United States Patent Application Publication US 2004/0123343 A1 - sequence listing, part 28

SEQ ID NO: 78378 - DNA, 543 bp, Oryza sativa
  Clone ID: PAT_MRT4530_78191C.1
atgacgacgcctccaagaagggaaacggcacccacgggcgtcgtcatcgtcgaactggccaaaggcacgacaaggctttcactagtgtcttcatatcacccacacaagcacccccacatcgacggccacagaaaaggtctggccaaagaaggtggaaaccaaaaggagggagaacactcggccggcaacgaggaagacaccgccgtggatgtcaagccccattcctgcttcatgccaacgcaagccaacgtcccgccaactccacatccgcacatcgcgagcaagaggctcgtcgccagcgagcaaccccactggaacctgcctaggcgacgcagtgcagccatcgagctcatcggagctcacccgagccatgcaacgccaccacacgcaaccgccccgctggctggctgccctggccagatcaagcgcggaggcgacggattcggccacgaacgctcagatccatccagggtggagcaagccggcttcgacgtccgcgcgccacagccgtccatcgtcgccgcaaccaccacgccgccgtag

SEQ ID NO: 78379 - DNA, 365 bp, Oryza sativa
  Clone ID: PAT_MRT4530_78192C.1
ggtggggtaatatctcttttttttttactcaacactttcatttagtttgttctttgagaagaaaaacgggcaaacaagtcacaccaacggggggggaaccccaatttaaccccaaattagaagggcacaccgaacccttagctaaaatacccgcgccaagcggaccggccagacccacccttgtcaagacacggacttgcaagattcataaggacggtctctggccacaaaaattaaggcccggagaaaaccatcacaccccttggggggggaccacctttaggacaaagtactttgcgaggaatcagggccaaaccttgggggtggccttcccgggaaggaaaaaccctaatggcccctaaaaa

SEQ ID NO: 78380 - DNA, 2109 bp, Oryza sativa
  Clone ID: PAT_MRT4530_78193C.1
ggcattgaaacaggggtaaactacccgctcacattatcagcatgcggaccaaaatgtttaccgtggctcattggcagtgcttctctctgttaggctattagcggatgatatatcaagcgaagggaaagttaaagagagttggaaattgaccttagctaaaaaaaacgcggttaacagaaagcaatggagtcgagggtctgaaatctgaagataccaaaaagactaaaggacgtccttgccttcgcactagaagtgttccaaagccaccaacctatgtacttctgttgagtgtgactaacgtaattcaactacttagaacttccaaaagcaccgtaatcagcagcactgcgtggtgcttcccagttcaacgccatgtaacttgataatcttagcagcctccagaagaatgccttgtgttgtagacagccactcatcctttgtcattttcgtgaggttgcatccaatggtgagctctccatatgaactttccaatcttgaaagataacaataaggagctggtgcttctgagtctaagacaacctttgggttggaccttaacataacttttatctcctctgatatggcaggaaccttttcaatatcctcaattctaataggaatctttgtcacattggatcgccatttagctcgtgatctgttcactaccacctggctggagaacagagagttgggtacagtgacaggaagttgttctggattcatcaattccgtagaagtcagtcctatttcaatcaccttgccttctattgacccagcctttatgtattctccagctttgaatggactagaaaactgtaaggagaacccactgagcatgttaccaaggacatcccgagcagcaaaggcagtagcaacacctcccacaccaccaacagttagtattgactgagcagctacaccacaagcctctgcaagagccattactccaagtgcaatcagtcctaatgacgagatcttatcaaatgctgacaacctggtttgatcaatacttgaggcagcaactttagtgatgaagtttgttttccacctatgaaggaaccagacaaaagagagaacaattgcacccctccatgcctgtggaagataagctgatatgcttggtgcggtgaatccagccatttctgaaaatgccataaatgtgataaggtatttcgcaggatcctccaatgcactccagaggctagtttcatacgagacatcattctttgttgagctccccaaaagtgctgatataggactctgtatcgaatacttgtgaatcctccttaaaacgataggcatgacaaaccaagccatcattgtaccaaagattgtcccgccaagtggaaccacaaccttttctaggtttggatttgcatcaaagaactgttgtacatgaggtgtaattgcatcagtcagctccttaactttcttgcctgcatcagtggtagcatctagagtacacttgcgagcattgtcgaagatatcaatccaagaactaccaccatcagatgttccaagcgcaacggtttctgtggaaggtacatttgagacagtattctgtggaacttctgccttaatcccagtgtctgaggagtatgaaaaatacgaaaagggccgagtgaagaatcctggcagtgcattaaatctgggatttgaagtagacaaccagtttgtgtccatatgagctgaaagaggcaccctactgatcattgacataccattaactggagaataccgttcaactgccttgatctggttaagtatggaagtgtttgagtgcttagtacagctgctgaaccaccttgaagaagcaccagaagatacacaaggtccaagacatatctccatgatattctgactaccagttactctagacgatcgacgaagagttgctgctatcatagacattgtgcagtcctgaaaacagagttctaaataacctggatgcagaggcaaaatagaagtcgattctcgggaggaggaggcggaggagacccggacggcggcgcgttcgcttcctccccaccgcgcttccgacacctaggccgggaagggggagggagagcgcccgcgcgccgggcctccccgcccggggttccctcgtgc

SEQ ID NO: 78381 - DNA, 224 bp, Oryza sativa
  Clone ID: PAT_MRT4530_78194C.1
gacggcccaacccacgtctcaccagacgacttcgtccggtggtgcggaccttacattgagcacgcctccgatatccatgaacacagggatgatcgggtggaggaccgctctacctggctggaccagggcaggaccagatcatctaggctcggcgctctagcacagtaccggacgaaggtacagcggattcgaacaaggcggcctacgtgttcttgggacggacg

SEQ ID NO: 78382 - DNA, 404 bp, Oryza sativa
  Clone ID: PAT_MRT4530_78195C.1
gggggagccaattttttttaggtttttttttaattaaaactaaaactaatccccttgttaatcttggaaaaataggcaaatttttgggacaatttaccccaagcgaagggggcaagtattccaagtaaacatcaaataaggcaaattttgtttactccttgggggaatgggggggaaccttttttttcgccgccgcggtggccgccgcttttctttttccctgaaccttgggggccttggcctttttaagctccttgaccaatttgggaaggaaggggtcggctttttccccgggggccttgggcgtgaggtttttgggaaactcggggggggttattttaacctcccccaggaacccccccccggggttaaacaaggggggggggtctattcccagggaaacc

SEQ ID NO: 78383 - DNA, 401 bp, Oryza sativa
  Clone ID: PAT_MRT4530_78196C.1
cccgggtcgaccagcgtccgccactctcgtttagggtttccctccgccggcgccgcctcccgcatccacgcgcctactcctcctccgccgccgccgccgccaccgcagcataagccatggacgaagtggagctaccgcagcaagaggtcaagctgtttaaccgacggtccttgccagacgtacatgcaaaagagggcggggggggcgactacctaggtgctaaaccggcagatcaccggacgggagaggttccagccgatgttacggcgtccgggcgcgctcggcctgcggatgcagtgctgccagcagctgcaggacgtgtagccgtgagtgccgttgcgccgacatacattggtaggtgaggagatatgaggagagcatgccgattcccttggagcaag

SEQ ID NO: 78384 - DNA, 335 bp, Oryza sativa
  Clone ID: PAT_MRT4530_78197C.1
tagcactgggtgggaaaaggaaaacctacctggggcgccccaatgaccgcaagcccgcctgctgccccagcgcgtttggccgattgcattaatgccacgctgggcacagacaaggtttgcccacagactgggaaaccaggcagtggaggcagcataccgcaattgaaatggtgggagttgagctgcatctgcatttgaggcaacacacacaggcttttaacaccttttatgcttgccaggcatcagtattttgtgtgggaattgtggaccaggataacaaatgttgcacacaaggaaacaaggcttatggaccatggattaccccaagctgtaat

SEQ ID NO: 78385 - DNA, 434 bp, Oryza sativa
  unsure (1)..(434): unsure at all n locations
  Clone ID: PAT_MRT4530_78198C.1
ggacggggtgagccggcactcggtccaggtgtacccgaggtcgtggacggcgatcatgctgacgttcgacaacgccgggatgtggaacgtgaggtccaacatctgggagaggcactacctnggcgagcagctctacatcagcgtcgtctcgccggcgaggtcgctccgggacgagtacaacatnccggagaacgccctccgctgcggcaaggtcgtcggcctgccgctgccgccgtcctacctcccggcctaattcatcgatcgatgcatatataagaacaaaagaggagtggaaactgaaacgtacgtcctatgaagaagctgagcgccgtcgtcgtcagctggatgtaatttcgatatgccctctaaaaaccattgtaatggtggagttatattatacatatgatttcatcgctcaaaaaaaaaaaaaaaaa

SEQ ID NO: 78386 - DNA, 2622 bp, Oryza sativa
  Clone ID: PAT_MRT4530_78199C.1
ccggttgacgacctctccggtctcccccctcaccccaccgcaacccgggacgtcttccatggccgccgccgccgccgcccccgcctactaaaccaccctacccaccccctccaaactcccacacattacatccttcaaagagagcatcacacacacacacacaccagcctagcgatcacatttccacgatgacgacgacggcgctggccggcgtggcgcgcggcgaggacccgtacgtgttcttcgagtggaaggtgacgtacggcaccaagaccctcctggacgcgccgcagaaggtgatcctgatcaacggcgagttcccgggcccgcggatcaactgctcgtccaacaacaacatcgtggtgaacgtgttcaaccagctggacgagccgctgctcttcacctggaacgggatgcagcaccgcaagaactcgtggcaggacggcctcgccgggacgcagtgccccatcgcgccgggcaccaactacacgtacaagtggcagcccaaggaccagatcggcagcttcttctacttcccgtcgctggggatgcaccgcgccgccggcggctacggcgggatcagcgtcgtcagccgcctgctcatcccggtcccgttcgacccgccggccgacgaccacatggtgctcatcggcgactggtacaccaaggaccacgccgccatggccaagatgctcgacgccggcaagagcttcggccgcccgcacggggtggtcatcaacggcaagtccggcaaggccgccgccgacccgcccatgttcaccgtcgaggccggcaagacgtaccggctccgcgtctgcaacgtcggcatcaaggcgtcgctcaacttccgcatccagggccacgacatgaagctggtggagatggagggctcccacacggtgcaggacatgtacgactccctcgacgtccacgtcggccactgcctctccgtcctcgtcgacgccgaccagaagcccggcgactactacgcggtggcgtccacgcggttcatccacgaggccaagtcggtgtcagccgtcatccgctacgccggctcgagcacgccgccgtcgccggccgtgccggagccgccggcgggatgggcgtggtcgatcaaccagtggaggtcgttccggtggaacctgacggcgagcgccgcccgccccaacccgcaggggtcctaccactacggccagatcaacatcacgcgcaccatcaggctcatggtctcccggggccacatcgacggcaagctcaagtacggcttcaatggcgtctcccacgtcgacgccgagacgccgctcaagctcgccgagtacttcaacgtcaccgacggcgtcttcaggtacaaccagatgaccgacgtgccgcccgccgtcaatggccccctccacgtcgtccccaacgtcatcaccgccgagttccgcaccttcatcgagatcatcttcgagaaccccgagaagagcatggactccgtccacctcgacggctacgccttcttcgccgtcgggatggggccggggaagtggtcggcggaggagaggaagacgtacaacctgctggacggggtgagccggcactcggtccaggtgtacccgaggtcgtggacggcgatcatgctgacgttcgacaacgccgggatgtggaacgtgaggtccaacatctgggagaggcactacctcggcgagcagctctacatcagcgtcgtctcgccggcgaggtcgctccgggacgagtacaacatgccggagaacgccctccgctgcggcaaggtcgtcggcctgccgctgccgccgtcctacctcccggcctaattcatcgatcgatgcatatatgtactgaacccgatgacattcttctcttgttcttgacattttttgtgatcttttgcttaatctggcgaaataatcaacttaatttgggctcgtgcttattgcatgtccccgcgaaaagaagaacaaaagaggagtggaaactgaaacgtacgtcctaggaagaagctgagcgccgtcgtcgtcagctggatgtaatttcgatatgccctctaaaaaccattgtaatggtggagttatattaaaaaaaaaaaaaaaaaaaaaaaaaaaaaaaaaaaaaaaaaaaaaaaaaaaaaaaaaaaaaaaaaaaaaaaaaaaaaaaaaaaaaaaaaaaaaaaaaaaaaagggggggccgttttaaagaatcaaagttaacgtacccgtgcatgcaacgtaaaagtttttttatagggcaaccaaaattaaattaactggccgtggtttaaaaacgtcggaactggaaaaaccctggggtaaccaaattaaatcgctttgaaaaaaatccccttttcgcaagttggggaaaaagcaaaaaggcccgaaccaatcgcctttccaaaaatttgccaaccctaaatggcaaatggaaccccccctgtagcggccaattaagcgcggggggtgtgggggttaccccaagggtaaccgttacatttgcaagggccttagcgcccgctcttttggtttttttcctttcctttttcgcaacgttcgccggttttccccgtaaagttttaaatggggggctcccttaagggttccaattaagggctttacggaacctcgaccc

SEQ ID NO: 78387 - DNA, 2349 bp, Oryza sativa
  Clone ID: PAT_MRT4530_7819C.1
atgagttacttccaagctggggggccttgcctatggacccctttcgccacacccccgcccttcgccacagtaccgacgacaagggctgggggcgaaaaggagttaaatccaagctgtggggccgcgaagccagcccagcctctggatccctttcgccacacccacgcccttagccacagtacccgcaagacccctttcgacactaccacgaccactgcaaaagtacccgcaaggtacggcgacaagggctgggggaaaaaaggatttaagtccaagctgggggccgtgaagccagcccagcctctagacccctttcaccacacccacacccttcacgatagtacccgcaagcaccctcccgcgctctcccgtggcctcaccacctctccccgcctcctccttctctttcctcggtgccggccaccctccagccacccctaccgcctcgcccacgcgccgtccggccgtgccgccgccttccccggcgtcgcagcagcctcctctccactggcctgccctccgtttcgcacggagacccctggaggtgcgcccccgccggcaacagtggcgttgccaccactgttccacccccggccgcctctgccgcgtctcccgtgcgccggccgacgtcgccaccacctctcccggcaccgaaacgccgtcctcttccccagccaggccacgatgtcgcccgtatttcgccggaacaccgccgtgccgcgccggcctctccatccacctcgccggaatttccccggtcgaccgcgtcgccgtcttctccgtcgcagcggcaaggttgtcctcggcatcgccttccctccatccgaaccccgccgtggcgtgatccacgccgtcctcgtctccgtgcagccgctgccggctgccctcgtcgcctcctcgccggccccggtcgtcgtcgtcgtcgtcctcccgtcgttcccggtcatcgtggcgttcatccctccgtcaagccgttctcgtccgtcgtccgcgtccgtcaagtgtgccgctgcagccccgtcgtcgtcttcgtcctcgcctccgcgtcgccaagcattgcgccggccgcatctcgccttcgtccaaggatcgccgccgaagtcgtcccctcgcctttcgtctccgtcattcccggccgtctccgccgcgcccgttcgtcgttgtcgttccctcgcctcgtcgcgtggtgccgtgttcaagagatcacatgttcccacgggaatgatcacactgagaaaacgagagttccgctacctgaagcaagaagatttgaccgtcacagagtacctgcacgagttccatcgtttggctcactatgcaccagaagatgtggaaactgatgaagacaaacaagagaagtttctccaggggttaaaagatgagatcgcagtgcaactactcctagaggaatatgaagattttgagaaacttgcggacagagccatacaactcgaaagtgagcataatcggatgaagaactgcaagagaaggattgtcagcatcccagtatttccatgtggtaaccaaagacagcgcactgagccacttcagatcaccggatcttctgttgcgcatcaagaattcctgccccaagaagatggacacaatgcagacaacaacattagcaatactaatgatgaggataccaccaacaaccgtgcttcttgccccattagtgaccactcgaatcaagcgtgcaatgtcaacatcattcaccaaggtgtcgacgatagtatcaatgatggcacccagaatgacaaccctagcaattgtgactctgagaaagactccaatggtgattgcaactatggtaccaccgatgccaatgcttgggggattcgaagccgccctagcctctggactccttacgccactcccacgcccttcgccaaagtacccgcaaggtacggcgacaagggctggaggagaaaaggagttaagtccaagctgggggccgcgaagccaacccagcttctggacccctttcgccacacccacttccttcgccacaatacccgcaaggcttgggggattcgaagccgccctagcctctggactccttacgccactcccacgcccttcgccaaagtacccgcaaggtacggcgacaagggctggaggagaaaaggagttaagtccaagctgggggccgcgaagccaacccagcttctggacccctttcgccacacccacttccttcgccacaatacccgcaaggcttgggggattcgaagccgccctagcctctggactcctttcgccactcccacgcccttcgccaaagtacccgcaaggtacggcgacaagggctggaggagaaaaggagttaagtccaagccggggccgtga

SEQ ID NO: 78388 - DNA, 351 bp, Oryza sativa
  unsure (1)..(351): unsure at all n locations
  Clone ID: PAT_MRT4530_781C.1
ggccgcccctttttttttttttttttggattaaatcaggcttttttatacatacagtcatacggagggacagagtatatatactgtgtacatgattcttaaaaggttaatctgggtggtggaataggtgaagacgagaggaagccgagcaccacggggcacgcgggccagaaggtacctccaaccacgggggggggggggaacttaacnacaggcaaacttggtcggaggggacgagggtgctgggggacgcccaggagctgagggaagagggagcccggaggggcggccggggaggccccgggggaggcccttggcggggaggaaggacgggaggaagaggcagaggggg

SEQ ID NO: 78389 - DNA, 339 bp, Oryza sativa
  Clone ID: PAT_MRT4530_78200C.1
atgaggcgggagcgggtggtcgacgacgtcccacatcagcagcaccgcgccctcaccgacgacgtggacactagcagcatgtccgggagggagcgcgagagctcgcggagcggttggcgaatgctaatggacgaggccaaagagtcaaagaggccatcgatgcccataaggcggaggcgccctgtggtcctggaggcgccgttgacacaacaacaggggcggggtgcggcgaagcaggtcgagcggctcagcatcggtgacatccagcgcctcgagtggaaagcactagaggccaagatccagtgcgagatacacgtggccccgtggtgtcttcactag

SEQ ID NO: 78390 - DNA, 294 bp, Oryza sativa
  Clone ID: PAT_MRT4530_78201C.1
atgacgctgttgacgacgatgttggaggtgggagaggaggccgaagcagaagccgccgctggagatgaactcctcctcgagacacttcaaccgacagtggtcgtagcacctcgcgatcttggcaagaaccggcacactctcggctttcgtgtcgcctctggagtattcgtccttgaagtttcttggcccgtagatgcggggaaggtggcggcggccgcctgggacgctccggccactctgtttcgtattctgaggaacaggatcgcattgggtataaactctgttccagagtca

SEQ ID NO: 78391 - DNA, 331 bp, Oryza sativa
  unsure (1)..(331): unsure at all n locations
  Clone ID: PAT_MRT4530_78202C.1
tctcacgcnnngtccggctgtagacttgttatggctgcgcgccacccggcaacgcgccgccgacgcgccttgcgctgaggcacgtgcatatgcaccgtcgggctgactactagggctgctgctgcccgccacgaacgccaccgtcggcgtggtctactactgcgttacgattgccatctagcaagcagagcaaggatgggaggggcgccgtggctctactgcatccctggagagcatacacatcatacatctctctatgtcccacccattgtttggctggaattttattgcgttaaccatagcttctattagagatctggatgatgctctt

SEQ ID NO: 78392 - DNA, 411 bp, Oryza sativa
  Clone ID: PAT_MRT4530_78203C.1
atgggatggacggccacgatcggccgagtgccgagcgggcagctggggacgggcggcgccaaggccggcccaggcatggctcacggcggcggccggtgcccggcgaccggccagcggcagtggccggcgacgggggcgacagcgcagatggcggtgcagcgcgacgacgcggggttaggagtagggaaggcgaccacggcgcacgccattgacggccggaggcggaggggatggggaagctcaccggctttcggggagaagggggctccggcagcgattgacgacaaccaggcggcgaccgaggtgcgggcgggcttggtgagcgcgacggcggcgattgcgcagcgcggcggtggctctagcggcggcggtgcgcggccggagatgggcggcggcggtggagctcggtga

SEQ ID NO: 78393 - DNA, 459 bp, Oryza sativa
  Clone ID: PAT_MRT4530_78204C.1
atggccgttaccgtcggtcgggtcctgctcctgcttccttcaatgcctgcaaccgccggtgtcggggtccccaacgccgccaacatgtcgccgccctacggttgcttccttcttgtcaggatgtgctatttttgttgccccgcctcaatgttcttcaccgcaaagacacctcagccatcactcacagaccagcgcaccttcaccgacccgatgtgtgcacgtgtactgggcgagggcccgcaggcccgtaccctgggcgtggagctcgtccatctccttcctcccggtgttgtagcattggcgtcggcaacgccgcggacaacgataagccccaccacggcaaatgagaagcaacaagacacgacgttgcactccaccacctccctccagacaccttgcagatctcactccaccctgctcgtgaagcacgttctttttatcaaggtggagtacacgtaa

SEQ ID NO: 78394 - DNA, 2091 bp, Oryza sativa
  Clone ID: PAT_MRT4530_78205C.1
atgcctccacgctgtaggcgcctccccctcctcttcatcctcctccttgccgtccgcccactctccgccgccgccgcgtcgagcatcgctgcggcccccgcctcctcctaccgccgcatctcgtgggcgagcaacctcacgctcctcggctcagcctcgctcctcccgggcgcggccggcgtcgcgctcaccaccccttcccgcgacggcgtcggcgccggccgcgctctcttctcggagcccgtgcgcctcctcctgccccaggacgcggccgcctccgcctccgcctcgcgtgccgctaccccggcctccttctccacccgcttcaccttccgcatcacgccctcccccacctacggcgacggcctcgcgttcctcctcacctcctcccgcactttcctcggcgcttccaacgggttccttggcctgttcccctcctcatccgcctccgacgagggggagctccgcgacgtctccaccgtcgccgtcgagatcgacacccacctcgacgtggcgctgcatgacccggacggcaaccacgtcgcgctcgacgcggggtccatcttctccgtcgcgtccgcgcaaccaggcgtcgacctcaaggccggcgtgcccatcaccgcctgggttgagtaccgcgcgccgcgccgccgcctcaacgtatggctgtcctactcgccgtcccgccgccccgagaagcccgccctctcggccgatgtcgacctctccggcctcctgcgcacctacatgtacgcggggttttcggcctccaatggcaacggcgctgcgcttcacgtcgtcgagcgctggaccttccgcaccttcggcttccccaactcttcatacgccccgccgccgaccaagtacataggcccaatgccacccaataaccagcctctccctccccctccctctccctctccctctcccccttccccctttcccctcccccctccccctcaccctaaccaccgccgccgccatctgttctacaaggtgcttggcggagtcctcggtggtatggtattgctgggccttgtcgtcgttggttctgctgtcttgcttggccggtcagtgcgccgcaaaaatcaagaacatgcagtggcaagcgaggacatgggggaagcgacactctctatggaggtggcacgggcagcaacaaagggctttgacagtggcaatgtgatcggcgttggtggctctggtgctactgtgtatgagggggtgctcccctctgggtcgagggttgctgtcaaacggtttcaggctattggatcgtgcaccaaggcatttgacagtgagctcaaggccatgcttaattgccctcatcacccaaatctcgtgccgcttgctgggtggtgcagaagtaaggatgagcttgtgcttgtttatgagttcatgcccaacgggaatctagactctgcattgcacacactgggtggggcaacacttccctgggaggcacggttcagggctgtatatggtgttgcatcagcgctagcatatctgcatgatgagtgtgagaaccggattatacatcgtgatgtcaagtcatcaaatgttatgcttgatgcagagttcaatgctcggctaggtgattttggccttgctcgcactgtgagccatggtgggttgccacttacaacacagccagcaggcacactggggtaccttgcaccagaatatgttcatacaggggtggctacagagcggtctgatgtgtacagctttggggtgcttgctctggaagtggccactggacgaaggcctgctgagaggggaatctctgttgttaattgggtgtggactctatggggtcgtcgaaggctggttgatgcagcagaccggcggctccagggacgatttgttgcagatgagatgcgacgggtgctgcttgtgggtctgtgttgtgtacatccagactgccggaagcggcctggtatgcgaagggtagtcagtatgcttgatggtactgcaccgttgatattggtaccagataagatgccaccagttcttctacagccagtaccaaatgcttcatcaatgaactctgcagatactgccaatactgcattcttcagttgtcgctga

SEQ ID NO: 78395 - DNA, 160 bp, Oryza sativa
  Clone ID: PAT_MRT4530_78206C.1
tgttcaagaccgcggagccaactttagccacctgttccttgttagttttgtaggtggagcccacgctcgatctaacacatcgtcagggaagggagagggaggagagagaccagggcatccctaagctccacgccgtcaagctagtcggccgggccgccag

SEQ ID NO: 78396 - DNA, 128 bp, Oryza sativa
  Clone ID: PAT_MRT4530_78207C.1
cggcacgaggctaatctgtatttcgattagatgcgctgttgatttacttggactctattctttcaatgcatgcttatatgttagttgaattttgatttttacacttcctttccaaacaacacaaaagt

SEQ ID NO: 78397 - DNA, 348 bp, Oryza sativa
  Clone ID: PAT_MRT4530_78208C.1
atgaggcagctggggacggtgccgccgaaggagcggacgccggaggcgatgcgtcggctggacagacgcgcgttccgtggcgggttccgcggcgtgttccggaagcaggcgaagcggcagcggagcatcgacggcctgcccatccgcctgctcgtcgtcgagccctctcccggcgctcccatcggcgcacgcgtccaccccggccgctctcctccgcatcctctgccggtgtcgcgccgaggaggtgcgcggcgccgtggaggcggcatggctggcgatagcgactcccgctgcgccggcaactgcgcccgctccgccgtcggccgccatcttcccgcctgcgcgtaa

SEQ ID NO: 78398 - DNA, 283 bp, Oryza sativa
  Clone ID: PAT_MRT4530_78209C.1
caaggttcggcggcgcttcctctgggctggaacaggggacatcacaggcggcaagtgcaaggtcaattgggcaaagacgttccgcaatgttcacctgaacgatgagcagcccaaccagatcgactggaagttcactagtcatgggcaatactctgcatcctcagcttatcaagctcaatgtattggagcccccagcacaaccttcgactcgctgatttggaagggcactgggagcctacgcagtcggtccaggaatggtgggagaaactggccaatacggtag

SEQ ID NO: 78399 - DNA, 447 bp, Oryza sativa
  Clone ID: PAT_MRT4530_7820C.1
atgccgtcctcgtcgccgtgcagccactgccggctgcccacgtcgcctcctcgccggccccggtcctcgtcatcgtcgtcctcccgtcgttcccggtcgtcgtggcgttcgtccctccgtcaagccgttctcgttcgtcgtcctcgctacgtcaagtgccgcagccccgtcatcgtcttcgtcctcgcctctgcgtcgccaagcgttgcgccggccgcgtctcgccttcgtccaaggatcgccgccgaagtcgtcccctcgcctttcgtctccatcgttcccggccgtctccgccgcgcccgttcatcgttgttgttccctcgcctcgtcacgtggtgtcgttcgcttgtgcgtgtggtgaccgtgttagtgtgcccgctcgggtccgcttccgtcgacccgtggaccgtctctgtgtacccggtcagccgtggtcccttaggttga

SEQ ID NO: 78400 - DNA, 397 bp, Oryza sativa
  Clone ID: PAT_MRT4530_78210C.1
ctgttacgaactgtccagactccaccacgcgggcgaggaagcacagttgtactcaagcacgacgaaggcggcgtcgctgcccgctgaccggtgggggagccgatgacgtggtcatcgaagcaaccactggcggagaggactacgagctcggcgccgggagcggcaacaccgacagaaagtgcggtcgacgccggttaggccttgagctcgccggtggacacactgcctcaacaaggaacatccgttatgagagaggacccgagctcggtggcggcgggggcgctaacgccacacggagataccggtagcgccggttagggcccagagctcggcggtgagggcacttggagggagcgtgtcgaagcttgtggcccgcttgatggatatggctgagagc

SEQ ID NO: 78401 - DNA, 828 bp, Oryza sativa
  Clone ID: PAT_MRT4530_78211C.1
cgctcctatccctccctcccccgcgtccagctcagagatgagctctcccacctgtacgcgcgaatctagaaccttctagatcctctccccttcccgatccgcccgcctcgcctcgtctcccgccccaccccgatccgatcccccgaaggtctcggggttgggggggggggcgaatcctgatggcggcgcacggcggtggcggcgtggaggaggatcaggcggggtcgagctcgctgtgcccacctgctgcggaggcagaggcggcggctgcggaggcagaggcggcggctgcggcggcggcgatagcgagggcggcgcggccttcgaggccgggcagggacaagaggctcggtgcgcacccgctgaagcaccggaggttccgcgcggggggcaaggcggcgggggcggccggcgctagggaggtcggggaggcgaccaccgtggcggaggcgacagcgacggggcctccgaaggggagcgacgaggatgacgaggctaggtacatttgcggcggatggacgagtgatgatggaagaatgagttgtggatactcaagctttagagggagaagagcaaacatggaagacttctatgacataaaatcatcaaaagttgatgataaccaaataaacctctttggaatatttgatggtcatggtggttcacatgctgctgagcatttaaagaagcacttatttgaaaatcttctgaaacatccgtcattcatcactgatacaaaatcagcaataagtgagacctacagaaaaactgactctgatttcttggatgctgagactaatattaatagagaggatggggcaactgcat

SEQ ID NO: 78402 - DNA, 1540 bp, Oryza sativa
  unsure (1)..(1540): unsure at all n locations
  Clone ID: PAT_MRT4530_78212C.1
gggacaagaggctcaatgtgccgcacccgctgaagcaccggaggttccgcgcggggggcaaggcggnggtggcggccggcgctagggaggtcggggaggcgaccaccgtggcggaggcgacggcgacggggcctccgaaggggagcnntttnggatgacgaggctaggtacatttgcggatggcggcgcacggcggtggcggcgtggaggaggatcaggcggggtcgagctcgctgtgcccacctgctgcggaggcagaggcggcggctgcggcggcggcgatagcgagggcggcgcggcctccgaggccgggcagggacaagaggctcggcgtgcggcacccgctgaagcaccggaggttccgcgcggggggcaaggcggcggtggcggccggcgctagggaggtcggggaggcgaccaccgtggcggaggcgacggcgacggggcctccgaaggggagcgacgaggatgacgaggctaggtacatttgcggcggatggacgaggagtagcaacttacaattaggtctgatgcttttccgtttgttgattggaactgacctatcatttgcacggcttccttcgattgttgataatatatgcagttgcatccaggcatgttgtgatgatggaagaatgagttgtggatactcaagctttagagggagaagagcaaacatggaagacttctatgacataaaatcatcaaaagttgatgataaccaaataaacctctttggaatatttgatggtcatggtggttcacatgctgctgagcatttaaagaagcacttatttgaaaatcttctgaaacatccgtcattcatcactgatacaaaatcagcaataagtgagacctacagaaaaactgactctgatttcttggatgctgagactaatattaatagagaggatgggtcaactgcatcaacagcaattttcgttggtaaccatatctatgtggcaaatgttggtgactcacgaactgtgatgtcaaaggctggcaaagctattgcactctctagtgatcacaaaccaaatagaaaagatgagcggaaacggattgagaatgctggaggggttgtgacatggtctgggacatggagggttggtggtgtactagcaatgtctcgggcttttggtaatcgtttcttgaagcgattcgttgttgctgagcctgaggtccaggaacaagaaatagatgatgatttggagtttctgattttggctagtgatgggctgtgggatgtggtgtccaatgagcatgccgttgcatttgtaaaggcggaggagggccctgaggccgcagcccggaagctggcagagattgcttttgcccgtggaagcaccgacaatataacatgcatcgttgtaaaatttctccatgctaagatggccgtagatgctgcctcgtctagtgagcgaagttgatttcttctgttctatttctcttgttcattttatcatcttaatctggagtgctggcatcaatcacggtgcaaccttaactattgggcgtttatatatttgtttgttcattg

SEQ ID NO: 78403 - DNA, 678 bp, Oryza sativa
  Clone ID: PAT_MRT4530_78213C.1
atgagcggcggcggcggcggccggaaggcggccgtcaccggcggcgaagaggcggaggtggaagcgctcctccgcgcggcgcaggacgcggtgatgctcaagctgcaggcgaactcccacctcgtctcctcgtcgtcctcggccaccgctccgaatcttcctccctcgctcgaccaccccgccgccgccgccgccgcagatcccctcgacgccgacctcgcccgccgcttcgacgcgctcaggtctcaccgcccgccggatccgaagccgaagcaacccgatgctccctccgccgcagccgccggcgggatggacgagctggaggcgcgtttcgcagcgctgaagggggcggcggggccggagaaggagacgagggtgaggctggaggatctgggcggggagtcggacgaggacgaggacgacgaggtggacaaggtgatgcggtgggcgatggacgccgcgcggctcgacgtcgccacggccggcgccggcaaggcgaaatccaccaagaaggatgacgacgaggaggaggaagagaaggatcagacgagcagcagcgtcagtagcgaggacgaggaggaggaagaagaagaaaaacttgagaaggagagggagaggaagaggaaggagatgatgagcaagaacaagtctaaaaccaagtggttctccctcttttga

SEQ ID NO: 78404 - DNA, 204 bp, Oryza sativa
  Clone ID: PAT_MRT4530_78214C.1
atggaacagaacattttcagcagggactctcagggcgtcctgatcctatttaattatgaaatgatgcaagatgcaaggaagaatgtagttggctcggcggcaggcaccagcgctggcaagagaggctgggaagcagcggcgccggcgccggtgaagaagatccgcctctgggaggaggagaaagaggtggccatgggaggttag

SEQ ID NO: 78405 - DNA, 483 bp, Oryza sativa
  Clone ID: PAT_MRT4530_78215C.1
atgacatcattggcttcatctcaggcagcgggcggcagcgctggcggcgacctcgattacggagtgggtgggctcatcctcgactcggccgtgcgccaacaccatgtacaccggtggctgcggctgcttgtcggaggtggcggtcaacaagcgcagcgaatctggcaacgactctcgccgggaagggtggatccgccatcggcgggctcagaaggacggatccgccctcacttgcagcgggtgcaagccgtgacctcaggagtggccaacgacctctttcctctagtgctggtgaactcagcagcaacggatctagcggtggggagctcggcagcagcagatctggcgctagggagctcggcgacggtgaatctgacgggttctccccctttgtgcgcacatggatctggcggcaaggagggtgttggcaatagcgagggcgtccacgcttacctcctcaaggccgtgaagtacaacaactga

SEQ ID NO: 78406 - DNA, 106 bp, Oryza sativa
  Clone ID: PAT_MRT4530_78216C.1
cccattatcaacacacagctcagacaccaagaacgggagggtacttcaccaccatatgggtctctttcgctcccgctaggcagaaacgtctaggacaccaagggca

SEQ ID NO: 78407 - DNA, 367 bp, Oryza sativa
  unsure (1)..(367): unsure at all n locations
  Clone ID: PAT_MRT4530_78217C.1
nnccngtcgattcggcccgagagttgttgtaaagttgcgagagagagagagagagagatcagttagtttgttgagtggaagcagatcaggaagatgctggagaagctgtgggacgactggtggccggtcctcgaccggagaccggcctcgagangctccgcgnggccgctacaacccgcccccttgtcatcnacaaanatggcgacggcgaagcgaacggaatggcgttcaancggacgcactcnatgccgacgaccccnacgaccccggtgacgccgtcgtcttcctcccgangacggngaccaccacnacccccgggctcngtgtgtggnggacctgttccccccggggagccacctcccccccc

SEQ ID NO: 78408 - DNA, 1265 bp, Oryza sativa
  Clone ID: PAT_MRT4530_78218C.1
cccccgggctgcaggaatcggcacgagggaattgtctagctccgcggggctcatatatacgggttctgggaggaaaggccatcgggaataaggcagctggagatcgaaggcttgagcgtggtaatctagctttgaagaattctattgaaactaagactccggtccgagtgattcatggattcaaaggtcatagtaaaggtgaagctagccattctaaatccaagcaaatctcaacatatatttatgatgggctgtgcatggtggtggattattggaaagaaggcccagagggctcgatggtctacaagtacaagttgcaaaggatcccaggtcaacccgagttagcattacacataatcaaggcaacgaggaagtccaaagttcgcgaaggtgtttgtgtgcctgatatatctcaaggaagggagaggattcccatacctgcgatcaacacaattgacgatacgcagccaacagcatttaagtacactacggaagtcatatatccacattcctatgcaaaagaacctctgaaaggctgtgattgcacgaatggttgctcagactctaatagatgtgcctgtgcagtgaagaatggaggtgaaatccctttcaattccaatggtgctattgttgaggcaaaacctctcgtatatgagtgtggcccatcatgcaggtgccctccaacatgccacaacagggtgagtcagcatggtatcaaaattccgctggaaatattcaagacggggaacaaaggttggggtgtaagatctctgagctctatctcttcaggcagtttcgtatgtgagtatgcaggtgaggtgctgcaagaaaatggagatgaacatgtagagactgatgagtacctttttgatattggtcatcactatcatgatgaagtttgggaggatcctaaatttgaaggcattttgggtctagaatcttctacgtccaagacaacggaggatactgaaggcagtaaaacaacggaggatactgaaggcagtactatcgatgcatcaaagtgcagcaatgttggaagattcatcaaccacagctgctcgcctaatctgtatgctcaaaatgttctctgggatcatgatgacatgaagaaaccgcacatcatgttctttgccaccgagaacataccgccgctgcaagagcttacttacgattacaattacggtaaagtcgaggataagaatggcaaggagaaggttaaaccttgcttctgtggttcgcctgattgctctcgcaggctgtactga

SEQ ID NO: 78409 - DNA, 2088 bp, Oryza sativa
  Clone ID: PAT_MRT4530_78219C.1
atgagtacggccattatcatcgtctccaccaccacctcctcctccttcttcttcttcctcctcctcatgatcactaccggcggcggctgcaaaccgcgggagagagacgctctgctggcgttcaaggaaggcatcgtcaaggatcctgcaggcctcctctcctcctggcaaagaggaggccactatgatgatgatgatgatcagctgctggaagaggattgttgccaatggagaggcgtccggtgcagcaacctcaccggccatgtcgtcaagctcaacctccgaaacgattacgccgacgttggaacaggtctggttggcgagataggccattctctgatctcgctggagcatctcaggtaccttgatctcagcatgaacaacctggcaggtccaactggacatgtccctgagttcttgggctctttcagaagcttgagatatctgaatctatctggtatagtgttctccggcatggtgccacctcagctcggtaagctttcaaatctgaaatttctcgacttctccgggatgttgccctccagcatggctccatttctgtacattagtgatgcttcatggttagcacacttgtccaatttgcaatatctgaaccttaacggggtaaaccttagcacagtactcgattggcctcatgttctgaatatgatcccttctctgaagttccttagcctttcttcttgctcacttcagagtgcaaatcagtatcccacacagattaacctcaggcaacttgagatacttgatctttccaacaattatgaacttagtgaccaagctgaatctagttggatttggagcttgacatccctcaagtatctcaatcttagttcgactagtttgtatggtgagatcccacaagcactaggaaacatgctgtccctccaagttcttgatttctcgtacaacatgagtgtttcgaagaaaggtaacatgtgcatcatgaaggcaaacttgaagaatctgtgcaatttggaagttcttgaccttgattatagactggcatatggagagatttcagaaatatttgagagtttaccacagtgttcacccaacaaactgaaggaacttcatttggctaataacaatttgactgggaatttaccaaaattggtagggaggctaacaagcttagtcactcttgacctctttaataataacatcactggacaagtgccttctgagataggtatgctcacaaatttgacaaacttgtacctccattacaattgcctggatggtgtcatcacagaggagcactttgccaatctaacgagcttgaagtcgatatatttgtgttataattacttggagattgtagtggatcctgaatggttacctcccttcagattagagaaggcatactttgcatctacttcgatgggtccctcatttccctcatggcttcaatcacaagtcgatattcttgaacttgctatgagcgatgctggaataaatgatacatttccagactggttctctacaacattttcgaaggccacgtttttggagatgtcgcagaatcaaattgctggaggcttgccaacaaatatggaaaacatgtcattggaaaaattatatttggactgcaaccacatagctgatcgaattcctcggatgccgagaaaccttatgctactagatatatcatataaccttatcagtggtgatgttccacagtctatttgtgaattgcagaaattaaatggccttgacttgtccaataatctactcgagggcgagttccctcaatgttctctaatgagcaggggttggacaaagttaagtttccttgatctgtcatggaataaattctctgggactttgcctacatggattggaaactttaacaagctagaatttctgcagcttaagcacaatatgttctctggaagtattcctgacagcatcaccaaccttggaaagctttctcatttggatctagccagcaatggtttatcaggtcccctgcctcagcatttgtcaaatttaacaggaatgatgataaaccatgataccacaaatatgaagagagactatctggatgtgactacaaatcttttgtga

SEQ ID NO: 78410 - DNA, 1863 bp, Oryza sativa
  Clone ID: PAT_MRT4530_7821C.1
atgttggcaacagcatttcaactattacagaattggaacaacccagcaggggcaaccaacgttcaagggttaaaagatgagcttgcagtgcaactactaatagaggattatgaagattttgagaaacttgtggacaaagccatacaactcgaaagtgagcataatcggatgaagaactgcaagagaaggattgtcaacatcccagtatttccatgtggtaaccaaacacagcgcaccgagccacttcagatcaccggatcctccgttgcgcatcaagagttcctaccccaagaagatggacacaatgcagacaacaacattagcaatactaatgctgatgacaccaccaacaaccatggttcttgccccattagtgaccactcggatcaagcgtgcaatgtcaacagcattcaccaagatatcgacgatagtatcaatgaaggcacccagaatgacaaccctagcaattttgactctgagaaagacaccaatggtgatagcaactatggtaccactgatgccaatgttagcaaggatttccaaccaccaattccaactccaagtcagaatgatcgttctcagacgaacagctcagtaaagaagacattgatttgttacaactgcaaagaaccaggtcatttctccagagattgtccacagccgaagcgtaacctgcgtcatcactccggccattatgcaagaagaagacaagtcactcgccttgtggtcactggagcaaacgccatacctgtttctctgaaaggcaacaggctcaagtaccacatcgtcaccagaagcatccacaactctcggagtgaagagtacttagttgacaaaggtgtcgacacaagacatgaagttgataacttgtgtgaggttgacgccgaagatatgaatcatgagaagttctggaacggaagcatcattaaactaccgcaacctagtctgagtcagctaaaaggtgcaccctggttcgagtcaggtgaagagaagattccatctgcaataggagaccaagccaagcagttccaagtggggaagtttgctggacaagccgcctccgggcccaagccgagcggcgccctcccgcccgtgccgcgcacccgcccctaccgccgcgtcagcacgccggccggccgtgccgtcgccttccccttcgtcgcagtggcgttgccgccactgtaccacctccagccgcctgtgccgctttgccggagcatcggctttcgtcgtcgctgcctctcccggcaccggaacgtcgtcctcttccccggccatgccacggcgtcgctcatatttagccggaacaccgccgtgccgcaccggcctctccatccgcctcgccggaatttccccggtcggtccttcctccacccgtgcgccgtcggccgcaccaccaccacctccagcatcgcagcggcaagcggcgtgttccacgccgtcctcgtctccatgcagctgccgccggctgccctcgttgcctcctcgccggtcccggtcatcgtcctcatcgtcgtggcgttcgtccctccgtcaagccgttcgcgttcgtcgtccgcgttccgtcaagtgagccgctgcagccccgtcgtcgtcttcgtcctcggctccgcgtcgtcaagcgttgcgccggcggcgtctcgccttcgtccaaggatcgccgccgaagtcgtcccctcgcctttcgtctccgtcgttcccggccgtctccgccgcgcccacgtcgaagccctgtcgccgacggtcacactgcctgcctgccgccggtcggaccgtcgaagcctcgccggtcagaccgcccgaacaactgcggtcagaccaccactatcccaccggtcagaccgcgcgtacaactgccgttag

SEQ ID NO: 78411 - DNA, 2850 bp, Oryza sativa
  Clone ID: PAT_MRT4530_78220C.1
atgagtacggccattatcatcgtctccaccaccacctcctcctccttcttcttcttcctcctcctcatgatcactaccggcggcggctgcaaaccgcgggagagagacgctctgctggcgttcaaggaaggcatcgtcaaggatcctgcaggcctcctctcctcctggcaaagaggaggccactatgatgatgatgatgatcagctgctggaagaggattgttgccaatggagaggcgtccggtgcagcaacctcaccggccatgtcgtcaagctcaacctccgaaacgattacgccgacgttggaacaggtctggttggcgagataggccattctctgatctcgctggagcatctcaggtaccttgatctcagcatgaacaacctggcaggtccaactggacatgtccctgagttcttgggctctttcagaagcttgagatatctgaatctatctggtatagtgttctccggcatggtgccacctcagctcggtaagctttcaaatctgaaatttctcgacttctccgggatgttgccctccagcatggctccatttctgtacattagtgatgcttcatggttagcacacttgtccaatttgcaatatctgaaccttaacggggtaaaccttagcacagtactcgattggcctcatgttctgaatatgatcccttctctgaagttccttagcctttcttcttgctcacttcagagtgcaaatcagtatcccacacagattaacctcaggcaacttgagatacttgatctttccaacaattatgaacttagtgaccaagctgaatctagttggatttggagcttgacatccctcaagtatctcaatcttagttcgactagtttgtatggtgagatcccacaagcactaggaaacatgctgtccctccaagttcttgatttctcgtacaacatgagtgtttcgaagaaaggtaacatgtgcatcatgaaggcaaacttgaagaatctgtgcaatttggaagttcttgaccttgattatagactggcatatggagagatttcagaaatatttgagagtttaccacagtgttcacccaacaaactgaaggaacttcatttggctaataacaatttgactgggaatttaccaaaattggtagggaggctaacaagcttagtcactcttgacctctttaataataacatcactggacaagtgccttctgagataggtatgctcacaaatttgacaaacttgtacctccattacaattgcctggatggtgtcatcacagaggagcactttgccaatctaacgagcttgaagtcgatatatttgtgttataattacttggagattgtagtggatcctgaatggttacctcccttcagattagagaaggcatactttgcatctacttcgatgggtccctcatttccctcatggcttcaatcacaagtcgatattcttgaacttgctatgagcgatgctggaataaatgatacatttccagactggttctctacaacattttcgaaggccacgtttttggagatgtcgcagaatcaaattgctggaggcttgccaacaaatatggaaaacatgtcattggaaaaattatatttggactgcaaccacatagctgatcgaattcctcggatgccgagaaaccttatgctactagatatatcatataaccttatcagtggtgatgttccacagtctatttgtgaattgcagaaattaaatggccttgacttgtccaataatctactcgagggcgagttccctcaatgttctctaatgagcagggtatcattttttcgtgcaagtaacaatagtttttctggcaacttcccatcttttttacagggttggacaaagttaagtttccttgatctgtcatggaataaattctctgggactttgcctacatggattggaaactttaacaagctagaatttctgcagcttaagcacaatatgttctctggaagtattcctgacagcatcaccaaccttggaaagctttctcatttggatctagccagcaatggtttatcaggtcccctgcctcagcatttgtcaaatttaacaggaatgatgataaaccatgataccacaaaatatgaagagagactatctggatgtgactacaaatcttttgtgaacatgaagggacaggaactacaatacaaccaagaaaaagtaacagttgtgacaattgacttgtcttcaaattttttgactggtgtaattcctgaaggcatagtttctcttgacggaattataaatttgaatttgtcatggaacaatttgaatggaaaaattccatacatgattggggccatcaagtcattggaatcactcgacctctcgaagaacaatttctatggtgaaatcccacaaagcctatctgatttaacatatttaagttatttgaacctatcttataacaatcttactggaagagtaccatcagggacacaactttgtagcctctatgaccaaaaccatcatctgtatgacggcaatgatggtctttgtgggccacctctccaaaaaagttgttataagtatgatgcctcaaagcaaggttaccagatcagaagcaaacaaggttttcacatagggtcattttccattggagttacagtgggatttatggcaggcctatgggtggttttctatattcttttgttcaagaaatcctggaggattgcttacttttgcttcttggacaatatgtatgatgaggtttatgtgaaggtgattgttgtctgggcaaagttgacaggaagaacagatgaaagattgcgaatgtcgcaggtcgcatggtcatccatcgactctgacgaatactatgaatag

SEQ ID NO: 78412 - DNA, 208 bp, Oryza sativa
  unsure (1)..(208): unsure at all n locations
  Clone ID: PAT_MRT4530_78221C.1
aaatgatggggctgggggataaatganagtgatgggaggggagaccatgatgatacatgctgtgcctgagctaatgctgtgcctggtgatggattgtaccatgctgttgctgtgtgtgctgtgtgcctnttggttttggttacagtgtatacttgtacatctacttatacccattaaagaaatcttgggcttaaaaaaaaaaaaaaaa

SEQ ID NO: 78413 - DNA, 2137 bp, Oryza sativa
  Clone ID: PAT_MRT4530_78222C.1
atggacgatccctcctccacctccaagggcaagcgcaagcgcggccgcaagcacaaggcggccgccgaaaaccacgcgcccgcgtcccccgtggcctccaccgccgccgacaaccccgcgccggccgccgcgggccgccggggccgcaagtcgcggcgccacgaggccccggccgacgcggacgggtcgcggccgccgtccccgccccgccgcggggaggcgaagcccgtggcgaatggaggaggggacgcggtggtggaggcggggggacccgtgggctgggacgaggtcgcgagggtggtgccgtccatggacgccgtggtgaaggtgttctgcgtgcacacggagcccaacttctccctgccgtggcagaggaagcggcagtacagctccagcagcagcggcttcatcatcggaggccggcgcgtcctcacaaacgcccactccgtggagcactacacccaggtcaagcttaagaagcgcggctccgacaccaagtacctggccacggtcctcgccattgggacggagtgcgacattgcgctgttaactgtcgatgatgatgagttctgggaaggagttttgcctgttgagtttggatcactgccagcacttcaggatgctgtgactgttgttggttatccaattggaggagacacaatatctgtgacaagtggggtggtctccaggatagagatactttcatatgttcacggttctacagaacttctaggattgcagatagatgcagctattaactcaggaaattcaggtggcccagcttttaatgacaggggcaaatgtgttggtatagcttttcaatctctcaaacatgaagatgcagagaatataggttatgtgatacccaccccagttattatgcatttcattcaagactatgaaaagtctggagaatatacaggattccctatacttggaatagaatggcagaaaatggagaatcctgatctccgcaaagcgatgggaatgaaacctgatcaaaagggtgttcgtgttcgaagagtggaaccaactgctcctgagtctggatgcctgcaaccatcagatattattcttagcttcgatggtattgacattgccaatgatggtacagttcctttcaggcacggcgagcgcattggcttcagttatcttgtttcccagaaatatactggcgagaaggccctagttaaagtcctgcgcaattcgaaagtccatgaatttaaaataaagctagcaacacataagagacttgttgcagctcatgtaaagggcaggccaccatcatattacattgttgctggctttgtttttgctgcggtttctgttccatatcttagatccgagtatggaaaggactatgaatatgatgcacctgtcaagttgttggtcaagcatttacatgcaatggcccaatcacctgatgaacagctggtggtggtatcacaggtgcttgtagcagatatcaatatcggttatgaagagattgtcaatactcaggtccttgctttcaatggtcagcctgtgaagaatttgaagaacttagtgtcaatggttgaaaattgcaaggatgaattcttgaagtttgatctggagtatgaccagattgttgtccttgagacaaaaactgcgaaggctgcgacacaggacattctgacaacacactgtataccgtcggcaatgtctgatgacctgaagacctaatggggacaagatgcggccttcggctatttggtggccctgcttgggccacatttttgattgggttgattagcatcagcccgcgagaagcctcagcttacgaattgaaagccctccagacgttctggacggcaaagtgctgttggcgtccagcttcaccaaaaagaaggctccgagtaaacgagcgtcacatcactattaggtggagttgttactagcgacgagtcatcgtgaaagcgatagtggttacaataaacaagattctatttcattacattacattaaattagtgagctgagatcatacttcatattttggccaaacaccatcaaatcccataacagaagttatccctgtcttgtcagcagccaaagtgaaaccttaacgtttgagttttgttaaagttgcagtggtcatccactctgacggttcttat

SEQ ID NO: 78414 - DNA, 1574 bp, Oryza sativa
  Clone ID: PAT_MRT4530_78223C.1
gcacgaggcttcttcttctacccacttcttgcacgcgtgcaagaacgagaattcgatcccactccggccaatttctcgcgcgaattcgccgccaattcgagcaggcagcaatggagtcccccgccgacgatgccctcccggcgctgccgccgatcaggaccgctttgtcgaccccgtcgccgccgccgacgaccgtggaggtggaggtctcaggttcgccttcgccgccgaaggaggaggtggtggcggaggcggatgcggaggaggaagagccgtcgacgccgacgtcggaggagagcaggctgaggccgccggcggtgtgcccgccggcgccgcgaaagccgccgccgcctccacgtttctctctcctcgccgcgcgccggcgagacctcgccgccatgaacaatctcctcaccgattcgtttgagctccctcggggaggctcttcaagagatggggacattgaaatgggaatgcaagctgatccttcagacaatctaaaaggtttcttgaaaaaggttgacgcaattgaaagcctaattgctaagctgacgaatctcttgcataagcttcagactgcaaatgaggaatctaaagcggttacaaaagcaagggacatgaaagcaattaaacagaggatggagaaagatattgatgaagtggggaaaatcgctcgcatggcaaagacaaaagttgatgaattggaaaaagataacttatcaaacagacaaaagcctggatgtgggaaaggatctgcggtagatcgatcaagagaacagactactggagcagtgaaaaagaaattgaaggagcgcatggatgattttcaggttttgagagaagcaatccggcaggagtatcgtgatgtcgttgaaagaagggtgtttacagtaactggtagtcgtcctgatgaagagacagttgacaatttaatagagactggaagaagtgagcaaattttccaagaagctatccaacagcagggaagaggccaaatactggacactgttgcagagatacaggaacgtcacgatgctgtaagagatctagagaggaagcttctggagttgcagcagatattcatggatatggcagttttggttgatgctcaaggagacatgatcaacaacatagagacacatgtttcaaatgctaccaaccacatacaacaaggcgtcagtgctctacagaacgcgaagaagctccagaagaactccaggaagtggatgtgctacgccatcatcctcctgctcatcatagtggtgatcattgtcgtcgccgtcatccagccatggaagaagggtgcttgattgtaacttggaaaaagaagatcgtgggatatatttttttccctgtttgtgcaatatgtgtagttgtgtctccgattccctcctacccctgtacgtatgcttaacaaaacaacatgatgagattgagattcgtttgcccttaggcgcaggttgattcatcttcataccagatttcctgtgcaatctaccacgccaggggttatgtgtgaaacaatggtcccatcagtctcaacaaaaattgtgaattcctggatcttttccacc

SEQ ID NO: 78415 - DNA, 966 bp, Oryza sativa
  Clone ID: PAT_MRT4530_78224C.1
atgaacaatctcctcaccgattcgtttgagctccctcggggaggctcttcaagagatggggacattgaaatgggaatgcaagctgatccttcagacaatctaaaaggtttcttgaaaaaggttgacgcaattgaaagcctaattgctaagctgacgaatctcttgcataagcttcagactgcaaatgaggaatctaaagcggttacaaaagcaagggacatgaaagcaattaaacagaggatggagaaagatattgatgaagtggggaaaatcgctcgcatggcaaagacaaaagttgatgaattggaaaaagataacttatcaaacagacaaaagcctggatgtgggaaaggatctgcggtagatcgatcaagagaacagactactggagtgcataaagccatgaatagttgttcatccactatgcttgctaaattctacagagcagtgaaaaagaaattgaaggagcgcatggatgattttcaggttttgagagaagcaatccggcaggagtatcgtgatgtcgttgaaagaagggtgtttacagtaactggtagtcgtcctgatgaagagacagttgacaatttaatagagactggaagaagtgagcaaattttccaagaagctatccaacagcagggaagaggccaaatactggacactgttgcagagatacaggaacgtcacgatgctgtaagagatctagagaggaagcttctggagttgcagcagatattcatggatatggcagttttggttgatgctcaaggagacatgatcaacaacatagagacacatgtttcaaatgctaccaaccacatacaacaaggcgtcagtgctctacagaacgcgaagaagctccagaagaactccaggaagtggatgtgctacgccatcatcctcctgctcatcatagtggtgatcattgtcgtcgccgtcatccagccatggaagaagggtgcttga

SEQ ID NO: 78416 - DNA, 243 bp, Oryza sativa
  Clone ID: PAT_MRT4530_78225C.1
atggcgaaagctacacgctggcacgcaaaacaaggaaaaacactaataaacaccaagaaaacacaaagggccggcgtcgacaggcgggcccacacatcagcggctccaaggggaggacacacggtggaccaagcccaccgcggcctaggcggcaccgtggacccggaccacgggactggtccatgggaccgacggctcggatcggccaagagccgatccaacggccaagggcggcccggctag

SEQ ID NO: 78417 - DNA, 139 bp, Oryza sativa
  Clone ID: PAT_MRT4530_78226C.1
aacaagcagtttcctccatgttcccattcccagcattcttagaccctcttttgtggactgtaaatgctaggactatctcccatgatggattctttgtttctttcttctcagagaggaagaatttctgacagcctgtgga

SEQ ID NO: 78418 - DNA, 222 bp, Oryza sativa
  unsure (1)..(222): unsure at all n locations
  Clone ID: PAT_MRT4530_78227C.1
gcggtgctctcgcctcccctccccgcnggcttccgcctccanatccgcgccgcccgcngccgccgcgctcgctcgagcgggaagctatagctgccgcnttcaattcgacgctgcatgtactggcganaggcgtangcgtggngtgctctccccgacgcgcgcctcgnntcctncccgttaattacaagatggcgatgatggtggaccctcctaatggcatgg

SEQ ID NO: 78419 - DNA, 2674 bp, Oryza sativa
  Clone ID: PAT_MRT4530_78228C.1
ggcacgaggtttttttttttttttttggaaatgatactgatatttcagagggaaagcactacaagcagtcagctaaaacaactttagccaagcaaacaaccaccaaaggctatacaaactccaggcccctgaaccaaaaagacatcatggcaagccaacccaagtacccaacccagccttcgagctgaaggccagcagctgggcacacccactacactcttcgcggtctcccactccctctacgcccctactctttacaggcacgctcgctgcgaactaccaaagcctacggggagcaacaaaacacaggggcgtctcactccttccctctcttgccgtacaccgccctggtcaccgcccggatgcccctcacccacagctccgcctcctcctcgccgccctggcacacgaagtgcacctccctccccgtcgccgtcgccacgcggaacagcccgggctcgtacgcgtcgcagccccgcctctgccggtgcagctggaacgccgagctgccaccgagctcggcctcccggcacaccacgttgcgccgccccgacccgccccaccggagcacgcccgccgcggcgaccatccgcagggacttgccgtgcggcttgccgcgcccgcacttggtgtgcttcttgacgtgggcgcccccgaggacgagctggcggcccagctcgtccatgatcacgtcctcggccttgttgaacgccgcggtggccctcgccagggagagcgccgtctcgccgcgcggggtccgggtgtcgcaccgcgcgccgtaggagatgaggagctcgcacacggccgcgtgcccttccctcgccgccagcatgagcggggtgtagccgtcgccgtccgggatgttgacgtcgcagcccgcgctcgccaggtggcgcaccgccgcggtgtcgccgcgccgggacgcgcagtggagcgcgtagaagccccccggcatgcccttctccagcgcgaactcgagcatgacctgctcgaacaggtccctcttcttgctctgctgcgccagcccgatggccgtctcgccgcgcttgttgctcagcttcacgttggcgccggcgaacacgagcgcgcggaaggcgtcgacgttgccctccttggccgcggccattatcggggagcacccgtccacgtcctgctcgtcgacgtccacgtctggctgggccaggagaacttccatcgcggcggcgtcaccgcagcgcgccgtgaacatcatcggcgagaacacgttccggtcgctcgaccgagggatcgtcccggaccgaatcacgccaagaacggcgcgctcgaagccggccttccagcccccggaacaagcgacggaagccgcggactcgccggccgagttcaacagcgcgacgtccgctccggcggacacgaggatcctcaggcaatcctcgcgcttgtggcgcgcggcgagtatggccgcaacgtcgccgccctccgccctcgcgttcacgtcgcatcccttgcctatcagcatctccaggatctccggctggccgaggcgcgcggccatgtgaacaggcctggacctggagctcctggacgtcttcacggccacctcgtggtccacgccggacgccagcagcgtctgcaccgcgccggcgctgccgcagaggacggcgtggtggaggagattccggccgagatgggtggcgcccgacgagtacccgttctggaggagcatgcggaggatggcgccggtggactcgtagtactccacggcgcaccagaccgcgtcgtaggggtccgcgaggccggcgccgacgcgcagctcctcgccggtggccgtgtcccatgaccacgctcccagcctcaccttggtgtccctctttactccggcctgaagtagctgacgaacgacggcgatttgccggctgacgatcgcggcgaagagtgccgtgcagtcgacattggcatgcagagaaggcttcagagagcgcaggagcacccgagaagtagcatttgggtcagctccacacttgatgagcgagtccaccacgtccacgaagccgcgggcggcggccgacacgagcgcgtgcacagcgacgcgagggcggacgaggtcggagcccatgaagatgacggcgagggcggcctgcccctgcagcgccgcctccacgacggcctcctcgcacgccggctgcgacgccccggcgcgcaccagcaacgccgccacctccgcgcgcccctcccgcgccgcggccgtcgccgggtacccacggaacaccttgccgttcacgtccgcccccttcgcagaggccctcatggccgtggcccgtgcgagctcatctgcaagcagcgcacggacgagcgcggcgtccccgttgccggcggcgaggaagagcggcgacacgtcggcgcggatctcctcgtgcgccgcccgcagctcagcggcggcgccgtcccgcagcgcggcctccgccacccgccgcgccttgagccacaccaccccggcgtagttcacgtccgcgcggccggacgcgagcagctccccggcctccctcgcgtccccgcgcgccaccgcctccaccagccgctgcgacgcggcctccgcctccgcctcgtcccgcagctgccggtggtggtcctccgccaccggccacacctgccgcccgccggcgatcgccgccgccggccgcagcagcactgccat

SEQ ID NO: 78420 - DNA, 279 bp, Oryza sativa
  Clone ID: PAT_MRT4530_78229C.1
atgacgaagcggacgagccgcgcgctcgcccggccaaccaccgaagcgtccgtggccgtgtgtgctgcccgcgccggggcgaacagtagttcacttggccacgcgcggggaatagtagccaacgcccccgctggtggcttgtcaatctcgcttgaaccagcggccgcggcgaagaccgggtctgagctgacggctgccgagccaacgccggttagtgctacaaagatccaagaggatgatgattctaggttcaagaagcagcggaagctgagtaggtag

SEQ ID NO: 78421 - DNA, 875 bp, Oryza sativa
  Clone ID: PAT_MRT4530_7822C.1
gtccactcgaagagctcggcggtggaacagctcgctcgatcatggccgccgccgccgccgcctcaagggcgctctgggcttgccgcaccgcctcctaccttcggatctcctccttccccagggctttctccaccgtccttaaagatctaaaatatgctgatactcatgagtgggtgaaggttgagggtgattcagcaaccataggggtcacagaccatgctcaggaccatttgggtgatgttgtgtatgttgagcttccagaagttggttccacagtatcacaaggaacgaactttggtgcggttgaaagtgtgaaagcaaccagtgatatcaatgcaccagtatctggagagattattcaagtaaatgatgaactaagtgaaaaaccaggatttataaatggaagtccatatgagaagggatggatcatcaaggttaagataagtgatccaagtgagttaaactcgctgatggatgatgagaagtacaagaagttttgtgaggaagaagatggcaaacactgatcaatcccctaactgctggatttcaagaaactatgcagcaactcaccatcatgacaatgagccatctcgcctctcctaccacattatattattctggatagaggagtcccaaggaatgtaataagctgaaacatttttcttgcaaatcagacatgaaaattttgtagtgtcctgatcattccgtttgtgctccatttgaaattcaaaaaaaaaaaaaaaaaaaaatctgaatacaggtggaggattgggtttgtttaaactttgattaagtgacagtgacttgattgtattgaaaaaaaaaaaaaaaaaaaaaaaaaaaaaaaaaactcaagactagttctctctctctcc

SEQ ID NO: 78422 - DNA, 356 bp, Oryza sativa
  Clone ID: PAT_MRT4530_78230C.1
tttttctgatgaggaattttgtttccgttgataggattctcagcggtacatttttttgtacaggtcctgatttgtatgttagcagttgctgagaaataccctttaaagcgggcgtgactgactgaagctggagtttacgacacaaggccagagaggactgctgcaagagcccacgacgcggaggggggacctgtgccgcagataataagatgacaagccccagagctggtgaacatcaggatcaagccccaatctcgttgaacccattgtgctggatacgctggacggcgtggacgcggctgtatggtctgtggaccaagagaacactctctcggggtgcggagccatctgaaaaa

SEQ ID NO: 78423 - DNA, 280 bp, Oryza sativa
  unsure (1)..(280): unsure at all n locations
  Clone ID: PAT_MRT4530_78231C.1
cgaccacgcgtccgagaaacagaaatctctcgctcgcggctccctccttgcgccagacagtcgcgggtgacagggaggggacgccggacgccgtctccatctggnagcagagcaacggaggggaggtgcgccgatctccatctggcgagcagagcaggggaggtttggtgnggnccccncctntttttgggggggctgnctccccctttnctcccccccccgccgtttgtcttttgccccgcctccgtttccctcttttgccgtcctctctttccccccc

SEQ ID NO: 78424 - DNA, 431 bp, Oryza sativa
  Clone ID: PAT_MRT4530_78232C.1
cacgcaacaaggacttgcgatctatgatattccagtcgttaatgggttacacgacaaggaattggctgaactgcggcacaccacctgagacaattagggctctaccaattcagagctacgctgtaaaccacagcacttgcaccataaccccggggctaaatccgtaggctttgttgttattttcagcctgaatatcaggatggggaccatgagtgttcggattgacaatgtgacagttagccgatcggcccctagaaaggggaatacatccctacctgatgggagcgatgctttcttcaatgctcttgagctgcattgctggaagaaactcctctaggcactggccctgtggatctgtgcgggaggcttcctgatgaaatcctggttgtctatgggcgaacacaccattcatttggagactgttgtgattc

SEQ ID NO: 78425 - DNA, 4371 bp, Oryza sativa
  Clone ID: PAT_MRT4530_78233C.1
atggaagataaggacttagtttttgagtgtattttggtgtggcattctatgtacgtggttacctggggtattacagttggtatcagagcgggcgctatgccgcctagagtgagtgtttggttggctaacagaggccgcgggagaggcggaggtagaggtcgtggtaggggccactataatgaagaagttgaaaatactcaggataatgaagaggttgggaacaactcggttgctgaatcccctattcctaatcgtggaggtcgtggtaggggccgtgctggaggccgtggaagaggttgtggtagaggtcgccataatgaggcagcatcctcgaaccagaaggaggatgagcacatggaagaggagggtggtagccattcagctgctgtctctgatgatgctcctcgagctgctcgggggatgacactcactagatggacatccatgcgcttagacacatttgatgggtctggtactcccgttaatgctgcagactggttacgcaagatggagaagtatatgaggggatctagaatgactcctgaggagaaggttactttcatgccttttcagttgactggtcaggcggacatttggtgggatggagttgttgaagcgtggaaccctgatcgtggtgctattacttgggaagtttttcttcagcagttcagagctaagtattatccagaatcatttagggacaagatgagtgatgagttaaacaatatccaacagggaagcaagactgttgatgagtatgaacgggagttcagcagtattgtacgctttgtgcctagcgtggcaaatgatgagcgtgagaaggctaggaagttctttcgagggctcaatgctcggtatagagaagtgatgggaagaaacccgcctactatatacctcaatgcagttgaggaggctcaagggatggaggttgagctccaaattactactgcgcagaagaatcgttttggcaatgtcactggtaatgagcagaagagagctcatcaggaagggggtgagaactcgcagcgaccacctttcaagaagtacaaacaaaatcagatgatgacaacttatccacttccttaccagcagttcacacataattacccaccaccaccattaccaggacagtattggcccatgcctcaatcttttgctccacgtgctccactccagttgcctgcaccgcctatggcgcatccttctgcttcagctccacctcaccagcaggtctcagcctctactaccccagctatagctggagtctacaacatgcctgcagcttcatcccttggtcgcccggatgtcgttacaggtacacttttagttgattcgcatgatgccctagttctgtttgattctggtgctacattttcctttgtttcaatcgagtttgcgaaaagagctaatctatttagtcaagaggtctctcgatctgtccaagtcagctctccagggggtataatctctagttcagtagtatgtctaggttgtgcaatctctattgatggggaggaatttgtggcaaatctaattgtgattcccttaccgctctttgatgtgatcttgggcatggattggttgaaccgatatcgtgctgtaatctcttgtttctggaagactattaccttggaagctccatcaggcgaggagatggttttccaagggagcgcgcctccgcattctcttttcgtgatgtcaaggttatttcctgggcagcgtgctgtaaagacggggttattatgggccttagccgagaagtcatccaagcctttagtgattgaagatgttcctgtagtgcgagattatcctgatgtttttcccgcagaattgccagggatgccacctgagcgtgatgtagagttccgtattgatcttgttcctggtacacaacctatctccagagccccgtaccggttagctcgtcctttccaagaagagttgaagaaacaattagatgatctattatctaagaagttaatccgacggagtgtgtcgccatggggcgcacctgttatttttactgagaagaaggatggaagttggcgtatgtgtgtggactatcgggccttaaatgctgcgacaatcaagaacaagtacccattgcctcgtattgaagatttgtttgatcagttaaagggagcgaaggtgttctctaaaattgacttgaaatctggttataaccaaattcgagtgcgagaagaggatattgagaagactgcattttccacgaggtatgggcattatgagtatagagtaatgtcctttgggctgaccaatgctccggcctattttatggaggcgatgaatagcatgttgcatagttttctagataatttcgtggtggtgtttattgatgatattctgatttactccaaagatgtagaggagcatgagcgtcatctgaggatggtactagggaccctacgagaaaacaagttctatgctaaactgaagaagtgtgagttctggcttcctgaagtggctttcctagggcatgtaattaatcagcaaggtatctcggttgatccaagcaaagttttaagtgttgtcggatgggaaaggccgactaatgttaaggatgtgaggagttttttgggtatggcggggtactaccgacgctttgtgaaggatttctcgattatcgctaaacctatgacgatgctcacacataaggatgtgaagtttcagtggacggaccaatgcgagtgtagtttccaacaattgaagcagaggctggtaactgctccggtgcttactttgccccaacctggtaaacgtttcactgtctattccgatgcttcacgagtaggccttggttgtgttcttatgcaagagggcaatgttatagcttatgcatctaggcagttaaagaagcatgagcagaattaccccactcatgatcttgagcttacagcagtggtctttgctctcaaaatttggaggcactacctgtatggagaatcttgtgatattttccctgatcataagagtctgaaatatatcttcactcagaaggatttgaacttaaggcagaggaggtggctagagttgattaaagactatgatcttaacattcaatacacaccgggtaaggcgaatgtggttgcagatgctctaagccgtaaggtcgtttctccaactgtgagttgtttgataactgattttgaacggatggatatctcctattgttatgttggagtggcaagtaccgagtcacgagtcattcttgagtccgtcataccccaacgagtgctagaggcccaacaacacgatcggttgctgcaacaagttaagaaacgtgtaaaggaaggaaaaactggagatttcactttggattcctcgggagctgtgcgattccatgggcgtttatgtgttccacaaaaagctaaagtcaaggaagagattttgcgagaagcacaccgaacaccatatactgtgcatcctggggagaacaagatgtatcatgatctgaagaagatctattggtggaagaggatgaaagtggatgtggccaagtatgtggcatcatgtggggtatgtcagcgagtaaaggctgaacataagagtcctgctggaaagttgcaatcattggaagttcctgtatggccttgggatgatattgctatggatttcgtggttgggttacctcgaactccacgaggaaaggacgccatctgggtggttgtagatcatctgagtaaggtggcacatttcattcctatccgcaccacttattctgcgagtgacttggcaccgatctattcacgcgaggtagtgaggttacatggtgtgcctcgctcgattgtttctgatagggatgctaagttttcttctaagttctgggaatctgtgcaagaggcatttgatactcaattgaaattcagtacggcttttcaccctcagactgatgctcaaagtaggcagaagagctacgccgatgtcagaagacgagaattagagtttgaagtgggcgatcaagtacttctaaaggtatctccaaccaaaggtgttgtgagatttggaacgaaaggcaaactcagccttaggtatattggtccattctcgatagtggaaagagttggaatcctagcgtatcgccttgagttaccagagtccatgaaagagccgatgaccattgagcaagatttgacatttgagtctcatcctgtaagaatattggaggaatctgagagggtgctcaggcatagaactatcaagtatgtcaaggttctctggacgcaccagaccgagcgagaggccacatgggaacttgagtcacagatgcgggagaagtatcccgagttattcacgtctggtgtggaaggttccaacgttggaggagttgagtcggagtatcgaatgagttaa

SEQ ID NO: 78426 - DNA, 1935 bp, Oryza sativa
  Clone ID: PAT_MRT4530_78234C.1
atgatttccctcttccgccgccgccacggcctccccttctccaccctgcacacgccagccggcgacgtcgccgccacgccgccttctcctctcgacgccacggcggtgctcgagacgctctccctctacgccaacgactggcgccgcgcgctcgagttcttccactggtcagcctcccccgacggcgccaacgtgcccccgacgccggccaccgtcgcccgcgcggtcgacgtcctcgggaagcacttcgagttcccgctcgccacctccctcctcgtctcccaccacgacccggggcgcgcggacccgtccttcctccgccccgccctgcgctccctcctcaaccgcctcgccgccgccaatctcatcgacgacgccatccgcgcgttcgattccactgccggttccatcggcctgcgggatgaggcctccttccacgccctcgtcgacgcgctctgcgaccaccgccgcgttgacgaggcccaccacctatgcttcggcaaggacccgccgccattcccgccggtgacgaagacctacaacttgctcctccgggggtgggctaagacccgcgcctgggcgcgcctccgccaactctggttcgacatggatagccgcggtgttgccaaggacctccactcctactccatctacatggatgcccttgcgaagtcaggcaagccgtggaaggccttcaaggtgttcaaggagatgaagcagaagggcatggcgatcgatgttgttgcgtataatactgcaatccattcagttgggcttgcacagggagtcgatttcgctattcggttgtataggcaaatggttgatgctggttgcaagccaaatgcttccacttttaatacgattgttaaattattatgcaaggaagggaggttcaaggaagggtatgcatttgttcaacagatgcacaagtttgggattgagcccaatgtgctcacttaccattgcttcttccaatatttgagccggcctcaggaggtccttggactgtttgagaaaatgctcgagaggggttgtcggccaaggatggacacatatgtcatgctcatcaagaggtttgggcggtggggattccttaggccagtgttcattgtgtggaaggcaatggaagagcaaggactcagcccagatgcatttgcttacaattcccttattgatgcattgctgcagaagggaatggtggacttagctagaaatctgtaccttctgctggggctttatcatggcaacgagatgttccagtgtttagctgccgaaaacctgtcagttggaggcaggctagcaacatacgtcgccggtgttggtatccgtttggtagccgacagcctcaccagaatggtctctcctgccgcttcccacggccaccgccggtcggccggcaattggccgggaaagtccgcgtccacagacacccagcgcgcgtgcgtggccctacctacatacgcgcccctcgacacgtcgttacgccggcgggccaaacagttcgcggtggtggcgacgctgccggccggccctggtgtattaatttcacttggagtgatcattgaaaagcttctttgtgctcctgaaaatgcagggatcaggctggacaggcagttacatgaagcaatcaacaacaaggagatcatgcgtgactcaaaggccgagcaatcactaaatacagctcgtttgatgaacaagcactgcacatccgatgggcattgcaactcaggaaaggtacaaaggccagtggtgcaggctgaggcaggcgcagcagcgaagcagcagcagcagaatcaggagcaggagacggcgccgcgacagcaagagaagacgtcgtcgacggctacggcgacgatgacgacgtaccctgacatcctcgacatcgccggaatggactattcgccggcgacgagaaagccgccgatccacaactga

SEQ ID NO: 78427 - DNA, 591 bp, Oryza sativa
  unsure (1)..(591): unsure at all n locations
  Clone ID: PAT_MRT4530_78235C.1
tcgcccacgcgtntcgccacggtctatcttccttcccctaccttccttccccaaatccaacgcacgcgccgtggccccacccaaatccgatggcgagctgagtccccggcgtgcaaccacggcgccgacaaactcccgccccaccgctggaggcggcggcggaggccgtcgcgctgccggatgctgcggcggtggcgtcggcatggacgcggcgctgtgcgacgacctgctgcaggaggtgttccgcctgctgccgcgcgcctccgcgccggctgtgtccctcgtctcccgccgctggtacgccctcctccgcgcgtcgattgcctccctgaccctccgcctgccggtctcctccgacgcctcggtgttggcgccgctctctgcgctgctgtctcggttcccctatctctccgccctggcggtggtctgcacagccgcaaccgcccaggtcgcggacgcgatgctgctcgtggtcgcgtcttcgccgtcggccgcgcagctctccgggctgaggtcctgcctgattcgggtatctcgcctgcggcgctggttgctgcctggccagacttctacgggctcacctcgcttcac

SEQ ID NO: 78428 - DNA, 4303 bp, Oryza sativa
  unsure (1)..(4303): unsure at all n locations
  Clone ID: PAT_MRT4530_78236C.1
gngacccacggacgggcgggagacgggcgggggggcggcgccaccgcgcacccacgcgcgngtggccgctgcgtttgtgcttctnnnnnnnnnnnnnnnnnnnnnnnnnnnnnnnnnnacacatttgatgtgtctggtactcccgttaatgctgcagactggttacacaagatggagaagtatatgaggggatctagaatgactcttgaggagaaggttactttcatgccttttcagttgactggtcaggcggacatttggtgggatggagttgttgaagagtggaaccctgaccgtggtgctattacttgggaagtttttcttcagcagttcagagctaagtattatccagaatcatttagggacaagatgagtaatgagttaaacaatatccaacagggaagcaagactgttgatgagtatgaacgggagttcaacagtattgtacgctttgtgcctaacgtggcaagtgatgagcgtgagaaggctagaaagttttctcgagggctcattgcccgatatagagaagtgatgggaagaaacccacctactatatacctcaatgcagttgaggaggctcgagggatggaggttgagctccaaattactactgcacagaagaatcgttctggcaatgtcactggtaatgagcagaagagagcccattagggagggggtgagaactcgcagcgaccacctttcaagaagtacaaacaaaatcaggtcactcaaccatcatccaaacctaggcagtggggttctcagcctaatgcagcttcacgtcctacgaagtctcagttgattcaccctgtaccagggaaagggctattttgctttaagtgtggaaagaatcaccattcagcagagtgtgggtttactgaggcatgtcgtgggtgtggcaaggccctcaggctctactaccccagctatggctggagtctacaacatgcctgcagcttcatcccttggtcgcccggatgtcgttgcagatacactttcagttgatttgcatgatgctctagttctatttgattctggtgctacattttcctttgtttcaattgagtttgcgaaaagagctaatctatttagtcaagaggtctctcgatctgtccaagtcagctctccagggggtataatctctagttcagtagtatgtctaggttgagcaatctctattgatggggaggaatttgtggcaaatctaattgtgattcccttaccgctctttgatgtgatcttgggcatggattggttgaaccgatatcgtgctataatctcttgtttctgaaagactattaccttggaatctccatcaggcgaggagatggtttttcaagggagcgctcctccgcattctattttcgtgatggcaagtttattgattgaagatgttcctgtagtgcaagattatcctgatgtttttcctgcagaattgccagggatgccacctgagcatgatgtagagtttcgtattgatcttgttcctggtacacgacctatctcagagccccgtaccggttagctcgtcctttccaagaagagttgaagaaacaattagatgatctattatccaagaagttaatccgacggagtgtgtcaccatggggtgcacctgttatttttactgagaagaatgatggaagttggcgtatgtgtgtggactatcgggccttaaatgctacgacaatcaagaacaagcacccattgcctcgtattgaagatttgtttgatcagttaaagggagtgaaggtgttttctaaaattgatttgcaatctggttataaccaaattcgagtgcgagaagaggatattgagaagaccgcattttccacgaggtatgggcattatgagtatagagtaatgtcttttgggctgaccaatgctccggcctattttatggaggcgatgaatagcatgttgcatagctttctagataattttgtggtggtgtttattgatgatattctgatttactccaaagatgtagaggagcatgagcgtcatctgaggatggtactagggaccctacgagaaaacaagttctatgctaaactgaagaagtgtgagttctggcttcctgaagtggctttcctagggcatgtaattaattagcaaggtatctcagttgatccaagcaaagtttcaagtgttgtcggatgggaaagaccaactaatgttaaggatgtgaggagttttttttggtatggcggggtactaccgacgcttcgtaaaggatttctcgattatcgctaaaccaatgacgatgctcacacataaggatgtgaagtttcaatggacggaccaatgtgagcatagtttccagcaattaaagcagaggttagtaactgctccggtgcttactttgccccaacctggtaaacgtttcactgtctattgctacacttcacgagtaggccttggttgtgttcttatgcaagagggcaatgttatagcttatgcgtctaggcagttaaagaagcatgagcagaattaccccactcatgatcttgagcttgcagcagtggtctttgctctcaaaatttggaggcactacctgtatggagaatcttgtgatattttcactgatcataagagtctgaaatacatcttcactcagaaggatttgaacttaagacagaggaggtggctggagttgattaaagattacgacctcaacattcaatatacacctggtaaggcgaatgtggttgcagatgctttaagccgtaaggtcattcctccaaccgtgagttgtttgataactgattttgaacggatggatatctcctattgttatgccggagtggcgagtaccgagtcacgagtcattcttgagtccgccataccccaacaagtgctagaggcccaacaacacgatcagttgctacaacaagttaagaaacgcgtaaaggaaggaaaaattggagatttcactttggattccttgggagctgtgcgattccatgggcgtttatgtgttcaacagaaagctgaagtcaaggaagagattttgcgagaagcacaccgaacaccatatactgtgcatcctggggagaacaagaagtatcatgatctgaagaagatctattggtggaagaggatgaaagtggatgtggccaagtacgtggcatcatgtggggaatgtcagcgagtaaaggctgaacataagagtcctattggaaagttacaatcattggaagttcctgtatggccttgggatgatattgctatggatttcgtggttgggcttcctcgaactccacaaggaaaggacgtcatctgggtggttgtagatcatctgagtaaggtggcacatttcattcttatccgcatcacttattctgcgagtgacttggcaccgatctatacacgcgaggtagtgaggttacatagtgtgcctcgctcgattgtttatgatagggatgctaagttttcttctaagttctgggattctgtgcaagaggcatttgatactcaattgaaattcagtacggcttttcaccctcagactgatggtcaatctgagcggactattcaaactttagaggatatgttgagatcatgtatcctttcatggaaaggcagttgggaggatcatttgccacttgtagaatttgcttataacaatagtttccatgctagcattcgaatggcaccatatgaggcactttatggaagaaagtgtcgatccccattgtgttgggattccataggggagagagctatgttaggacccgattgggttcaacagaccacagaacggatagcaaaaatacgacaacacatgcttgcagctcaaagtaggcagaagagctacgccgatgtcagaagaccggaattagagtttgaagtgggcgatcaagtacttctaaaggtatctccttccaaaggtgttgtgagatttggaacaaaaggcaaactcagccccaggtatattggtccattcttgatagtggaaagagttggaatcctagcgtatcgccttgagttaccagagtccatgaaaggtgtacatgatgtattccatatttccgtgttgagaaaatatttgagagaccctgaacatcatatcaccatagagccggtgaccattgagcaagatttgacatttgagtctcgccctgtaagaatattggtggaatctgagagggtgctcaggcatataactatcaagtatgtcaaggttctttggacgcaccagaccaagcgagaagccacatgggaacttgagtcacagatgcgggagaagtatccatagttcttcacgtctggtgagttatataagtcctacctatgagtt

SEQ ID NO: 78429 - DNA, 2379 bp, Oryza sativa
  Clone ID: PAT_MRT4530_78237C.1
atggaagatgaggacatggaccggctgtttgtatctaatgatgctgctcgagctactcggggaatgacactcactagatggacatccgtgcgcttagacacatttgatgggtctagtactcccattgatgctgcagactggttgcgcaagatggagaagtacatgagtggatctagaatgacccctgagaagttcagagctaagtattatccagaatcatttggggacatgatgagtgatgagctaaacaatatccaacatggaagcaagactgtggatgagtatgagcgggagttcagcaatattttatgctttgtgcctagcgtggctagtgatgagcatgagaaggctaggaagttctttcgagggctcaatgcccgatatacaaaagtgatgggaagaaacccgcctactgtatacctcaatacagttgaggaggctcgggggatggagatgatgacaacttatccacttcctcaccagcagttcacacataattacccaccactatcactaccaggccaatattggtccacgcctcaatttattgctccacgtacaccactccagttgcctgcaccgcctatggtgcatccttctgctttagctccacctcagcagcaggcctcaggctctatggctggagtctacaacatgcctgcagcttattctcttggtcgcccggatgtctttacaggtacactttcaattgattcgcatgatgctctagttctgtttgattctggtgctacattttcctttgtttcaatcaagtttgcgaaaagagctaatctatttagtcaagaggtctctcaatctgtccaagtcagctctccagggggtataatctctagttcagtaaagactattaccttggaagctccatcaggcgacgatatggttttccaagggagcgcgcctccgcattctcttttcatgatggcaaggttgtttcctagacagcttgctataaagacagggttattgtgggccttagccgagaaggcatccaagcctttattgattgaagatgttcctgtagtgcgagattatcctgatgtttttcccgcagaattgctagggatgccacctgagcgtgatgtagagttccgtattgatcttgttcctgttatttttactgagaagaaggatggaagttggcgtatgtgtgtggactatcgggccttaaatgctgcgacaatcaagaacaagtacccattgccttgtattgaagatttgtttgatcagttaaagggagcaaaggtgttttctaagattgacttgcaatctggttataaccaaattcgagtgcgagaaggggatattgagaagactccattttccacgaggtatgggcattatgagtataaagtaatgtcttttgggctgaccaatgctctagcctattttatggaggcgattaattgcatgttgcatagctttctagataattttgtggtggtgtttattgatgatatcctcatttactccaaggatgtagagcagcacgagcgtcatttgaggatggtgctagggactttacgggaaaacaagttctatgctaaattaaagaagtgtgaattttggcttcctgaagtggctttcctagggcatgtaatcaatcagcaagggtactatcgacgcttcgtgaaggatttctcaattattgctaaacctatgacgatgctcacacataaggatgtgaagtttcagtggacgaacctatgcgagcgtagtttccaacaattgaagctgaggctggatttgaacttaaggcagaggaggtggctagagttgattaaagattacgatctcaatattcaatatacaccgggtaaggcgaatgtggttgcagatgctctaagccgtaaggtcgttcctctgactaaagctgaagtcaaggaagagattttgcgagaagcacgccgaacaccttatactgtgcatcctggcaagaacaagatgtatcatgatctgaagaagatctataggtggaagaggatgaaagtggatgtggcaaagtacgtggcatcatgtggagtatgtcagcgagtgaaggctgaacataagagttatgctggaaagttacaatcaatggaagatcctgtatggtcttgggatgatattgctatggacttcatggttgggctacctcgtaacccacgaggaaaggatgccatctgggtagttgtagatcgtctaagtaaggtggcacatttcattcctatccgcaccacttattcatcgagtaacttagcaccgatttatacacgcgacgtagtgaggttacatggtgtgtgtcgctcgattgtttctgatagggatgttaaattttcttctaagttctgggagtctgtgcaagagccatttgataactga

SEQ ID NO: 78430 - DNA, 2328 bp, Oryza sativa
  Clone ID: PAT_MRT4530_78238C.1
atggcgcatccttctgcttcagctccacctcaccagcaggcctcaggctctactacctcagctatggctggagtctacaacatgcctgcagggtcatcccttggtcgcccggatgtcattacagaattgctagggatgccacctgagtgtgatgtagagttccgtattgatcttgttcctagtacacgacctatctccagagccccgtaccggttagctcgtcctttccaagaagagttgaagaaacagttagatgatctattatccaagaaattaatccgatggagtgtgtcgccatgcggtgcacctgttatttttactaagaagaaggatggaagttggcgtatgtgtgtggactatcgggccttaaatgccgcgacaatcaagaacaagtacccattgcatcatattgaggatttgtttgatcagttaaagggagcaaagagttatgtcttttgggctgaccaaagcttcggctattctatggagacgatgaatagcatgttgcatagctttctagataagtttgtggtggtgtttattcatgatattctgatttactccaaagatgtagatgagcataagcatcatttaaggatggtgctagggactttacgggaaaacaagttctatgctaaattaaagaagtgtgaattttggcttcctgaggtggttttcctagggcatcgagtaaaggctgaacataagagtcctgctggaaagttacaatcattggaagttcatgtatggtcttgggatgatattgctatggacttcgtggttgggctacctctaactccacaaggaaaggacgccatctgggtggttgtagatcttctgagtaaggtggcacatttcattcctatccgcaccacttattctgtgagtgacttggcaccgatctatacacgtgaggtagtgaggttacatggtgtgcctcgctcgattgtttctgatagggatgctaaattttcttctaagttctgggaatcggtgcaagaggcatttgatactcaattgaaattcagtacggcttttcaccctcagactgatggggagagagctatgttaggacccgattgggttcaacagtccacaaaacagatagcaaaaatacgacaacacatgcttgcagctcaaagtaggcagaagaactacaccgatgttagaagacgggaattggagtttaaagtgggtgatcaagtacttctaaaggtatcccctaccaaaggtgttgtgagatttggaacaaaagatgaatacttgctaactggcaagagcacttccttagagtgtttggacacttttgctatagggatagttgaggtctttggtgggcaatatttgcgacaacccacaagtgaggatatagagcatatactacaggttaacgagtctcgtggctttccggttagaggggaggctcctcgggttcatttttctgttaacgggaatgagtataacaatgggtataaccttgctgatggtatatacccagattgggtcagcttcatgaagtctatatcacttccacaaacagggaagcataaattgtttgctaaacgtcaagaaggggcaaggaaagatgtggagcgggcttttggagtgttgcaagcccattccaatattgtgcgtcgtccagcgaagaagtggaaacggaagagtgttgggaaaatcatgctagcttttgtgattctcgacaatatgattgttgaagatgagagagaggatgcgatatgtgacattgacctcaatagaattcctaggacatcaatagtcctgcctcctgaagtaacttctggaacatgctctgctcagtatgtccaaatcatggtgctgcacttcttaaagagggagtcgaaatcgtgggggcgcaacggagttggggtcgtcgcggaagccacgatccttggtcttacggggacatttaccggctcaccgccccctgcgatggtgaacaaaggagtgagggagtctcgaggaggcgcaacagcgagtgaggtggtctggtggtggaggcgcggtagcggaggcactggtccagcagtggactacggcggcagaggggattcgggcggagtgaggaggaaggaggattcgagcggagagaggaggagtgaggaggcggcagggattggcgctggtccggtggtggactgcagcggcagcggggattcgggaggagcgaggaggcagcagggattcgcgtggcggagtcatcgcgcaggcggaaagagcggtggagaggaatcggtgggattggttatgatttcctacagcaaggaggataaacggatgagattagatgagatagcagatgaacggtag

SEQ ID NO: 78431 - DNA, 1480 bp, Oryza sativa
  Clone ID: PAT_MRT4530_78239C.1
ttttccttttcttgttgttttttttttttttttagccaaaaaatggggctcgatcaagctttattgatgcatcaaacagcctacaagatcgcactatgtacatgatgtcacacactcttcttccatccatccactacgacttcgtcctcttgcacccttcaggcaaaacccaacccagatgatccatcattggtgccgtgctgcaagccattgcacggtggtgctcgccagtttgcctagcctagctagatatctagtcgaatgcgacggagtagtagtcgtcgtacgtgcaccgccttcgggtggacatgagcctcgccagcttctgcctgcacagatcgaacctcgccggccggtcgccggagtcctgcgcggccgccgccgccgccgctctgcgcgggatccccagctggcgctccagctccgcgaactcctcgggcctcttcaccacgtggtcgtagcagatgtacctcccgccggccgtgttgtcgcccatcgcctcgtacacccggacgtgcgcctccgccaccgtctccacgctcgccgtcgcgagcaggccgtcggcgagcatggcgcgagcccctttgaggtaggcgatggaggcggtggagttgcggcggcggaatcccggaccggtgaccagcgccgggcagacggtgaccagcttcaggtccctacccctggctgccctccacgccgtcttctccgctgccgtcttgcccagtgcaaaccacagcttgttgtcacggcagaagctctcatcgctccagcagttctcgtcgatgatggtaggaaaccgtcggtcatgagggtaattttgcctccatacacatgctagcaacgacgacgtgaagacgcattttctgacggactctgtcctcacgcacgcctcgatcacctgctctgctgctttcgcctccaagcttgccatatgtttctgattacccgttcttatcagataataaacccggtcccttagtgacttctgtgacagcattagggaacacataacataggtaggtgtagtagttgcgaggatcttaaggttagggaccgagtttggtgcactcaccgtgtagccggacatgccccccggatccacgaacgccgaggtgtgaaacacgccggcgcatccgtcgaacgcccggtgcaggctctcggggtccgtcacgttcgccatcaccgtccacacgccgtcccggccgtcctcgccgaacatctccatctccctcagcttgtccaggtcctcttgggtctcgagggcgaggcgcacggtgtagccgtgccggagcaggcggtcgacgacggcgaacccgacgaaggagatgccgcccgtgacgcagacggtgcgcggccccgccgcgcccccgtcgccgcccgcggtgcgcttgacgtccgcgtcgccggccgaggggcgccacccggccgccgccgccgccgccgccccgcccccgtggccatgcagcagcgccgcccgcat

SEQ ID NO: 78432 - DNA, 513 bp, Oryza sativa
  Clone ID: PAT_MRT4530_7823C.1
atggccgccgccgccgccgcctcaagggcgctctgggcttgccgcaccgcctcctaccttcggatctcctccttccccagggctttctccaccgtccttaaagatctaaaatatgctgatactcatgagtgggtgaaggttgagggtgattcagcaaccataggggtcacagaccatgctcaggaccatttgggtgatgttgtgtatgttgagcttccagaagttggttccacagtatcacaaggaacgaactttggtgcggttgaaagtgtgaaagcaaccagtgatatcaatgcaccagtatctggagagattattcaagtaaatgatgaactaagtgaaaaaccaggatttttgacaatttgcttctgcaattttacacagataaatggaagtccatatgagaagggatggatcatcaaggttaagataagtgatccaagtgagttaaactcgctgatggatgatgagaagtacaagaagttttgtgaggaagaagatggcaaacactga

SEQ ID NO: 78433 - DNA, 2628 bp, Oryza sativa
  Clone ID: PAT_MRT4530_78240C.1
ccgcgtcgttttcccccgtttctctcgcattttttccccgtctggggcccgcccatcgatcccctgaccccggctcgctccgcgccttttcctcgttctggcctccccaacctttcccaacgaacccgctcgagcgcgagccttctgcttcccccagatccgaaacctcgaccgacctcgggacacaagaagagagcaccttcgctcagtcgttgcttagtgcgccatctctctgtcgcgggaacggcagggggctagtaatgccacaatccttttctctatcagcaatggggaggaggacatggcagtggcacgccattgcggcgctcggcgtcgcgtgcgcggccgccgccgccgtggccgccgataggagagccttctcggtgacctcggccgccggcggcggcgccgcggcggcggcggcggtggtggcggcgacgccggaggaagtgggcatccttcggaaggtggccaatttcttgtggcagactgatggcaactcgtaccaccacgtttggccggaaatggaattaggatggcaaatagtgctgggatcactgatcggattcttcggcgcggcattcgggagtgtgggcggcgttggaggtggtgggatctttgtgccaatgctgactttgatcattgggtttgatccaaagtcatctactgcaatatcaaaatgtatgatcatgggtgcagctgtctcaactgtctactacaatctcaagcttaaacatcctacgttggacatgccagtgattgactatgacctagccctgctgatccagcctatgctaatgcttgggatcagcattggtgttattttcaatgttttattccctgactggctggtcacagttctccttattatccttttcctaggcacatcaactaaagcttttctgaagggtgttgagacatggaagaaagagacaataatcaaaagggaggctgcaaaacgattggagcaaaccagtgaagaaccagaatatgcaccacttcctactggaccaggcgctgtagctgatgcaaaaaggccatcagatgaagcggcatcacttatgaagaacatttactggaaggagtttggccttcttgcatttgtgtggatggcattccttgttcttcaggtcacaaagaactacacagctacttgctccagttggtactggatcttaaaccttctccagctcatgttcttattcatccctaaaaaatggaaaccactcaaaattacatattcaaaatctttcacattgtatggtattaagatcccagtatcagttggagtgactatgtatgaagcgctgggcctgatgagcgggaagagagttctatcgtcaaagggaaatgaacagactacactgaaatttcaccagctctgcatatactgcttcttcggtatcactgcgggggtcgttggtggtctgctaggtctcggaggtggctttatcatgggtccactgttcttggaacttggcatcccaccccaggtttcaagtgcaacagccacctttgcaatgatgttctcatcttcaatgtctgttgttgagtactacctgttgaaccggttcccagtgccctatgctttgtactttgtcattgtggcattcatcgctgccattattggccagcatgtggtcaggaggttgatcaattggttaggacgggcatcgctcatcatcttcattttggctttcatgatctttgtcagcgcaatttctctaggattatccttggagatcactggagcaaagggtgagaagagaaccttttgtgttttcctccagggagccatggaaccatcatctctgtcacttcggctcaaagcagccatatatgatctgttcaacagtaactcattgcaaacatatgtgccattcagaatccgccatatcaacggtggcggtaacccgaggccgagacaagaggaccccggactcaccgatgccgagttcaagaaggcgatggagcagctcaacaagcaggcatataggtccttagaccctcataagatggttgaatcaaacagaggaggcagaaaccatgcaaagagtgcaagatccaagccagctccaaacaacacggaagaggagaaagcatgtaccatatgtttggagacattcctggctggggagcaggtggtggccacaccctgcaaccacatatttcaccaagagtgtatcaccccctgggtgaaggggcatggcaactgcccggtgtgccggttcgcgctatgcgagaggaacaccgtctccgacaacagccagagtggcgttggagaggttgaggtagatctggacctgctggagatgatgagggccatggaggagatcttcagccgggtcacattctcaaacttcatgccatacaactagatgaatcagcatcaggtcatgaagacatgaactgatgaacaaatggtattccagtcttaatatcatggtgtgctactcacttgcatgatattccactacgaatttcatcaagattttctacctggcaatcttgtccaactgctttgtgaaaccaggtaatgcattgcaacagtacaaacaacaggatggatgaacaactgcatatgcattagaggtcaggcagcaaaactaattgtgcgagatgtgccat

SEQ ID NO: 78434 - DNA, 4641 bp, Oryza sativa
  Clone ID: PAT_MRT4530_78241C.1
atgcaccggcgatcgggagagcaggtctccggaacctctgccttcgacatcctgcaccgggagaaggcggcaataaggcgctgcgattttactatggctggttttgccgatgcactggggccggataaatttaccggtgtgcactttaagagatggcagatcaaggtcactctgtggctgacagctatgaaatgcttctgggtgagtactgacaagcctatgggcgttcttaatgctgatcagcagaaagaattcgatgaggccactactctctttgtgggatgcattcttagcatgcttggcgatcgtctggtcgaggtgtatatgcatatgaccgacgctaaggagtcatgggatgcacaaaatactaaattcggtgctactgatgctagcaatgatctgtatatcatggagcagtttcatgactacaatatggctgacaaccgttctgtagtcgaacaggctcatgaaatacaaaccatgactaaggaactcgaactccttaagtgtgtcttacccgacaaatttgtggccgggaaggagggagagaaggcagagaagaacaggaaggaaggaaagaaggggaaatttgatagaagaagggaaatttggggaatttggtacgtggttacctggggtgttacagttggtatcagagcgggcggtatgccgcctagagtgagtgttcggttggctaacagagggcgcgggagaggcggaggtagaggtcgtggtaggggccaccataatgaagaagttgaaaatactcaggataataaagaggttgggaacaactcggttgctgaatcccctattcctaatcgtggaggtcgtggtaggggccgtgctggaggccgtggaagaggtcgtggtagaggtctccataatgaggcagcatcctcgaaccagatggaggatgagcacatggaagaggtggagggtggtagccactcagctgctgtctctgatgatgctcctcgagctgctcgggggatgacactcactagatggacatccatgcgcttagacacatttgatgggtctggtactcccgttaatgctgcagactggttatgcaagatggagaagtatatgaggggatctagaatgactcctgaggagaaggcggacatttggtgggatggagttgttgaagcgtggaaccctgatcgtggtgctattacttgggaagtttttcttcagcagttcagagctaagtattatccagaatcatttagggacaagatgagtgatgagttaaacaatatccaacagggaagcaagactgttgatgagtatgaacgggagttcagcagtattgtacgctttgtgcctagcgtggcaagtgatgagcgtgagaaggctaggaagttctttcgagggctcaatgctcggtatagagaagtgatgggaagaaacccgcctactatatacctcaatgcagttgaggaggctcgagggatggaggttgagctccaaattactactgcgcagaagaatcgttctggcaatgtcactgggcaagggctaatttgctttaagtgtggaaagaatcaccattcagcagagtgtgggtttactagggcatgtcgtgggtgtggcaaagctggacacatggagttgatgatgacaacttatccacttccttaccagcagttcacacataattacccaccaccaccattaccaggacagtattggcccatgcctcaatcttttgctccacgtgctccactccagttgcctgcaccgcctatggcgcatccttctgcttcagctccacctcaccagcaggtctcagcctctactaccccagctatggctggagtctacaacatgcctgcagcttcatcccttggtcgcccggatgtcgttacaggttgtgcaatctctattgatggggaggaatttgtggcaaatctaattgtgattcccttaccgctctttgatgtgatcttgggcatggattggttgaaccgatatcgtgctgtaatctcttgtttctggaagactattaccttggaagctccatcaggcgaggatatggttttccaagggagcgcgcctccgcattctcttttcgtgatgtcaaggttatttcctgggcagcgtgctgtaaagacggggttattatgggccttagccgagaagtcatccaagcctttagtgattgaagatgttcctgtagtgcgagattatcctgatgtttttcccgcagaattgccagggatgccacctgagcgtgatgtagagttccgtattgatcttgttcctggtacacaacctatctccaaagccccgtaccggttagctcgtcctttccaagaagagttgaagaaacaattagatgatctattatctaagaagttaatccgatggagtgtgtcgccatggggcgcacctgttatttttactgagaagaaggatgaaagttggcgtatgtgtgtggactatcgggccttaaatgctgcgacaatcaagaacaagtacccattgcctcgtattgaagatttgtttgatcagttaaagggagcgaaggtgttctctaaaattgacttgcaatctggttataaccaaattcgagtgcgagaagaggatattgagaagactgcattttccacgaggtatgggcattatgagtatagagtaatgtcctttgggctgaccaatgctccggcctattttatggaggcgatgaatagcatgttgcatagttttctagataatttcgtggtggtgtttattgatgatattctgatttactccaaagatgtagaggagcatgagcgtgatctgaggatggtactagggaccctacgagaaaacaagttctatgctaaactgaagaagtgtgagttctggcttcctgaagtggctttcctagggcatgtaattaatcagcaaggatgtgaggagtttttgggtatggcggggtactaccgacgctttgtgaaggatttctcgattatcgctaaacctatgacgatgctcacacataaggatgtgaagtttcagtggacggaccaatgcgagtgtagtttccaacaattgaagcagaggctggtaacagctccggtgcttactttgccccaacctggtaaacgtttcactgtctattccgatgcttcacgagtaggccttggttgtgttcttatgcaagagggcaatgttatagcttatgcatctaggcagttaaagaagcatgagcagaattaccccactcatgatcttgagcttgcagcagtggtctttgctctcaaaatttggaggcactacctgtatggagaatcttgtgatattttcactgatcataagagtctgaaatatatcttcactcagaaggatttgaacttaaggcagaggaggtggctagagttgattaaagactatgatcttaacattcaatacacaccggctaaagtcaaggaagagattttgcgagaagcacaccgaacaccatatactgtgcatcctggggagaacaagatgtatcatgatctgaagaagatctattggtggaagaggatgaaagtggatgtggccaagtacgtggcgtcatgtggggtagtgaggttacatggtgtgcctcgctcgattgtttatgatagggatgctaagttttcttctaagttctgggaatctgtgcaagaggcatttgatactcaattgaaattcagtacggcttttcaccctcagactgatggtcaatctgagcggactattcaaactttagaggatatgttgagatcatgtatcctttcatggaaaggcagttgggaggatcatttgccgcttgtagaatttgcttacaacaatagtttccatgctagcattcaaatggcaccatatgaggcactttatggaagaaagtgtcgatccccattgtgttgggattccataggggagagaactattttaggacccgattgggtacaacagaccacagaacggatagtagaaatacgacaacacatgcttgcagctcaaagtaggcagaagagctacgccgatgtcagaagacgagaattagagtttgaagtgggcgatcaagtacttctaaaggtatctccaaccaaaggtgttgtgagatttggaacgaaaggcaaactcagccctaagtatattggtccattctcgatagtggaaagagttggaatcctagcgtatcgccttgagttaccagagtccatgaaaggtgtacatgatgtattccatatttccatgttgagaaaatatttgagagaccctgaacatcatgttgccgtagagccgatgaccattgagcaagatttgacatttgagtctcatcctgtaagaatattagaggaatctgagagggtgctcaggcatagaactatcaagtatgtcaaggttctctggacgcaccagaccgagcgagaggccacatgggaacttgagtcacagatgcgggagaagtatccagagttattcacgtctggaaggagggagagaaggcagagaagaacaggaaggaaggaaagaaggggaaatttgatagaagggaaatttggggaatttggtgaatatttccaaattcttcgttttccttatacattagtactgctaggtgtggagggttccaacgttggaggagttgagtcggagtatcgaatgagttaa

SEQ ID NO: 78435 - DNA, 537 bp, Oryza sativa
  Clone ID: PAT_MRT4530_78242C.1
ccggccgggccgccgccgccgccgctctgcgcgggatccccagctggcgctccagctccgcgaactcctcgggcctcttaccacgtggtcgtagcagatgtacctcccgccggccgtgttgtcgcccatcgcctcgtacacccggacgtgcgcctccgccaccgtctccacgctcgccgtcgcgagcaggccgtcggcgagcatggcgcgagcccctgtcgacacgcaagacatgtcagtgtgtactgcacaagcacaaaggcacaccatgttcctttctccgatcgtagcttacatgctcgtatcgaagcctgtagtgtacctttgaggtaggcgatggaggcggtggagttgcggcggcggaatcccggaccggtgaccagcgccggtcagacggtgaccagcttcaggtccctacccctggctgccctccacgccgtcttctccgctgccggcttgcccagtgcaaaccacagctgaaaagtttatccagaaagtcattagattgcacaaaaaagaagaagaaaatttgcggcc

SEQ ID NO: 78436 - DNA, 2373 bp, Oryza sativa
  unsure (1)..(2373): unsure at all n locations
  Clone ID: PAT_MRT4530_78243C.1
atggcgcatccttctgcttcagctccacctcaccagcaggtctcagcctctactaccccagctatggctggagtctacaacatgcctgtagcttcatcccttggtcgcccggatgtcgttacagagtttgcgaaaagagctaatctatttagtcaagaggtctctcgatctgtccaagtcagctctccaggggatatgatctctagttcagtagtatgtccaggttgtgcaatctctattgatggggaggaatttgtggcaaatctaattgtgattcccttaccgctctttgatgtgatcttgggcatggattggttgaaccgatatcgtgctgtaatctcttgtttctggaagactattaccttggaagctccatcaggcaaggagatggttttccaagggagcgcgcctccgcattctcttttcgtgatgtcaaggttatttcctgggcagcgtgctgtaaagacggggttattatgggccttagccaagaagtcatccaagcctttagtgattgaagatgttcctgtagtgcgagattatcctgatgtttttcccgcagaattgccagggatgccacctgagcgtgatgtagagttccgtattgatcttgttcctattaaagggagcgaagtgttctctaaaattgacttgcaatctggttataaccaaattcgagtgcgagaagaggatattgagaagactgcattttccacgaggtatgggcattatgagtatagagtaatgtcctttgggctgaccaatgctccggcctattttatggaggcgatgaatagcatgttgcatagttttctagataatttcatggtggtgtttattgatgatattctgatttactccaaagatgtagaggagcatgagcgtcatctgaggatggtactagggaccctacgagaaaacaagttctatgctaaactgaagaagtgtgagttctggcttcctgaagtggctttcctagggcatgtaattaatcagcaaggtatctcggttgatccaagcaaagttttaagtattgtcggatgggaaaggtcgactaatgttaaggatgtgaggagttttttgggtatggcggggtactaccgacgctttgtgaaggatttctcgattatcgctaaacctatgacgatgctcacacataaggatgtgaagtttcagtggacggaccaatgcgagtgtagtttccaacaattgaagcagaggctggtaactgctccggtgcttactttgccccaacctggtaaacgtttcactgtctattccgatgcttcacgagtaggccttggttgtgttcttatgcaagagggcaatgttatagcttatgcatctaggcagttaaagaagcatgagcagaattaccccactcatgatcttgagcttgcagcagtggtctttgctctcaaaatttggaggcactacctgtatggagaatcttgtgatattttaactgatcataagagtctgaaatatatcttcactcagaaggatttgaacttaaggcagaggaggtggctagagttgattaaagactatgatcttaacattcaatacacaccgggtaaggcgaatgtggttgcagatgctctaagccgtaagctcgttcctccaactcgagtaaaggctgaacataagagtcctgctggaaagttgcaatcattggaagttcctctatggccttggnatgatattgctatggatttcgtggttgggctacctcgaactccacgaggaaaggacaccatctgggtggttgtagatcgtctaaaggcatttgatactcaattgaaattcagtacggcttttcaccctcaggctgatggtcaatctgagcggactattcaaactttagaggatatgttgagatcatgtatcctttcatggaaaggcagttgggaggatcatttgccgcttgtagaatttacttacaacaatagtttccatgctagcattcaagtggcaccatacgaggcactttatggaagaaagtgtcgatccctattgtgttgggattccataggggagagagctattttaggacccgattgggtacaacagaccacagaacggatagcagaaatacgacaacacatgcttgcagctcaaagtaggcagaagagctacgccgatgtcaaaagacgagaattagagtttgaagtgggcgatcaagtacttctaaaggtatctccaaccaaaggtgttgtgagatttggaacgaaaggcaaactcagccctaggtatattggtccattctcgatagtggaaagagttggaatcctagcgtatcgccttgagttaccagagtccatgaaaggtgttgtcacaccccgaagttttccccccaagccaaaattttaa

SEQ ID NO: 78437 - DNA, 405 bp, Oryza sativa
  Clone ID: PAT_MRT4530_78244C.1
tcattctcctgctgcgcctgcctctgccgccgactccccgctccgctccggcctccctcccgtcccgaccgcgaccagccaccgcccccgtccctcccgcgcgcgcggttgcttcagatctcctcttcccccctccctcacccgccgccaacccctcccgccattacgtagcagtatataaagtcctatccccatcaccctcccatttcgctgcttctccctccctacccgcgccatggcctgctgattgctgctgctgctgctgctgttgactcgtctcccgtggatctggatcttgatccccgcgagaggaatggaggtcttcggccccgtcacgcccggccaagtaagcgcgtgcatgggtcttttccctgtcctcattggatggatctacgccgaaatctt

SEQ ID NO: 78438 - DNA, 4641 bp, Oryza sativa
  Clone ID: PAT_MRT4530_78245C.1
atgccacctagagtgagtgttcggttggctaacagaggccgcgggagaggcggaggtagaggtcgtggtaggggccaccataatgaagaagttgaaaatactcaggataatgaagaggttgggaacaactcggttgctgaatcccctattcctaatcgtggaggtcgtggtaggggccgtgctggaggccgtggaagaggtcgtggtagaggtcgccataatgaggcagcatcctcgaaccagatggaggatgagcacatggaagaggaggagggtggtagccactcagctgctgtctctgatgatgctcctcgagctgctcaggggatgacactcactagatggacatccatgcgcttagacacatttgatgggtctggtactcccgttaatgctgcagactggttacgcaagatggagaagtatatgaggggatctagaatgactcctgaggagaagggaagcaagaccgttgatgagtatgaacgggagttcagcagtattgtacgctttgtgcctagcgtggcaagtgatgagcgtgagaaggctaggaagttctttcgagggctcaatgctcggtatagagaagtgatgggaagaaacctgcctaccatatacctcaatgcagttgaggaggctcgagggatggaggttgagctccaaattactactgcgcagaagaatcgttctggtaatgtcactgcttcacgtccaacggagtctcagttgattcgccctgtgccagggcaaggactaatttgctttaagtgtggaaagaatcaccattcagcagagtgtgggtttactggggcatgtcgtgggtgtggcaaagctggacacatggagttggtatgtaagcgtaacccaaattctatcatcaagtggcaaaagccgagctcctattcagcaacctcttcgacagctagctatcctcgaggttcaggttcatccactagtactccccgtggtgccgttcagatgatgacaacttatccacttccttaccagcagttcacacataattacccaccaccaccattaccaggacagtattggcccatgcctcaatcttttgctccacgtgctccactccagttgcctgcaccgcctatggcgcatccttctgcttcagctccacctcaccagcaggtctcagcctctactaccccagctatggctggagtctacaacatgcctgtagcttcatcccttggtcgcccggatgtcgttacaggtacactttcagttgattcgcatgatgccctagttctgtttgattctggtgctacattttgctttgtttcaatcgagtttgcgaaaagagctaatctatttagtcaagaggtctctcgatctgtccaagtcagctctccagggggtataatctctagttcagtagtatgtccaggttgtgcaatctctattgatggggaggaatttgtggcaaatctaattgtgattcccttaccgctctttgatgtgatcttgggcatggattggttgaaccgatatcatgctgtaatctcttgtttctggaagactattaccttggaagctccatcaggcgaggagatggttttccaagggagcgcgcctccgcattctcttttcgtgatgtcaaggttatttcctgggcagcgtgctgtaaagacggggttattatgggccttagccgagaagtcatccaagcctttagtgattgaagatgttcctgtagtgcgagattatcctgatgtttttcccgcagaattgccagggatgccacctgagcgtgatgtagagttccgtattgatcttgttcctggaacacaacctatctccagagccccgtaccggttagctcgtcctttccaagaagagttgaagaaacaattagatgatctattatctaagaagttaatccgacggagtgtgtcgccatggggcgcacctgttatttttactgagaagaaggatggaagttggcgtatgtgtgtggactatcgggccttaaatgctgcgacaatcaagaacaagtacccattgcctcgtagtgaagatttgtttgatcagttaaagggagcgaaggtgttctctaaaattgacttgcaatctggttataaccaaattcgagtgcgagaagaggatattgagaagactgcattttccacgaggtatgggcattatgagtatagagtaatgtcctttgggctgaccaatgctccggcctattttatggaggcgatgaatagcatgttgcatagttttctagataatttcgtggtggtgtttattgatgatattctgatttactccaaagatgtagaggagcatgagcgtcatctgaggatggtactagagaccctacgagaaaacaagttctatgctaaactgaagaagtgtgagttctggcttcctgaagtggctttcctagggcatgtaattaatcagcaagatatctcggttgatccaagcaaagttttaagtgttgtcggatgggaaaggccgactaatgttaaggatgtgaggagttttttgggtatggcggggtactaccgacgctttgtgaaggatttctcgattatcactaaacctatgacgatgctcacacataaggatgtgaagtttcagtggacggaccaatgcgagtgtagtttccaacaattgaagcagaggctagtaactgctccggtgcttactttgccccaacctggtaaacgtttcactgtctattccgatgcttcacgagtaggccttggttgtgttcttatgcaagagggcaatgttatagcttatgcatctaggcagttaaagaagcatgagcagaattaccccactcatgatcttgagcttgcagcagtggtctttgctctcaaaatttggaggcactacctgtatggagaatcttgtgatattttcactgatcataagagtctgaaatatatcttcactcagaaggatttgaacttaaggcagaggaggtggctagagttgattaaagactatgatcttaacgttcaatacacaccgggtaaggcgaatgtggttgcagatgctctaagccgtaaggtcgttcctccaactatgagttgtttgataactgattttgaacggatggatatctcctattgttatgttggagtggcaagtaccgagtcacgagtcattcttgagtccgccataccccaacgagtgctagaggcccaacaacacgatcggttgctgcaacaagttaagaaacgtgtaaaggaaggaaaaactggagatttcactttggattcctcgggagctgtgcgattccatgggcgtttatgtgttccacaaaaagctaaagtcaaggaagagattttgcgagaagcacaccgaacaccatatactgtgcatcctggggagaacaagatgtatcatgatctgaagaagatctattggtggaagaggatgaaagtggatgtggccaagtacgtggcgtcatgtggggtatgtcagcgagtaaaggctgaacataagagtcctgctggaaagttgcaatcattggaagttcctgtatggccttgggatgatattgctatggatttcgtggttgggctacctcgaactccacgaggaaaggacgccatctgggtggttgtagatcgtctgagtaaggtggcacatttcatttctatccgcaccacttattctgcgagtgacttggcaccgatctatacacgcgaggtagtgaggttacatggtgtgcctcgctcgattgtttctgatagggatgctaagttttcttctaagttctgggaatctgtgcaagaggcatttgatactcaattgaaattcagtacggcttttcaccctcagactgatggtcaatctgagcggactattcaaactttagaggatatgttgagatcatgtatcctttcatggaaaggcagttgggaggatcatttgccgcttgtagaattttcttacaacaatagtttccatgctagcattcaaatggcaccatatgaggcactttatggaagaaagtgtcgatccccattgtgttgggattccataggggagagagctattttaggacccggttgggtacaacagaccacagaacggatagcagaaatacgacaacacatgcttgcagctcaaagtaggcagaagagctacgccgatgtcagaagacgagaattagagtttgaagtgggcgatcaagtacttctaaaggtatctccaaccaaaggtgttgtgagatttggaacgaaaggcaaactcagccctaggtatattggtccattctcgatagtggaaagagttggaatcctagcgtatcgccttgagttaccagagtccatgaaaggtgtacattatgtattccatatttccatgttgagaaaatatttgagagaccctgaacatcatattaccgtagagccgatgaccattgagcaagatttgacatttgagtctcatcctgtaagaatattggaggaatctgagagggtgctcaggcatagaactatcaagtatgtcaaggttctctggacgcaccagaccgagcgagaggccacatgggaacttgagtcacagatgcgggagaagtatccagagttattcacgtctggtgtggagggttccaacgttggaggagttgagtcggagtatcgaatgagttaa

SEQ ID NO: 78439 - DNA, 204 bp, Oryza sativa
  Clone ID: PAT_MRT4530_78246C.1
atggccctggcgatcgatcgaccattagcatcccccatcctaaccgggcacatggtcggaccggcacactgggtcccatatgtaagtgaatcaaagcggagagcgggggaggagcggtggtctgggaagggtgtcactacgggaccggcgatggacgacgcggcacaggacagcaaccagcgtcgcaacagcggagggcgatag

SEQ ID NO: 78440 - DNA, 936 bp, Oryza sativa
  Clone ID: PAT_MRT4530_78247C.1
atgccgcctagagtgagtgtttggttggctaacagaggccgcgggagaagcggaggtagaggtcgtggtaggggccaccataatgaagaagttgaaaatactcaggataatgaagaggttgggaacaactcggttgctgaatcccctattccgaatcgtggaggtcgtggtaggggccgtgctggaggccgtggaagaggtcgtggtagaggtcgccataatgaggcagcatcctcgaaccagatggaggatgagcacatggaagaggaggagggtggtagccactcagctgctgtctctgatgatgctcctcgagctgttcgggggatgacactcactagatggacatccatgcgcttagacacatttgatgggtctggtactcccgttaatgctgcagactggttacgcaagatggagaagtatatgaggggatcaagaatgactcctgaggagaaggttactttcatgccttttcagttgactggtcaggcggacatttggtgggatggagttgttgaagcgtggaaccctgatcgtggtgctattacttgggaagtttttcttcagcagttcagagctaagtattatccagattcatttagggacaagatgagtgatgagttaaacaatatccaacaggggagcaagactgttgatgagtatgaacgggagttcagcagtattgtacgctttgtgcctagcgtggcaagtgatgagcgtgagaaggctaggaagttctttcgagggctcaatgctcggtatagagaagtgatgggaagaaacccgcctactatatacctcaatgcagttgaggaggctcgagggatggaggttgagctccaaattactactgcgcagaagaatcgttctggcaatgtcactagtaatgagcagaagagagctcatcaggaagggggtgagaactcgctctga

SEQ ID NO: 78441 - DNA, 465 bp, Oryza sativa
  Clone ID: PAT_MRT4530_78248C.1
cagaggtgttcttgtgggagagctgctggaaacgggcttctaggtcggtgtaaaatttgcttacaacaacagttaccatgctagcattcgaatggcaccctatgaggcactttatggaagaaagtgttgatccccattatgttgtgattccataggggagagagctgttttaggacccgattgggttcaacagaccacagaacggatagcagaaatacgacaacacatgcttgcagctcaaagtaggcagaagagctacgccgatgtcagaagacgggaattggagtttaaagtgggtgatcaagtacttctaaaggtatctcctaccaaaggtgttgtgagatttggaatgaaaggtaaactcaaccccaggtatattggtccattctcgatagtggaaagagttggaatcctagcctatcgcctcgagttaccagagtccatgaaaggtgtacatgatgtatt

SEQ ID NO: 78442 - DNA, 162 bp, Oryza sativa
  Clone ID: PAT_MRT4530_78249C.1
atgcccacaacgacgcccatccccgccccgatgatggccccgaccccaatccatggcacgctgtatcctggtcgccgcaaggccgtctccacccgcatgaacgccaccatggagacacttgacgagcggagtggtccagcgacccctcgcagggcaccgtag

SEQ ID NO: 78443 - DNA, 159 bp, Oryza sativa
  Clone ID: PAT_MRT4530_7824C.1
gtggtgagcgggatgaacaaatgttgcacacaggcatagccatgaccagtatatcatatagggaatggacgccataccgtccggattcccggtgacccatcgagtgtagacaacagggaacagttaaattaatcatcattccctaaaaaaaaaaaaaaa

SEQ ID NO: 78444 - DNA, 363 bp, Oryza sativa
  Clone ID: PAT_MRT4530_78250C.1
atggctaggcagctcggcagccgggagcgagtggtggtgggcgatggatgggcggcgctgccacatgcggatcgggcgcatgcgacaactgtggctgggggattcgttaatggcgatgacagcgggcaatgtgggcagtggatgcggcgctggcgacgatggctggccagctcggcgcccgggagcaagcggcaggcgacggccaggctgttcagcggccaggagcgagcggtggtgggcgacggacgggcagcgctgccacgcgcagatccggcgcaggcaacgactgcgggtggtggggacggcagattcgttggcgatgactgtggatggggatgtggtgctggcgacgaaggcaggtag

SEQ ID NO: 78445 - DNA, 336 bp, Oryza sativa
  Clone ID: PAT_MRT4530_78251C.1
atgccgccgccgcgccgcgcggcgctcgccgccgccgccgtgctcctcctcctcgtcgtcgcggccgccaccgcgcaggccgtggaggtggcgccgtactgcgtgggcgagccgggggaggagtgcgtggccggcggcggcggcgaggaggcggtggcggtggcggcggcggcgaggaggaggctgcagggcggcgggtacatcagctacgacgcgatgcggcgcaacgccgtgccgtgctcgtaccgcggcgcgtcctactacaactgccgtcccggcggccaggccaacccctacacccgcggctgctccgccatcacccagtgcagaggctag

SEQ ID NO: 78446 - DNA, 638 bp, Oryza sativa
  Clone ID: PAT_MRT4530_78252C.1
gcaactatgaaaccagagacaaaattgccctcactatcccgcattcccgcattggaatggttaggttttggatcaatcctcctgttcgaatgaatcgatctccccgaccccgtcatgtcgcgcgggctcacgcccttcttgccgaacaccgccacgatgtcactgctcgccgtcgtcgagttgcgccggcccggcgacacctcccagcaggttgatgccgtcgtgagcagcgagggcgaggatgtcaggaagaacgttggggcaagatgagcctggtcgtcgccgccgtggaagactacgagggccgggccgccgtgagagggccgcaacgctggtgacgtcgagtcagggacgcgggtagcacaggagagggaggccgaaggcggtgcagggtagagaggcggcgccgcgacggcactggggtcgagcgtcgctgggcggcggcgcttctgctggggactgggagggaggcggcgggccagcggccggcaactccttgcgccgcccagagggagggactcggtctcggcgtgacggacatgagggcgtcgaacagtctggcgacagcggcgctgccaaattggcttgcggtcgtggcaagccaacttccttcctgcgttttggagctgcgggaccat

SEQ ID NO: 78447 - DNA, 464 bp, Oryza sativa
  Clone ID: PAT_MRT4530_78253C.1
agtaatcatagttagctgaagtctgtggtgtaggtgtttagcttccaaacttggttagaattttgagtttcctgcttactggcgtagtatgcttcatatttttttcctttttcttgttttgaggttgggccaggtgaggtaccccccgctctccagtaaggacccctgactgttagttctatgccaggagagtagttttggtgtgatgtgttgggacttgggagttgttcagtctttttgagcttaacctgtaaagttggtacccggcgtgcgtatggatcggagctggtgaacagagaaggaagacgcgcacattggggatgattttggagcgtgttgactgttgaggactggtaggttgctagggaaatcagctataacctggattacagcccttgtttggggggtttgttctctgtcggttggtctgcaatgtttattttaaaaaaaaaaaaaaaaaaaaa

SEQ ID NO: 78448 - DNA, 341 bp, Oryza sativa
  unsure (1)..(341): unsure at all n locations
  Clone ID: PAT_MRT4530_78254C.1
tcgtacctttttactctgcttctgacgcttattaatggacatatcaatcctgtacctggatgggagcatatgttagctggatatgatattcgtaacgcatcttctatcctagatggtgttaaattcctatctttgaacccacttatacctttggacaaaaatattatccacccaactctacaatagcctatgatgtccctgatcaaatgatggcttatgctatttatgaaacagatgtccttactactacagacatctaccaagacatttctgccatgttaactgangaaaccgaaagtgtctcttttggtattggatttagccttggtgcttggggtatt

SEQ ID NO: 78449 - DNA, 825 bp, Oryza sativa
  Clone ID: PAT_MRT4530_78255C.1
atggtggtctcgtacacgcaggagcacgtgtaccgccacccgtggcaccgggtgaccgcggcggcgtggcgcaagttcacggacgcggacgcgcgggcggcgccgctgtcgcacatcctcgaggtgcacacgctgtcccgccgcgtcgacgctggatcggggcgcatcgacgccgtgcgcgccatcgcggggcgggcgccgccgctcccgctcctcctccgcggcctcgtcgccgccgccgacgtggtgctctgcgtcgagcacaccaccgtggacgggcccgcacgggccatgcgggtgatctcccgcaacgccaacctccgggcgctggtgcacgtcgaggagacctgcagctaccgcccgcacccggagcggcccgacgagtggacgctgttccggcaggagacgagcattcggtgcgcgccgctcgctgccgtggcggcctgggcggccgagatggtggagcggcggtgcgcggagaggttcaggcagaacgcgtcccaggggagggagaggtcgggcgccagcgacgctggtgatgggcggcggcggtggggaagaggggccggcagcgtggaagggggagagcttggcggcaaggagagggagcctggtggcggcgcggttgcacgcaggaggagagaggctgcgaggcgcggcggcttggcagcgcggccgggagacggcgcagaggggaggaatcgaggtggcgccaggcggaggagggagggaagggagtggcgccgggaggagaaggacggggcgccaattggagggggcgccagcggcggcatcggctccgattgggtgatggccggctattaa

SEQ ID NO: 78450 - DNA, 690 bp, Oryza sativa
  Clone ID: PAT_MRT4530_78256C.1
atggccaccacatccgccgccacgacccccaaatccggtggcgaatccggggccccgcgtcgacgaccgccaccacaactcggatccggacgagccaagaactggcggccggtgtccgcaggccaccaagaaccgacgtccgcgtgccgccaagaactggcggcggcggcggcggctgccgcgctccccgtgccgccggtgccgcgcggctcctccacgggcgcttgtggctccgccgacgccgagccgctgcagctgcgacgcggtgaagtaagggagtgggggagggagaggggaggtgcggcggatagatccaccgccgccgctgtcgccacgacgaccggcgaacccactcctcctcctcgcgacggcggcggcagctgctcgaggtctccctcggtgaggtcgccgcggtggaggcgtctcgctaccgcagcggccggagaaggaggcgcgacgagggaggcgatgaggacgacgggaggcgaggaggacaccggagcagcagcctttcccctcctcctccgccgcccccgtcgctcccaccgtcgggaaaggcgcggcggcggaccgggaggaggcgcggcggcggactgggaggaggcgcagcggcggacttggaggggagcggcgtgggaggctaggaggcgaggaacggcgtgggagacgaggaggacgacgggagcaagg

SEQ ID NO: 78451 - DNA, 3282 bp, Oryza sativa
  Clone ID: PAT_MRT4530_78257C.1
acgtttaatggggactccctttgatgggaagatgggaactttccaagatgtctcactgccgccccttgccactcttctaaagcactgggctaagaagcctctccactccaatttgcaagaagctgctatgccacagaagaacacccttcttaaaggcattcttcatccgtagtctcaaagaaggttcaaggcccattgatgcagacccaaactgtctggtgagtcctgtggatgatggcggaggaggccaccctgagccacccgtcgcggtacgtgaagctgagcagggagcacgacgcccccgcccccgccgaggacatccgccccggcgagctcaaccagccagtccacctcgagggcaggaggtgcagcgagtgcggccaggtcctgccggaatcctacgagccccccgccgacgagccctggaccaccgggatcttcgcctgcaccgacgatccacaaacctgccgaactgggttgttctgtccttgtgttctttttggacgcaatattgaggccctcagagaggatatcccttggacaacgccttgtgtttgccatgctgtctttgttgaaggagggattgcgcttgcaattctcaccgcaatatttcatggtgttgatcccagaacgtctttcctgattggagaaggtttggtgttcagctggtggttgtgtggtacttatacgggcatctttcgccaagaacttcagaggaaataccatctcaagaattctccatgtgacccttgcatggtccattgctgcttgcactggtgcgcgaattgtcaggagcaccgtgaaaggacggggcggcttgcagagaacagcgcggtgccaatgaccgttgtgaatccacctgcagtgcaagagatgagcatggcagaaagccgtggtcctgtttcccccggtatggagaacggagcaccatcaaactcaaaggctgtgtttgacacttgtgagccttcattggtcctaagagaaacagttaattcgtctgtccatgtagttgttgaaaggaaggagaaaggaattgagccggaattctcaccagatttcaaggtagtcaatagaacttggccatttgctgactattccggagctttatttgacatacaacaactgcacactgatgatattctcaatacaggcttcatttctcaggcttctgccattgcgttcgatgtcacgtttatggggatccttgatggaagtgatttgcaagaagctgctatgccactagaagaatacccttctttacaggcattcttcatccgtagtctcaaagaaggttcaaggcccattgatgcagacccaaactgtctggtgagtcctgtggatggtaaagttctgcggcttggagaacttagaggtccaggaaccatgattgagcaagtgaagggctttttcttattctgctgcttctcttctcggtgcaagttcatctcttcatggtgctgaagaagaagatttttctagagagcatacagaacaaagtaatcccgcagattcaaatgcaaaatcatggtggcgagtatcagtggctaaacccaaattatgggatcaaactctgctgagcccaaagaaaggcatcttctattgtgtcatttatttacaccctggtgattatcatcgagttcactctcctgttgattggaacattataaagcgccgacatttctcaggtcatctcttcccccaaaatgaacgtgccgtgcggaccatcagaaacttgtatgttgagaatgaaagggtagtacttgaagggcagtggaaggaaggctttgttgcaattgcagccattggtgctactaatgttggctctatcaaactatatattgaaccagagctaaggacaaatagggcagggtcgaagatactgaactcccagcctgagcctcctgatgatcgagtttatgaacctgtaggcaccggtgtgatggttaaaaagggggaagagatagcagggtttaagatgggatcgacggtggtgatggtatttgaggcacctgtagtgtccaaggcaagatggagagaggatggcagtggcacggtaacgtcagatttcgatttctgtatcaaggctggcgataggatcaggcagcagaaggagttggtgagatcagatgaggcccttggtcctgtacatgaagaagaagaagaagaagatcgtcggaggaggaaagaagtcggagatctgggagggatgcggttggatcggaggcggagcaggaggcgtaaactggacacggtgggcattgtggcgcggctgtctgagtgcatcgcctcgcgtggtggcaacatccacagtgtcgatgtctttgtccctgacgacaaacccgtcttctactcccgtagtgagtttacctacaatcccatgctatggccgcgcgatgtgcttcgcaccgacttcctcaatctgtcacaacacttcagcgcacaaagatctactgttcgagtccctgatcttgacccgaaatacaagatatctgtactcgcttcgaagcaggatcattgtttgtttgacttgctctatagatggcaagagggaaggcttccggttgacatcaattgtgtcataagcaaccatgatcgacttaaagataaccatgtcagacgtttccttgagagacatgggatcccctatcattacctaccgacaagcccaggaaataaaagagagcaagagattttagaattggttcaaggtaccgattttgtggtactggcaagatatatgcagatattatctgaaggctttctcaaggcttatggcaaagatattattaacatccatcatggtcttcttccctcatttaagggagggaatccttcgagacaggccttcaacgctggagtaaaattgatcggcgcaaccagccattttgttaccccagaacttgatgctggcccaatcattgagcagatggttgaacgggtgtcccacagagacacgctacagagctttgtggtgaaatctgagaacctagagaagcagtgcctagcagaagctataaagtcgtactgtgagctccgtgtgctaccatatgaattgaagaagacagtagtgttctgatatcttttgaaggaagcgattttgtttgtttgtttttatttgttgataagaggaaattactacagtacaaaattttgtggtgttgattgctttggtgataaggaggtgggtgtgtgggcgtggctggacagtgcattttgtaattgattgagtataacaatactccaaagcaaataaaatgataatgcataatagtagtaattggt

SEQ ID NO: 78452 - DNA, 396 bp, Oryza sativa
  Clone ID: PAT_MRT4530_78258C.1
ggatggagcaatggatctcggcgcccctgacccgaactgaatctagcacacagcagctcaaaagcgatctgcatcccgtggtccaagctctgatctatgcgtgggtgatgagccccatcgagcttctgttattcggactcgaagctctgaattatttagggaggtttgaaccgcctttttgctatttgctgcaacctgcaagttctataaatttgtgttcagtcatattcttgttcttgaccacttgagtcttcttatgcagtaaagtagcacaaatctgtccatgataatctttttagtgagttttccgttcaggagctttgatatcctgctctgttcaacaaagcaactaaaaatgtgctgctctattcataatgaatccatcctagggatttt

SEQ ID NO: 78453 - DNA, 871 bp, Oryza sativa
  unsure (1)..(871): unsure at all n locations
  Clone ID: PAT_MRT4530_78259C.1
tcctgtcaaaaaaatcacccactctttgcccggcacgtgtgccctccccggccatgggagcggccatgctcctcgctcccatgcctctcctcctcctcgcctccactcccctcgccgccgtccacctccccacccgctgccgcctccgcctgcagctcctctcccgcgccgcgcccgaagccgcctccgccaccaccaccaccaccaccgcgcccgacaaccacttctctgtcgaggaatacctcatctccaactgcaatctcacccagccacaggcccacaaggcgtccaagagcatcgcccacctcaagtcccgctccaaccccgacgctgtcctcgccttcctcgccgacttcggcctctcccccaaggaggtcgcggccattgttgcctccaacccgcgcatcctgtgcgcccgcatcgaccgctcccttgcacccatctgctcggagctccgcgccgtcggcctctccccctcccagatcgcccgcctcgcccagatcaccggccgctacttcctctgccgcagcttcgtctccaaggtgcggttctggctccccctcttcggctcatcggagaggcttctccaggccagcgactggaactactggctcctcacctccgacctcgagaaggtggtcgagcccaacgtctccttcctcaaggaatgcgggctaagtgctcgtgatatttccaagctgctcgtggccgcgccgcggcttgtcaccatgcacccggattacgtcaaggacgccgtgcggcgtgccatccagctcggcgtggccccgggctccccagatgttcggcacgcgctctccaccgncggctgcatcggccaggacaagatcgacgccaaggtcgccgtcctgaa

SEQ ID NO: 78454 - DNA, 1154 bp, Oryza sativa
  Clone ID: PAT_MRT4530_7825C.1
cacttattagggtcgagattgggtcagccgctcgagcgggcccaccacccacccggccgcctctgcctctctctctctctctctccaattcctcctcgcctcggttgtttcgtcccaggaaactcgattctgcttctgaatcggattttcccagggatttcgccggcggctaggatcgggtcgggggtccgccatggccgacgtgttcgagggctacgagcgccagtactgcgagatctccgcctccctcgcccgcaagtgcaccgctgcctccgctctccaaggagagaagctgaagcagaaggcgtcggagatcaagtctggcatcgatggggccgaggcactgataaagaagatggatcttgaagcaaggaaccaacagccaagtgtgagggctgggctgctggcaaaactgagggagtacaagtcagatcttaacaacctgaaaggaacgttgaagagggtcaccaccggtaacgcgcagcaagggtcgagggaagagttgctggagtcaggaatggctgaaacgttgggggtatctgctgatcaaaagtcaagattgctcaggataactgaaaagcaaaataaaacaaccgataggatcagagatagccacagaactatgctggagactgaagatcttggagtctccctcttgcaggacctgcatcaacagcgtgaacgtctaatacatgctcatggcacattggataacgtggatgacaacatcgggaagagtagaaggatcatgggtgccatggtgaggaggatggacaggaacaagtggatcataggtttcattatagctctccttgtgttggtgatcctagtaatcctgtatttcaagtttgtgcactgaagggactccttgaccatccaaggactgatgaactgtgtgcgttctttgcatattcgctctttgtcctatttctttttttgggtttggacgaaaccactttcatgtggtggttgtgaatgtgttttggtcatgtaaaaaaagtgagaaggttttgagtatctgatagtttcatggatcaaatggattttcatttataattctggacagctcaaataaatgaccaattttgtgcatcaaaaaaaaaaaaaaaaaaaaaaaaaaaaaaaaaaaaaaaaaaaaaaaaaaaaaaaaaaaa

SEQ ID NO: 78455 - DNA, 2310 bp, Oryza sativa
  Clone ID: PAT_MRT4530_78260C.1
ctatttcgcagatgattctgctggtgatctcccatatagctggaacagcaaagaggatttcaacatctgaggttccctctcaagtgctgcgatcacatccttcaccgtaatgctccgggtcacttttacgtgtgatgatcttctaacaccacctgtcttttcaatttcctgttgttctcttgaaccttttccaggtttcggtgaagacgtacgaggcaacatgttgcctggcatggaaccagaagaaccatcaccatcacatttgctcttctttttttcagccatgaactgccaccttgaaagcatgtcatctccgcctgctgcaactcgtgcagcagcatttgcagctgttgttctcgttttatcatcttccgccttataggtcttagcatgctttgatgtgctacgactctcattcttgtccttctctgaatcaaccacagcattgtcatctccatcactctgtttcctgattctttcagcatcttcggccagctttttgtcccactgttctctagcttctctgttcaccctcaaaatgtgactacgaacatctgaagacaaaggataaattcgatgtcttgatttttcaagatcaaccctcatcgatagacatcgctccacgtcactgcctatgctcttcaaattgcatttcctcaccttttgtaggatgagtttttcttcttcaagttgtacgaccatccgagcagcttctgaaactcgactctcctcctttggagcagagaaaagttgctcctcttcttccctcagattaacaccactaactgcagtaacatcattcagctggtcaatactttgatcatgataacctccggatgtcttctgctttttgctagatggtggaggggatgagcctaaagcgtccaaaggtttcttctgtccagcagatgccttcttttgaggtgttttagaagctgctgcagggggaggtgtttgtgtagcaggttggatcttatttgtgtgttctgttggagggaaagatttagttttctgctctttgtttacttgttgccatggagatatattagtttgcaacgttggtcgtgctgccatgctcccagtcactgaggtaacagctccctggactaattgtcctctttgactggaatctgccatttgtggtctaagtggtacaattggacctccaactggtcgtggcaatggacgagcatgaatattatttgacccaagcacaggtaaagatgtttgtggatgctgtgttgcttgccctggggctgattgtatattgtgtggatggctgagcatatgcccccctttcacatctgacatgttactagattcattaaccttttgcaaattgctttctgaagatggatagcccatgttactttgcatttggcctgacaaagaaggtcggaaaaaaggtggtcttgggctgtcactagcttggtttgcaggaatggaatgagctgacggatatgatttgtgctcaactcctgacgtagaaccactgggaacattctgctgattggaaacttgacttaacaaagaatagttgcttggatttgtctgtggattccgttgcccatgagcagcctgagcttgatattgtgcagcagcttgtttgagcaacttatcgccaacaatagtccttacaactttgagaaagtgttccttgctaacttcatttttcagaatactttgttgagaactgtttcctggctcttgcttaacctttggctggtcttgtttattatcagcacccccagataccagttcaggcctagatggctgctcatttgaatgatgcaaatgtttctgttcctgttgttggttctcctggtttccaatttcattctttactgaaccctgccactgttcatgattgtgggtgaacattgaattgctctcctgaggcacaagaccggcgccgtgatccagcggctgggaggaggaggccgcggcgctggtgctcgcgccgccgctgccctccacctcgcggttgagcgccgccgtgaaggcctcgacgtcggcgcccgagtgcatggtctcgtccacgtcgtcgtcaaggagctttatgaggggatccatggccggaggccgcctctctccctccttgccttgccttgcctcgcctctgcccttgtcggcacaccactgcatcgccgccactgcctctctattccagccgccgcggcgcgcctcatcggtcctgccccctaacagctgcgccgccgcctctccccggcgagtctcctccccagtcgtgccgcctatcctcagccaaaccctaggcaccgagccggccgcatcgatgcgtacagccat

SEQ ID NO: 78456 - DNA, 503 bp, Oryza sativa
  Clone ID: PAT_MRT4530_78261C.1
agctttttgtcccactgttctctagcttctctgttcaccctcaaaatgtgactacgaacatctgaagacaaaggataaattcgatgtcttgatttttcaagatcaaccctctgttttgaaagtcttattgtattgcttatgaatcctcgtaaccgctcttcaacacacatcgatagacatcgctccacgtcactgcctatgctcttcaaattgcatttcctcatgatctctgctaatttttttttcagaggacccttttgtaggatgagtttttcttcttcaagttgtacgaccatccgagcagcttctgaaactcgactctcctcctttggagcagagaaaagttgctcctcttcttccctcagattaacaccactaactgcagtaacatcattcagctggtcaatactttgatcatgataacctccggatgtcttctgctttttgctagatggtggaggggatgagcctaaagcgtccaaaggtttcttctgtccagcaga

SEQ ID NO: 78457 - DNA, 460 bp, Oryza sativa
  unsure (1)..(460): unsure at all n locations
  Clone ID: PAT_MRT4530_78262C.1
attatatagcactagtatgcgtagnggaaaaaaagagctaactacacaatcaggtatcagctctacataatgagcttgatgctgtttattatatcatgcctgacataggaagcgattacaatattattcatgagataaaagaacacatatgcacactattctcgttaaaaaaaatggctgatgatggcggttcactagtgattgttaaatcctgcaaaaatgatttatcaaccaatcaaacccatcgcttggtattagactcatcttctatcaaccattctactcaatacaatgcccccaagagcacaaccaaaattgaacactgcaactcgaaatgcaatggttatactgcaactatttcgcagatgattctgctggtgatctcccatatagctggaacagcaaagaggatttcaacatctgaggttccctctcaagtgctgcgatcacatgcttcacc

SEQ ID NO: 78458 - DNA, 162 bp, Oryza sativa
  Clone ID: PAT_MRT4530_78263C.1
atgtccatgaacccacgcttccggctgctggcggcagcgaccgtggctgccattgataccggcgatcggaggggaaaggcgaaaaagccttgggaactcgagaagaagcagaactcgagatcggagagcgtgcgagtccgattccgaagcgcaggccgctag

SEQ ID NO: 78459 - DNA, 408 bp, Oryza sativa
  unsure (1)..(408): unsure at all n locations
  Clone ID: PAT_MRT4530_78264C.1
cggacgcgtgggcggacgcgtgggcggacgcgtgggttgcaaggttccagctgtctgaacaacagtactctgaactatatctgtaaattttaccagctgaagtatctgacactcagaaagaccaatattggcaaattaccacgactaattggaaatctgaaatacctggagacactggacattagggcaacgcgtatcaagagattaccagccagtgcaagcaacctcagttgtctcaagcatttgttagttgggcacaaggtacaacttacaaggacaaccagcgtgaagtgcttccgaccggactcaggcttggagatgacggctggggtggttaagaacatgatggctctgcaatcacttgcccatataggggtcaaggagcggncagcggtgctgagtgaaatg

SEQ ID NO: 78460 - DNA, 396 bp, Oryza sativa
  Clone ID: PAT_MRT4530_78265C.1
aagaaatgaactgttgtacatatgctgctacagcacctagcttcatgtgtggttagatgacttcactgctctctcaggagcaggaggatctctagctgggccactgactgcgggtgcagaagaggcgtgacattagcaggggaaatgaaagcggaagcgagaagaatcctgcagagtaggtcacaggcgcgaccaacaccatcagactgactgctcgatccagccacgggagctacgaaagaaaggatacgggggctaaaagcgtccaaaactaccacaggaggtgttcactctggagggacggaccacttgcatcgaggtgtgcctgctgctcctgcaacggaatctatcgagatgattatccggctgagagaagactgattgcaaggatgcatg

SEQ ID NO: 78461 - DNA, 413 bp, Oryza sativa
  unsure (1)..(413): unsure at all n locations
  Clone ID: PAT_MRT4530_78266C.1
tagtagttgtgtgagcatgttttcgagaattctgtatgtgcatgtatgatctatgctgtgccagcagttgaatttcctggtatcacttgctgctatttgactgctgaactactgattcgttcgttagggcgttcgattgggcacaagttatgcttaaaattgataatggtgtattttggcatgtacttgcttgtgccgcatgataaactttgttttgctcctgatacatgcgtaagcagtgagctaagcatgcaaaagtgaacttggagttaggagtggctgcatacatatgcaccatgcgatgatgtattcggtatgacttggggtattctggtagaaccttgtcacattctagtgcatttcttaactaaaaaaaaaaaaaaaaaaaaaaaaaaaaaaaaaaaggggcggnc

SEQ ID NO: 78462 - DNA, 1482 bp, Oryza sativa
  Clone ID: PAT_MRT4530_78267C.1
atggtgcgtgagttccaatcgtccaaaacccccacgattctgctaaaactcgacattgcaaaagctttcgactcgatcagctggccttatcttctagacaaactcagatatttggaattcggagacagatggattggatggattatttccattctagcaacgtcctcatcaaagatcctcctaaatgggaaggcaggaaacagcttcttgcatggacgaggattacgtcagggagaccctctatcacccatgctcttcattcttgcgattgatcccctgcaaaagctccttgccgcagcacaggaagcaggatttccactccacatcaggaaactcagaaaatcagatgttcaacctctcatcgataggttctcagctaggctcccaacatggaaaggaaagttactaaacaagactggtcggacggttctgataaagtctaccctctccgccctcccgacctatcacctcactgttttcccccttaaaaaatgggctgaaaaaaagatcgacaaaattcgtaggggcttcctctggacagggtcagaacaggcacaggggggacactgcctagttaactggaagagggaatggaccgccgtcgacaagccttggcagggatcgagtcttccttgtgatgaaacagacaagcagctgttcagagcttcgaccacgataacccttggaaatggcaacaaatcaaaattctggcatgacagatggttgaacggatcacccctgaaagaactttacccttccctctatcagttggccacaagaaagaacagatcagtggcacaggagatacaagggaaccattggttgaaacagatgagacgaatgaataccacaacacaggttagggaattcatccttctatggcaccaaatccaacaagtggagttgcaggaaggaatagacgatgcgatagcttggagatggactccaaatggatcatattcagcaaactccgcctacaggatccagttcgttggaggcatacaagacaataggtctgatttcttctggaaggcgaaggtagaaaacaaatgcaaattctttggttggctcatgattcacagaaagatcctcacagccgacaaactccagcttcgtggatgggacaacagccacatttgtcctctgtgtggagtagaaccggaaacagcaacgcacctcctcatggaatgcgcctttgctaaacaggtatggagacagatatggctaaaggcggggctccacatgcctgtggcttccaccttcgatggagatatgctacgatggtggtcaacctgcagaagagagatggccaaagaacaaagaagaaattttgatggcctcttcatctgcacagcttggggcatttggctacagcgcaatgcaagaatcttcaatggcacttatagcacagtgatgcaagtggttgattcaattatcgctatgtgcaaagcctacgtcggagcgcatgttctagatgagtag

SEQ ID NO: 78463 - DNA, 1643 bp, Oryza sativa
  Clone ID: PAT_MRT4530_78268C.1
gaagcaactagaaagggagtatgggcactactcatctagaacatgcgctccaacgtaggctttgcacatagcgataattgaatcaaccacttgcatcactgtactataagtaccattgaagattcttgcgttgcgctgtagccaaatgccccaagctgtgtagatgaagaggccatcaaaatttcttctttgttctttggccatctctcttctgcaggttgaccaccatcgtagcatatctccaacgaaggtggaagccacatgcatgtggagccctgccttttgccagatgtgtctccatacctgtttagcaaaggcgcattccatgaggaggtgcattgctgtttccggttctactccacacaaaggacaaatgtggctgttgtcccatccacgaagctggagtttgtcggctgtgaggatctttctgtggatcatgagccaaccaaagaatttgcatttgttttctatcttcgccttccagaagaaatcagacctattgtcttgtatgcctccaacgaactggatcctgtaggcggagtttgctgaatatgatccatttggagtccatctccaagctatcgcatcgtctatgccttcctggaactccacctgttggatttggtgtcatagaaggatgaattccctaacctgtgttgtggtattcattcgtctcatctgtttcaaccagtggttcccttgtatctcctatgccactgatctgttctttctcgtggccaactgatagagggaagggtaaagttctttcaggggtgatccgttcaaccatctgtcatgccagaattttgatttgttgccatttccaagggttatcgtggtcgaagctctgaacagctgcttgtctgtttcatcacaaggaagactcgatccctgccaaggcttgttgacggcggtccattcctgccaaagccagcggagtcttaaagagcgaccaaaaagttcgaggtttgttataccaaggcctctcatgtttttatggtctacagactctcttccagttaactaggcagtgtcccccctgtgtctgttctgaccctgtccagaggaagcccctacaaattttgtcgatctttttttcagcccattttctaagggggaaaacagtgaggtgataggtcgggagggcggagagggtagactttatcagaaccgtccggccagtcttgtttagtaactttcctttccatgttgggagcctagctgagaacctatcgatgagaggttgaacatctgattttctgagtttcctgatgtggagtggaagtcctagataggtacaagggaagtgtttcatctgtgccgggaaggggtagagaatatcctgtaagtcgagggtgtcacatctaatggcatagacttcgcttttcgataaattggtcaccatgcctatcgcgaggccgaaattttgaattatcatttggaccttttggagttcctgtttatctggtctaaggaacactacagcgtcatctgcatataaggccatattgaaacgagcagtccgcctgtggagcggttggaggagacctgcttcctgtgctgcggcaaggagtttttgcagaggaaagccctaaatcgtaaagaggaagggagaggctggcctgccgatgtggggtccacgt

SEQ ID NO: 78464 - DNA, 405 bp, Oryza sativa
  Clone ID: PAT_MRT4530_78269C.1
atgggcaacagaaacgagcagcaggaggaggagcagcggcgggcgagggtgccggcgttcggcgagtgggacgagatgaaggccgccggcgtgctgccggactactccctcgacttctccaagatccgcgccgtccgcatgcagcgcaaggagggtgggcccctcaccacctggtcctccaccgccgccggcggcgtagaggtcggcggcgagacggagcggcgctcatcgtcggccgccggcgtcgtcgtcgacggccgtgatcgccgccgccgccgccaccgccaccgccgacacagcagcgacggcggcgccgacctccgccggccgctccggcacgaccgtgctgcagctcccaaggagaggagcaagctgggctacctgttctgttgcattgctggatga

SEQ ID NO: 78465 - DNA, 291 bp, Oryza sativa
  Clone ID: PAT_MRT4530_7826C.1
atggatccgacgcccttcgcccaccgccctccaaccattcgctgtcatccggcgtctatcgccgtcactattggatgcaggccgctgccccggcgtcgactgctctcactattggatcaaggccgtcaaccaccgtcgggcgtcatccactgccacggccgcccgccgcctgatcgagcaggccaacacccatctccaacgcctgcgaggcatggtcagttgcatacactggccgttgtagaggctgaatgcatcatcgaagctgggaacgtggttgaggggccgatgtga

SEQ ID NO: 78466 - DNA, 768 bp, Oryza sativa
  Clone ID: PAT_MRT4530_78270C.1
atggacttgtccctcgtctgctggaaactggaaatccttccacgaagtgcattggttttgtccatcgggaagaacttcgagaggaatgctgtagagcatttgtcccaggtgtttgatgtggtccctagccttccccctcctctcccacctctgcccctagccgccccgagccgcgccatcgccgcctgccgcgcgcgcctcgcgccccaagccgtcgcgccgctgtcccgccaccccgcgcgcccacgcgccccgtcaccgcccatcccgtcaccgcgcgtcgccgcctcgcgccccgagccgccgtgcgccgtcgccatcgtcgcctgccgccgcgccaccgtcgccatcgccatctcattgccgcggccgcgccgtcgccgtcgcgtcctgccccccgccgcgcgtgcatcttattgccgcctcgcgccgggcgacaccactgccgcgccgtcgccatcgaagtcccctcgccgcgcgcggcccatcccggtgccgcgcctcgcgccgtctcgtcgcctcgcgccgcgagcccgccgcctcgcgccccgtgccgtgctgctcccccgagccccgtgccgcgctgctcccccgagccccgtgccgccgctgctactgcgccgcgccgcccgttccatcgcctcgcgccgtcgccgttcggccgtcgcgtcgccgctgccgctcctcgcgccccgcgccctgccgcgccgcgtcgccgtcacatcgccgcgtcgagccccgcgccacgccaccccgccgacgccatga

SEQ ID NO: 78467 - DNA, 298 bp, Oryza sativa
  Clone ID: PAT_MRT4530_78271C.1
cttccgttattcgtgatcacccattgaataattcgccttgcataaactaaaagaaataaggcttgcttcattacttaccttaaagggaagccttgcactccagggaacctagatccccctatcaaaaaggcccatccctttgattaaatacctgcggttacttggccgctgggtttccaataaccatgtcctgatgttccctcaaggaattgtaattgaagtgggccctcgccagcttgacttcctcctttttgtacagagttgccaagggtgtgaattccggcagggaacaattttt

SEQ ID NO: 78468 - DNA, 183 bp, Oryza sativa
  Clone ID: PAT_MRT4530_78272C.1
tcgacgaggctgctcgagctcgaagacgatgaagatatggaggtcgatcaggcgtgcaaggacgaagctagcagctgcgtggtgcgcgcttgcggcaacggcggtgacaatcgaccggcgttcacgcgcgcgcgccgctcccccgtcactcccgcctcccggatcactctcactcccagctag

SEQ ID NO: 78469 - DNA, 366 bp, Oryza sativa
  Clone ID: PAT_MRT4530_78273C.1
atgagggagcgacgggcggtggcgtcggcgtcggcgtcggcggcgactggcggcggtgggcagtggtggcacggtgtggtgagcagtggtggcgtggcacgatgcgtgagagccgcggacggcagcggcagcggcaggcgcgcgtgccgtggtggcgcacaggctgtggcggttcgctggcggccctccagcggcggtaggcggtgcatgggaggcgtgcgggcgggggcgcaggggcgagcagcggtggcccgtgggctgccaccaacggtgacgcgcgggctgagcgatggcgatggcggcggcattggagttggagttagtagctgggagctagagtttagagtcctaccaaacggggcctaa

SEQ ID NO: 78470 - DNA, 385 bp, Oryza sativa
  Clone ID: PAT_MRT4530_78274C.1
gtccaacctatgctttcttatattgatgaatctacaaggggatacgaacagtgcattggaacgggatctcagaagttgcaggaccttgttgagggacgtccctagcattgatagctgaagtcataagaaacttctacagtccatagcaaacacgcaattgcttgccatccaatgattgatttatttagtgactcattatacgccccgacaacttaagagggtgccgacacattattaaccattcgggtgatgcatggtttgccgggagttaatgcaccaagctcaactcctttgttatgcttgagcctctgagcctttttttttgaaaagctataagcatttgctagaacatcatgtgggggaacacggcagatggaactctttt

SEQ ID NO: 78471 - DNA, 379 bp, Oryza sativa
  Clone ID: PAT_MRT4530_78275C.1
gtccaatccaaggatgtcttctaggtcaagcagctcctcccgcaacagcaacagtgtcaacatggactcagagtggagcaaaaaggagaacaagctgttcgaggaggctcttgcctactacggcgagggcgcgcctgacctctttcacaaggtgtctcgcgccatgggaggcaccaagacagccgatgaggtgcgccgccactatgagatcctcgaggacgacctcaagctgatagaggcaagaagagtcccgttccccaagggtggaagcatctgagcatggaactgatacgggtggaagcatatcaggttccagacaacacgaaaaaaattccaatataaattatattccttgctagctgaggctaaactactgaag

SEQ ID NO: 78472 - DNA, 480 bp, Oryza sativa
  Clone ID: PAT_MRT4530_78276C.1
atggctagagatcggagcagattaatcgaccgcctccggaacttgccaccatcagatccattattagcaagtccagattccataggaacgactccggcgacctcagtcaaaacaggacattgcacgaagatacgggaaaaagcccaagaatgggtggaacccaacactatactggctaaactactactagtaggaaggggcttgacccctctttcagccatcactggcagtgagctgccggaaccgagaataatggagaggacaaggagacacttagagagggacttagaggtgtggaggatcagcaaggaggtccaagtcaatatggaggcccaaaccaagtcaacttcaaggattagccttctcggtgaggtcaaccgggtttcgacacgtacggttgataaccagagtagacgtggtgctgcggttgcggggctcaagagcatgttcgttcagaagccagatcaatttgtgctgtga

SEQ ID NO: 78473 - DNA, 522 bp, Oryza sativa
  Clone ID: PAT_MRT4530_78277C.1
atggtggcgtggcaaaagctggacaacactgccacaccatctgcgcgtggtgtcacaaagccgatcgctcctgtgacgccgtgtggcaacaagtacttccttctcatggtagaagacaagagacgctacatgtggctcacgctgctcctatccaaggctgcgatcaatcgattcaaggcgtctgcgaaggttgaatccggcgacgcctcaaggcgctgcacaccgattggggcaattgtccctgccactgtgtcgaacaccttcggtgcaagttggtgcggagccggaggcagtagaacccgatgggccggcacggacgcgagattcgcctcgccgcctcctaacttggaagagaaccttggtgttgatcatgacgatgacacgcccctccgtttccacaccgtcgatagcctactcggtgaggcagcggctccggggttcgcgatccgtgagctcgagatcaccgaggagcttctcctcagtacaccgacgaacccacaagcttcaaggaagcgaagctag

SEQ ID NO: 78474 - DNA, 274 bp, Oryza sativa
  Clone ID: PAT_MRT4530_78278C.1
aaattaccccagggaaaacccccttttttttcatgtagcggggaaaacccgggctgtttttcctttttaaacagaaaaaaaaacgtttccccgggtcaaactttggcccttagaaaccccccttcccgtttttttttccccctcccgaccggggccaaatgacaaggggggaaaaccccccagattccccgatcccttttgcaaaaaaccaactttccagaggccccccccctccctgggggggttttgcccaaactagggccccctcgggcca

SEQ ID NO: 78475 - DNA, 1326 bp, Oryza sativa
  Clone ID: PAT_MRT4530_78279C.1
atggagaagaaaaccaaaaagaagaaccctagcaagagggggagaaaaagaggaggaagaggggagggaagggagaagaaagtggaggagatcagcagcagcagcagcagccgcggccgcggccgccggaggatggcgccggtgaagaagtccaagaaagggaagcgcaagtccaaggactccggcaagctcaagatcgtcaagtatggcggcggcgcccctcccctcccccccgagctccgcggcctcgacaccgagtggtggtacaccttcctccacaagcactccgagctaggtctgagcgcgccgtcagatgagggggaggcgttcaggtatttcttcaggacgtcgaggaggacgttcgactacatctgctcgattgtgagggaggatttgatctctaggccgccgtcagggctgatcaacatcgaggggaggctgctcagtgtggagaagcaggtggcgattgccatgaggaggctggcgtcgggcgattcgcaggtgtcggtgggggcggcttttggtgtcgggcagtccaccgtctcgcaggtgacttggaggttcatcgagtcgatggaagagcgggctcggcatcatctggtgtggcccgggcaggagaggatggagcagatcaaggcgaggttcgaggccgagtccggtctgccgaattgttgcggcgccatcgatgcgacccacattatcatgacgcttcctgctgtcgagtcgtctgaggattggtgcgacccggcgaagaattacagcatgttcctgcaggggattgttgatgatgagatgaggtttattgatattgtcactggttggcctggcagcatgatgttttcgcggttgctgaagtgctctgggtttttcaagcactgcgatgctgggactcgcttggatggccctgtcatggtttcagcagagaatggagaaatcagggagtacattgttggtaacaattgttatcctttactcccatggcttatgactccctatgaaggggagagtctgtctgctccaatggccagctttaatgctaggcagaaggctgcaagaacgcttggaccaagagcactgtcacggctgaagggctcctggaggatcttaaacaaagtcatgtggaggcctgataagaacaagttgccgagcataattcttgtctgctgtttgcttcacaatataatcatagactgtgaagacgaactgcttccagatgtacaacttccagatcaccatgatactggttatagtgaagagaagtgcgagcaagtggatcctaatggcaagataatgagagatgtcattacaggatatcttcaaatctaa

SEQ ID NO: 78476 - DNA, 1408 bp, Oryza sativa
  Clone ID: PAT_MRT4530_7827C.1
atggcgtggacctcgattggctcggtgcagcagggtcgccggtggcgcggggcttcagcagagagtttcggggaggcagaacaaagcatagggatcgagttcccccggaacttgatgacgaattgtggacgaggggcttgggcggtagttgcacaggagggcggctggcgggcgcgcgaggccgccgtggggcgtgaagatggcccccgccgcggcgtcgaagtcgggcacggagacggcgaggtgagcggtggcgaaggaggagggaggcgaggggtggggcggggacagaaggggatgaagttgagggcgcggcggacggtggaggcggcggagtatgtggcgcaggaggaggcgggagagaaggcctacctagtggcgcatggtcgctgttgccggcggcgcggggcggatggcgatggcgacgtcctcggcgaaggaggcggagaggccggcgtcggtgatgaggcagcagagctgggactcgaagtagggggagtaggactgacgggagccagcgtggcgcgcgcttccccatcaccggagaccgggtcggcggcgaggcggcggaggaggcgaggactagctaaacctttgccggccgctctccgagccaccgcccgctctgccaaccgctcgcccggtcctccggcaggccagtgcggcgggcgcaactgccgccgccgctccgccctcctcctctcccgcctcgccccggcgacctcccgcgtggtcgccgccgtgtcgtcgccaacgcggcgctcccccttctcgtacaggctgcagctggtgatatcggtgctgatcccgacgctgcagcagctcaccggcatcaacgtcgtcatgttctacgcgcccgtgctgttcaagaccatcggattcgccggcgccggcacggcctcgctcatgtccgcagtcatcaccggcctagtcaacatgttcgccaccttcgtctccatcgccaccgtcgaccgcctcggccgccgcaagctcctcctccagggcggcatccaaatgatcttcgcgcagttcgttcttgggacgctgatcgccgtcaagttcgggacggcgggcgtggcaaacatctcgcggggttacgccatcgtggtggtgctgtgcatctgcgtgttcgtgtcggcgttcgcgtggtcgtgggggcccctggggtggctggtgcccagcgagatcttcccgctagagatcaggtcggcggcgcagagcgtggtggtgatgttcatcatggcgttcaccttcatcatcgcgcagatcttcctgatgatgctgtgccacctcaagttcgggctcccctccccttccccgccgttcccatccccaccctcgccgccgccgccgcccacctcgccgtctccacgccaacaccgcggctgggccatcttcgcgccccacg

SEQ ID NO: 78477 - DNA, 1692 bp, Oryza sativa
  Clone ID: PAT_MRT4530_78280C.1
atggcgcctcaggcaaccatcttgagagggccagggaagacggagtatccagggcgctcggcaggagatagacacactgtcgaagataagcgcccgggaggatccggcggcaagcaacagaaggagaccaagggtgacgacccttcccagcatatcacgaagatcccggtccatagagatgatcgaggaggatacaaacgccacggcgagtcaatcgaattcctgcgtgactggcgtcataagaaggagagaactgctcgtcctaacagacttccattgccgaaatcttctaaaaagggtctgcgtattgaagattctccacaccccgagctggaccgcaccatgcgtgagaagcgaggaaaaaaccccgtagtttatgagagggtatcatccacggagtcttcaagcgatgatcgtcgccgccgccgccgctctgtggttcccgacacggagcttgatgctgtccagttgagtgactcctcctcctcttcttcttcttctgatggcactagcaaggcaactgcattgggtggacttaaagctactgcctcttccgatgttgctccggtacctattgacgatgtaccttcagttgtgccggctgctaatgctcctgtccgctcttctccggtgatgccggcggctgatgccgcttcagctccgggatcctcgactcaaaagcatcaagaaggcaatccatccgacacagcttgccagatgaacgagttgatggagaagacgtcccgttaccttgctgagttccggacgggcgctctcttcttcagtgaggcggccgggcagatgagggcgtggcgacaggcggcggtgcgggcacagcggcgtgcggggaagaagcgggagaggggagaggaggcgggcgcggcgtcgggcggcatggagcgagcgcgccagcggtggcgggagagggggagagaggcggctgggacggcgggagtggcgggcagggcagcgggcgagagtggcagcggagcggcggcgctcgtcatgctccagctcttcaccaccggcgttgtcgtcgtgttggttgacctccacgagcgtggtaggcggagtagtggtgggcggagggcggcgagcgattacgatggagcggggggcttggtcggcgagcgggggggagggggggcgcaagtgtggcggcggagcagcggcaagcggtcgacggcgacctcttcgctgatgcggagcgccaccccttctcccgccggcctcatctccgcccttgaagacaaggttgataggctcctcgtcgtcgtcgccgtccccgggcctcgcccacggcgacgacgatgggggagagccgatgacgacggcggccacggcaagcggctgctccgcccgcagcctccgctccgccgccgcgctccgctgcctccgctccgccgccggacggccgcgccgcgtagcctcgcccacagcgacgacgacggtggagagccgacgacgagggcggccacggcgcgcggctgctccgcccgcagcctccgctccgccgccgcgctccgctgcctccgctccgccgccggacggccgcgccgcgtcgcctcgcccacggcgacgacgacggtggagagccgacgacgagggcggccacggtgcgcggctgctccgcccgcagcctccgctccgccgccgcgctccgctgcctccgctccgccgccgaacggccgc

SEQ ID NO: 78478 - DNA, 657 bp, Oryza sativa
  Clone ID: PAT_MRT4530_78281C.1
atggctggaaaggcagcgggcgagagcggcagcggagcggcggcgctcgtcatgctccagctcttcaccgccggtagcgtcgtcgtgttggttgacctccacgagcgcggtgtggctgcggagcggcggcaggcggtcggcggcgacctcttcgccgatgcagcacgccaccccctctcccgccggcctcatctagtcatctccgcccttgaagacgaggttgatgggctcctcgtcgtcgtcgccgtccccgggtgggagcggcggcgcggggggctcgctcctgcacgggttgaaagcctcgcccacggcgacgacggcggccacggctcgcggctgctcggcccgcagcctccgctccgccgccgcgctccgctgcctccgctccgccgccggacagcctcgctcacggcgatgacgacgcctccgctccgccgccgcgctccgctgcctccgctccgccgccggacggccgcgccgcgtagcctcgctcacggcgccgacgacggtggagagctgacgacaacggcggccacggcacgcggctgctccgcccgcagcctccgctccaccgccgcgctccgctgcctccgctccgccgccgaacggccgcgccgctttgcctcgctcacggcgacgacgacggtggagagctga

SEQ ID NO: 78479 - DNA, 255 bp, Oryza sativa
  Clone ID: PAT_MRT4530_78282C.1
atgaccaatctttatgaccaaaaggaagttctcaagtactcgaccacctcactgtgcagctcaggttctatattttggatgtcagtaggaccagcctatgtgagagttctgacaaatgttccattttccatgacaagctccttcagcccagtggtctacaatttggtgcctctgaaacaagtgaaccttcatctcccagaatcagaaaattggtatcttcaaaacactgttccaaatgttcaatttatcttataa

SEQ ID NO: 78480 - DNA, 903 bp, Oryza sativa
  Clone ID: PAT_MRT4530_78283C.1
tcagaaatgtctacccctaaattcacttaaaccgttcaccggaggtcactcggcacggaggcagcggagcgcggcggtggagcggaggctgcgggcggagcagccgcgtgccgtggccgccgttgtcgtcagctctccaccgtcgtcggcgccgtgagcgaggctacgcggcgcggccgtccggcggcggagcggaggctgcgggcgaagcagccgcgcgccgtggccgccgtcgtcgtcggctctccaccgtcgtcatcgccctcgcgagtgaagctcggccggctctctctcctctccggcaaaaagggcgccaaggccgccctgctcaacgacgatgattacgagccccccgcgccgccgctcccacccggggacggcgacgacgacgaggagcccatcaacctcgtcttcaagggcggagatgactagatgaggccggcgggagagggggtggcgtgctgcatcggcgaagaggtcgccgccgaccgcctgccgccgctccgcagccacacctgccccccgccgctcgccgaccaggccccccgctccgtcgtaatcgcccgccgccctccgcccaccgctgctccgcctaccgcgctcgtggaggtcaaccaacacgacgacgctaccggcggtgaagagctggagcatgacgagcgccgccgctccgctgccgctctcgcccgctgccctgcccgccgctcccgccgtcccagccgcctctctccccctctcccgccaccgctggcacgctcgctccacgccgcccgccgccacgcccgcctcctctccccccgcttcttccccgcgggccgttgtgcccgcaccgccgcctgtcgccacaccctcatctgcccagccggctcactgaagaagagatgagaaaagagaatgtgcagc

SEQ ID NO: 78481 - DNA, 738 bp, Oryza sativa
  Clone ID: PAT_MRT4530_78284C.1
atgctatttttgactaaatttattaccgctattattttgccgccgttcaatacgctagcattactgctcctttcattacttctttataaactaaaacatttaagactgagctatttttgcactattttgaatatcacaacgctctatctgtatagtacaccttacttttcccaaaaactgattcaagcggtctcttttagtgaaaaactaacaattgaagaatatcgacaagcacaagcgattgtcgtattaggtggcggagtacgtaacagccgtgaattatttgctgactatgcaattgccgcaacaccattagagcgtatgcgatatgcagcctacttacataaacaaaccagattacccgtactggttacaggcggaagcccaacaggcaagcaacctgaagctaatattatggcacaagaatttgctaacttctttgatgtacaagtgaaatggattgaatccgcgtcaaatatcactgaagaaaatgcccatttaaccaaagctattttagataaagaaggcataactaaaattattctcgtaacaaatgagtggcatatgaagcgggctaaaatgttgtttgaacgggagggctttaatgtacttgctgcaagtacctcttcttatgaaggattaaatattattggcgtattaccgtttattccacaagctatcgcaatgcaaaacagcagtatcgcactcaaagaatggttaggttattggaaagtaaag

SEQ ID NO: 78482 - DNA, 882 bp, Oryza sativa
  Clone ID: PAT_MRT4530_78285C.1
atgtctacccttaaccctaaactcactcaaaccattcaccggaggtccctcggagcggaggctgcggagcacggcggcggagtggaggctgcaggcggagcagccgcgcgccgtggccgccctcgtcgtcggctcttcaccgtcgtcgtcgccgtgagcgaggctacgcggcgcggccgtccggcggcggagcggaggctgcaggcggagcagccacgcgccatggccgccgtcgtcgtcggctctccaccgtcatcgtcgccctcacgagtgaagctcggccggctctctctcctctccggcaagaagggcgccaaggccgccctgcccgacgacgacgattacaagccccccgcgccgccgttcccacccggggacggcgacgacgatgaggagcccatcaacctcgtattcaagggtggagatgaggccggcgggagagggggtggcgcgccgcatcggcgaagagccacacttgccccccacccctccccttccccgccgctcgtcgaccaggccccccgctccgtcgtaagcgcccgccaccctccgcccaccgctgctccgcctaccgcgctcatggaggttaaccaacacgacgacaatgccggcggtgaagagctagagcatgacgagcgccgccgctccgctgccactctcgcccgctgtcctgcccgccgctcccgccgtcccagccgcctctctccccctctcccgccaccgccggcgcgctcgctccacgccgcccgctgccgcgctcgcctcctctcccctctcccgcttcttccctgcgcgccgttgtgcccgcaccgccgcctgtcgcacgccctcatctgcccggccgcctcactgaagaagagatgggaaaagagaatgtgcagc

SEQ ID NO: 78483 - DNA, 264 bp, Oryza sativa
  Clone ID: PAT_MRT4530_78286C.1
gtatgattcctacagttgtgtattcttttcaccagatgcttttacatcatgggctaataccattctatcacacatttttccttttttgtacattataccgtttcttttttttctttttacatctaacaacattcaccactaattacaatttcttctttttaataaaacttatttatactgtatttcatttcattccttataactccaatctattggacattatcctttatccacattttcttttctatcaaacattttcttttt

SEQ ID NO: 78484 - DNA, 1358 bp, Oryza sativa
  Clone ID: PAT_MRT4530_78287C.1
cttgggttgtgttttttcgtttagttccttttgtcaattcgatcacccccaacaattttacaacgatgtacaagtagaagaagcaaaccaagcgtctgcaatcttgcgtggctagcagcagcggcggaagcaactgcaggaacagcaagaggaagggcttggaagcttgaacgcgcagcacttgggaaacctgcacttcggcagcttgatcttccacgagcagcacctgcggcggttcccgtggccacccctctccgagcggacgagcttcttcagctcggccttggtcttacgcagacgggccccgtattccttcttccacgtcccgaactgccgcttcagcttcttgagctcgtcgaccgacttggcagtcggcggtcccgcttcggtcaccgcacgcgcgcggtgctcgaacgcctcgctctcctgccggagctccgtggccaagcggctcacggcatcggttttcctttcgtcgacgactgcagcaacgttcgattcgcggccacgagcctgttgccgcgtcaccgatgcttcctcctctcgccaccctgacgactgagcaggagcaccactagtgcctgatagttcctgcctgtggtgcgtccttgtcgtcgattcaccggttcttccagcgttgttctgagcgatctgcatcgtggtgatctgtttccgcagctcctcctccacggatttcatcctcgcctcgcattccgagagccgggattcgtagtgctcaacctgttgcctcagcgcggctatctcctcatctttctgcctcaccacgtcgtccttctgctttaccgcctcttccgccaccgtggcccttctttccagcaccgaattgaccgcaagtttctcgtccacttccagcataggcggtaacgatggtgaccggtgaacccaagggggaggggaaccaggcctctgcagagatggcggcctgcccctcaccgtggggcgtgtgggcagcgctggaggcgcctcctccttgggcttttcctccggctttcctactcctctctgcatgagcgcatccagcatcacctccatggagctcagcgctgaagacagcgtcgacgatgtcatcgcttgccacgagctcaagccctcaacgccaaggagacgttacgccgatgcgcgcgcctcctgcgtgcatgtaatccagcttcatttgtccatgaaatttgatggagtcagggttgaaatttgatgtagtcagactggaggagaaggggaggcccgaagaacaacaggcaggcgaaatcatgtggtggcgaggcgttgcccaacggcctcgccgacgctgcctgcctgcctattcctagcggacgcgtgggtcgacgcgggaattccgg

SEQ ID NO: 78485 - DNA, 903 bp, Oryza sativa
  Clone ID: PAT_MRT4530_78288C.1
ccagaaatgtgtacccctaaactccctcaaaccgttcaccggagttccctcggcagtatttttgcccgttcaggctacgggcggaggctgcgggcggagcagccacgcgccgtggccgcggtcgtcgtcggctctccaccgtcgtcgttgctgtgagcgaggctacgcggcgcggccgtccggcggcggagcggaggcagcggagcggaggctgcgggcggagcagccgcgcgccgtggccgccgtcgtcgtcggctctccaccgtcgtcgtcgccctcgcgagtgaagctcggctggctctctctcctctccggcaagaagggcgccaaggccgccctgcccgacgacgacgattacaagccccccgcgccgctgctcccacccggggacggcaacgacgacgaggagcccatcaacctcgtcgcatcatcggcgaagatgaggccggcgggagagggggtggtgcgccgcatcggcgaagaggtcgccgccgaccgcctgccaccgctccgcagccacacttgtccccccgccgctcgccgaccaggcccctcgctccgtcgtaattgcccgccgccctccgcccaccgctgctccgcctaccgcgctcgtggaggtcaaccaacacgacgaagacgccggcggtgaagagctggagcatgacgagcgccgccgctccgctgccactctcgcccgctgccctgcccaccgctcccgccgtcccagccgcctctctcccactctcccgccaccgctggcgcgctcgctccacgccgcccgcctcctctcccctcccccgcttcttccccgcgcgccgctgtgcccgcatcgccgcctgttgccacgccctcatctacccggccgcctcactgaaaaagagatgagaaaagagaatgtgcagc

SEQ ID NO: 78486 - DNA, 632 bp, Oryza sativa
  Clone ID: PAT_MRT4530_78289C.1
atgcggcgtgccaccccctctctcgccggcctcatctctgcccttgaagacgaggttgatgggctcctcgtcatcgtcgccgtccccgggtgggagcggcggtgcggggggctcgtaatcgtcgtcgtcgggcagggcggccttggcgcccttcttgccggagaggcgagagagccggctgaggctgcacgggttgaatgcctcgcccacggcgacgacgacggtggagagccgacgacgagggcggccacggcgcgcggctgctccgcccgcagcctccgctccgccgccgcgctccgctgcctccgctccgccgccggacggccgcgccgcgtagcctcgctcatggcgacgacgatggtggagagctgacgacaacggcggccacggcacgcggctgctccgcccgcagcctccgctccaccgccgcgctccgctgcctccgctccgccgccgaacggccgcgccgctttgcctcgctcacggcgacgacgacggtggagagctgacgacgacggcggccacggcgcgcggttgctccgcccgcagcctccatttcctgttaccaacttgaccatgaataccagtgggcagtggcacggtcttgatggcactgaaattccaatatccat

SEQ ID NO: 78487 - DNA, 350 bp, Oryza sativa
  Clone ID: PAT_MRT4530_7828C.1
cggcgtggtccgcgccgtcctcgtctccgtgcagccgctgccggctgccctcgtcgcctcctcgccggtcccggtcgtcgtcgtcgtcgtcctctcgtcgttcccggtcgttgtggcccccgtcgtcgtcttcgtcctcgcctccgtgtcgccaatcgttgcgccggccgcgtctcgccttcgtccaaggatcttcgccgaagtcgttccctcgccgtccgtttccgccgcgcccgttcgtcgttgtctttcccacgcctcgtcgcgtggtggtaaggatctctcctctcgctgcctcgtcctcgtcctttcagtgtcgccccgtacccgttgtgcggttgtcgaccccg

SEQ ID NO: 78488 - DNA, 1778 bp, Oryza sativa
  Clone ID: PAT_MRT4530_78290C.1
ccagaaatatctacctctaaactcactcaaaccattcaccggaggtccctcggcagtattttcgcccggttttgctgacgtgctgagggcggaggcggagcaaccgcgcgccgtggtcgccgtcatcgtcggctctccaccatcgtcgtcgccatgagcgaggctacgcggcgcggccgtccggcggcggagcggaggctgcgggcggagcagccgcgcgccgtggccgccctcgtcgtcggctctccaccgtcgtcgtcgccctcgcgagtgaacctcagccggctctctcgcctctccggcaagaagggcgccaaggccgccctgcccgacgacgacgattacgagccccccgcaccgccgctcccacccggggacggcgacgatgacgaggagcccatcaacctcgtcttcaagggcagagatgaggccggcgagagagggggtggcacgccgcatcggcgaagaggtcgccgccgaccgcctgccgccgctccacagccacacttgcccctccgccgctcgccgaccaagccccccgctccgtcgtaatcgcccgccgccctccgcccaccgctgcttcgcctaccgcgctcgtggaggtcaaccaacacgacgacgacaccggcggtgaagagctagagcatgacgagcgccgccgctccgctgccactctcgcccgctgccctgcccgccgctcccgccgtcccagccgcctctctccccctctcccgccaccgctggcgcgctcgctccacgccgcccaccgccgcgcccgcctcctctcccctctctcgcttcttccccacgcgccgtgcccgcaccgccgcctgtcgccacgccctcatctgcccggccgcctcactgaagaagacgagaaaagaaaatgtgcagctgacatcgccgccctcccacccgcatgtacttcttccacctcctcccatccatccgagctccttcccttccacctcccatccgtcgacgccaacgccggtggtgcggcggccaacctggcccatgcgccgccgccaccggtgcccaacctggcccgtgcggtgggggcaccgccggggaagcgaatcgaggtggtgtgggagcgggagaacacgctgctctcgttcggccaggccgccgcgcacgccgccgtcgccttcgtcgagttcaacgtccaggaatataatgatttaacatgtcgccggcagcggtttacgggctggcggcagaatgcggcccagcggcagggggctggcaatgagttcaactcacaaggttgtgatgacgaatttgtgcctgaaacacaacaagatgttccaatcgaggagattggcataggtacaatgttgcacaattggcttcgggctatttcagagtatgagaagccaagcatcgacatggaaaccatcgagaaggcatgggctgatgagaaaaaggcaatcgctgatgtggactatgagggaaatccaaggaaggtgaacacaagctccgagaagaaggcatgcgtcgacgaggggaagtcaatctccgatgcagaaactgatgatgagggcgtcggtgtgcctgagaagaaggcatgcatcgccgagagaaagtcaatctccgacgcagagactgatgatgagggtgtcggtgtgcctcggaatttacatatgaaagatttgcacgatatcatgtttcctacctatacccaggactaccatgtttataagtgtacaaattaccgtagtgttccatatggttgccagactagtacggagtattttgttatggaaatgccctag

SEQ ID NO: 78489 - DNA, 336 bp, Oryza sativa
  Clone ID: PAT_MRT4530_78291C.1
attcagatgggtagttgggtcatcgggcctgctccggagatttctgagctagatgagcgggctgccatgtaccgtgataagaggaaggccatggattacgtcaggaattggatttgccccgggtgtaggaaggagtacgagcctatcaagaatatgcttgtagacttgcctccattcgggtgtgttgactgtggtttgaagaacgatgcagcttacgagtggaagataactcaatgtacactcaatggtatttctttggattttaagacctatgatcaaaaacttgaacagaacttagaattcaacacagtttttggtgctccttttatcatctga

SEQ ID NO: 78490 - DNA, 5124 bp, Oryza sativa
  unsure (1)..(5124): unsure at all n locations
  Clone ID: PAT_MRT4530_78292C.1
ccccggggtcccggcagtgtcagcgtacgtgtctcgtcgtcgtcggaattaatggcgggtgcttggcggcggtggccggtggtggtggcggcggcggtcgtgctggccctggcggcgccggtgctggccgtgcccacatatctcccccttcttcctcggctgtgtgctctgcaagtgtagctgctgctagctagagcagagcagcaatggagttggggcggttggtgacggtggtgatggcggcggcggtgagctcggcgctggtgatggtggcgaggtgcgacccgcaggtgccgtgctacttcatcttcggcgactcgctcgtcgacaacggcaacaacaactacatcgtttcgctggcgcgcgccaactacccgccctacggcatcgacttcgccggcggcccgtccggccggttcaccaacggcctcaccaccgtcgacgtcatcgctcaactcctgggcttcgacaacttcatcccgccgtacgccgccaccagcggtgatcagatcctcaacggcgccaacttcgcctccgccgccgccggaatccgtgccgagaccggccagcagctgggtggccggatcccgttcgccgggcaggtgcagaactaccagacggcggtgcagacgctgatcagcatcctgggggaccaggacacggcgtcggaccgcctgagcaagtgcatcttcagcgtcgggatgggcagcaacgactacctcaacaactacttcatgccggcgttctacaacaccggcagccagtacactcccgagcagttcgccgactcgctcatcgccgactaccgccggtacgtccaggtgctgtacaactacggcgcgcggaaggtggtgatgatcggcgtggggcaggtcgggtgcagccccaacgagctcgcccggtacagcgccgacggcgccacctgcgtggcccgcatcgactccgccatccagatcttcaaccggcgtctcgtcggcctcgtcgacgagatgaacaccctcccgggggcgcacttcaccttcatcaacgcgtacaacatcttcagcgacatcctcgccaacgcggcgtcgtacgggttcacggagaccaccgcggggtgctgcggcgtcgggaggaacaacgggcaggtgacgtgcctgccgtacgaggcgccgtgcagcaacagggaccagcacatcttctgggacgcgttccacccgtcggaggcggccaacatcatcgtcggccggcgatcctaccgcgccgagtcgcccaacgacgcctacccgatggacatcgccacgctcgcctccgtctgagatcgatcggatcggtagctgctcgcggctcagtatatacatacatacatacgcacgcagcctcaagattcccagcgcccacaagctaaagggtgtaactctctctttttttcccctttttttgaggtggttatattacttcggtttgtaccgggtaggcaataattgttgtcataaggattggtgtcttcctagtcgttttcaacctactgcgtgcctggaatcttgatgggtgagagaggagagaacaggcattcggttcttcggtttatagatgtgttcagtgctggagagagcacagataaatatgttcagacaagacatattttagattcggagatttttcatacaactgtacaccgaatagatgtattcctcattctttgtatgcatggcaacctttttctcaagtatccaagtatcttgccagttttgtaggagaggtatctttgccattgccaagccaacgaacatttcagacacacggcacacacaagtacagacgaggtgaagtgagctgcaagcctgcaatacacggcagccattacacaattccatttacttctccccgttggaaagaatgccttncagttcaccacaatcttaaccatcgttacgctctctttgcctcctcttcagcagctcggatgatcttgtcgagggcgtcagggccgtgcgactcgatgaatcgttcgacggacttgcgcgcgtcgaggctcatcatctggagcgccttccgctgccgttcgttgtagttggggctcacgtactggccgatcttgaagtagcggcgcacgtgggtctcgtagatgtaggccgcgccgttgaagattggcagcaccagccaacagcagaagaggagcttcatgtacggccacagaggaaaccattggagaactttccagcatgagagctcaaagagggtgatcagggagtagaggacccagtaggtgagccattgctgatcatccagggtagaagggctctctatcgcacgcatcgacgcgtatagagggtagagcagcatgattcctggcccaacaagggcatccatgtgcctagcaagggcacctagaacacccatgatccgctgttgcgatcggtgaagagctttgttctgaattttctcgatgtcctcgatgagccgttgtactaaggtgtagatagcgagcgataggctagatggttttatacttcttgtttcaagaacaggaactggacctgaactagcccttacacaattgctttcgtttgttgacatttccaagccatgtcctgctactttactaccaaagtcaagtatccgaggaccaattgcatcatccagtgaccagccaagtgaacgatttttcgtctcttcaaacactggtgccactaagtcctggcatgactggtaaataggagcagaggtaggatcatcataagaaaatgtggatttctggtacttttcctgtggcggttgatgtaggtttatatgcctggccctggagttgacattgatagtggttgccctttttatttcagcttgacgaacagattgactgccagagttccaaatgcaatctctgacacttgaagaaacagtatttattggttgcagccttcggttttgaacattgcctatagtagcccttgcctctggtagagtaacactgggaatcctttgtaatatatcaagagatcccttgacatgaacacttggtgtcacagaatcctgacaaggaaacaatctcttttgtggaaaatgacatgaagttgatgatgggtggtcttcaacaatggtactgtcactccaccctttccccatagttggcaccctgtgctccttgctacgctcacaaactgagacagtcttgcccatcaaacgcactgttggttggcaaggatgataaacatcttgctgtaaataaccatttaaaactttttcctgaacttgagaatcactgaaatcagtttttctctggccttgcataatattgggcacaccaatcaccgcctgctgtttctcgcatcttactatatttgctggccgcccattggtactcatgttttcatctgtcttaatattgcagcttgagatctctattctttcaagaccaggtagcttcataaaagctgaaccaatgcttgctggagtgcaaactgggtgaagttttgagtaccaactacactggtcctcctttgataatgatgtgcatgtatcaacagatttcctactttcacggaacagattacttgcaaaggtaccattgagaccggaagtgggaatactgtcctgggaaggtatactcttgtaggaagacatgccatccgcactggttgctgcactggcagaaccttgtgatattgctgaggacaaaacactgccttcagatgaaatatggcactccgttggaaccaatgcacaagagatactggtgctcttcttgctattgactgccatatctctatcactttcaattgcttctgttctggttcttacagtgactgaacttgtagcaatactagtaccgggttttcttatttcctgacagtagtttgtattcatagaaaaacaatcttgttgagtatgggccgtgttgctagaaccagattttaaacctttgttagaataagaacttaaggcaggaacatcagtagatttcagctgagtatcactgagacatgttttcaccatgttgataccattatgatttaggccatcaaactcagcagaggagggtagattcttttttacgtcattgcgcaagatgcatattgactttttggcaggagttccttcctttttcaccaagtctttgagggtggatgatgtctgtactgacatgtcagaaggtggtattagtttcaatgatacattttctgatatggcttctggtccactttgatctgttacaaaagagtcttctataacagtagggagttcatcaactccggaatggaacattactttagaactttccaaaagagggagatctccaaaaatatcatccttaggagggtaggctacattcttcaccaattcacatccaggatttagaggatagatagttggttcactggcctttatgttttgtttatttacagaagagtttgctgcctctttcctgaccaggttgctgcccatgccagtagaaggatccattcctctgatgtactgcttattcaggttgttttcatgagttgacatgcaatcatgtgtattttgaaacttcttctgtgctgagagttctttctgtgtacgcagggtagaacctttgtgtttactcttctgtgctgagggttctttctgtgtacgcagggtagaacctttgtgtttactcaacagttgcttatgtaacacatagtgaagtaaacgagatgatgttttctccttccgcttcgaaaggaggccaaattggagagatcgccgccatttcctggccctctcggctctgactctcccacgagatcccttcctcttcgcccccttcccggaaccaccaccacccgcaacaccgcctccggcatcctctgtaccggtcgcgcgggcctcctgccgcgcccgctccgccgccagctcgtgcgcccaccaccgcgaccgcttcggcggctccatcggcgggagcggcggaggcggctccccatccccgccgccgcggccgaacggccagcacttggacgcgtccaccgcccgcatccccgccgcgaacccccgtatggtgaatggctggaaggccggtgccgcagccatcgcgctcacagaaaccagtccactccacccacccacccacacgcacgcacgcacgcgcgcgcgggcacccaacgaacacgtcaaaagcaaagc

SEQ ID NO: 78491 - DNA, 274 bp, Oryza sativa
  Clone ID: PAT_MRT4530_78293C.1
atggcgaggttggagcagaggacgaggttgctctcgacatcgatgccgccatctccgcccgcccccggggcagaactgactaccatgccactggtctcctccaagaagacgcgcccacacccgccgctgtgccgaccacccccgccaccccggccccctccgcaggcgcccattaccccggcttcggccaccgcgtcacccatcaagtccactaaggcatccgtcccggcgcccaaggcccaaggccaccccgccgccggcctcctctcccccg

SEQ ID NO: 78492 - DNA, 279 bp, Oryza sativa
  Clone ID: PAT_MRT4530_78294C.1
atggcggtgttgcttgccggtgatagattggagtcgacttgggagaagttgatgtccaaggatcaagagatcatgcaggatactaaaaggctagagaacaatgcacgtggtgatgaagaatctatatggcttcagacggcagcaaggcgatctttgtgtggcagcggcgatctttatgcagcggtggcggtcatagcagtggcaaattcgttgcttgtgaatgatggatccattggtggtggcctcaggaagcctgcatccaccacctgcggcctctaa

SEQ ID NO: 78493 - DNA, 399 bp, Oryza sativa
  Clone ID: PAT_MRT4530_78295C.1
gtcctccaaacgtcagaacatcgtctcctactccagcactaaagccgagtatagagcatttgcaatgttgttgttggaacatgctggcttcaccaacttttgcacgagctgcattcacatcccactcgaaccactttggtctattgtgacaacatcactgcagttcagcaccagcacatcaagcacgtcgagattgatctccattttgtccatggttgtgtgactactcgcactattcaagttctacatgtgtgaactacatcccagtatgctgatatattcacaaaagggttgccgactgatgtcttctttgagtttcggtctagtctcaatgtccagcctgttgacgttgcgattgccgggggtgttagcatatctcatgtatatcgcatgttttct

SEQ ID NO: 78494 - DNA, 1211 bp, Oryza sativa
  Clone ID: PAT_MRT4530_78296C.1
tttttttttttttttgattacaaaattgacaactgagaaaattttatatccataaagattcatccagatatgcacaaaatgatcatttcttgagctagatatcctcaccttacagttgatttaacatggatacagcacatgaattctcaagagtgactattcacttgattattacaaggatatagtgctctcaatactagtcttctttacagtgaactcagggccggatcaggtagtatattgtagatacagctcatagaagggaagcagccatgtcaaacagcacaaggcccaggggtcatcttctgcctcctctcatctaagtctagggtatgaacaaaagccggcaagcaacagcgaccggtgtaccacgccttctccttgcgattcttcgcttctctgatcggcgtcggttctgtgctacacgtggagctggactcagatactggcttcacagctgcagaaacaggctggaattgctgcttctcattcttgctgatgtctggaacagatgcatcggtgctatcttcggaaccattctgcatcgcctcctgcaagagctcggctagttttctccttccagttggagaaggttcaggtgatttggaattctgtacattatcaggtacaaagacattgctcataactgtttgtgttctgggttggtagtttggagtgctgccacgagacggagtaaaatctccattcacactgtagaagtcgtcctcgcaatcagaatctaaccatgcccgcgagtcaaagaacatttcatccttgctaccagaaccggggctcctgacgccaacccctgccgccgccgcctgctgctgctcctttcgcttgagatcaacagacacaccgccaccgccacccttcccgttcgcggccttcttctccttggtaggcgacgacgcaagaaacagcttcttggggaacccgaggtccttgtgaaccgaagcgcaagaacccatctctctctctctctctcccctccactccactttctctctcctctcacacccaacctttttcaaaccacagcgacacacatctttctctcctcttccccgtgcaagaacgagaaatggaagcaacaaaaggagagagaagagaagagtagagagagagaggagcctcgtcctgggagaagaggaagaagagggacagaggagaggagagcctcgtgccgattcctgcagcccggggatcca

SEQ ID NO: 78495 - DNA, 179 bp, Oryza sativa
  Clone ID: PAT_MRT4530_78297C.1
gtccgaaaatgcatacctgaattttatgcgggcaatttcaccaagggtttttacaaaactgtgatggaaaaacacatgggaaggtaaacaacggaatggggtggtttacatggtattggcgggcaaggctagggcctaggggggctccccatccaaaataaaatgtgagccgaatacaa

SEQ ID NO: 78496 - DNA, 278 bp, Oryza sativa
  Clone ID: PAT_MRT4530_78298C.1
cgttgctgtcatgcccagaaattcccgaatagaattccaagcagaatgtgcattaaaatccccgtccaggactggccggggtacacaaacgacaatattgacattcagatccacgtcggaaagaggccgtgacaggaccctttgcataaccccctctagccaagcacaccatacctcaggtttcacccccgtccccagcgggcgacggacaatcccctctcatgcctaggtgaatccggaagccgcataggccgtcgcagggcccatccaaactccat

SEQ ID NO: 78497 - DNA, 1419 bp, Oryza sativa
  Clone ID: PAT_MRT4530_78299C.1
ggagaactagttcgagtttttttttttttttttttcttttttttttttttgtacacggtacagcaatacaacattctgttttcagaacgagaaacagacaagtacgccctcgtcgagaggctgggactactgaacacatagcattttgcatctactagtacaactagaactagatctaacctgccgggccactacacagcaaaaacgtgacgagcctaaaaaggggagaaaaacgggagcgcggcatacagtacacgcgaccacacaaacgacgacatgtaaggcacttggagcggctcagtacatgtacgtcgcgagttctctcttcgccaccgccgtcgccgtcgtggccagttgccccgccgcgaggagatgctccgaggcggccgcctccgcgtcgacgatgcagagcacgtggtgcaccgacgccgcgatgtcgtccaccgtcgtcaggctgcatccttcctccaccttgacgctgagggtgtagagcacaagggagtccagcgtggtgacgttgaggtgcagcacggtgagccggagggcctgcaggccggcgatcatcttgagcagctgccctggccgccgcggtgacatgacacggacgctggcgtgcgtctcgaccaggctcacctcgatgtcggccaacccggagcggtgctccgactggagcgccgccgccaccgtggccggcgacgacgacgacgccgaagccgacgccgacgcagacgccgcggtggtggtggtggtggagtcgcgcggcgagtggcaccacacgtactgcgggtacgcgaagaactgcgcgaacgggggcgcgtcggcggacggcgcgtcctcggtgacgctgctgctgcagttgctcgttgtcgtcgtgggctccatgcagccgccggccccgacgttgctgccgctggcgttatgcatcggcgttgcgtcgtcgcatctcgccttgtggtgagggagcagcgttcgcttctgcgcctcaagcgactgcagctgctgctcgagctccttcacgaactcgattgcgcctcccacaatggacgcctggtcgcccctctggacgtagggctccggcatgagcgaccggaggatggcgaggtactcgttcatctggcgccggcggttgcgctccacggcgatgtgcgtcatccgctgggtctccgtctcctcccgcgacttgcagctcttcgcgcgccgccgccgcttcttcctcggcggggcggcttccgcggccgcggccgcggccgacgacgtcgcctccttctcccctgtcgccgtggcgccgaggatgtcagcgtcgcagaaggcggcggcattgtcgaagaggaagctcgcggcggcggaggcgttgaaggtgtcgtagatgagcgcggtgtcgctgcagggagcgcacagcgcgtctactagtgtgctcat

SEQ ID NO: 78498 - DNA, 2667 bp, Oryza sativa
  Clone ID: PAT_MRT4530_7829C.1
atggtggaggagctctacatccgaaaggtagacgacgaggcgctccgctacaaggccatggccgccgccgtccccgccaacgtcgtcgagtctagcattgatccggataccaccgtggtgaacaaagaaggccacgtcctcacgtccaagcggtttgcggtcgtgggcggtggcatgtcggcggcgtcgggctccgcgtgcgggtgtttgctccgggaccatagtgcgtcgggcggcgtcgtcgtctcgccgcggactggtgatgagcagatgcaacagctggagatcaggaatagggggctcacctcaaagcatgtgaccacaatttgccttgatggaactgacaaggaagcgttagcaagctatcttagtggcattgaagaggtaattaattggtcatatgaagatggaattaaggtggatatctcagatatttgtggacagtgccatgaggtattcactacaagagctggaggctcaatggaagtggaattcgtgtacatgggtcggtctataagattcttgatacagggaagaaatctgtaccttagaggatggaaagcaagggattgtgtttttgagcttaaccatgaccaacatgagaacttcactctggacccaaagtgcatcagactcaaaactggtttgaactataacaagcttgttttcgggggtgttgagaatactcccactggtctatggcctgttagaaaagcatttgacaacttctggaggcatgctggtggtgaaaacataaatatatcagaagatgttgcaatatttgctgtgattatatctgaggcagcaagattacgcccggtgcatgactacatcaaagattctttcctttctgagaatccgggtttaagcaaattggggaaacatccctccaaccccatgtatgtgaagaagtacaagaaaatttctgctcacataatggaaaatgttgacctcatgaaacagggcctagagccaaaaccattcaagcatgagaaacttgtcatagattctatggaatcggctcttagtattgtcaggatcttattcagggatgcatttaactcaggattatttgagcatgagaaacctcccaagcccatctttgaaaacacatgggatcgtcaggaggctaagcacaaaagaaagcaggacaagcggaaaaagaaaggaaagaagggaggagggggatcaggagggggaggtggaggtggatcgattggggaagaagtaccaaagggaggaggagttcgagaaagactgaagggagcaagttacaagcatgccagagacattgacagcaagagtattggccccagcagtaatggctctgatgatgagaaagtgaactggaaggctctaaaagatgtcatatacaaagagtgttttattcattctggtttgaagatcttatccattctctctgatgtccgtctgcatccccacgagcggtggaatatttgtcagaaggtaggatcgagggctgcaattctgcaaaatcttgtcaaccccattgaggtgttcgtagatgatgaatgtgctgggaaaccagctccccaagtgccaaagagttcaaaaccatctattatgaagcttaggcaagcaacaagcagaaacctcaagcgggaaattgaactgcttatggagaacccacagcgcaacttccctctaaccaacttctgtcttgacccctcaaagttgattaaatctagcactatggttccccctgtcatttatgcgcaacgtcgcctgtcatatctgatgaatggcatgggaagacaacaagctctcggtgatgcaatgcaagcttggagacggccaaccacttttaattttctggatgctgctctgccttctttaggcatggaaattgaatctgaagaagcaatcgagggtgcatcaaattttcagcttgagctaaagagaagggggatgttctccagcgctctcctctacgcaagaaggagattgccctccgagtcccaattgccttgttcatcaccatcacttatgcaccaagcaagcgcggctcttctcttcatcgccgagatggccccgacgcggtggcgtggctcgctcacggccgggttccagttcttcctcgccgtcggcgtacgtcgtcatcgcaacggcgggcgtggtcgtggggcccgctgggtgtgggtgatccccggcgagatattcccggtggacatccggtcggcggggcaggcgatgaacgtgtccatcggcctcggcctcaccttcgtgcagacgcagtcgttcctcgccatgctctgccggttcaggtatggcaccttcgcctactacgccgcttgggtcgccgtcatgaccgccttcatcgccgtcttcctgctcgagtccatgcccaccgtctgggcgcgacactggtactggaagcggttcgcgccgcaggagcaactgaagaggagcgagaggtggaaggatagtatagacttttcgtatgtaagggcgagacgccggggtgcgcggtggggtgttgacggtggcaccagactacgggttccagacccgatgtcgatagcggcggtaggcagcgaggtgcgccgcggggtcagcatcgacggtggcatcaacggacggcgaggtctggggccggcgttgatggcggtggcggcgagctgcggcctgtggggttcaagggtttga

SEQ ID NO: 78499 - DNA, 504 bp, Oryza sativa
  Clone ID: PAT_MRT4530_782C.1
gcacgaggatgaaaaatagatacactccgcatcttgtatagattgtatgacttaatccctgaggtggggactaaatgtaaaatcttgtccctaactcttaactgatgctacagtactgcgaggtttacccctttcccgctgcccatggacgtgggtttcttagcccgatactggtgacatctttgacctgtcagaaactcagcacgttagccggggtatcacataccactgtttaatgactgatgctattttccaataaaaaaaatcatgttatcatcaccacaaataaaaattttcaacagtgatatgcgtatacgcacttcatccaacatgaatggacaaagaacaatcacagaaggggtgggatggaatttgccgaatgccgtattacggtggggtcattttattttacatgatatatggagcacaatactctctcttccagtgcaatggagtttgcatgtgccttagtacattgcggtatttatcttccagtgtaagtag

SEQ ID NO: 78500 - DNA, 592 bp, Oryza sativa
  unsure (1)..(592): unsure at all n locations
  Clone ID: PAT_MRT4530_78300C.1
acnatccacttggnacccgnatataaggggattatggcgttgcaagataaggcataccatcatatgatagatggatttgtcatgcattctttggtgtcgctggttctaacaatgatataaacatgctcaattagtcacccatcttcaccaaaatgatatttgggacagctcctagggtgaggtacacagttaatgggtatcaatttgagtatggttactacttagctaatggaatttatcccaaatgggtgacgctaattataacaataagttaccgcaaagtcacaaagaccagttgtttgcagctcaccaagagtcaacaagaaaatacattgagtgtgccttcgacatcctgaaggcgtgttttagggtggttgttgtgccttgtcgattgtgggaaataggtggcattggattgatcatgatggcttgtatcatattgcacaacatgattcttgaagatgagagagatctcccaccctttgatcataatgacaacaatggagagttcgaggttgacgaacccgagtataattaaggtgcactggatgaatttgaggctgtccttgatgaggacacaactagctcagat

SEQ ID NO: 78501 - DNA, 332 bp, Oryza sativa
  Clone ID: PAT_MRT4530_78301C.1
gattatctattttctttttttttttttttctttttgtctcacaaaaagggcccccttaaaaaataaaaaccctgtacaggaaagggctcccggaaccaggataaaacggaaacaccgaatggggggtgtcaaaaaccccaaaatttacccagccttgtggcccccccaattttggcccaacttaatgagggtgcctcctggcaccctaaagggaaaggccacccgacccgatggccttgtttggcaataccatcggatattttagccccaacctgaagcaaggcagctggcccacccgtggaggatgttctccccaagtccggaccgaacca

SEQ ID NO: 78502 - DNA, 1335 bp, Oryza sativa
  Clone ID: PAT_MRT4530_78302C.1
tcattttagcacattttggtcttcaacaacattgggtccataaaggtaagtcacatgagacttaggtacccaaatggattttatgctagcatgtggtgaactaatcaccctaatagcacaaatgtcctttttggcatccctaggcaaatcataatcaaatgaggagtttggcttaggaatgttacccatgggacaattgttaccaatatgtccctttgcacggcaattgtagcaaagtcgattcttgtctttacatggtgctttcttcaccacatcttgcatcttctctgctaccttgctacttgctaccttgatattaagcttcttccttgatgacacaaagtgattcttcatgtgagggcaagatgcaacttcatgactcttctcattgcatccatagcacttcctattgcttcttcttgttctcctctttggaagtgtgacttggtcatcaatcttgttggaacatatcaaggcatagtgtcccactttcttgcacatgaagcaagtaatgagagttttgatccaactttgaatttgccccttactcttgttgttggacttattgttttcttgacaggacttggtgcaagctacggttgatcccttctcaagcttcttcaccatgttcccacggttatcttgagaaggttgagccttgtccacaagtccatgatccatgtgcttctctctttttcctacacaatccaagtcacatgtagtgctcggggaaatgtttgtgttggagcaacaagtgttagcacaagtaaaatcaacttgaacatgtggctcataagattttaccgttgcaattatcacctcatgagctatctctaccatggcatgagaatctacaaggttctcatgagacacacaaaagttcatcgtgtgtttcttgtaaatccatatactttttagtgatctcctcaaattgagatttgagctcttaattttccttctccaaagatgcttgctcatagtgtatgttgatgagatggatgatgaggtgagatcttcttggtcggaggagataatcacttgggacttgtcatgatgaggtaatgaagtagagcaattcccaaatgatgcttccacaagagtatcctctccatcacatttagacttgtcatatctttcctttagtgttatccaaatgagatgagcatctacaagtggcatgatggttttgaacacatattcactcaaagcactaaacaaaacattaatagcttgagcattgagatgtgtgcatttctcttcctcttcaaatgatagctctttatcattaggaggagaaatactcacatctacaactcgctctatatgaggacccat

SEQ ID NO: 78503 - DNA, 1262 bp, Oryza sativa
  Clone ID: PAT_MRT4530_78303C.1
tacgggtggtgcgcctcttgtctctctgtgctgctctcactatcgatcgacctctgctgctgcctcgctgtcctctgctacgtgagctcggccggctcgggtgtcgaggacgatcgaggatggggtcgctggggcggcggccgtgggttggtgggttgacggcggcgatgatttttgctgttgctgtgtgcggtttctgcttcagtggggcgtcggcggcggcggcagcgccgacgttcggcgacaacttcgagatcaccggagccgaggatcacgtcaagacctccgccgacggccagacgtggtacctctacctcgacaacaagactggcgtcgggttccagacgaaggagaggtatctcttcgggtggttcagcatgaacctcaagctcgccggcaacgactccgccggcgtcgtcaccgcctactacatgtgctccgacgtggacgcggcgccgcagcgcgacgagctggacttcgagttcctggggaaccggacgggtgagccctacatcatccagaccaacgtgtaccgcagcggcgtcggcggccgggagatgcgccactcgctgtggttcgaccccaccgccgacttccactcctactccatcctctggaaccccaagcagatcgtgttcttcgtggacaaggtgccgatccgcgagtaccggaactcggacaagcccaacaccttcttcccgatcatgaagccgatgtacgtgttctccagcatctggaacgccgacgactgggcgacgcgcggcgggctggagaagacggactggaccaaggcgccgttcatctcctcctaccgcgacttcaccgccgacgcgtgctcctggggcacggcggcggcgagcccgcccagctgcgcggcgtccaccggcaacagctggtgggaccagccgccggcgtgggcgctcgacgccggccagcgcgaggactccgcctgggtggcgaggaacctcgtcatctacgactactgcgacgaccgcaagcggttcccctccccgccggaggaatgcttgctccggacgaccagctcgtgaggccatcgccggcgccgccgccgacgtacatggccgtacgatgtgcggccaggatcggatcgtccttcgatcgtgcggctcagattcactgtaactactacagtactactatttttggattgggccacgtagagtggctgtcacgttggaaaccatattctttttggatgatgaaatggataaaattattatttttcaaaaaaaaaaaaaaaa

SEQ ID NO: 78504 - DNA, 492 bp, Oryza sativa
  Clone ID: PAT_MRT4530_78304C.1
atggcggccgagaagacgccgggcgaccatatggcactctgccttggaagcggcggcggcggcccaaacagagcggtttcggaggacacggggaatgaggatacggcggcggcggaggagcgtcgccaagtcgccaggtacaagcagacgctctgggaattcaagctgtcagccatcgtcatcgttctcgtcctcgcattttgggtggccctattgctcgtcgggaccctcgaccaccacatgtccgagtcgtggcgccagacctacgtcagctctggcatggttgcgtccggaccctggctattcatggtcatctgccatctcagagattatggcttgtccgtccccaagatgtccgacttcagcaaccaagagcatcagctgccgccccgtgggccacgacctttgctgactgacggctatagatcgattatccctcacaagagggggtcactccaaaatccagatcgttctatacttctatatatgtag

SEQ ID NO: 78505 - DNA, 210 bp, Oryza sativa
  Clone ID: PAT_MRT4530_78305C.1
atgtggatgcggagcggattatttcggacgtcggattcggtgtggagtcgcggcgccgacaagccgagcgctaccagcctgcagtggagctccggcggcgcgtgtgggaaaagatgcgaagaggaagaggcgactcgcggactcgagaagagacagacgggcgacggcgcaggcattcggcagagagagagagagagatttggggaggac

SEQ ID NO: 78506 - DNA, 204 bp, Oryza sativa
  Clone ID: PAT_MRT4530_78306C.1
atggcccgagatcggtggaaggaggaatctcacaggattgtgacgaagatggcaatccggtggcctttggcaccgatggggagttggaagaggtggtggctttgggaagatggtgaaagcgttgttccagtggtgttcggggacgatagaagggtggccgagcttcttcttgtcccggaaatgctggcggtggtggagtcatga

SEQ ID NO: 78507 - DNA, 358 bp, Oryza sativa
  Clone ID: PAT_MRT4530_78307C.1
tcttccttgcgttctgctccccaggggcagggggggggtcagattactctcagtgtccactcccaccgaagtaccgaacaccacgtcctcatcatcacctcatcatggcggcagagggagaggaggcgaggcgcccgcacgatgtgcttttcccctccctcgcgcacggtcacattccggccttcctacgcctggccggccacctacagacgctccgcccgggcctcgtcgtcacgctcgtgttcaaccccacgcctcctcggctccctctccctcccggccacctctcctcctaaccggctccacgcgcttcccttcgcgcccgacgaccacggtctgcccgacggtgccgagtccc

SEQ ID NO: 78508 - DNA, 525 bp, Oryza sativa
  Clone ID: PAT_MRT4530_78308C.1
aaacatacaagtggtttgcacaaaaaaaaagaaaggagattttagataggttggacttgcttgataaaaaggcggaaacatttcttttgactcaggaggaaattgatattagatggttttataggaataggttatcttcgattttaagggaagaggaaataaagtggtatcagagggctaaaacaaaagatattttggaaggtgattctaatacaaagtattttcatttagttgcaaatggtaaacatagaaaaatgagaacttttcaattgcatgatggtgaccaagtaataaatggtgatgcgaatttaaaggcgcatattaccactaattataaaggtctttttggtcctcctaatgattttgatctaaagtttgatgaggataatattgctgatattccccaagtttctcttttggagaatgaagctttaactcaggagttactgaacaggagattaaggaggccattttccaaatggaacacaacaaagcatcggatcctgatggatttctgtcgacgtt

SEQ ID NO: 78509 - DNA, 327 bp, Oryza sativa
  Clone ID: PAT_MRT4530_78309C.1
actaaaaattcgtgatgtactgactgcctcttttaagagtactgaacaaattctgtatctgaaaaacaaaaagcgcggctaggttgctctgtctttcaagcaaggccccaaacaaaattcgggggcgacaccaccactgaatttgtggatggtcaaaggaagcgagttccttttgtctgccacctctgtgggtcacacacactcaagaagcacatgatgttggcatccaccagcttttttatccaaaaaaaaacgtaaggtaacctttttctctaccattcacttccatcgaacatgcatgaataccttttatattattgaacaata

SEQ ID NO: 78510 - DNA, 377 bp, Oryza sativa
  Clone ID: PAT_MRT4530_7830C.1
gcgcactgctgcctgtggcgctcgcaatgggaggctacagcacaggctcctgcgcggaagggaggacgctgctgacaacgcccttgttcgagacggagagctccacctacacctacctgctttgatacaccctggacccagagcaacccgtcgagatgatagaccctgtagacagaacagctggtagatatctcattcttatcatagagatgggcttgctgctcgtgtatgctatgcatacccatatgcatgctaatcatgtgactggaacaggattaatagagactaaggcaactggaatgcagaccgtgatagcgaacatgagcacagcatatgcttaccattccattgagcttggggacaaaatattcttgggc

SEQ ID NO: 78511 - DNA, 477 bp, Oryza sativa
  unsure (1)..(477): unsure at all n locations
  Clone ID: PAT_MRT4530_78310C.1
ggggggtgtgggttttttaaaattttttttttttttttttttttttttacccctgggtcgtccccccaatttcttcccgcctcctcctggcgtcccaccattccctattttgagtctttttattattttttcgtaataatcatcatatttggggactcgccgggggnnntnntccncccccccttcccccccccttcctnccccgccggcctaaaaagtaaaacctcgcggggccctcctgagggaggcaaactaacaataattgcggggccggccactaccccccttccagcaggaaaacatcccgtgccccctgctttaaaaaataacccacccccccgcaaaaagcgcctttcttattttcccccaccggggttttttttttcccactggagaggccaacaacaaattgccctccaccacctcccccccaaaaaagagcgtaagaggtcccccctgcttggcccccccagcaaa

SEQ ID NO: 78512 - DNA, 1086 bp, Oryza sativa
  Clone ID: PAT_MRT4530_78311C.1
atgatctaccctgcaccagctcctcatgttcacccgcggcttccgcaagctgccatctcggtcgttgccactgttgtcgagacgaagatggtgatagtgacgatggatctgctcctcgccagcctcgtcctcctcgacagtgaagcatctaggcctccgttgttaattttggggcggtccgaccggccacatagtagcggtctgatcggccacaagacgagcattagcttagatcctattattggcaatgagcaaccagggatgtcatattggcaaaggatcacagaccactaccatgctaaccgtgattttgagtctgataggaatgcaaactctcttgagcaccgcgagcgtcacggcgagtcggcgacccacccatggcgcaccgccatcgccaggctccctgcctcctcgctccccgcacgcctcgccggcctcctcgccgacggtgtccgggtccttcgggaggtggagcggctagccggcaagagagttgaagacgacgcaggcgacttccgtgatagggatctgccggatggtgtcgtccaacacatcctcggtttcctcccggcgccggaggccgtgctcacgtgcgtgctcgcgcggcgctggcgccacctctggaagtcggtggcgagactgcacatcaccaactgggacaaggaggtgacgatgcaggagttcgggtacttcgtgcaccgccttctgctccaccgcgggcgcggcgcgccgatcgacgagtgcaggttcagtttgggcgggctgtccgacttcgccgccgacgcccgccgcgtggaccgctggttccgccatgccgcggtgatgtgccaggcccgtgtgctgcagctgcgactcgctcccagtggcgtccaactagcgctggataacctggccatcgtctcccggcatttggagaagctacagcttactggtgtgaagctgatgcacagtttccttgatttctcgagctgtccggtgctggagcatcttgatatatccttctgtaacctggttgaagactttgtcaatctgcggatatcgactttgaggcacttagctgcatccttcagcactcacctattctag

SEQ ID NO: 78513 - DNA, 648 bp, Oryza sativa
  unsure (1)..(648): unsure at all n locations
  Clone ID: PAT_MRT4530_78312C.1
ccatggtgatagacagcaagcgcagcatcgagaatctggagataaccttgtatgacnattcagattaagaagcgcaatgaatgtgaatagctagctttcggatgtcctgtcacgctgggctcggcgatctccaggatcacccctgcctgtattgcgaccctcgagcgaattcccacgtgcgaccgcataagatgataagaggctcatggtgacaagtgcagaacatggagaatggcggcggatatagttaggcaacacagagagctgaacccaactatccattgtacacggtattaatttagcagtttgacatcataaggtgtggtttgttcagtgtaagtttagtagttctggtcgtctggtattacaaaattacatcacgaaagtgagtgcagctagtggctagccatacagatatatatacaggtataggtatgtgaaatacagttataccagcttttacagttctgtagtctgtgtgaggagaaatgtgaaggcagagaattttagataatgacatatttcagagttctgaacttagaaattattcgggtaaaaagatagagaagaactgtatgccgtgcgtggggattgaattgaaatgaaatatggaaatgatgttcgcttcaaaaaaaaaaaaaaaaaaaa

SEQ ID NO: 78514 - DNA, 467 bp, Oryza sativa
  Clone ID: PAT_MRT4530_78313C.1
gcgccgcacatacgtacggccagtaatcccacacgaacttgatccatccgagctcccgcgccgcctctgccaccatgtcgaaggacgactcctccgacgtccctgccgccgaggcgccggcgaagcgtgcccccctcaacaagtacgccctcgcctgcgccatcctcgcctccatgaactccatcctcctcggctacgacatctcggtgatgagcggcgcgcagaagttcatgaagaaggacctgaacatctcggacgcgaaggtggaggtcctcgccggcatcatcaacatctactcgctcgtcggctcgctcgcggcgggccggacgtccgactggatcggccgtcgctacaccatggtgctcgcgtcggtcatattcttcgccggcgcgctcatcatgggcctcgccccgagctacgcgatcgtcatgctcggccgcttcgtggccggcgtgggtgtgggctac

SEQ ID NO: 78515 - DNA, 1809 bp, Oryza sativa
  Clone ID: PAT_MRT4530_78314C.1
atgtcgaaggacgactcctccgacgtccctgccgccgaggcgccggcgaagcgtgcccccctcaacaagtacgccctcgcctgcgccatcctcgcctccatgaactccatcctcctcggctacggtccgtgcaaaaaaccgcacatcacaccctgtgctcagaaccaggagaaacgtgcaagcgtgctaacaataatctcgtttttggtcgatcgagcagacatctcggtgatgagcggcgcgcagaagttcatgaagaaggacctgaacatctcggacgcgaaggtggaggtcctcgccggcatcatcaacatctactcgctcgtcggctcgctcgcggcgggccggacgtccgactggatcggccgtcgctacaccatggtgctcgcgtcggtcatattcttcgccggcgcgctcatcatgggcctcgccccgagctacgcgatcgtcatgctcggccgcttcgtggccggcgtgggtgtgggctacgcgctcatgatcgcgccggtgtacacggccgaggtggcgccgacgtccgcccgcggcttgctcacgtcgttccccgaggtgttcatcaacgccggcgtcctcctcggctacgtctccaacttcgccttctaccgcctcccgctgcacattggctggcgcgtcatgttcctagtcggcgccgtgccgcccgccttcctcgccgtgggcgtcctcgccatgccggagtcgccgcggtggctcgtcatgcaggggcgcatcggcgacgcgcgacgtgtcctcgagaagacctccgactcgccggccgaggccgaggagcggctcgcggacatcaagaacgcggtcggcatccccgaagggatctccgacgaggacgaagttgtagccgtcgtccacaagagcaggggctcccacggcgagggtgtctggagggacctgctgctccgcccgacgccggccgtgcgccgcatactcatcgcctgcctcggcctccagttcttccagcaagcctccggcatcgacgccgtcgtgctgtacagcccgcgggtgttcgacaacgcgggcctccactccgactccgactccatcggagcctccgtggcggtgggcgccagcaagacgctcttcatcctcgtggccacgttcctcctcgaccgcgtcggccggaggccgctgctcctcaccagcgccggcgggatggtgatctcgctcgtcacgctggcctcggcgctgcacatgatcgagcaccgcccggagggccaggcgacggcgctggtgggtctgagcatcgcgatggtgctggtgttcgtggcgtccttctccatcgggatgggcccgatcgcgtgggtgtacagctcggagatcttcccgctgcggctgcgcgcgcagggatgcgcgctcggcacggcgatgaaccgggtcgtgagcggcgccgtcagcatgtccttcatctcgctctacaaggccatcaccttcgccgggagcttctacctctacgccggcatagctgcggccgggtgggtgttcatgttcttcttcctgccggagacgcaaggcaggagcctggaggacaccgtcaaactcttcggcggcgatgaacgtgacgcgaacggtactgtgggaagggaagacggccatgggcagaacaagtccactgagttgactactcagcagtgagccagtaaccagtgaggactactagtacagtagtacatgatctactcagcagtgaccagtgagggctactagtacataccctccgtaggaaatcgagtcaaactttgaaaatataaatcataagtaactcttaagttgttgagtttg

SEQ ID NO: 78516 - DNA, 327 bp, Oryza sativa
  Clone ID: PAT_MRT4530_78315C.1
atgccgaagatcggcgacggcagcaaggctattgccggtgacgacgacaacagcaagctagtggtgcagcaagtgaaggatgcgggggtgacactatgttaccccatgctcggagggaacaactatggtgtttgggcggtgaaaatgaaaattttcatgcgtgcacaaggtgtgtgggctgccgtggagggcgatgtgtgggctgccgtggaaggcgacgcggccgatgagaagatggaccaaatggctctcgtcaccattgtccaagctgtgccatatccgagaaggagaaggcgaaggaggtgtgggatgccctcaaacagatga

SEQ ID NO: 78517 - DNA, 152 bp, Oryza sativa
  Clone ID: PAT_MRT4530_78316C.1
atgggtggaatgggagacatgtggattcaccggggtggtgtctgggaggacccctgggcttcctggcacagtatgctgatgggatcagctaggcccgggtggccgtttgaaaagttgttggcccgggtgaccgttgaaaagctgttggccgg

SEQ ID NO: 78518 - DNA, 471 bp, Oryza sativa
  Clone ID: PAT_MRT4530_78317C.1
aaggtgcacaaaatgcacggctggaaactctgccaccgagccttacattgttgcccatcacctcattctttcccatgcttctgctgttcagagataccggcacaagtatcagcatatacaaaaggggaagattggaattcttctggattttgtctggtatgaaggtcttaccaattcaacggcagaccaagctgcggctcaaagatcaagagacttccacgttggatggtttcttcacccaatcatctatggtgaataccctaaatcgctgcaagtgattgtcaaagaacggcttccgaagttcacggccgatgaggtccacatggtgaagggatcaatcgactatgttggcattaatcagtatactgcttattatgtccgtgatcagcagccgaacgccacgactctccctagttactcgtctgactggcatgctgcaccctattatgaacgcgatggcgtgccaattgg

SEQ ID NO: 78519 - DNA, 1711 bp, Oryza sativa
  Clone ID: PAT_MRT4530_78318C.1
agtagagaagagagatgatgtatttattaatagcctactttaaaaaactatgggttgtggagtgtagtttctattgtgatgttttattgacatgacaccttagacactacttatgcacactatgggttgagactacccttattactccactccatcaatctttaattggtatctccccatgaaccattcaaactattttcatgacatcattcaagattgttaagaaccctacttgtatttattagctactcatttggcccaccttcttatttgtgcatttttgcaaacgaaaaggtggttatatcaaggttgaaagcccagctcagtttttgctgctgacaaggtccctgaaccagtaggccgacatcttggggtacctcctgagggtcctgaaatccacgtacaccaggccgaacctcgacgtgtacccgagtttccactcgaagttatccagcagggaccaggcgaagtagcctatgcagttggcgccgtcgtcgatcgcctccttcagcttggtgatgtagctcctgtagtaggcgaccctcgtggtgtcatgcaccccctgagcaatggtcacattgccaggatcatccatgccattttcagatagaaacattgtggggttaccatacttctccttgacataggtgacagctttgtacaaaccccacggtacaatgtaaagccagtcagaattcgcccttggtccaattggcacgccatcgcgttcataaataggtgcagcatgccagtcagacgagtaactagggagagtcgtggcgttcggctgctgatcacggacataataagcagtatactgattaatgccaacatagtcgattgatcccttcaccatgtggacctcatcggccgtgaacttcggaagccgttctttgacaatcacttgcagcgatttagggtattcaccatagatgattgggtgaagaaaccatccaacgtggaagtctcttgatctttgagccgcagcttggtctgccgttgaattggtaagaccttcataccagacaaaatccagaagaattccaatcttccccttttgtatatgcacccacattccccagtcgtcctcatggagcacgcggctggggagcacacatggtccatcctcgccgagcgtgagagtgggcggcctccctatccctaaagctcgctgatacttgtgccggtatctctgaacagcagaagcatgggaaagaatgaggtgatgggcaacaatgtaaggctcggtggcagagtttccagccgtgcattttgtgcaccttcctggagcaaaatttccatcatcgtatcctagagcggcaacaactctcggttcgttaaatgtcatccagttcttcactctgtcgccaaatgtcttgaagcaaaactcagcgtagtctgcgaatgcttccactatttttctgttcaacagtcctccatattgcacctctagtgcctctggtaagtcatagtgatacaaattggcataaggtgtaatgcctatcttcagcatatagtttatcaatctgttatagtatgccacacctttccaatttactttcccagttccagttgggaatattcttgaccatgagattgagaagcggtacgcatcgaaacccatacttttcatgatgtttacgtcctccttgccatccaggataccgtactcttcacaagagattcttttgatcactatgaagtagtccat

SEQ ID NO: 78520 - DNA, 177 bp, Oryza sativa
  Clone ID: PAT_MRT4530_78319C.1
atggccatgatcttctccaggtccagtgctggttcccccttccatccttccagtcccactcccactgatgaggaaggatcgccgtcgtcttccccgccgtttcctcgccgtccaacgttcccaagtagcggcaaacgcggcccgccggcgccgacgaggtgcaggatgccagccaag

SEQ ID NO: 78521 - DNA, 5158 bp, Oryza sativa
  Clone ID: PAT_MRT4530_7831C.1
ccttttactttgattttctaaactttatgcaaattaatccaaaaagttgtgctattaattggataaatgtcttaactccctcctttcacttgtctttagatgccgcgctacaagcctgagtacttgtttggtgttgagggatttgtccaggagttgcgtacgatgtcctttgtcataggatttgggactgctcctttttatgcccagattcctcatgatcgtcatgaagagaagtgccgagtcaaagtcaccttgaacagtaatagtgaagatatcccctcagtgatgttcgaagctggaggaagaaactacatccatgtatgtcaggaggtggcaaggatcaccataggagagcttcgtgatcgctatagtgatcagttggccgacactgagtatcgttaccatcctcgccaaccacagggaagtgaccgtggcagttaccttgagactgagggaattgagaatgatgctaccacaaggcatttggttgagatgctgtgggctatggatgaaacccgtgcggagactgtgttagcagctcaagatcgtgaagaccggaatcgtggtaagatttgcaagctagaggacaaggtggatcgtttggagaaggaactagccgcgttaaagggagaagcaccaccgcagaaggccagaattcgtcttaccgcaaggaagagagctctatttgtccctcgctaccaattggcgccaaagttttccccggtttctcttcttgtgctcttgtccctgccagatggtgctcactcgcagcaacgggaatggccccaacaataacaataacaacaacaatggagagaatcccacacttgcccaggttctggctcaacagacacagcttatgaacatgatgatgcagcaactccagaaccagcagaaccagctcaaccaagggaacaacaatgctccaccgccgcagaacaagttagcagaatttcttcgtgtgaggccgcccactttctctagcaccactaatcctgttgaagctggtgattggttgcacgccatagagaagaagttggatttgcttcagtgcactgatcaggagaatgtctcatttgcatcacaccagctgcatggccctgcctctgagtggtgagatcacttccgccttaataggactactgctgaacctatcacttggcttgaattcaccgctgctttccggaagacgcatataccatcgggagtagtgtctctcaagaagaaggaattcaggtcgctcacccagggatctcgctctgttacggagtatctgcacgagttcaatcgtctggctcgttatgctccggaagatgtgcgcaatgatgaagagcgccaggagaagttcttggaaggacttaatgatgagctttcttacccactcatgactcgggattatcctgatttccagaagttagtggataaggctattcgtcaggaggacaagtacaaccgcatggagcagaagaaacgccggattgctcaattcaagacacaacaggggaataatcagaggccgcgtcttactttaggaccccagtccatgccacagggaggttcttcgtctgttgttcatccgcagcgtcagttcttcaacaacaatgctggcaacaacatccgcaatcaagctccacaacctgccaagaaggagcaaggcagcaagctcgtggtgtgtttcaactgtggagaaccaggacattatgctgacaagtgtccgaagccccgacgcgtgaaggttgtccctgtccagagcaactctaccgtacccgcatcaaaggcccgtgtcaatcatgttgctgctgcagaagctcaagatgctccagatgtgattttgggtacgtttcttgttaactcagttcctgcaacagtgcttttcgattctggtgctacacattcattcttatctatgagttttgcgggaaatcatgggatggaagtagaagatcttagacgtcctatgatggttagtaccccaagtaatcaagcactctctttgcaacgtagcccctctgtcagaatagaaattaaaggagtaccgtttctggccaatcttatcctgttagaatccaaagaccttgatgtcatcctagggatggactggttagccagacataaaggtgtgatagactgtgctaacagaaaagtaactctcaccagtaatggtggtcgagttgtaactgttcatgcattgtcttctgagtctttaaggtcaagactgaaccaaataactttggaagagattcctatagttcgggagtatcctgatgtgttcccagacgatttacctggtatgccgcctaaaagggatatagagttcagaatagatttggtaccaggaacaactccgatccataagagaccttatagaatggcagccaatgagttggcagaagtcaagaggcaagtagacgatttgcttcagaaaggatacatcagaccgagttcatctccatggggagctccggttatttttgtggaaaagaaagatcatacccagaggatgtgtgtggactatcgtgcactaaatgatgtgactatcaagaataagtatccgctgcccagaattgatgatttgtttgatcagcttaaaggtgccaccgttttctccaagatagatcttcgatcagggtatcaccagttgagaatcaaagaggaagatatacctaagacagcttttaccactaggtatggattgttcgaatgtactgttatgtcttttggacttaccaatgcctccgctttcttcatgaacttgatgaataaggtgtttatggaatacctagacaagttcgtggtggtctttattgatgacattcttatctactcccgaaccaaagaagagcatgaagaacatcttcgccttgcactagagaagctacgagagcatcaattttatgccaagtttagcaagtgtgaattttggttgtctgaagtaaagttccttggtcacatcatctcagcaggaggagttgccgttgatcctagtaatgtggaatccgtaaccaattggaaacaaccaaagacagtttcagagattcgcagtttcctaggcttcacaggatattatcggaggtttatagataattttttcaagattgctaagcccatgacacggctgcttcagaaagatgtgaagtacaagtggtcagaagaatgtgagcagagtttccaagagttgaagaatcgcttaatatccgctcctattttgattttgcctgatccaaagaagggtttccaagtgtattgcgatgcatccaaacttgggttaggttgtgttctgatgcaagatgggaaggtggttgcctatgcatctcgtcagatacgtccgcatgagaagaactaccctactcatgatcttgagttagctgcagtggttcatgcgttgaaaatttggcgtcattatcttttcggtactcgtatagaggtgtataccgatcataagagtttaaaatatatctttactcagccggatctgaacatgagacaacggagatggttggaattaattaaagattatgacatgggaattcattatcacccagggaaggctaatgttgtagcagacgctcttagcaggaaaggctattgcaatgctacggaaggacgacagttgccgttggagttatgcaaggaatttgaaagattaaatttgggaattgtcagtagaggttttgttgcagtcttagaagcgaagcccactctaattgatcaagttagagaagcccaaattaatgatcctgatattcaagaaatcaagaagaatatgagaagaggaaaggctatcggtttcttggaggatgagcaaggaactgtatggttgggtgagagaatctgcgtccccgacaacaaagatttaaaagatgcaattctgaaagaagctcatgataccttatactccattcaccctggtagtaccaaaatgtaccaggatctcaaggaaagattttggtgggcaaatatgaaacgtgaaatcgcagaatacgtagcagtatgtgatgtttgtcagcgagtcaaggcagaacatcagaaacccgccgatttgctgtagcctttgaagattcctgaatggaaatgggaggaaatcggtatggatttcatcactggtttacccagaacgtcatcgggccatgactctatttgggtgatagtcgacagacttaccaaagtggctcatttcatcccagtaaagacaacatattctggaagtcggttggcggaattgtatatggcaaggattgtgtgtttgcatggcgtccctaagaaaatagtgtctgatcgaggcagtcagtttacttcaaatttttggaagaagcttcaggaagagatgggttctaaactgaactttagtactgcttatcatccgcagacagacggacaaaccgaaagggtgaatcagattttggaagacatgttgagagcttgtgctttagacttcggtggaagttgggataagaatttaccttatgcagaattttcgtacaacaacagttatcaagctagtcttcagatggctccgtacgaagcactgtatggtcggaagtgccgcactccgcttttgtgggatcaaacgggagaacatcaggttttcgggacggatatcctgagggaagcagaagaaaaggtgaaaatcattcaagaaagattgcgagtggctcagtctcgtcataagagttatgccgacaatcgccgtcgagatttgagttttgaagaaggagattatgtgtaccttcgtgtcacgcctattcgaggtgttcatcgttttcacaccaaaggaaaattggcaccgcgttttgtgggaccttataagattgtcagtagaagaggagaggttgcttatcagttggagttacctcaatctttggcaggagtccataatgtgttccatgtgtcgcaactgaaaaagtgtttaagggtacctaccgaagaagctaatcttgaacagatagaagtccaagaggatctgacctatgttgagagaccaacccgtattttggaaatagatgagagaaaaaccagaaattgagttatccgtttttgcaaagtccaatggagtaatcactcggaagaagaatcaacttgggaacgagaagatgaattgaagtcagctcatccgcatctgttcgctagttcttccgaatctcgaggacgagattctgtt

SEQ ID NO: 78522 - DNA, 210 bp, Oryza sativa
  Clone ID: PAT_MRT4530_78320C.1
atgaatggtctagatctgtacgaccacctccaacctcttggtcacctcaatgcccgaactgaatatgctttctcggggagaaaattcatgtcgccgctagcagaggagttaattgactccacagtttggttgctggcgaggctggtgcgaacatgccaaccagcagcagcagcagccacacgccacgccatccgccaagacagctgttga

SEQ ID NO: 78523 - DNA, 302 bp, Oryza sativa
  Clone ID: PAT_MRT4530_78321C.1
taaccgttcatcaagtggtaaatgataaagtgactaattcagattggaaagaagtaagcacatccgtttcattaccaaaagcagcattaacggcggatattaagtcgcttaatgattttggtagcaatttaaatcaaacacattgtagtggttgtcacgctccaattagcgccaatcattacacagcaaatcaatggattggtgtggttaactccatgaaagatcgtacctcaatgtcagcagacgatgttcgtgcggtgaccatttatttacaacgtaatgctaaagatatggcaggcagt

SEQ ID NO: 78524 - DNA, 1740 bp, Oryza sativa
  Clone ID: PAT_MRT4530_78322C.1
cggccctctaaactagtggatcccccggccgggcttctctaacgccctgcggttgctagcagaagtccaggtggacaagaacgcgaggaggggaagaatcatccccgagatctcgctgccgctgctcatggcgttcgcggcgtcccacaccgcatcgccgtcctcctgcggcggcgtggcgcagaggaggagcaatgggatgtcgccggtggtggccatggcctccaccatcaacagggtcaagactgctaagaagccctacactcctccacgtgaagttcatctccaagtcaagcattcactgccaccccaaaagcgggagattttcgattcgcttcaaccttgggccaaagagaaccttttgaacctcctgaagccagttgagaagtcatggcagccacaggacttcctgccagacccttcttccgatgggttttatgatgaagtaaaagagctgcgggagagggctaaggagatccctgatgactactttgtttgcttagttggagacatggttactgaggaagctcttcctacctatcaaacaatgcttaacacccttgatggtgtccgagatgaaactggcgcaagcccaaccacctgggctgtttggacaagagcatggactgctgaagagaacaggcatggtgatcttcttaataagtacatgtaccttactggacgtgttgacatgaaacaaattgagaagacaatacaatacctgattgggtctgggatggatccaggaactgagaataatccctacttgggtttcctttacacatcatttcaagaaagagctacatttatatcccatggcaatactgcaaggcacgccaaggagtacggggaccttaagctggctcagatatgtgggacaatagcagctgatgagaagcgccatgagacagcttacaccaagatagtggagaagctcttcgagattgatcctgactacacagttcttgcatttgctgacatgatgaggaacaagatctcaatgactgctcatctgatgtatgacggcaaggacgacaacttgttcgagcatttgagcgctgtggcacagcggctgggtgtctacactgcaagagactatgccgacatcctggagttcttggtccagaggtggaaagtcgcagatctcaccgggctgtccggagaagggagaagggctcaggatttcgtctgcacgttggcgccgagaatcaggcggctggatgaaagagcccaagcaagagctaagcaagcgcctgttattcctttcagctgggtttatgaccgcaaagtgcagctttgatcatgatcagtgagcaaccgagactgcatcctatatattggttctaagatatgaggttctctatatggaaaaaaatctaggttatctagctggggtagaatgcaattacctgtccatctgccctcacaaaatctgttgtcttttaagttgataacagtgtcgatgagtctggtgagaagctgatgtgagatgcaacagagtgaacttatgttgtattgatgtgagatgagtatggtgacatttatgtgtacttgcaggttttacatgacttgtataagttttaaagtaataatggagatttgtatacagacaagcgtgtgcactgtcgcatgattaagtagtctaaaatccagactatcttttgtgctctgaatttagcagtaataagattgatcggcttgttcgttttgagctctgaataaaaaaaaaaaaaaacaaaa

SEQ ID NO: 78525 - DNA, 1266 bp, Oryza sativa
  Clone ID: PAT_MRT4530_78323C.1
atgaaatggtcccaacacaagatagagttctcagaggcggaccacccgaaaattgcaaccatacctggcagatattcaatcgtggtcgagcccactattcggaacatcaagctaacacgggttctcatcgacgacggcagttccatcaacctgcttttcgccagtaccttagatgccatagggataccacgaagcgagctgacacccactgatcagcccttccatgggatcactccagaatcatcatccaagacgttgggtaagatcacactacccgtcacttttggacaagccgataacttccaaacagaacagatcacctttgatgtcaaggagttcgacactgcatacaacgccatcattgggagaggttcactcgcgatgttcatggcagcatctcactatacctatcaagtgctcaaaatgccaggaccaaaatggacaatcactatccagggaaacgccaagttggcgttaagcaaaaactacaaagattcgcacccgattaaaaacaagccatacgggaagaactggacaaacatctcaaagttggcttcatcagagaagtcctccagtaatccagtaatgctacgcaaagccaacggaaagtggaggatgtgtgtagacttcaccgaccttaacaaggcgtgtcccaaggaccacttccctccccctcgaatagatcaactagtggattcaacagcctgttgtgagtcgttgagttttcttgatgcttactccggctaccaccagatcaacatggcaaaagaggacgaggagaagatggcattcatcacacccttcggtgtattctgctacgccaagatgctgttcggattaataagcataggaaatacctatcagcgcgggatccaggaagcacttggtgatcaactcggacgaaacatcggggcctacgtggtagacatcgtcgtcaaaaccaagacgggcgatttgctaatcgacgacctaagggaaacgttcgacaacctccgacgatatcaaatgaagcttaactcggagaagtgcacattcagagaaccgttagggaaattactcggcttcctagtccccggacaaggaatcgaggtcaaccctgaaaagataaagggaatcgagaacatgaaattgcccacaagactcagggaggtccagcggttgacaggatgcatggcttcgcttagtcgtttcgtcacaaggatgggagaacgaggacaaccttttttcaccctgctcaagaagcaggacaaattcgagtggagctaa

SEQ ID NO: 78526 - DNA, 411 bp, Oryza sativa
  Clone ID: PAT_MRT4530_78324C.1
atgacgacgcaatcgaacggcactccagtgaggcgggaggggctgccggaggaggaggacgacgacggtgttcttcactgttcgccagtgaggacgagcttcagacttggggaaggggatgccggggacgagcacggtgaggcgcagccgatggaagcgacagcacgggctggcggcgcccggctcgacggggaggggctgccgaaggtggaggacgacgacgtcctcctggatgtcggcgtcgacggcgctccagctagcctcaggcggaacgcaggcgaggtcggggaagatgaggtcgctgcgatgccgagggaggtggtggcgaggtctggcgctgctcggcacgatggggagggatggccggagttcgccggtgtggtggagagagaggaagacgcgaggagatga

SEQ ID NO: 78527 - DNA, 600 bp, Oryza sativa
  Clone ID: PAT_MRT4530_78325C.1
cttcatatcaggagaaaaaaaacatgaacaaagaagaatttggaatattatttgcactgttatataatatattttctgcatgatatggcattataaatgattttgttttttttcgaggaaactgcatggaaggagtaagcagtggcacatctcacatattagttagtaaagggatgaaaacggagcggatagattccaacccctccggacaaaaacggatacggatacctttcggatcggataattctcggatagtttggatacggatatgaatacgtatactttctcctggatacgaatatgcatatggtatcggggtttccgtcaaatacagataataattcggatatccgaaaaaattgtttctgtattcgtgtccgatcatattcgattcttattcgtatgtgagataatccgtatttgtttccgtattcgagctatccgtattcgttttcgtatccggtaaaaaaatatgaaaacaaatatgtgtagaagcagcccagttctagatagcgaagattgacaaatgctgagatgttgcctatcaatgaatccaagtcaaagaagaccatctccagtttcaacacacggattgacctt

SEQ ID NO: 78528 - DNA, 545 bp, Oryza sativa
  Clone ID: PAT_MRT4530_78326C.1
ctgtttttttattttttctatggccacttgtgccttattccgacaataaggtcaggtttgcatacagtgaaacacattaactgcaaaaaaatattgtgccggatcatatggaaaacctcgaaatggttcaagtataacacaccactccaatacttggttcatatgtgcgtaataactctgatcctacagtattgagctagcttggccctataagaaataatgcttctatggcaactgcacacaaaacgctggatgataacctttgcagcataccaaccagccttcacacaggcctaagtgctcttttgttgaaccacttgttataggaacccttcaacaaaggcattaccatcgccattggggtcaacaaaatcttcctttggtgattagatcgcagggaatgtgtgttcctgtacatcctgagcgaccacttctggatcagcacgctcgagtagtcacggcaatgctcttatggtttccaaaggcccatggaagctgggaaatcttcagcgccatctccttaacattcttaatctcccatccac

SEQ ID NO: 78529 - DNA, 603 bp, Oryza sativa
  Clone ID: PAT_MRT4530_78327C.1
cattgccacctcagttccgatatatgtagcatgcattataaaattttaacaaaagggataaagatttatttattaggcaatgatatcatcactctacgtatgctcccatcctcaagaaaagataatatatgatggtagatcgtgattatcatagcttattgaaaataaagagtgacagaaatcaagatagatcgatcgatggcacactggcttggatatcatgatatccgttttattaatgagtactccagagtggcatagcctttcatgggcttcgatgtgtgaagcccttatgcttgcatgttgcacttgcttaggaaacaacggtgacagtctcagcttccttggtacagaagcggtggcatgcatcgttgcaacgatcgacggcataattcgcttcttcattgctagaaagagtgctcatggtgctgcacacagacgaagcacatcccagcttgcagaagtcaagtacctccgattcctcagcttcagggtgaagggtatggtgaacgtaaggaggcttgcaattcccatcaacaattttgcagccagaaagtttagcacaggtgtctcttgagccacccgcgaaacggcatgagttat

SEQ ID NO: 78530 - DNA, 1257 bp, Oryza sativa
  Clone ID: PAT_MRT4530_78328C.1
atgggagagcgccgggtaacaacagtccacttgccaggcgtgataagccggatgatggagctccaccacgacttcacgacgtgcacgctcgagcggactaagaaagcaatcgagagcctgcgcatggccccggcaaaggtagacgccgaggtagagaagccgaagcccgcagtcgtgttgggcggcatggtgagcgggctgagggaggtgtacgagagcgggaggaccaaggacctgggagtggaggcagtcgtaaatgcatggcgctcatcggactcggcaaccagcaaagaggaggagatactcgccgtcctactacgtacggcctctggcaatgcaccggggcgagtcgatccgaggcgatcttgggatgctttgttaagtcgatcaagtacgcgctagcagaacctcagggaaatgggggggctccggagagggcggaatcgtcgttgggttgcattccctgccaccgcgatggtggttccggagccccgcggtgtcatgatcgctttcgtcagctggaatctgccactagaattagcgacggagccactctctggagtcgtagcgacatgcaacggcgttgttccgtggctctccgaccgttcgaccttgcatgatgtgatactgtatccctatccttccgtggtatatggtaatctggggtgctatgctcgtatttagagtacccaatgttaagaaagggtgagtgggtatcagttggtttaaagaaatgcctagtgggaattgcatgctcggacctgttatccataaaaaaagatttgtaaacagttcttgggtgctattgctcctgaggatgaaaaagccatgcatggtgaagtagttggacagtttaacacaatcataaaggtaaataagatcgaggattgcatcgaaaatttaaagtccaagccgaaaccgattgcgatgtacgccttcaccaacaacgagaggctgaaacgccggatcgtagaggaaacgtcgtccgggagtgtcacattcaacgacgcagttgtgcagtacgctcttgaaagcgtccctttcggcggagttggccatagcggattcggacagtaccacggcaagtactcattcgagctgttcagccacaagaaggcggtgttcaagagaagctttctgatcgagttcatgttcagatacccaccatgggatgagagaaagatcgggacgctgaggcacgtcttcagctataactacttcttgctgttcttcaacctgctcggctttaggagatga

SEQ ID NO: 78531 - DNA, 361 bp, Oryza sativa
  Clone ID: PAT_MRT4530_78329C.1
ttggaatggtcggaattaccctccaaccgtcataggggcttcatctcagccgtccagccaaaaactggatccaacagccaaaccaagggcagggccattcagccaacaactttgctggtgggctactctactttgtccctcaatgtacggcttgatgatgacgagctggtccagcgcaccgatatgtgcttccgtgacagctcggtagtggttatcatagaatcagttcaagtggatgggcctcttcccagtcaactcaccgtcgtgttcatcgaggataagtcggaccgcaaagcatctcacggtggcacgctgtttgggttggccatgcctccagagcgcgtaacttttaagaagccca

SEQ ID NO: 78532 - DNA, 783 bp, Oryza sativa
  Clone ID: PAT_MRT4530_7832C.1
atgagaataaagacgacgccgacgccgtacgcgatacgagcgaggcgggccgcgacctcgctatcgttcgcgtacggcgtcggcgtcgtcttcatcctccgcagcgagctccccgacgacgaggcgctcccttacaaggccatggccgccgccgtcctcgccaacgtcgtcgagtctagcattgatccggataccaccgtggtgaacaaagaaggccacgtcctcacgtccaaggagaaccaccggggccactccatcgtggagctcccgaacggaagcgctcgacgtcgccgcgacgaggctgctcgtcacctgtcaatgcacatggggcacaccatcgccgagaggctctgcaagacgcagagcgccgccggcgccagcgaaagaggcagacgaggggcggagggccgcgctgctgcgggcggtttgcggtcgtgggcggcggcatgtcagcggcgtcgggctccgcgtgcgggtgtttgctccgggaccatagtgcgtcgggcggcgtcgtcgtctcgccgcggactggtgatgagcagatgcaacagctggaggtcggccggcggagagccgccgccgccgccgccggtggcagctcctccctcgccggccgctgcccgcgcccgcaacgcccatctgctctctgcagccgccgtggagaggggaggggaagaagtggctgacatgtgggacccacgtgggtcccactctgagtcagctgtcacatcagacaaaaccggagtcaaaaccgttcaggattatactggttttataagttga

SEQ ID NO: 78533 - DNA, 3837 bp, Oryza sativa
  Clone ID: PAT_MRT4530_78330C.1
atggcgtcgatgaagtatgatctaccgctgctagactacaagacgagattctcgctgtggcaagtcaagatgcgagctgttctagctcaaacttcggatcttgatgaggcgctggaaagtttcgggaagaagaaaacgactgagtggaccactggggagaagcggaaagatcgtaaggctctgtcgctaatccaacttcatctatctaatgatattttgcaagaagtgttgcaggaaaagactgctgcagaactttggctcaaactggaatcgatctgcatgtctaaagatctaaccagtaagatgcatatcaagatgaaattgttctcgcacaagttgcaggagagtggttctgtgttgaaccacatatcggtcttcaaggagatcgttgccgacctagtgtcgatggaggtacagtttgatgatgaagatttaggtcttttactgttatgctcactgcctagttcatatgaaaattttcgtgacaccatacttttaagccgtgatgaactaaccctagcggaagtttatgaggcgctccaaaacagggagaagatgaaaggtatggttcagtctgatgcgtcgtcctctaagggcgaagcattgcaggtcaaaggcagatctgagcagagaacctacaacgacagcaatgatcgtgacaagagtaagagtagaggccgttctaaatctagaggtaaaaagttctgtaagtattgcaaaaagaaaattcacttcattaaagaatgttggaagctgcagaataaggagaaaaggaaatctgatggtaaggcctctgttgttaccagtgctaaaaactctgattcaggagattgtcttgttgtttttgctggttgtgttgctagtcatgatgaatggatacttgatactgcatgttcgtttcatatctacattaacagagattggtttagttcttacaagtctgtgcagaatggagatgttgtgcgcatgggaaatgataacccacgtgagatcgtgggcattggctccgttcagatcaagactcatgatggcataacacgcacgctgaaagatgtgagacacataccagggatggcgagaaatctcatctctctcagcacacttgatgcagaaggatacaaatactccggttcaggtggagttgtaaaggtatcgaaaggttctcttgtttacatgattggtgatatgaattctgcaaacttatatgtccttagaggaagtacattacatggttctgttaccgctgctgctgttactaaagatgaacctaataagactaacctgtggcacatgcgtcttggacatatgagtgaacttggtatggcagaattgatgaagaggaacctgctggatggctgcactcagggtaacatgaagttctgtgagcgctgtgtttttggtaagcacaagagggtaaaattcaatacctcagttcatcgcaccaaaggtatacttgattatgtacatgctgatttgtgggggccttctcgtaagccctctctcggtggtgctcgttatatgcttaccattattgatgattactctagaaaagtgtggccttattttctgaaacataaagatgatacatttgctgcttttaaggagtggaaagttatgatagaaaggcaaactgaaaaggaggtaaaagtacttcgcactgacaatgctggtgaattttgttcggatgcttttgatgattactgcaggaaggaaggcatcgttaggcatcacaccatcccgtacactccacagcagaatggtgtagctgagcgcatgaatagaaccatcatctccaaggctcgttgcatgctgtccaacgctcgcatgaacaagcgtttttgggcagaggctgctaacaccgcctgctacttgatcaacaggtcgccttctatcccacttaataagaaaactcccattgagatatggtctggtatgcctgctgattattcacagttgagagtttttggatgcactgcttatgctcatgttgataatgaaaaattagagcctagagctattaagtgtctatttcttggttatggtttaggagtaaaaggatataagttatggaatcctgaaactaacaagaccttcatgagcaggagtgttgttttcaatgaatctgttatgtttaatgacagcttgcccacagatgtcataccaggtggttcagatgaggagcagcaatatgttagcgtgcaggtagagcacgtggatgatcaggaaactgaaattgttggtaatgatgttaatgatactgttcagcactcacctcctgttttgcagccacaagatgaacctattgcccatcgcagaacaaagaggagttgtggagctccagtccgtcttattgaggaatgtgatatggtttattatgcttttagttgtgctgaacaggtggagaatactcttgagccagccacatacactgaagctgttgtttctggagaccgtgagaagtggatctcagctatgcaggaggagatgcagtctcttgagaagaatggcacatgggagcttgtgcacttgccaaaacagaagaagcctgttcgttgtaaatggatcttcaagagaaaggagggtttatctcctagcgagcctccgaggtttaaggcaaggttagtagcaaaaggtttcagtcaaattgttggtgttgattataatgatgtgttctctccagttgtaaagcatagttcaattcgcacattcttcagtattgttgctatgcatgatcttgagcttgagcagttagatgtgaagacagcatttttacatggagagcttgaggaggagatatacatggaccaaccagaagggttcatagtacctggtaaggaggattatgtttgcaagttgaaaagatctttgtatggtttgaaacagtctcctcgtcaatggtataaaaggtttgattcatttatgttgtcacatggctttaagaggtctgaatttgatagctgtgtgtatattaaatttgttaatggatcacctatatacttgctgttatatgttgatgatatactgattgctgccaagagcaaggaacaaattactacattgaagaaacagttgagtagtgagtttgatatgaaggatcttggtgctgctaagaaaattctaggcatggaaatcactagagacaaaaattctggtttgttatttcttagtcagcaaagctacattaagaaggttcttcagtgttttaacatgcatgatgcaaagcctgttagcactcctattgcacctcattttaaattatcagctttacaatgtgctaatactgatgaggatgtagaatacatgtctagagttccatattctagtgctgttggttctttgatgtatgccatggtttgctcccggccagatttatctcatgctatgagtttggttagtagatacatgactaatcctggtaaagaacactggaaagctgttcagtggattttcaggtacctcagaggcacagctgatgcttgcttgaagtttggcaggactgataaggggcttattggatatgtggattctgattttgctgcagatttggataagagaaggtcactcacagaatacatggctattgctgaaacatgtaaagaatcagtttggctgaaaggattgtttgctgagctttgtggagttgattcttgcattaacttgttttgtgatagtcaaagtgctatatgcctcaccaaagatcagatgtttcatgagaggacaaagcacattgatatcaagtaccattatgttcgcgatgtagtcgcgcaaggtaagctaaaggatgaaggattgattcacgctacaagaaggaatttgtctcaaggtggagtttgttga

SEQ ID NO: 78534 - DNA, 2753 bp, Oryza sativa
  Clone ID: PAT_MRT4530_78331C.1
actcataaataaaatggatatcatgatatccaatccagtgtgccatcgatctctcttgatttctgtcacgttgtatttccaataagctatgataatcacgatctgccatcatatattaaaaaaaaaaaaaaaaaaaaaaagggcggccgcccttttttttttttttttttttgttgtaaatctgtatcgtgtaagaccacaatgttaaagagagaaacaacggagtgaacggcaagaagcagcgatgatcattatataatggttgtgcacagcaacttgtttttcatgttgtaagcaggacacggcacttttagcgtgttgctgatatgccatcaatcaataacatcttacaagccgttttcgcaagttaaaagaaaaaagaaggggacaatcgagcatgagttatcacaatgcagcaacaggtagcaagccgttgtgcctgagcagagcttccggtgatggctcccgtccgcggaaagacacaaacacctcgagtggagattttccacctccaagcgcaaggactgtttctctgaatcgtctgccagtttcctcaattgccttctcattgtccaaaccaacgtcttcaaatgctgagaatgcatcagctgacaatacttcagcccacttgtaactgtagtatccagctgcatagcctcctgcaaatatatggctaaagctgcacaggaatttatcctccggaagaggagcaagaacctgtgttcgctcagcaactcttcggtcgacatcatatatggacaatgaaccatttggatcgtaagtcgtatgcagctccatgtccacactagcaaaacgtatctgacgtaaactgaaggtgccagcacggaaattctttgcagcgacaagctttgcataaatttcctctggaagaagttcgcctgtttcataatgctttgcaatgctcaaaagagtattcctggcaccaacaaaacaattgtggtagcaccagttctccatgaactgagagggcagctctacagcatcccattctactccacgaataccagaaacaaatccttcatcttgtttggtaagcatgtgctgcagcgcatgaccaaattcatggaacacagtttcaacctcacggaaggtcataagactgggtttatcaccaactggtggggtctgattacacaccatatgggcaacaggaagcctgacaggtgaaccattgcgagcaagcacacgactgcgagaaaaaaccacattcatccaagcccctccacgcttctcagatggtcttgaatatggatcgaagtagaaataagcaacagggctattcgaagaatctttgacacagtaaaatttgacatcactattccaaacaggagccagtccatctgcaggctctacgctaacaccaaagagcctatttgcgagactgaagaggccatccataaccttgggtagtgcaaagtaaggacgcaaatcttcctcgttgatatcatatttagattcccggagtcgttcactccagaagcttaggtcccagtgagccaggtcattggcttctggagaagcagactctttagcaaaggcttttagatcttccatatctttaacagcatgatcccaggaggcagcacggagtttctcaagaagctcttctacacggtcaacagttgccattttctgagccatgcttacctcagcatagttcttgtagccgagtagcttagccttctccagcctcaactttagaatttgactgatgatattggtgttatcaaggtcgccactagaggcacgggttaggtaagcacgataaacttcttcacgaagtgctctgttccgtgcatgctgcataacagcaatatagcttggcgcatccaatgtgatgatccatggtccgttttcagccgaagcattttcatgaccctttgacgcggcagtctgtgctgctaagccaagtgctgtggcaggtaacccatcaatttcattcttatcagtaattaatttctcaaatttcttagttgcatccagcacattttcactgaacttttgtgttaacttctcaagctcctgctcgatttgattaaatttctccctctgttcatcctcaagtgcgactccacttagaacggcttccttgatttgggcttctactatacgcttgcgagcctcactgagggtttcccagtctgaagaattccttatggcgttgaaagcttggtatataggcttgctctggcccagccttagttggaatttgactttgtcaggctgaacgtcctcgacggcggcgcggaggtcggaagagtccttgacggccttgaggtggtcgacggtgccccagacgacctcgaggctgtcgacgatccgctcgagcggctcgaccagcttcccccaggtgggctgcacgcccttctcgaggtcggtgagctcgccctcgaggcgggcgaggagcgtgcggacggcggggcggacgtggatgggctcgacgcggtcgaagggcgggaagtcgaagtcggcgaggagcgggttgtcgtcggtggccatggaggaggaggcgtaggcggcggagcaggtggcgggcgaggggcggcgggaggcggggcagaaggcgcgaagaggggaggaggcggggaggaggaggagggccctagacctagacctagaggtatatgaggaggaggtagggtttgggaggcgagctcgagcgacaagtgggagacggatgaggaaggaggaagccgagacgatgagaaacaccatggcgacgccgataaagc

SEQ ID NO: 78535 - DNA, 2039 bp, Oryza sativa
  Clone ID: PAT_MRT4530_78332C.1
caagttacgacacaggctgttctaacgcaatcttcggatcttgatgaggcgctggaaagcttcgggaaaaagaagaaggatgaatggaccgctgaggagaagaggaaagatcgtaaggctctattactgattcaatttcatctatctaatgatattttgtcaaaagtgttgcaggaacaaactgctgcagaactttggctcaaactggaaactggttctatgttgaaccacatatcagtcttcaaggagatcgttgccaacctagtgtcgatcgaggtacagtttcatgataaagatttaggtcttctattgttatgctcacttcctagttcgtatgcaaatttccgtgacaccatactattaagccgtgaagaactaatccttttggaagtttatgaggcactccagaacagggagaagatgaaaggagactgtcttattgtttttgctggttgtgttgctggtcatgatgaatggatatttgataccgcatgtttgtttcatatctgcattaacagagattggttcagttcttacaagtttgtgcagaatggagatgtcgtgcgtatgggagatgataacccacgtgagatcgtgggcattggctctgttcagatcaagacgcatgatggcatgacacgtacgctgaaagatatgagacacataccaaggatggtgagaaatctcatctctctcagcacatttgatgcagaaggatacaaatactccagttcaggtggagttgtaaaggtatcaaaaggctctctcgtttatatgataggtgatctgaattctgcaaagttatatgtccttagaggaagtacattgcatggttctgttaccgctaccactgtttctaatgatgaacctagtaagactaacatgtggcatatgcgtcttggacatatgagtgaacttggtatggtagaattgatgaagaggaacctgctggatagctgtactcagggtaacatgaagaaggaaaccatcgtcaggcatcacaccaccccgtacactccgcaacagaatggtgtggctgagcgcatgaacagaaccatcatctcgaaggctcgttgtatgctgtccaacgctcgtatgaacaagcgtttttgggcagaggctactaacaccgccttgatcaacaagtcaccttctaccccacttaataagaaaactcccattgagttgagagtttttggctgcactgcttatgctcatgttgataatggaaaattagagcatagagctattaagtgtctgtttcttggttatggtttaggagtaaaaggatataagttatggaatcctgaaactaaaaggattgtcatgtgcaagagtgttgttttcaatgaatctgttatgtttaatgagagcttgtccacagatgttataccaggtggttttgatgaggagcaccaatatgtcagcgtgcaagtggagcacgtggatgatcaggaaattgaaattgttgataatgatgttcatgatactgtcaagcactcatcccctgttttgcagccacaagatcaacctattgcacatcgcagaacaaagaggagttgtggagctctagtccatctaattgaggaatgtgatatggtttattatgcttttagttgtgctgaacaagtgaatactcatgagccggctgcatatactgaagctgttgtttctgatgatcgtgagaagttgatctcagctatgcaggaggagatgcagtctctcgagaagaatggcacatgggagcttgtgcgcttgccaaaacagaagaagaccatccattgcaaatggatattcaagggaaatgagggtttatctcttagtgagcttcggaggtttaaggcaagtattgttgctatgcatgatcttgagcttgagcagttagatgtgaagacaacatttttacatggagagcttgaggaggagatatacatggaccagccagaagagttcataatacctagtaaggaggattatatttgcaagttgaaaagatccttatatgatttgaaacagtctcctcgtcaatggtataaaag

SEQ ID NO: 78536 - DNA, 462 bp, Oryza sativa
  Clone ID: PAT_MRT4530_78333C.1
cccacgcgtccgcccacgcgtccggccttgttaagcttgcagagacaattagtattgtgcatgacttgaggactaatatattattccatacaaggacatttgtgtaataacaccagataacttttatttgtagcttaactagttcttataggaatttattatacttcacttaagttgctctcttctaataaattttagatgcatgagatcactttttatagtagtcaccactagatgagcttttaaacaggagtctaactgtcctgcttttgttgcagctgatgaggttcttattataaaaagtttgacgcacaaagaaatcaatgcggtgataaaggaacttccaaacccagtttatctttttcaaggcatagtcttgagaagaggtgctaaagggactggtatgaagtcaatagaattggcccttccatgtgtgatattatcgacatgtatggattcaca

SEQ ID NO: 78537 - DNA, 2670 bp, Oryza sativa
  Clone ID: PAT_MRT4530_78334C.1
atggcgtcgatgaagtatgatctaccgctgctagactacaagacgagattctcgctgtggcaagtcaagatgcaggctgttctggcgcaaacttcggatcttgatgaggcgctggaaagcttcgggaagaagaaatcgactgaatggaccgctgaggagaagcggaaagatcaactttggctcaaactggaatcgatctacatgtctaaagatctaaccagtaagatgcatatcaagatgaagttgttctcgcacaagttgcaggagagtggttctgtggtcttcaaggagatcgttgccgacctagtgtcgatggagaataaggagaaaaggaaatctgatggtaaggcctctgttgttactagtgctgaaaactctgattcaggagattgtcttgttgtttttgctggttgtgttgctagtcatgatgaatggatacttgatactgcatgttcgtttcatatctgcattaacagagattggtttagttcttacaagtctgtgcagaatggagatgttgtgcgcatgggagatgataacccacgtgagatcgtgggcattggctccgttcagatcaagactcatgatggcatgacacgtacgctgaaagatgtgagacacataccagggatggcgagaaatctcatctctctcagcacacttgatgcagaaggatacaaatactccggttcaggtggagttgtaaaggtatcgaaaggttctcttgtttacatgattggtgatatgaattctgcaaacttatatgtccttagaggaagtacattacatggttctgttaccgctgctgttgtttctaaagatgaacctagtaagactaacctgtggcatatgcgtcttggacatatgagtgaacttggtatggcagaattgatgaagaggaacctgctggatggctgcactcagggtaacatgaagttctgtgagtactgtgtttttggtaagcacaagagggtaaaattcaatacctcagttcatcgcaccaaaggtatacttgattatgtacatgctgatttgtgggggccttctcgtaagccctctcttggtggtgctcattatatgcttaccattattgatgattactctagaaaagtgtggccttatttcctgaaacataaagatgatacatttgctgcttttaaggagtggaaagttatgatagaaaggcaaactgaaaaggaggtaaaagtacttcgcactgacaatggtggtgaattttgttcggatgcttttgatgattactgcaggaaggaaggcatcgttaggcatcacaccatcccgtacactccacagcagaatggtgtagctgagcgcatgaacagaaccatcatctccaaggctcgcatgaacaagcgtttttgggcagaggctgctaacaccgcctgctacttgatcaacaggtcgccttctatcccacttaataagaaaactcccattgaggtatggtctggtatgcccattgaggtatggtctggagtaaaaggatataagttatggaatcctgaaactaacaagaccttcatgagcaggagtgttgttttcaatgaatctgttatgtttaatgacagcttgcccacagatgtcataccagtccgtcttattgaggaatgtgatatggtttattatgcttttagttgtgctgaacaggtggagaatactcttgagccagccacatacactgaagctgttgttactggagactgtgagaagtggatctcagctatgcaggaggagatgcagtctcttgagaagaatggcacatgggagcttgcaaggttagtagcaaaaggtttcagtcaaattgctggtgttgattataatgatgtgttctctccagttgtaaagcatagttcaattcgcacattcttcagtattgttgctatgcatgatcttgagcttgagcagttagatgtgaagacagcatttttacatggagagcttgaggaggagatatacatggaccagccagaagggttcatagtacctggtaaggaagattatgtttgcaagttgaaaagatctttgtatggtttgaaacagtctcctcgtcaatggtatgaaaggctcagaggtacagctgatgcttgcttgaagtttggcaggactgataaggggcttgttggatatgtggattctgattttgctgcagatttggataagagaagtgctatatgcctcaccaaagatcagatgtttcatgagaggacaaagcacattgatatcaagtaccattatgttcgtgatgtagtcgcgcaagcggcggctgacggagggggtgagttgcggcgggggcgcacggagggggcgagcggccgtcctggctcgtggagggagggaggaacgacggcggcgcaggcgagcggaaggagggaggaggtggcgacggcggcagcggcgcaagcgcccggaaggagggaggaggcgggggagggggccggcgctggcgcaagcgtgcggaaggagggaggacgcagcggcggtggcgccagatctgagggggtggcggcgccggctccggctcttcgtcgtcgtcctcgtcctcgtcagcagggcgccggcttcggctcttcgtcgtcgatgagccgccgccgccactcctcgtcgtcgtcatcgtcactagggccggtgccagctcatcgtcgtcgtcactag

SEQ ID NO: 78538 - DNA, 1735 bp, Oryza sativa
  Clone ID: PAT_MRT4530_78335C.1
ttaactaaaccatatatctctatctcttctttatctctatctctactattataaaaatttaaggtgtttttatcgagattttagtaggtcaccccggcgaagcgggaggctgcggctgcggctgccgccggagccaccgggcctcccgctcgtcggccacctgcaccttttcaggaagccgctccaccgcaccctggcgcgcctcgccgcccgccacggtgccgtgttccgccttcgcctgggatcccgccgcgtcgccgtcgtctcgtcggcgccggctgccgaggagtgcctcggcccgcacgacctcgcgttcgccgaccagccgcggctgccgtccggggagatcctgtcgtacgagtggtccaccatgggcaccgccagctacggtccgtactggcgccacatccgccgcatcaccgtcaccgagctgctctccgcgcaccgggtgcagcacttcgccggcgtcaacgcccgcgaggtgcgcgccctggcgcgccgcctctaccggcgggccgccgccgcggccgccgcgggggcgcgcacgcgtgtggagctcaagtcgcggctgttcgagctgctcatgaacaccatgatgtccatgatctgcgagaggaccttctacggcgccgacgacgacgaggtgagcgaggaggcgcggtggttcaggtcggtggtgaaggagacgatggagctgagcggcgcgtcgacggtgtgggacttcctaccagcgccggcgcgctggctggacgccggcaggatgacgcggcggatgcgggagctgtccgacagccggacgaggttcttgcagaggctgatcgacgaccagaggaaggacatggacgccgactccgacgatcacgcgccggcgaagcggcggaccatgatcggcgtcctcctctccctgcagagaaaggaccccgactcgtgccccgaccagctcatccgctccctctgcatcggctccctgcaagccgggacggacacgtcggcggcgaccgtggagtgggcgatgtcgctgctgctgaacaaccccggcgcgatggcgagggctcgcggcgagatcgacgcgtgcgtggggcagccggcggcgcggctactggaggcggccgacctccccaagctgcactacctccggtgcgtcgtgatggagacgctccggctgtacccgccggtgccgctgctggcgccgcacgagtcgtccgccgactgcgtcgtcgccgggttccacgtcccccaggggacgatgctgctggtgaacacgttcgccattcacagggatccccaggtttgggatgaaccagaagccttcatcccagataggtttgcggatggaaaaaacgaagggaagatggtgatcccgtttggtatggggagacgggggtgcccaggagagaatttggggatgcaaatggtaggacttgcccttgggacattgatccagtgttttgattgggaaagggttggggaagagctggttgacatgagggagtgctctggccttacaatgccaaaggagttgcctctcgaggccctctatcaacctcgagcttccatggttgatcttcttacgaagatttagtcagcatccataaaaaataatttgttgttcaacttttgtaatgtaaggaataatcgggcaagtgcggtttcaaagataattgggctgttcatcttctttaaaaaaaaaaaataaggacgaccgctcgcgcccacgcgtccgcggacgcgtggg

SEQ ID NO: 78539 - DNA, 152 bp, Oryza sativa
  Clone ID: PAT_MRT4530_78336C.1
ccacactcttctaattatttatttaaacacaaatatgttttgagtataatggctcatacactttgatttaaatgtcactaaattcgtaatcacataagcttaataactctagcctgcaaaggcacaatattaagaaacatcatgaaatcaaa

SEQ ID NO: 78540 - DNA, 1917 bp, Oryza sativa
  Clone ID: PAT_MRT4530_78337C.1
atggagatgtcgtgcatatgggagatgacaacccgcgttagatcgtggacgcatgatggcatggcacacatgatgaaagttgtgagacacatactagggatggcgagaaatctcatctctcttaccagacttgatgcagaaggatacaaatactccggttcaggtggagttgtaaaggtatcaaaaggttctcttgtttatatgataggtgatctgaattctgcaaagttatatgtccttagaggaagtacattacatggttctgtttccgctgctattgtttctaataatgaacctagtaatactaacctatggcatatgcgtcttggacatatgagtgaatttggtatggcaaaattgatgaagaggaacctgctggatggttgtactcagggtaacatgaagttatgtgagcactgtgtttttggtaaggacaagagggtaaaattcaatacctctgttcatcgcaccaaaggtatacttgattatttgcatgctgatttgtgggggccttctcgtaagccctctaatggttgtgctcgttatatgcttaccattatcgatgattactctagaaaagtgtggacttatttcctgaaaaataaagatgatacttttgttgcttttaaagagtggaaagttatgataaaaagacaaattgaaaaggaggtaaaagtacttcgcattgacaatggtggtgaattctgttcggatgcttttgatgattactgcaggaaagaaggcatcgttaggcatcacaccatcccgtacactccgcaacagaatggtgtggccgagtgcatgaatagaaccatcatctcgatggctcgttgtatgctgtccaatgctcatatgaacaagtgtttttgggcagaggctgctaacaccgcctgctacttgatcaacaggttgccttctatcccacttaataagaaaactcccattaaagtatggtctgatgttataccaggtggttctaatgaggagcagcaatatgtcaacgtgcaggtggagcacatggatgatcaggaaactgaaattgttgataatgatgttcatgatactgttcagcactcaccccctgttttgcagccacaagatcaacctattgcacatcgtagaacaaagaggagttgtggagctctagtccgtctgattgaggaatgtgatatggtttattatgcttttaattgtgctaagcaggtgaagaacactcatgagccggctgcatacactgaagctgttgtttctggtgatcgtgaaaagtggatctcaactatgcaggaggagatgcaatctctcgagaagaatgacacatgggagcttgtgcgcttgccaaaacagaagaagactgtccgttgcaaatggatcttcaagagaaaggagggtttatctctcagtgagcctccaaggtttaaggcaaggtaccttggaggcacgacagcggcttgcttgaagtttggcaggactgataagggacttgttggctatgtggattcaaattttctttctgatttggataagcgaagatcactcacaggtaatgtgtttactattggtagttgtgctgtgagttggaaggcaacattgcagcctgttgttgcccagtctaccactgaagcaaaatacatggttattgctgaagcatgtaaggaatcagtttggctgaaaggattgtttgctgagctttgtggagttgattcttgcattaacctgttttgtgacagtcaaagtccatatacctcactaaagatcagatgttccatgagaggaaaaagcacattgatatcaagtaccattatgttcgttggaggcatgtcgcgagggcctttgcccaaacctgccgaaactattaaggaacggcaaagcggccagaagccaagtttggatgaaggcagagcccgtggcgaagcatga

SEQ ID NO: 78541 - DNA, 2658 bp, Oryza sativa
  Clone ID: PAT_MRT4530_78338C.1
atggcatcgatgaagtatgatctagcgctgctagactacaagatgagattctcgctttggcaagttaagatgcgggctgttctggcgcaatctttggatcttgatgaggcgctggaaagcttcgggaagatgaagaatactgaatggaccactgaggagaagcggaaagatcgtcaagctctgtcgctgatccaacttcatctatctaatgatattttgcaagaagtgttcggagccggtctagatgaaaccatggataactacacgtctcgtgggcaaaacggaaggttttcaggacaaatctacaaagaggtgtcgcactctcgcaacggcggtggacgatttacagcgcaaatcgacaaagatggacaaactaaactagaactagaagcaaaaggcgaagcattgcagattagtggcagatctgagcagagaacctacaacgacagcaatgatcgtgacaagagccagaacggtagaggccgttcgaagtccagaggtaaaaagttctgtaagtattgcaaaaagaaaaatcacttcattgaagaacgtaggaagctgcagaataaggagaaaaggaaatctgatggtaaggcctctgtcgttaccggtcctgaaaactctgattcaggagattgtcttgtcatttttgctggttgcgttgctggtcatgatgaatggatacttgatactatcaagacacatgatggcacgacacacacgctgaaagatgtgagacacataccagggatggcgagaaatctcatctctcccagcacacttgatgcagaaggatacaaatactctggttcaggtggagttgtaaagggtaacatgaagttctgtgagcactgtgtttttggtaagcataagagggtaaaattcaatacctcaattcatcgcaccaaaggtatacttgattatgtacaagctgatttgtgggggccttcacgtaagccctctcttagtggtgctcgttatatgcttaccattatcgatgattactctagaaaagtgtggccttatttcctgaaacataaagatgatacttttgttgcttttaaagagtggaaagttacgatagaaaggcaaactaaaaaggaggtaaaagtacttcgcactgacaatggtggtgaattttgtttggatgcttttcatgattactgtaggaaggaaggcatggttaggcatcacaccatctcatgcactccacaacagaatggtgtggctgagcgcatgaacagaaccatcatctccaaagctcgttgtatgctgtccaacgctcacatgaacaagcgtttttgggcagaggccgctaacaccatctgctatttgatcaacaggtcacctactatcccaattagtaagaaaactcccattgacgtatggtttggtatgcctgctgattattcacagatgagagtttttggatgcactgcttatgctcatgttgataatggaaaattagagcctagagttattaagtttttgttccttggttatggttcaggagtaaaaggatacaagctatggaatcctgaaactaataaggccttcatgagcagaagtgttgttttcaatgaatctgttatatttaatgacagcttgtctacagatgtcataccaggtggttctgatgaggagcagcaatatgttagcatgcagccacaagatgaacctattgcacatcgcagaacaaagaggagttatggagctccaatccgtcttattgaggaatgtgatatggtttattatacttttagttgtggtgaacagaatagttcaattcgcacattctctagtattgtttgtatgcatgatcttgagcttgagcagttagatgtgaagacagcattttcacatggagagcttgaggaggaaatatacatggaccagccagaagggttcatagtaccttctaagcaggattatgtttctttacaatgtgctagtactgatgaggatgtagaatacatgtcaagagttccatattctagtgcggttggttttttgatgtttggcatggtttgctcccgtccagatttatctcatgctatgagtttggttagtagatacatggctaatcctgacaaagaacattggaaagctgttcagtggatttttaggtacgtcagaggcacaactggtacttgcttgaagtttgtcagaactgataaggggcttgttggctatgtggattcagattttaatgccgatttggataagacaagtcaaagtgccatatacctcactaaagatcagatgttttataagaggacaaagcacattgatatcaagtaccattatgttcgtgatgtagtcgcgcaaggcctgggggtatgcgaaatacgggggagttaccttcccgtccagccacgaggccctacagcctggccctccccccacacctcggaagacgtagaggcagccagggggcctcggggtgccacgtcacgcccctcgggccctcgcgctacctcgccccgaggccctcgcccagctaccacatggcgaggggagcgagtgcggcggagactcaggctgaaccgccatcaatgcgcggcgccccaaccgtccctcaccgcatttaatgtagtaagggcggacgtgcggtgctgcccgattgacccacgtcaatttggcgtgattagactgtga

SEQ ID NO: 78542 - DNA, 2346 bp, Oryza sativa
  Clone ID: PAT_MRT4530_78339C.1
atggcgtcgatgaagtatgttctaccgctgctagactacaagacaagattctcgctgtggcaagtcaagatgcgggctgttctggcgcaaacttcggatcttgatgaggcgctgaaaagcttcgggaagaagaaatcgactgaatggaccgctgaggagaagcggaaagatcgtaaggctctgtcactgatccaacttcatctatctaatgatattttgcaagaagtgttgcaggaaaagactgctgcagaactttggctcaaactggaatcgatctgcatgtctaaagatctaaccagtaagatgcatatcaagatgaagttgttctcgcacaagttgcaggagagtggttctgttttgaaccacatatcggtcttcaaggagatcgttgccgacctagtgtcgatggaggtcagaggcagatctgagcagagaacctacaacgacagcaatgatcgtgacaagagccagagtagaggccgttctaagtctagaggtaaaaagttctgtaagtattgcaaaaagaaaaatcacttcattgaagaatgttggaagctgcagaacaaggagaaaaggaaatttgatggtaaggcctctgttattaccagtgctgataactctgattcagaagattgtctcgtcgtttttgctggttgtgttgctagtcatgatgaatggatacttgatactgcatgttcgtttcatatttgcattaacagagatgggtttagttcttacaagtctgtgcagaatggagatgttgtgcgcatgggagatgataacccacgtatggcgagaaatctcatctctcttagcacacttgatgcagaaggatacaaatactccggttcaggtggagttgtaaagaggaacctgctggatggctgcactcagggtaacatgaagttctgtgagcactgtgtttttggtaagcacaagaggaaaagtgtggcttatttcctgaaacataaagatgatacatttgctgcttttaaagagtggaaagtcatgatagaaaggcaaactgaaaaggaggtaaaagtatttcgcactgacaatggtggtgaattttgttcggatgcttttgatgattactgcaggaaggaaggcatcgttaggcatcacaccatcccgtacactccacagcagaatggtgtggctgagcgcatgaatagaaccatcatctccaaggctcgttgtatgctgtccaacgctcgcatgagcaagcgtttttgggcagaggctactaacaccgcctgctacttaatcaacaggtcgccttctatcccacttaataagaaaactcccattgaggtatggtctggagtaaaaggatataagttatggaatcctgaaactaataagacattcatgagcaggagtgttgttttcaatgaatctgttatgtttaaagacagcttgcccacagatgtcataccaggtggttctgatgaggagcagcaatatgttagcgtgcaggtggagcacgtggatgatcaggaaactgaaattgttagtaatgatgttaatgatactgttcagcactcacctcctattttgcagccagaagatgaacctattgcacatcgcagaacaaagaggagttgtggagctccagtccgccttattgagaaatgtgatatggtttattatgcttttagttgcgctgaacaggtggagaatactcttgagccagccacatacattgaagctgttgtctctggagaccttgtaaagcatagttcaattcgcacattcttcagtattgttgctatgcatgatcttgagcttgagcagttagatgtgaagacagcatttttacatggagagcttgaggaggagatatacatggaccagccagaagggttcatagtgcctgttgatgatatgctgattgctaccaagagcaaggaacaaatcagtacattgaagaaacaattgagtagtgagtttgatatgaaggatcttggtgctgctaagaaaattctagctttacaatgtgctagtactgatgaggatgtggaatacatgtctagagttccatattctagtgctattagttctttgatgtatgccatggtttgctcccgtccaaatttatctcatgctatgagtttggttagtagatacatggctaatcctggtaaagaacactggaaagctgttcagtggattttcagtcaaagtgctatatgcctcactaaagatcagatgtttcatgagaggacaaagcacattgatatcaagaaccattatgttcgcgatgtagtcgcgcaaggtaagctgaagggtgaaggattgtttcatgctataagaaggaatttgtctcaaggtggagtttgttga

SEQ ID NO: 78543 - DNA, 695 bp, Oryza sativa
  Clone ID: PAT_MRT4530_7833C.1
acagaggtagatagttcctctcaatcaataaagatctaagcagcggaaaataaaaaaacggcgcagacggctccactccacaggcagcttgaccaaggctacacctaatcctccacaccatcagcctcattgcagaactcttcctctgatgaatgattgcaaggaaaaggggatttattgcgtcagcgggctagggtttggtggaccgggcgcacgggcggcggttcacgcgaacggacggccgagatctaaccgatccaagatggacggccgagatcgatcgggtccacggcggttcacggcggacgaccctgatgacgtcagcggtgacgtcaccgacagcggcggcggctcggcagaggagacggctcgggcggcgcacgctcgccggcgaacggcggcgccaggacgcaaacggagggcaccaagacgtagaggacaacacggcgaactcaccggtgacctaaacggcggcggaagaccaacggacggcgacggcgacgaggaggaagcggcgggaaccttcgggtcaacgacggcgaagctgctcctgggctcggaggcggcggcgaaggcccacggcgacggcaacggcgaaggaaacctcggcttggagagaaagaaaaccgatccgaatcgaactcgatcccaaagctttccaaagcgatttaaccgatgattccaaaggagaaaag

SEQ ID NO: 78544 - DNA, 3411 bp, Oryza sativa
  Clone ID: PAT_MRT4530_78340C.1
atggtgtcgatgaagtatgatctaccgctgctagactacaagacgagattctcgctatggcaagtcaagatgcgggctgttctggcgcaaactttggatcttgatgaggagagtggttctgtattgaaccacatatcggtcttcaaggagatcgttgccgacctagtgtcgatggaggtacagtttgatgatgaagatttaggtcttttactgttatgctcactgcctagttcatatgcaaattttcgcgacaccatacttttaagccatgatgaactaaccctagcggaagtctatgaggcgctccaaaacagggagaagatgaaaggtatggttcaatctgatgcatcgtcctctaagggcgaagcattgcaggtcagaggcagatttgagcggagaacctacaacgacagcaatgatcatgacaagagccagagtagaggtaaaaaattatgtaagtattgcaaaaagaaaaatcacttcattgaagaatgttggaatctgcagaataaggagaaaaggaaatctgatggtaaggcctctgttgttaccagtgctgataactctgattcaggagattgtcttgtcgtttttgctggttgtgttgctaatcatgatgaatggatacttgatactgcatgttcgtttcatatctgcattaacagagattggtttagttcttacaagtctgtgcagaatggagatgttgtgcgcatgggagatgataacccacgtgtgatcatgggcattggctccgttcagatcaagacacatgatggcatgacacgcacgctgaaatatgtgagacacataccagggatggcgagaaatctcatctctctcagcacacttgatgcagaaggatacaaatactccggaagtacattacatggttctgttaccgctgctgctgtttctaaagatgaagctagtaggactaacctatggcatatgcgtcttggacatatgagtgaacttggtatagcagaattgatgaagaggaacctgctggatggctgcactcagggtaacatgaagttctgtgagcactgtgtttttgatgcttttgatgattactgcaggaaggaaggcatcgttaggcatcacaccatcccgtacactccacagcagaatggtgtggctaagcgcatgaacagaaccatcatctccgaggctcgttgtttgctgtccaatgctcgcatgaacaagcgtttttgggcagaggctgctaacaccgcctgctacttgatcaacaggtcgccttctatcccacttaataagaaaactcccattgaggtatggtctggtatgcctgctgattattcacagttgagagtttttggatgcactgcttatgctcatgttgataatggaaaattagagcctagagctattaagtgtctgtttcttagttatggttcaggagtaaaaggatataagttatggaatcctcaaactaataagacattcatgagcaggagtgttgttttcaatgaatctattatgtttaatgacagcttgcccacagatgtcataccaggtggttctgatgaggaacagcaatatgttagcgtgcaggtggagcacgtggatgatcaggaaactgaaattgttggtaacgatattaatgatattgttcagcactcacctcctgttttgcagccacaagatgaacctattgcacatcgcagaacaaagaggagttgtggagctccagtccgccttattgagaaatgtgatatggtttattatgcttttagttgtgctgaacaggtggagaatactcttgagccagccacatacactgaagctattgtttctggagaccgtgagaagtcgatctcagctatgcaggaggagatgcagtctcttgagaagaatggcacatgggagcttgtgcacttgccaaaacagaaaaagcatgttcgttgtaaatggatcttcaagagaaaggagggtttatgtcctagcgagcctccgaggtttaaggcaagtattgttgctatgcatgatcttgagcttgagcagttaggtgtgaagacaacatttttacatggagagcttgaggaggagatatacattgaccagctagaagggttcatagtacctggtaaggaggattatgtttgcaagttgaaaagatcattgtatggtttaaaacagtctcctcgtcaatggtataaaaggtttgattcatttatgttgtcacatggctttaagaggtctgaatttgatagctgtgtgtatattaaatttgttaatggatcacctatatacttgctgttatatgttgatgacatgctgattgctgccaagagcaaggaacaaatcactacattgaagaaacagttgagtagtgagtttgatatggaggatcttggtgctgctaagaaaattctagatttatctcatgctatgagtttggttagtagatacatggctaatcctagtaaagaacactggaaagctgttcagtggatttttaggtacctcagaggcacagctaatgcttgcttgaagtttggcaggactgataaggggcttgttggatatgtggattctgattttgctgcagatttggataaaagaaggtcactcacaggttatgtgtttactattggtagttgtgtttctaccactgaagcagaatacatggctattgctgaagcatgtaaagaatcagtttggttgaaagcattgtttgctgagctttgtggagttgattcttgcattaacttgttttgtgacagtcaaagtgctatatgcctcactaaagatcagatgtttcatgagaggacaaagcacattgatatcaagtaccattatgttcacgatgtagtcgcgcaaggtaagctgaaggccaacttctaccgtagtggagcggaggctgaagctggcccattgggccgtgcacctggggacgcccgcgggtgcgggggcggagcccccgcgaaacggatcgtcatcctttttagggttccaccattatatacatcttacgacggaggagctcgccaccgtcacgtcctcgaagtcgtcgtcgtcaacctcgccgtgctcgaggatatacgaggtggtggtcctgtacaagcgggcgtggaaggtggtgtaccgaagcaagcagctgctgctgaccaacttcctggagtatgttctcgtgaggacactgctcgagaccatctacatcaacgccggctacggcgaggccagcgcgcacaagcggctggggctgttcgccttcacgctaaccttcctcctcacctccaccaccgagacgctgccgacgttcgagttggagctcccaagcatctacttcctcatcggcctctgcgtgtcgccggcggcgttcgctctgccgctaccatcgcccgcccgagcgaggtccacctctgccgcaggccacctgagtga

SEQ ID NO: 78545 - DNA, 1980 bp, Oryza sativa
  Clone ID: PAT_MRT4530_78341C.1
atggcgtcgatgaagtatgatctaccgctgctagactacaagacgagattcttgctgtggcaagtcaagatgcgggctgttctggcgcaaacttcggatcttgatgaggcgctggaaagcttcgggaagaagaaatcgactaaatggaccgctgaggagaagcggaaagatcgtaaggctctgttgctgatccaacctcatctatctaatgatattttgcaagaagtgttgcaggaaaagactactgcagaactttggctcaaactggaatcgatctgcatgtctaaatatctagccagtaagatgcatatcaagatgaagttgttctcgcacaagttgcaggagagtggttctgtgttgaaccacatatcggtcttcaaggagatcgttgctgacctagtgtcgatggaggtacaatttgatgatgaagatttagcagaagcttatgaggcgctccaaaacagggagaagatgaaaggtatggttcagtctgatgcgtcgtcctctaagggcgaagcattgcagaataaggagaaaaggaaatctgatggtaaggcctctgttgttaccagtgctgaaaactctgattcaggagattgtcttgtcgtttttgctggttgtgttgctagtcatgatgaatggatacttgatactacatgtttgtttcatatctgcattaacaaagattggtttagttcttacaagtctatgcagaatggagatgttgtgcgcatgggagatgataacccatgtgagatcgtgggcattggctccgttcagatcaagacacatgatggcatgacacgcacgctgaaagatgtgagacacataccagggatggcgagaaatctcatctctctcagcacacttgatgcagaaggatacaaatactccggttcaggtggagttgtaaaggtatcgaaaggttctctcgtttatatgattggtgatatgaattctgcaaacttatatgttcttagaggaagtacattacatggttctattaccgctgctgctgtttctaaagatgaacctagtaagactaacctgtggcatatgcgtcttggacatatgagtgaacttggtatggcagaattgatgaagaggaacctgctggatggctgcactcagggtaacatgaagttctgtgagcactgtgtttttgagtggaaagtcatgatagaaaggcaaactgaaaaggagcagaatggtgtggctgagcgcatgaacagaaccatcatctccaaggctcgttgtatgctgtccaacgctcgcatgaacaagcgtttttgggcagaggctgctaacaccgcctgctacttgatcaacaggtcgccttctatcccacttaataagaaaactcccattgaggtatggtctggtatgcctgctgattattcacagttgagagtttttggatgcactgcttatgctcatgttgataatggaaaattagagcctagagctattaagtgtctgtttcttggttatggttcaggagtaaaaggatataagttatggaatcttgaaactaataagatgttcatgagtaggagtgttgttttcaatgaatctgttatgtttaatgacagcttgcccacagatgtcataccaggtggttctgatgaggagcagcaatatccacaagatgaacctattgcacatcaccgaacaaagaggagttgtggagctccagtccgccttattgaggaatgtgatatggtttattatgcttttagttgtgctgaacaggtggagaatactcttgagccagccacatacactgaagctgttgtttctggagatcgtgagaagtggatctcagctatgcaggaggagatgcggtctcttgagaagaatggcacatgggagcttgtgcacttgccaaaacaaaagaagcctgttcgttgtaaatggatcttcaagagaaaggagggtttatctcctagcgagcctccgaggtttaaggcaaggttttag

SEQ ID NO: 78546 - DNA, 697 bp, Oryza sativa
  unsure (1)..(697): unsure at all n locations
  Clone ID: PAT_MRT4530_78342C.1
gcatacatacagcaaaatagaaagatctattagtcccgcagcaatgaagatcatttctcgtcttatgctctcctagctattagctgcatgcagacgccacagcagcagataaagatgttcttaggtcaaagttataggcaatatcagctgcagtcgcctgtcctgctacagcaacaggtgctaaagcccatataatgagtccgtaaggcagcaagtatggcatagacggcaaagcccctatctagccaatccagctgcgataaacaaactgagaaaaacaaaccaaagtcctgggcaatcatttttcaacaaccagaatggacaccaacaaaatcttcacctattcagggaacattaaaccattggttccaaggcccatagccgccaaccagctaaccaacttcccaacaggttttgggtggattcctcctaccttttgggaattcggggaaaattcttggggccttcaaaagccctccaaaaacccctctttgggtttgggggcctttttttaaaaaccggttggccccaattcttaagaaattaatgtgggtaatttctaacaccccttaagggtaaaccaaattggttgcccaccccacagatatacccaaattaaaacccacaccccttgggggccgggtgtgtgtttttggtttaaaaattggaaattttttaaaacccgtnttattatatg

SEQ ID NO: 78547 - DNA, 4440 bp, Oryza sativa
  Clone ID: PAT_MRT4530_78343C.1
atggccaaaccattagatttgccgttgttgctgataccggtcatggttgttatcctcatcagcgtgtcatttgcccaaacaaatgtcacttcgggcgcctccgtgcaggccgtcgccggcgccggctggtcctcgccgtcgggccactttgtcttcggcttctacgccaccgacggcggcctcgccgtgggcgtctggctcgccaccgcgcccagcataacggtgacgtggacggcgagccgcaacgacacgccggccaccggcggcgcgctgcggctcacctacgacggccgcctgctctggaccggcgcgaacggccaggacaggaccgtcgccgcgccgccccagccggccgtcgcggcggccatgcgcgacgacggcaacttcgtgctgtacgccgcgaacgcgacggtggcgtggtcgacgttcgcggcgccgaccgacaccctgctcgccggccaggacctcgcccccggcgcacagctcttctcgagcgtctccgccacgagcagggccaccggcaagtaccggctgaccaaccagctcaacgacggcaacctcgtcatgtacccggcgggcaccatgaacgtcgccgccgccgcgtactgggacaccggcacgttccagataggcttccccctcaccttgcgcctcgatgccagcggcgtgctctacctcgtcggcaacaatggcagctacaccaagaacttgacgaaggccagtgcagctcaagccgtagagcaagctcactaccaccgcgtcacgcttgatcccgacggcgtcttgcgttcgtatcgccatggattgctgtcgagcggcgggtggaagaccgacgtcgagtggatcgggccgagcgatcggtgccatgtcaagggcgcctgcgggttcaacagctactgcgtgcttgatcgcgacgcgcagcccagctgcttgtgcccgccggggttcgatttgatcgacgccggcgacgccgcgggcgggtgcacggcgagctccggcgccggcgagtgcacggggggcagagagccgaccctggcggcgtgcatgtcagactgcttctgcgtcgccgcgctgctcgacaccaacgacggcacgtgcacgaagcagcagctcccacttcgatacggccgcgcgggcggcggctacacgatgttcgtcaagaccggtggagcggcgagcccggcgctcggcggcggcggcggcggcaaccaccaccaccaccgcctcaggcgagcgagcaccgtcgcgctggtctgcgtcgggctcctgacgttcgtcgcgctgtgcgccctcctcgcgtcggcgcggctgctctggctgaaccagaggatggtgcgacggcgcgtcgcgctcgccgacgccgaggccctggacgaggaggcgccgctccgctcgtacagctacgaggagctggagcacgcgacgtacagcttccgacaccccctcggccgcggcgcgttcggcacggtgttcaaggggacgctgcggcgcggcggagagaggaccgtcgccgtgaagcggctggagaagctggtggaggacggcgagcgtgagttccagagggaggagagtggttctgtgttgaaccatatatcggtcttcaaggagatcgttgccgacctagtgtcgatggaggtcagaggcagatctgagcagagaacctacaacgacaacaatgatcgtgacaagagccaaagtagaggccgttccaagtccagagagtggaaagtcatgatagaaaggcaaactgaaaaggaggtaaaagtacttcgcactgacaatggtggtgaattttgttcggatgcttttgatgattactgcaggaaggaaggcatcgttaggcatcacaccatcccgtacactccacagcagaatggtgtggctgagcgcatgaacagaacaatcatctccaaggctcgttgtatgctgtccaacgttcacatgaacaagcgtttttgggcagaggctgctaacaccgcctgctacttgatcaacatgtcgccttctatcccacttaataagaaaactcctattggggtatggtctggtatgcccgctaattattcacagttgagagtttttggatgcactgcttatgctcatgttgataatggaaaattagagcctagagctattaagtgtctgtttcttggttatggttcaggagtaaaaggatataagttatggaatcctgaaactaataagacattcatgagcaggagtgttgttttcaatgaatctgttatgtttaatgacagcttgcccacagatgtcataccaggtggttctgatgaggagcagcaatatgttagcgtgcaggtggagcacgtggatgatcaggaaactgaaattgttggtaatgatgttaatgatattgttcagcactcacctcctgttttgcagccacaagatgaacctattgcacatcgcagaacaaagaggagttgtggagctccagtccgccttattgaggaatgtgatatggtttattatgcttttagttgtgctgaacaggtggagaatactcttgagccagccacatatattgaagctgttgtttctggagaccgtgagaagtggatctcagctatgcaggaggagatgcagtctcttgagaagaatggcacatgggagcttgcaaggttagtagcaaaaggtttcagtcaaattgctggtgttgattataatgatgtgttctctccagttgtaaagcatagttcaattcgcacattcttcagtattgttgctatgcatgatcttgagcttgagcagttagatgtgaagacaacatttttacatggagagcttgaggaggagatatacatggaccagccagaagggttcatagtacctggtaaggaggattatgtttgcaagttgaaaagatctttgtatggtttgaaacagtctcctcgtcaatggtataaaaggtttgattcatttatgttgtcacatggctttaagaggtctgaatttgatagctgtgtgtatattaaatttgttaatggatcacctatatacttgctgttatatgttgatgatatgctgattgctgccaagagcaaggaacaaatcactacattgaagaaacagttgagtagtgagtttgatatgaaggatcttggtgctgctaagaaaattctaggtatggaaatcactagagacagaaattctggtttgttatttcttagtcagcaaagctacattaagaaggttcttcagcgttttaacatgcatgatgcaaagcctgttagtactcctattgcacctcattttaaattatcagctttacaatgtgctagtactgatgaggatgtagaatacatgtctagagttccatattctagtgctgtgggttctttgatgtatgccatagtttgctcccgtccagatttatctcatgctatgagtttggttagtagatacatggctaatcctggtaaagaacactggaaagctgttcagtggattttcaggtacctcataggcacagctgatgcttgcttgaagtttggcaggactgataaggggcttgttgaatatgtggattctgattttgctgcagatttggataagagaaggtcactcacaggttatgtgtttaccattggcagttgtgctgtgagttggaatgcaacattgcagcctgttgttgcccagtctaccactgaagcagaatacatggctactgctgaagcatgtaaagaatcagtttggttgaaaggattgtttgctgagctttgtggagttgattcttgcattaacttgttttgtgatagtcaaagtgctatatgccttactaaagatcagatgtttcatgagaggacaaagcacattgatatcaagtaccattatgttcgcgatgtagtcgcgcaaggtaagctaaaggtatgcaagataagtactcatgataatcctgctgatatgatgataaagcatgttcctgttgctaaggtgaaggattggttcatgctacaagaaggaatttgtctcaaggtggagtttgttgagttctgggtgatccactgcgacgtgaagccgcagaacatcctgatggacgcggccggcacgacgaagatctccgacttcgggctggccaagctgctccagcccgaccagacgcgcaccttcaccagcgtgcgtggcacgcgcgggtacctcgcgtcggagtggtaccgcggcgccggcccggtgatggtgaaggccgacgtgtacagctacggcgtggtgctgctcgagacggtggcgtgcaggaggagcatggagatggaggaggccgccggcgaggaggagcggacgctggcggagtgggcgtacgagtggctgctggtgaagagcgaggcaaagagcgccatgagcagcgacgagacggtggaggcggcagaggtggagagggtggtgagggtggccatgtgcttcttcttaagatgctactactaa

SEQ ID NO: 78548 - DNA, 696 bp, Oryza sativa
  Clone ID: PAT_MRT4530_78344C.1
atgcgcatgcctgaaggcccgtgcatcgaagcacaacagttggcaaaggagcccaagggcacgcgcggggagagagggagggggaaccggtgggccgggtccacctcacgtggtcccgagtgggacccgcttgttggcggctcggctcaccatgagcgaggagcacgcgacgcggcgctagggttcggagaggggggcgtggtgcacgcgcgcggctcgcggtgggtgcggatgcgcttgacccggtcgcggctgaggtggcgccgacgtggcgccttcgtggcagccacgcgggccggagaggaagacgacgccgccggccgtaacggacggcggacggcggcggcgagcggcggggcgatctacggcgatgctggtgaaggcgagcacaccgggaggttgcactggacgaggggagacgagccaacggctcggattcgccggagggagttcgacggcggcggattgtggcggcggcaaccggcggcgagaaaagagggtaacagcgacggcgcgacgggagttcgattcctccggactagagcatctacgcggccaccggagtccgtttctagcgtcggattagacggagacactacgagagaggccggcgacatgcgggcgctaccgagcacgggcggcgacggcggcgagcacacagcgagcggcggcagcggtcgaggcggcgccagctag

SEQ ID NO: 78549 - DNA, 487 bp, Oryza sativa
  unsure (1)..(487): unsure at all n locations
  Clone ID: PAT_MRT4530_78345C.1
acccgccctggtaagcgtgtctcccgccgccgccgctgcaagagcagagtcnggtaccagccacaggatcaaccgcctcgagaccatgaagtggttcaagtctcgcttcgacggtattgtccgttaagcgacgtctttgtattttcttatggcacggcacggttatgacggagttataacgttggttcaaaaggagcatatgggcaaacggtgacgacctctcacctgggaattaaaaatcattgggttttggcttcgtcatgtatatcctgcactcagtctcttgtgagcatttgcttcacacaagcatggtctgaatttttcaaccaagctgcggccttagagtccgaccggcctgtgccggcttccctcagcaaatgacaggcgtgttcatgcttcgctggacagatatttgacgcttttggagtctaggagtttctgcaatacatttgatgatagtttctgatgcaaaaaaaaaaaaaaaaaa

SEQ ID NO: 78550 - DNA, 1090 bp, Oryza sativa
  Clone ID: PAT_MRT4530_78346C.1
cgttttagacaaggacatgccaagaaagtcattttattgcaaaagaggagtaagacaaggggaccctttatctcctcttccttttgttttgggagaagacttgttgcaatttcattaacaaggccaatcagaacaaccttatatccatgcctatcctaacactagagaatgaattcccaattgtacagtacgctaatgacacactgcttttcctgacagcatcttcaaaggaactcttttgtctaaaggctattctaaatacttcttcctcttcaacaggtttaaaaataaattttagtaagtcttgtatgattcctctgaatgtgcagccagacaaagttgagcatttatccaagatgtttggctgtttggtaggagacctacctttcacttattggggctgccaatgggtataagtagacctaaggtaattgatttcagccctcttgtggatagaattgaaacaagattgcctgctacttcttccctactctcttatggtgacagattgactatggttaattcagtgctttcttctttgccgatattttacacgtgcactctttccttgccaaaatctgtcatcctttctattaatagagcaaggaggcattgtttatggagaggttcagacataaattccagtaggaaatccttgatcctttgggatagagtttgccaacccaagtctaaagggggtttaggagtaattgatcttagacttcaaaacaatgccttgctaatgaaaaatcttcataaattttataataggcatcttgttccttgggttaaattgacatggtcctcttattatagtgataaagtcccacatgctttatctctaaaaggttctttttggtggaaagatgctctacagtttgttgatatctttagaggtcttttaaagtgcacaattggtgatggcagaacctgtttgttttggtctgatctatggaatgataagattaggcaaaggagttatcctagagctttctcttttgcaaggaaccaaaaagactcgattcatctgacttccttaatggacttgtcttagacttttaccctccctttgtctaaacaggcttttcaa

SEQ ID NO: 78551 - DNA, 501 bp, Oryza sativa
  Clone ID: PAT_MRT4530_78347C.1
ctgcaggaattcggcacgagggtttattggacctaatactgctggtatttagccatttgtgtaatttgatgtgtcaaacccctgtcaggtcatatcagttatacttgtatatattataaatatttgctgtggttagctggcctaggaatttgtccttgaaattatctaagacaatcccgatatgaaaagtatcaacacggaaacactacttctagatgttaatagtagcaagcatcttgttcattcaactctagtagtgttagattattttctgtgcaaaacagtcgctcctcatcttcaagattttagcatatttattttttaaatttggcaattggtgctgaaagtatatctaagggcagagtttatgcttcatgtttcctaaccttttattccttctttctacttgcactttactatattcttgctgttacgcaccacattgatttactttctttttctttttctcatgctagaggagtgaagagctgatgggaaaga

SEQ ID NO: 78552 - DNA, 725 bp, Oryza sativa
  Clone ID: PAT_MRT4530_78348C.1
ggaagaatagcatcagatgtaagtattatacatgcttagtgtaggaaaagagtacacacttcctttgtatacaaactgtaatggtcgccaaatcatctcatctccaatctaaagttcaaagaatatctataccgaaaacagctacccttttcaggggaaaccaaaaaaatataactgtagtagatgagcttcttgctgtggtaatctttttgtaacttaatgtctctgtgttttacttgatcatgcctgatctagttcacttgtattttgttttctctataaactctacattgtggcgtcagatccacttgaaacacccattggttatcaatcgaagaggctcaagaggcggagagccagaggaggagggcgcagaggatcagcacgagcgggatgcagtgcacggcgcgctgcagcgcccgcgcccgcgccgcctccctccgccccgccgccgactgcgggtcgcacgtcggcagccccactccttcgatctctccgccgccgccgctgccgccctccgacgacaacgcgcgccccgctcgacgaccgccgcatcacccccgcctcggcgcctcctgtcctcgccgaccgatcaacagcgcggggcggcgaggcgaggcgaccgcaacacgcaagtcggcgaccctgcgctgcgctgcgcgcgtgccggcgacgacgagctcctcgccttcctcttcgccgccgccgccgccgccgcctcggcc

SEQ ID NO: 78553 - DNA, 186 bp, Oryza sativa
  Clone ID: PAT_MRT4530_78349C.1
atggcccaagctggcgtcgccctgacctacatggggttgagcaatgacgcccacacggcacggtggcaggcatgctcctgccgtgtcatcgtggcggagctgagggatgaggcgagcaacgcgttgggagaggcgtggccctgtgcgacgcccccatatctcgtgcaaggcagcagcggtcactag

SEQ ID NO: 78554 - DNA, 178 bp, Oryza sativa
  unsure (1)..(178): unsure at all n locations
  Clone ID: PAT_MRT4530_7834C.1
tcaacgncggtgaggtcnattgcttnnatncaggctgcggtgagacncgcgacgttcncctcttnccncgtanccgnatatttgcttcgtncgtncagattgtgtnaaanaatgttatcnggntggttgatgaaagangtacaatggncntgantgtgtaannaaaaaaaaaaaaata

SEQ ID NO: 78555 - DNA, 1440 bp, Oryza sativa
  Clone ID: PAT_MRT4530_78350C.1
atggctcaaaattgggcggaggaggcaaagaaacacctgggagaggctagcaacagttatggaatggaaaagcaaaatggcagcagcgccttccctgtctctgccagatccgatgggaggggaggtattggcagcagtggcggcgccctctcctccactagatccggccggaggagaggcggcgacaacggcgggctctccacgggcagcggcggtgggctacgcacgggcgatggtggctcttccctccgccagatccggtgggaggggaggcggcaggatacccacaggcgacgacaactctaccctctgccagatccggtgggaggggagacggcaggctacccacaggtgacgacaactctcctctccgccagatcttgcgggaggggaggccgcaggtttaccacgatggcgccttccaagagcatcctcgtcgtcgtcttcgccctcttcgccgtcgccgcctcgctgcctccgtcggcggccgccagggacgcccaggtgttcaagcccaccgtcgccgtcgatgtcgtgcatcaggaacaacaacaacaacaacaacctgcagtgaacgccattgccgacgtcagccagccatctacatctctggttggattgccagggctcccgccactgccacctcttccgacgatccaaatcccaggactcccgccattgccgcaacttccgacgatccaaatcccagggctcccgccattgcaaccacttccagcaatccaaatcccggggctcccgccattgccgcaacttccgacgatccaaatcccggggctcccgacattgcaaccgcttccgaccatccaaatcccagggctcccgccattgccgcaacttccgacgatccagatccctgggctcccgccattgcaaccacttccagcaatccaaatcccggggctcccgccattgcaaccgcttccgacgatccaaattccagggctcccgccattgccacaacttccgacgatccaaatcccggggctcctgccattgccaccactgccatcaattcctatcactcttggatcaccaggagcacaaatccccataaactcccagagcgcactgtcaacgtctaccacaccacaggtgatcacagagtgcctgtcgtcgctgatgcagctgatgccatgcatggagtatctgaccaaggctgacgagccggctcccccgagtatcggctgcgacagcttcaagtcgcttgtggagaaggcgcccatctgcctctgccatggcatcaacggcgacatcagcaagttcatgccggcgccgatcgatttcgcacgtatgatgtctcttccggccacctgcggcgtcgccccgcctgtcgaggctctgaccaacgggaccagtgccgccgttgatgcctgctcctactcccgctgctgctccatctccggggccatctgcgtctag

SEQ ID NO: 78556 - DNA, 246 bp, Oryza sativa
  Clone ID: PAT_MRT4530_78351C.1
gcttgacgaggcctccgccgtcggcgaggccatggccatgtgcaacggcctactgaaatccaagaagaagatctttctcatcacctccaactgctccccgcagaccatcgatctctgccagaaccgcgccggtgggtttaacctcaacgtcatcttaacggaccccaaagacttcgactacaccagctgtgatttgtgcagagtgctcgtgcactaccccagcccagagggggaggtgctaggact

SEQ ID NO: 78557 - DNA, 109 bp, Oryza sativa
  unsure (1)..(109): unsure at all n locations
  Clone ID: PAT_MRT4530_78352C.1
caaggnccactcacgaaagagtcatgctaaatctaatgcactgagtggagacaagtgggtctccaacgggtgggtcttccagggagtcacagagtctcagagagtttga

SEQ ID NO: 78558 - DNA, 294 bp, Oryza sativa
  Clone ID: PAT_MRT4530_78353C.1
cttggaaaacaaaaacgtggcataaagtccggatgttcttttttttttccctgtacatttagtaaaaaaaaatgcatgtagcaattacttcatgcagtgttaattgagaacttggatcaaagcacaggggtatatggctgcgtcccctgcaaaaatatcatatcctcaaaacttcatatacagtgagatagttaagaatagtcagggttaagtctggcttccaagttggaatccagcttggaaaatttttcctttgtagttctagcaaaggtcagggcaaagaaatttgtggct

SEQ ID NO: 78559 - DNA, 183 bp, Oryza sativa
  Clone ID: PAT_MRT4530_78354C.1
atggggactggcggaggtgctacgggaggcagggagcgcagcgcgatgggaggggagcagcgtgtgcaagcactaaaaatgttatggagcacaggccatagtatacttgctttcttgggtggcttctggggaggcggtgagccggcgaccttgaagagcaactcgccggcagtggcgtggtag

SEQ ID NO: 78560 - DNA, 250 bp, Oryza sativa
  Clone ID: PAT_MRT4530_78355C.1
ggtcttcctttacctacttgtctactcaaatcctggtttataagctaagtagataaacagatgaggaaatgccagattaattcttgctctcccattcatacttgattttgccatccttgcttgaaattctgccaactaagtgctagaaaatggcaatggctacacagacatgttatgagccaaactgggattaactggatttgtcaatgatttacagaaaattgatacaacttgtaagtattttaggtat

SEQ ID NO: 78561 - DNA, 5183 bp, Oryza sativa
  Clone ID: PAT_MRT4530_78356C.1
atggatggaaacatcccggaatacggtggctcaggtatagagaatgaaggtattgattttgatctggaagatatgttgcggcactttgaaccagaggtcctaactggtacaagacgagggttggacaattgggaagcgttggaaaaagcagcgaaggagcttctgtacgacgaagccaaaggatgcgacaaggactattcggtcctacgctcggtgctcgaacttctcagattgaaggccagacatggatggtcggacacgagcttcaatgatttgatggatcttttgagagttatgcttcctaagccgaacctgctaccgacgaacacatatgaagtgaagaaattgatatgtccattgtctctaggtgttcagaagatccatgcatgtgaaaatcattgcctactgtaccgcaaggaattcgcggatttagactcttgcccaacatgtgggacgagtcggtacaagatggacaacggagccaccgatggagaggtggtcgacaaagatgatgcaccggtggatgagaacaaaaagattgctaggatggtgatgtggtacctgccagttaaagatcgcctgaagcggctatattccaaccgagacgacgccgagttgatgagatggcaccaagagggtaggaaaattgacggtaagatccaacaccccgccgatgctcgacagtggaaaaactttgacgcactacacccggaatttgcaaaggacccgagaaatgtcaagtttgcattgagcacggacggaatgaacccgttcggtgacctaagcagcacacacagcacctggccagttcttctaacaatgtacaacttgcctacatggatttgccagaagcgaaagtacattcttttgtctatccttatacaaggtccaagacaacctgggattaacgtagatgtgtttctcgaaccattgatggaggacatgcaagaactgtgggaggaagggttacgaatgtgggacgagtaccgtagggaacatttcactctgcatgccatcatattcattatgatcaacgacttactggcaaacttttcgctctcgggccagtttaaggggaagttcggatgcctcatatgtatcgacaagacatcgtacaagtacctcacctcattaaccaagggtcggtctatcttcgagttgacaaagaacattaaggttgtgttcggcaagccaaagaagaagcccgtcaagaggaagaaacgtacggatcaggacacaactgatgcacctttagacgaaagtaaccagcccttcaagaagaactcaatttttttcagcaccattggcactttactggacatcccgagtaagacgaaagatgggttgaagtcccggaccgacctcgtcaatttggacataaggcgtgggcttcaccccaaagagctgccaaatgggaagatcgaaattcctccggcttgctactcactaacacctgacgagaaaaaatctttatgtagatgcttgcatagtgtgaaagtcccgaccgcgtgccagcttgagatgtttttccccccagcttacttcaacatgatggagcatcttattgtccacatcgtacctcagattatcgagattggtcaactatacctaaaccagatgtgggcgtacaagaggtacatgtccgtgctgaaagggtatgtccgtaaccgagctcatccagaaggatcaatgatagaggggtacacaactaaggaggtggttgaatgctgcatagattacatgaaggacgccgaacccatcggtgtgaccctccctttacacgagggccggttagctgggacggggatcgtaggcaagaaaaggttctacgatgaggacttcaaagatgtagcggaagcacatagcagtattttgcaacagctcgccatcgtcgagccgtacattcaggaacacatgaacgagataagagcccgcaaccctagaataacggacatttggatttgtaaagaacagaaacagaaatttcctgaatggttgaaggagaaagatctgccgttgggtgtttcgctggaggaaaaaactttgtgcaggctagcaaatggcccaactagccttgtgatctcatggcaagggtacgacatcagcggaaatagattttacacaatgttcaaggacaggaaaagcgcagctcagaacagcggagttcgggttgaggcgtttgacacatcaggtgagaagaagtcttactacgggatcatacaagacatttgggagctggactatggccttaacatacagatcctggtgctacgatgccaatgggtcagagacacaacaaacgtattcatcgatgactacggcctgacggttgtggatcgtagtaagctaggacacaaggataatccgtgggttcttgctgagcgtgttgctcatgttttctatgtcagtgacccttccgacgataagatggccattgctgtaccgggaaagcaaaacattgtaggcattgatagcattgaagacgcgtcagattacaaccaatacgacgacgtccctttgttcacagattttcctaaccggatcaaggaagttgagacaagccttgatgaagatttgttttcgtccgcgcggaaggatggtgtttccaaaattccccagatctgggccgcgcgcctcctctccacctcgcccttgccgccttcttccccgagctccacctcgccctcgccaccactgcctcttctccaccgcgccctcgccgccttcttccccgagctccacctcgccctcgccgccgtcgcctcttctccacctcgccccttttcgccgcctcttctccacctcgcccgtgccgccgccgtcttctctcgtccacaccgaccggcctccgtcgccgacgcctcctccccggtctccaccgacgctgccactgcctcctccggcgccgacgccgccactgcctcctccaccgctagcgagatccggaccgccgccggcctcttctccacgccgtcaagaccaatgccggcgtcaagagcaccgtcaagccgccggcctccccgacctccccccctcggcgtcaagagcaccgtcaagccgctggcctctgcgaccaaggacgccgcaatcgtcctccctaagccggcgccgtcgtcctccccaagcagccgccggccacctcgccgccaagccacggccggccacctcgccacaaatccgccggccgcctcctacctcctccccaagcctcctcgatccaggaagtggaaccttgttagggttggaacgaactgccttaaggaagtcgatgctccagaatgcgcgtcgaagatgtcgggcaagacagctctggcgggcacagaaccaacggtcaataaacctgacgggcaggacagctccgtcgggcacagaaccgatgtcactaacaatccccaacacgaaaaagatgtcgggaaggtaccggagtcgagcgaggaatcgtggcgcacactgagcgacccatttgagctagaactagcgcaattgcagtatgaaagacctgaggatgacccggattatattcctatcgagcaggcgacacagcgacctcgggaccaccgcgaacggacacgacgacgagcgggggagcttgtccaaagaaaaaaacgtggcgagaagggcaggaacctcatgtcgaaggagacgtactacattcttgctctcgacgatgacggcaaacccgtcgagccgcaacatgtaagggcgaagtttagcacctcatgcggtgcgctggcaaagcttcatgggcctctcaacgtggacaaatggaagcacaagaataagactccatttgaagaattgggcaccattttagcagctgagtgggacaagttcgtggccaagatgacaactcctcaagctctagaaaggaggaagaagatgtcggacctggcgaagaagaacatatatccacacgggttagggtcaagtggatacgccggtcacgagaagaaatggcaaactacggaagaaaagtttgcggccgaagacaaacctttgattgtgcagcccctaaataagcaaactagaaattgggtgtgggcaagaacttcggggcaagtgacagaagagggtgagatgctgttggactgtccggacatccagaacgtgaccacgtctctccaacaaatcgtccagaaggaagaccggatgaattggaacgtagggtttccacaggaagcccaaagttacaagaagcgcgacgcctacaaggccaagatgcgccaggaaatcacagatcaagtcatacaacaagtcacccaacaattctacagtcttgccgcacaacatcctcaagccttccctgacctggttcctcatgggagagcgggaaaaacaaaggaggttgcgtctggattggcgataccggggagacagttccataacagcccaattccggcggactatgcaagggttcaggtcgcacgtgttaatggcgaccagatgtcattggagcttgacatcccaacaccagaggggattgaacttctcggggatgcgccgtctcctgctcctcagtcgtatcttgctctaccccttgacgaacatgtgccacctccacagccagatacatcaaaggagcagccaaaaacctgtgaagcccgcaagctcatacccattatgatgagcgttgtaggtcttactgacaaaatgcaatcttggacctccgatgaagtgcctaaggagtatgaatatggcaagccgtttttgccgttcaacttgatgtgtgaactcccatggccaatgaggttgatgcatgagtggtacttgagggcaagtgagttaggtctcgggatgattactgtgcatgtcccggaaggcgctttcaaggatggacctaacgcaaacttcgccttcagtttcaaggacctccacgcattctttaagatggataaaatgaatatcaatctcgtcggcgcatggtgcctgttagcattccatgagaaaaatgattacatcaagcgtctgcataagagaaagatggccgaggtgggaaattacttggccacctcatttctcgcacattccgacaaacgagtcatcatggtcccctaccactttggcgagcactacatactattcctcgtctatccaatggaccaaaccgtcgtagttcttgatccggcggactatgacaaggacgcgtacatgaaagcacatggccgttataagaaacatggcgg

SEQ ID NO: 78562 - DNA, 3240 bp, Oryza sativa
  Clone ID: PAT_MRT4530_78357C.1
aaaatccccaaaatggttttagggagcaagatgacttacatttgtaaactcagttctgtatctcccgcagaccattatttgcaatatcgaagggtcattcacatagaaaacctgagcaacacactcaacaagaaaccacggatcatccttgtgtcctagcttgctacgatccacaatcatcaggccgtagttatcgatggatacgcctgttgtgtctctgacccattagcatcgtagcactgggatcggtatgtttaggccatagtcaagctcccaaatgtcttgtatgatcacatagcaagacttcttcttacctgatgcgtcaaacgcctccacccgaactccgctattctaagctgtgcttttcttgtccttgaacatcgtgtaaaacctatatccgccgatgtcgtatccttgccatgaggtcacaaggctagttgggccatttgctagcctgcgcaaagtttttcctccagcgattcacccaacggcagatctttctccttcaaccattcaggaaatttccgtttctattcttaacatatccaaatggccattcttctagggttgcaggctcttatcttgttcatgtgttcctgaatgtacggctcgacgatggcgaactattgcaaaacgctgctatgtgcttccgctacatctttgaagtcctcatcataaaaccttttctttcctatgatccccgtcccgactaaccggcccttgtgtaaaggggggttacaccgatcgattcggcgtccttcatgtaatcaatgcagcattctaccacctcctcagttgtgtacccctctatcattgatacctccggatgagctcggttacggacataccctttcaggacggacatgtacctctcgtacgctcacatctggtgtaggtacaggggaccaatctcgaaaatttgaggtacgatgtggataatcagatgctccatcatgttaaagtaagctggagggaaaaacatctcaagctggcacgctgtctcgattgcaaatttttggaggggtcctaactcttcaggatcaaaaaccttctgtgatactcgattgaaaaagtagcacaacttggttatcactaaccgagtgtgaactggcttgaccgctcttatagcaatcggcaggaagactgttaacatcttgtgacaatcatgagcattatacccagagatggtcaaatctttcaaagatacaagttttctgacgttcgctgagaaaccagtcgggactttcacactatgcaagcatctacataatttttttttctcttctggtgttagtgagtagcaagccggaggaatatcgatcttcccatttggcagctcttttgggtgaagctcatgccttatgtccaaattgacgaggtcggtccaggacatcaacccatctttcgtcttactcaggatgtccagtaaagtgccaatggtgctatcaaacacattcttctcaaggtgcattacgtcgatggcatgacgaacctccaggtctttccagtaattcagatacctgaaaaatattgagtgcttcttaaaaggtaagttactttcctctacaggtgcatcagtattttcctgatccgtccgtttcttcctcttgatgggcttcttctttggcttgccgaacacaaccttaatatcctttgtcagctcgaagacagagccaccagttcgtgtttccggagctagatcgttctctactgtattgtcgaataatctggccttcacatggcacctatgcctctgaggtaagaaccgacgatgacgcatgtacacacccttggttgacgaggtgaggtacttgtacgacatcttgtcgatacatatgagacatctgaactttcccttaaactggcccgagagcgaaaagtttgccggtaagtcgttgatcgtaacgaatatgatggcatgcagagtaaaatgttccctacggtacttgtcccacattcataacccttcctcccacagttcttgcatgtcctccatcaatggttccagaaacacatctatgttaatcccaggctgtcttggaccttgtataaggatagacaaaagaatatactttcgcttctggcaaatccatgtaggcaagttgtacacggttagcagcactggccaggtgctgtgtgtgctgcttaagtcaccgaacgggttcattccgtccgtgctcaatgcaaaccttacatttctcgggtcctttgcaaattccaggtgtagtgcttcaaagtttttccacagtcgagcatcggcagggtgtcgaatcttaccgtcatttttcttaccctcctagtgccatcccatcaacttggcatcatcacggttggaatatagccgctttaggcgatctttcactggtaggtaccacaccaccatcctaggaatcttttttttctcatccaccggtgcatcatctttgtcgaccacctctccatcggaggctccgttacccgtcttgtaccgactcgtcccacatgttgggcaagagtctaaatccgcgaatttcttgctgtacagtatgcaataattttcacatgaatggatcttctgaacacctaaagaaaatggacatatcaatttctacacttgatatgtgttcgttggtagcaggttcggcttaagaagcataactctcaaaagatccatcaaatcattgaagctagtgtccgacaattcatttctggccttcaatctgagaagttcaagcaccgagcgcagcatcgaatagtccttgtcgcatcctttcgcttcgtcatacagaaggtccttcgctgctttctccaacgcttcccaattgtccaaccctcatcttctaccagttaggacctctggttcaacgtgccacaacatatcttccagatcaaattcaatgccttcattctctatatcagagccaccacattccgggatgtttccctgtgacatgtctttgattataaaattttctgcatcatcaaagcagaaatcatccatcacttcgttacgaccaccgacttccccatgaaaagtccatattttgtggccctccttaaatccttgctctacgatgtgcgacaatacttcattcggatcttgcagcaaatttcgttcttacacactttgcatgggcaaaaaacgctcctcaaattctccctcacagcatgtgcctttgcgacctcaacaaatttggctgcttccttcaagaacgttggatgagctcttttcttgctgtacatccatgacctacaataaag

SEQ ID NO: 78563 - DNA, 286 bp, Oryza sativa
  unsure (1)..(286): unsure at all n locations
  Clone ID: PAT_MRT4530_78358C.1
ccgncgncaaccactcctcaccaagtcaaagtttcttcctcgcgaaccggcgcgaacggcggcggcggcgatgtctgggagaggcaagggcggcaaggggctcgggaagggcggcccgaagaggcacaagaaggtgctgcgcgacaacatccaggggatcacgaagccggggatccggagctggcaggaggcggcgtgaacgcattcggctgatctacaggaccgcggtctagacttctggacgatcggcgcgcccaccgccccgcagacacgctgcggtccctac

SEQ ID NO: 78564 - DNA, 2409 bp, Oryza sativa
  Clone ID: PAT_MRT4530_78359C.1
atggtggacacgagcttcaatgatttgatggatcttttgagagtaatgcttcctaagccgaacctgctaccgacgaacacatatcaagcgaagaaattgatatgtccattgtctctaggtgttcaaaagatccatgcatgtgaaaatcattgcatactgtaccgcaagagattcgcggatttagactcttgcccaacatgtgggacgagtaaatacaagacgggcaacggagcctccgatggagaggtggtcgacaaagatgatgcactggtggatgagaacaaaaagatttctaggatggtgatgtggtacctgccagttaaagatcgcctgaaccggctatattccaaccgagacgacgccgagttgatgagatggcaccaagagggtaggaaaattgacggtccaagacagcctgggattaacatagatgtgtttctggaaccattgatggaggacatgcaagaactatgggaggaagggttacgaatgtgggacgagtaccgtagggaacatttcactctgcatgccatcatattcgttacgatcaacgacttacaggcaaacttttcgctctcgggccagtttaaggggaagttcggatacctcatatgtatcgacaagacgtcgtacaagtacctcacctcgtcaaccaagggtgtttacatgcgtcatcgtcggttcttacctcagaggcataggtggcgtgcgaaggccagattattcgacaatacagtagagaactttctagctcctgaaacacgtacaggtcgttctgtcttcgatttgacaaagaagaagcccgtcaagaggaagaaacgtacggatcaggacacaactgatgcacctttagaggaaaacctggaggttcggcatgccatcgacgtaatgcaccttgagaagaatgtgtttgatagcaccattggcactttactggacatcccgagtaagacgaaagatgggttcaagtcccggaccgactttgtcaatttggacataaggcatgagcttcacccaaaagagctgccaaatgggaagatcgaaattcctccggcatgctactcactaacacctgacgagaaaaaatctttatgtagatgcttgcatagtgtgaaagtcccgactggtttctcagcgaacgtcagaaaacttgtatctttgaaagatttgaccatctctgggtacaatgctcatgattgtcacaagatgttaacagtcttcctacccattgccataagagtggtcaagccagttcacactcagttagtgataacaaagttgtgctaccttttcaatcgagtatcacagaaggtttttgatcctgaagagttaggcccccttcaaacttttgcaatcgagacagcatgccagcttgagatgtttttccccccagcttacttcaacatgatggagcatcttattgtccacatcgtacctcagattatcgagattggtccactatacctacaccagatgtgggcgtatgagaggtacatgtccgtgctgaaagggtatgtccgtaaccgagctcatccggaaggatcaatgatagaggggtacacaactgaggaggtggtcgaatgctgcatagattacatgaaggacgccaaacccatcggtgtgaccccccctttacacgagggccggttagctgggacggggatcgtaggcaagaaaaggttctacgatgaggacttcaaagatgagaaagatctgccgttgggtgattcgctggaggaaaaaactttgcgcaggctagcaaatggcccaactaggcttgtgacctcatggcaagggtacgacatcggcggatatagattttacacgatgttcaaggacaggaatagcgcagctcataacagcggagttcgggtggaggcgtttgacgcatcaggtgagaagaagtcttactacaggatcatacaagacatttgggagctggactatggccttaacatacagatcccggtgctacgatgccaatgggtcagagacacaacatgcgtattcatcgatgactacggcctgacggttgtggatcgaagcaagctaggacacaaggatgatccgtgggttcttgctgagcgggttgctcaggttttctatgtcaatgacccttccgatgataagatggccattgctgtaccaggaaagcaaaacattgttagcattgatagcattgaagacgtgtcagattacaaccaatacgacgacgtccttttgtttacagattttcctaaccggatcaccggatcaaggaagttgagacaagccttgacgaagatttgtttttgtccgcgcggaaggatggtgtttccaaaattgtcaaacattagtgagatgtcgatcctgtgtactacctattttgtaaacgattactggatgaaacttatattgcgaatgagatag

SEQ ID NO: 78565 - DNA, 1492 bp, Oryza sativa
  Clone ID: PAT_MRT4530_7835C.1
tggtgggcaagtgtgaagcgtgaaatcgcagaatacgtaccagtatgtgatgttcgtcagcgagtcaaggcagaacatcagaaacccgccggtttgttgcagcctttgaagattcctgaatggaagtgggaagaaatcggtatggattttatcactggtttacccagaacgtcatcaggccatgactctatttgggtgatagtcgacagacttacaaaagtagctcatttcattccggtaaagacaacctattccggaagtcggttagcggaattgtatatggcaaggatcgtgtgtttgcatggcgtccctaaaaaaatagtgtctgatcgaggcagtcagtttacttcaaatttttggaagaaactttaggaagagatgggttctaagctgaactttagcactgcttatcatccgcagacagacggacaaaccgaaagggtgaatcaaattttggaagacatgttgagagcttgtgctttagatttcggtggaagttgggataagaatctaccttatgcagaattttcgtacaacaacagttatcaagctagtctacagatggctccgtacgaagcactgtatggtcggaagtgtcgcactccgtacgaggttgcctatcagttagagttacctcaatctttggcaggagtccataatgtgttccatgtgtcgcaattgaagaagtgtttaagggtacctaccgaagaagctaatcttgaacagatagaagtccaagaggatctgacctatgttgaaaaaccaatccgtatcttggaaacaaatgagagaagaaccaggaatcgagttatccgtttttgcaaagtccagtggagtaatcactcggaagaagaatcaacttgggaacgagaagatgaattgaaagttggattcgagttcgtctcggattcgttcttcccaatctttccttcctcgtcgccggccgccgtgggcctttgccgccgcctccgagcccctttaaatggacccccggtgtctcctctacccgccgccacccttgccttcgcctctcgtcgtcggaagagctctagcgccccgtgcgccgccgtcgtttcagccgtcgccgtcgctcgggaagaccgtcgtcgtggtcgccaagtcgtcgccgtcctcgtccgccccttcgccgtcgccggagatcgccggagcctcgtcgccgtcgtcaacccgaaagtttccgccgtttcctcctcgtcgccgtcgccgtccgttgatcttccgccgccgttttggtcaccgcgccgccgttcgccggcgagcgtgcgccgcccgagccgtccgctccgccgagccgccgccgctgtcggtgacgtcaccgctgacgtcatcggggtcgtccgccattccgtcgtttccggagagtccgttttcgccggagaagagtttgaagagttccaaggccagcaaggcaagtcacacagatcccaaacaaccctttgagcatgtaacaaaaaggagcaaaatcaccaaa

SEQ ID NO: 78566 - DNA, 762 bp, Oryza sativa
  Clone ID: PAT_MRT4530_78360C.1
atgtcgccagggcgagttggtggccggcgatgggcgcagcggggacgcggtgggcatggtggagcggcgactggcgataggcgcggcgcgcggcgggcgtggcggtggcgcggtgggcgtggtggagcagcggccggcgatgggcgtggtgggggtgcggcgggcatggtggagcggcggccgccggccggaaggctactgcgggtggcgggtgtgcggatctccccgccaccgacgcctcttctcccaccgcccgccaccgacgcctcctctctcgctgcccgccacgacctcactgccaccgacacctcctctcccgcccgcccccaccggatcttctcgccaccagccacgccggtgcgcctcgtcctcctccgattccttctctgccgccggcctcccttgctcgagccgtcaccgcctgccaccggcgccatccttcgcatccccaggttgaagacgatgatgacgagctcgggtgcggtggtggtgatggcggcaaccgccgggggctcggagcggaagggcggagacgacctccgcctccaccatcgccacttcgccgccctccgccgcgacaggcagagtcggggacggcgcgcgggagggcagtggggcggagcggtagcacgggggcacgggcgtcgccccctcttcgccgccacccactccgcccgccatcgtccgagctcctcccgccgtcccgagctccgccgcccccttcatcgccccaagttctgccgaacaccgtcctcgaggtga

SEQ ID NO: 78567 - DNA, 3359 bp, Oryza sativa
  Clone ID: PAT_MRT4530_78361C.1
atggatcggacatggatgtacaacacgaaaagagctcatccaacgttcttgaaggaagcagccaaatttgttgagctcgcaaaggcacatgctgcgagcgagaatttgaggagcattttttgcccatgcaaagtttgtaagaacgagatcttgctgcaagatctgaatgaagtattgtcgcacatcgtagaacgaggatttaagaagggatacaagatatggacttttcatggggaagccggtggtcgtaacgaagagttagatgatttctgttttgatgatgcagaaaattttataatcgaagacatgtctcagtgaaacatccgggaatacggtggctcaggtatagagaatgaaggtattgatttcgatctggaagatatgttgcggcacgttgaaccagagatcctaactggtacaagacgagggttggacaattgggaagcgttggaaaaagcagcgaaggagcttttgtatgacgaagccaaaggatgcgacaaggactatttagtactgcgctcggtgcttgaacttcttagattgaaggccagacatggatggtcggacacgagcttcaatgatttgatggatcttttgggagtaatgcttcctaagccgaacctgctactgacgaacacatatcaagcgaagaaattgatatgtccattgtctctaggtgttcagaagatccatgcatgtgaaaatcattgcgtactgtaccgcaaggaattcgcagatttagactcttgcccaacatgtgggacgagtcggtacaagacgggcaacggagcctccgatggagaggtggtcgacaaagatgatgcaccggtggatgagaacaaaaagattcctaggaaggtgatgtggtacctgccagttaaagatcgcctgaagcggctatattacaaccgagacgacgccgagttgatgagatggcaccaagagggtaggaatattgacggtaagatccgacaccccgtcgatgctcgacagtgttaaaactttgatgcactacacccggaatttgcaaaggacccgagaaatgtcaggtttgcattgagcacggacggaatgaacccattcggtgacctaagcagcacacacagcacctggccagttcttctaacgatgtacaacttgcctacatggatttgccagaagcgaaagtacattcttttgtctataattatacaaggtccaagacagcctgggattaacatagatgtgtttctggaaccattgatggaggatatgcaagaactgtgggaggaagggttacgaatgtgggatgagtaccgtagggaacatttcactctgcatgccatcatagtcgtgacgatcaacgacttaccggcaaacttttcattctcgggccagtttaaggggaagttcggatgcctcatatgtatcgacaagacgtcgtacaagtacctcacctcgtcaagcaagggtgtttacatgcatcatcgtcagttcttacctcaaaggcataggtggtgtgcgaaggctagattattcgacaatacagtagagaactttctagctcctaaaacacgtacaggtcgttctgtcttcaagttgacaaagaacattaaggttgtgttcggcaagccaaagaagaagcccgtcaagagttagaaacgtacggatcaggacacaactgatgcacctgtagaggaaagtaaccagtccttcaagaagcactcaatttttttcaggtatcttgattactggaaagacatggaggttcggcatgccatcgacgtaatgcacctggagaagaatgtgtttgatagcaccattggcactttactggacatcccgagtatgacgaaagatgggttcaagtcccggaccgacctcatcaatttggacataaggcatgagcttcacccaaaagagctgccaaatgggaagatcgaaattcctccggcttgctactcactaacacctgacgagaaaaaaatctttatgtacatgcttgcatagtgtgaaagttccgaccggtttctcagcgaacgtcagaaaactcgtatctctaaaagatttgaccatctgtgggtaccatgctcatgattgtcacaagatgttaacagtcttcctacccattgccataagagtggtcaagccagttcacactcggttagtgataacaaagttgtgctactttttcaatcgagtatcacagaaggtttttgatcctaaagagttaggcccccttcaaacttttgcaatcgagacaacatgccagcttgagatgtttttccccctagcatactttaacatgatggagcatcttattgtccacatcgtacctcagattatcgagattggtccactatacctacacgagatgtgggcgtacgagaggtacatgtccgtgctgaaagggtatgtttgtaaccgagctcatccggaaggatcaatgatagaggagtacacaactgaggaggtggtcgaatgctgcatagattacatgaaggacgccgaacccatcggtgtgaccccctctttacacgagggccagttggctgggacggggatcgtaggcaagaaaaggttctacgatgacgacttcaaagatgtagcggaagcacatagcagtgttttgcaacaactcaccatcttagagccgtacattcaggaacacatgaacgagataagagcccgcaaccctagaagaacggacatttggatttgtaaagaacagaaacggaagtttcctaaatggttgaaggagaaagatctgtcgttgggtgattcgctggaggaaaaaactttgcgcaggctagcaaatggcccaactagccttgtgacctcatggcaagggtacgacatcggcggatatggattttacatgatattcaaggacaggaaaagcacaactcagaacagcggagttcgggtggaggtgtttgacgcattaggtgagaagaagtcttactacgggatcatacacgacatttgggagctggactatggccttaacatactgatcccagtgctatgatgccaatggatcagagaacagaacaggcgtattcatcgatgactacggcctgatggttgtggatcgtagcatgctaggacacaaggatgatccgtgggttcttgctgagcgggttgctcaggttttctatgtcagtgacccttccgacgataagatggccattgctgtactgggaaagcaaaacatcgttggcattgatagcattcaagacgcatcagattacaaccaatacgacgacgtccctttgttcacaggttttcctaaccggatcaaggaagttgagacaagccttgatggagatctgtttttgtctgcgcggaaggatggtgtttccaaaattgtcaaacat

SEQ ID NO: 78568 - DNA, 539 bp, Oryza sativa
  Clone ID: PAT_MRT4530_78362C.1
ggatccccgggctgcaggaattcggcacgagggctccttcctcttcctcggcagcttcgcctcctccccaattccaccgccccgcgcggtgcggcgagacctcggcgccctctgccccgaattcccgggccccgtaggcacggtgtgtacggcctcttgccctagccttctccccccttttcggcatcctcgctcgcgccgccggcgagcaggttttgaggggcggggcggtcgtccgccgtctcgggttgagtcgaattgaagtatccaaacatgggctggaaaaggaagacacatcatggaggatcatgtcatcaacaacaatcctgtccttcacatggtaatgaattgtctgcgatagatgaggaggtttcccatcttacgaggcttaaatccgagccatgtgagaggactcgtgcatcccttcatgctggaaaaaagaggcatatctcaacattcaagttgttgtcagggagagaatccaactgcttagggattggtaggttctcttcagctgattgctcttatgctcttcgtaa

SEQ ID NO: 78569 - DNA, 243 bp, Oryza sativa
  Clone ID: PAT_MRT4530_78363C.1
gagcaacagcagattcgaatggtgtgtttgcatggacgatgaattcgatggaataagatgtcttaacaaacttaacctacaaggccaaaaaggcgaccaaaactcgtagcacaacaagctacaaaaagaaaagacacccagcacactcaataattgactataatagccacatggtgatagtatttttttatatcatgactatgtacaggtatcaactatagctcatttcacgtatctgctcac

SEQ ID NO: 78570 - DNA, 2496 bp, Oryza sativa
  Clone ID: PAT_MRT4530_78364C.1
ttttttttttttttttgcattgaagattcctcactttattcatcttttgaactgtacatatttgtacccaaattttggagcattctccaagcctgactagcgagcaaggtgcccgtcaccaatatctatctagtcaaggccgtcgaaatcccaaatgggagaaaaagagaagcaaagacatacatttgtaaatgactgattgaactactctacctttgtaacttgtaatgttgtactttgattcggtgaatttctatacggctgaatacgttgctacttgaaccagaaagcagagaaaatgactaatccgacacagtagcatcgacgtgaatacatcttccaagcattgaggaccctgccgtctgctgaatttctaaaacacaaacgaaaatgtgtatccctctggatgcattctttgctttccggtcttgagcatggaggggtccttgtcgtcctctgttgcttcccaccggactagatagccatcccaagaagagctaacaagcgttggaaagtatgggtgccaggaacaatctctgattattgatccatgccatctgagtttttcaacaatttttccagtagccctgtgtgcagaaaaactctgacccgtgatgtcctcattgcagctaccagttacagtcatcaaggccattgacacagctcgtaagaattgcctgtggagaggtaataacccttcttcgacaaggaaatctctagcttcctgggatagggtgtgcatgcctaaggagaaaggaggcttaggagtgatcaatctgtgtattggggaaaaatagcaacgaattagtgtacgtaacactgaatgccctctaaatgttgacagggactggtcatatggatgcttgaaatatcgggcttctgagggatatgtcatccatctgtaatcccattcatatgcttttggtgtgcagtctttcacagtggacgacattttcctgatgtcccatagtttaatagtttgatccttgcaatttgaaataaaataatgcccatctccacggctatcaataaatgtaatcccatctaaatgacctgtcaaaacaccaacttgttttcctctcttgttgcagcgcctatcccagaccttacagaggctatcatcacttccagagtataaaacatcactaccttcatcagcaaaggtgactgcattgacatcagccgaatgagcgtgaatgcgttctgttactttgtttgatccaatatcgtaaatacatattgattcattgttgtttccaacaacaagttctcggccatcttttgaaaacttaacagaaaatatggcaaaggagaacccatcatcatcattcgaaaactccaagccttcgtgaacttgcgtaatattggcatgtgattctctcatgccattctggatatctaccatatgaacgataggtgacagactggaataagctaggtatcgttgatcaggtgaaagagcaatatctgaaactgtccaacgtagctttttgcaggttatgtccttatgtatcgtccactttttctcagcattgtagattctgatatggctaccccggaacccaccaatgagaagggaaccatctgcggagaattgagatatgtaggcttcactgtccatgtcatcaacacaccatgggccttttactggtaggtgtttacgaagagcataagagcaatcagctgaagagaacctaccaatccctaagcagttggattctctccctgacaacaacttgaatgttgagatatgcctcttttttccagcatgaagggatgcacgagtcctctcacatggctcggatttaagcctcgtaagatgggaaacctcctcatctatcgcagacaattcattaccatgtgaaggacaggattgttgttgatgacatgatcctccatgatgtgtcttccttttccagcccatgtttggatactcgaaaagaacaagactttaacgtggacacaagcttgcaatccagctatccaggcaactccaagcagggcagtaaagctgatagccggaggcttggactcttctacagccagtcattccctgtaccttcaattcgactcaacccgagacggaggacgaccgccgcgcccctcaaaacctgctcgccggcggcgcgagcgaggatgccgaaaaggggggagaaggctagggcaagaggccgtacacgccgtgcctacggggcccgggaattaggggcagagggcgccgaggtctcgccgcacgcgcggggcggtggaattggggaggaggcgaagctgccgaggaagaggaaggagcaggagacggggggaggcgatagctgggagaggcgggagccggatgttggcggctctcttgagaagcggaagcggcagccgggcgggagaagcagcggcggcggccgagcgacggaagtggtggcggaggcaccctccccctcagccagatccaccgggaggagaggccacgggatgggagcccaggtggcggtggagcgacggtag

SEQ ID NO: 78571 - DNA, 1248 bp, Oryza sativa
  Clone ID: PAT_MRT4530_78365C.1
atgtcttgcgtaaccacggtgaggtatgctgtcaaatttaatggaaccatcttgagtacatttgctccttcgcgtggcctctgccaaggagacccattgtcccctttcttgttcctgttagtggctgacgggttatcgctcctgttggaagagaaggttagattgggagccattactccggttaaagtctgtcgaggagcccctagtatttcccatctcctctttgcagataatacccttctattttttaaggcaaagagagaggaagcagtggtcatcaaagaggtcttagaatgttatgctgatggaactgaccagctgatcaatccagggaagtgctctatcatgtttggtgatatatcggacttgtcgataaggcaagaaatcagctcggttcttcaggtggcaaattctgattttgatgacaagtaccttggcttcccgactcctcagggacgcatgcacaaggggaagtttcagaacctaaatgaaagaatttggaagagaactatgctctgggggaaaaaattcttgtcagcaggcgggaaagagattctaattaaagctgttctccaatcgataccagtgtatgttatgagcctttttaaattgcctgggtcggtctgtaatgatctggtaaaggccattcgcaacttctggtggggtgcagacaatggcaaacggaagactcattggagagggcaggaggatgattttgtggcttggcacctagataaatggagttgcttctcagttaggagtgcataccatcttgctttgtcgctgaagaatatggaccaggctgagtcctcttctgatgtgaatcttcgacgatcttggggattgttatggaagtgtaatgtgccgcagaaggtgaagatattctccgggaaggcagctaataattgtctggctacctcggaaaataagaagaagagaaagctcgagcaggttgatgtctgtggatggatacttgatcacttggggtccctggaggaggaaaggaatatgtttttgatgctgttgtggcgcatctgggaagcatgtggtacatcaagccaggccgcaatggggcaccgaaagcaggaagtgacggatatcccctggacaaagcctggtatgggatggatgaagcttaacgtggatggctcctatgatgcaacggtgggtaccggaggcattggtgctatcctgagaaacagctctggagaggtcattttctcggcgtgtgattctattgatgagtaa

SEQ ID NO: 78572 - DNA, 454 bp, Oryza sativa
  Clone ID: PAT_MRT4530_78366C.1
acgttaagtttttaaacaaacaaagtatattaatttgcctattccatgttaagaaacattgcagagaaaagacaggaagcacattttcagataaaacaaagaaggatctgcacaaagattttgaggacattgtgaacaattgtttaacaagagaggaatttgaaagcttatggcctcaaatgattgaaaaatatagcttgcacaatgtcaaatattttgaacacatgtggaaaactagagaacaatttgtgcctgtatatttcaagactgacttctgccccttcattcaaagcacagcattaagtgagggcacaaatgcaaggtttaaaagaagtgtaggaccaaagcatagtgtgatgagctttatgaatgagtatgaaagcatatatgacactatatttagcactgagtacagcaaagatcatgaatcaagaactaaaagaccagatttcta

SEQ ID NO: 78573 - DNA, 246 bp, Oryza sativa
  unsure (1)..(246): unsure at all n locations
  Clone ID: PAT_MRT4530_78367C.1
gtaaangtacaggcgcgtcatcagctgtcattcataattcaaacatgtgcccaccagttgttccgacaattgtcacagtggcaatgcacacagtcttggtaaagtgctcttgcgaccaacgtacttctgggtcaaactttgtccctacgataaacagcccttatacagggatcacatggcacaggtgttaatatctagaagggctgactgggatcacattccctgtccagggaaccctggacgggt

SEQ ID NO: 78574 - DNA, 1431 bp, Oryza sativa
  Clone ID: PAT_MRT4530_78368C.1
atggaggcggtcatcgcggagtgccgccccaagcctctcttcaccaccgggcccttcctctccgccgtcggcggcggcggcggcggcgtcgaccgcatctccgggctccccgacgacctcctctttgtcatcctctccaagctccccgtcagggatgccgtggcgacgtccgccctctccccccgctggaagagcctctggtccagcgtcccgctccgcctcgacgacgccggcctcctccaccgccgcgacggcacgcgcctcggccgggaaggcgtcgccgccaccgtctccgccgtcctcgccgcccacccaggccccgtgcccgcggcctccgttgggtgctgcctctcctccgacgaccagggctaccagctgggaggctggctccgagccctcgccgccaagggcgttcggcaactgtgcctgatgggcgcgccatggtcgccgcgcgctgctctcccctccgctgtgttctcctgctcatccctgcggcgcctcttccttggttccgtgcaatgcaactgggacctcataccagaccatgcctgcttccctgagctacgagagatccagatatgcaacgccctaatgaagagccaggatctgtcccttgttttggctgtctgcccagcgcttgagacagtggagattcttgcgagccgtaacaaaatccccaccgtgcgaatgagtagccatactatccgcaatactttgctatggaagtcggtggccaaggaagtgaacgttttggacaccccttgcctcagcagggttgttttgtggcaggatcttctgctgccccactcaagatataattctaaggtcacaatcagccgtgccaccaaaatgcgcatttccggttacctggacaccggcatcaacactttggtgatcaacgaaaccacagttaaggtaaacacaaatataagcttcaagacacttatccccagcgtgaaggttttgggtctctctgttcatttcggagtacgaaaggaggctttgatgtccatcagcttccttaggtgttttccagaggttgagacactacatataactagcaaaacggacaaggcttcagaagccgaacaattcagtttctggggaaaggttgatcctgttgagtgtgtgacctctcatctcaagaagttagtgttccatgggatgccatggtgtcctggaaaccttgagtttctcaaattcatcgtggaaggggcatacttgctagagaaggtgttgattgttcttcctaaaggaacttacactagcatgcatagcgttatcaccaaactcaagttagcacctttgacctctgcaagttgggctagtcacatctgtaaaatggaggttgtccaatccagtcaaggaactttgagctaccaaagggcatctgatcattccgtcgatgatcctttagattattccctgtag

SEQ ID NO: 78575 - DNA, 124 bp, Oryza sativa
  Clone ID: PAT_MRT4530_78369C.1
agggaggtgcggcaatgccgcgacgattgcgaccttgggcctcctttggcgtgcacaacgcttgacaaaccagcaatccccttcggttgcctccacgatgacggcacaaaatagaggtatgcta

SEQ ID NO: 78576 - DNA, 668 bp, Oryza sativa
  Clone ID: PAT_MRT4530_7836C.1
cgggctgcaggaattcggcacgaggcgacgaagctgtaagggagagtttgggtattcacaaggggacagtaacaacatgggaaagatgtaatcatgaccttctttacaaaaagcaaatcgttagttcagtggagtatcatttaagcctgattacccaaggataccgaggcttggtatacagtggagatcatgacagtgtagtatctcttattggcacccaaggatggcttagatctcttaacctgtccatcacacatggttggcgaccatggtacgtcaacagccaagtggtagggttcacaagaacttactccaataacttgacatacgcaactgtgaagggtgctgggcacacagccccggagtacatgccaaaggagtgtcttgctatggttgatagatggctttctggggaacctctttgatcaatccagtaattaggagtctgttctcttaactaagattctcttatttatatgtgttctactattttttttttctattctgactcgcttattctatctagctgagccattcattcctttctataaaatagagataattaaggagacaaaaaaaaaaaaaaaaagagtattatttatattccgttaataaattaatggactgaatgagacttagcttatgtgatactccctccgtcccacaat

SEQ ID NO: 78577 - DNA, 628 bp, Oryza sativa
  unsure (1)..(628): unsure at all n locations
  Clone ID: PAT_MRT4530_78370C.1
ggcctccccacctcatcggcggcggcggccctggtggcggtgatcggcggcggcggctttggaggtggtgattggcggctccccatgccgccctgncctcccatccnctncttatccctctcccatatctatccgaggggatgatggccgcgtcggcgtatattcgatgggatcatatagcgcgggggagctgatatatnngcggcggtaggagtgcatcccggccgaggcagatctgatcatcatcatcatcatcgcggcgatcatcatcatcatcgctgatggccgtgctaggtgatngatgatgcctgccnccgcggcgngcggcggatgtgcncgcggcgcgggatcatcgcggccggcggcatgtctatcatcatcatccatgatcgcggcatcatcatcgctgccggccgtgctcggtgattgatgatgcctgcattggcgccgggcggcggattgtgcntgcaccgcggggatgcncgcggncggcggcggatctatcnncatcgacnnccgccgcggtggccncgccatcaacaatgctgccggccgtgctcggtgcctgcggatggccgttgggcggcgcctctcccttggggatgctgcggcggcagcnctgccctcc

SEQ ID NO: 78578 - DNA, 195 bp, Oryza sativa
  Clone ID: PAT_MRT4530_78371C.1
atggggagcttgggactggaaagactcgtgtggaggtcgatgttaggcgacgtcagcaaagaggagctcgtgcacgtccaggtcgacgtcgagcggggggagacacggcagaggtcaaggccgagggtggcacgccagcatgggactatgggagagttcgaggtcaagacggggcatgacgatagcggagattga

SEQ ID NO: 78579 - DNA, 1654 bp, Oryza sativa
  Clone ID: PAT_MRT4530_78372C.1
atcttagaacagaggtggtattatatacacggacaacgtaattttacaagagaaaattaaggatgcatccggcgtgaagaatttgcaaatgtcacaacacatttgaacgctgcgaaaaatggacaattcaattcacgcatagacccactctcactacatgtacgccacgcacgcacccacccacccgtctcacacggtatgctcacaccagcaccatcaacaatgccagcaacgccgccgcggataagccgacgccggcgacggccggcgcggcggcgctgatgatctggatcgggaacgcgcagccgcgcgcggaggcgttcttggtggtgatcttggcgaggccgtcgaagtcgcaggcgcgcacgtcctggtcctgcatctggaagtacatgttgaaggcgtaggagatgttgctcttctcgtcgaggccgttgcaggagcacccgtagccgagcgccgtgcagtcgccgctggcgcacgcgtactggatgttcccggggagcttggacttgtcctcggccccgtcgtcgaacacgcaccactgcttcgggaggtactcgacgccgggcacgccggcgagcggcttgtcgttgccgtggccggagaggtccatcgggaacttgggcttgccgtcgtaggtgaagatgccccaatggcgctcgaagttgcccgggagaatgctcttcatgtcctcgtcgaagaggccgaacatgtagacgtccatcttgccaggccggagcggcgtgccttccttcttggagagcttcttcaggaggccgtcgtagtagcgccgcgcgagcttgaggttggcgttcttgtcgccgtcggtcggccagccgacctcgccgacgacgacctttaggcttgggacgccggccttcttcagcgcggtgaccagcgtgtcgtagttggcgtcgaacacgttggagtagctgatgccgcccttgtcctggatggtcttgccgccgtcgacgaaggcgaactcgaacgggaagtcgtcgctctggtacaggctgaggaaggggtagatgttgacgacgaagggcgagccgtgctcgtgcaggaacttcaccatgtccgtcatcaggccctggatgtccggccggaacgcgccggaggacggcttgttgtccggcgagacgtacacgtcggcgttcagcgggacggtcgccttcaccttgtcgccgacgccggcctcgttcagcgccttctggatgttcttcagcgccgggaaggtcgtcttcatgaacgatccgttgtacgccttgagaaacggctcgttccccacggcgacatacttgatcttgagcttgtcgccgtagctggtgacgttctccttgacccaatcctgggcgttcccgtagctgttcatcgtctccagcatgtcgttggggatgccgagcatgacctcgatgccggagtcgacgagcgcgccgacgggccacgggtcggcgtcgaacagcttcaccttcaggatgccgttctccttgagcatctgcacgaccgacttgggcagcagcgggtgcgacagctgcgagccccagttcacgccgacgtccacggcgttgccgtccgccgccgcacgggacgccacggcgagcagcagcagcagcgcggccgcgccggccggcagccgcggaggcggagccat

SEQ ID NO: 78580 - DNA, 1166 bp, Oryza sativa
  Clone ID: PAT_MRT4530_78373C.1
tggtaagccatggaccgcgtgcagctcctcctcgtcggtctccccgccctcctcttcctctccgacctctcccacatcttcgcgccgccgccgccgcatctccggcacccccaccaccacccgccgcaccaccatccccatccgcctcaccaccaccccccgcatcacccccacccgcctcaccacccgcatccgccgcatcacccccacccgcctcaccacccgcatccgccgcaccatcacccccaccctcaccccgatcccgccgcggaggccatacaggctaacgttgatggagctggatatggcaccaccgtcgagctgcaattctgcgcctcctgctcgtacaaggggactgcaatgactatgaagcgcatgctggaaacatcatttccaggcattcatgttatcttgcacaattaccctccacccttccccaaacgtgtacttggcaaacttgtgccaattcttcaggttggagccattgcaacaataatggctggtgatcatattttccccagacttggaatggttccacccccatggtactactcactgcgtgccaatagatttggaaccatggcaacaatctggctatttggcaattttgcgcaatctttcctacaaagttctggtgcctttgaagtttactgcaatggagatttggttttctcaaaattagctgagcagaggttccctagtgagtttgaactgcgggatctcatcaacagcagattaccagattctctggttgggaaaaatgtgggaaaatccttgtcttagacaatgacattggaatatcacatgccaatgcgacatcttgctatcaaggtagtactatattgtttgctgtttgacgtcgagcagtttggaagctctgcagcttgtctgtgaacactactattcaattaaatggcttgtaaaggataacctagagtgagatagtgactcaattgtatgaacttattagttatgccacaaaaaaaatcatcatttcctgtttattttctgagaggttgataaaatattgtagtattcgtcacctttggtgtgattcatactgttttatacttgtatgcattatgtaaaaaaagggaaaaggctaagcaaactcaagcgggcatgagaattgagacagcgctgaaattggaaaaaaaaaaaaaaaa

SEQ ID NO: 78581 - DNA, 981 bp, Oryza sativa
  Clone ID: PAT_MRT4530_78374C.1
atgaggcaactcaagtacgtgggcaacttccacccctacgacaccgccttcaagcgcgactgcaaggccggcaagctcccaaactacgtcgtcatcgagcagcgctacttcgacctcaagctcctcccgggcaacgacgaccacccttcccacgacgtcgcccatggccagcgcctcgtcaaggacgtctacgaggcgctccgctcgagcccccagtggcacgagatcctcttcgtcatcacctacgacgagcacggcggcttcttcgaccacgtccccaccccggtcgccggcgtcccttcccccgacggcatcgtcagcgccgcccccgtgtcgttcgccttcgaccgcctcggcgtccgcgtcccgacgctgctcgtctcgccgtggatcgagccgggcaccgtggtgcacgacccggcgtcgtgcggcggcgcgccggagccgacgtcgcagttcgagcactcgtcgatcccggcgacggtgaagaggatatttgggttgaaggagttcctgacgaggcgcgacgcgtgggcgggcacgttcgacacggtgctgacgcgggcggcgccgagggaggactgccccgccacgctgccggagccgccgcggctgcgggcggcggaggcggaggagcaccgggaggtgtcggagttccaggccgagctggtgcagctcggcgccgcgctgaacggcgaccacgacggggaagggtacgaccccgaggtgttcgtccgcgggatgaccgtcgccggcgccgcccagtactgccgcgacgcgttcgaccggttccgggaggagtgccaccggtgccgcgacggcggcatggacgggtcccacgtcccgatgctgcagccggcttcggcttctgcttcgtcttccgctccggcggctgacccgccggccacggcgccggcaccggcgacgccgtcggctctgtccaagctgtgcggttgcttcccatgcttcaatgcgtcgtag

SEQ ID NO: 78582 - DNA, 1851 bp, Oryza sativa
  Clone ID: PAT_MRT4530_78375C.1
atgctgttctgctgccctgcttctcctccccctccaatccaagcttcttctctcccgccgttccggacgaacagcttgtctccgaccgtacgtggcgggaatgccgcgccacgacgccctctcgcgcggtctttctcggccaagaaccggtccccgcgagcgcggaaccgccacgcggcagcaggtgatggtggtggttatgggtctccggagcaagaggggcgtggggaatcgtccctcccgaacgccgaggcgctcgcgtcctcgctgcgtgattgcggcggcgcggacggcgtccggcgggtgcacgcggttgctgtccggtcgctcgacagcctggggacgttcgtcgccaacaatttgatcagcgcgtatgccaggttcgacgaggtttcggatgccagggaggtgttcgacgaaatgccggagaggagtgttgtgtcgtggacggcgatgatgaatgtgtatctgaaactaggacactacggcgaggttgtgaggctcttctttgatatggtgggaagcggagtgcaaggtaacagcttgacttttgtttgcttgctgaaatcatgcggcgagcgttgcgatgctaagctagggcagcaggtccactgttgtattgtcaaaggtgggtggagcaatgtgatagtggacagtgctattgcacacttctatgctcaatgcggtgatgttgctagtgcttcagccatatttgataagatggcctatcgtgatgtcatctcatggacaacaatgatcacagcttatgtgcagcatgggcatgggggccaagctcttagaatgttttcagaaatggtgtcagaaggatttcgaccaaatgagttcactgtgtgcagtgtcctcaaggcttgtgcagaagagaaagctgtgagatttgggaagcagctgcattgtgctgttttgaagaaaatgtacaaaaatgacatccatatcggcagtgcccttgtcaccatgtatgctagatgcggtgaagtttttgatgctcaggcagtgtttgatatgatgccacgaagaaacactattacatggacttctatgatctctggctatgcacaaagtggccatggagaaaaggctatcttgttgttcagaaagatgaagatgcgccgagtatttgttaacaacctcaccattgttggtctcctaagtgcctgtggctccttacagtcgccttatcttggaaaggaattgcatgctcagataataaagaattctatggaagaaaatcttcaaattgggagtacacttgtttggttctactgtaaatgtggagagtacacatatgctgcaagaattcttgaagcgatgcctgaccgtgatgctatctcatggactgctctgatttccggctacaataatctaggtcataatgttgaagcacttaaatcattagatgatatgctatgggatggtgtaaaaccaaatacatacacttactcctcggctctgaaagcttgtgcaaaattggaggctctgcaatatggaaggaagatccatggttttgttaacaagactcaagatttctccaatgtgtttgtgggaagctcacttatcgatatgtacatgaggtgtggaaaagtcgacgaagcccgaagtgtctttgatgccatgccagaacataaccttgtgacatggaaagtgattattacaggatttgctcagaatggcctctgtgaagaggctttgaagtacatgtacctaatgcaacaagaagggcatgaggttgatgattttgtgctctcaacagttctgacatcatgtggagatcttcaatggaaatccatctccttctctgactcagttgctggttcagtttcagctaggcagtag

SEQ ID NO: 78583 - DNA, 237 bp, Oryza sativa
  Clone ID: PAT_MRT4530_78376C.1
atggccgagcggcaagcaaggggggcggggaggccggcgtcgacctcctcaccggccgtgacgtcgccatcaagtccttccccaaccggcgacgtggcggccagcgaggggagcaaggcatcggcgggggagcaaggcgtcggcggcggtgaggcggttcttggccgcggccagcttgacccggagtttgaggttagaaatcaacacgaagaatcaatcaagaagcattcagattag

SEQ ID NO: 78584 - DNA, 1065 bp, Oryza sativa
  Clone ID: PAT_MRT4530_78377C.1
atgaacagggagaaatccccgatcccgggagacggcggcgacgggttgccgccgcaggccacccgccgggcgggccctccggcggcggcggcggcggcggagtacgacatcagccgcatgccggatttcccgacgaggaaccccggccacaggcgcgcccactccgagatcctgagcctccccgaggacctcgacctgtgcgcggccggcggcggcgacgggccgtcgctgtcggacgagaacgacgaggagctcttctccatgttcctcgacgtggagaagctgaacagcacgtgcggggcgtcgtcggaggcggaggcggagtcgtcgtccgccggcgccgcggcggcggtggcggcggctgaggagctcgtcggggcgtcgcccgggacggaggggatgtcgtcggcggaggccaagaaggccgtgtccgcggccaagctcgccgagcttgctctcgtcgatcccaagagggcgaaaaggatttgggctaacagacaatctgcggcaagatcaaaggaaaggaaaatgcgatatattgctgaacttgagcgcaaggtgcaaaccctgcaaacagaagcaacaacactgtcagcccagttggcactgctacagagagataccagtgggctaactactgagaatagtgaactgaagctacgtctgcagaccatggagcagcaagtccacttgcaagatgctttgaatgacaccctgaagtctgaggttcagcggcttaaggttgcaaccggtcaaatggcgaatggtggagggatgatgatgaacttcggtggcatgccacaccaattcggaggcaaccagcagatgttccagaacaaccaggccatgcaatctatgctggcagcacaccagctgcaacagctccagcttcatcctcaggctcagcagcagcaggtgctgcaccctcagcatcagcagcagcagccattgcaccctctacaagcgcagcagctccagcaggcggcacgagacctcaagatgaaatcgccgatgggcggccagagccagtggggagatggcaagtcaggaagcagcggcaactga

SEQ ID NO: 78585 - DNA, 296 bp, Oryza sativa
  Clone ID: PAT_MRT4530_78378C.1
acacacacaatccaccggtatggtttatttgagtcgtttagaggtaaaacaaaaaggcactaccggacgctgattcaatctactgccccctgaagtatacatcggggtccaagaccaattgagttaaatcttcatcacctcaacaaaagtatgcttcttactccttaccataaagcgtgtctagcgcccccctaaaaatgttaccttacttgcgggggccaaactatatgcaattggaataattcgccctttgatccttgtgacaaactgcagacataaccaatcaatgctaaaaa

SEQ ID NO: 78586 - DNA, 1860 bp, Oryza sativa
  Clone ID: PAT_MRT4530_78379C.1
ccgggcaggtttttactgtccccatgcagacaatgccaaagggataaacagagttaaaattggtgaaaattcactcgaatccaaatgtaaacaacccatttttctcctgttccaatcccatccattccattccattccttctccctgtgctcggattcctgttcttgcagctgatccctagatcttcctctttgcccgagaattttccgcccaattccccactccgattcctcttctttcgcccaaattttggctcaacatttcgcagcgcaatctcgagctgaatcttggggggtaaagctttgcttcttggaatcttggtgcggtttttgggggagatttgcgagcgtttggagccgagaagatgaacagggagaaatccccgatcccgggagacggcggcgacgggttgccgccgcaggccacccgccgggcgggccctccggcggcggcggcggcggcggagtacgacatcagccgcatgccggatttcccgacgaggaaccccggccacaggcgcgcccactccgagatcctgagcctccccgaggacctcgacctgtgcgcggccggcggcggcgacgggccgtcgctgtcggacgagaacgacgaggagctcttctccatgttcctcgacgtggagaagctgaacagcacgtgcggggcgtcgtcggaggcggaggcggagtcgtcgtccgccgccgcccatggagcgaggccgaagcaccagcacagcctgtccatggatgagtcgatgtcgatcaaggctgaggagctcgtcggggcgtcgcccgggacggaggggatgtcgtcggcggaggccaagaaggccgtgtccgcggtcaagctcgccgagcttgctctcgtcgatcccaagagggcgaaaaggatttgggctaacagacaatctgcggcaagatcaaaggaaaggaaaatgcgatatattgctgaacttgagcgcaaggtgcaaaccctgcaaacagaagcaacaacactgtcagcccagttggcactgctacagagagataccagtgggctaactactgagaatagtgaactgaagctacgtctgcagaccatggagcagcaagtccacttgcaagatgctttgaatgacaccctgaagtctgaggttcagcggcttaaggttgcaaccggtcaaatggcgaatggtggagggatgatgatgaacttcggtggcatgccacaccaattcggaggcaaccagcagatgttccagaacaaccaggccatgcaatctatgctggcagcacaccagctgcaacagctccagcttcatcctcaggctcagcagcagcaggtgctgcaccctcagcatcagcagcagcagccattgcaccctctacaagcgcagcagctccagcaggcggcacgagacctcaagatgaaatcgccgatgggcggccagagccagtggggagatggcaagtcaggaagcagcggcaactgatgcgtcatttacaaatttacaaaaaaattcgccaaagtttcggtgtaaggttgtggtttaacaaccatggagatggtctgtttcattgagatgatgatgatgtgcaagagtagttatcatcatcatcatcggtaggttcaggttggcttcagcttcagtcaaacagttgggtggatgttcagttggagagtttatctgtagctggttcagtaaggaaatggtcgaataatcaagaattccaggttaaaatctttcgtttctttggtaaggtagcacatcaccaagatgtactgttgtagtgttgtccccagttccatagattcaagtagccaaaaaaaaaaaaaaaaaggggggggcccgcgcctcgtccgaattcctgcagcccgggg

SEQ ID NO: 78587 - DNA, 5018 bp, Oryza sativa
  Clone ID: PAT_MRT4530_7837C.1
ggagcggagggaatcacctcgataagctacccctccacctcgtggcactggcgatcttcgagatcaaatcaatggtcgccgagaagcacgacgcacacggggtgacgcaaaccgctcccggcgtcatgtctcttcgcggcgccatgatcgaggaaatcgtccaaacgaggaccgagactacgacgatcgcgaccggcgggggccagacaacactggtcatggccgtcgccgcaacgacgacgatgaaggagatcggcgtcgagacaacagcgagagacgacgacaggattcccgggatccaggtcgtcatcctcgtaatcgtacgccggaaccaagcgacccatcgtcgtcatcatcatcatccgcgtcctcttcatcgtcagacagacatccacgaaggtcacgcgaccaccgacaacccaccgctcccagtgctgggtgtagggctttcggtcgttccctacgtgatgtccgatggcctgagagatgccgacctggagctattgaaaagtatgatgggagcaccgacccagaagaattccttcaagtctactcgacagtgctttatgctgccgaagcagatgacaatgcgttggcgaattatttaccaaccgcgttgaagggttctgtacgttcgtggctgatgcatctcccccctactcaatttcttcgtggtcagacctgtggcaacaattcgtcaccaatttccaaggaacatacaagcgccacgtgatcgaagacgatttacacgcgttaacacagaactcaggcgaatcattgagggaatatgttcggcgcttcaacgagtgcaggaacaccatccccgagattaccgacgcttctgtaattcgcgcctttaagtccggtgtcagagatcgctacactacccaagagttggcaacaagacgcatcacaactactcgaagattattcgagatcgttgaacggtgcgcccacgtggatgacgcgataagacgccagaacgacaagccgaagactaggggagagaagaaatcagccgcagacgcatttgagtcaaacaagaagaaaaatcgcaaaaacgggaaaaggaaagctcaagcggaagtcctcgcagtagaatacgcgaaccctcccaagcgcccggacccacaaggcagcgacacaaagaaatcatggtgccccatacacaaaacagacagacattctctagaggattgccttgttttcaaaaagtcgctcgagaagcacatggcgtttgaaaaaggcaagcgagtacgcgttgtcgagaggaacgaggagtcacctcctcacgaatcggactctgcgtacccagactccgacctccacgtttcacacatcttcggcggctccacgacgacggtatccgatcgtggtcgaacccactattcggaacgtcaaggtagcacgggttctcatcgacggaggcagttcgatcaacctcctctttgccagcactctggatgcaatgggaatttcgcaaagtgagttgacaccaaccgatcaacccttccatggaattactccccaatcatcgtccaaacctttgggcaagattacgttgcttgtgaccttcggccaagccaacaacttcagaacagagcagatcaccttcgatgtcgctgaattcgatacagcttataacaccatcatcgggagaactgcacttgcgaagttcatggccgcatcccactacgcatatcaagtgctcaagatgccgggaccgaagggaacaatcactattcaggggaacgcaaagctggcggtgcagtgcgacaagcggagcctcgacatggtcgagcaaacgcacaccccacccgccacgtctgaaccacccaagaaagtgagcaagccaaacaagacgccgaaaccggacagcgccatcaagatcgttccgctctctagtgctaaccccgacaagactgaactcgcgctcatcaccttcttccgcgataatgccgacgtgttcgcttggcagccgtccgacatgccgggggtccccagggaggtgattgagcacaaactaatggtgcgacccgatgccaagccagtaaagcaaagactgcggagatttgcaccagatcgaaaacaagccatacgagaagagctcgacaaacttctcaaagctggcttcatcagataagtactccatccagagtggcttgctaacccagttatggtgcggaaggccaacggaaaatggagaatgtgtgccgacttcacagacctcaacaaggcgtgccccaaggatcactttcctctccctcgaatagatcagctagtggattcaacagccggttgtgaactattaagcttcctcgacacttactctggctaccaccaaattagcatggcaaaagaggacgaggagaaaacagcgttcatcacaccgtttggggtattttgctacgttaagatgcctttcggattgataaccgctgggaatactttccaacgcacggtccagggcgcacttagcaatcagcttggcaacaatgtcgaagcttacgtcgacgacatcgttgtcaaaaccaagacaagcgactcattgattgatgacctccgggaaacgttcgacaacctccgacgatatcgcctcatgctcaatccagagaagtgcacgttcggagtaccgtcgggcaaactactcggattccttgtttctggcagaggaatagaggcaaatcccgagaagatcaaagcaatcgagaacatgaagtcgcccacaagactcaaggaggtgcagaagctaaccggatgcatggcagcattaagcagattcgtcgctaggatgggagaacgaagacagcctttcttcgccttgttgaagaaacaagacaactttgtatggacacaggaagccaaagaggcatttattgcactcaagcgctacctatcaaacccccctgtactcgttgctccccaacctaatgaaaaattattcctttatattgccgccacgccatattccgttagcactgtcattgtcgtcgagagagataaagtacagcgaccagtttattacgtcagcgaagctctccatgacgcaaagacaagatatccacagattcaaaaactgctctacgcaatcatcatgacatcaaggaagctacgccactactttcaagcccacagagtcataattgtctcctccttcccccttggcgaagttgtgagaaacaaagacgttgtcggccgcatcgcgaaatgggtagtcgagctaagccaatttgatgtccactttgtgccgcgaacagccattaaatctcaggtactcgccgacttcgtggccgattggaccatgccagataacaagtcagacaaccaaggcgacaatgagacatggacaatggcgttcgatggtgcactcaacagccaagaagcaggggcaggatttatcttgacatctccatccggagatcaattcaagcacgcaatccacctcaactttagggcaactaataacactgcagaatacgaaggactactcgccgggatatgagctgcagccgcacttggggccaagcgactaatcgtcaaaggggactctgagctagtcgcaaaccaggtgcacaaagactacaaatgctccaaccccgagttatccaagtacctcgcagaagtcaggaagctcgagaagaggttcgacgggatcgaggtccgacacgtctatcgcaaggacaacgtcgagccagacgacctagcgcgacgcgcatccagacgagagccgctcgaacccggcacctttctcgacgtcctgacgaagccatcggtaaaagaagttagcggcgaagttggcccgagcacccccgacatcagctcggaggtcaccgaggcagaacgcgccgttgctgacattgaaaccacggatgactggcgcaccccattaatcaaattcatcagtagcgaggagttgcccgaggacgatacagaggccgagaaaataacccgtaaagcaaagatctactgtatggtcggcaacgatttatacaaaaaagcgccaaacgggatacttctcaaatgcgtctctaccgacgagggcagacaactcctcctcgacatacatgaaggcatatgcgggtcacacgccgccggtcggacattggtcggcaaagcctttcgataagggtttttctggccaatcgcccttaaagatgcatgcgacatgcaaacacacaaagctacctgcacaagcgcttcagacaatccctctgacttggccgttctcgtgctgggggctagacatacttgggctattcccacgaggacagggaggctacaaatttctatttgtagcgatcgacaagttcaccaaatggatcgaagcagtacccactggagaaatcaaggccgataacgccatcaagttcatcagagggatattttgtagatacggactaccgcaccgtatcataaccgacaacggctctcaattcatcagcgccgatttccaaaattactgcatcggcttgggagtcaaaatatgcttcgcctcggtttctcaccctcaaagtaatggacaagtcgaaagggcgaacggcatagtactacaagggataaaaaccctgctatgggccgtgcgcactacaccgacaacgtccaataaagaaacacccttcttcctcgtgtacggctctgaagccatgctccccagcgagctacgacatcaaagtacacgagtacagaagtattccgatgagaaccaggaggaacagcgagacatcgatgtaaaccttctcgaggagcattgtgaccgagttgccgttcgagcagctagctatcaacaagccctccgccgttatcacaagaagcgcatccgagcacgcatactttcgatcggcgactatgtcctccgacgagttcaaacccaagcagggcgaaacaaactctcaccaaaatgggaaggaccctacacgatcacacaagtcttgcgcccaggcgcatacaaaatcgcagacggcgacggttgcgaactagcaatttcatggaacattgaccaactacgtaaattctatgta

SEQ ID NO: 78588 - DNA, 552 bp, Oryza sativa
  Clone ID: PAT_MRT4530_78380C.1
atgggctacgtcggcaacatccccggcctgccctacgagagcctggccatcgctgacccgctctcccccgacgccgtccgcgccttcgccgcctggatgtggccggccaccgtgttcccggaggaggcggtgctcgcgtacacggagaagctgacagcggtggaggctgcggtgcggcggatggtgcgacggtggaggcgctggaggtggcggtgcaacgtcggcggaggccggggaggcgcaggcagcggcgatggcgttcatgcttcggctgtcggagtacgtggcgcctggcagtggggtggaggtcggcgggaggctggggctccctgcgcaccaggacacgagcttcctcgccgtggtgacgcagaacggcgtcgacggcgtcgaggtggagtgtggccgctgtccgcctccgctgccggctgcctgccgcctccacctatggctgcctggtccgccaccgccgccggctgcccagacgaggtggcgccggcgttggcgccgacgtccttgaagaaggcgaccttgttgagggcggactggccgtag

SEQ ID NO: 78589 - DNA, 216 bp, Oryza sativa
  Clone ID: PAT_MRT4530_78381C.1
atggggaagaaaagcccgcggaccgcccccagcctcgacctcaacctcgggctcgcgaccgtccgcaccaaccgatcctgggcggcgctccgcacggaccccagtctcggagctgcccccgggaggggcgtcgacgccaccgccacccacggcccggactgctccggttgtgcggatttcgtcctccgcgaggggtccgaccccgaggtcccctga

SEQ ID NO: 78590 - DNA, 311 bp, Oryza sativa
  Clone ID: PAT_MRT4530_78382C.1
atgcccaaggccacgcgcgtcgaggaagagctctcggatgacaagctgctggaggatgtgatcccagctgtcgcctcgggtatcatgaaatgggggaataatttaccactaggttcctctattggctccatcgctttccgcgagagaagaagcaaagggctgcaggtagtagctgttggaagccggtgttactcctgctttcctagctcgctgaggtggctgaactcggagcccaccaccagcgctggcaagcatgcaggagacaagtggaagagaagaggggaaggcaagaagtggaagaaggcgaggcg

SEQ ID NO: 78591 - DNA, 547 bp, Oryza sativa
  unsure (1)..(547): unsure at all n locations
  Clone ID: PAT_MRT4530_78383C.1
accgcgagcggcggcggcgctccgtccgtcgatgctggcggccccgcgcgcacgatgccccacgaaggcgatgcgcatcgccagcggagggccgccgcgacggcacgcgagaagcccccaggtgcaggaggcctccggctgctgctgctgctgcggcggcggcggccatgacggtggccggcggcgagcgaagaggtgagagagagagaatggatgagcggtgccgattcgtggaccaataggtgagtgccacgtggatggaggatagttcggcgaccgttatcccctctagcctctgtctggtctctcgccaacgcgcctgttaatttgcacttctgtggctgatccttggcttggttggttttctttgtttctttcttttcttttgtgaggacaatgagatttggaaatttcagatatttggaaatattttgaaaatctatgctgactaagtgcaaatttttacccagcaaagctttaagaaaaaatatatgtgtcttcttatagactaaatcgtangagttttgactaggacatgttagagttg

SEQ ID NO: 78592 - DNA, 330 bp, Oryza sativa
  Clone ID: PAT_MRT4530_78384C.1
atgagatataacaagaaaacatatggctacgaccacatcgtctgcatgcattccgccgccacctccaccccaccatgggcttcctccgcactcgcccagccccgctatttctccacaagagctaccagggttatgatgaggcgccttgagcagcgcattaggaaacaggagagggcggcaggaagtatgcatggatggcgtattgctcatctgaaggcaaaccacaggctagatttgttaaaatcagacatgaggggtgaccaactcaaggtgaccgcgcacatgtacagggggacctgttcgtcatatttgccggtgcacacacggtga

SEQ ID NO: 78593 - DNA, 401 bp, Oryza sativa
  Clone ID: PAT_MRT4530_78385C.1
gaaaagggggggttttttattaaaggggttttatttttaggggtggcccaccattttttccaaaaccttttttctgggggccatggaaccaaagtttggtcaaaaaaaaccccaggaaaaaagttggaagttgaaaggggccattttgcaaatttttgggttttggatcgccattttaaaaaattgggggggcccgggtccaaaaaaaaaaaattgggggatgctttggattatttggaaaagggggccaaaggggccctggggcattatgccttggaggtggttgcaaaaatggttttgggggggccccattgggtgggaaataaaaatgggtggggggctccccccgcccaacgtttggtttttgtcctgcccccccggttccgcccccggggttcccc

SEQ ID NO: 78594 - DNA, 1523 bp, Oryza sativa
  Clone ID: PAT_MRT4530_78386C.1
ctaaaagcatccatagacataggtaactatggcaaccaaacagacaagcaactctacaatgttcttcatgatagttcttttgatcttaggttcaactgtgcttgggaaagagccccctaacccatgcctagccccagtgccaaccccagccaaacctccgtccattattaccccggctaaacctccatccactattgctccaaccaaacccccaatcaaatcccctcccactattggccctgccatacctccgtccactattgctccagccaaacccccaaccaaacctccgctcactattactccagccaaacccccaaccaaacctccaccacctattgccccagccaaacctccgtccactattaccccggctaaacctccatccactattgctccaaccaaacccccaatcaaatctcctcccactattgcccccgccatacctccgtccactattgctccagccaaacccccaaccaaacctccaccaactattgccccagcgaaacctccgtccactattgctccagccaaaccaccaaccaaacctccacccactattgctccggccaagcccccaaccaaacctccacccactattgctccggccaaacccccaaccaaaccttcgcccactattactccagccagtccaccaccatcgtcactacctccgtctgtgaacccgccaaaacctaagccgctacctaagtgcccattgttgttaactaatctcggagggtgcattagcttggggataggcaatagcttaatgaagtacccatgctgctcacaattgtacaacctccaatatgacactgctgctgcttgtctatgtgacgccataaagattgatcggtgctgtcctccgttgctcctcgtcgcgctgcaccgcactctgccgtcgccggctgcccctcgcgcgcgggccgggcctccgccgtcgccggccgcgcttccatgagcgctggcctccaccgccgcggccgcgcctccgcgagcgccggcgtccacagccgcagccgcgcctccacgaaacgcagcctcccccgctgccatggccgcgcctccgcgagagccggcctccaccgctgcggccgcacctccgcgagcgccggcgtccacagctgctggccacccctccatctacgctctccggccggatccagcggaggcggcgccggatccgccacctctacgccgggaggagtcgccgccgccgcgtcctagccgaagacgacgcgccgccccatcgccaccgtcgccaccacctccttcccgcggccatcctccactgccgcctgcgcatcgccgcgtcccctcgccggatccgcttccaggggcgccggatccgccgcgcccctgccgtcgccggccgccggagccccccaccgtcgcgcgccgctccgtcctcccacgccgaggatgagctttgccggttctcatggccccgccgccgccttcccggctggccgcgtggctttccggcggcgagctccggcggtggcaaggtggcgtga

SEQ ID NO: 78595 - DNA, 190 bp, Oryza sativa
  Clone ID: PAT_MRT4530_78387C.1
gtggatccccgggctgcaggaatcggcacgaggctgatttgagtctaaaatcgtcctgtttcatccaagagacaccaaatcagtatcctttgttttacctagaagatggcaatggtagcagcgaacagtacttggaccatgaaatggtggaacaggcctcttgttgtacagctgaaacctgccatgcgaa

SEQ ID NO: 78596 - DNA, 254 bp, Oryza sativa
  Clone ID: PAT_MRT4530_78388C.1
gttggagcgagggagtgggaatatcacgggggtgtgtttttctcgctccgtgcttaacactcatgtgaaggtatacttatgttgcctgaatctctcgcacctaggctgtcagaatgctttctcggccagaaaacatccgcgtctgacgaataatctttctgcagctatggtcgctgtggtgattggggcgatgtgcatgagaagatacgattgatccatgtgagcagaataatgtggtgctggtgttcactaaa

SEQ ID NO: 78597 - DNA, 426 bp, Oryza sativa
  Clone ID: PAT_MRT4530_78389C.1
atgccggagctggccatggtcaccgcggcgagggcaatcgctgagtgggaccaccctgccgcggacatcacccatctcgtcatctccaccaacgccggcgcccacacccctggcgccgacaagcggcttgcggcgctcctcggcctccgtccagcgcgccatcctctacatgcacggctgctccgcctcgccaaggacatcgccgacaacacccacggtgcgcgcgtgctcgtggcctgcgcgaaggtcttcctcatagcgcccgtcgcccccgacgaggcccacctcgacaccctcgtcgccgcgtcgctgtttggccgcggcgccagcgccgtcatcgtgggcaccaacccgagagcccccgtcaaaaaccctgtcttccacatggtgtccaatcgaatgggagtgagagctagggtttggtaa

SEQ ID NO: 78598 - DNA, 4560 bp, Oryza sativa
  Clone ID: PAT_MRT4530_7838C.1
atgtcgtactacgtagatccttgtaccaacgtaccccaataccctttatatccggtctacgggtatcacccgtcgacagtggcgcgccaggtagggggatttggtactcaaggttctactactatgtcatccagcttcgtcgacaacaacgtcaacaccagcctcagccaagcgctccctgcttcaacaatgctggtatggactcaagtcggcgaaatcgtcttcccgttttacaccacgacgctgatctcaaccggtcctccaatgaccggaaacgagaacgcagtggctacaaaccaaggcgacttcatgtcgaaaaatccacctgtcgaaacggagaacggatcatcgacgacatccaagctcgggaaggattctgatacggccaaaccttgcccttctgacatgaaccacgagccggcaaagatgacttccgaagccacaaggtcttggtgtcctatccacaaaaccaagaaacacaccctgcaagattgctgggttttcctcaacgtccatgctgaaattcgcgcatgcaaagaacgtggaattcagcgtacttctccaactcgggatgtctattgtcctattcacaagacaaagaatcacaacctctcgagctacaaagtcttcctcggcgccatgaaagctccgtctcctgagtcatacgtccccgtcagggataacggcaaggaacaaggagcgactccagcctcagatcgattcgttgaggtaatcgatatcgatcctcatgaaccaccggtcttacatcttctcgaagactatgggtcatcgacaatgagcgtgccgcaggaggtattggctatcgatgacgttggcacggctttcggtcgttccctacgtgatgtccgatggcctgagagattccgacccggagcaattgaaaagtatgatgggagcaccaacccagaagaattccttcaagtctactccacagtactctatgctgccggagcagacgacaacgcgctagcgaactatttatcaaccgcgttgaagggttctgcacgttcatggctgatgcatcttcctccctactcaatctcttcgtgggcagacctgtggcaacaattcgttgccaatttccaaggaacgtacaagcgccacgcgatcgaagacaacctacacgcgttgacacagaactcaggtgaatcattgagggaatatgttcgacgcttcaacgaatgcagaaacacaattcctgaaatcaccgacgcttctgtaatccgcgccttcaaatccggtgtcagagatcgctacactacccaggaattggcgacaagacgcatcacaaccactcggaggttattcgagatcgttgagcgatgtgcccatgtggacgatgcgctaagacgcaagaacgacaagccgaagaccgggggagagaagaaatcagccacagacgcatctgagtcaagcaagaagaaaaatcgcaaaaatgggaaaaggaaagctcaagcggaagtcctcgcagcagaatacgcgaaccctcccaagcgcccagacccacaaggcagcgacacaaagaaatcttggtgccccatacacaagacggacagacattctctggaagattgccttgttttcaaaaagtcgctcgagaagcacatggcgtttgaaaaaggcaagcgagtacgcattgtcgagaagaacgaagagacggctcctcacgaatcggattatgcgtatccagactccgacctccacatctcacacattttcggcggctccacaacgtactcctccaatactctagacgcaatgggaattccgcaaagtgagttgacaccaactgatcaacccttccatggaattactccccaatcatcatccagaccttttggcaagattacgttgcctgtgactttcggccaagccaacaacttccgaacagagcagatcaccttcgatgtcgttgaatttgatacagcttacaacgccatcatcgggagaactgcacttgcgaagttcatggccatatctcactacgcgtatcaagtgctcaagatgccgggaccgaagggaacaatcactattcaggggaacacaaagctggcagtgcagtgcgacaagcggagcctcgacatagtcgagcaaacgcccagcccacccgccacaactgagccacccaagaaagaactcgcgctcatcaccttcctccgcgataatgcctgcatgttcgtttggcaaccgtccgacatgccgggggtccctagggaggtgattgagcacaaactaatggtgcgacccgatgccaagtcagtaaagcaaagactgcggagatttgcaccagaccggaaacaagccatacgagaagagctcgacaaacttctcaaagctggcttcatcagagaagtacttcatccagagtggctagccaatccagtcatggtgcggaaggccaatggaaaatggagaatgtgtgtcgacttcaccgacctcaacaaggcgtgtcccaaggatcactttcctctccctcgaatagatcaattggtggattcaacagccggttgcaagctattgagcttcctcgacgcttactttggctaccaccaaatcagcatggcaatagaggacgaagagaagacagcattcatcatgccgttcggggtattttgctatgttaagatgccgttcggactgataaccgtcgggaatactttccagcgcacggtccagggcgcacttagcaaccagcttggcaacaatgttgaggcttacgttgacaacatcgttgtcaaaaccaagacaagcgactcattgattgacgatctgcgggaaatgttcgacaacctccgacgatatcgcctcatgctcaatcctgagaagtgcacgttcggagtaccgtcgggcaagctactcggattccttgtctctggcagaggaatagaggcaaatcccgagaagatcaaagcaatcgagaacatgaagtcgcccacgagactcaaggagaaagccaaagaggcatttattgcactcaagcgctacctatcaaacccccctgtacttgttgctccccaacctaatgaagaattattcctctatattgccgccacgccatattccgttagcactgtcattgttgtcgagagagagaaagtacagcgaccagtttattacatcagcgaagctctccatgacgcaaagacaagatacccacatatccaaaaaatgctttacgcagtcatcatgacatcaaggaagctgcgccactactttcaagctcacagagtcacagttgtatcctccttcccccttggagaagttgtgagaaacaaagacgttgtcggccgcattgcgaaatgggtagtcgagctaagccaatttgatgtccactttctgccgcgaatagccatcaaatcccaggtactcgccgacttcgttgccgattggactatgccggacaacaaatcagacaaccaaggcgacaacgaaacatggacaatggcgttcgatggcgcactcaacagccaaggagcaggggcaggatttatcttgacgtctccttccggagatcaattcaagcacgcaatccacctcaacttcagggcgaccaataacactgcagaatacgaaggactactcgccaggatacgagctgcagccgcacttggcgccaagcgactaatcgtcaaaggggactccgagctagtcgcgaaccaggtgcacaaagactataaatgctctaaccccgagttatccaagtatctcgtagaagtcaggaagctagagaagaggttcgatgggatcgagccatcggtgaaagaagttagcggcgaagttagcccgaacacccccgacatcagctcggaggtcaccgaggcagaacgcgccgttgctgacatcgaaaccacagacgactggcgcatcccattaatcaaattcatcagcagcgaggagttgcccgaggacgatacagaggccgagaaaataacccgtaaagcaaagatctactgtatggtcggtaacgatttatacaaaaaagcgctaaacggggtacttctcaaatgcgtctctactgacgacgacagacacctcctcctcgacatacatgaaggcatatgtgggtcacacgccgccggtcggacattggtcggcaaagcttttcgacaagtctttttctggccaaccgcccttaaagatgcattcgacatggtccagcgatgtgaagcctgtcaattccacagtaaacacacaaagctacccgcgcaagcgctccagactatccctctgacttggccgttctcgtgctgggggctagatatacttgggccattcccacgaggacagggcggctacagattcctattcgtggcgatcgacaaattcaccaaatggatagaagcagtgcccacgggggaaatcaaggccgacaacgccatcaaattcatcagagggatattctgcagatacggactactgcaccgcatcataaccgacaacggctcccaattcatcagcaccgacttccaagattactgcatcgggttgggagtcaaaatatgtttcgcctcggtctctcaccctcaaagcaacgaataa

SEQ ID NO: 78599 - DNA, 1591 bp, Oryza sativa
  Clone ID: PAT_MRT4530_78390C.1
actcctataggggattgggaccctcgaggccggccggctcctccccgcgccgccgtcgagatgtttcggagcccggccgccgccgccgcctccgccctcctccgccgcctaggcccccgcgtatccggcggtggaggcggcgcttccactcaccggcgattcgcgcctccggtatccacctccatcctctcccgctactcctccgcgccgacgtcctccccttcgccgccgccaccgccacccccaccgccctccgacgccgcggcggatggggataaccgagcggaatcgggggaacccggctccagtctcagcatcaccatcgaccgctccggcctgtacaatcccccagagcactcgcacgagccgtcgtcggattccgagctagtgaagcacctcaagagcatcataaagttccgcagcgggcctatcagcgtagccgagtacatggaggaggtgctgacgaacccgcagtcagggttctacatcaaccgcgacgtgttcgggacatccggggatttcatcacctcgccggaggtcagccaaatgtttggagagatgactggtgtgtgggcaatgtgcctctgggagcaaatggggcagccggagaaagtcaatctgattgagcttggtccagggcgcggaactctcttggcgactttcttctggcggtcatcaaaatttgttaattccaccaaagcactcaacattaacttggtagaatgtagccccacgttacaaaaggtgcaatacaatactctgaaatgtgaagatgagcccattggcgataaaacaaggacagttagcaagctttgtggagcccctgtacactggcatgcttcccttgaacaggttccttcatgattgccaactataattattgcacatgacttctatgatgccttgccaattcatcaatttccgcctacagcttttctactgcaccgttccacgcggtgcggttgggctagttgttaggatcttgagaaagagtatcatattgatggctacccgaaagcaatggagatcactgaacagattgcagatagaattagctcggatggagggggtgcacttatcattgactacggaaaagatggaatagtctctgatagtcttcaggcaatccgcaagcacaagtttgtacacatattggataaccctggttcagccgatctgagtgcttatgttgattttgcatcaatcagacactccgctaaggaagcttcagatgatatttctgttcatgggccaatgactcaatcccagttcttgggctctcttggtataaacttccgtgtggaagccctgctccaaaactgtgctactgatgagcaggccgagtctctgaggacaggctactggcgtcttgtcggagatggtgaagccccattctgggaaggtcctgacgaccaaaccccaattggcatgggtactaggtacttggccatggccattgtcaacaagaagcaaggcacacccgttccattcgagtaagcatcacgtggctggtgcgagaagaatgtggatcttgcagaagactcatcggttcgctatggtctatcttcacagcctacagcctctttacttt

SEQ ID NO: 78600 - DNA, 2802 bp, Oryza sativa
  Clone ID: PAT_MRT4530_78391C.1
atggctgaggctgtgattcttttagctgtcaagaagattggtgttgccctggggaatgaggcaatcaatcaggccacttcatatttcaaaaaatttgtcacacaactgacagagcttcaaggtagcatgggacgcatcaagagagagcttaggctgatgcatgagtttctttcccgaatggatgtccgcaatcgcaacaatcagacatatgaaatctgggtggaggaggtcagaatgttagtccatcggattgaggacatcgtggatgattacttgcatcttgttggccacaaacaagacactggatggggtacctatctgaagaaaggattcaagagaccaaatgttctgttctctttaaacaggatagcttcatcgatcaaggacgctgaggccaatttagtgcacttgttccaagccaaagaacgatgggtgtggatggctggtggaagggctactggcagcaaaagctcaagctatattattgagacgtctcgacatctagctaatatttcacgctccctcgatgaagatcttgtgggggtcgatgaaaacataagaaaactacatgagtggctaacaagtgatgagttgcaacgtgaggtgatagcgctgcatgggatggggggtcttggtaaaacggctttggcagccaatgtgtacaggaatgagagagaaaagtttgaatgccatgcttgggtctccatctctcaaacttattccatcaaggatgttctaaaatgtttggtcactgaattagatttaaaaaagaaaattcagggtaacattggtgacatggatactgcaactctccaaaatgaactgaagaaattcctgatggatcagaagtatttgatcgtattggatgatgtttgggtaccagaaactgtcaacgacttgtttagcatatttgtttcaaatctcaaggggagcagagttctcgtgacaacacgcattgatggtgtagcccacctcgctttcccggacaagaggataacactagagcctctatcagaaaaaaagtcatgggaactcttttgtaagacggcttttccaagagataaaaaccatgagtgtcccacaaaactgacagtactagcacaacaaatagttagtaaatgtgaaggcttacctcttgcaattgtctctgtcggtaggctcctctttgtgcgtgacaagaccgaagaggaatttagacgcatacaaaaccagcttgattgggaactaatcaacaacccaagcctggaacatgttcggaatatcctttacttgagctacatctaccttccaacacatttgaaaagttgcttcttgtattgtagtatgtttccggaggactatcttataacaagaaagaagcttatacggtggtgggtagcagaagggttcatagaggagagaggtggaaacacaatggaggaagtggcagaagagtatctcaaggaattggttcacaggaatatgttgcagcttattgaaatgaatggatttggcaggataaaatcattcagaatgcatgatattgtacgtgagttggcaattgatttgtgccgcaaagagcacttcggttgttcatacaattgtgagaataaacatggtaaatttcttgaggggaaggacgaacgccgcgtggtaatacataaattagacaagcatattaatcaagccattttgaatgaatgtcatagcctccggtgtttgatcacattggacgaagcgacaccaccatcaccatgtctgctacatttggtagcagacaaatgtaggtatatgtcagtacttgagttaactggactacccattgaaaaagttcctgatgctattggtgatctatttaaccttcgacatcttggcctacggggttcaaaggtgaagcacctcccaaattctatagagaagctctctaacttgctgacgctagatctcaacgaaacggaaatacaagaagtgccaaatgggattgttaagctaaagaagcttaggcatttgtttgttgagaaaatgaatgaattatatgggagagaattccggcctcgcactggtgtgcgcatccataaaggcctagagaagctgaatgagttacagacgcttcaaggactagaagttcaagacgaagtgtccttgaggcgcttaggggagctgagacagatgagaagcatccggatatggggtgtcaaggaaagctactgtgaaagcctctgcgagtccctgcagcagatggagtttttatccttcttaagtgtcaatgcaagtggcaaggaggaagtcctcaaattggatggtctaaacccgctgcctccaaaccttcgaaagcttaacttgcgtgggatactggcagaagcaggcatgttgttgggttcacctgcagcaggagatcaaaataaccactcgttgtattcagtgcatctatcgtggtctcagctgatagaggacccactgccatccctctctaggtggtcaagtctgacggacctaatgttgacaagagcatatgttggggagcagtttgtcttccaccaagggtggtttcccaacctcaaggaactcgttttaagggacatgcctgatctgaagcgcctggaaatacacgatggtgccatgacaagcctgcaagatctaactcttgttaacctcagtggcttgacagaggttccatctggcatcgagttactttccaccctcaaaaacctgggcttttgggagatcacccaagacttccttgcagctttgcgccaatgccatagaattcaccatatgcagtggtggtacagtgtacggggggagacagatggagctctctga

SEQ ID NO: 78601 - DNA, 1024 bp, Oryza sativa
  unsure (1)..(1024): unsure at all n locations
  Clone ID: PAT_MRT4530_78392C.1
gctccgggtgcaggattcggcacgaggctgttactgtcatggttctaaatttccgttgttactccccttggagctaagcttgattgtccctcttcttgcgtttcgggagnaagtttatcacagngcaagtgngacactctcccctnttgnactntcagnatggcattccaaagaaaggtttatccacctgggccaagggcctccaaaagggatggtggatggctccagccatttggtgncatggcgaatgcctccggggttgggcttgattcgcttgccacccggttccgccactttggctggcggctngttaccattgggtttttccaccccccttgtttttcaaagccttaatgnggtccgaacaagggttttgtgcgggcggttcccggtccgaagttccanagggaacggcccgaattcaaaaatttaagttggtnancccgnttggatggttgggaaaaaagttgaattcttggttcccanattaaccaaaccgcctttccttggaaaaggcctggtttattaatttattccaaaatttaattanaattttttggttccnttggttcccttcccaggaattttggaagaaattttggggtccccccttggccccaaaaccaattttttttggccttgggggggcccaattccccttggggaaanggccccntggtttnttttaaaaacaaaaaaaaattcctttattcctttcccnggaaangggcgattnatttatttgnaatngaaatttcccncnccggtttattttgggcnattttccaanngggccgnttcttnggccccttgggggggtttttnaaaacnananccancntctnntnactanatnttccntnaactccccaaaaaggggggggggggggcccccgggtttaancccccaaattttccccccccccctcaaaaaagattgggnaanttncnctnaatttnanaaaaatnttccccttgggggcccggtcccttttttttantaaaaaacgatccngttgggaaa

SEQ ID NO: 78602 - DNA, 372 bp, Oryza sativa
  Clone ID: PAT_MRT4530_78393C.1
atggaggtgaagaaggtggccatggttgctgtctgctgcatgttcatactgctgtttccaggccagcagcagcaggtggctgccatgtccaggatctgcagatgctaccacgaatgcttgcccaactgcggcctgcgcaattctcgctccttctgcaaggtgttctgcggcagctgctgcgtcttcaatccagttcacaattgcactagcaccgatgcggcggccgcggcgccagcgatcgccggagacgactgcagaatgatctgcctgaactccttctgcggcgaggcagctacaggctacttgttcaaatattctcgtattctctgcgagcaatgcaatcttgtttacgaactgaaggatggtgtttag

SEQ ID NO: 78603 - DNA, 417 bp, Oryza sativa
  Clone ID: PAT_MRT4530_78394C.1
atggtggtcgtggacgagaggccaggctacctttataacatagcgttgagtgaagagggtgccatagcctatcagaatgtgtttctccttgatacctgtaactccacacttgatgagagccgagtacagaggagagggagggagaagggcgtcggtgctccggtggccgaggatcggcgacgtctgcggccggtggtgttcccgactgacgcgcacccgaggaaggtggaggaaggcatagggagagaggagaatggccggaacggcggcggcaagatcttggccgcggcagcaagaagagtggtgcgccgagattgggcggcggaggaggagagtcacggcacggcgatgacttgccgtggtcagcaagacagcggtgacggcggcagaagaccacggacggcggcgcagccgtga

SEQ ID NO: 78604 - DNA, 510 bp, Oryza sativa
  Clone ID: PAT_MRT4530_78395C.1
ccggccgctgccgcctcctctccacgcacacttggaaaaacttatctaaaaaatggtccattttggggccccaaagtcgctatcgccgtcctcctgccactgtggtgggtcggcgctgaggtggcagggggagcgcgccaatgtggctggcgtcccccgcatagtaagcatacaagaaccaaccatagaaaaaataaactcaaatgtacgaaatatgtgacttataaaattttccaaagctctaccgaaaagtttctcgcctcgaaaacataatcttgcaagtagaatttggagattctaattttgctgaacccagcaaagcgggggagaattgaatataaccttttctataaatgtccgtggatatattatctgcctgattccgagtccgtatgagaaagttacgcttgtttaaaaaaaagtattagcgcgctccccctgccacctcaacgccaccctgccacggtggcaggaggacggcgccagagaggctggcactgtcctgttgga

SEQ ID NO: 78605 - DNA, 1596 bp, Oryza sativa
  Clone ID: PAT_MRT4530_78396C.1
cgggaaggaatagtggttaagcttgaccgactccggtgcggccgggccgggctccacatcaaccaaccacaagcccaaaatatcctctccagccacgagcccgccacgcgctccctcgccttcgtcccatctcgaccgtccacgtgcggcccatccgtgagctccacgcgcctatatctatccctttctatcacctccaccccgggctgctggatgtacgaccgagcaatctcatcactcttcacccgccgcgacctccgcgacactcttcacccgccgcgccgcgaactccggaaccgaacgccacacgcgccttcctctcacttaatccgccatgcttcctcctagggttgccccctcctctctggccgccgccgccgccgccgcgcctacctatctcgccgccgcggcctcgacccctgcttccgtctggctgcctgtgccgcgtggtgccggacccggggcagtgtgcagggccgccgggaaagggaaggaggtgctcagcggcgtggtcttccagccattcgaggagctcaagggggagctctccctcgtcccccaggccaaggaccagtctctcgctaggcaaaagttcgtcgacgagtgcgaggccgccatcaacgagcagatcaatgtggagtacaatgcatcgtacgcgtaccactcccttttcgcctactttgatcgtgacaacgttgctctcaagggattcgccaaattcttcaaagaatccagcgatgaggagagggatcacgcagagaaactcatcaagtaccagaacatgcgtggaggcagggtgcggctccagtccatcgtcacacctttgacagagttcgaccatcctgagaaaggggatgccttgtatgctatggagttggccttggctctcgaaaagcttgtaaatgagaagttgcacaacctgcacagtgtggcatcaaggtgcaatgatccacagctgaccgacttcgttgagagcgaattccttgaggagcaggttgaagccatcaagaagatctctgagtatgtcgcccagctgagaagagtgggaaaggggcatggggtgtggcactttgatcagaagctgcttgaggaagaagcttgaatggaggagacggtgtgaagggcagtagtaggtttcgtttcttccatccatgggatcatgcagctaaagaaagaaaataagtcgagtctgtgtattcatcaaattaagcacgcagtagcaatggagtgaatgaaccaaccaatttggtcatgaacttccccctgtgtctaggtcagtagagcttcagaatcatgtgtatgtcgcgcgtcctcgcagaaaaggaacatggcgccgctggctgtagcgatacttgtgatattgtggctatgcatggagtcatggtgatggtgtattttggggagcatttacacgtttgttgctagagagattttgctggcagccaataaggaacagtatgataatccattgtggtgttaatgcttgtttcatcgtgcttatgtcatgttcctagtagtttatgttagtaactcgaagcctggcaagtttttatgcatatatgtccctttgctttgctgcctgaaaaaaaaaaaaaa

SEQ ID NO: 78606 - DNA, 143 bp, Oryza sativa
  unsure (1)..(143): unsure at all n locations
  Clone ID: PAT_MRT4530_78397C.1
nggagtccgaattctccgccaacgtacaagaggatatgctacgccatgttaaacaagaggtgctagcggccaggtcacgagaattgtataattggcaggcattagagaaggcattgaaggatcttctttacgatgaatcgaac

SEQ ID NO: 78607 - DNA, 276 bp, Oryza sativa
  Clone ID: PAT_MRT4530_78398C.1
atgctggaggaggcgacggcgcggccggacgatgctccggtgaggagggagaggcggctggaggccggccggcaacgagaggagagggaaccggccacgggggaggtcggaacggcggcgagaaccacggccggcggcaatggttggtggccggagaaaacgcgagcgttcccggcgattgggggcggcattcaagggggaaaacgggggaaatcgaagaggaatcaatggggattaattgcccctaatcaatttggtaagagccggcttgaatag

SEQ ID NO: 78608 - DNA, 3243 bp, Oryza sativa
  Clone ID: PAT_MRT4530_78399C.1
atggagacaattctagctggttacaccaaggatgttgtcaggtcacttggtgagttagctgctaacgagatcgccaaagtgctctgcgtcaaaaatgaaatcaacaagcttaagaggaagcttgagaccatgtcggctatcatcagggatgctgagcagacagttgtgcagtatgaaaccacaagggattggttgaagcagttgagaggaatagcttatgaggcagaaaacataattgaccgctgcaggattgaacaagagaggctccaaatgttccaaccacaggagtgcaatccttcatcgctttttaagtgctgcagagatgtcgctgttgactacattatagcaaatgatatacatgaactaaatcaggaactggagagcattagatcagagagtacactgctccatctgaatccagtggcagaagatcaaatcagattagatcttgatgttgctccacatcttgagcctgatatcgtaggcagagaggttgagaatgactccgataatctcatacagctgctaaccagagactataatactacttgtcctttgtttgctatcataggaactattggagtaggcaagactacccttgctcgtaaagtataccataaggcagcagccatgtttgagaccaggctatgggtacacgtctccaaagatttgcggcacttaacaatgtggtctgatgggatgttcagtaaagcagaaattgcagaacaacaagcactgttgctatcatatttacaagataagaggttcctgctggtcattgatgatgtatggggagagaatgtttgggatgggcggctagagatacaagcccaacatggcgcccctggcagtagagtccttgtgacaacccgggatgagcgtgttgctaggaggatgggggctatccatcttcaccgtgtgaagatgctgaatgaggatgatggttggtggttgcttcgtacaagggcctttcttgatgagggtgctggcaacatgcaggacatgggaagacgaatcgtgcaaaagtgcaatggccttccaatggcaataaggaggattggatgccatctacgggatgtggatcataaggaggatgaatggggaagagtctactcgagcgatttctgtggcatttctgcaaggatacggagcactattaacatgagctacctggaactgccatattaccttaagaggtgttttctgtactgtgcgttgtacccagagggatctgttatcgagcggcagtgcatcacccagcagtggatcgcggagggattcattgtgacccagacaaactcaacacagaggcactctgcaacagttgaagaagaagctgaaagatgttatgatgaattgttaggaagaggccttcttctcccagagaatgaagcttgcgatgtggtgggatcaaagatgcctcatcttttcagatcatttgcactccttcagtcacaagatgaaaactttactggcaaccctcaagatataggtgatgttttcaaaccatgccgtttgtctgttacaaatggaggtgtagaatccattagaaatggtcttaaaaagctcaggaacttgaggacacttctcctatctgggggtacgctaaatgatagggccttgagtgatattttcctaaagttcacacacttaagagttctagaccttggaaatacacagatcgactgtgttactgcgagtttgggacggatggcacaccttagatatcttagttttgccaacactcaaattagagaaattcctggtagtattgagaatctgaggatgttgcgcttcttaatcctcaggaactgcattcgtcttaattctctcccagaatctgttggccggctaaaaaacttgagaagccttgacatgtcaggtgctggactaaatattgtttcatttaaattctcccagatgagagaactcaactgcctacaaggtttccttgtaagcccaagtggtacacaaaataaatgtggctggccttttcaggagctgagttccttatctaagctgacaagcctccagatgttacggatagagagggaattaaatgcggaaggtgcaaaacaatcggcattgcgagaaaagcgtcacctcaaagagcttgagttatgctgcagcattgatgagcaaacaacacagataggtagagccgagaatattaaagatgtttttgaagaactggcgccagcaccttctgttgtgtctatcaagatggcaaattattatggacatgaatttccatcttggctatcctttcccggtctatcagagttgcagaggctaaccattgatggttgttcacattgctcgcagctgccatctctgggccagatgagtaatctaaaataccttgcaataatcgattctaatttgtcagctaccattggccctgaacttcgcggaaaaccagataatggagtggcatttcccaagctggaacagttgctcatcagcgagatgagcaacttgaagtcatggtcaggtatcgaagaaggagatatgccttcactagtggatttcaggcttgaaagatgccccaagctggattcacttcctcgctggcttgagcattgtactgcactgagaagcttgcgcatagatcatgctgacagcctcaaaacaattgagaatctgccttcacttagagaacttgaagttcacaggaacaaaaaactgaagaggatcttaaatctcgaaagtcttgaagatttgaaagttgtgcattgcttggttttgaaagtggtacatggtgtcccttcattacgcgctgtgcattcagatgacagaaattcaactgagttgccacaatggttgcagccacaacagccattcgttctcaagagattggatataattgggactgaagagctactagataaatgctcctctgccagtagcacatattggtccgccattcaacatgccgatcatgtctttgcctatctgccagacgatactttctacttctcttacaccaaaagtaacagcaacttccatagaagcgcaaggtcccttgcacgatctttatacagttcacagagcttcgttatgccttctattacgccgagcaatgatgttattgtaccagaagaaaatataaggagaaacaagcgaatagaaataggccgatccaggagtcagtcatgggtgaggactgaacttttcgcagttcttctgtttgttgctgcccacttgtttttcttgtcaaccacgcatgcttcttcacattga

SEQ ID NO: 78609 - DNA, 4914 bp, Oryza sativa
  Clone ID: PAT_MRT4530_7839C.1
atggtgcattgctttgaattgtgttatgcagagggtattgtcacaatctctattcggtggtacatctctggccagagtaaaactattcaaatagccgtgcccgcggttatggcgggtctaacaatgtctttcgtgattagtttcacacctctcaccataataaatgatgttgtacttggtaataacttgtttagctcctggtttggaacgatgccgcgcttcaagcctgagtacttgttcagtactgagggatttgtccaggaattgcgtacgatgtccttcgccataggattcgggactgcccctttgtatgcccagattcctcatgatcgtgatgaagagaagtgccgtgtcaaaatcactctgaacagtaatcgtgaagatatcccatcggtggcaaggatcgccataggagagctccgcgatcgctacaatgatcagttggccgacactgagtatcgctaccatcctcgccaaccccagggaagtgactttggcagctaccttgaacctgcaggaattgagaatgatgctaccacaaggcatttggttgagatgctgtgggccatggatgagtcccgcgctgaagtcgtgatagctgctcaagatcgcgaaaaccggaatcgtggtaaaatttgcaagctggaggacaaggtggttcgtttggagaaggaactagccgcattgaagggagaagcaccaccacaaaaggccagggttcgtcttactgcaaggaagagagctctatttgtccctcgctaccagttggcgcctaaggttcgtgtggtggaagaagaagctgtcccagtcccagcgaatcctccgatcgttaacatggtgcttactcgcagcaatgggaatggccccaacaacaacaatcacaacaacaacaatggagagaatcccacgcttgcccaagtcctggctcaacaggcacagctcatgaacatgatgatgcagcaactccaaaaccagcagaaccaggggaacaatcatgcacctccccagaacaagttagcagaatttcttcgtgtgaggccgcctactttttctagcactaccaatccagtagaggctagtgattggctgcacgccatagaaaagaagttggacctgcttcagtgcactgatcaagaaaaagtctccttcgcttcacatcagcttcatggccctacctctgagtggtgggatcatttccgtctaaacaggaccactgcggaaccaattacttggcttgagttcactgctgctttcagaaaatctcacataccctcgggagtgttgtctctcaagaagaaggaattcaggaagctcactcagggatctcgctctatcactgaatacttgcatgaattcaatcgtctggcttgctatgctccggaagatgtgcgcactgatgaagagcgtcaagagaagttcttggaaggactgaatgatgagctctcttacccattaatgactggggattatcatgattttcagaagttggtggataaggccattcaccaggaggacaagtacaatcgtatggagcagaagaaacgcaggattgctcacttcaaagctcagcaggggaatagtcagaggccgcgtcttgctatgggacctcaggcagtgtcacagggaggatcttcgtctgttgttcgtccgcagcgtcagttcttcaacaacaatgctggcaacaacaaccacaaccaagctccacgtcctgttgcaactccaacccagcaccagcctgccaagagggagcaaggaaacaagccaggagtgtgcttcaactgtggtgaaccaggtcattattctgacaagtgtctgaagccccgccgcgtgaaggttgtccctgcacagaacaactccaccacaccagcgtcaaagtctcgtgtcaatcatgttgctgctgcagaagcccaaggtgctccagaagtgattttgggtatgttccctgttaactcagttcctgcaacagtgcttttcgattctggtactacacattccattttgtctatgagttttgcgggaaatcatgggatggagatagaagatcttagacgtcctttgatgatcagtaccccgagtaaccaagcactctcatcacaacgtagcccctctgtcagaatagaaattcaaggtgtaccatttctggccaaccttattttgttagaatccaaataccttgaagtcatcctagggatggactggttagccagatataaaggtgtgattgactgtgccaatagaaaagtaactctcaccagcaatgatggtcaagttgtaactgttcacgcattgccttctgagcctttaaggtcaagtttgaatcaaataactttggaagagattcccatactacgggactacccggatgtgttcccggatgatttacctggtatgccccctaaaagagatatagaattcagaatagatctggtaccaggaacaactccgatccataagagaccttatagaatggcagccaatgaattagcagaggtcaagaggcaagtagatgatttgcttcagaaaggatacattagaccaagttcgtctccatggggagctccagtcatttttgtggagaagaaagatcatacccagaggatgtgtatggattatcgtgcactaaatgatgtgaccatcaagaataagtaccctctgcctagaattgatgatttgtttgatcagcttaaaggagccaccgttttctccaaaatcgatcttcgatcggggtatcaccagttgaggattaaagaggaagatatacctaagacggcttttaccactcgatatgggttgtttgaatgtactgttatgtcttttggacttaccaatgcccccgctttcttcatgaacttgatgaataaggtgtttatggaatacctggacaagttcgtggtggtctttattgatgacatccttatctactaccgaaccaaagaagagcatgaagaacatcttcgccttgcactagagaagctacgagagcatcaactgtatgccaagtttagcaaatgtgaattttggctgtctgaagtaaagttccttggtcacgtcatctcagctggaggagttgccgttgatcctagtaatgtggaatccgtaaccaactggaaacaaccgaagacagtttcaaagattcgtagtttcttgggtcttgcaggctattaccgaaggtttatagagaatttttccaagattgctaagcctatgacacgactgcttcagaaagatgtgaagtacaagtggtcggaagaatgtgagcattgttttcaagagttgaaaaatcgcttgctatcagcacccattttgattttacctgatccaaagaagggtttacaagtgtactgcgacgcatctaagcttgggttaggttgtgttctgatgcaagatgggaatgtggttgcctatgcatctcgtcagttacgtccgcatgagaagaattaccctacccatgatcttgagttagctgcggtggttcatgcgttgaagatttggtgtcactacctctttggtactcgtacggaggtgtacacggatcacaagagtttgaagtatatctttactaagccggatctgaacatgagacagtggagatggttggaactgattaaggattacgacatgagaattcattatcaccccggaaaggttaatgttgtagcagatgctctcagcaggaaaggctattgcaatgctacggaaggacgacagttgccgtgggaattatgcaaggaatttgaaagattgaatttgggaattgtcagtagaggtttcgtagcagcattagaagcgaagcccactctcatagaccaggttagagaagctcaaatcaatgatcctgatattcaagagattaagaagaacatgagaagaggaaaggctattggatatttggaagatgagcaaggaaccgtatggttgggcgagagaatttgtgtcccagagaacaaggagttgaaagatgcaatcttgaaggaagctcatgacacgttatactccattcaccctggtagtaccaagatgtaccaagatctcaaggagaaatgttggtgggcaatcaaggcagaacatcagaaacccgcaggtttgctgcagcctttaaagataccaaaatggaggtgggaggaaattgggatggatttcatcaccggtctaccgacaacatcatcgggccatgactctatttgggtgatagtcgacaggcttaccaaggtggcccatttcatctctgtgagaacaacatattccggaagtcgtttggcagaattgtatatggcaaggattgtgtgtttgcacggtgttcctaagaaaatagtatccgatcgaggtagccagtttacttcaaagttttggaagaagcttcaggaagagatgggttccaagctgaactttactaccgcttatcacccgcagacagacagacaaactgaaagggtaaatcagattttggaagacatgttgagagcttgtgctttagacttcggtggaagttgggataagaatctgccttacgcggaattctcatacaacaacagttgtcaagctaggctccaaatggctccttatgaagcactgtatggtcggaagtgccgcactccgctttcgtgggatcaaacgggagaacgtcaggttttcgggaccgatattctaagggaagctgaagagaagttgaaaaagtgtttaagggtacctactgaagaagccagtcttgagcagatagaaatccaagaggatctgacatatgttgagaaaccaatccgtatcttggagacagatgagagaagaaccaggaatcgagttatgcgtttttgcaaggtccaatggagtaatcacttggaagaagaagctacttgggagcgagaagatgaattaaagtcagcccatccgcatcttttcgccagctcttcccaatcttga

SEQ ID NO: 78610 - DNA, 607 bp, Oryza sativa
  Clone ID: PAT_MRT4530_783C.1
aaatatcataatacttcgaacagttatatactacagacttacatatatgaaaactagtgattactagtggagagagggaagtggaaaggggaaaggtagaggtatggaattaagagatacaaaccactatgtattaaatagataaacaaaaaggatatattatatagtacagagaattatagccaatgtcttataataacgttaaatgtagtgtaatctaaatcactaaatcactatgctgtgcacctgaaaatatataatactataaatcaattaaacagtaaaaaataaatgtggatatactataaataagaataaaataataaccctcatacataaaatggacgtatctcaatatttttatttaattatttagtgacaaaaccagtgatatatagcaaaacagttcaaggaagaattaagagacacattaagtaatcaagaatgttaaaatgaatttaaacaatagatggaaactgacttctttaggaggaaggagaaagaaatcaatagcacctctactggagaaaatttattttatatgtaagaaaaccatatccattgcttgctatcatttatctacaaattagagtggttacacagctca

SEQ ID NO: 78611 - DNA, 359 bp, Oryza sativa
  Clone ID: PAT_MRT4530_78400C.1
tggggctcgctagcctcatgcgcgtactggcgcttccgctcactgccatgtccgcgtcctccccctgtggggtttgtcgctctctggttcgtgatggagctatcgctcgcaaactgcttttccaactagcattggatgtcgctgatcttcatgctctccgaggctgcctcgtatgtctccatcatccaccgacggtcgccaccctatgcttcctcgtcggtctctgtcaattagtcccccatggagaagaaagggagaccagggagggtagggagagaagaggtaagggtgagcaagggaggattaacttgtgggtcccaacaccacattggatgaaaatattaagggagacgatttaa

SEQ ID NO: 78612 - DNA, 604 bp, Oryza sativa
  unsure (1)..(604): unsure at all n locations
  Clone ID: PAT_MRT4530_78401C.1
ccggccgggcctaaaccctaaaccctaaacccacattcttcacatcaatatatattctttctttatttcttcagtgctacttgagttgtttcctgtgtgttgtcatacctttttccgctgccatgcatatttcttgtttggttggtgtcttatgttttgttgtgttcgataggtgtacgtgagaaatgcgatggcgggatactggagtaatgtgagtgtgcgacccggacagtgaaggggacggaccgtaggtgtggtatgaggcgacgttggcgtaccgggtgcagtcacaggggtgacgatcgaggaaccagccacccggacatcatcatggtttccttctacgtacgtactcgacatgnggtccgtccacccacaccatactgcccatgcctaccttctacggtgagcgtcacgcctaccttgccccctgcagcatcgatatcgttaaggttgatgtgcagaacatcatttgagacattcggggtcngggcattggacccattggcccgtgccgcttgtgtttattttcagccccactctttttgtttttttcgcgccgaccgccttttcaaaacctgttaaacgggtccattttttttgc

SEQ ID NO: 78613 - DNA, 210 bp, Oryza sativa
  Clone ID: PAT_MRT4530_78402C.1
atggcgaatggggtgccaccccttctagacatagaaacggttaagagaagcagcattccaggagtggttgaactcttcgccttccagcgtcgccaagcgaaaagagccagtcctggacctatgcttgatgagtgcttcgactctcaccccttcgaggagttcgagcgacacctcgcgcccatcttcgcctccagagaacattacccttga

SEQ ID NO: 78614 - DNA, 380 bp, Oryza sativa
  Clone ID: PAT_MRT4530_78403C.1
agaaaaaaaaatctacactcttagtgattggctgattgagcaaaagggctagtccggacgtcttctttgcatgcgctgctcatggcggccatggtggacatatacagcgcgcagctgagcgagttgcagatgaggttcagaggacaggcagcgctcatcgagaggcgcagacagcccgcttgacgctgtgctcgcaggtgctcgaccggcagatcaccgcccgtcagaggattcagcccatcttccgccgcccgggctgcgctcggcctgaggatgcagtgctgccagcagctgccggacgctagcctcgagatgccgctgcgccgacatccgccggaagtggaggagcttcaaggagagcatgccgatgcccctggagc

SEQ ID NO: 78615 - DNA, 1651 bp, Oryza sativa
  Clone ID: PAT_MRT4530_78404C.1
ggagccaataacacttttaagatgcacaaaacatttatattgtttcatctacaaaaaacagattagcatacacaaaaagaatactagttacatgaaacaagacttgatctatagaagaatggtaacacaaatataggtacaaatatgccatctacactgaacatgattctcgacaaacactgaaaacctctcgaggaacctagtcttttaaattgtgtccaccagctatgttctgattatgaaaccgaactatcggcaaatccatatgatcccaaagatgactgtaaagtataacgagcaccagtacaacctcatcgaatcctataggtgaattctattcttctttcttctccttttctctcctctcttttatcaatgaggagaaaaagagtggtagcattgtgcatgcagcctcaatcaacagacaagtcggcagcgctgagaaatcacctccagatactcccatgaattcagcaagtgcaaccccaagataaccgctgatgatagttgcgagggcaagtgcagacatgacaaaagccataagtgatccctcacacccagaagggcaaagttttgcaacaagaacactgaagggcagcaccttgaacaacataagaccctccaacaaccctgagaaaacaattgtgtacatggaatccggtattccgaagtttctgtatattccctgaacaaatagtacatctgacagcattacgagtgctgtaagaaactgcagaactgataaaaccttctgtgcaggtgttgttttgaagtacttgttgtatgccacactccaagctaatagagttacttgtccaaaaaccttggacaaaccgataactgatgagtcaagtcttaacacttcagtctgatagaagaacatggtcccaagtagaaatggtatggcagcataggacaatgaaaaccaaatgactgaccaaaatatttcaggcatacacagcgcatatgacagctctttgatttgcttacggacgctggagacagctgatagattagtatctgcctttgggagttggagggagctttcaggtatagccacagtagtgcagaactggagcacgagaaggattgcaaaaaacagaaacatgatttttggagaaaagtaactgagtgcaatgccaccaacaagatttcctaaagcgccagcagatgaaccaaacatccaagcaaaggattgaagctgacctgaccctgaggacaaggttgcttgcttcccagcttctgctacaatggcatcattggcaacctcacatatggatgcaccaaagttgctcaagaggagaaaaatggtaagaactggaagagaaatagctggccagagggcaattgctaaccatgaaattgcctgcaagagagcgccgatggcgacgtaggggaggcggcggtggccgcggatggggacggcgtcggagaggaggccgagaagcggcttggcgaccatggggaggttggcggacgcctggaggatctgcagcgaggaggcggcgacgcccatgccgtccttgaggaagaagttgacgcccagccatgggaacagccggaacccctgcacccagaaccccaccgcgatcacccaccgccgcgtcgcctccaccctcctctccccctccatcttcctctccttctccat

SEQ ID NO: 78616 - DNA, 993 bp, Oryza sativa
  Clone ID: PAT_MRT4530_78405C.1
ctagacatagaaacggttaagagaagcagcattccaggagtggttgaactcttcgccttccagcgtcgccaagcgaaaagagccagtcctggacctatgcttgatgaggtatggcccttcccacttcgattcaagctttccaaccgccactaggttggccttcttccttaggactagatggccaggcaacagctctgtcgatcgaacctttttgttgtaagttgccgaagtgctcttggcgtattcgtgcatgtgttctagtgcttcgactctcaccccttcgaggagttcgagcgacacctcgcgcccatcttcgcctccagagaacattacccttgatgagttagcccctagctctgttggggtcattgcttcgtcacgcacaacccctggtgtatttctttcgctatttcctcgccttcggtaaaggagatgcagcgaagcaagggttggagcaccccggagcgatacaactgccccgaagtcagcttgatcttgtggctctgagctgtaggcgctttgcttctgcttaccattcttgaggtacttcacgaacggtgttcgccagtcctctgggtcttcgcccagttctgcctggtcaaatgccatgatgtccaggctctctgtgggcacacttagtgcgtacaaaacttcaaaaaatatgcctggcgaatgtgggcctccactggcagcggatttcgccagggcgcctgcttcctcattccggtctctaggtaaatgttcgaccgttatgccggcgaaacacttttccatagatcgaacagcctccagattcctcttcatgccttcttcttttgcctcaaaagatttgtcaacatgacttaccaccagtttggagtatgttcggatgagcaagcaccgaaccccaatgactcttcctctcgctttctcgccggtcggcgcgactcggcggcaggcgggggacgcagcgacgacggcgggggacgaggaggcggcggcggccacggccat

SEQ ID NO: 78617 - DNA, 433 bp, Oryza sativa
  Clone ID: PAT_MRT4530_78406C.1
cttttatcaggaccaacgcatctgcaaggcagcggcgagggcaagaacacacacagactgctactgctcttagctgtgcgaaaaagaacactctaagatatcgcacgacgagacatcacttgtactgcatccgcgtgcatgcggattaagctgtgcttatgcctctttagtggagatgtggtgagtccatcaggccaatatatgcgcagactctgggcggagagagacactcacactagcccaagatggggagtgtgcacaagtacagagatattctcctcatgaaaacgactactacgcatggagagcgctcagtatgctacgtatacggatccgaagcaccccggatgtgttgccgtcaaggatctgctcgggcggatgactctcgctgcgaacatagcccagatgacccacactgagaggaagaatgcca

SEQ ID NO: 78618 - DNA, 1722 bp, Oryza sativa
  Clone ID: PAT_MRT4530_78407C.1
gacatagaaacgcttaagagaagcagcgttccaggagtggtcgaactcttcgccttccagcgtcgccaagcgaaaagagcccgtcctggacctgttcttgatgaggtatggcccttcccacttcgattcaagctttccaaccgccattgggttcgccttcttccttagccaggcagcagctctatcggttgaacctttttgttgtaaggtgccaaagtgctcttggcatatttgcgcatgtgttctagtgcttcgactctcaccctttcgaggagttcgagcaacacctcgcgcccatcttctccttcagaaaacattacccttggtgagttagcctctaactctgttggggtcattgcttcgtcaccataaaggagcatgaacaggctaaacttggttggccttgtgggggtcgtccgaagggcccaaagaacagataacatttcgtccggccatttgcccttcaccgccccttcaagcctcttcttgagcgcctcaaggatcttgccatttgctcattcgactgccccgttcgattgtgggtgtgcgacagaagcgaacttgatttgcaggtctgggccttcgcacatctctctaaacttgtcagaatcaaactgcttgccattgtcagtgatgaattctttcggcactccgaaatggcaaacgatgttcttccacacaaatttttatacagctgccgaagtgatcgcaccaagcgattcggcttcgatccaacgagagaagtattcaattgctacaattgcaaacttgtacccatttcgtgccaccgggaaagggccaatgatgtccaacccccatctggcgtaaggccagactactgcgataggctacagctcgtactggggtgctgtctggcttcggccatgccgctggcagcttttgcatttcttggcttgctccacacaaacttttagcacagtgggccaatatacactctggcaaaaaactttggaggcaaccgttcttgcggcttgatgcgcactgcacagcccctagtgtatttctttcgctatttcctcgcctttagcaaaggatatgcagcgaagcaagcgttggagcaccccagagcgatacaactgccctgagtttgtatcttgtggctctgagctgtaggcgcttcgcttctacttcatcctctaggagccaaccattcttgaggtacttcacgaacggtgttcgccagtcttctgggtcttcgcccagttctgcctggtcaattgccatgatgtccaggctctctgtgggcacacttggtgcgtacaagacttcaaaaaatatgcctggcgaatgtggtcctccgcaagcagcggatttcgccagggtgtctggctcctcgttctggcctctaggtaagtgttcgaccgttatgcggcgaaacacttttccatagatcgaacagcctccagatacctcttcatgccttcttcctttgcctcaaaagacttgtcaacgtggcttgccaccagtttggagtctgttcggataagcaagcgccgaacccccaatgctttcgcttttcttaggcccatcagtacagcgtcatactctgtcgtgttgttgatcgtgtcgaactgcagccttgtggcatatcgaattggcacgccacctggcgaagtgagtactgccgcggcgcccgcccccttgtgcgaccatgagccgtcagagtacatcacacaaggttgttcgacaggctcaggttca

SEQ ID NO: 78619 - DNA, 413 bp, Oryza sativa
  Clone ID: PAT_MRT4530_78408C.1
ccgagcagttccaggcgagactgctgccagacaagctcgccgcacgtcggacgacagctggtgcaggtgcagaggcgatcagccacatgctgggaggcatctacagggagctcggcgcccccgatgtcgggcaccccatgtccgagtgttccgcggctgccggagaggggacattggagcgcagcaggcggcgagcactcccggcagttcatgcaacgtggacatccaccaacggcggaggtggtgtctgctacatggctggcgagatctggctactagctaggctactgtagctagctgtgcatgtatgtggtgtggttactaaaataattagtgttttccttttgtttggaagcatatgtgtggtgaataaatgatgaactccgatgttcctctctataaaaaaaaaaaaa

SEQ ID NO: 78620 - DNA, 1229 bp, Oryza sativa
  Clone ID: PAT_MRT4530_78409C.1
cccacgcgtccgagagagaggccggttgtgtagcctagaccaagaggaaggaaaccaaccgagaggcacacccgctcctcctgccggccggcactctgcagtccgcacccgcgcgaggcttccgctccgctcccctccgatccgtggcctcctcatcgcccctattaaacgggaacccagcccggcgtccccttctcggcttcctcctccaccatccatccatccgcgcgcggtgcgtagtagcgagaagagaagggggggagggcaaagcgatggctccgatgaagctgtacgggtcgacgctgtcgtggaacgtgacgaggtgcgtggcggtgctggaggaggccggcgccgagtacgagatcgtgccgctcgatttctccaaaggcgagcacaaggcccccgaccacctcgccaggaacccctttggtcaggtgccggctttgcaagatggtgacttgttcctctgggaatcacgtgcaatttgcaagtatgtatgccgcaagaacaaaccagagctgttgaaggatggcgacctcaaggagtcagcaatggtggatgtgtggcttgaagtggagtccaaccagtacactcctgcactgaaccccattctttttcagtgcctaatccgtccgatgatgtttggggcaccccccgacgagaaagttgttgaggagaaccttgagaagctgaagaaggtgttggaggtgtacgaggcgcgcctgacgaagtgcaagtacctggctggagactacatcagtgtcgcggacctaagccatgtggctggcactgtatgcttgggggctactccccacgcatccgtgttggacgcatacccgcatgtgaaggcctggtggactgacctgatggcaaggccgtcttcccagaaggtggcttcactgatgaagcctcctgcttaaggtagttgttctaggcacaggtttgtcgtccatggtccacagaataagctgaggtgtgcccagttggttgctcgtttaaggatttgtgttattatgtgtgtcctggatgttgaatgttcaagcaatcaggattgtgttgttatgctgcatatgatccaacctaagtcttgtactgctatgagcattcttgtgctctggccttcgctcttgagaaccttataataaattctgcttttagtcacctaaaaaaaaaaaaaaaaaaaaacaacacggtggagctcccagcttttgttccctttagtgagggtt

SEQ ID NO: 78621 - DNA, 362 bp, Oryza sativa
  Clone ID: PAT_MRT4530_7840C.1
tttgtttttttaataatttgggctttttatttatttttttttttttttttttacttatttaactttacaacttccttgtaaccccaaaacaaactaccaaaacaataaaaatccaccaaaccatagaccaccaactacaaatattaaacccatacctaaaataaaccaacactatttttaaaagcaacaacaccagaccagagaagtaccctacaatttaagctgtccttattaaataaaccataccaaaaccaacaaccacattaacgaaaacttcaagcacacatcgtccaacaaaataatcattaccccctttgactaacacatgaacccaaccccccttggtgacccactcctgaaac

SEQ ID NO: 78622 - DNA, 617 bp, Oryza sativa
  Clone ID: PAT_MRT4530_78410C.1
tcctgtgctcgtcggcgacgcgaccatggcggagtaccaccaccaagaccacgtggtctacccccgggcccagcgccgtccccctggattgggctacccgaatggtacccagctcccgcagttccagggcgttggtgaagcgccagtgcgagtcgggccagtggcacaggccacccaccacccacgagcaggtccaggcgagactgctgccggcagctctcccgccagtcgacagacagctggtgcaggtgcgaggcgatcaagccacatgctgggaggcatctacagggagctcggcgcccccgatgtcgggcaccccatgtccgaggtgttccagcggctgccggagaggggacttggagcgcgcggcggcgagcctcccggcgttctgcaacgtggacatccccaacggcggaggtggtgtctgctactggctggcgagatctggctactagctaggctactgtagctagctgtgcatgtatgtggtgtggttactaaaataattagtgttttccttttgtttggaagcatatgtgtggtgaataaatgatgaactccgatgttcctctctataaatcttgatgattcgctaccaaaaaaaaaaaaaaaaaaaa

SEQ ID NO: 78623 - DNA, 609 bp, Oryza sativa
  Clone ID: PAT_MRT4530_78411C.1
gcttctcccgtcgtctccgtgctcagcggcgacggcgaccatgcggagtaccaccaccaagaccaggtggtctacaccccagggcccagctctgtcaagccaaggaatgggctacccagatgtacccgctcccgcgttgccagggcagttggtgaagcagccagtgcgtcaggccagtggcacagccaccccgccgagcaggtccaggcgagactgctgccggcaagctcagccagccgtcgacagacaagctggtgcaggtgcgaggcgatcagccacatgctgggaggcatctacagggagctcggcagcccccagatgtcagggcaccccatgtccgaggtgttcccaggctgccggagaggggacttggagcgcgcggcggcgagcctcccggcgttctgcaacgtggacatccccaacggcggaggtggtgtctgctacatggctggcgagatctggctactagctaggctacatgtagctagctgtgcatgtatgtggtgtggttactaaaataattagtgttttccttttgtttggaagcatatgtgtggtgaataaatgatgaactccgatgttcctctctataaaaaaaaaaaaaaaaaa

SEQ ID NO: 78624 - DNA, 899 bp, Oryza sativa
  Clone ID: PAT_MRT4530_78412C.1
atggtgcccgcggacgccatcgcgctccgcctctactccctcccggcggcggcggcggccgtccgctcgctctgggcgtggctcgtcgccgccctcgccgccgccgtcggcctgtggcgcatccgcgccgccgccggtgtccgtagcgccctcgtggacgacgacgactacaagcagcgcaaggcgaagcagccgcgcggtgctctgcggcctgccggcgtcggcgaggcacggccggctcgcgccgaggcggcggagtcggaggcgacgacgccgacctccccgagcgagccgagcacgccttccaaggtccggttcacggcgtactacggcggcgagggggacggcgccgacgagggagtcgtggacagcgtcaggagatgcgtggacaacgacggcgacggcgagggggagacgccgacggcgccggtgaggcggacggcgtcggggaggaggaggtggtcgacgacgacgacgacgacgacggcgccattcatggcgacgccgtgggaggagagggagatggccgtgaggaggaggggagacctggggtggtaccgccacctcgacatggcggcgctcgacggaagcgtcgtccggctgtgggacggcgaggtcacggcggcgtcgccggggcggcgcggccggagggcattatcggaattgcacctctcattgtagagacatggctcagtgtgtatattgtggtgtaggactattggatggttattaccatggttggtgtatatgacaattttgcccctgggcttgtcataccctagcagtatggcttaggggtaatggcccctcgtatgaggacataaatggaaattggcaatgccactggttatcctttgcttctgaattccattccaatttttacaaaaaaaaaaaaaaaa

SEQ ID NO: 78625 - DNA, 433 bp, Oryza sativa
  Clone ID: PAT_MRT4530_78413C.1
ggtggcacagccccgccgtccgagcaggtccggcgagaacttgtctgcccgcaaggctcccacccgtcgacggacagctggtccaggtgtcgagcgatcaccacatctgggaggcatctaccagggagctcggcgcacacccgatgtcgggcacacaccatgtccgaggtgttccagcggctgccggagaggggacttggagcgcgcggcggcgagcctcacacggcgttctgcaacgtggacatcacccaacggcggaggtggtgtcatgctactggctggcgagatctggctactagctaggctactgtagctagctgtgcatgtatgtggtgtggttactaaaataattagtgttttccttttgtttggaagcatatgtgtggtgaataaatgatgaactccgatgttcctctctaaaaaaaaaaaaaaa

SEQ ID NO: 78626 - DNA, 5280 bp, Oryza sativa
  Clone ID: PAT_MRT4530_78414C.1
atggcatttgaaatgtatggtatgctagttggaaatgtgagtgccttgacgggtgaatatgtgaagccagcctatgggggtgagaaagaagcctttctgaagaaagttgttactccaatttacctcaccattgcaaaggaagctgaaaggagcaaaagagaaaaaggaaatcattctgagtggagaaactacgatgatctaaatgaatatttctggtctgctgagtgctttcggttaggttggcctatgcgtgcggatgctgatttcttttgtcaacatttaaattcacctgatcaaagaaatgaaaccacaagaactgaaaagcagaaaggaaaggtcaactttgttgagctacgctccttttggcacatattcaggagtttcgatagaatgtggagtttctttattctagctcttcaggttatggtaattctggcttggaatggaggctcgctgggaaatatttttgatcctgttgttttcaagaagattctgagcatatttattacttctgctattctaaatctcgggcaagctacacttgatataatctttaattggaaggccaggagaacaatggaatttgcagttaaactgagatatgttctaaagttcacactagcagccttgtgggtagtattactgccggttacatatgcatacacctgggagaatccaacaggaattatcagggccatcaaaggctggtttggaaatggtcaaaaccacccatcactctttgtccttgcagtagttatatatttgtctcccagtttgctagctgctattctttttcttctcccatttctacggcgtatacttgaaagttcagactacaagtttgtgaggttcgtcatgtggtggtcacagttaactactgaccaagataatgtggaaaatatagttgtgagctactacctgagaaggagacctgatatgacgaagcaaaatcctcgtctatttgttggtaggggaatgcatgaaagtgccttctcacttttcatgtacaccatgttttggattgctcttcttttgataaagtttgcatttagctattatgtggagatcaagcctcttgtcgaacctaccaaggatatcatgaagttacctatacacacttttcagtggcatgagtttttcccaaaagcgaacggaaacattggtgtcgtgattgcgctttgggctccaatcattttggtctatttcatggatacacaaatttggtatacaatcttctcgacactgcttggtggaatttatggtgctttccaacgacttggagagatccgcaccctaggaatgctgcgatctcgctttggttcaatacctttagcctttaatgcctgtctaattccggctgaagaatctgatgcaaaaaggaagaagggtctaaagtcttatttgcacagtcgttttgagaggaagcacacagacaaggagaagatagccgcaagatttgcacagatgtggaacgaaattatcacgagctttcgagaagaggaccttataaataacaaggagaaggagctgctgcttgttccgtatgtggctgatcaggctcttgagattatgcagtggcctccttttttgcttgccagcaagatccccatagctgttgacatggctaaagatagcaatggcaaagaccgtgacctgaaaaagaggcttgagaacgactattattttaaatgtgcaattgaagaatgctatgcatcatttaaaaatatcatcaaggatcttgtacaaggtgaaccagagaaaagggtcataaatactatatttgcagaagttgaaaagtatattgctgatgacaaagttattactgatttgaatatgcacgctttgccagatctttacaataagtttgttgaattggtaaaatatttggagaagaatgataagaatgatagggatgctgtaataaagatttttcaagatatgctggaggttgtaacaagagatataatggaagaccaactttctagtattttggagtcaagtcatggtggttcataccaaaggcctgaaggcacaacgacatgggatcaagaatatcagttatttcaaccggctggagctatcaagtttcccgtacaattcacagatgcctggatagagaagataaaaaggctggaactgttactcactgtgaaagagtctgctatggatgtcccctcaaatctggaggctagaaggcgtcttacctttttcaccaattctttgtttatggacatgcctgatgctcccaaagtcagaaacatgctttcattttccgcgttgaccccgtattacaatgaacgcgtgcgtttttcgataaaagagctgcaggaggaaaatgaggatggagtttccaccctattctacctacagaaaatttacccagatgaatggaagaactttcagcaaagggttgaatgggatgaggaacttaaagagaatgaagacaagaatgaggagcttcgtctgtgggcttcatacagagggcaaacattagctcgaacagttaggggaatgatgtactaccgaaaagctttggttcttgaagcatttctagatatggccaaacatgaagatctcatggaagggtataaagcagttgagtcaactgatgaacaatggaagttacagcggtccttgtttgcgcaatgtgaagcagtggctgatatgaagtttacctatgtggtatcatgccagcaatatggaaatgacaagcgtgctgctcttcctaatgcccaagacatattacagctgatgagaacgtacccttctcttcgtgtagcatatatcgatcaggtcgaagatagagtggaagaaaagaaaatggagccagcttattactcaactttggtaaaggttgctctaactaaggattctgaatctacagatccagttcaaaatcttgatcagaagtggatcaagtgtgaaagttctttctgtgatcctgtgaagctgcaacatttgcatttttttgttttcaaggttatctaccggataaaacttccaggacctgcaatgttgggagaaggaaagcctgaaaatcaaaatcatgcaataatcttcacccgtggtgaaggcctgcaaaccatagacatgaaccaggataactatatggaagaagcacttaaaatgagaaatttgcttcaagagttccttacagaacatggagttcggcgcccatctatacttggagttagggaacatatttttactggcagtgtctcttctctcgcatggtttatgtccaatcaggagcatagttttgtgactattgggcaacggctgcttgcaaaccctctgaaggttcgattccactatggccatcctgacgtatttgataggatttttcatctaacaagaggtggtgtcagtaaggcatcaaggagtatcaacttgagcgaagatatttttgcaggctataattcaactctccgtggaggaaatataacacatcatgaatatgtgcaagttggtaaaggaagagatgtagggttaaaccagatctctaagtttgaggctaaggtggccaatggaaatggagagcagactcttagccgtgatatctaccggcttggacaccgcttcgatttcttcagaatgctttcatgctacttcactactgtgggattttatttcagtactctgctgacagttgtcacagtttatgtatttctgtatggacgcctttatcttgctctcagtggacttgaagaagggcttttaacacaaaggagatacattcataaccacccccttcaggttgctcttgcctcacaatctctggttcagctaggttttctgatggccctgcccatgatgatggaaattggccttgaaaaaggatttggtcaagcactaagtgaatttatcatgatgaacttgcaattggcagctgtgttctttacgttttcacttggcactaagactcactactatggacgaatgttgctccatggaggtgctcagtacagagctactggtaggggctttgttgtctttcatgctaagtttgcagagaattacaggctttattctcgcagtcactttgttaaaggcattgagttgttgattctgctcatcatttaccaactatttggtcaatcttaccgctcaaccattgcctatatttttgttacattctctatgtggttcctagtgttgacatggctttttgcacccttcctgttcaatccatcgggatttgagtggacgaaaattgtggatgattggtctgattggaataagtggatcagcaatcgtggtggcattggggtgtcaccagacaagagttgggaatcctggtgggagatcgagctagagcatttgaaatattctgggacaattggactttttgttgagataattttgtccctgaggtttttcatataccagtatggccttgtttaccacttaaatatcacaggcgacaaaagtatattggtatatttaatttcgtggctcgtgattttggtggtattgcttgttatgaagactgtatctgtcggaaggcggagatttagtgcggattttcagctatttttccgtctgattaagtttatgatatttgtttcgttcatcgccatcttgattgtactgatagcaatacttcatatgaccttacgagatatatttgtgtgctttctggcattcttaccttccggatggggaatattgctgattgcacaagcttgcaagcctcttgctcggcgagcagggctatggggatctgttcgtgcccttgctcgggcatacgagataattatgggagttcttctctttacaccaattactattttggcatggtttccctttgtgtccgagtttcagacacggatgctatttaatcaagcgttcagtagaggactgcaaatctctcggattcttggtggtcagaagaaggagcgggagcggtcctctcgcaacaaggactgatcttctctacccattttgtgcttgtggtcttcaagatttaagtattttggcgtatgtatgttgtaaatattccacagggcatattgtatctattgtagttacaacttcgctcaaacagtgaaatatatcctcttacttgtaacataagatgtataattggatagtgtagtgtgtaagaaacgccagcatgtcaattccgtgtgtaaataccgtatttgtttatacgacctttagcaatgatcagggttcaggacattagttcttaattacttttatggagttcatgtgtataaatttgtattattctccacagataaatagttaaatctgtactaatatcgctgaacggct

SEQ ID NO: 78627 - DNA, 1296 bp, Oryza sativa
  Clone ID: PAT_MRT4530_78415C.1
gactggcccatccatcaacttgatgtgaagaatgccttccttcatggtactctccaggaaactgtttactgctctcagcctgctggtttcattgatcctaccaaacccgacatgatctgccgcctcaacaagtcccttcttcttcgttggacaatttccgccttgcaagctgaattctccatgaaggacctcaggcctctccaccacttccttggaatcagtgttacccgcacatccactggtttgttcctcagccagcaacagtacattcttgatgttcttgctcgtgctggcatgtccgagtgcaagccatgttctacgccggtcgacactaatgccaagctctcagctgtcgatggtgccccagttgctgacctgactgattacaggagcctcgctggtgcattacaatatctcactttcaccaggccagatatatcctatgctgtccagcaaatctgccttcacatgcatgacccccgggagccgcaccttgccgctctcaagcgtatacttcgctacactcagggcaccatcgatcatggattgcattttcagcgctctcgaactgttgacttggttgcttattctgatgctgattgggccggttgtcccgacacgaggaagtccacctcgggctatgccgtgtttcttggtgccaacctgatttcttggtcctccaagcgacaagcgacagaacacagtctcccgttccagcgccgaagcagagtaccgagccgtggccaacgccgtggcggaaacatgttggcttcgccagttattgcacgagttacatactccaccctccaaagctatgtacaacatcaacggactaagcacattgagatcgatcttcactttgttcgtgatcgtgttgcggctggagttgttcgtgtccttcatgacccggggttccaccacgacagcgcatggagccacttccaggagttcccctccccctcctgcttcccttcgctaccgccctcgccgccgccgccgccggcaacatctccgtccccatacccgttcaacaccgatctcatctacacgatgcaggagatgattcgcacagaagtctgcaactacatggccggcgtcgggctccgcgtcggctgcggcccgggggccctggccaaatgctccatgccgcagctcgtcgacggcgtcatgtgcgccgccgccgagagggagatgggaaagagcagatcacgggggctctctttatataggccggaggggaggaggtcgaccgcacggacggaaaacaacgtcggcgacggtggagctccctattga

SEQ ID NO: 78628 - DNA, 495 bp, Oryza sativa
  Clone ID: PAT_MRT4530_78416C.1
gtcaccaggaatgggctacccgatgtacccgctcccgcgttgccgggcttggtgaagcagccagtgcgtcagccagtggcacagccaccagccgccgagcaggtccaggcgagactgctgccaggcaagctcccaccgtcgacgacagctggtgcaggtgcgaggcgatcaagccacatgctgggaggcatctacagggagctcggcgcccccgatgtcgggcaccaccatgtccgaggtgttccacgctgccggagaggggacttggagcgcgcggcggcagagcctcccggcgttctgcaacgtggacatcccccaacggcggagtggtgttctgctactggctggcgagatctggccttactagcctaggctactggtagcttactgtgcatggtattgttgggtactaaataatttagtggtttcccttttttgaacataattttggtggaataaatggatgactccgatggtccctctctataaaaaaaa

SEQ ID NO: 78629 - DNA, 518 bp, Oryza sativa
  Clone ID: PAT_MRT4530_78417C.1
gcccgctctgtcagccaggaatgggtctacccgatgtacccgctcccgcgttgccgggctttggtgaagccccagtgcgtcgccgtggcacgcccccctccgagcagttccggcgagactgctgccgcagctcgcccctgtcgacgacagctggtccaggtgcgaggcgatcagccacatttctgggaggcatctacagggagctcggcgcccccgatgtcgggcaccccatgtccgaggtgttcccgctgccggagaggggacttggagcgcccgcggcgagcctcccggcgttctgcaacgtggacatccccaacggcggaggtggtgtctgctactggctggcgagatctggctactagtctaggctactgtagctagctgtgcatgtatgtggtgtggttactaaaataattagtgttttccttttgtttggaagcatatgtgtggtgaataaatgatgaactccgatgttcctctctataaatcttgatgattcgctaaaaaaaaaaaaaaaa

SEQ ID NO: 78630 - DNA, 493 bp, Oryza sativa
  Clone ID: PAT_MRT4530_78418C.1
tgtcacccaggaatggctacccagatgtacccgctccccgcgttccccgggctttgttgaagccccagtgctcgcccagtgcgcacgcccccccccgacagtccggcgagactgctccgccagcttcagccccgtcgacgacagctggtcaggtgcgagccgatcaccacatcctgggaggcatctacagggagctcggcgcccccgatgtcggccaccccatgtccgaggtgttcccggctgccggagaggggacttggagcgccggcggcgacctcccggcgttctgcaacgtggacatccccaacggcggagtggtgtctgctactggctggcgagatctggctactagttaggctactgtagctagctgtgccatgtatgtggtgtggttactaaaataattagtgtttcccttttgtttggaagcatatgtgtggtgaataaatgatgaactccgatgttcctctctataaaaaaaaaaaaaaaaaaa

SEQ ID NO: 78631 - DNA, 1089 bp, Oryza sativa
  Clone ID: PAT_MRT4530_78419C.1
atggcgatgatcaaccggaaccacgtcgtgtcgttcctcgccggcgccgcgctgccgacgttgctgctcttcttcctcgcgtccgacagggtgagcgagaagctggcgatcgtgtcgagctgggggagtggtggatcatcgtcggcggcggcggcggatcatgatctcagaggcgccggtggcgacgctgctcctcctcctgctcaacaggagaaattcccgggcttgccggagttgctgccgaaggtggcgatggaggacaggacggtgatcatcacgtcggtgaacgaggcgtgggcggcgccggggtccctcctcgacctctaccgcgacagcttcaagaacggcgaggggatcgcccacctcctcgaccatgtcctcgtcgtcgccgtcgaccccgccggcttccgccgctgcaaggccgtccacccccactgctacctcctccacgtcaagtccatcaacctcacctccgccacccgcttcatgtccagggagtacctcgagctcgtctggaccaagctctccctccagcagcgcgtcctcgagctcggctacaacttcctcttcacggactgtgacatggtgttgttccgtgacccgttccggcacatcgcggtgtacgccgacatgagcacgtcgtcggacgactactccgcggcgcgggcgccgctggacaacccgctcaacacggggctctactacgtgaaggcgacgagccagagcgtggagatgctccgctactggcaggcggcgcggccgcggttccccggcgcgcacgaccaggcggtgttcggccacatcaagcacgagctcgtcgccaagctgcgggccaggatcgagccgctcgacacgctctacttcggcggcttctgcgagtaccacgacgacctcgcccgcgccgtcaccatgcacgccgactgctgcgtcggcctcgacaccaaggtgcacgacctcaccgacatcgccgccgactggaagaactacacgggcatgtcgccggaggagaggaagaaggggggtttcaagtggacgtaccccacccggtgccggaattcgattggatggcgtaaacctgttcatccctaa

SEQ ID NO: 78632 - DNA, 1056 bp, Oryza sativa
  Clone ID: PAT_MRT4530_7841C.1
atggatttattgcttcagccgaggggaggggcgcgcggaccgggtccacgggggtggggcccacgcggcagccccacggtccatggtggaccgggcgcacccgggctcacaccggccggcgccgggggtcccacgcgtcagccgcacctaagggcgcgggcggctgacagccgggccccacgcggcagccgcacggtgcgcccgaaggcggccacgccggcgcagcggcggcacggcggagcggcggccgagggaggggaagggaagggggaaaagaagcggcggtccacggctcaccccgggtcgatggcgacgacggaaacggcgaccggagcggaggaaggtggcggcgcggctcgggtggacggggtcgacggtgctccggcggtcggcgagcgaaacggaggggtggacgaggtcgccggggatgcggcgaagccgaaggaggcggcgccgaggggagaggtggtccggggcgacaacggcggtggaccggagctcggcggcgacgacggagagagagggcgacggtgcgagctcgattccggcggggagagagagcggcgagtggcggaaacggtggagggaggcacggggagggtttatatagggttgggagtgagagagggcggccggatgagggggaaacgggcgcggaagatccggccgccattgatgcgccggcgaggtttagggggaaagattccgaacgaatccgagggagagagggagggaaaaatggggggaaagggggaggggatcccggggaataattcccccctattgattgcacgcggggcggacgggggcggcgggattcacggcggcggcggcgctagggcgcgggcgaggcggcgggagcggcgggatgaaggggatgacgggtgggccccacccgtcagcgagggaggcgggcgggcccgcccgtcagcggcgcgcgcgcggggaggaggccgaatgggcagcggggagaggagagggagggggaaggagatgggccgaggcggcccaagagggagaggggggaaaagggactttttagagcttttattttta

SEQ ID NO: 78633 - DNA, 508 bp, Oryza sativa
  Clone ID: PAT_MRT4530_78420C.1
tcacccaggaatgggctacccgatgtacccagctcccgcgtttgccagggcttttggtgaagcagccagtgcgtcggccggtggcacaggccaccacccgccgagcaggtccaggcagagactgctgccaggcaagctcgccagccgtcgacggacagctggtgcaggtgcgaggcagatcagccacatgctgggaggcatctacagggagctcggcgcccccgatgtcgggcaccccatgtccgaggtgttccgcggctgccggagaggggacttggagcgcccgcggcgaccctcccggcgttctgcaacgtggacatccccaacggcggaggtggtgtctgctactggctggcgagatctggctactagctaggctactgtagctagctgtgcatgtatgtggtgtggttactaaaataattagtgtttcccttttgttgggaaccatatgtgtggtgaataaatgatgaactccgatgtccctctctataaaaaaaaaaaaaaa

SEQ ID NO: 78634 - DNA, 337 bp, Oryza sativa
  Clone ID: PAT_MRT4530_78421C.1
cgtacgccaccggaagagagagccctgctacgacgacgacgaccatggagctcgcctgcacctgcgagaccgtgttcgcggccgtgctgaagactctctttctgggggcgatgcgcgcgctcgccaatgccgttggcgtcgcgggcgccaagcccgtgccgcgccgagcgctcgtggcgtctgccaagaagtcgtggctcccggccttcaagagcggctccaggtgaatcaacccacctgggctatgctgctcgctctccggtgactgttgcttgaactcgttggggctggccaaggacccgtcggtcctgaagtgtgacaggagggcggggctgat

SEQ ID NO: 78635 - DNA, 511 bp, Oryza sativa
  Clone ID: PAT_MRT4530_78422C.1
ccgtctcccgctgttgccggctgttgttgaagcgccagtgcggtcggccgtgtgcaacgtctcagccgcctgctcgagccaagtccgggcgtagactttcttgccgtcagctcgtcctgcctgtctgtactgtacagctggttcaggtgcgaggcagatcaagccacatgtctgggaggcatctacagggagctcggcgcccccgatgtcgggcaccccatgtccgaggtgttcccggctccggagaggggacttggagcgcgcggcggcgagcctcccggcgttctgcaacgtggacatccccatacggcggaggtggtgtctgctactggctggcgagatctggctactagctaggctactgtagctagctgtgcatgtatgtggtgtggttactaaaataattagtgttttccttttgtttggaagcatatgtgtggtgaataaatgatgaactccgatgttcctctcttataaatcttgatgattcgctagctaaaaaaaaaaaaaa

SEQ ID NO: 78636 - DNA, 251 bp, Oryza sativa
  Clone ID: PAT_MRT4530_78423C.1
atataattccattacttttcgggggtctttttaaaacaaatagttcacaactacacaagtacctatcaccgactaaaaaaaaaaaaaatctttactaaacatgactggaacttacagcttcaaaaattttaacaaaatgtctcttaggccatacaccttgaccacaaatcccacgagtgccatcgaagcaacttgaagaacttacacaacaatacccattcccttgcttgacatgcttttcaaaatgtttt

SEQ ID NO: 78637 - DNA, 1440 bp, Oryza sativa
  Clone ID: PAT_MRT4530_78424C.1
gttgacgtggcggccgagtcagtgtggggcccacgtggaccacacatgtcagccagcaatcttcttccacctcacttacctctcttcccatctcaacccaaacctccaaggcagccgccaatggatggggagaatggtgtgggccgatagggaaaagctcgatagcggaggccaccggctgatgcggctcccaacgaccgggagcgcgcacgtggtgcgcccaggtcccaactgcaacgacaatatcatctttacctacgcgcgtgagggctagggcttccgtcttgtcacgctggccaagctcctatcccccaagctcagagccacccccgccgagctgctcaaaagctgatgtgttcaagtgtccctgagctctgcctctcctccactgaggagcacgcgtggcttcgccacatcgtcttcgaggtcaactccatctactccacactgtggtcgcatcgtcttcgacacctacgcccttctccccacatcctatcactatgaagcttctcgacagctgcaagccttctcccacccatcgccagtcatcgccgtcgggattctacctaccaccgccacccttctccctgtcggtcgccggccaccgcacacctctcccatgatttagcgactctttgtgtgcacgcatggacactcatggagctggtggtgcttgcgatcgtgctcaggcatcacaatgtactccatctcctgtctcttggagattctctcgccaatcccgatggtgtggctgacattgcgaagcgccactgcaacagccggcagtgcatcatcttcatctgatggccgatctccctattaccacctccaccgctccgccgcgacgccggcgagcggccgatcgcgctcgcgtggccgcccgacctggcgacgacgaccttcctcgcctcggcgtccgcgtcggcgaagcgcgggagctcggtgcagctccgctgccgcgagagcgcagcaggcggcgcgtccagagagtcttcggcgaggtggtcggcgagcgtggtggccacagacgaggaggaggagggggttgacgcggctggcgcaggggacgagggcgacggcgacgccttcctagtgctcgtgttgccactgttagaggaggaggaggaaggccatatcgtgcgggcgatggatggcgccggatcggggcgcgacacggcgggggagcggcgggcgctcgggcggacgggggagagcgcggcggcggggagaggcgaccggccggcggacgacaggtccgtaacggaggccgacgcccaccgcctcgacgacgacgggcggcggccggcggtggcagctgcacgcacgtagcgatcgagagcgaagccagccggcagggcaaaggtttttgggcgtgcaggacagcgtccgatgcgcgcgagacaaatggaagagcaaggggactacctatacaataaaaat

SEQ ID NO: 78638 - DNA, 417 bp, Oryza sativa
  Clone ID: PAT_MRT4530_78425C.1
aggaccttcttcctggaaagggcctgtcgaagaaactgggagaatgtgctcctgggcctgggcgtcgccggcagcgccccggggatcgcaaggcgacgagtatcgcgcccgcctcgccccaggagaacgtggctgctccacttgaagagccctgagatctacattatggagtgattaattgaatatgagcccgctatatggtatgagagacgtagtatggaccccgctggtttgtttgttgtagtgaatttgtagctatagccccacttatataggctaataagtttgatgttgtacttctttctgggtgtgccttaagttattcttatccggaccccgaatttatgtgtgtggctttttccccataatattaataataaagggtttattatattataaaaaaaaaaaaaaaaaaaa

SEQ ID NO: 78639 - DNA, 456 bp, Oryza sativa
  Clone ID: PAT_MRT4530_78426C.1
atgtggtggctagcgtgcggcgtgcaggcgggcggggccaggagatggcggccagcgtgcagcgtgcctgacgacggcggcgaaggagtcccaacagccggcggaggcgcgccgcctacaagccgagcgttgactcacataaaggagaaccacaaatttcagctaaacgggaggaaagtttatgcctgtcaattttcaaccaaattcatcttcgtcacaacaaattttgtgtcaaaaatttcagaattcatgcagccagactgggacatgttccatagcattcatccgatggctgaataccatgctgcagcaagagcagtcggtggctgtgccatatatgtcagtgacaagcctgggaaccatgacttcaatctgctgaagaagctggttcttcctgacggatcgatcctgagaaccaaactccctgagatgccatgccatgacgatccagtgtga

SEQ ID NO: 78640 - DNA, 714 bp, Oryza sativa
  Clone ID: PAT_MRT4530_78427C.1
atggaggatttgagtggtatccgaaaagggctagtgccgtccctggtgctctacagtgggacagctgttgaggtagggccgagagtcgtgccctacatcggtgtcgccattgataggactgccatgagtgctgctgatcgtcgtccgcgagatttgtcgttgacatcgtacgtccgcgagcttcttcttcccaaccaggcctccacaatcttcgttgtcaagctgttacgctgccagatatccgtgagcttcttcgttgccgccgctggtcgtctgcgagctttgccgcagccactgttcagtcatactgctggtttccatctttgccctcctcctcgccctgattcctcaaatccggccgccgccgccgccgcgagggatgccggcctcgcctgcgcgatatccgctgaggccagcgccgtgctggccgtcatgcgccgcagcctccgccacccgcgcgccgtagccgacgacgccgcggcggaccacccgctcgtctcctccctcaaggcgctgcgccgcctcgtcttctcccccgccgccgtgctgcggcccttcctctacgcggtccgctccgaggacgccggcgccgcggtcacctcggcgtcgctggccgctctccacgaggtgatggcgctcatgggtccgtccctcacgagcgccgcgctgcgtgaatgggcctgtcgccagctgccggttcgaggccggggctga

SEQ ID NO: 78641 - DNA, 1326 bp, Oryza sativa
  Clone ID: PAT_MRT4530_78428C.1
atggctttagatctaaatatagcattagatgatggagatgaacatgctgtacctaacctcaatgaagcagtggctgatcaggaggatgaccaggttggaggtgatctccagggaggtgccaaccatgagcttcctggaggtgatttccagggaggtgccaaccatgtgcttccttttgatctcaacttgtatgcatctgaccaccaaggagaaatacatctagacgatgctgatgccatggatcaagttctgcaagtaaatggaggtcacaaccataatgcctttccttttgatctcaactttgatgccaatgaggaagacctacaataccatctagacatgcaagagtacggcgtgtatgcgggtgatgtggatgttgttttcgaacaagaggagttggttgattcagatgaggaagatgaacatcaaaacaaaaatctgaccaaaattcaaaggcaacagatatatgcagcattgactggaaaaactaacaatggaatcctgagaaaaatgagaaaaaatgctacaactgaagttgcagcaatgtttaatgtgaaaagggctagagtgcaagctatttggcgaagagtgaagcaatgccgtgcccagggaataccaattgatgtaatttctaggaaaaaaaagaattgtggtcgcaaaaagaaagaaatcaacctaacagatgttgctaatgttcccttgcaacaaagaggcactttacggttatttgcatcagcctcagcagttgctaggcccagatacaatgaagaaggtatctgcacttttgacggcaagataggcttgtggcctttcaccagaaaggaaccagcgcaaaggacaagtcataatagaccaagggggactctagtcaacaagacaatcaaggttgatcgagataccgaatttcaggcctatgatgacaacaagctaaatagggtgttcctaacattgcaatcttgcttgttagaggttatgaaagctgatggaggaaatggatacaagatccctcatatgggtaaagagagtctagagcgtctagacattctccccaatacccttagttgtgattttgagctatatgataagataaccatgccctcacgcaacctgagagcagtaggaagcggaagtcttccaaaggcatttcttcaagtgacaagggagatccgtcagccaagagaaagcttcagtttaccagatgcatctgagggttatgattccatgattacacatatccctcccaccacaattagcggccaatatctagcccaggcgtttactgaatgtacacatcctgaggacgacgatcatgaagcctccacataa

SEQ ID NO: 78642 - DNA, 326 bp, Oryza sativa
  Clone ID: PAT_MRT4530_78429C.1
tttcgttcgagcggccatcccacgtaggctcagtcatactctgattccactgctgatgctggcaaactcacaccttgacgaatcatgggacataggccgaggaggtaggagaagagaaatagatgacgagatcatatgaacttgaagtcctaagacaattcttctttccatgagcacaagcatatatatgctgaaagtacgtgatctttccagatgtatctctagtctacgtacagtgaatagcgaagattttgacatccgtcaaatggtgtgaaggcggtagcatagatggctacaatttgctctgaaagactgaaactggacac

SEQ ID NO: 78643 - DNA, 695 bp, Oryza sativa
  Clone ID: PAT_MRT4530_7842C.1
ccggccggcggccgggagccgcacggcaccaccaatccaccactgatcatactagcacagagcgccgccgccgaggagagtccaatcgagaagaagggaggagaggcaagcggagaggaagaagaagaagaagagaggatgggcttcgagaagacgatcctgaaagccggcaccggtcccaagcccgtcaagggccagaaggtcaccgtccactgcaccggcttcgggaaagataatgatctcgctaagaagttttggagcacaaaggacgcaggccaggagccattcagtttcaatataggccagggttcggtgatcaaaggatgggacgagggagttatgaccatgcaagtgggtgaagttgctcgtattcagtgcaccccggattatgcgtatggagctagtgggtttccggcctggggaattcgaccaaactcagtgctggtgttcgagattgaggttcttagcgcccagtaaacgcatcatgtaattccggatggatctaaaattccatgagtactgaaataattgtaacgtcacaacactgctgcgtgctaccgctggaatgttctatgttattgaccaagtaacgttacaccatcgtctatggacacgataataagtttcgggccgtacattttcgtattaaaaaaaaaaaaaaaaaaaaaaaaatgaaaaaaaaaaaaaaaaaaaaa

SEQ ID NO: 78644 - DNA, 1227 bp, Oryza sativa
  Clone ID: PAT_MRT4530_78430C.1
atggctttagatctaaatatagcattagatgatggagatgaacatgctataccaaacctcaatgaagcagtggctgaagaagcagcagtggctgatcaggaggatgaccaggttggaggtgatctccagggaggtgccaaccatgagcttcctggaggtgatttccagggaggtgtcaaccatgtgcttccttttgatctcaacttgtatgcatctgaccaccaaggagaaatacatctagacgatgttgatgtcatggatcaagttctgcaagtaaatggaggtcacaaccataatgcctttccttttgatctcaactttgatgacgatgaggaagacctacaataccatccagacatgcaagagtacggcgtgtatgcgggtgatgtggatgttgttttcgaacaagaggagttggatgattcagatgaggaagatgaacatcaaaacaaaaatctaaccaaaatacaaaggcaacagatatatgcagcattggctggaaaaactaacaatggaatcctgagaaaaaatgctacaactgaagttgcagcaatgtttaatgtgaaaagggctagagtgcaagctatttggcgaagagtgaagcaatgccgtgcccagggaataccaattgatgaaccagcgcaaaggacaagtcataatagaccaagggggactctagtcaccaagacaatcaaggttgatagaaataccgtaaggtcatttctgattgctaaagtcctacgagctattatagcaagttggcctccagaagaagcacacaacactatatggattcagcaggataatgctccctctcatgtcccagtggatgatcctcaatttgcctatgcagtttcccaaacagggtttgacatccgactcatgcatcagcctcctaattccccagatatgaatgcactagatcttgggttttttgcgtctctacaatcattaacatatagaaggatatctaggaatatggatgacctaatagataatgttgagcaggaatttcaagcctatgatgacaacaagctaaatagggtgttcctaacattgcaatcttgcttgttagaggttatgaaagctgatggaggaaatggatacaagatccctcatatgggtaaagagaggctagagcgtctagacattctccccaatacccttagttgtgattttgagctatatgataaggtaacaacagcattagccaaccaagtgcagtaa

SEQ ID NO: 78645 - DNA, 1506 bp, Oryza sativa
  Clone ID: PAT_MRT4530_78431C.1
atggccggtgtggatgccacggccgccggcggcgacgaggccggcgaaacgttgcacgtagtgttgttcccgttccttgccttcggccacatcaacccgttcgcgcagctggcccgtagcctcctcgccgtcggtgggggcacagagagcacggcggaggtcgacgcggacggcgccgagctgctcaagctcgccctcgacggcacgcggccgcaggtggaggcgctgctcgcgaggctccgcccggacgtcgtgctcttcgacttcgtcacgccgtgggtcgccgacgctgccaggcgtctcggcgtcaggtcggcgcggttctcgatcttccccgcggtctccggcgcgtacttcatggcccacgggcgcggcctctacggcgcgcgcccgaccgccgaggagctcgcgtcggcgcccgaggggttcccgccgtcgtcgccgctctccacggtgccgacctaccaggccgcccacttcacccacattttcaccagcttccacggcatgccgagcacgcatgaccgctccgtcgcctgccacaacgcctgcgacgcgctcgtcatcaggacctgccacgagatggaaggcccctacatcgactacatcgcggcgcagtatggcaagccggtgctcgccacggggccactggtgccggagccaccgcgaggcgagctggaggagagaataatctgcatggcaaaaagtattgtttttggacatggtactcacatggtatttgttattgtaaacgatgctgatgccatggatcaagttctgcaagtaaatggagatcacaaccataatgcctttccttttaatctcaactttgatgccgatgaggaagacctacaaatacatccagacatgcaagagtacggcgtgtatgcgggtgatgtggaagttgttttcgaacaagaggagttggatgattcagcagttgctaggcctagatacaatgaagaaggtatctgcacttttgacggcaagataggcttgtggcctttcaccagaaaggaaccaccgcaaaggacaagtcataatagaccaagggggactctagtcaccaagacaatcaaggttgatcgagataccgtaagtttcccaaaagggtttgacatccgactcatgcatcagcctcctaattccccatatatgaatgcactagatcttgggttttttgcgtctctacaatcattaacatatagaaggatatccaggaatatggatgacctaatagataatgctgagcatcaggcctatgatgagaacaagctaaatagggtgttcctaacattgcaatcttgcttgttagaggttatgaaagctaatggtggaaatggatacgagatccctcatatgggtaaagagaggctagagcgtctagacattctccctaatacccttagttgtggttttgagctatataataagcttttgaaatatgtaatatgggaagtttatcatggtttcatattttgggcagttttcaggttgtatatatga

SEQ ID NO: 78646 - DNA, 411 bp, Oryza sativa
  Clone ID: PAT_MRT4530_78432C.1
cggacgcgtgggcgagaagaagcacacaacactatatggattcagcaggataatgctccctctcatgtcccagtggatgagactcgatttgcctatgcagtttcccaaacagggtttgacattcaactcatgcatcaacctcctaattccccatatatgaatgcactagatcttgggttttttgcgtctctacaatcattaacatatagaaggatatccaggaatatggatgacctaatagataatgttgagcagtaatttcaggtctatgatgacaagctaaatagggtgtttctaacattgcagtcttgcttgttagaggttacgaaagctgatggtggaaatggatacaagattcctcatatgggtaaagagaggctagagcgtctagacattctccccaatacactt

SEQ ID NO: 78647 - DNA, 1113 bp, Oryza sativa
  Clone ID: PAT_MRT4530_78433C.1
atgggtttagatctaaatatagcattagatgatggagatgaacatgctataccaaacctcaatgaagcagtggctgaagaagcagcagtggctgatcaggaggatgaccaggttggaggtgatctccagggaggtgccaaccatgagcttcctggaggtgatttccagggaggtgtcaaccatgtgcttccttttgatctcaacttgtatgcatctgaccaccaaggagaaatacatctagacgatgttgatgtcatggatcaagttctgcaagtaaatggaggtcacaaccataatgcctttccttttgatctcaactttgatgacgatgaggaagacctacaataccatccagacatgcaagagtacggcgtgtatgcgggtgatgtggatgttgttttcgaacaagaggagttggatgattcagatgaggaagatgaacatcaaaacaaaaatctaaccaaaatacaaaggcaacagatatatgcagcattggctggaaaaactaacaatggaatcctgagaaaaaatgctacaactgaagttgcagcaatgtttaatgtgaaaagggctagagtgcaagctatttggcgaagagtgaagcaatgccgtgcccagggaataccaattgatgtaaggtctaggaaaaaaaagaattgtggtcgcaaaaagaaagaaatcaacctaacagatgttgctaatgttcccttgcaacaaagaggcactttacggtcatttgcatcagcctcagattggcatactttgccaaatcaacccaagttcattgatatgcgaaacattgtgcacatagatgaaaaatggttcaatacaactaaaaggacaagaaccatttatatggtccattgggaggatgatccatacagacctgtccaaaacaaaaattctatcgataaagtgatgttcttagcagcaattactaggcctagatacaatgaagaagaggttatgaaagctgatggaggaaatggatacaagatccctcatatgggtaaagagaggctagagcgtctagacattctccccaatacccttagttgtgattttgagctatatgataaggtaacaacagcattagccaaccaagtgcagtaa

SEQ ID NO: 78648 - DNA, 643 bp, Oryza sativa
  unsure (1)..(643): unsure at all n locations
  Clone ID: PAT_MRT4530_78434C.1
ggcgattgggttcctcgaggccggccggggagtgtgattgactgattgtgtgattgtgtgaagtgtattggttattttagcttcatagcttgtgaaatgtgaatgactatctagattaggatttaggaaccagtgctgctttgctcaattgctctttgatattgttgtttgtaggtttgaaacatgaagagaaaaaaaggtcccatggttaatttaaagagttttgtatgctctataaatttgatatgttttgtcaattaatagtttagtactgtactctaatatgcttaacgcattcaatttatggtcaattctatccatttatgactttatgaaatcatgtttataccgttacatattatacaactattagatcttgggttggaaaaatttttctatcttttacaatttcgaatagccnagttgaaaaacctgggccgcccctggaggcaaggtagccggatccgcattgtgcggctgtgctcctgcgcccacatcgccgggcggctgcctcgacccctcccgtgatctcctcgtgccaataacctgaccagcanatcaacnaggtagcgaggacacacactgatgaatatgctgccgaagagaaggaagagacttttcttggtcaggccacggctgctat

SEQ ID NO: 78649 - DNA, 372 bp, Oryza sativa
  Clone ID: PAT_MRT4530_78435C.1
atttctttcagcttcccatgctcctgcttcactgtccgcgttgtcgccgggcgcgtttattcatatgcctcaatcgaagcatccagcgcgtacaccgagagaggagcggggaggaggaaaggctcacattgcgccatgactctaaaggtcataatgttggcattggttgatatgataacgtgcgatgccgcgagatgcaaacccccgttatgggggatgaacgaatgaagtaccaagctgatcaataacccactcggtgccatcatcgacaatggacggaagatcaccgatgccatgatttacacgtgcgcggggacctgggatgatgtaacggggggttacaagaagatgttgaacacactgagtaagctt

SEQ ID NO: 78650 - DNA, 803 bp, Oryza sativa
  Clone ID: PAT_MRT4530_78436C.1
gaagaaagtctcatcaagatcatcaatcatgcaaggagttcacagttactagaactcttatgtgagtgtctaatagcttcaggttcagatatagtatctgggtccactaacatggtaccagcagcttgtcccgcatgcaaggccatttggtatctagctcatgctgttgacattatgtcccttggcacacataatttttcatttccattagctaactcatggagacaagttcatgcaaaactggatggtaaaatgcaagatcaaggatcattgccagcctcacaaaaaaaagattcattatcagatatagactctacccatctgataaatatatttgtcaaatcattcctggcttcaaaaccgatgcaggttgctgtttatcactgcttgcataatggtttggagtctgctattcatgcttctcttcagctaatctcaagagcttgtctactggatgcttctttctgtgctatgatttgtggcccaataaatccatcatccaatgtcaatgaagtagaacatggtggagatggaacaattgtatctgacatgttttctctattgtcactgtgtggctcatatttgaataaggagtccaagcaaaacagtaatcagaaatgcaggctatccaatcctcatgccctagtagtgcactgttgccttgcactggcaacaatagctgcatgcctgaagtcagaagggaattcttcagcatcaattatcttaacgagttcccagaagaaacagcggtcccgactttctgttcttgcgcatctctctttagttgatgatacagtcaagag

SEQ ID NO: 78651 - DNA, 1164 bp, Oryza sativa
  Clone ID: PAT_MRT4530_78437C.1
tagccgatcccccggccccccgcccccttcgtcctccgctccacgagaccacgacgcagggttttctggttcttgctgtcttgggatctttgatttgctgcgaaggcgaaggcgaagatgaggcccgtgttcgtggggaacctcgactacgacacccgccactccgagctcgaccgcctcttctaccgctacggcaggatcgaccgcatcgacatgaagtcaggatttgcttttgtctactttgaggatgagcgtgatggtgatgaggccatacgagcccttgatggctatccttttggccctgggaggcgcaggctttcggtggagtggtcacggggtgatcgtggttccaggcgtgatggctatagcaaaccacctgtgaatactaaacccacgaagacactatttgtcattaactttgaccccatcaacaccagagtcactgatatcgaaaggcatttcgaaccatttggaaagctttcgaatgttcggatcaggaggaactttgcttttgtgcagtttgaaacacaggaagaggccacaaaagcacttgaagctactcattctaccaagttgttggacagggtgatttctgttgagtatgccttcagggatgatacagaacgaggtgacaggtatgatggtgcaagaggtggctatggtaggcgagatgatagtccatatcgtcgatcagttagtccagtgtacaggtcacgcccaagtcctgactacggtcgtcaaaggagtcctgtgtacggttcgtatgacaggagtcctgttaatgatcgctatcgaagccgatctcctgtccggcgatcaagatccccacttgccaacagaagagcttatgattgacagagttttctcaagggtggttggctggttgctgaagggtttgcatctgcctctctagatctttagcagtgatagcaagaacttgtcttctccgtactatatatataatttagatatgggtactcatgggtggttcgtagtcgaactgaaaatcttttaccttttgttgacctggaactccgtactagtataatttagatatgatgtgttgtgcatcaaggcaaaactctgtgcgatgtacctgtgccacaacgttttctatgactaccgcactttatatttctaaaaaaaaaaaaaaaaacctcgtgc

SEQ ID NO: 78652 - DNA, 177 bp, Oryza sativa
  Clone ID: PAT_MRT4530_78438C.1
atggctagagggaaggagcccgacggtggaaagggtggcggagacggcggctggcagcggaagggacaacttaagggacctaaagtgaacttattccatattggcggcctgggaatggcgttcggcccgacgcgggagatgttggagccgtccgatctgatggacgatcctgattga

SEQ ID NO: 78653 - DNA, 498 bp, Oryza sativa
  Clone ID: PAT_MRT4530_78439C.1
atgcatcaatcggcattattgacgagtgaggaccccgggcatgtaatcgtcccgtcctctgtggagtgtggatccagcatattgattccagattcagattcagctatgcaccgaatcgaaacgacgttggttgtagcgtgctgcgtgcatcgtcactgtatggtggtggttggtccaggtacgctcgctcgagattggagaaccaaccgggcgggccagacggcggtggggccgcgcgcgcgggggccatctccccgtcgcttttgccgtaaaatccaccgtcccgtccccgtcccgcagagctgggccaccggtcgactactcatacatgtcgctgtgtcgactgctcgtttgctacttacgccgagcggcgcgtgcccccgccatgtgacggttttggagcatgtactgtacaaactagtagcacaagccagcggcagtggagttctcccgtggccagacagcgcgcaccgcagagtattacaagtggcgcgctag

SEQ ID NO: 78654 - DNA, 3276 bp, Oryza sativa
  Clone ID: PAT_MRT4530_7843C.1
ctatttctcgcttagtgtcgccccgatcttgacggtcttgtcggggttggcactggagagtggaacgatcttgattgcgccgtccggtttcggcttcttgtttgtcttgctcactttcttgggtggctcagtcgtggcaggtgggctgggtgtttgctcgaccatgtcgaaactccgtttgtcgcattgcatcgccagctttgcgttcccttgaatagtaattgttcccttcggtcccagcatcttgagcacttgatacgcgtagtgagatgcagccataaacttcgcaagtgcagttctcccgttgatggcgttgtaagctatatcgaattcaacgacatcaaaggtgatatgctctgttcggaagttgttagcttggccgaaagtcacaggcaacgtaatcttgtccaatggcctggacgaggattggggagtaattccatgaaagggttgatcggttggtgtcaactcgctttgcggaattcccattgcgtccaaagtgctggcgaaaagaaggttgattgagctgccaccatcgatgagaacccgtgcgaccttgatgttccgaatagagggttcgaccacgatcggatatcgtcctgggatgacggcggtcttggggtggtcttcttccgagaattctatcttctgttcagaccacttcatcttgggtgcagccccctgccatgtcgaacagatttcgcgttccactttcttgtattctcgctttgaggagtacgttgtggaacctctgaagatgtgtgaaacgtggaggtcagagactggatatgctgaatccgattcttggggagccgcctccacatccttttcgaccacgcgtactcgcttgcctttttcaaatgcaatgtgtttctcgagcgattttttcaaaacaaggcaatcttccaaagaatgtctgtccgtcttgtgtatgaggcaccatgctttctttgtgtcgctactttgtgggtctgggcgtttgggagggttcgcgtattctattgcgaggacttccgcttgagctttccttttcccatttttgcgatttttcttcttgcttgactcaggtgcgtccgtggctggtttcttctctcccccggtcttcggcttatcattcttgcgtcttagcgcatcatctgcgtgggcgcatcgctcaacaatctcgaacaatctccgagtagttgtgatgcttcttgttgccaactcctgggtagtatagcgatctctgacaccggacttgaaggcgcgaattacagaagcatcagtgatttcggggattgtatttctgcactcgttgaagcgccgaacatattccctcaaggattcacccgagttctgtgttaacgcgtgtaggtcgtcttcgatcgcgtggcgcttgtaggttccttggaagttggcgacgaactgctgccacaggtctggccccgaagagattgagtaaggcaggagatgcatcagccatgaacgtgcagagccttttaacgcagttggcaaataattcgccaatgcgttgtcgtctgctccggcagcgtagagtactgtggagtagacttgaaggaactcttctgggtcggtgctcccatcgtacttttctattgctccgggtcggaatctctcaggccatcggacatcacgcagggaacgactgaaagctctacacccagcgctgggttgtcggcgatcgtgtgtccttcgtggatgtctatctgatgatgaggaagacgaggatgatgacgatgacgatgggtcgcttggttccggcgtatgattacgaggatgttggcctggctctcgagaatcctgtcgtcgtctcccgctgttgtctcggcgccggtctccatcatcgtcgtcattatggcaacgtcctcgaccagtatcgcttggcacccgccgttcgcgatcgttgtgatcgtggcggttatcacggtcttggtcttcgtttgaacggtctcctcgatcttcgttatcatggcgccgtgaagagacatgacgccgggaacggttctcgttgtctcgtgtgcgtcgtgcctctcggcggccgttgaggtgatctcggagatcgccagtgccgcgaggtggaggggtggctcgatgaggcgattccctctgttcagggttttcaccattggcatcgctagttggtggctgctccgggtgcgctgcggcagcggcctcccgcggcgcgctcgttgtcgatgatccatagtcttcgaggaggtgcaagactgacggttcgtggggatcgatgtcgattaccccaacaaattgatctgaagttggcgtcgctcctcgttccttgtctttatccctgatggggacgtgtgactgttggaccttaggagatggcgccttcatggcgctgagaaagaccttgcagcttgagaggtcatgattctttgtcttgtgaataggacaatagacatcacgagttggagaaatacgctgaattccacgctctttgcaggcgcgaatttcagcgcggacgttgagaaaaacccagcaggcttgcaaagtgtgtttcctggttttgtggataggacaccaggaccttgtcgcttcagaagtcatcctcgtcggctcgtggttcttgtcggaatgacaaggtttggccgcattagaatccttctcgagctcggatgtcgtcgaggttccgttctccgcctcggcgggaggatcttttgacatggagtcgtcttggtttgtagccactgcgttctcgtttctggtcattgatggaccggctgagatcggcatcgtggtgtaaaccgggaagacgatttcgccgacttgagtccacaccagcattgttgaagcaggaaatacttggttgagttggtgttgacgctgttgtcgacgaagctggatgacatagtagtagaaccttgagcaccaagtcctcctgcctggcgcgccactgtcgacgggtgatacccgtagaccggatatagaaggtattggggtacgttggtacaagggtctcacacgatacgttgacgacccagtctggttcgagtaggactctttccatccgtaaactccgtgaaggatttccttaatgcatgcggagggtatctgtatgcgcgtgggtatgccataccgatatgcgacgtatatcgaagggtaaagggtatacctaacccgtaaccctgctatgtcaccttgtgggacccacctatcaatgacgtttatcttttccctctcatcattgctggcaggaaggcagggcagaggcgccacaccactccagtcttctcttctctcggcgaaatcagacat

SEQ ID NO: 78655 - DNA, 138 bp, Oryza sativa
  Clone ID: PAT_MRT4530_78440C.1
atgggggccctaccagaccaggccgaggacgaaaatgagagcgacgtacccgtcaacagcgaggcgtctgtggtgacttcgtcaatctctcgaggatttactggcccagtcttcgacagcgagacgcttgtggggtga

SEQ ID NO: 78656 - DNA, 603 bp, Oryza sativa
  Clone ID: PAT_MRT4530_78441C.1
atgcctactccaggttttcaaccagatggtcgtagtgatcttttgacacctaacgcgacagtcaacatggtcatgataacaacaaccgagactgacaggattgccgtagtcacccggacgacaacgtctaggactaacaagattagggcgacaacggacaaggttaacgacatcatgacatcacatggcgacgacgaaactccagatcccaagacttccagagggcccgaggttgaggccgtaggtccgggagttgaacctctgactacgataatccctcatcgacttcgtcatcgtcaggaggcagttcttgcaggtgagtacatggaatactccgcaagccacatagcaaatatgcaagtgcacaaggataccaaaaggatgctaccagttctagtcatcaaggccattgacacagctcgaaagaactgtctgtggagggggaataacccttcttctacaaggaaatctctaacctcctgggacagggtgtgcacccctaaagagaaaggaggtttaggagtgatcaatctgagagttcaaaacacagcgctcctcctaaagcacatggtcaaattctataatggtgctgatttaccctga

SEQ ID NO: 78657 - DNA, 1434 bp, Oryza sativa
  Clone ID: PAT_MRT4530_78442C.1
ttacaaagcgaacagcggcgtccctgcattgctgttctgaagatcatcctcaagcgatgccgttgcgaagatctgctccgtgttgcgcgcccccatgtcactggagatcctctcacagagctgtctatacagtgcagggtctccgttggacttcctaagttctacaacatttacagaagggccaagctcaaaaacctcggcggacaccataaatgactcagggttctttgatcccttgcaattgcgcattaatttgagcttgctgtgccccctctgaacttggaatcccaactccgtcgctgagctttcaatcttgtcgaaggcatccttgggtggatgcgttgatgtgaatctaatcctcctttgggacacttcctcatcctcgaaaaaccctgaaagatcaagggatgatgccattccaatcaactggaaagcgttgatctgatgagaattcttatctccaggctcatcattgatttgctctttggcaggaagacgtgccccaaactgtacatcttcatcgtcatcatcatatggaagaacaggaatatagtccttctgaaaccattcgtgtgatttgatccctgccatgtcgatcctcttcatcggattgggttcaagaatcctccgaagaagattttgtgcactgtgtgaaagccactttgggatctgagtgtcacccttgaaaatcttctgatacagaacaacaatatttcggtcatcgaacggaagatatcctataagcattacataaaggattactccgcaagaccagatatctgacaaggatccatcatatcctttattctgcagaacctcaggagcaatatagttggggctaccacaggtagtatgcagcaatccatcattcccgaggtgttgaggtaaagcactaagaccaaaatcagagatcttgatgttgcctttttggtccacaagaacgttctcaggcttgaggtctctgtggtagactcccctatcatggcaatagctaacaccatcaattaactgctgaaaaagcctccttccttctttctctgatagttttccctttactgccatagtagctggcatgaaaatttttgcagcgaggaaatagcgtaaaagatcattgaaacaagggcttacaattctctcaaacagttcacctccattgacaaactcaagcaccatgtaaatcttagttttgctagcagcaacctcgtggaggcggacgacgtgggggtgcctgagcagcttgagcgtggcgatctcgcggcgaatctggtcgccggcgcggagggagacgacgcggccgcggtcgaggatcttgacggcgaagtggccgccggtggcgaggtggcgcgcgtacttcaccttgccgaagttgccctccccgagcgtcctccccatctcgtacccgcccagcagcgcctccctccctcccttcaccat

SEQ ID NO: 78658 - DNA, 714 bp, Oryza sativa
  Clone ID: PAT_MRT4530_78443C.1
atggcagttaaggaccggttcacgggaaaccctagaagacttgcagtgcttaccacaagcgggagcaccggtggcgagggtgggcgtgatggagttggatcggccggggtgtccggttgtccagctgccggattcaccgtggcgcacgaggggactgcccacctccggggtagggggtgggggtgaaaccttagcatggtgtggttggttaggggagagttatatgaagggtcttatcacaatcactcgacatggtgacgtgtgttcaggtgggttggttgggcctgtccaacgtggtgtagcattgttcagtagagatttaatattaccttaattactaaactgttttactgttttgctcaataaaatgttttacaaccacctttatgcaaatagccacaaaccgtccttgtgttccccttgcacgtctgcatcattggtgtggcttgctgagtacggtggttatactcagccttgctattgtttccccttttcaaaactgtagtgcttctgagccgaagacaaagttagagaaccaaggctcagaccccagttgagcttggagggcaagcgggcgaggtgttgcggtagaggtacaggggtgtcgccgtcgtcgtcgccgccgccgccgacgacagctggtgggttcaccttgaacacggactaggcagggcaagtgactccatggccgaccaccaagtacacggccgacac

SEQ ID NO: 78659 - DNA, 1260 bp, Oryza sativa
  Clone ID: PAT_MRT4530_78444C.1
cagtcagtggtacaacaccacagcaacgcaccaccggccatcaacctcctctcccctgcttctcgctcgctctcctgccctgtttcttggagaagtgagcttaagtgagagcctctgtccctcgcacacgctattggccatggtggttctcgctggcccgcccgccgtcgatcacatcccgctgctgaggtcgccggaccccggcgacgtcttctccggcgtgccggtcgtcgacctcggcagccccggcgcggcgagggccgtggtggacgcctgcgagcggtacgggttcttcaaggtcgtcaaccacggcgtggccacggacacgatggacaaggccgagtcggaggccgtcaggttcttctcccagacgcagcccgacaaggaccgctccggcccggcctacccgttcgggtacggcagcaagcggatcgggttcaatggcgacatggggtggctcgagtacctcctcctcgccctcgacgacgcgtcgctcgccgacgcctgcaccgtcccgtcctgcgcggtcttccgggccgctctgaacgagtacatctcgggggtgcggaaggtggcggtgcgggtgatggaggcgatgtcggaggggctgggcattgcgcaggcggacgcgctgagcgcgctggtgacggcggaagggagcgaccaggtgttccgcgtgaaccactacccgccgtgccgcgcgctgcaggggctcggctgcagcgtcaccggcttcggcgagcacaccgacccgcagctcgtctccgtgctccgctcaaacggcacgtccggcctgcagatcgcgctccgcgacggccagtgggtgtccgtgccctccgaccgcgactccttcttcgtcaacgtcggcgactcgttgcaggttctgaccaatgggaggttcaagagcgtgaagcacagggtggtggccaacagcctaaagtctagggtttccttcatctactttggagggccaccgttagcacagaggattgcaccattgccacagctgctgggggagggagagcagagcctgtacaaggagttcacatgggatgagtacaagaaggctgcctacaaatcaaggcttggagacaacaggctggcccagtttgagaagaagtagctagctagatgcctagcaacagaactggccggtcaagcaacaacgactttactgcatggcagctagctaccttagctatgtctcacgcacacgtacggtacaccatgaccacgagaagatgaagctgcttaagagag

SEQ ID NO: 78660 - DNA, 1518 bp, Oryza sativa
  Clone ID: PAT_MRT4530_78445C.1
atgaagtacgtggtggtgatgggaggcgtgatcagcggcctcggcaagggggtgacggcgagcagcattggcgtcgtcctcaaggcgtgcggcctccgcgttacgtccattaagatcgatccttactttaacgctgatgctggaactatatctcctcatgaacacggcgaagtgtttgtattagatgatggtggtgaggtggacttggatcttggaaactatgagaggtttctcgacattaaactaactcgagaccatagcataaccgccggaaagatccatcatgttatcccacatattacaaatgagatacaagattggattgagcgtatcgcgatggttcccgttgatggtgaggtggatcctgccgatgtctatataatagagctcggtggcactataggcgatattgaatccacgcaatttattgaagcctttagtcaattctcctatcgtgttggtgctggtaatttatgtgtggtgcacgttggtcttgttccagttttgaacgttgtgggtgagcaggaactggagaaaaatgtgaaagaaaaactctctctcttctgccatgtgccggtagctaacatttttactctgtatgatgtttcaaacatctggcgtgttcctctgttattgcgggaccaaaaggcagatcaagctattcttaaagttttgaatcttgaaagcgttgccgaagagcctaacttggaggaatggatggcaagggctgatctatatgacactttacatgaaacagtcaggattgccatggttggaaaatataccggtgtatctgatacatacctttctgtgatgaaggcacctgatgcttacagcacagcatggagtttactgaggggtgcagatggcattttagtacctggtggctttggagaaagaggtgttgaggggaaaatattggctgccaagcacgcacgcgaaaacgatgtccctttcctgggcatatgccttggcatgcagctcgccgtggtagaattcgcatgccatgttttgaaactgcctgatgcgaacagcacagagtttgatgccaaaacggagaacccatgtgtaattataatgccagagtgctccaacgaaggaaagggtggtaccatgcggcgtggatcaaagaggacatttttcaaggttgcaaatagcaagtctgccaagctatatggtagcgtcaaccacatagatgagaggtttcggcacagataccaggtaaatcccaatgtggtgcaattatttgagaacaatgggcttcaggttgtaggcacagacaagaccggagaaattgtgcagatcgtcgaaatacccaatcatcgatttttcgttggcgttcaatttcaccccgagtttatgtcgagaccttcgaaaccttccgcactttttgtcggactaatcgctgcatcgtgtgggcaactggatggtgtgctgcaagatgcggcttgtaaccatgagccacagcagaatcagcgtgcagagaagcgtcctgctgctagtgatctaggagattga

SEQ ID NO: 78661 - DNA, 1820 bp, Oryza sativa
  Clone ID: PAT_MRT4530_78446C.1
atgaagtacgtggtggtgatgggaggcgtgatcagcggcctcggcaagggggtgacggcgagcagcattggcgtcgtcctcaaggcgtgcggcctccgcgttacgtccattaagatcgatccttactttaacgctgatgccggaactatatctcctcatgaacacggcgaagtgtttgtgttagatgatggtggtgaggcggacttggatcttgggaactatgagaggtttctcgacattaaactaactcgagaccatagcataaccgccgggaagatccatcatgttatcccacatattacaaatgagatacaagattggattgagcgtgtcgcgatagttccggttgatggcgaggtggatcctgccgatgtctgtataatagagctcggtggcactataggcgatattgaatccacacaatttattgaagcctttagtcaattctcctatcgtgttggtgctggtaatttatgtgtggtgcacgtcggtcttgttccagttctgaacgttgtgggtgagcagaaaactaagcccactcaaaatagtatacgtaagttaagagaatatggtctcacgccaaatattatagcttgccgttgtactaaggaactggagagaagtgtgaaagaaaaactctctctcttctgccatgtgccggtagctaacatttttactctgtgtgacgtttcaaacatctggcgtgttcctctgttattgcgggaccaaaaggcacatgaagctattcttaaagttttgaatcttgaaagtgttgctggtgagcctaacttggaggaatggacggcaagggctgatctatatgacacactacaagaaacagtcagaattgccatggttggaaaatacaccggtgtatctgatacatacctttcagtgatgaaggctcttctacatgcttgtatagcttgtggcagaaaacttgttgttgattgggttccttccaccgatcttgaggattcaactgccactgtggcacctgatgcttacaacacagcatggagtttactgaggggtgcagatggcattttagtacctggtggctttggagagagaggtgttgaggggaaaatattggctgttaagtatgcccgcgaaaacgatgtccctttcctgggcatatgccttggcatgcagctcactgcggttgaatttgcacgccatgttttgaaattgcctgatgctaacagcacagaatttgatgccaaaacggagaatccatgtgtgaccataatgccagagtgctccaacgaaggaaagggtggtaccatgcgacgtggatcaaagaggatatttttcaaggttgcaggtagcaagtctgccaagctatatggtagcgtcagccacatagatgagaggtttcggcacagataccaggtaaatcccaatgtggtgcaattatttgagaacagtgggcttcaggttgtaggcacagacaagaccggagaaagggtgcagatcgtcgaaatacccaatcatcgatttttcgttggcgttcaatttcaccccgagtttatgtcgagaccttcgaaaccttccgcactttttgtcggactaatcgctgcatcgtgtgggcaactggatggtgcgctgcaagatgcggcttgtaaccatgagccacagcagaatcggcgtgcagagaagcgtcctgctgctagtgatctaggagattgaacctgccgcagcaagcggcaagtgacggcgtgctctgattcgaatgaccctgtggaggcacaggatgttacaacctgttaagaggcactgaggcagtgctggcccttggcgtagccctcccaatccat

SEQ ID NO: 78662 - DNA, 958 bp, Oryza sativa
  unsure (1)..(958): unsure at all n locations
  Clone ID: PAT_MRT4530_78447C.1
gcacgaggcaacctccttcgccgtgccgctctcccgttatgaagcagctccacaaatcgtcccccacccacgcgccggcggcggcgcacgccccggcgttcaaggcgtccaagacgtcccgccccgggccccgatcctgggtcggctaccttcttcgcgagcagcgcctcctttttgtcctcctcggcgccctgatcgcctcctccttcttcctcctccgcccctacctcttctccctctccccgtccttccacgttcccgaccgccgtccgctcttctccttcgcctcgcacacctcgtcggcgttgggcgtgccccccgggttcctgccgccgccgtgccgtgttgttgtcaccggaggggccgggtttctgtggatgccacctcgtatacaggcttgttggacaaggggacatgctgtatggttgtggacaacttttttatcgggaggaagggatatcttttcttaccctcctgtggaacctctggttcattttgttacgtattcgatgtctatagtccattctgtttgtgggggacctgtttcttttacactagcgtggcccttgttttccctggtggctttcataattctcaccctctttaatgtctataaattacctttgttcttgtgatcctttgaatcttgttgggtgttaggtaatactaaattggttgccttgtttttttcgttattttgcgacatgtttaagtattttgtgggtatttctttttgttcctttctctatatatggatctcttcctggggggccattgtctatccccaatatgtgggttagtggggctggtattctaccagagggtgaaaaaaatcacctctaaaccttttactcctttgggatattcctcagaaggtggcgtgggtgattagggtgtccctatctggttctctctttatcaaattcctatgtgggcccctcttaatagttgncttact

SEQ ID NO: 78663 - DNA, 377 bp, Oryza sativa
  Clone ID: PAT_MRT4530_78448C.1
ctactctgttctaactctcacagtttttttttatattactcattgtctttccctttttcaagggagtaaacaacggttttaagactatgttcagaaggaaggtacagcccttgcaagccgaacatttgcctgaacactattcattcgggaataatgcacaccgagaccgacctaataagattccgtccaataccaaacctaactgtatgtttaggcatattgcaggaaagatgcccccaacccatctcctctataagatggatcccataagcctattgtattgaaagacaagatgcttatgcgctaacccatattggaagagcccagtaaatggcattctctcctgtccaggcgattacctaccagtacggtttggt

SEQ ID NO: 78664 - DNA, 1196 bp, Oryza sativa
  Clone ID: PAT_MRT4530_78449C.1
tttttttttttttttgtttgttttttttttttttttttttttttttttttgtttactattcctttttatcattatgccaaagagtaatatcaaccgaacacccccaacatcacatggtcctatctctggagctggtaaacaccagcatgacaacacggcagataagaatatctcgaaaaacacatacaagcgcgggaaaactaaaaagggccaacttggtgttaaaaagaaaataaataaaacaaaaaacaatttacaagttgtattcttttatctatcgtccagcgagcttcgcagccttcgatggaccctctagtagctttggaacctctgatgaggcttctaattttttcaaaccatcttcacagtagttactaatatcaaagttggtcacagcatgggcaccacgaagctcgatggcagctaggtcataagcttcagctgcctctatctccgtttcaaaggtaccaagatagatgtctttggtgtctctactttctccaatcctaccaatccgtgcttgccatctaccatcctttcgccttgttacacccctatatgatgaagttcctcttgagaaacagctgctctgccttcttatgtacaccacaaattcatcttgggacatggtcttcatcctctcgatttctttctcataatcagaaacattgaagttaagtttggtgtttggccctgcaccccaatatttaagggctgcaaggtcatgtgcccttgcagcattctcttcagtaacatagcttccatgcttccccttgcgcttgcggccctcgacctggctgctgttgtcccagaggtgcgcctcgaacttgccgctccacttcaacctcgtgacgccgtggtaccgcgacgaccgcggcgcggcgtacttgcgcatggtctccgccaccagcttccctcctcctcctcctcctcctccctccgccgccgcagccgctttcccatcatccccgccgccgtccgcgacggccagctgctcgtcgagcgccgcgatctcctcgccccccgccgcggccggctgctcctccgtctccggaggaggaggaggcgcggggtccgaggcggcgggttgcacggtggccatcgccgcgaggtgaatcttcttcttcttggatttctcctcggcgaaatcttcgagagctcgtcgcggcgcaaaccctagccgccggcccttgtcc

SEQ ID NO: 78665 - DNA, 378 bp, Oryza sativa
  Clone ID: PAT_MRT4530_7844C.1
atgggcttcgagaagacgatcctgaaagccggcaccggtcccaagcccgtcaagggccagaaggtcaccgtccactgcaccggcttcgggaaagataatgatctcgctaagaagttttggagaaaatttatcgttagacctcacaaatcaaaattcttggagcacaaaggacgcaggccaggagccattcagtttcaatataggccagggtcggtgatcaaaggatgggacgagggagttatgaccatgcaagtgggtgaagttgctcgtattcagtgcaccccggattatgcgtatggagctagtgggtttccggcctggggaattcgaccaaactcagtgctggtgttcgagattgaggttcttagcgcccagtaa

SEQ ID NO: 78666 - DNA, 815 bp, Oryza sativa
  Clone ID: PAT_MRT4530_78450C.1
caagctcttgttaacagtgaaatttggtaagcccggagtagtcatcgcttagagtcagcatcggcttcgaagtcatgagattagccgatgagagttgtcaagtcgtcagttgtcggattcttgctatattcgcctgcttattgattgccaataagggtttcatcggggtttcagccgatttcatgacatcggaccttcagccgatgtgtgctttaaccttcggatcgatgtttattctatcatatcattatttgccgattggtttatactggattatgttgttattttattacatcactatcagtcgattgcctttatatcattatttactaaagtgttagaatctacattggacgtatagccgattgcttaaaccctatcgctatcggctgatacagttgatgaagcagttcatcgcgcattgtttgatcaatctgagttgtggcagatacattacaacatttgatcaaggatgggccgatcttgagaagcaatttcatgactacttctttgctggagtcagcaagttgaagcttttagacttaatatcagttgagccgcaagaaggagaatcggctatggaatatattcagagattctgtaatgtccgcagccgatgttatagtttgagcctaagcgatgaacagctagcggatcttgcattccaaggattgtcagcacctatcagagatagattcttttgccacgagtttgaaagtctagctcatctaatgcaaacaatatcagctcatgaaagccgattgcacgaagcaaaggaagatcggttttggagttatcaagacaagaaattttga

SEQ ID NO: 78667 - DNA, 310 bp, Oryza sativa
  Clone ID: PAT_MRT4530_78451C.1
agggccgccccccttaacaattttgttgggagggagggcaggcacacaagagaaaatcacaagccaaagggcacacgtaggccaggcgaaaaaagccaacgggggagaaagccccaggaagggcgcaaacacaagaacacgaaacaaacaacaaaaaaacacaggccacaaaaaccaagagccaccacgcgggggggggcgcacaacaccacaaccacaggaaagaccagaacacccccacacagaaacccaccagaccacaggcaacagaaccagaaacaagcacaaccgacacccccagaaacaaaaa

SEQ ID NO: 78668 - DNA, 623 bp, Oryza sativa
  Clone ID: PAT_MRT4530_78452C.1
atgctaagatcatggtcacagtggagaatttaactgaggaacaacaatattggcttggggggcaagcgcatcagcttcagcatggtgaagcacatcagtatcagctcatgaaagccaattacaagatagagaaagaagataattttgaagcatgagttctcatattccaaaactgggggggcatgtgttgacagtaaaatttggtaagcccaaagtcatcatcggcttagagtcactatcggctacggcatctcggaatcagccgatgggagttatcaagtcgccaatagtcggattcctgctatattcgcctgcttttgactgccaataagggtttcatcggggtttcagccgatttcatgacatcggacctccagccgatgtgtgctttaaccttcggatcaatacttgttctactatatcatattgttagccgattggtttctactggattatattgttattttattacatcatcatcagccgattgcctttatatcatcatctacattggacatatagccgattgcttaaaccctatcgctatcggctggtatcggcatcgactattatcggctatcggctggaactactccatcggcttgtcagccgttcggctgttt

SEQ ID NO: 78669 - DNA, 625 bp, Oryza sativa
  Clone ID: PAT_MRT4530_78453C.1
gggacgcgaatcgccatcgcaggggccagggtggcaccaggccgacacgcgaatcgccaccgcctcccacccccggtcctccagccggcaactttcatggccaccacgagaggggcaaccgggcaagctgccactgtcgccgcctcctaccccagtctgcgtcaacctcccacctccggccatgacttctcgttaacagtgaaatttggcaagcccggagtagtcatcggcctagagtcagcatcggcttcgaagtcctgagattagccgatgagagttgtcaagtcgtcagttgtcggattcttgctatattcgcctgctttttgactgccaataagggtttcatcggggtttcagccgatttcatgacatcggacctccagccgatgtgtgctttaaccttcggatcgatgcttatttatcatatcattatttgccgattggtttctactggactatattattgttatattttattatcatcagccgatcgcctttataccgttatctacattggacatatagccgattgcttaaaccctatcgctattggctggtatcagcatcggctattatcgctatcggctggaactattccatcggcttgtcagccgatcggctgttt

SEQ ID NO: 78670 - DNA, 467 bp, Oryza sativa
  Clone ID: PAT_MRT4530_78454C.1
tggagcccatactccatgtagcaccaattactgttaacagtgaaatttggtaagcccgaagtagtcatcggcttagagtcagcatcggcttcgaagtcctaagattagccgatgagagttgtcaagtcgtcagttgtcggattcttgctatattcgcctgcttattgattgccaataagggtttcatcggggtttcagccgatttcatgacaccggacctccagccgatgtgtgctttaaccttcggatcgatgcttatttatcatatcattgctagctaattggtttatattggattatattgttattttattacatcatcatcagccaattgcctttatatcattatctacattggacatatagccgattgcttaaaccctatcgctatcggttggtatcggcatcggctattatcggctatcggctgaaactactccatcggcttgtcatccgatcggctattt

SEQ ID NO: 78671 - DNA, 685 bp, Oryza sativa
  Clone ID: PAT_MRT4530_78455C.1
aggaggggagagaggaagagaacggtggcggcgcagcgctctcacgggcgtgcgaggagggactggagggtcgcgtccttacatcttgcatgacgaggacatgccagctacacttgacgtaaacaagggtgatggtttacgtcatacatcacatgaaggaaataaagatgtcgtaaatcaagttgatggatttcgtctcagcaagaacgactaaacttatcatggttcaattacgcgcagccatgctaggaaaatacaacaagagctgaactcactctttgctcaacttaacccaaatcttagtgagaattttatactacctaaatgctctacctttgtatttctaaggtttacacccgaggacatcattagtatgccaagaaggatgggttatgttaagtcaaggaggaattagcccatgcccaaccagcagctgtctacgccaacaagaagatggtttacgctgtaaaggctcaatttccatggcttgtgcaacccagccagtcaagagacgggttgcatggcatagatggttggaaagagggacaagtctagtttccaacgtatcaaaccccacctcaatatcattttccaataagaagttatagcatttttactaaagactgcgcaggagttgaagggttgtgcgcgaacctgagaaaactccttgcattctcatttatgt

SEQ ID NO: 78672 - DNA, 1146 bp, Oryza sativa
  unsure (1)..(1146): unsure at all n locations
  Clone ID: PAT_MRT4530_78456C.1
gcttttagttcaaactgacagcggacgtnangaagcgtcggaggagatggaggttgcgacggcgacggaggcgtcggcgccggcggcgagcaggcggagccacccgttcccgtggctagacctggccatctccgagccctactacttcctccacctcgtcgccttcttctcctacttcgcggcccgcagcacggtgccctcggccgacgacggcctcctcctccgccgggcggtgctcacgttcctcgtgctcttcgtcgtgaagatcgtgaaagaggaaaactgggaaacatgcattgctgattcactgctctatgctaagggattattgctggcagttactttggttatcgattattggctgactgtctcctacttactgggatttgttgttatatatgctgttgctcaacagccaccttatgatggtcttggtcattcaaatcatttgactccattgcaactggaaggcctactaacggaggagccaacaacacgattttggctggttgaattccggacttccttttcaggaacatgtatagaagcaagcagtgttctgcctgaactctctaacatatactctaacaagaacatttcgtttggaataattgatcttgggcattttccaaatgctgcagcaaagtttggaatatccatgtgggatcatcttcccacttatatactctttgacaaggccactgaagttgcacgattcccagaaatcatgaatgaatcaaaagtatttgtgccaaaaattacaaagaaacttctctgccagcacttcgaccttgacaggcgactgattgaatacctatctagatgacccatcatctatcccagctgtctcaaaaagaaagcgccaattcccttttgtcgacgaaccagatgaatgaaccggacagttgtgcggcagcaatcacttcagggggtatcttcaagcttgttttattctatgagtttacttgtacccatccaatcaaggacagtatactttagggtagggtgggggtgggcaggattatgatttgcatcttactaccatatgtcacctcttgaattacggaatgttaccacacctgtggagatcttgcaatgatatgccaactatgttttccactgcaaaaaaaaaaaaaaaaaaaaaaa

SEQ ID NO: 78673 - DNA, 642 bp, Oryza sativa
  Clone ID: PAT_MRT4530_78457C.1
atgtggacggcccggatcgccccgaagggagatcgggcggccaagggtggagcagcggaactctctgggcaaataggcagggagtggcggtgcgtggcccgacagtcgccggcggcgaccatccggcgcggcgacgcacaatggaggcagcgtaagaggcgagtaggagacagagcaaggtcaccgtggggtgccggcgaggagattgaggcgaagctcaacagggtagcgacgatgatgtgtgagcggtgttggtatttcttacaatcacagataaaatccacaagcgcaggaatataccaatgtagcactttccctacggaatattccaagggtatcgaatccaagggaacgcacttgcaacccgctgttcccggatgtcgctctactacgtacccggatagggaggacttaagtgatcttgagggctttcaccagctctgcacctacctcaaacatgttggcggtatagaattggtatttaacagccgccaacaaaaccccgcacacttagctctttgctcgtccctgagtaaagctctggtactataccatggtggagatataccgatggacatgctcacctgcttacctgtaaaaattgagagggattggggccagttttggttcggccgaacctga

SEQ ID NO: 78674 - DNA, 953 bp, Oryza sativa
  Clone ID: PAT_MRT4530_78458C.1
tttccgttcgccgccgccgccttcgattcgataccgatcgagttggagaaggtcgccgctgcccaatggctccgctaccctcgccaccgctgctggccgaatcgctcgcgacgctgcgcacagcctcgccgtcgccgcccatcccctgctctcctcgccgcacccggccgttggtttcagctaggttcgcaagaacggccggccgccggagccggagcacggggggaaggagagaccttaggagctgtgcctatgcggcggaagctgagtacggcagcgcggaggatgaggtcgccgacgacttctactccgttcttggcgtcatgccagatgcaacccctgaggaaatcaagaaagcatactacagttgcatgaaagcgtgccatcccgacctcagtggggacaaccccgaagtaacaaacttctgcatgttcatcaacgaggtttacacggtgctgagtgatccggtgcagcgtgcagtgtatgatgaaatccatgggtatacagcaaccgcgaccaaccctttcttcgatgacagtgcacccaaggatcaggtgttcgttgatgagtttacctgcataggatgcaaatattgtgccaatgtgtgccccaatgtatttagaatcgaggaggattatgggagcccagtcaactgtattcactggacttctgctgcacagctttctctccttgagaatgaaatgcggagaatagagcgggtgaatgttgggctgatgagtgctgggatgggagtttcagttgatgtattccgattggctagcgtgcgttgggaaaagagacagtcaaaagttttggaaaaaattaggacacggatgacaaacaaaaagtattcagatataagtagttcttggactgatatctggggatccccaactcgataccaaggaaatgatgaattccggggcaaatttcctttggcagtagtctggtaa

SEQ ID NO: 78675 - DNA, 611 bp, Oryza sativa
  Clone ID: PAT_MRT4530_78459C.1
gccggcgaaccaaacctcgaattccttgggagctcggaggaggaggaggaggaggaggaggagaggggggagctcccgtacgtaccaggggttcggagagggagcactccttggagtcgaacccgagcacctccacggccggcggcgaccccgcccgcccggcggagcccactattgttaacagtgaaatttgataagcccggagtagtcatcggcttagagtcagcatcggcttcgaagtcctgagattagccgatgagagttatcaagtcgtcagttgtcggattcttgctatactcgcctgcttcttgattgccaataagggtttcatcggggtttcagccgatttcatggcatcggacctccagccgatgtgtgctttaaccttcggatcgatgcttatttatcatatcattgctagccggttggtttatattggattatattgttattttattatatcatcatcagtcgattgcctctatatcattatctacattggacatatagccgattgcttaaaccctatcgctatcggctggtatcggcatcggctattatcggctatcggctggaactactccatcggcttgtcagctgatcggctgttt

SEQ ID NO: 78676 - DNA, 1137 bp, Oryza sativa
  Clone ID: PAT_MRT4530_7845C.1
acgaatagagtacccactagttggggttttgtttattctagggtgaacaagccgagagagagggcgcgcggaccgggtccacgggagtggggcccacgcgtcagcccctcggtccacggtggaccgggtgcacgcggctgacgccgaccggcgccgtgggtcccacgcgtcagccgcacccgcgggcgcgggcggctgacggccgggcccacctggcagccgcggggcgcgcccgaaggcggcctcgccggcacggccgacggaaggcggcgcacccgcgccccgatggtcgccgccggcgaccaacggcgcggcggagcggcacccgagagagaggagggaagggggaagcgaacggagcggtccacggctcaccccgggacgacgagggcggcggaaacgacaaccggagcggaggaaggcggcggcgcggttcggatcgacgaggacggcggcgctccgacggtcggcgggcgaaacgaaggggtggacgaggttggcgaggacgcggcgaagccgaaggaggtgacgccgagtcgggaggaagtccggagcgacaacggcgatgaaccggagctcggcggcgacggcggagagagaggaagacggtgcgggcacgattccgacggggagagtgagcggcgagtggcggaaacggaggagagaggcacggggaacaattatatagcgccgggagggggagaaagcggccggaggggaaggaaaccggcgcggaggatccggccgccattgatggcgccggcgaggtttgcggaagcgattccaaacggatccgagggagagagagagggaaaagcgggggaaaacggagagggaatcgcggggagtgatttccccctctttatggcgcgcggggatggcgggatgcggcggattcggcggcggcggcggcgctagggcacgggcgggcggcgggagcggcgggaggtaggggatgacgggtgggccccacccgtcagcgagggtggcgggcgggcccgcccgtcagcggcgcgcgcgcggggaggaggccgaatgggccgcgggggagaggagagagagggagagagatgggccgagccggcccaagagggggggaaagaactttttagagcttttctttttataaaaccattt

SEQ ID NO: 78677 - DNA, 755 bp, Oryza sativa
  unsure (1)..(755): unsure at all n locations
  Clone ID: PAT_MRT4530_78460C.1
gcagcgtgcagtgtatgatgaaatccatgggtatacagcaaccgcgaccaaccctttcttcgatgacagtgcacccaaggatcaggtgttcgttgatgagtttacctgcataggatgcaaatattgtgccaatgtgtgccccaatgtatttagaatcgaggaggattatgggaggtcaagagtatattcccaatcgggtagcacagagctaattcaggaggccattgatagttgcccagtcaactgtattcactggacttctgctgcacagctttctctccttgagaatgaaatgcggagaatagagcgggtgaatgttgggctgatgagtngctgggatgggagtttcagttgatgtattccgattggctagcgtgcgttgggaaaagagacagtcaaaagttttggaaaaaattaggacacggatgacaaacaaaaagtattcagatataagtagttcttggactgatatctggggatccccaactcgataccaaggaaatgaagaagaaggaacagagagagcgaagagagcagctgctgctgctaggagatggcgagaatactcgagaaaaggcgcagacaggccaccggagtacaaacttccagaggcagcgggcaataaagaatgaattccggggcaaatttcctttggcagtagtctggtaacccccaggcatcgatgatgaactgcaacatctgccaaaggacaacttgcccagcaatgcagctgcacatctcatggtctcaaccta

SEQ ID NO: 78678 - DNA, 547 bp, Oryza sativa
  Clone ID: PAT_MRT4530_78461C.1
gttcagcatttgcttagttgtattcatgattactgcacttcttgctcagtctctggcaccgagatcgagtgcaaaaccagctgcaacagtgcaacaaagccaacatagtaacgtgttgacagtgaaatttggtaatcggcaaagacgtcatcggcttagaatcattatcggctgcagcatctcggaatcagccgatgggagttatcaagtcgccaatagtcggattcctgctatattcgcctgcttttgactgccaataagggtttcatcggggtttcaaccgatgaaatgacatcgaacctctagccgatgtatgctttgacctttggataagtgcttattatatattgtctctagccgattggtttctactcggttatattgttattttattacattatcaacagctgattgcctttatatcatcatccacattggacatatagccgattgcttaaaccctatcgctatcggctggcatcggcattggctattatcggctatcggctggaactactccatcggcttgtcagccgatcggctgttt

SEQ ID NO: 78679 - DNA, 462 bp, Oryza sativa
  Clone ID: PAT_MRT4530_78462C.1
atggaggagccgagctgctgcgtcggcgccgccgtcgtcgtcgtcgcccgttgtcgtcgtcgtcgtcgctcgtcgtggacgtgggagaggatggagccgccggtgcgcggatgtggggagaggaggggagccggcggcgcgcggtcgtcgtcgtcgccgaggagggagccggccgacggtgcgtggatgtggggagaggaggagagccggcgtcgtggtcgtcatcgtcgccggcgcacggaggcggcgtcgcggttgtcgtcgtcgccggcggcggaggtggggagccggaggcgcgaaggtcatcgtcgtgatcgaggggagccgtcggcgcgcggaggcggcgtcgcggtcgtcgtcgtcgccggcggcggaggtgggagccgaggagggagccagccgcggcggaggcgtcgcttaagtggtccgcctgcgaaaatgattttcgcaggcgccgattaa

SEQ ID NO: 78680 - DNA, 442 bp, Oryza sativa
  Clone ID: PAT_MRT4530_78463C.1
gcctcctggtaacagtgaaatttggtaagcccggagtagtcatcggcttagagtcagcatcggcttcgaagtcctgagattagccaatgagagttgtcaagtcgttagttgtcggattcttgctatattcgcctgcttcttgattgccaataagggtttcatcgaggtttcagccgatttcatgatatcagacctccagccggtgtatgctttaaccttcggatcgatgcttatttatcatatcattgttagccgattggtttatactgtattatattgttattttattatatcatcatcagccgattgcctttatatcattatctacattggacatatagctgattgcttaaaccctatcgctatcggctagtgtcggcatcggctattatcggctatcggctggaactactccatcggcttgtcagccgatcggctgttt

SEQ ID NO: 78681 - DNA, 444 bp, Oryza sativa
  Clone ID: PAT_MRT4530_78464C.1
atgcgcatcgtctgcacgtgcaaaggtgagcgcgtggtcccgaccttgatggcacccgctgaaccaagcggatgtcagcaacctcctcctcccgtcgcatggccaattaacatggcggcggcatcaggcatgcatggcgggaaagccgctgcgaactccggcaagaccatcctagtgacgatactgacgcgccgcctgtcgaaattagcaaccgatctgagcgggccgagcccgatgtggacggaaaaggtgaagggatggagcaagtcattggggcagtacaagagacggagggtcgggccggaggaaaatgaggtggagtggtcgaagtggagatccctggcatcaccgctggtcgagaaatcggagaggaatggtagcccgagcacaccgaccaacacctatgccttcatggcagaggactccatcatcgtcgctacctag

SEQ ID NO: 78682 - DNA, 992 bp, Oryza sativa
  Clone ID: PAT_MRT4530_78465C.1
ctaggcaattgtatcgtttacgttggtgtcgttcaaggcataatctctagcctgcttcttgattgacaataagggtttcatcggggtttcaaccgaggagttatctggacgttgcatcggctcatgaggattgtatatacatataagttggatttagccgatgacaacaaaggtttcattgtttaatctaatcttgtggatttcatgacatcggacctccagctgatgtgtgctttaaccttcggatcgatgcttatttatcatatcattgatagccaattggtttatactggattatattgttattttattacatcatcatcaaccgattgtctttatatcattatctacattggacatatagccgattgcttaaaccctatcactatcggctggtattgacatcggctattatctgctatcggctggaaccactccatcggcttgttagccgattggctatttgatctattatttgcaaatcttgtcagttgcaggatcaaactgactggcacgcccgcatctcatccatacttcaaaagtggagggcatgtgttaatagtgaaatttggtaagcccggagtagtcatcggcttagagtcagcatcggcttcgaagtcctgagattagccgatgagagttgtcaagtcgttagttgtcggattcttgctatattcgcctgctttttgattgccaataaggttttcatcggggtttcagccgattttatgacatcggacctccagccgatgtatgctttaaccgtcggatcagtgcttgttctattatatcatattgctagccgattggtttatactggattatattgttattttattacatcatcatcagccgattgccattatattagtatctacattggacatatagccgattgcttaaaccttatcgctatcggctggtatcagcatcggctattatcggctatcggttggaactactccatcggcttgtcagccgatcggctgttt

SEQ ID NO: 78683 - DNA, 439 bp, Oryza sativa
  Clone ID: PAT_MRT4530_78466C.1
tgctgttaacagtgaaatttggtaagcccggagtaatcattggcttagagtcagcatcggcttcgaaatcctgagattagccgatgagagttatcaagtcgtcagttgtcgaattcttgctatatttgcctgcttcttgattgccaataagggtttcatcggggtttcagccgatttcatgacatcggacctccagccgatgtgtgctttaaccttcggatcgatgcttatttatcatatcattatttgccgattggtttatgctagattatattgttattttattacatcatcatcagccgattgcctttatatcattatctacactggacatatagccgattgcttacaccctatcgctatcggctggtatcggcatcggctattatcggctatcggttggaactactccatcggcttgttagccgatcggctattt

SEQ ID NO: 78684 - DNA, 219 bp, Oryza sativa
  Clone ID: PAT_MRT4530_78467C.1
atgggggtcgtcgggtgggggtgctgcggattaggaatttggagcgctcgccgtgtcgcggtcggcgcatgtttcacacggcacagcgacagcgatggaccagccggctccaccatcgcttctattggagccacgacggcggcggcggcgcgcgacggccgggaccctcgctccgccgcgtcggagacagaagccgacgccgacgcgagcgcaaagtag

SEQ ID NO: 78685 - DNA, 137 bp, Oryza sativa
  Clone ID: PAT_MRT4530_78468C.1
gttttcttcacagatagctggagccttttgggcataggctctctaagccataatttattaggccaaaacactattgaatggcagactgctccccttgtaagcccaagagaatgcacgtgcgatatgttgcaaccatt

SEQ ID NO: 78686 - DNA, 684 bp, Oryza sativa
  Clone ID: PAT_MRT4530_78469C.1
tccaatcctatagatctggctgctaatggttggggtggtacctggggctctggaggtacatcatcttcccttggtgcggcttcatcacttgggttgtttcgaggatggagctcgtccgagtcgtcttcatctctatctcgtcctgattggagaactaatggcccttcaccatgtgactacacctcaatagactggagccttgacacaacgttgttaaaccctgcagcgaagagtgaatggctgtccgacacatggtcaaccatgttcatgggtggcagatccacaagaccatctgggaaccttggtggtccaggcattgctgggttacatgaaagcaattttccaatggatccttctccatcaccccgaccctatgattggccttctttctgcaggggaggatcttcctagtttcccctaccctgtaggtaagaagccatcgaataaaacaaagtaaaagatgttatttgtttctgttcttgttttggtctcagatccagttggttgacaagttttacatgtgtattgaaccgtgtttgtgtatcctcgactgttggccgagattagtcatctttctgtgtatgctgtgcatgaaaaatgaaggaagaaattgaagatatcttggcttaaaaaaaaaaaaaaaaaaaaatctctctctctctccctcgggggggcctcgtgccg

SEQ ID NO: 78687 - DNA, 225 bp, Oryza sativa
  Clone ID: PAT_MRT4530_7846C.1
atggtgcaaatccccttcgtcggcggagaatgcagggaggaggcaacggtgaccaggtggggagaggtcggtgtgaggagcttggtgaagcaaaaggaaggcgaggtagaggaggtccctggacgacagccatgtgatctgtcaaaagggaagaagctgatgaagggcattgacaacagcggtggtctcagatctatgcgggtgctagagacccatgcggagtag

SEQ ID NO: 78688 - DNA, 317 bp, Oryza sativa
  Clone ID: PAT_MRT4530_78470C.1
attaagaatggataaatgcataaattaaaccaattcttataattacaacagaatcaagaaaaaggtacagcaatgtgggtggggagaaagaggagagggagcagaaaacgcagagaaagaaacaacgaaaatggtgaagaaacagaagagagaccaatcaacatgatcggatcatctagaaggcgtagatggcggcggcggcgacggcgaacatcgcgaaggcggggcggaggccggcggcggcgccggtcggggaggtcgtggacggtggctcgggggcgggggagggcgacactgtcttagctggtgctgggaga

SEQ ID NO: 78689 - DNA, 267 bp, Oryza sativa
  Clone ID: PAT_MRT4530_78471C.1
atgggtggaggagcttgggaccgtgacactgttatgagtgctcggcgagctgcatacaacaatccagaacgggctatggagtatttgtacactggggttcctgagcaagctgaggcccctgccgcagttcaagcacttcctatccctgctgcagttcaagcatttcccacgagtgaccaactagttgatttgctgatttgctgtgttgtaaattttgtgttgtattggatgtttgtcgggttgtgttggatgctaattgggctgtaa

SEQ ID NO: 78690 - DNA, 494 bp, Oryza sativa
  Clone ID: PAT_MRT4530_78472C.1
aaaaaccccccgggccctgggtcataaaaaaactaaaatccaaggctccccctttaagaaaacctggggttttgcaacaaaaagatgagtaggtttttgcaacaaagggttttatggggaaaaagggcaaactccaattgacttaagagggggttttggcaatttcccctataatcaaagcccccataaaaccccctgcttttagcgggccaaccccaaggggggacgccaaaaggttaaaaagctttttgaaagctacactttttttttttgacccccttaagataacccacaaatagttggcaaaacccctactaatttattcaccaacggcccatcgggtgaaaacaatttactgccctaaaaacataattgcctttatcttattccacacccccatatccaacccttatatttatgaaaatctccctttcccccaaaatttatttccaaatgggctttgttggtggaaaaaaacaaacccgtgccccctt

SEQ ID NO: 78691 - DNA, 300 bp, Oryza sativa
  unsure (1)..(300): unsure at all n locations
  Clone ID: PAT_MRT4530_78473C.1
aaaaacagaacaatgttaggaatgccacaaaaaccacccacttgccttttacctttnctattgtgacagtgacatttggnccaaatgtttggnccaccctggggncaggtatcaatatcaatctaaagacagacaaacaaacaaacctttccaacaatcacctaatggcttcatagggggcaccaaatgaaaaaatagngncgtgggaaatcttggggaatgnggaacgtagtaaatagtcgttcancatggaaccgggnnggatacacaggtttttcttngggggatttcncaacttgt

SEQ ID NO: 78692 - DNA, 2019 bp, Oryza sativa
  Clone ID: PAT_MRT4530_78474C.1
atggctgctattgtacatggctgcttcgctcgccgcggtgtcggcggtcctggtgctggaagacgactccgggccgaagccgctgcaacgcccgtgtactacgtttcggaggccttggcgggccctaaaacatggtacacagagccgaaaaaaatggcatacttactggtcatggcctcccggaagctccggcactacttcctggcccacgacatcatggtgctgacctcttatccgctgggcgatatgctccggaacagagaggccacaggccgaatcggcaaatgggctatcgagttggcgtctttcaccatctccttcgtatctcggtcggctatcaagtcacagatcctggcggatttcatcgtggaacggaccaggccttgctccgatcagccggagcctcctgtggaggaggtctggatagccctaaccaacggagcatgcaacgctttcggtgcgtctttcgccatctccttcatatctcggtcggctatcacttcgcctattgggcggtccgcgtcattcgcagctcggttggaattcccgaccaccaataacaccgccgagtacgaggccattatgctggcccttcgcaaagcacgggcaatgggcgcccagtgcctcgtgatccacacagactcgcaggttgtcgccgggcatatcgacaagtcatatcaagctcgcagcccggagctcgccaagtacctggaagcgtttcgcaaggccgaggcttgctttcggggcatcacagtgtccggagtcccccgagccacgatagcggacgtcgatgccctggcaaaggcggccgccggtagtacgctgctgccttcgcacgtactctacgaggtattgcgctccccggccgcatccgacacagacgcgcctgccgccgaggtcgcagtgatcgacacccgaagccaaggggcggagctcctcaaagaacacgacgggcactgcgggatgcagctcgctctgcgaaccttggtagccaagacgctccggcaggggctgtactggcccacgatagcagctgacgcggagcacttggtatgccattgccaggggtgccagtggatgaggcgagcttcgcacatgccccccactaggctgacactgattccgcccgtgtggcccttcgcacggtggggcatagacatcgttgggctgctgcctcgggccccagggaacatgcgcttcgccttggtagcagttgagtacttgtacttctccaagtgggtaaaggcggaggccctagcatccataaccgcaaggacaatacaacgcttcgtttggcgcaacatcatgtgccggttcgaggtgcccaggcacctaacgatggacaatgggcatcagtttgacttcgacagcttcaagaacttctgcgaaggcatgtggggccactgcacctcggtgacctgggccaccggctttaccccgttcaagctccttttcggagacgaggccatgacccccgcggagatcaagggtcaatcactgcgagtcgtccttccggagcacgctggcgagcgcgaggtctcggtggaccacgtcgaggagatgaggatggctgcagccaagaaactacgaaaatacatcgtagcgacgcagctatggtataacaagaaagtggccccacgagcatttagtctgagcgaggccgtcctaaggcgcgccctgagccccagcaagctacagaacaaatgggaaagccccttcctggtggcgggaaccggcacatgcggagcttgtcacctgacggagctcgatgggacccctctcccgtgctcatggaatgcttacctcctcaaatgctttactcaaaaaagggggggagcggagtacggcaaggagtatgatgaccatctcgttgggaacgcccccgcctccgcctccggatccgcgatgagcctcccgaggaggcacctgcgaactctcaccccggacgcgacctgcggagcgcttggtagggcgtcgacggggttagatcccgtgagaaggatggtaaccaagccctag

SEQ ID NO: 78693 - DNA, 3914 bp, Oryza sativa
  Clone ID: PAT_MRT4530_78475C.1
ccatcccgagcaaatatgaattgaaatagtagttttcatcccggacaattgtgaatacatccggagggagctccgccgtgcacgaatcaaagcgtcaacgccgcgactatgcgcgcgacgtgctgaacctagctctagtaagctcagttgctccgccagcctgtgcggcggctccggtctccttctccctggaagacggccatggccgtctgtacccccataatgacgccatggtcgtcattacggcccatatcgcggaggccaacatccaccgaattctcgtggacggaggcagctcagcggacatcttgttcataactcccttcgaccaaatgaggattcctcgaagccggctaagcaaggttcgttggcccttgaggggcttcagcggggatacggtggaagcgctcgggctgataactctcccggtctccttcggtagaggccggagtgcccggacaaagcaggtcaccttcgatgtcgtcgacctcccatatgcttacaacgcaataatgggaaggggctccctgaacaagttcggggcagccatccactagaattatttgtgcacgaagatgcccggccctgccggcgtgatcacagtaaggggcgatcagctcggggctaggaaaatcgcgtacgggcacgagccgcaggccgaggccaggcacgtgcatgaggtggacggtgccgacccggagtgtactgtccgcttcgtcaagccagaggcagacgaggggacgcacgggttgcaccctgacccagcccactcgaagcgggccttccggctcggagacgggttggcaagcgacgtggaggtggccatcgtggccgtccttcgagagaacctagacgtcttcgcatagtccgcttcggaccataagggcgtcgacagatgcattacggagcatcgcctagacgtccacccgggggcccggccggtgcgccaggggctccggaagatgtgtccgccgagcgggcctaggcagcccgcgaagaagtgaagaaattgctcgaggctagggtcattcgtgaggtccagttctccgagtggctcttaaacccagtgctcgtcaacaaggccaacggcaagtggtggatgtgcatcgacttcaccgccctaaacaaggcatgcccccgggaccccttattgctgcgtcgcattgactagctggtcgattccacggcaggctgtgagctcttgagcttcctggatgcttactccagctaccattagatctgcctggctccggaggataaggccaagaccagtttcgtcactcctgacagggtgtaccgttacatccggatgccctttggccttcgaaatgcccagctgatccactccgcgctaaaggcccagctgggccgcaacgtcgaagcgtacattaacgacgttgtgatcaagagcaagctggcttcggaccacgtcgcagacctccgagagacgttcgatagcttgcggagagcgggcatcaagttgaaccccgagaagtgtaccttcggcgcgacaagggaaagctcctgggctacctcgtctctaagaggaggatagaggccaatccagagaaaatcaaggccaaagaagtgcagcgccttacgggacgcctggcctccctctcgcgtttcctggccaaatccgcggagaactgccaccccttctttgttgtgctccgaggtgcatcgcccttccgatggacgccggagtgtcagcaagctttcgagggccttaaagaacacctatccaagttgacggcactagcgactcctccctcgggccaatggctgctattgtacatggctgcttcgctcgccgcggtgtcggcggtcctggtgctggaagacgactccgggccgaagccgctgcaacgcccgtgtactacgtttcggaggccttggcgggccctaaaacatggtacacagagccgaaaaaaatggcatacttactggtcatggcctcccggaagctccggcactacttcctggcccacgacatcatggtgctgacctcttatccgctgggcgatatgctccggaacagagaggccacaggccgaatcggcaaatgggctatcgagttggcgtctttcaccatctccttcgtatctcggtcggctatcaagtcacagatcctggcggatttcatcgtggaacggaccaggccttgctccgatcagccggagcctcctgtggaggaggtctggatagccctaaccaacggagcatgcaacgctttcggtgcgtctttcgccatctccttcatatctcggtcggctatcacttcgcctattgggcggtccgcgtcattcgcagctcggttggaattcccgaccaccaataacaccgccgagtacgaggccattatgctggcccttcgcaaagcacgggcaatgggcgcccagtgcctcgtgatccacacagactcgcaggttgtcgccgggcatatcgacaagtcatatcaagctcgcagcccggagctcgccaagtacctggaagcgtttcgcaaggccgaggcttgctttcggggcatcacagtgtccggagtcccccgagccacgatagcggacgtcgatgccctggcaaaggcggccgccggtagtacgctgctgccttcgcacgtactctacgaggtattgcgctccccggccgcatccgacacagacgcgcctgccgccgaggtcgcagtgatcgacacgtagcccgattagcggctgcagataacagacatcttgacgggtcgcgccaagccttcttctgcaacggagcatcagcgctttcgccagcgcgcaaggggctacgtgctggtcgagggggccttttacgataggagtttgtgcacccgtcttgcggtgcgtcagccgaagccaaggggcggagctcctcaaagaacacgacgggcactgcgggatgcagctcgctctgcgaaccttggtagccaagacgctccggcaggggctgtactggcccacgatagcagctgacgcggagcacttggtatgccattgccaggggtgccagtggatgaggcgagcttcgcacatgccccccactaggctgacactgattccgcccgtgtggcccttcgcacggtggggcatagacatcgttgggctgctgcctcgggccccagggaacatgcgcttcgccttggtagcagttgagtacttgtacttctccaagtgggtaaaggcggaggccctagcatccataaccgcaaggacaatacaacgcttcgtttggcgcaacatcatgtgccggttcgaggtgcccaggcacctaacgatggacaatgggcatcagtttgacttcgacagcttcaagaacttctgcgaaggcatggtacagagctgtgtttcgcctccgtctgtcatccgtagagtaacgaagcggtggagcgggcgaatggcaacattctctcctccctcaacaagcgtctggtcgacgcttcgcgcggtacatgggcggatgaactccccgccgtacagtggggccactgcacctcggtgacctgggccaccggctttaccccgttcaagctccttttcggagacgaggccatgacccccgcggagatcaagggtcaatcactgcgagtcgtccttccggagcacgctggcgagcgcgaggtctcggtggaccacgtcgaggagatgaggatggctgcagccaagaaactacgaaaatacatcgtagcgacgcagctatggtataacaagaaagtggccccacgagcatttagtctgagcgaggccgtcctaaggcgcgccctgagccccagcaagctacagaacaaatgggaaagccccttcctggtggcgggaaccggcacatgcggagcttgtcacctgacggagctcgatgggacccctctcccgtgctcatggaatgcttacctcctcaaatggtattgcatc

SEQ ID NO: 78694 - DNA, 586 bp, Oryza sativa
  Clone ID: PAT_MRT4530_78476C.1
aaggtcatccttggtggtgctatgtcagtggatgaagtgcaggactgtgtttcccaacttatatcgtataaaggatattttggccgaggagggtgttgtgggaaagacagacttagagccttatcttcttgctgtattgagtctgaagctctggagacagtcgaatgcttaataaaaagtacagtgaatgagctgattgaaccagttgatagagatccagtcatttttgttctggacactaatgtgcagatgcttccttgggaaaacttgcctgcactaaggaatcaagaaatttatcgcatgccatcaattggaagtgtctttctagctttgactagaagtaataattattggaaagatgcccgtgttatagctcctccttttcctgtcattgaccctttcaacgcattttatctgttgaatcctagtggagacctgagcagtacacaagaagaatttgatcagatgtttaagaactacgaatggaagggaaaggctgggtctgctccaacagctgaagagctggcgttggccttgaggaatcatgatcttttcctttattttggccctggttgtggtactcagt

SEQ ID NO: 78695 - DNA, 426 bp, Oryza sativa
  Clone ID: PAT_MRT4530_78477C.1
ccacaaaaaatctgggctggttggctccaaacagggggggaggtctaaagggggcgggcagaaaaaatttccaaaagctttccccagtggagggtctgttgcagtaagcttgtcccagtccaacaaagggttttataaacagttaatcctttttttgccctaaaaaaaagagctgggttccccccccatatcccagggtcctaaagcaaaaacccccctaaagggtccacaaaattgagccccatgcctaaacaagcccaggatcacagaagggatggaaaaaaaccacctgatgcaaagggtttggttaggactaccggttaaaaaagcagcaaacaagggggaaaacctcgcatttgcaggcctgaacaggcctaattttttcctttggacagggggaccagctaatctaatctaatctaattt

SEQ ID NO: 78696 - DNA, 1085 bp, Oryza sativa
  Clone ID: PAT_MRT4530_78478C.1
atggtggggccccacgtatcatgctcacccctcctcttcttcttcctcctctctctccccaatccccatctctcctctcttcgtctctctcctctgctctctccaggcgacggagaggtagcggcacgtggcggccagcggccggcgggagaggaggaagcggtgcgcagcggcggaggcagggctctggcggttgtgggcggaagaggaatcggcgacgggaggtggctctggctgcggcggtcgcggtcgctgcacgtgctcgaccccttcgcggccgctgccgcggccgccgctgccgaggctctgtccggggaggccgccatcgccgcgagacatggaggaatcatggctggggccatggtaatgccttctcttggggtacgaatgtacgatttaactgaccaacacattgaggcagctctgacaaacctgattgctggtctggaatcagaatacaaatttgaagtaaatccagtgctcatcaaggtcatccttggtgttgctatgtcagtggatgaagtgcaggactgtgtttctcaacttatatcgtgtaaaggctattttggccgaggagggtgttgtgggaaagacagacttagagccttctcttcttgctgtattgagtctgaagctctggagacagtcgaatgcttaataaaaagtacaatgaatgagctgagtgaaccagttgatagagatccagtcatttttgttctcgaggaacctgctgcggccacggccacgaccacgagtccacgacgacacttccgctcccgagatactgccacgtagcgagccctccgcctccagtccacgccggggtcgcgggcttgggcgacgagcagcaattggagcagctggcgagggtgctctcctcgctgggtacaaacgagatggccttcgcggcgccgctcctcgccaactcagcgttgctcgcggtgtggacagggtcgatcaccgtcttcgcggctcccgacgtcttcctccgctcctcttgcaccatgtgctcgcgctgccatgtcctactggagcacatcgccctgggagagaggaggaagaataggaagggtgagttctactga

SEQ ID NO: 78697 - DNA, 6482 bp, Oryza sativa
  Clone ID: PAT_MRT4530_78479C.1
gggtagtccgcccccgctttcctcctaaattacctcaccatcccgcccttactctacggccctatctcgctgattcccacctacgttgtgccaatatcgatgtttcgaccaaccagtcgacgaagtgtgaatctgccctctcatctcctagtgttggagcgcaagcagtagctgcctccgccgccacccgacgcggccacggtccgcctgctcgctaagctgttcttccgcttcctgttccgcgcatttctggtactcccgctgctaatgcgaaccaacacaagttcagatgacgccggctgcagtgcccaaatgttctacgtttacgccctcctcctttatagtttcccggtgatataggcgaggatggccctgaagacctattgcgttctctttcaccgatgtctatcggtgtgatgtctcatttcgtgcaaactttaaacccgccccgcggcgtacgccgctgccaatccaaatacgcttcaggctgcggaataaatcctcataatactaaagtctagctgggctgcaactgtgagactagtctccctccttactgattctggcatggctggcgatcagtcacagtgacgcagtgagcactagcttccactgctcgcatcgcttgtcatcatcatcagttcatcaccaatggccaccgtcgaggtccaagcagtcgccgccgcgcctagtctggcggcggaggaggctccggccgtggtggaggctgtccaggaccaggagccggtcgtcgccgccgttgaggaagaagaagccaccgccgccgccgctgcggctgcggctgcgcaggtcgaagagacaaagccggcagatgatcaggctgcggctgctccggcggagactgtggctgaggccgaggcagaggccaaagaggcagagcctgcagccgccgaggaggccgagccggaggcggagacggcgccgccggcggcgatcgccgaggccgaggcaggtgaggcgaaagaaccggagccagaggcagaggcagaggcggcggccgctcccgtcgaagaagctgctgcggcgcccgtcgaggtggcggaggaggctgaggcggcgccaccggccgcacccgaggtggctgccgtcgaggccaccgagtgagctggcgagagatggcgagccggagatgaagctgatggctgccggcggcgtcggcggcggcggcggcgtacgtgtgtgttgtgtaatgaattgggcaccaataaaattttgtcatgttggctaccgggcacagtgtcagaaggtgctcacttggcagctcatacctggccttggagctcgcaaccgtatatcttctccgcctgtttcgtgggttcaaccttctaaatcctcgaagcagtctgggctttctaataagaagaacaaattgaaacactctgatgaccatatatcttttgtggcatacctggattcgctagggtttctttgcaagtcatcatcacagtaggtgaatgcagtttggacgaacttatatgaaggcgcaacaaccaaatattcatcaaagatgaccaagttgtaatcagctctggatcagattaacacggcgtgtacttgacgttcccgcgcttccacatcgccaaactcaccgcagcggacgccccctcaacatccaggaagatcaacgcaagctgcggtgtcttcaatcgacgtcgcctccaccgcggatgacctctaccactgttgcggctgctccctgatacggcgaagggcaatgatagcgttaacacttcatataatgacacatctcatgtccaaaattgaaataatacttgtcacactttacaatatttgatgtttagatgtggcatgctggggttccaaacaaagttgccacgggtaaagggtgcatgccagtatttctagacgaaaatcatgcaactgtctgaactaataaaaatctattcaatttacatcgcaatagaaatctaaagaaagtaaattggaagaaatgacaactattcataataacatagacaatggaagtgaacatcgcgtgagaatgttacgtgctattatcgtgaagctcttgtctgtatcgatagtttatagcaggaaattcgaagcattaacaaatcgattagtgctagtgaacataagtgattacagaagatgtaaggatgcgaagtacgatgatgatgttctcgtagctccgcgtgtatactaattaattacagtatagagaaatacattagggaaaaatgaataaaattcaatcttagattaagaaatattaaattataaataaattgaatctcgaggcactatgttttgtgtagaaatgcaaaagaggatcacaaacattctgttgaataaaatatactgttcaaaggagtattatttggagagatcgagggtccttgttagaaaggcacgtgtgcttcgtacatgtggagtgcaaagtataagcagctgccttgagtctttatctgaagccatatctttactgcgagacatcccactggattcatctcaaggcaatgcacctgcaatccatcaattagctattgcatactgcctgcatgcacattgtgcgcaggaagccaatcttggtgcggaggtaatctttgatagcgctcagaatgtatttggcctgtggtcaaagatcaaaacttttggttactattctcctggtatgatatctcagcagccatcagaaaatcttgtaccacttctttgttctttggttgatttgttggcaatgaagagattgtggcctattgattcctttatttctacgacatgtgaaccttcctttcgaagggaatttggtttcggtggtagtgttcatgaggttgatagtgtcgcatcatctttggtttctgatgctactgtaaatgatcaatcaacctttctagctggctatctgtactttgatttatcagaaagacttctatcaagaggagaacttttccaggccttttcatacggaaaagaggccttgcatttacgcaagaagctcctaagaaagaaattcaaattcaattttggcaagtttacaagtggggaagctcaatgttctggagggcaaaactctgtttcacttgaagcatggggatcaacaataactgaaatttggccagattctaccagatcaactggaacaagagattctttccttactccttggactgtactccagtgctatcttgatagcattttgcaggttgctttgctgcatgaattgattggtaatggtgccgaagcagaagttttgttacgaacaggaaaggatatatcacaatttcaaggattgccggtttttggtgtccttttcgcatcagctttaggtcaaatataccgcaagagacagcaatgggacaccgcagagggcgagcttaaatatgccagggatcttcttgcacaaaatgctacattcatttcgtgcaagctctgcaagttaactctggatatatcacttgatgtgcaagctggagatctattttggagtctatatgagaaagactttcagaaacagtcagcaggcaatttgtctaatgctctaggcatgtatcagtctgccctggataaactgaacggcaccaaattggaatctcctgttgactcatatgataagcttaaaactacttgcattatctgcagcaaatatgggaaagaaccattagctgcaaatgatggagtgttaccttcatgtactgtatgtgcaaattttagtcaggcttccggtgatcactcgaatgagtttacggcattaaaatttctgaaacataaggattctgaatgttgtccaccattggatgttaaagttaaaaggacaaccagaaattcatcacgtgggaatgatgtaatgtcttaatatttatgcaacttctttttttttatagtgagggctttatttgaactttagtatgtacaacaaatttgattttagtaagacccacctcttttttaatcttgcagagataatcagtaaacagatactttggtccgtggaaaagcaaactgtatccttgatggcgttgaccagagcatagattacacatgcagtatatttggatgttggaattgcctttttgtgaatacactcaactctgggtccatccagaatattttgcaattcagatgggattgtgtttggcatcacaaccatgtgtctatcctgttaaaaatagagagggcagaaatattatatagtatgagtttgtttttgctcaagggcttcctttcagaacagtcaagggacatatgctgccgcttctgcagtgtacaaatgtctgatgttgttccttggttgctgaaagcttttgtgctgtccagagagaatccctcactttttcaggaggtttgcaggctacttgcatgtatattcttacttgcaacgattgattccacggctcaattacctttatactccagtggatctctctctttgaatcattgggctgcatactttcatcagaattctgttggaacctatctcgattgccagtactttgctggcttaaaatcattactcagaaaaatgactcgaaggttttcatcagcagacataggacatcttgagatacatataaaagaattcttccataagcttcctgatgtaccaattgtgtgcattagcatgcttgaaggtgattttgtgaatgttcttggggaaattcttcttctcccttcttattttcctgcttggatgatgctttcgaggtttgattcaacaaacaaacctattacaatgcttttgccagtggatgctatttctaaagaaacccaacatgaagattcctgtaccaaagaactggacaatctaatgagagccacagataagaattggcagtgcccttggggctacactataatagactacgtggctcctacttttagaaagatacttgaggagaactttatttccctctctagtgcaaccctcactctgaatgatggacaagcaaaccatgtaaagtggtggtcacatagaatgaagctcaacaaccaccttgataagatgctgaaagacatggaggaatcatggctggggccatggaaatgccttctcttggggtatgatttaactgaccaacacattgaggaagctctgacaaacctgattgctggtctggaatcagaattcaaatttgaagtaaatccagtgctcatcaaggtcatccttggtggtgctatgtcagtggatgaagtgcaggactgtgtttcccaacttatatcgtataaaggatattttggccgaggagggtgttgtgggaaagacagacttagagccttatcttcttgctgtattgagtctgaagctctggagacagtcgaatgcttaataaaaagtacagtgaatgagctgattgaaccagttgatagagatccagtcatttttgttctggacactaatgtgcagatatttcttcgagtccttgagatagtgttatggatgttttccttgactgttcggtctaatggtaggaatagatactgtggattcgatatcatttgtctcaagcctgtgttggtccagatgcttccttgggaaaacttgcctgcactaaggaatcaagaaatttatcgcatgccatcaattggaagtgtctttctagctttgactagaagtaataattattggaaagatgcccgtgttatagctcctccttttcctgtcattgaccctttcaacgcattttatctgttgaatcctagtggagacctgagcagtacacaagaagaatttgatcagatgtttaagaactacgaatggaagggaaaggctgggtatgctccaacagctgaagagctggtgttggccttgaggaatcatgatcttttcctttattttggtcatggaagtggaactcagtatgtctctggaaaggaaattgagaaattagataattgcgcagctgctcttcttatgggttgcagtagtggaacattgcgttgcaaagggtgttatgctcctcaaggagcccctttatcatatttatctgctggttctccagctgttatcgcaaatctctgggatgtgtcagataaggatattgatcgattcagcaaagcattgctcggttcatggttgcaagagaattttgtagcggccaaaaattgctcgaagtgttgccagctaacacgagaatttgaatccatgaccattgctgtggagggtaatggcaggccgaggcgaagaggcacacgagggaagaagtccgaacgaatgaataactgtaaagtgagcattcttggcaccgcattgcacgagctcgcatgtgcttgtgatgtttgtgatattcattcgccatctgggaatgtagatcaggcaagatggtgtgaattggcagatgccttcgatcgacggtttactagaagatctgctgtggaaatgctcatcgaccgtcgtgaagagatacaaatctttcttcttgcaagtatatacaagtaaatgattatattaatatatgctctgtagaatgtagttatgaacaaaattgtaatgttatgttacg

SEQ ID NO: 78698 - DNA, 422 bp, Oryza sativa
  Clone ID: PAT_MRT4530_7847C.1
ctgaaacatttaaatattttatgaaacatggtggagaatcggctatggaataatacccgtagaccggatgattagggtattggggtacattggtacgaggatctgcgtaatatgacatcaagcgaacacaaagacaaggattatactggttcaggccccttatcaggattgatatgaagaaaccacatattacgatgggaacagataaactcgatgataccgacgagatcgtagtcgatggactcaacgagatctcctgacgacttggctccacgtgctctagcttcgtaaactatggtggggatgccttttataccgtagatcatcttgatctccaagtacctgccactcatcgcagtactgttgtaattcattaagcattctgccgacatggaagccagtacattgagcaactgactgaa

SEQ ID NO: 78699 - DNA, 608 bp, Oryza sativa
  unsure (1)..(608): unsure at all n locations
  Clone ID: PAT_MRT4530_78480C.1
acgaggtggtggtcctgtacaagcgggcatggaaggtggtgtaccgaagcaancaactnctgntgaccaacttnntggantnggtggtngngnggacnattnttnatcnnatcnaaannacngncnccatcggnangttagccntnaatagtagncgtngnngnanncnanttantngtctngncgctactanngatcatctggncncngttcanttttncgtngggtgacgtnctttnnttanaggattcnnntctgcgctctnttgctnctggctctgcgagctngtgcttgcgacnngtagaagggntatttatatatatantntatttnanattttntatnttnntttnnananntntntgncctnntncnnntgttanatactnnnggttttttttnnttttttngcgtngtggncgttttnccntnntnntnnttttgnttangtttntntcttnntntatttttatntttgggtagtttattnntnttattggactttntatatngtntntngnnattgtnttttttngtanttntttnggngtnttntagatnnttntcnttntnntnnntnattgttngttttttnttnttggagtttt

SEQ ID NO: 78700 - DNA, 255 bp, Oryza sativa
  Clone ID: PAT_MRT4530_78481C.1
atgagatgggatgaagaggggtcgggtagaaggaggaggaggaagaaaggacaaagtcctgggcccaccatcccaggccggtcagaccggctatatgcggccggtcagaccgccggggtgctgccggtcagaccgggcccaagaagccggtcagaccgcgcatatagcgccggtcagaccgcctggcccccagccgactgtgcacagcccttgcacacgggtttcatcaagaggcttggtaaagatgtcggctag

SEQ ID NO: 78701 - DNA, 396 bp, Oryza sativa
  Clone ID: PAT_MRT4530_78482C.1
acgggcacaaccaaaatgcataattaacgataccattgggggatacattcttgtctagtaaaaaattaatttgctaaaaattaaaaaaaaacttcgatgttaaaaacttgaaaaaaaactttaaactttgcaacaatatggcaaaaggcttaatcaaaaaggctaatgcccaggtaaccatcggactcctcctggggcttttccttttttttttcctccttggcagccgatggagcaacaacaccactgtcgggggaaactggggcagcaacaacgaacttgctggggtctttaaaaaactccttgaacttataaaaatgggggtacaaaaatttggtctccaaaaaaaaaaaaaacaaatttttgtacccattgagaaaaatgtgtggtgcaaaa

SEQ ID NO: 78702 - DNA, 328 bp, Oryza sativa
  Clone ID: PAT_MRT4530_78483C.1
agaaaattgatccatgggaccatgggggcaaaatagttggggcacaaatttacatgttaaacccaaaccctaaacccatggataataaaacattggatatacctacggacatacataccccttttgatcacacccaccattgatgggacaaaggtgggtacatacatacgtacacacattttcccatacccccgtacatacatacctaattaaaaacccggaattaattaaaatcctagttgatgggatttttaaaggaacttgaggctggggaggatgtttttgtggaccggatccagggggggaacaaaccgggtttttaaggggc

SEQ ID NO: 78703 - DNA, 162 bp, Oryza sativa
  Clone ID: PAT_MRT4530_78484C.1
atgggcccctattgggcgaagtggctcggcccaattgtctggcgaagcctccggaagacacaacagcccgctgggccttctctcggtgaggccatggctttcgcccatgtggttgccttctcggccttcgtcacgcacctccggcttgaatctttcgtctag

SEQ ID NO: 78704 - DNA, 390 bp, Oryza sativa
  unsure (1)..(390): unsure at all n locations
  Clone ID: PAT_MRT4530_78485C.1
cggcgggatctttttaggaaccatttataattagctagcatgcccacgtagtaatcggaggaagaggaggaggaggctaccccctaaacctggatttggaattgcagggagcaaagggcggggtcgttgacccttttcctggcaagcacaacctgttgttgcaagcgcttgcagtaggcaatggccccctggatgaccccctccgactcggaccgggcgctgttgcatcgtttaaggggggggtcactcgttgccgaggagctcctcctcgtcggaaatgccggcgggggcgnnnncctcccggttgcggctgcaggccccggcggaggaccccccttgatcactccggaaaaggacttgcgctgggggaccctgcccgcgtgctcctcc

SEQ ID NO: 78705 - DNA, 480 bp, Oryza sativa
  Clone ID: PAT_MRT4530_78486C.1
caccagattattagctgcttcatcaccagctggatcaataactactgtctacatgaagtcaagacaacacaaggttttagcaaccgatgggggatttatttttgtgtgttttggaggatcaccaagctgggagcatggcagcgatcactatggctgcaaccaagaactgggggaagcaatgagctcatggtcctaaccaagtaagcagctggcagctgcactgttttactgtggtagtattgctctattctggttctgcattaccgatcttcatggctgtgaatagctaggaattttttaacagacaaatcgatcaccattgcccttctcttttccccttgagcattttggttaggtgataatggggaagtctgcactccgagagtgggactgggagcccatgccctttctgcagaacttatttgtctctgcacataataatatatcgtttaatttctttcaaaaaaaaaaaaaaaaaaa

SEQ ID NO: 78706 - DNA, 857 bp, Oryza sativa
  Clone ID: PAT_MRT4530_78487C.1
cggcacgagggagagaactagggccgcttttttttttttttttttttaaacaagcaaaagttcagttctctagcttattattgcaaccattaggaatagaggtaatttttcagccgctcatacagccatgctatactatgcagggcaagaagaacacaggtgcagagcagctgccattattcgcgagacacatcacacatacagagagttcgatcgatcggagttggttgatgagattagagataagataattagaacatgtccttgagtgtggggagcttcatctcgccgctggtggagagcgggatggtgaagttgccgacgatggggaggtcgatggtgaggccgacgtcgagctggtagtcgatgtcccagtcccggcccacgtccttcaccagcgagatgaggaagtcgtaggggatcttggccggtatctccagcttcgtcgtgtcgctcgccgcgatccaccccggatcgggcatcgtgccggacgccacaacgttgccggcgcacttgagggtgtaggtgagctcgcagatggggaggcggtggtcgtaggggttggagacgttgacgttgctgtgcacggtgatgcactcgcggctcatccccttgaacgacaagctgtccagcgacgcctccggctttgggatgtgcgcgatcttctccgccacgaaccctttcgccttgtccatcaagctcgacatggccgacgcacgctggagtgaaattatcttggatcgagaggagcaggaggccgtcccggccggctccttgctctcttcgattctttctcggatgctggttgggtggggtgcacagcaacgcgaaccctcgtgccgaattcctgcagcccg

SEQ ID NO: 78707 - DNA, 676 bp, Oryza sativa
  Clone ID: PAT_MRT4530_78488C.1
gtttaaagttgataagtcactcagtaggccatagattatgttgggaaaactagaaggttgataataaatactgaatgagcttgcctatgaaaaaaacccaaataatcattccaatgggaattttttttaaaaaaaatcgcactaccaaaaattgtgctcaaacttgtgtaagcattattggaaatatggacaaccatgtgtatagatgatcaaaatgatcaactacctcctaaaaaaaatctataccacactgaatagcacaagaaaaactggtaacaggtgaagtacctctgctagagggaaaattacttcatgccattcttcaagaatcaagtcttcaactgctactcaatctcatttcagttaacaagtccaaaaaagcatgttgctgacgcatatggaccaaagtgactggaagtcccaggaaagcgatcaggcgaaccagttatacatgagttgtttagggacatgccaagaattgatagagcatcattttatcacataagcaactccaatgacatttgcagctctggcaaccatatatctgttgcttcactaaatactaggagaccaaatggcttgccttttactttattgatcagtgtgaagtagttttcgattagtttcttggtagttctggtccaggtgcaatatgtttacatttgaggttctctta

SEQ ID NO: 78708 - DNA, 1092 bp, Oryza sativa
  Clone ID: PAT_MRT4530_78489C.1
tcaatctcttgtcctcaggccaacttgagcaactccacgagcaagtcgccggtcaagccgtcgtccgacttcccggtgccgccgctgccgaactcgttccggacgacgctctccagcgtccacccggtcttggccgcgaacgcctggttgacgcggcgcacgtcgacgcccgcgcgcgtcacgacggtccgcaccagcgcctccctcgccgcgctccagcgccgcgcgcaccgccctcgcgaagtgcctctcggggagctgcgcgcaccgcagcgccgcgcggaggatgcccgggaacgacgacgactcgcctcgccggccaccgccgccgccgctggtgtcgccgtccttcctcttcagcgcccgcgcgagctcctgcccgtacagccgcctgtacgacgcgagcaccgccctgagctggtcgccgctccggtggcgcagcagctgcaggacgctcctctggtccacccgcgccgcgctgatctccaccgcctcgtacagcgtcttggcgtcgcacatcgccatcgtcgcgtccacccggccgccatggtagccgctcccgctcgatcccaagaacgcgagaagaacctcgttgaggctgccgcttgtcctcgacgagacgtcgcgttcgaggctggcgctgtaccgggcctggtacgcctgcctgatcagcgcgacctcgccggagggccgcgtgcacacgacctcgacgagcacgtcgccgtcgatccgccgcccgaacagcgcgtccctggcgatgtctgcgtcgcggacgcacggctcgctagctctgaggcacgccaccctgatggcgatcgaaccagacaagattgaaatatgttttgacacaagaggatcagaagctgggattactgcaaaggtggtcttctgctgcgacagtagctggatgagatcttggcgatacatgctgctgtaagccctgcagatttgcttcatctcctggctgctccttgcggtgaagatctccaggaccggtctcgcattgttcggggaaacatttccagaaaagaattggttgaggtgtctgcagtcagcttcatatctcttggcaaaatctctaatcgaggccat

SEQ ID NO: 78709 - DNA, 101 bp, Oryza sativa
  Clone ID: PAT_MRT4530_7848C.1
atctcatagagatctacaagtatcatatagatcttgtctccattcgtgatggcaatgagaacgcgctctactccgtacacgggcatagaggactacggtga

SEQ ID NO: 78710 - DNA, 741 bp, Oryza sativa
  Clone ID: PAT_MRT4530_78490C.1
ggtctttagtccaagagcgtgacgcatgttcggtaccacgcgcacaaactgccgtgctcggcttctccatcgatcaccggcataggtgagccatgcaaagctcgccgggcgcccccaagctccggccaccccctataaaacccgccgctcctcaccgtcaccggcaagcacagcaaagcagcagcagcaaaggtaaggtaatatttgcagcatcgtctgaagaagcacaggagcaggggagatatggcggcgagcaaggggaacgcggcggcggcggcgtgcgcgctcgtgctggtgctgctggccgtgggcgcggaggcgcagggcggcggcgggggggagtgcgtgccgcagctgaacaggctgctggcgtgccgcgcgtacgcggtgcccggcgccggtgaccccagcgccgagtgctgcagcgcgctcagctccatctcccagggctgcgcctgcagcgccatcagcatcatgaacagcctgccttccagatgccacctcagccagatcaactgctctgcctaagacgagacgagagttaaccccggacgccatggaagaagaataatcaaggtgttgacgaagccgtcgttgtcttcgtgtctcgtttagtaaaatcttcagattgtactgcagttgctattgatgtcgatgaataataccagtaagtactatggaacaatcatgtaatgcccggttgctggttgattaacgatgacctcctttggctatcgtgcc

SEQ ID NO: 78711 - DNA, 203 bp, Oryza sativa
  Clone ID: PAT_MRT4530_78491C.1
ctgtgtggcaccctttcggcccatgtgttgaagctaaccccatggattcacccttggtgtgatattgaagcgtgcgatgctttgtgatcatgattactgggggtaagtactgcaacagcaaaaatgaacagtatgtatgtacaccatacatggagcattggctccataaataccatctttttctaaaaaaaaaaaaaaaaaaa

SEQ ID NO: 78712 - DNA, 436 bp, Oryza sativa
  Clone ID: PAT_MRT4530_78492C.1
cccacgcgtccgcccacgcgtccgcccacgcgtccgcggcaatttcgtggtgcacgttgtttagggggcaatcccggtgtgcactagcactgtagagcgagtacataggtagaggagctcatccatgatccatggtggagcttttgcagaggagtttttctctgatgacgtggcagctcggaaaacatgagcccttcagatctcagattgcagcagtaaggggttgtttggtttgcaatagcaccaagttgagaggttttgacaaggagcacatcacctagtagtgctcaaggaccaaacagatcacaggtaaatcatcatctccaagctaaacactgtcaggcagaatgcaatagtggattcgcatccaacattccaagttgcatttctgaaactctgaaacttgtgggcacatttggatgttctgaagaaaacc

SEQ ID NO: 78713 - DNA, 148 bp, Oryza sativa
  Clone ID: PAT_MRT4530_78493C.1
ccacaaccaccaccaacaccttctgacctacatggtaatcaaacaaggcgaacacttgaggaacacacatcgcggtacatagcgcccaaaacaccccctgcagctcatacacctctaatgagagcaccagctgcagcaaatactcctg

SEQ ID NO: 78714 - DNA, 2017 bp, Oryza sativa
  Clone ID: PAT_MRT4530_78494C.1
gcacgaggctagtctcgagtttttttttttttttttttttttttttaatttgtggcatgacagactaattatcggtcagccagacagatcgcaatagcaacagggtaggaggtgattatctccaccttgaactgaaattccaaacatcacacatgttttcagtaacacacaattgtgttgaacgaaaccgaacaagacttaaaaaagaagggatgacaatatactacaataaattgttggatccaataaaattatgactggacagtacacttgctatcatccgtgtgcgtggtagcttgagaaggagctatggtgtgcatcgaaggcggacgatgaacaagagtgaagctttctcccacatcagccgacccatagatttttcgcttgatgtagactgctatcctactatggcctcggctgtatgggaattacttcacaaacatgcagatatcatgctcttgaatagctcatgtagttacagcatgattcacttgcagcatctccaggattagtcttccatatagttcatagatcatacaacctcagatcttaatatgactccaccacagaagtgtttatacctcagatcttaatgatcttggcagccctgatcacaggattcgcgcgggcaatctcctccctgcccgcggttttataatcgaaggagcactcatgggtctcggaatgccggtggcgaggacagaagagctccccgcagcggcaccggaatccggtcaaaccgaccctcttgcggcacacgttgcaccggttaacaaacagcaccggagataatggctcggctaccgccgccacgaccacggcattagcatcggtggcggtggcttcggctagtttcctcttcttggaaacctctatgagaataccttcgcagttcttggctgagaattgaggagctgctgctgccgatgccgctgctgctgctgccggtggtgttggtggtgtcgattgcggaggcggtggttctgtcatttgtgctgttggtggcgatggggaggctgtggttggggaaggagaaggtgaggatgatgatgatggcttcaagatctcagcctcgtccttgttgagatcacagctctcctgcgccatcggatttaacgcggacgaacaaatcaagggaagtggaggcgaatcccaagcttggacaaccagatcaggacgaattgggcgtaggaacagcaagaaatggagtttgttgaggtaaataaaaggttcggaaatgggaaatcaatggctttttttttattccttgatcgaatcggtgcaggccttagacccaaaaccaaagaggaaaacgagatctacgcaggtagaaatcagagaaatattattcggaaaaaagaagggtaaaaattctagcttttcctgcaccaaatcaaacgtggaaatgaacagaaaatcgggctgaaatgtttacagagtaggaattttcccccctgatttaaacgcaagaacaaaaacacaaaatctacaacacgcaatcgagccaggagaagagaacacgcgcagatcagggggaaaaaacccaaaaaaaaaaaaaggacgaccttttcagctcataccaaacgcaccgaaccacggatttctccccaccgcccaaataaacccaaatcgaaaccgcgggagatggatcgccgccgcgccgcgccgcgccggctaagctgccggcgagggatcgaatttcgaaggagagaccaaagaacaagaaccaaaggattggggaaggaagaatccgaagaagaagaaaagctccgaaacaaatcggcgggaggggggctcccccggcggccgcgtggaatcgacaccgaatccgggcagattcgacggatcgcgccgcgggagagcgccgaattggggacggaattggcccgcggaggcgagcgcaggagggaggaggaacgggaaaggtgggagcttctgtgctggaggaggagagagaccgaggtgcgtctctgttgaggtcccgacctcgtgccgattcctcagcccggggatccac

SEQ ID NO: 78715 - DNA, 351 bp, Oryza sativa
  Clone ID: PAT_MRT4530_78495C.1
atggcgaagccgtcttccttcggcagatactcttcgccttgcacccttcgcctgggacacctctggcttgacaagatttggtcgaagggcctcatgctatccgccaacaagcccctcacgggaaagggtgagattggagcttcggccgagaccgtgcaaaccatgtggtatggtatgcggcgccccctttcgaccgatgctcctgccgaaacctacattgttcctgcgaataagaaacagtattgggctttcccttcatgggccttttttttttactgtgctgctcggttggtgggaatttaccatttcgcctacccttgcgacacgtggcgctgtattactggtgggtag

SEQ ID NO: 78716 - DNA, 710 bp, Oryza sativa
  Clone ID: PAT_MRT4530_78496C.1
cgacacagcagtttcgacttcactacgatgctaccccaactccaaaaggagcaaacataaacgatatcgatgaaggacatcagcctaagctaccaaggaaccagttcctgcacgcagctagcatcaacaatcctataaaaagattggagtgtgtcaccgttgccaagttttgtcgcacccctacaacgaagcagctccgactctacccagcagtacacaaataagaatgatgaacacccgccgggatcagaggcattgcaggagtccaccaatgctatcgttgcacgcggaaggttcttgctgctacgagaggtcaatgccagaacgacgcctccaagaagggaaacgacacctaatggcgtcgtcgtagtcatgctggcccatggcctagcaaggcttttaccaatgagtcccaatcaaaaccccacacaaccatcatgcacaacaaccatcgttggaccacagagggagagagagagagagaccggatctggccaaagggacactggccgcacaccgcctgcacggccccttccccgccgcctgtgccatccatcaccgctccagcctaccctgcggcaccgtcctcccattgcttatgtcatcgccgatgctgtcgcgccgtcatcgactagttccatgccggggccagacctggagccagatctggcgcgactgtgtcggatccgcgtcctccaccaccaccgcca

SEQ ID NO: 78717 - DNA, 400 bp, Oryza sativa
  unsure (1)..(400): unsure at all n locations
  Clone ID: PAT_MRT4530_78497C.1
gcagcagtaatacngacntcacntatagtggcgaanttgngtgtaccgggcccccccntcganggntcgacccacgcggtccggccgaggcaagttcctcgtcaaggccgnacgacgccgtctacgacgagctgggtcaagctcgccngacgccggcnaaggactgccgactgctacccnagctcccccgtcggacgagngaccttncccggttatggggacagtttctacttgccttccacttgcgnatcggctacttttggcaaggtgnaganntnttcaagggagggaggcaactaaccggcttcaaaagcggcccacaaaggaaaaagggattcaaagncaaaatngtcaaggggnccaggcccccaccattacttcaaacttttggatggcagga

SEQ ID NO: 78718 - DNA, 708 bp, Oryza sativa
  Clone ID: PAT_MRT4530_78498C.1
ctagtggatcccccgggctgcaggtagagccatcccagtgacattctccttacttttcgaaggaattcgtcactcttcagcatggagtgccatttgaagaagatctcggctggagtacaaatatgttatttacttacactgcttgtcctgtggatggagttgtttgagttaaaacaactataggatgtttggaggtccattgaaattatcataggttatttggaggccagagcttgttaagctaaccttgtagaactctggagatctctaagtagaatgttgagcagattagctgtttattattccgtgccatgagattagttccaaatgttcatccttcagctaaatagaagcacgaaattttatctggatttattgctgtaacttgcattgaagtaatcatgtttggaagtaagaactcctatcatatccttctcttagccttttcatttcagttgttctcttgatgtcatcatgctagtaattaatttagcttgtttcaaacacagcttgtagttggttatatcctagagaagtacatgttagttaatccttcagagttagtatagtgatagataatgttcatatgatagtatgtaagtgaacatcagtgctcaggcttatcagttgttttgtgtgcatttcccattgtgaaggtcagaccatgttacatgaaatcttccattcacatgcaccatcatgtgttca

SEQ ID NO: 78719 - DNA, 1453 bp, Oryza sativa
  Clone ID: PAT_MRT4530_78499C.1
cggacgcgtgggcggacgcgtgggggaagaagaaataatcaatggagtgttgggagaagaagccaaggaatctgggtggctcgctgccggtgcccaacgtgcaagacctcgccgcccgcccggaccacctcacgcccaccctcctccgccgctatcttcgcccgcaccacctgtccctgcccgccgacgaccaccatgccatggctatgatacctgtcgttgactttgccaggctcatcgatcaccatgaggaggccgccaagctgaggcacgcctgcgaggagtggggtttcttccaggtgatcaaccacggaatcgccgacgagacggtggaggagatgaagcgcgacgtcatggccttcttcaacctcccgctggccgacaaggcggcgttcgcgcagcagccggaatggatcgagggctacggccaggcgttcgtcacgtcggaggaccagacgctggactggtccgacctctacttcctcaccacgcagccgcccagctaccgcgatctccgcttctggccaccggagacatcctccaccttccgccgctccatggaccgctactccctcgagacgcagcgggtggccaccgagctcctccgagccatggcgcgcaacctgggcctgcgcgacgccgacaagatgacaaggctcgccgcggcgcagtccatgcggatgaactactacccgccatgcccggccaaggagagggacagggtcctgggcgtgtcgccgcactcggacgccgtggggctgacgctgctgctgcaggtgagcccggtgaaggggctgcagatcaggaggggcgacgactggatccccgtcgaccccatccccggcgcactggtggcgaacgtcggcgacgtggtcgagatggtgacgaacggcaggtacaagagcatcgagcaccgggtggtggtggacgcggcgcaggagcgggtgtccgtggcggcgttccacaacgccacgttcgggtcgacgtacggaccactggaggagatggtgggaggcggcgaggcgcgctaccggagcatcagcgtggaggactacgtcaggctcgtcgtctccagcaagctccagggcaagaacatcttggacgctgtcaagattattactacgacttaatttctcatcttatcatgcctgctgattaatcaatcaatcaatctccctggttggttggttgctgccgagtaaactattcatgccacttcaattattagtaggtaaaaaggatctatcatgcatactactttccgtttttattggagtaaggtttatataggagtacctttgaataaacaaacaaatctcgtctactttgatgtaaaggtttgttgtatatgaggtttgcttcattgtacgctacagttgcctgagtatacggctaatgtacatgtgtcttgctacataaacaattagtaattacaaggtacacaagctttagc

SEQ ID NO: 78720 - DNA, 900 bp, Oryza sativa
  unsure (1)..(900): unsure at all n locations
  Clone ID: PAT_MRT4530_7849C.1
agcgtgttgtatgaagtattacaaatcattttggataatgaacatttacgtgcgattgaaattcaggtctatggtgcagattattggaatgtcacgattgataatgcacccgcacaaacatgggattttactgaaatagcggttgaaaatgaaaaagtcgcgcgattaggttggaagccgtcattattatgcccagatgaacgataattaaaaatgtttctgaaatgatcggccgtagtctatacgttttacaagtcaaaaacaacaannnnnnnnnnnnnnnnnnnnnnnnnnnnnnnnnnnnnnnnnnnnnnnnnnnnnnnnnnnnnnnnnntcgctcactttttttaaaattcaaattagcttattgaaatataatagcgaaacggtgaaaaattggcataaacagaaaacgattttagcggattttgaaaaagcgttaaacgaggcatatagtcagttaagagagctattatcgacttttcgcttaactattgaagaacctaattttaacctgtgcattagaacgtgttttggattcgttacgctcacgaacttcagcaaaaataagtttaaattgtaaattgccttcgcaaacgtttagtgctcagcaacaagtccatgcattacagattgtgcgagaagcggtcattaatgctataaaacattcaaatgcaacccaaattgaagtgattgctgaaactaatcaagatggcgaacaatgtttaattgtacgcgataatggtaatggaatcgtgaatggcattgaaccagatgatcattatgggctgacgattatgaaagaaagagcggcacaattaaaaggcgaatttactattatcaatcgtggtgaggcggtgtacaagtaatggtaacattacccaataccttactttaagc

SEQ ID NO: 78721 - DNA, 825 bp, Oryza sativa
  Clone ID: PAT_MRT4530_784C.1
atgaaggcgtgcgcgagggcagcgggggagaggctccccctggtcggtgctcccgccaggcaacccctggctcggagttttgttaaggtcaacagattatcatctcaacatgagacgaagtctgtggtatcctgctcggtaagggtgtcagatgacaagacacaccgaatagaagccacggcagaacacatccttccagcaacaaatgatcatgtcatgaaagcaattgactcaattaacagggggcaagtgattgcggtgcccaccgatacgatttatggctttgcttgtgatgcatgctctgcagaagcagttaatcgtatatatgagatcaaaggacgcgtacagacacggcctcttgcaatctgtgttgctgatgtcccagacatatcacggtttgctgttgtggatcacctacctcatggcctgcttgatagtctacttcctgggcctgtcacagttgttttaaaacgaggtaacaacagtatattggagagatctcttaatcctggtttggaaagcattggagttcgtgtgccagattttgatttcattcgagccatttcccgtggtgctggaagtgcgcttgcacttacaagcgccaacttaagcgggcatcctagtagtgtcaacgtcaaagattttgaggatctgtggccacattgttcatatgtctttgatggtggaatcctcccttctgggcgtgctggttcaacaattgtggacctaataacaccaggagtctacaagatattgagagatggaagttcaaggcaggaaacgacagcggtgctcggcaagtttggctttgttgaagcttggtga

SEQ ID NO: 78722 - DNA, 779 bp, Oryza sativa
  Clone ID: PAT_MRT4530_78500C.1
acgaaaaaaatctcaagttcaaactacgaacttgcattgcccgaaggaatgcggttgcgatctaaggttttccacgtgtcccttcttgaaccagcaccaagaaacgccagactcgaaacacaggtacaagcagaagacgacgagagttacgacgtcgagaagatccagagtctaactcgtgggaacctcacgagaacctgaattgcccggagaagctcgagcagttccaccgacagaaccctgacctttctggaccagcaagtccggatcaatcgtcgaccagtcgacgccagcaagccagtcagggctaccaacgaccgcagaggacgactggggctgaccgcccgttgaggcttgggactccagtaccggagtagaagaagaggcgagggaagcctccgtcgtcgctgaaccccgcttgaaaagctcgtcggcccggctcttggccagacgcttgcggcgcatcaccgaaaggagcctttcctgaagctcgtcctcctcgcgctcgagggttttgtagtcctccagacttcggaagagggcggaagcaaagtcattcccgtcgcaagagaccttgcggtcaatacactccttacaacgcttggaacctgaaacaaccacgcaggaacgatggttacggaaacaattggaacaaggcatgggggaatttgaaccaaaaaccgcaatgtagacggacaaagcggattcagcagaacgtttttggtaagaacggcacgatcgggttttctgcactctgttagaaaacatggttgcggctg

SEQ ID NO: 78723 - DNA, 342 bp, Oryza sativa
  Clone ID: PAT_MRT4530_78501C.1
cctctaccattttttttgtttgcttctttttcaaacattttattggctttccacacatttaaaaattttttcctgggtgggcttcctgtttatgtattcttaacaaagggggtttgttcttcttttttattcctatgggtgtgggttcgtgttttctcccaacaactttttttgttttttttaaaaactacccctcattgatattatgattctataaaatcctctagcgatattataatgtttttaaaacacttcctttattttttttttattaaacccgccggcttggttatcttttaattatccccagcacctttggctttttttaattttttaaaaggg

SEQ ID NO: 78724 - DNA, 474 bp, Oryza sativa
  Clone ID: PAT_MRT4530_78502C.1
gaaaaaactagtcggataaataacagaattaaaacaaatacagagagaagagggggaacactcgcctcgcctagccttcttttgcggttttgttttgcgaagtggagattgtgcgagcgcactgatcaagcgacctatctctatatatcacgagtcgccgccttcacacaagatacgcgaaatcaatttagggtttgcctcttactctgtgctgcgccgtcgcttgtagactactccatcccgctcgtcggcgtgcaccggcgatcgggagagcaggtctccagaacctctgtcttcgacgtcctgcaccgggagaaggcgacagtaataaggtttttgggaagcgcttcgcacgactgctccctgttcgtccgtgacagctcgccttcctctccgctcgcgtgctgcgcgccttcgtcgacgcccgcaaccgcgagtagttcttgccgaacaaccggtctttccgccacctcg

SEQ ID NO: 78725 - DNA, 2919 bp, Oryza sativa
  Clone ID: PAT_MRT4530_78503C.1
atggcacggggctccgcaccgctcgagggtagcgtgctgccgccttcccgcatcgtgagcgagaggcaggccgggctgccgcgccgattcatgccggaatctgccaccggccgggaggtggtcgcgctgggcgagggacgcccggcgccgcattacccggggcggtccgtcttcttcctctctttcgcaatggcagggctggtcccgccattctcttctttcttcatggatgttctggagctttatgatctccagatggcgcacctcacccccaacgcggtaatgacgttggccatcttcgcgcacctatgcgagatgttcatcagggggctcacgggggccatggtgttcggcgactaccttcgtcgccggatcgcgccactccagcggcgcgcccggggcgcctgggagtacaccaggtccgaggactacatgaggacccaccaggggggcagatgggactgggcccctgaggacttcaagatggtggtccaacgggtgctgaatctcagctccgtggaggcatccctcatcccccaaggtgtcctccccctctgcagcgatccagagcgcgccaacatcctgaccatcatgcaggcggtcggggcgtcaggggagcgggctcctcgaggccacgatggcgcgggcgggagccgcaggggggaacaatctaccccgggagggggtcgtgcttctgggccccgtgacgggggcccggggggcagccgccctgccgacgcccgggggaagaggaaacaggaggataccccctccccatctcctccccgagggggcggggcggtgcgtgccagcagcaggcgcccggagggtgctgtgccgacgtcgcagcccgagggggagcgaaaaaagaagcggctccgcaagatggggggaccaaaccatgccggggaaacctcatctcccccccaaggtggtcgtttagccgacctcctcgcaggttcgtccccgcgcccactgtggccgtattcattctcccaaggcgagttttcacttacccgtttctttttgtcttctggtttttcttccgctttcagcgagattccgtcgcgcctccctcaccattccaagtccggccggtctgaggccgaggagacagcaaccgtggaggcccggaggcgggaagctgtccggcgagaagccgcggaccgcctccgggaagctgaggaggctgcccaggaagccgtccgggttcgccaggctgaggaggccgctcgggaggaggccagactccgccgggccgggaagtcagcccgggaggcagaggcgacgcgcgcacgccaggcggcctgccaagcccccgacccgactccgcccgaggcgacgacgacttccgaggccacccacgatgaggccgcgggcgcgccgctcggacccgacccttcgggcgacgttcgggacgagccagcctcgggggacgcccctgagtccggcacgtcgattggcgggccgagccgcacagcgcccacaccgaggcggctctctcctctgccttccgccgccccactgaacacagagcccctcctgcaggccctggccgccgcgaacacgacggtgctggacgggttaggtgcccagatggaggtcttgcaagcagagcgggcggagctcgacgcggcgtgggcgtgcgtcgatgaggggcggcgctcggtggaggccatggtggaggcgggccgcaaggcataccaccggcacgcctcagagctcgaggtccgtcggagggagctggcggagatcgccagggaggtggaggaggagcgggagactgccctcatcgccaccgccgtgctcaacgaggcgcgggacgatctccgccttcaatacgggagccgggtggcggagctagagaagaaactcgacaccgcccggggagtccttgacgccgccactgcacgggaacggcgggcgacggagaacgaggcggcgtcccggcggcgcgaagtggcccttaaggctcgcgccacggcgctggaagagcgcgcccgcgcgagggagagggacctggcggaccgcgagaccgccgtcactatccgggaggcaacggtggcggcgcacgaggccgcctgcgccgaagaggagtccgcactccgcctccgcgaggacgcgctcaccgagcgggagcgagctctcgaggaggccgaggccgcggcgcagcggctggcggacagcctgtccctccgcgaggcagcacgggaggagcaggcgcgccgtaatctggaaggcgccagcgccgagagggccgcactggatcagcgggccgctgagctcgaggcgcgggcgaaggagctggacgggagggcgcgcagcggcggggcggccgcgggcgacggcgatctagccgcccgcctcgcagctgccgaacacaccatcgccgatctgcagggcgcgctggactcgtccgccggggaggtcgaggccctccgcttggcgggcgaggtagggcccggcatgcttcgggacgccgtctcccatctagaccgcgccgggcggcaagcggccctctggggcgagcggaccgcgaagtacgccgccaaccaggggggcctcgcccagcgcctctcagagatggccgggactctccagcgcctccccgaggagctcgaggagacctcgcccggggggcagtggagcttgtactggcaagctaccaggccagggacccggacttctccccgtgggcagcgctggacgagttccctcccggaaccgaggacgatgcgcgcgcgcaggtccgggacgccgccgaccacatcgtccacagcttcgagggtacggcccctcggctcgcgttcgccctcgactccgacgaggagggcggcgacggtggtgtggacgacagcgaccacgaggccggcgacccgggagcctcgaagtgagcccccaggcccccgccaatcttaa

SEQ ID NO: 78726 - DNA, 3012 bp, Oryza sativa
  Clone ID: PAT_MRT4530_78504C.1
atggcacggggctccgctttgcttgatggtagcgtgctgccgccttcccgcatcgtgagcgagaggcaggccgggctgccgcgccgcttcatgccggaatctgccaccggccgggagatagttacgctgggcgagggacgcccagcgccatgctacccggggcggtccgtcttcttcctcccttttgcaatggcagggctggttccgccattttcttctttcttcatggatgttctggagttttacgatctccagatggcgcacctcacccccaacgcggtaatgacattggccatcttcgcgcacctgtgcgagatgttcatcgggtcggtgtcgccgccgtcggtggttggtggctgctacttccaaccgcgggggccggtgttgaaccgctacattccctgcgtcctccgcaagaagtgggatgactggaagagcgactggttctacacccccctcgccgacgaagcgcgcctccgacttccgagccagcccccggcgcaggcctccagctggcgggcgccggtagatctgggagatggctatgacgccgtcctcgaccgcctggcgggcctgcgatccctggggctcacaggggccatggtgtacggcgactatcttcgtcgccggatcgcgccactccagcggcgcacccggggtgcctgggagtacaccgggtccgaggactgtatgaggactcaccagggagtcagatgggactgggctcctgaggacttcaagatagtggtccaacgggtgctgaatctcagctccgtggaggcatccctcattcctcaaggagtcctccccctctgcagcgatccagaccgcgccttcatcctgaccattatgcaggcggtcggggcgtcggaggagcgggctcctcgaggccacgatggcgcgggcgggagccgcaggggggaacaatctaccccgggagggggtcgtgcttctgggccccgcgacaggggcccggggagcggccgccctgccgacgcccgggggaagaggaagcaggaaggaacccctcccccatctcctccccgagggggcggggcggcacgtgccagcagcaggcgcccggaggggccacgccgacgtcgcagcccgagggggagcggaagaagaaacggccccgcaagatgggggggacagaaccatctcggggaaaccttatttcccctccaaggtggtcgtttaaccgacctcctcgcagcgagatcccgtcgcgtccctcccgccatcccaagtccggccagtctgcgaccacagaggctcggaggcgggaatctgaccggcgagaagccgcggatcgcctacgggaagccgaggaggccgcccaggtggccgtccgagctcgccaagctgaagaagccactcgggaggaggccagacttcgccaggccgaggagacgacatcctccgaggcgacccgtgaaactgaccggcaagaggccgcggatcgccttcgagaagccgaggaagctgctcaggtggtcgtccgagctggccaagctgaagaagccgctcgggaggaggccagacttcgccaggccgaggcgacgacgacttccgaagcagctcgcgacgaggccgcgggcgcatcgctcgggcccactccctcgtgcgacgctcaggacaaaccaggccttggccgtcgctaacaccacggtgttggacgggttaagtgcccagatggaggccttgcaagcagagcgggtggagctcgacgccgcatgggcacgtgtcgaagaggggcgccgctcggtggaggccatggtggaggtgggccgcaaggcacaccgccggcacgtctcagagctcgaagttcgtcagaaggtgctgggggagatcgccaaggaggtggaggaggagcggggggctgccctcatcgccaccaccatgatgaacgaggcgcaggacaccctccgccttcaatacgggagctgggaggcggagttagggaaaaagctcgacgccgcccggggggtccttgacgctgccgctgcccgagaacggcgggcggcggagaccgaggtggcatcccggcggcgcgaagaagcccttgaggcccgtgccatggcgctagaagagcgtgcctgcgccgtggagagggacctggcggatcgcgaggccgtcgttgctattcgggaggtcacactggcggtgcacgaagccgcctgtgccgaagaagagtccgcgctccgcctccgcgaggacgcgctcaccgagcgggagcgagctctcgaggaggccgaggccgcgtcgcaacggctggtggacagcctgtccctccgcgaggctgcgcaagaggaacaagcgcgccgtaatctggaaggtgcccgcgccgagagggccgcgctgaaccagcgggccgctgagctcgaggcgcgggaggagctggacgcgagggcgcgcagctgcggggcggccgcgggcgaaagcgacttaaccgcccgcctcgcagctgccgaacacaccatcgccgatttgcagggcgcgctagactcgtccgccggggaggttgaggccctccgcttggcaggcgaggtagggcccggcatgcttcgggacgccgtctcccgtctagaccgcgccggccggcaggcgggcctctggggcgggcggactgcgaagtacgccgccaaccaggggggcctcgcccagcgcctctcggagatagccgggactctccaacggctccccgaggagctcgagaggacgattaagtcatcctcgagggatctcgcccgaggagcggtggagctcgtactggcgagttaccaagccagggatcccgacttctccccatggacggcgctggacgagttccctcccgggaccgaggatggcgcgcgcacgcaggtccgggacgccgccgaccatattgtccacagcttcgagggttcggcccctcggctcgcgtttgccctcaacttcgacgaggaggacgatgacggcggagtgggcgacagtggcgacgaggctggcgacccgggtgcatcggagtga

SEQ ID NO: 78727 - DNA, 1630 bp, Oryza sativa
  Clone ID: PAT_MRT4530_78505C.1
atggtgggctccgatggcgacggcgacggcggcggaggggaagcacacgcgccggcggcgcccgcgcaccaccaccgccggcccccgcgcccgcggggaggcagcggggccatcgtcgagggcttcgcggcggcgctccgtcgcaggatccgctcgggggccgcggcggccgcgcgggccagcttcgggggcgactccggggacgaggccgcctccggggagccctcctcgtcctcgtcctcgtccccgtcccgccgccgtggcggcgactccaacggggcggaggcgtcctccgccgccgggggcggtggtggccgtggcggcggtggggacttctccgcgttcacgttccgcgcggcggcgccggtgcaccgcaaggccaaggagagccccctcagctccgacgccatcttcaagcagtatggcttattaataagagctgggttttggtttaatgataaatcattgcgggactggccacttctaatgtgttgtcttagtctgcctgctttccccctgggtgcatttgcagttgaaaagttggcatttaacaatgttattactgatgctgttgctacctgcctccatatcttcctttcaacaaccgaaattgtatatccagtgcttgtgattcttaagtgtgattctgcagttttgtctggctttttgttgatatttattgcctgtattgtttggctgaagcttgtatcttttgcacatacaaaccatgatataaggcaactgaccatgggcggcaagaaggttgataatgaactaagcacagttgacatggataatttacaacctccaactttagggaatctaatatacttcatgatggctcctacactctgttatcagccaagctatccccgaacttcatgtgttagaaaaggttggctgattcgtcaaattattctgtacttgatctttactggtcttcaaggcttcattattgagcaatacataaatccaattgttgtgaattctcagcatccattgaaaggaggactcctaaatgctgtagagactgttttgaaactctcattaccaaatgtttacctgtggctttgcatgttctatgcttttttccatctctggttaagtatacttgctgagattcttcgatttggtgacccaaatgtgccttctcctgtactatcatgatgtgatgtaacaggattgagaaggcaatgataaatgcgtgttagccactctttttgcctctgtttcattttgtaccagcagaagcagacgcattaaactacttgctagcgctaaaacaccttaattacgaatggtttggcccagccgaccttcctattactctactttcttggctgtggtgtaaatttagtttttaacttgtggctaaccgcaggaatgcctgtagataagcatttgtcagtctggctggcgacgttctccttattaatgtgtagatgtagaactgtttccgaaaactatatatcttgaaattgttttaccacgaggaataaaaaggcaagataaagcttagttggtcacagtctagaaaggataagagtcgtggatgtacgatttcgtctgccatatatcacgctcatattggtacaggtaactttgtcgctaaaaaaaaaaaaaaaaaaaa

SEQ ID NO: 78728 - DNA, 3811 bp, Oryza sativa
  Clone ID: PAT_MRT4530_78506C.1
atggcttccagcggcggcggcggcctgcgtcacagcaacagcagccgcctctcgcgcatgtcctactccggcgaggacggccgcgctcaggcccccggcggcggcggcgaccggccgatggtgacgttcgcccgccgcacccactcggggcgctacgtgagctactcccgcgacgacctcgacagcgagctcggcaacagcggcgacatgtcgccggagtctgggcaggagttcctcaactaccacgtgacgatcccggcgacgccggacaaccagccgatggacccggccatctcggcgcgcgtggaggagcagtacgtctccaactcgctcttcaccggcggcttcaacagcgtcacgcgggcgcacctcatggacaaggtgatcgagtcggaggccagccacccgcagatggccggcgccaagggctcctcctgcgccatcaacggctgcgacgccaaggtcatgagcgacgagcgcggcgacgacatcctcccctgcgagtgcgacttcaagatctgcgccgactgcttcgccgacgccgtcaagaacggcggcgcctgccccggctgcaaggacccctacaaggccaccgagctcgacgacgtggtcggtgcgaggccgacgctgtcgctgcctccgccgcccggtggcttgccggcgtcgaggatggagaggcggctgtcgataatgcggtcgcagaaggccatgaccaggagccagaccggcgattgggatcacaatcggtggctgttcgagaccaaggggacatacgggtatggcaatgccatttggcccaaggagaacgaggtcgacaatggcggtggcggtggcggaggcggcgggctgggtggaggcgacggccagccggcagagttcacgagcaagccatggaggccgctcactcgcaagctcaagattcctgcgggtgtccttagcccatacaggcttcttattcttattcgtatggctgttcttggtctattccttgcatggagaattaagcacaagaatgaggatgcaatgtggctatggggcatgtctgttgtttgcgaactctggtttggcctctcttggctcttggatcagctgccaaagttgtgccctgttaaccgagcaactgaccttgctgtcctgaaagataagtttgagaccccgacgccatcaaatcctaacggaagatctgacctgccggggctcgatatatttgtgtctactgctgatccagaaaaagaacccccattggtcacagcaaatactattctgtccatccttgctgctgattatcctgttgagaagctttcttgctatgtttctgatgatggaggcgctctcctgacatttgaagcaatggctgaagccgctagctttgcaaacatgtgggttcctttctgtcgcaaacatgacattgagcctcgcaacccagagagctactttaatctgaagagggacccatacaagaacaaggtccgttctgattttgtcaaggacagaagaagggtgaagagggagtacgacgagttcaaggtcaggatcaatagcttgcctgattcaatccgtcgccgctccgatgcatatcatgccagggaggaaatcaaggccatgaagcggcaacgagaggctgctctcgatgacgtggtggaggctgttaaaatccctaaagctacctggatggctgatggcacgcattggcctggtacctggattcagccctctgctgagcatgctcggggtgaccatgctggaataattcaggtaatgctgaaacctcctagtgatgatcccttgtatggaaccagcggtgaagaaggcagacctcttgatttcactgaggttgacatccgtttgccaatgttggtctatgtgtcccgagagaagcgtcctggttatgatcacaacaagaaggctggtgcgatgaatgcgttggtccgctcatctgctgtcatgtcaaatggacctttcatcctcaaccttgattgtgatcactatgtttacaactcacaagctttccgtgaaggcatgtgcttcatgatggatcgtggtggtgaccgtattggctatgtccagttccctcaacggtttgagggcattgatccatcagatcgatatgctaaccacaacactgtcttcttcgatgtcaacatgcgtgcacttgatggtatcatgggaccagtctacgtcggcactggatgtcttttccgtcgcatcgctttgtatggatttgacccaccgcgctccaaggaacatagtggttgctgcagctgttgcttcccccagaggcgcaaggttaaaacttccacagttgcatctgaagagaggcaggctttgagaatggcagattttgatgatgaggaaatgaacatgtcacaatttcccaagaagttcggtaattcaaacttcctcatcaactctatcccaattgctgaattccaagggcgacctcttgctgaccatcctggagtcaaaaatggacgtcctcctggtgctctcaccgtccctcgcgaccttctcgatgcttccacagttgctgaggctatcagtgtcatctcatgctggtatgaagataagactgagtggggtcagcgtgttggatggatctatggttcagtcacagaggatgtggtcactggttacaggatgcacaaccgtggatggaaatcagtttactgtgtcaccaaacgtgatgctttccgtggcactgcaccaatcaaccttactgaccgtcttcatcaggtgctccggtgggctactggttcagtggaaatcttcttctcccgcaacaatgcactacttgcaagccgaaagatgaagtttcttcagaggattgcatacctgaacgttggcatttaccccttcacatcaatcttcctcattgtctactgcttcctgccagccctgtccctcttctcgggacagttcattgtgcggacgctaaatgtgaccttcctgacctatctgctcgttatcactctgacaatgtgcatgcttgcggtgctcgagatcaagtggtcaggcatcagcttggaggaatggtggaggaatgagcagttctggctaatcggaggaactagcgcccaccttgctgctgttcttcagggtcttctcaaggtgattgctggtatcgagatctccttcacgctgacatccaaatctggaggagatgaagcagacgacgagtttgctgatctctacatcgtcaagtggacatcactcatgatcccaccgatcgtcatcatgatggttaacctgatcgccatcgctgtcgggttcagcaggacaatatacagtgaaatccctcagtggagcaagctcctcggcggcgtgttcttcagcttctgggtgctggctcacctttaccccttcgccaaggggctaatgggaaggagaggacgaacaccgaccatcgtcttcgtctggtctggcctccttgccatcaccatctcattgctgtgggttgccatcaatccgccgtcacagaactcgcagataggcggctccttcacattcccctgagcttcctcatgaacatgaaccttttgtatgatgaattataagagtggtcccagtagcagttgtccttgctgggggacaagtaaattctttacctatgtttacttaggtttttcttttttttttgggtcgaagatgatactattatgaatcatgcatgatactagttcttttgttcgtttttgtgccaaaatgagaagaggttctgtttggacctgaacatcaatcaattgcaaaaattcggagactaggaagttcagagttgcactcctgcacttctttggagctcttacattctgca

SEQ ID NO: 78729 - DNA, 3075 bp, Oryza sativa
  Clone ID: PAT_MRT4530_78507C.1
atggcacggggctccgctctgctcgatggtagcgtgctgccgccttcccgcatcgtgagcgagaggcaggctgggctgccgcgccgcttcatgccggaatctgccaccggccgggagatagtcacgctgggcgagggacgcccggcgccagactacccggggcggtccgtcttctttctcccctttgcaatggcagggctggttccgccattttcttctttcttcatggatgttctggagttctacgatctccagatggcgcacctcacccccaacgcggtgatgacattggccatcttcgcgcatctgtgcgagatgttcattggggtgcgcccatctcttcggctgttccggtggttcttcaccgtgcagtcggtgtcgccgccatcggtagttggtggctgctacttccagccacgggggccggtgctgaaccgctacatcccctgcgccctccgcaagaagtgggacgactggaagagcgactggttctacacccccctcgccgacgaagcgcgcctccgacttccgagccagcccccggcgcaggcctctagctggcgggcgccggtagatctgggggattgctatgacgccgtcctcgaccgcctggcgggcctgcgatcccaggggctcacaggggccatggtgtacggcgactacctccgtcgtcggattgcgccgctccagcggcacgctcggggcgcctgggagtacaccgggtccgaagacttcacgaggacccaccagggagtgagatgggactgggctcctgaggacttcaagatattggtccaacgggtgctgaatctcaactccgtggaggcgtccctcattccccaaggaatcctccccctctgcagcgatccagaccgcgcctccatcctgaccattatgatggcggtcggggcctcagaggagcgagctccaaagggccacaacggcgcaggcgggagccgcaggggggaacaatctaccccgggagggggtcgtgcttctgggtcccgcgacaggggcccggggagcagccgccctgccgacgcccgggggaagaggaagcagggaggaacacctcccccatctcctccccgagggggcggggcggtgcgtgccagcagcaggcgcccggagggggccgcgccgacatcgcagcccgagggggagcgcaagaagaaggggctccgcaagatgggggagacagaaccatctcggggaaatctcatttcccctccaaagtggtcgtttaaccgaccccctcgcagcgagatcccgtcgcatccctcccgccattccaagtccggccagtctgaggccgaggatccggcggccgcagaggcctgcaggcgggaatctgaccggcgagaggccgcggatcgcctacgggaagccgaggaggccgcccaggaggccgcccgggctcgccaggccgaggaaaccgctcgggaggaggccgcccgggcccgccaggccgaggaagccgctcgggaggaggccgcccgagcccgccaggccgaggaagccgctcgggagaaagccggatttcgccaggacgaggcgatggcgacttccgaggcagctcgcgacgaggccgcgggcgcgtcgcttgggcccactccctcgggcgacgctcaggcgacaacttccggggcagctggcgacgaggctgcgggcgcgtcgcttgggcccactccctcgggcgacgctcaggaccaaccgggtccgggggacatccccgagtccggcacttccatcggcggcccgagccgcgtggcatcctctccaaggcggctcttccccacgccttctatcgccccactgaacgcagagccccttctgcaggccttggccgccgcaaacaccacagtgttggatgggttaagtgcccaggtggaggccctgcaggcagagcgggcggagctcgacgccgcgtgggcgcgtgtcgaagaggggcgacgctcggtggaggccatggtggaggtgggccgtaaggctcaccgccggcacgtctcggagcttgaaacccgcaagaaggtgctggcggagatcgccaaggaagtggaggaggagcgggaggctgccctcattgccaccaccatgatgaacgaggcgcaggacaccctccgccttcaatacgggagctgggaggcggagctagggaagaagctcgacgccgcccagggggtgcttgacgctgccgctgcccgagaacagcgggcggcggagaccgaagcggcgtcccggcggcgcgaagaggcccttgaggcgcgcgccatggcgctggaagagcgcgcctgcgtcgtggagagggatctggcggaccgcgaggccgccgtcaccatccgtgaagcaacgctggcggcgcacgaggctgcctgcgccgaagaagagttcgcgctccgcctccgcgaggacgcgctcaccgagcgggagcgagctctcgagggggccgaggccgcggcgcaacagctggcggacagcctgtccctccgcgaggcagcgcaggaggagcaggcgcgccgtaatctggaagctgccgaacgcaccatcgccgatctgcagggcgcgctagactcgtccgccggggaggtcgaagccctccgcttggcaggcgaggtagggcccggcatgctttgggacgccgtctcccgcctagattgcgccggtcggcaagtgggcctctggagagggcggaccgtaaagtacgccgccaaccagggaggcctcgcccagcgcctctcgaagatggccggggctctccaacggctccccgaggagctcgagaagacaattaagtcatccacgagggacctcgcccaaggagcggtggagctcgtcctggtgagttaccaggccagggaccccaatttctctccatggatggcgctggatgagttccctcctgggaccgaggacaacgcgcgcgcgcaggtccgggatgccgccgaccatatcgtcgacagcttcgagggctcggcccctcggctcgcgttcgcccccaactccgacgaggagggcaatgccggtggtgcagacgacagtgaccacggggccggcgacccgggcgcatcggattga

SEQ ID NO: 78730 - DNA, 192 bp, Oryza sativa
  Clone ID: PAT_MRT4530_78508C.1
aaatataaagacaagtttatttctatttatatcacccaaagtttcacatgtcacatatgctgctatctgagcttatttttaacttccgaaccactatactgttaaaactcattacaaagacaccgccaaggtgtaatggtactagggtgcacatagtactaggtagataccatatctagatggcacgttaaa

SEQ ID NO: 78731 - DNA, 489 bp, Oryza sativa
  Clone ID: PAT_MRT4530_78509C.1
atgcacgcacggctcggcccgccgatcgacgtgccgaactcagggacgtcccccgaagctggctcgtcactgagcatcgcccgatgggtcgggcccgagcggtgcgcccgcggcctcgtcgtgggtggcttcaggaagtcgtcgtcagcatcgggcggagtcgggtcgggggcttggcagtcacgcccgcgtgcacgcgccagcctccgtctcccggatggactcctcggcccggtggagtctggcctcctcccaagcggcttcctcagcctggcgagcccggatagcctcctgggcagcttcctcggcttcccggaggcggtttgcggcttctcgccggtcggcttcccgcctccgggcctccgcggtcaccgtctcctcggcctcagaccggccggacttggaatggcgagaagggcgcgacgggatctcgctgatgcagaagaaaaaccagaagacgaaaaacgggtgagtgaaaacttgccttga

SEQ ID NO: 78732 - DNA, 1111 bp, Oryza sativa
  unsure (1)..(1111): unsure at all n locations
  Clone ID: PAT_MRT4530_7850C.1
gagaattccatnttgtatatagtatgatatatatggaagagcaattaacccatagaataantatanaaccatattgcgtcacactgcagcttccattggtcgtaggataggttgtagtacacgcagatcgantcgggatattgcatgtaagcatatttgcatggctctcaaacatgcaaataaatattttatttcaactgtatcttaagttgtactccctccgttttcataatgtaagtcattctagcattttttacatttatattgatgttaatgaatctagacatatatatctatatagattcattaacatcaatatgaatgtgggaaatactaaaatgatttacattgtgaaacggaggaagtagaagaaactctgtaggtacgataactaacaaaaatactgaattccttctgtttctttttatatgatgttggttgattagaagtaaagtaataaccaacgccttacagcttataatcatggcacagtagtacgcgatgggcatggatattggcctggattgcaggtcggatacggagtcggaagctgtccactttgaagcaacaccctcgcggcggaggccatcgccggcgcctccagcagcgccgccgccaagacgaacagcatcatgacgagcaccgccgccagccgccggccgccggtggtcctgagcgccaccgccatcgtcgatcctccgatgactgattttgtcacggatgtttgggtgcatctctgaattttctgcaggtttaatttaactatatggccgtttatataggacaagctgagctacgtaccaggagagatgtagcaaaaactccggcaaattttgtatatggatagttgtttgttatcaagttatcgtccccgatttatttagttaaatatcattttctatagacatgaaaagattcattgcaaacaattggaaattacaagtattttaagaaggttctatttgactttaagaaggttgaaagcaaatgtgatgaagttgatgaaagagtttgtgaagttctcaagatcttgagtgcttatgtaacaccgctccaaattgatatgagagatatatgtgagttaaatatttaatacccctcctctcaattt

SEQ ID NO: 78733 - DNA, 926 bp, Oryza sativa
  Clone ID: PAT_MRT4530_78510C.1
ccacgcgtccgggtcttcattgcttcattattgagcaatacataaatccaattgttgtgaattctcagcatccattgaaaggaggactcctaaatgctgtagagactgttttgaaactctcattaccaaatgtttacctgtggctttgcatgttctatgcttttttccatctctggttaagtatacttgctgagattcttcgatttggtgaccgttatttctacaaagattggtggaatgcaaaaacaattgatgagtattggagaaaatggaatatgcctgtacataaatgggttgttcgccatatttactttccttgcatgcgaaatggtatatcaaaggaagttgctgtcttgatatcattccttgtttctgccgtactccatgagatatgtgtcgctgttccctgccgcattctcaagttctgggcattcttaggaataatgctacagatcccccttatcgtattgacagcatacctcaaaagtaaattcagagatacaatggttggcaacatgatattttggttctttttctgcatctatgggcagccaatgtgccttctcctgtactatcatgatgtgatgaacaggattgagaaggcaagataaatgcgtgttgccatctttttcctctgtttcattttgtaccagcagaagcacaagcaataatccacatgctagccataaaacagcatgattcccaacggtgtggtacagccaaccttcctgttattctattttcttggctgtggtgtagatttagtttttaacttgtggctaaccgcaggaatgcctgtagataagcatctgtcattctgtctggcgacgttctccttattaatgtgtagatgtagaactgtttccgaaaactatatattcttgaatctgttatgcctcgacgaacataatccttttgttaagctt

SEQ ID NO: 78734 - DNA, 5145 bp, Oryza sativa
  Clone ID: PAT_MRT4530_78511C.1
atgggttccgtctccggcatcgacgacctcgtcttccctcccgggcaggcgtttcggttcggcagccttgacttcatcaccaacgatttcggcaagatctctctccttgactcggattcaatccagtcagggaaggaccaggtctcagccctgttcggtattccgaactcggccaagatctactccaagcttatctcgatcgagtcggcttcaaactactcggacgaaatcccatctattccaacaccaccagatcaagatgatggggcctacccgccaatcctaatgaaactccccgacgatttggctgccgttttcactacaagggtgtcttctccccgtaggcctaggcggaagtcggcgtcaacaccgatcatgcctagctccagggaagtcggcgtcatactccagccactcggcacgatttcgacagatcaactggaaggctacttcagctcccccggcgtcgactcacgaccaacagagatcgtggagtacgacgaattcggctaccgctatgacaaccgcgacctcgacgacttcgacgaaagctttgaagacaattacacccctctctacttcggcgtcttcatggccgacaacgagacagaagaacaacgccaagcccgagaaacaaaggcacgacggcgacgagcccgagatctcatcgggcagcaagacgtcgaggggacagcggtcttccgcacccctcaacagaacgctgtcgctgcgatcacccttctcgacaccctcctcaaggaagacgcactcaatcaagctgatcacgtcgtcaacatcttgaaccagaccaagaccatgatcgccgcttcggtcccggttaactctggaagcgtctgggccacgacgagcgatatgttcactcgcctcctgagcgacacagggagcgccgagttgaacggcctcgcccccccacctcgccagcgccctgtcgatcttcgcgatatgatcaaccagcgccgtgcagcacgaggtcaccgccattcaccagatcgctatgacaacgacgtggatggagtagctgcctttactaacgacctgcgtcgagtggattggccagccggcttcaagccgactggaatcgagaagtatgacggcaccactaatccggagtcttggcttaccgtctacggtctcgcaatccgcgcagcaggaggagacagtaaggccatggaaaactacttacctgtggccctagcggattctgcccggtcctggctccatggattaccccgtggcacgattggatcatgggcagaacttcgtgaccacttcatcgccaacttccagggcacctttgaacgccccggcacacagtttgatctctacaacgtcattcagaagtctagagaatcccttcgagattacatccgacgcttctctgaacaacgcaacaagatctccgacattaccgacaacgtcatcatcgccgctttcactaaaggaattcgtcacgaagatctagtcgacaagttcgggcgcaagcctcccaagacagtcaaacagatgttcgaaaaagccaacgagtatgccaaagccgaagacgccattatcgcatccaagcagtcgggtcctacttggaagccaaagaaagatgtgccgactacgggagggggtggaagtaacaatcacaaggaccgcaagcgtaagcccgaggaattcgtcgcgactactacacactcctcccgacaacgttcgcgcgtcaacacttttgacaagatcatgaactcccaatgtccgcatcatcccaactccaaccacgcagctaaggattgcttcgtctacaagcagtttgcagagcaatatgccaagaatgcacggaagacccctgacggagaacaaagtacgtcgaaaaagaaggatgatgatgatgatcccccgacaggttttcaggatcaccgtaaggagctcaaccacatctttggcggccctctggcttacgagtctaaaagaaagcaaaagctgactgaaagggagatcaatgctgtccagcccgatacgccccaatatcttcggtggtcggagataacaatcaagtttgaccgctcggatcaccctgaccgagtggtccacccggggcggtaccccctagtactagacccagtggttcacaacgtcaagcttcgcagatctctcatcgatggtggcagcgcactcaatatcctcttcgccaaaaccctggacgacatgcaaatccctcgcaccgagttaaagccgagtaatgcacccttccacggagtcatcccagggctatcggcaaaaccactcggccagatcactcttccggtcacttttggtactcgggagaacttccgcacagagaacgtctacttcgaagtcgctgatttcgagacagcgtatcacgccatactcggacgctcggcgttagccaagttcatggccgtcccgcactacacctacatgatgatgaagatgcccggtcctcgaggagtcatatccctacggagcgacatcaagcaagccgtcacatgtgacaaggaaagttgcgagatggctcaaacccgcgaggtcgcgattgctcgagaagacatccgactggctgcaaccacggcaagcgaaggagaagtgcctatggccaagatctcaaagagtggagaaagcgtagacaagaccaagaaaattcccctagatccttctgaccctactaaaactgttgtaataggcgccgaagaggtgattgagcactctttgcatgttaaggaagacgctaaacccatcaaacaacgactccgccgctttgcacaagacaggaaggacgcgatcaaggaggaattgaccaagctgttagcagcaggcttcatcaaagaagtccttcatcccgactggctggctaacccagtcctagttcggaagaagactgggcaatggcgcatgtgtgtcgattacaccgacctcaacaagtcttgccccaaagatcccttcgggctgcctcgcattgaccagatccgattgaaggaatccgactgcttgaagacttcattcattacgcccttcggggcctactgctacatcaccatgccttttggactaaagaacactggagcaacttatcaacgcatgatccaaagatgtttctcgactcaaattggtcacaatgttgaagcctatgtggatgatgtagtcgtcaagaccaagcagaaggatgatttgattacggatctggaagaaacctttgcgagcatccgtgcttttaggatgaaactaaacccagaaaaatgcaccttcggagtaccgtcagggaagctgcttggatttatggtgtctcacagaggcatacaggccaacccggagaaagtcaacgccatcctcaacatgaagccgccgagttcccagaaagacgttcaaaagctgactggatgcatggcggcgcttagccggtttgtctcacgactcggcgagcgggggatgcccttcttcaaactgttaaagaaaatagacaatttccagtggggacccgaagcacagaaagcctttgaagatttcaagaaacttctcactactccaccagttttggcctcaccacacccacaagagccgttattactatacgtatcggccacctctcaggttatgagcgcggtcctggttgtcgagcgtgaggaagaaggccatgttcagaaagtccagcgaccgatctacttcgttagcgatgttttggccaactccaagacgagataccctcaggttcagaagttgttgtacggtgttctaatcaccgtcaggaaattatcccactacttccaaggccactcggtcacggtggttacatcgtttccactcggcgatatactccataattgcgaagcaaacgggcgaatcgcaaaatgggccttagaactaatgtccttggatatatcgttcaagccacaaacttcgatcaaatcccaagctttagccgactttgtcgccaagtggaccgagtgccaaaaggacacgtccgaggaaaagatggagtattggactatgcattttgacgggtcaaagagactttcaggcactggggccggaggttttttaatttccccaactggagaaagactgagctatgtgttatggatacatttttttgcatctcacaacgtggcagaatacgaggctctccttcacggactacggatcgcaatctctttgggaatcaggcatctgatagttcgcggagattcacagttagttgtaaaccaagttatgaaagagtggtcctgcctcgacgacaatatgatcgcttatcgacaagaggtacgaaagttggaggataagttcgatggactcgaactcactcacgttctttggcacaataatgaagcagccgacagactagcgaattttggatccaaacgcgaagcggccccttttgatgtgttcgtcgaacatcttcatgagccaaccgtacccaagagagaaatagctgaagccgcggacactcaagacatagctatggtcgaaaccgactggagagagcctcttatacgatttgtgacctcccaagaactccctcaagataaagacgaagccgagcgaatttccaggagcagcaggctttatattattcatgagaccgagctgtacaggaaaagtccatcaggaattctgcaacgctgtgtatccttagaagaagggagacaattgctgaaggacatacattctggtatctgtggcaaccatgctgctgcacgcaccattgtcggcaaggcttaccggcaaggttttttctggcccaccgctgtgtccgatgccgacaagatcgtgcggacatgtgaaggttgtcaatttttcgccagacaaactcatctgccagcccaagagttgcaaaccatcccgctgtcctggctgtttgcggtttggggcttgacatggtcggcccgttcaaaaaggcagtcggcggttacacacatctctttgtggctatcgacaaattctccaagtgaattgaagctaaaccggtcatcacgatcacggcagacaaagctagagattttttcatcaacattgtgcatcagtttggggtacctaatcagattattactgataatggcactcaattcactggcggagtatttaaagatttttgtgaagacttcggcatcaaaattttctacgcctccgtag

SEQ ID NO: 78735 - DNA, 5051 bp, Oryza sativa
  Clone ID: PAT_MRT4530_78512C.1
gagtttctctaggtctacacgaccgggatcgaggccgccgggggtgacgacagggtcatggcgaacttcttccccatggccctgaagggacaggcgcggggttggctaatgaacttgccgcccgtgtcggtccactcttgggaggatttgtgccagcagttcaccatgaacttccaaggcacatatccgcgcccagatgaagaagcggacttgcatgcggtacagcgaagggacgatgagtctcttcgctcgtacattcagcggttctgtcaggtccgcaacaccataccatgcatccccgcacacgcggtgatctacacgttcaggggggggcgtgcggcacaaccgcatgctcgaaaagatcgcctccaaggagccccagaccactgcggagctttttcagctcgcggaccgtgtggctcgcaaggaggaggcctggacctggaactccaccggttccggtgtggcagcttcggccgcccccggatccgccgctcggtcaggacggcgggacaggaggaggaagaagaggtcggcccattccgacgacgagagacacgtcctcgccgtcgagggcgcttcgcgggccacccgaaaggggaggcctgcgagcgacaaatagaaggaggccggcgctccctgttgcaccgtgcacaacacctccctccacgacctcacggactgccgcgcggtcaaaagtttggctgagcggacgaggaagtgggaggaggagaggaggcaggagcgccgtgagggcaaggccccggcggctccctccggcaaccggcgaagtgaggccaagcagaaggcccccgccgaggacgtcgacgatgacgacgatgacctagggttccaggagcctggggccaccatcgccaccgtcgatggaggagcgtgcgctcacgcttctcgtcggagcctcaaggccatgaagcgagagcttctggccgcggcccctacccatgaggcgacgcggcgggcgcggtggtcggaggttgccctcaccttcgaccagaccgaccacccgccgtgcgttgcccggggaggacagatcgcgatggtggtttcccccaccgtttgcaacatgaagttggggcgtgtcctcatagacgggggtgcagccctcaacatcctttcccccgcagcctttgacgccatcaaggtcccggggatggtgcttcggccgtcccagccgattatcggtgtgacgccggggcacacttggccgctaggtcatatcgacctcccggtcaccttcggtggatccgccaacttccgcacggagcgggtgaacttcgatgtggcggacctcagtctgccttacaacgcggtcctgggaggcccgcgttggtgaagttcatggcggcggtccactatgcctacctccagatgaagatgccgggccccggtggccccatctctgtccatggcgacctcaaagtcgcgcttgcttgtatggagcagcgcgcggaccacctcgccgccgcgtccaagcccgagggtggcaacgagaggctcagcacctccgtcccagccgccccgaggcagcggatgatcacgtgcgacgaggtcccggaagacgcgctcgtctccttcctgcgggcaaacgccgacgtcttcgcctggagaccggcggacatgcccggggtccccaggaaggtgattgagcaccgtctcgccgtgcagacgggcgcaaggccggtccggcagaaagtgcggcggcaggccccggaacgtcaagccttcatccgcgaggaggtggcgcgacttctggaggccggattcatccgtgaggtcatccatccggagtggctggcgaacccgatcgtcgttcccaaggcgaacggcaagcttcggatgtgcatcgactacaccgatcttaacaaggcatgtcctaaggacccttaccccctgccacgcatagatcagattgttgactccaccgcggggtgcgaccttttgtgttttctagatgcatactctggttatcatcagattcgcatggctagggaggatgaggaaaaaattgcattcattacccctataggaacttattgttatacgacaatgcctttcgggttaaagaatgcaggtcctacttttcagcgtactactcgaatttctttgggtagccaaataggacgtaatgttgaggcctatgttgatgacttggttgtgaagacgcgcaaccaagagaccttactcttggatctagcggaaactttcgaaagtctccgctccgcccgcataaagctgaaccccgataagtgcgtgttcggcgtgcctgcgggctagcttctcgggttcttggtctctgcccgaggcatcgaggccaaccccgagaagatacgagctatagagcggatgcgccccccccagcaagcttagggatgtgcaatgcgtcaccggctgcatggccgttctaagtcggttcatatcgaggctgggagagaagacgctacccctatttaagctcctcaaacgctccgggccgtttatctggacggaggaggctgagcgggccttcactcagttgaaggcgtacctcagttctcccccagtcctggtcgccccggagccagatgagccattgctactctacctggcggaaaccccgcaggtggtcagcgcggcgttggttgtggagcgcgacgaggacaaccctcaccccgcgcatccccaccctgtgtcgactcgacccgggagagagcagggaggagaggcccccgagccgaacggcggcccgaggcccccgacggccggagctggcccttcgcacgtttgtccgacggtgccaggtgcccccgacccccaggatggccccggggccactgcgggaaggccgcgcctgtcgccctccgaccccgaggtcgtcggcacagaagccgagtgcgccccgcgcggcctctcggacgaagagcgccctggagatgcgcgaggccctccgggacgctaagacccgataccctcaggcccagaagatgctttacgctattctgatggcttcgaggaagttgcgccattattttcaggcgcatcgggtcacggtggttacgtcttaccccctcggccaaatcttgcataaccgagagggtactggacgggtggtgaaatgggcaatcgaactctctgagttcgatttgcactttgaaccacgccacgcgatcaagagccaggccctcgccgactttgtggcagagtggaccccggcccctgagcacgtctccgcccccgaggccagcttgggcccctcgcagctgcctcacaccgcctactgggtgatgcagttcgacggctccttgtctcttcaaggcaccggtgcggggggcacgttgacctcgccgagcttagacgtcctcagatacatggttcgcctcgattttcgggcgaccaataatatggcggagtacgagggactccttgcgggactcagagtggtagctggactggggatccgccgcctcctggtgttaggcgactcccagttggtcgtcaaccaggtctccaaggagtaccagtgctctgacccgcagatggacgcttacgtgcgccaggttcggcgtatggagcgccattttgacgggatagagcttcggcacgtgcccaggcgggataacgcggtcgccgacgagctctcaaggctcgcttcctcgtgagcccagaccccaccaggcgcctttgaagaaaggcttgcccagccgtcggtgcgacccgaccccctaggggagacggacgcgcctgaacggcccccgaggcccgtcgaagtccaggcctcgggacccgaggggagcgctcccagctcccttagattgattgcttggatcactgagatccaggcgtacctcacagataagactctacccgaggaccgcgaagggagtgaacgcgtccagcgcatctccaagcgctacgtgctggtggaagagaccctctatcggcgcgcggctaacggagtcctcctgaagtgcattcctcgggaacaaggtgtcgagcttcttgccgatatccatgaaggcgagtgcagagcccactccgcctcacgcaccttggttggcaaggcctttcgccagggtttctattggccgacggctctcaacgatgcggttgacctggtccggcggtgcagggcgtgccagttccacgcaaagcaaacccatcagccggcccaggccctgcagaccatacctctttcatggccgtttgctgtctgggggctcgatatcctaggtccgtttaggcgggccccgggcgggttcgaatatctgtatgtcgctgtcgacaagttcactaagtggcccgaggcttacccggtcatcaagatcgataagcactccgcgcttaaattcatcaggggcattactgctcggtttagggtgcctaatcatatcattacggataacggcacccagttcactagtgaactcttcggtgactactgcaaagatatgggcatcaagctctgcttcgcctctcccacccaccccagaagcaatggccaagtggagcgcgccaacgcagaaatcctcaagggcctcaaaaccaaaaccttcaacatcctcaagaagcacggcgactcgtggatcgaggagttgccagcggtgctctgggcgaaccgaaccacgccaagccgagcaaccggggaaacacctttcttcctcgtctacggcgcggaggcggttctcccatccgagctcaccctgaggtcccctcgggccaccatgtactgcgaggctgatcaagatcagcttcgcagagatgacctcgactacttggaagagcgaaggcggcgcgcggccctccgagccgcgcgctaccagcagagcctgcggtgctaccatcagcgccacgtccgggcccgatcactctgcgtcgacgacctcgtcctacgccgcgtccaaacgcgtgctggactgagcaaactctcaccaatgtgggagggtccgtatcgagtgatcggcgttccccggccgggctccgttcggctagccacgggtgacggcacagagctgcctaatccgtggaacatcgaacaccttcgtcgcttctacccc

SEQ ID NO: 78736 - DNA, 424 bp, Oryza sativa
  Clone ID: PAT_MRT4530_78513C.1
aaaggacttacattcaaatcgattttacacgacaaattttcaaaacatgcactataattatattgtaagttccaatgtaatatttttataatacacaatgtgtgtatgcaattagccctaaaagtaattaatttttttacatgaactagaagtaattaattgtccacttaaaagaggagatcagagagatacaaatatacttacatatataggagagagggcaatcacatagagtaagaaaaaaaataaatgaaattaggtaaacaacttggcaccatatttttagcgaacctgaaaattgtacagtacccaaataattaagaagccagattaattacttcagttattactactactacttcctccgtcgcataatacttgtctttttggcattcaaaatttatcccaaaataattgacacttg

SEQ ID NO: 78737 - DNA, 3399 bp, Oryza sativa
  Clone ID: PAT_MRT4530_78514C.1
ttaaacatggccatcatcttcacgctcgacaaccaggaccatgctcacaacctgagatgttgtcgacacatataacaacagcggctcttgtggatgcggtgaagataagactggtggagtagtgagaagtttcttgaagtcttcaaaggctttttgtgattcgggtccccactggaaattgtcagctttctttggcaacttgaaaaagagcatcccccactctccgagtcgtgaaacgaaccagctgagtgccaccatgcatccagttaacttttgaacgtcattctgggaactcggcggtttcatgttgaggatggcgttgattttctccgagttggcctgtatgcccctatgggacgccataaagccaagcaacttccctgacgttactccgaagatgcactttttagggtttaatttcatcttgaagaagcagatgctcgcaaaggtttcttctagatccgcgatcaaatcatccctctgcttggtcttgacgactacatcatcaacataagcttcaacgttacgaccaatctgagttgaaaagcatctctggatcatgcgttgataagttgctcctgcgttctttaatccaaaaggcatggtgatgtagcagtaggccccgaagggcgtgatgaatgaagtcttcaagtagttggactcctttaaatggatctgatgatatcctgagtagcaatccaaaaagctgagtagctcgcagccggccgttgagtcaactacctggtcaatgcgaggtaacccgaagggatctttgggacaagatttgttgaggtcggtgtaatcaacacacatacgccattgtcccgtcttcttcagaaccaggaccagattggccagccagtcgggatgtaggacttctttgatgaagcctgttgctaacagcttggtcagttcctccttgatcgcatccttcctatcctgtgcgaagcagcggagtcgttgctttatgggtttagcgtcttccttaacatgtaaagagtgctcaatcacctctttctccttcggttgctgtggatgcagccagtcggatttcctctcgagcgagcgtaatctcgcgggtctgggccatctcgcagctttccttgtggcaagtcctggcatcttcatcatcatgtaggtatagtgcgggacggccaagaacttggctaacaccgggcgttcgagtatagcatggtacgctgtctcaaaatcaacaacttcgaagcaaatgttctttgtgcgaaagttctcccaagtgccgaaagtaaccggcaaagtgatctggtcaagtggagtagaagatagcccggggatgactccgtgaaagggcgcattactcggcttcagttctgtgcgagggatctgcatgtcgtccagagtcttggcaaaaaggatattgagtgcgctgccaccatcgatgagggatcgtcggagcttgacgttacgaaccactaggtattcataagccaggggtccgccaaagatatggttgagttccttgcgtgagtcttggaaaccagtaggggcatcatcttcatcatccttcttcttcgacgtgctttgaactccgtcagtcggtttgcttgagttcttggcgtattgctgcttgcgatctttgtaattggtacttccactcccccttgtcgtcggcgtatctttctttggcttccaggtggtgcctgactgcttggatgcggtgacgacgtcttcagcttttgcgtactcattggccttttcaaacatctgcttgacagtcctgggaggcttgccgactaagagttcatgacgaatgcccttggtgaaggcggcaatgatgacgtcgtcggtgatatcagagatcttgttatgttgctcggaaaaacgtcggatgtaatcagggcgttcaaaagtgccctggaagttggcgatgaagtggtcgcgaagctccgcccaagatccgattgtgccacgggatagcccatgaagccaggaccgagcagagtctgctagggccacaggcagataatttgccatggctttgctgtctcctcctgttgtgcggatcgcgagcttctcgattccagtcggtttgaagccggtcggccaatccactcgacgcaggtcacttgtgaaggcagcatctccatccacatcgtcatcgtaatgatccagtgaatggtgggggatgtagcctcttgccgtgcggcgctggttgatagtttcgcaaagatcgacgggacgactgcgacgtggggagcgaggctgttcggctcgacgctccctgtgtcggtcaggaggcgagtggacatatcgttcgccatgatccctactcctgcggctagatccggcgccgacgacgctgaggcttggttggtgatagtcttgagatcgaagaggcggaactcggctgccagtcggcgtacggacacttgcagagttcaccgggactgaagcgacgatcatggtcttgatctgatttaagatgttgacgacgtgattggcctgattgagtgcatcttccttaaggagagtgtcgagaagggtgatcgctgcaaccgcgttctgctggggggtgcgaaaaaccgccgtcccttcgacgtcttgttgcccaataagttctcgtgctcgtcgcccggcctccaaggcgcgctgtcgccggtcctcagcctccttcgtagcccgttcgtgctcttgttgctcacgctgtagccgttctcgctcttgtgcttgacgctcctcctccagtcggcgacgttcggcttcttgtcgcacatgctgttcttctgcttctcgggcttgacgctgttcttccgtgtcattgtcggccatgaaaacgccgaagaagagaggcgcgtagttatcttcgtggccttcgtcgaagttgtcgaggttgcggtagtcgtagtggtagtcgaagtagtcgtactctacaatctccgttggtcgagaatcgacaccgggggagctgaggaagccatacaattcttccgtcgaaaccgtcccgagacgttggagtatgacgccgacttccctggagctaggctggatcgaagccgaggctggatctggcctaggcctacgggaagaagacgcccttgtggtgaagactgtggccaagtcgtcggggagactcatcaggattgagggataggccccattgtcttgatcaggtcgtgttgaagtagattggatctcgtccgactggtttgaagccgactcggttgagatgatcttggagtagatctcggccgagttcgggataccgaacggggcggagacctggcctccccccgactggttcggatccgagtcgaggagagaaatcttgccgaagtcgttggtgatgaagtcgaggctgccaaaccggaacgcctgcccgggagggaagacgaagtcgtcgatgccggagacgaaacccat

SEQ ID NO: 78738 - DNA, 5046 bp, Oryza sativa
  Clone ID: PAT_MRT4530_78515C.1
atggcgaatttcttccccatggccctgaagggtcaggcgcggggttggctaatgaacttgccacccgcgtcggtccactcttgggaggatttgtgccagcagttcaccatgaacttccagggcatatatccgcgcccaggcgaagaagcggacttgcatgcggtacagcgaagggacgatgagtctcttcgctcgtacattcagcggttctgtcaagtccgcaacaccataccgtgcatccccgcacacgcggtgatctacgcgtttagggggggcgcgcggcacaaccgcatgctcgagaagatcgcctccaaggagccccagaccaccgcgcagctttttgagctcgcggaccgtgtggctcgaaaggaggaggcctggacctggaactcctccggttctggtgtggcagctccggccgcccccgggaccgccgctcggtcagggcggcgggacaggaggaggaagaaggggtcggcccgtttcgacgacgagggtcacgtcctcgccgtcgagggcgcttcgcgggccccccgaaaggggaggcctgcgagcgacaaaaagaaggaggccggcgctcccagcagggagcgcccgaccggcaagtggtgtaccgtgcacaacacctccctccacgacctcgcggactgccgcgcggtcaaaagtttggctgagcggacgaggaagtgggaggaggagaagaggcaggagcgccgtgagggcaaaaccccggcggctcccgccagcaaccggcgaggtgaggccaagcagaaggccaccgccgaggacatcgacgatggcgacgatgacctggggttccaggagcctgaggccaccgtcgccaccgtcgatgggggagcgtgcgctcacgcttctcgccggagcctcaaggccatgaagcgagagcttctggccgcggcccctacccatgaggcgacgcggcgggcgcggtggtcggaggttgccctcaccttcgaccagaccgaccacccgccgtgcgttacccggggaggacagatcgcgatggtggtttcccccaccgtttgcaatgtgaagttggggcgtgtcctcatagacgggggtgcagccctcaacatcctttcccccacagcctttgaggccatcaaggccccggggatggtgctccggccgtcccagccgatcatcggtgtgacgccggggcacgcctggccgctgggtcatatcgacctcccggtcaccttcggtggttccgccaacttccgcacggagcgggtggacttcgatgtggcggacctcagtctgccctacaacgcggtcctggggaggcccgcgttggtgaagttcatggcggcggtccactacgcctatctccagatgaagatgccgggccccggtggccccatcaccgtccatggcgacctcaaagtcgagcttgcttgtatggagcagcgcgcggaccacctcgccgcggcgtccaagcccgcgggtggcgacgagaggctcagcacctccgtcccggccgccccaaggcagcggatggtcacgtgcgacgaggtcccggaagacgcgctcgtctccttcctgcgagcaaacgccgacgtcttcgcctggagaccggcagacatgcctggggtccccagggaggtgattgagcaccgtctcgccgtgcggccgggcgcaaggccggtccggcagaaagtgcggcggcaggccccggaacatcaagccttcatccgcgaggaggtggcgcgacttctggaggccggattcatccgtgaggtcatccatccggagtggctggcgaacccggtcgtcgttcccaaggccaacggcaagcttcggatgtgcatcgactacaccgaccttaacaaggcatgtcctaaggacccttaccccctgccacgcatagatcagattgtcgactccaccgcggggtgcgaccttttgtgttttctagatgcatactctggttatcatcagattcgcatggctagggaggatgaggaaaaaactgcattcattactcccataggaacttattgttatacgacgatgcctttcgggttaaagaacgcaggtcctacttttcagcgtactactcgaatttctttgggtagccagataggacgcaatgttgaggcctatgttgatgacttggttgtgaagacgcgcaaccaagagaccttactctcggatctagcgaaaactttcgaaagtctccgctccgcccgcataaagctgaaccccgataagtgcgtgttcggcgtgcctgcgggcaagcttctcgggttcttggtctctgcccgaggcatcgaggccaaccccgagaagatacgagctatagagcggatgcgcccccccagcaagcttacggatgtgcagtgcgtcaccggctgcatggccgccctaagtcggttcatatcgaggctgggagagaaggcgctacccctatttaagctcctcaaacgctccggaccgtttacctggacggaggaggctgagcgggccttcactcagttgaaggcgtacctcagttctcccccagtcctggtcgccccggagccagatgagccgttgctactctacctggcggcaaccccgcaggtggtcagcgcggcgttggtcgtggagcgcgacgaggacaaccctcactccgcgcatccctaccctgtgtcgactcgacccgggagagagcagggaggagaggcccccgagccgaacggcggcccaaggcccccgacggtcggagctggccctccgcctgcttgtccgacggtgccaggcgcccctgacccccaggatggccccggggccactgcgggaaggccgcgcctgtcgccctctgaccccgaggtcatcggcacagaagccgagtgtgccccgcgtggcctctcggtcgaagagcgccctggagatgcggcccctggcgaagaggattggccccgccgaaaggtgcagcggcctgtatacttcgttagcgaggccctccgggacgccaagacccgataccctcaggcccagaagatgctttacgctattctgatggcttcgaggaagttgcgccattatttccaggcgcatcgggtcacggtggttacgtcttaccccctcggccaaatcttgcataaccgagagggtactggacgggtggtgagatgggcaatcgaactctctgaattcgatttgcgctttgaaccacgccacgcgatcaagagccaggccctcgccgactttgtggcggagtggaccccagctcccgagcccgtctccgcccccgaggccagctcgggcccctcgcagctgcctcacaccgcctactggggcgccggtgcgggggtcacgttgacctcgccgagcggagacgtcctcagatacctggtccgcctcgactttcgggcgaccaacaatatggcggagtacgagggactccttgcgggactcagagtggcagctggactagggatccgccgcctcctggtgttaggtgactcccagttggtcgttaaccaggtctgtaaggagtaccggtgctctgacccgcagatggacgcttacgtgccccaggtgcggcgtatggagcgccatttcgacgggatagaacttcggcacgtgcccagacgggataacgcggtcgccgacgaactctcaaggctcgcttcctcgcgagcccagaccccaccgggcgcctttgaagaaaggcttgcccagccgtcggcgcgacctgaccccctaggggaaacggacgcgcctgaacggcccccgaggcccgtcggagtccaggcctcgggacccgaggggagcgctcccagctcccctagattgattgcttggatcactgagatccaggtgtacctcgcagataagactctacccgaggaccgcgaagggagtgaatgcgtccggcgcatctccaagcgctacgcgctggtggaagggaccctctatcggcgcgcggctaatggagtcctcctgaagtgcattcctcgggaacaaggcgtcgagcttctcgccgatgtccatgaaggcgagtgcggagcccactccgcctcacgcaccttggttggcaaggcctttcgccagggtttctattggccgacggctctcaacgatgcggtcgacctggtccggcggtgcagggcgtgccagtttcacgccaggcaaacccatcggccggcccaggccctgcagaccatacctctttcgtggccgtttgctgtctgggggctcgatatcctgggtccgttcaggcgggccccgggcgggttcgagtatctgtatgtcgctgtcgacaagttcactaagtggcccgaggcttatccggtcatcaagatcgataagcactccgcgcttaaattcatcaggggcatcactgctcggtttggggtgcccaaccgtatcattacggataacggcacccagttcactactgagctcttcggtgactactgcgaagacatgggcatcaagctctgcttcgcctcccccgcccaccccagaagcaatggccaagtggagcgcgccaacgcggaaatcctcaagggcctcaaaactaagaccttcaacatcctcaagaagcacagcgactcgtggatcgaggagctgccagcggtgctctgggcgaaccaaaccacgccaagccgagcaaccggggaaacgcctttcttcctcgtctacggcgcggaggcggtcctcccatctgagctcaccctgaggtcccctcgggtcaccatgtattgcgaggctgatcaagatcagtttcgccgagacgaccttgactatttggaagagcgaaggcggcgcgcggccctccgagccgcgcgctaccagcagagcctgcggcgctaccatcagcgccacgtccgggcccgatcactctgcgtcgacgacctcgtcctacgccgcgtccaaacgcgtgctggactgagcaagctctcaccaatgtggaagggtccgtatcgagtgatcggcgtcccccggccgggctccgttcggctggccacgggtgaaggcacagagctgcctaacccgtggaacatcgaacaccttcatcgcttctacccctag

SEQ ID NO: 78739 - DNA, 324 bp, Oryza sativa
  Clone ID: PAT_MRT4530_78516C.1
atgccccaaccgacaaagcccgtcgcaccgcaaaggcacacgcttggcatcaagaaggcgcttgtgcttgtgttctacgcctgtgatgggtcaagaccgattggattatgtgagtaccagctcgccaacattggccgcgccatcgcgggcaccaagaagaggtctctcaggacagccgtcgaggcggcgcggcggctgccgggcgagcagcacagcgcggcccacgcgatggcgacgtcgctgcacgagagggcgaggtctctgctcatggcgtgggtggcacagctcacggcggggccgagcccgagaggccctggccactag

SEQ ID NO: 78740 - DNA, 3198 bp, Oryza sativa
  Clone ID: PAT_MRT4530_78517C.1
atggcacggggctccgctttgcttgatggtagcgtgctgccgccttcccgcatcgtgagcgagaggcaggccgggctgccgcgccgcttcatgccggaatctgccaccggccgggagatagttacgctgggcgagggacgcccggcgccatgctacccggggcggtccgtcttcttcctcacttttgcaatggcagggctggttccgccattttcttctttcttcatggatgttctggagttttacgatctccagatggcgcacctcacccccaacgcggtaatgacattggccatcttcgcgcacctgtgcgagatgttcatcggggtgcgcccatcccttcggctgttccggtggttcttcaccgtacagtcggtgtcgccgccgtcggtggttggtggctgctacttccagccgcgggggccggtgttgaaccgctacattccctgcgtcctccgcaagaagtgggatgactggaagagcgactggttctacacacccctcgccgacgaagcgcgcctccgacttccgagccagcccccggcgcaggcctccagctggcgggcgccggtagatctgggagatggctatgacgccgtcctcgaccgcctggcgggcctgcgatcccaggggctcacaggggccatggtgttcggcgactaccttcgtcgccggattgcgccgctccagcggcgcgctcggggcgcctgggagtacaccgggtccgaagactacatgaggacccaccagggggtcagatgggactgggctcctgaggacttcaagatagtggtccaacgggtgctgaatctcagctctgtggaggcatccctcattcctcaaggagtcctccccctctgcagcgatccagaccgcgcctccatcctgaccatcatgcaggcggtcggggcgtcggaggagcgggctcctcgaggccacgatggcgcgggcgggagccgcaggggggaacaatctaccccgggagggggtcgtgcttctgggccccgcaacgggggcccggggagcggccgccctgccgacgcccgggggaagaggaagcaggaaggaacccctcccccatctcctccccgagggggcggggtggcacgtgccagcagcaggcgcccggagggggccacgccgacgtcgcagcccgagggggagcggaagaagaaacggccccacaagatggggggcacagaaccatcccggggaaaccttatttcccctccaaggtggtcgtttaaccgaccccctcgcagcgagatcccgtcgcgtccctcccgccattccaagtccggccagtctgaggccgaggacccggcgaccacagaggctcggaggcgggaatctgaccggcgagaagccgcggatcgcctacgggaagccgaggaggccgcccaggtggccgtccgagctcgccaagctgaagaagccgctcgggaggaggccagacttcgccaggccgaggcgacggcatcctccgaggcgacccgtgaaactgaccagcaagaggccgcggatcgccttcgagaagccgaggaagctgctcaggtggccgtccgagctcgccaaactgaagaagccgctcgggaggaggccagacttcgccaagccgaggcgacgacgacttccgaaacagctcgcgacgaggctgcgggcgcatcgcttgggcccactccctcgtgcgacgctcgggacaaaccaggtccgggggacatccccgagtccggcacgtccatcggcgggccaagccgcgcggcatcctcttcgaggcggctcttccccacgccttccgttgctccactgagcgcagaaccccttctgcaggccttggcagtcgcaaacaccatggtgttggacgggttaagtgcccaaatggaggccttgcaagcagagcgggtggagctcgacgccgcatgggcacgtgtcgaagaggggcgtcgctcggtggaggccatggtggaggtgggccgcaaggcacaccgccggcacgtctcagagctcgaagcccgtcggaaggtgctgggggagatcgccaaggaggtggaggaggagcggggggctgccctcatcgccaccaccgtgatgaacgaggcgcaggacaccctccgccttcaatacgggagctgggagacggagctagggaagaagctcgacgccgcccggggggtccttgacgctgccgctgcccgagaacggcgggcggcggagaccgaggtggcatcccggcggcgcgaagaagcccttgaggcccgtgccatggcgctggaagagcgtgcctgcgccgtggagagggacctggcggatcgcgaggccgccgttgccatccgggaggcaacgctgactgcgcacgaggccgcctgcgccgaagaggagtccgcgctccgcctccgcgaggacgcgctcaccgagcgggagcgagctctcgaggaggccgaggccgcggcgcaacggctggcggacagcctgtccctccgcgaggcagtgcgggaggagcaggcgcgccgtaatctggaagatgcccgcgccgagagggccgcgctgaaccagcgggccgctgagctcgaggcgcgggagaaggagctggacgcgagggcgcgcagtggcggggcggccgcgggtgaaagcgacttaaccgcccgcctcgcagctgccgaacacaccatcgccgatctgcagggcgcgctagactcgtctgccggggaggtcgaggccctccgcttggcaggcgaggtagggcccggcatgcttcgggacgccgtctcccgtctagaccgcgccggccggcaggcgggcctctggggcgggcggactgcgaagtacgccgccaaccagaggggcctcgcccagcgcctctcggagatagccgggactctccaacggctccccgaggagctcgagaggacgattaagtcatcctcgagggacctcgcccgaggagcggtggagctcgtactggcgagttaccaagccagggatcccgacttctccccatggacggcgctggacgagttccctcccgggaccgaggatggcgcgcgcgcgcaggtccgggacgccgccgaccatatcgtccacagcttcgagggttcggcccctcggctcgcgttcgccctcaactccgacgaggaggacgatgacggcggagtggacgacagtggcgacgaggctggcgacccgggcgcatcggagtga

SEQ ID NO: 78741 - DNA, 5875 bp, Oryza sativa
  Clone ID: PAT_MRT4530_78518C.1
atggccgaacgggcagtggcgcacaacctctctccgagcgctagcggtgacgacagtgagcagaacccgcgtcgtcgagctcgtactccaccgcccccctctcgccgaagtcttaggcgggaggaggcgctcgagggggtcgaaagatccgcaacttcgccgcccacgagcgatggagaaggacggcgagacggggagcgtcgcctcctcgtctacggcgatggcagcacgccccagggcgcgctccaagctgcgggcgcgctcttgcgtcacccgcccgttgtccccgatccagagactccagcccgatgttggctggatgacgtggccgacttggtcatgacggcgcagcagcgcctaggcgccggtgggcggtcctccgccaccaaggcctctggcgctgctaccgccggctccgtgtcgtcgaggcggagggcgcggcgagcggcagccgttacccgccgttcgtctgccattccctcgtcaactcctccgacccaagaagatgtgcgtagggggctggatgcccgcctcagtatcgagcgctggcgcaatggtcgtcacgcttcccacgcaacggaaggcgcttcctcgtccggagcgccacttcggttcgggcgcgggggccagccccccgtgcccccgattggtggtgtcggctgtcgagcctttgtggcgagccttcggaacgtccgttggcccccaaggttccggcccaccatcaccgaaaaatatgacggaagcgtcaaccccgccgagtttctccaggtctacatgaccgggatcgaggccgccgggggtgacgacagggtcatggcgaatttcttccccatggccctgaaaggacaggcgcggggttggctaatgaacttgccgcccgcgtcggtccactcttgggaggatttgtgctagcagttcaccatgaacttccaaggcacatatccgcgcccaggtgaagaagcggacttgcatgcggtacagcgaagggacgatgagtctcttcgctcgtacattcagcggttctgtcaagtccgcaacaccataccatgcatccccgcacacgcggtaatctacgcgttcagggggggcgtgcggcacaaccgcatgctcgaaaagatcgcctccaaggagccccagaccaccgcggagctttttcagctcgcggaccgtgtggctcgcaaggaagaggcctggacctggaactccaccggttccggtgtggcagcttcggccgcccccggatccgccgctcggtcagggcggcgggacaggaggaggaagaagaggtcggcccattccgacgacgagggtcacgtcctcgccgtcgagggcgcttcgcgggccacctgaaaggggaggcctgcgagcgacaaaaagaaggaggccggcgctcccagcagggagcgcccgaccggcaagtggtgcaccgtgcacaacacctccctccacgacctcgcggactgccgcgcggtcaaaagtttggctgagtggacgaggaagtgggaggaggagaggaggcaggagcgccgtgagggcaaggccccggcggctccctccggcaaccggcaaagtgaggccaagcagaaggcccccgccgaggacatcgacgatggcgacgatgacctagggttccaggagcctggggccaccatcgccaccgtcgatgggggagcatgcgctcacgcttctcgtcggagcctcaaggccatgaagcgagagcttctggccgcggcccctacccatgaggcgacgcggcgggcgcggtggtcggaggttgccctcaccttcgaccagaccaaccacccgccgtgcgttgcccggggaggacagatcgcgatggtggtttcccccaccgttagcaacgtgaagttggggcgtgtcctcatagatgggggtgcagccctcaacatcctttcccccgcagcctttgacgccatcaaggccccggggatggtgcttcggccgtcccagccgattgtaggtgtgacgcaggggcacacttggccgctaggtcatatcgacctcccggtcaccttcggtggatccgccaacttccgcacggagcgggtgaacttcgatgtggcggacctcagtctgccctacaacgcggtcctagggaggcccgcgttggtgaagttcatggtggcggtccactacgcctacctccagatgaagatgccgggccccggtggccccatctctgtccatggcgacctcaaagtcacgcttgcttgtatggagcagcgcgcggaccacctcgccgccgcgtccaagcccgagggtggcaacgagaggctcagcacctccgtcccagccgccccgaggcagcggatgatcacgtgcgacgaggtcccggaagacgcgctcgtctccttcctgcgggcaaacgccgacgtcttcgcctggagaccggcggacatgcccggggtccccagggaggtgattgagcaccgtcttgccgtgcggccgggcgcaaggccggtccggcagaaagtgcggcggcaggccccgaaacgtcaagccttcatccgcgaggaggtggcgcgacttctggaggccggattcatccgtgaggtcatccatccggagtggctggcgaacccggtcgtcgttcccaaggcgaacggcaagcttcggatgtgcatcgactacaccgaccttaacaaggcatgtcctaaggacccttaccccctgccacgcatagatcagattgtcgactccaccgcggggtgcgaccttttgtgttttctagatgcatactctggttatcatcagattcgcatggctagggaggatgaggaaaaaactgcattcattacccccattggaacttattgttatacgacaatgcctttcgggttaaagaatacaggtcctacttttcaacgtactactcgaatttctttgggtagccaaataggacgtaatgttgaggcctatgttgatgacttggttgtgaagacgcgcaaccaagagaccttactctcggatctagcggaaactttcgaaagcctccgctccgcccgcataaagctgaaccccgataagtgcgtgttcggcgtgcctgcgggcaagcttcttgggttcttggtctctgcccgaggcatcgaagccaaccccaagaagatacgagctatagagcggatgcgcccccccagcaagcttagggatgtgcagtgcttcaccggctgcatggccgccctaagtcggttcatatcgaggctgggagagaaggcactacccctatttaagctcctcaaacactccgggccgtttatctggacggaggaggctgagcgggccttcactcagttgaaggcgtacctcagttctcccccagtcctggtcgccccggagccagatgagccgctgctactttacctagcagcaaccccgcaggtggtcagcgcggcgttggttgtggagcgcgacgaggacaaccctcaccccgcgcatccccaccctgtgtcgactcgacccgggagagagcagggaggagaggcccccgagccgaacggcggcccgaggcccccgacggccggagctggccctccgcctgcttgtccgacggtgccaggcgcccccgacccccaggatggccccggggccactgcgggaaggccgcgcctgtcgccctccgaccccgaggtcgtcggcacagaagccgagtgcgccccgcgcggcctctcggacgaagagcgccctggagatgcggcccctagtgaagaagatcggccccgccgaaaggtgcagcggcctgtctacttcgttagcgaggccctccaggacgctaagacctgataccctcaggcccagaagatgctttacgctattctgatggcttcgaggaagttgcgccattattttcaggcgcatcgggtcacggtggttacgtcttaccccctcggccaaatcttgcataaccgagagggtactggacgggtggtgaaatgggcaatcgaactctctgagttcgatttgcactttgaaccacgccacgcaatcaagagccaggccctcgccgactttgtggcagagtggaccccggcccctgagcccatctccgtccccgaggccagctcgggcccctcgcagctgcctcacaccgcctactgggtgatgcagttcgacggctccctatctcttcagggcgccggtgcgggggtcacgttgacctcgccaaacggagacgtcctcagatacctggttcgcctcgactttcgggcgaccaataatatggcggagtacgagggactccttgcgggactcagggtggcagctggactggggatccgtcgcctcctggtgttaggcgactcccagctggtcgttaaccaggtctgtaaggagtaccagtgctctgacccgcagatggacgcttacgtgcgccaagtgcggcgtatggagcgccattttgacgggatagagcttcggcacgtgcccagacgggataacgcggtcgccgacgaactttcaaggctcgcttcctcgcgagcccagaccccaccgggcgccttttaagaaaggcttgcccagctgtcggcgcggcccgaccccctaggggagacggacgcgcctgaacggcccccgaggcctgtcggagtccaggcctcgggacccgaggggagtgctcccagctcccttagattgattgcttggatcactgagatccaggcgtacctcacagataagactctacccgaggactgcgaagggagtgaacgcatccagcgcatctccaagcgctacgtgctggtggaagggaccctctatcggcgcgcggctaacggagtcctcctgaagtgcattcctcgggaacaaggcgtcgagcttcttgccgatatccatgaaggcgagtgcggagcccactccgcctcacgcaccttggttggcaaggcctttcgccagggtttctattggccgacggctctcaacgatgcggttgacctggtccggcggtgcagggcgtgccagttccacgccaagcaaacccatcagccggcccaggccctgcagaccatacctctttcatggccgtttgctgtctgggggctcgatatcctgggtccgtttaggcgggccccgggcgggttcgagtatctgtatgtcgctgtcgacaagttcactaagtggcccgaggcttacccggtcatcaagatcgataagcactccgcgcttaaattcatcaggggcattactgctcggtttgggatgcctaatcgtatcattacggataacggcacccagttcactagtgaactcttcggtgactactgcgaagatatgggcatcaagctctgcttcgcctctcccgcccaccccagaagcaatggccaagtggagcgcgccaacgcagaaatcctcaagggcctcaaaaccaaaaccttcaatatcctcaagaagcacggcgactcgtggatcgaggagttgccagcggtgctctgggcgaaccgaaccacgccaagccgagcaaccggggaaacgcctttcttcgtcgtctacggcgcggaggcggttctcccatccgagctcaccctgaggtcccctcgggccaccacatacctccctggcgatctccgccaggtccctacgacgggcctcgagctctgaggcgtgccggcggtgtgccttgcggcccgcctccaccatggcctccaccgagcgtcgcccctcttcgacacgcgcccacgccgcgtcgagctccgcccgctctgcctgcaggacctccatctgggcacttaacccgtccaacaccgtggtgggaaggaccccttgagggatgagggatgcctccacggagctgagattcagcacccgttggaccactatcctgaagtcctcagggtcccagtcccatttgcgcccctggtgggtc

SEQ ID NO: 78742 - DNA, 357 bp, Oryza sativa
  Clone ID: PAT_MRT4530_78519C.1
caagattttctttttctaaacactgaggagatatcctgcttcttgactgccaataagggtttcatcggggtttcagccgatgagttatctggacgtttgcatcggcttataagaattgtatccgattggtttctattggattatattattgttatattttaatatcatcagccgattgtctttgcatcattatctacattggacatatagccgatagttcaaaaccctatcgctatcaactggatcaaactgactggcacgcccgcatctcataaacgtcttggacctgcactagagctaagcagatctcccaggccagtgtgtgtttttcgcatcaacatgatgtaccaaagctta

SEQ ID NO: 78743 - DNA, 415 bp, Oryza sativa
  Clone ID: PAT_MRT4530_7851C.1
acttaaacaaaaaacctaaattcataaaagaggggattttcataagaacatgaaaccacaattcttttattccattacacattgttactacaagataaataaattaactatacagaaaaactaatgtacaagcactgtatgaaaaaaaatatttatcagctacttgacataatgtatctaaacaaaatttactgatccagatcacaatcaatataaattggttaaagcatacacttaaaatgcaaattcagctttactaatttaacactttgcaaaaaaaacttatactgaaactcgccttcaagtataactcttgtaaatgtaaaaaaacatctaaatatgtaatccttttaaaacgtataattatccaatactttcaccataagtaaattatgcaaggtatttttaacaaaaa

SEQ ID NO: 78744 - DNA, 418 bp, Oryza sativa
  Clone ID: PAT_MRT4530_78520C.1
atgagggcccacatgtcattgacaggggtgcgtgccgctagcgacagacgtctagacgccctgtcgatcgatctggaggtggggttccctgggcgccggctcgccatgctctccatcgccccgacacaggacgccctcatctctcccctgccgtcgcgccgtcgccgattcacctccgccaggtcgccgcctatccccagcagccgccagtccacgctcgccctcgccgtcgcacagatcggcaccgccgccgacccgatgctcgccctcgcgcattcatcgccaccccatctggcccctctgcccatcgcgccaactcgccctagcaccgtctcgccgcctcgcgccatctctgccggtcgccggtcatctggtgaagatcaagataccatccatgtgctggataggtctcagatag

SEQ ID NO: 78745 - DNA, 1722 bp, Oryza sativa
  Clone ID: PAT_MRT4530_78521C.1
atgttgttgaagaattggatggctacctcaactcccccggcgtcagttctcgaccaaccgagatcctcgactacgacgacttcggctaccactacgaccacggcgaccccgacaacttcgatgacggctatgaggacaactacacgcccctcttcttcggcgtattcatggctgacaacgaaacggaggaatagcgtcgagcccgagaagcgaaccaagatcgcgaacggcaagaagctgaacgtcgccgactggaggaagagcgacagcaataggagcgagaacgactacagcgtgagcaacaagatcgcgaacggattgcaaaggaggctgaagatcgacggcaacgcgccttggaatctgggcggcgagcgagagagctcattgggcaacaagacgtcgatggaacaacggtctttcgcacccccccagcagaacgcggttgcagcaatcactctcctcgacaccctccccaaggaagacgcactcaaccaagctgatcatgttgtcaacatcttgaaccagacgaagaccatgatcgctgcctcggttccagccaactctgcaagcacccgcaccccgactggtagccgagtccctaatcttcgatctcaagactatcaccagccaagcctcagcattgccggcgccggatctagtcacaggagcaagggacatgatgaacggtctgtttgttcgcctcccgaacgatatagggagcgtcgagttgaacgaccacactccccacatcgaaggcgccccatcgatcttcgcgacaccatcaaccagcgccgtgcagcaagaggccatcattcaccggatcgctacgacgacgatgtggacggagttgctgccttcacaagcgatctgcgtcgagtggattggccagccggctttaagccaactggaatcgagaaatatgacggcaccaccaaccccgagtcttggctcaccgtctatggtctcgcaatccgcgcagcaggaggagacaacaaagccatggcgaattatctacctatggccctaacggattccgcccggtcatggctccacgggctaccacgcggcacgatcggatcatgggcagagctacgcgaccacttcatcgccaacttccaaggcacttttgaacggcctggtacacacttcgatctctacaacatcattcagaagtctagagagtctcatcaagattacattcgacgcttctctgagcaatgcaacaagatctccgacatcacggacgacgtcatcattgccgcctttactaaaggcattcgccacgaggacctagtcggcaagtttggatgcaaacctcccaagacggtcaagcagatgtttgaaaaagccaatgagtatgccaaagccgaagatgctatcacggcgtccaagcagtcgggcaccacttggaagccaaagaaggatacgccgaccacaggagggagtggaagtaacaaccacaaggatcgcaagcgtaagcccgaagaacttgtggcgacaacctctccgtcttcccgacaacgttcccgcgtcaacaccttcgacaagataatgaactcccaatgtccgcatcatcccaactccaaccacgtggccaaagattgcttcgtctacaaacagtttgcggagcaatatgtcaagaacgcgcgtaagccctcagacggagatcaaggcacatcaaagaagaaagatgatgaagacgatgccccgactggtttttaa

SEQ ID NO: 78746 - DNA, 5907 bp, Oryza sativa
  Clone ID: PAT_MRT4530_78522C.1
atggccgaacgggcagtggcgcacagcctctctccgagcgctagcggtgacgacggggagcagaacccgcgccgtcgggctcgcaccccaccgtccccctctcgccgaaatcttgggcggggggaggcgctcggggaggtcgaaggatccgcgacttcgccgcccgcgggcgacgggggaggacggcgagacggggcgcgtcgccgcctcgtctacggcgatggcggcacgccccagggcgcgctccaggctgcgggcgcgctcctgcgtcacccgcccgtcgtccccgatccagagactccagcccgacgttggctggatgacgtggccgacttggtcatgacggcgcagcagcgcctaggcgccggcggtaggcgccggcgggcggtcctccgccaccgaggcctctggcgctgccgccgccggctccatgtcgtcgaggcggagggcgcggcgagcggcggccgttacccgccgttcgtccgccattccctcgtcaacgcctccgacccaagaagatgtgcgtggggggccggatgcccgcctcgatatcgagcgccggcgcgacgctcgtcgcgccgcccacgcaacggagggcgcttcctcgtccggagcgccacttcggtccgggcacgggggccggccccccgtgtccccggttggcggtgccggctgtcgagcctttgtggcgagccttcggaacgtccgttggcccccaaggttccggcccaccatcaccgaaaaatacgacggaagcgtcaaccccgccgagtttctccagatctacacgaccgggatcgaggccgccgggggtgacgacagggtcatggcgaatttcttccccatggccctgaagggtcaggcgcggggttggctaatgaacttgccacccgcgtcggtccactcttgggaggatttgtgccagcagttcaccacgaacttccagggcatatatccgcgcccaggcgaagaagcggacttgcatgcggtacagcgaagggacgatgagtctcttcgctcgtacattcagcggttctgtcaagtccgcaacaccataccgtgcatccccgcacacgcggtgatctacgcgttcagggggggcgtgcggcacaaccgcatgctcgagaagatcgcctccaaggagccccagaccaccgcgcagctttttgagctcgcggaccgtgtggctcgcaaggaggaggcctggacctggaactcctccggttctggtgtggcagctctggccgcccccgggtccgccgctcggtcagggcggcgggacaggaggaggaagaagaggtcggcccattccgacgacgagggtcacgtcctcgccgtcgagggcgcttcgcgggccccccgaaaggggaggcctgcgagcgacaaaaagaaggaggccggcgctcccagcagggagcgcccgaccggcaagtggtgtaccgtgcacaacacctccctccacgacctcgcggactgccgcgcggtcaaaagtttggctgagcggacgaggaagtgggaggaggagaagaggcaggagcgccgtgagggcaagaccccggcggctcccgccggcaaccggcgaggtgaggccaagcagaaggccaccgccgaggacatcgacgatggcgacgatgacctggggttccaggagcctgaggccaccgtcgccaccgtcgatgggggagcgtgcgctcacgcttctcgccggagcctcaaggccatgaagcgagagcttctggccgcggcccctacccatgaggcgacgcggcgggcgcggtggtcggaggttgccctcaccttcgaccagaccgaccacccgccgtgcgttgcccggggaggacagatcgcgatggtggtttcccccaccgtttgcaatgtgaagttggggcgtgtcctcatagacgggggtgcagccctcaacatcctttcccccgcagcctttgacgccatcaaggccccggggatggtgctccggccgtcccagccgatcatcggtgtgacgccggggcacacctggccgctgggtcatatcgacctcccggtcaccttcggtggttccgccaacttccgcacggagcgggtggacttcgatgtggcggacctcagtctgccctacaacgcggtcctggggaggcccgcgttggtgaagttcatggcggcggtccactacgcctatctccagatgaagatgccgggccccggtggccccatcaccgtccatggcgacctcaaagtcgcgcttgcttgtatggagcagcgcgcggaccacctcgccgcggcgtccaagcccgcgggtggcgacgagaggctcagcacctccgtcccggccgccccaaggcagcggatggtcacgtgcgacgaggtcccggaagacgcgctcgtctccttcctgcgggcaaacgccgacgtcttcgcctggagaccggcggacatgcccggggtccccagggaggtgattgagcaccgtctcgccgtgcggccgggcgcaaggccggtccggcagaaagtgcggcggcaggccccggaacgtcaagccttcatccgcgaggaggtggcgcgacttctggaggccggattcatccgtgaggtcatccatccggagtggctggcgaacccggtcgtcgttcccaaggcgaacggcaagcttcggatgtgcatcgactacaccgaccttaacaaggcatgtcctaaggacccttaccccctgccacgcatagatcagattgtcgactccaccgcggggtgcgaccttttgtgttttctagatgcatactctggttatcatcagattcgcatggctagggaggatgaggaaaaaactgcattcattacccccataggaacttattgttatacgacaatgcctttcgggttaaagaatgcaggtcctacttttcaacgtactactcgaatttctttgggtagccagataggacgcaatgttgaggcctatgttgatgacttggttgtgaagacgcgcaaccaagagaccttactctcggatctagcggaaactttcgaaagtctccgctccgcccgcataaagctgaaccccgataagtgcgtgttcggcgtgcctgcgggcaagcttctcgggttcttggtctctgcccgaggcatcgaggccaaccccgagaagatacgagctatagagcggatgcgccccccccagcaagcttagggatgtgcagtgcgtcaccggctgcatggccgccctaagtcggttcatatcgaggctgggagagaaggcactacccctatttaagctcctcaaacgctccgggccgtttacctggacggaggaggctgagcgggccttcactcagttgaaggcgtacctcagttctcccccagtcctggtcgccccggagccagatgagccgttgctactctacctggcggcaaccccgcaggtggtcagcgcggcgttggtcgtggagcgcgacgaggacaaccctcactccgcgcatccccaccctgtgtcgactcgacccgggagagagcagggaggagaggcccccgagccgaacggcggcccaaggcccccgacggccggagctggccctccgcctgcttgtccgacggtgccaggcgcccccgacccccaggatggccccggggccactgcgggaaggccgcgcctgtcgccctctgaccccgaggtcgtcggcacagaagccgagtgcgccccgcgtggcctctcggacgaagagcgccctggagatgcggcccctggcgaagaggatcggccccgccgaaaggtgcagcgggcccgtctacttcgttagcgaggccctccgggacgccaagacccgataccctcaggcccagaagatgctttacgctattctgatggcttcgaggaagttgcgccattatttccaggcgcatcgggtcacggtggttacgtcttaccccctcggccaaatcttgcataaccgagagggtactggacgggtggtgagatgggcaatcgaactctctgaattcgatttgcgctttgaaccacgccacgcgatcaagagccaggccctcgccgactttgtggcggagtggaccccagctcccgagcccgtctccgcccccgaggccagctcgggcccctcgcagctgcctcacaccgcctactgggtgatgcagttcgacggctccctgtctcttcagggcgccggtgcgggggtcacgttgacctcgccgagcggagacgtcctcagatacctggtccgcctcgactttcgggcgaccaacaatatggcggagtacgagggactccttgcgggactcagagtggcagctggactggggatccgccgcctcctggtgttaggcgactcccagttggtcgttaaccaggtctgtaaggagtaccagtgctctgacccgcagatggacgcttacgtgcgccaggtgcggcgtatggagcgccatttcgacgggatagagcttcggcacgtgcccagacgggataacgcggtcgccgacgaactctcaaggctcgcttcctcgcgagcccagaccccaccgggcgcctttgaagaaaggctcgcccagccgtcggcgcgacccgaccccctaggggagacggacgcgcctgaacggcccccgaggcccgtcggagtccaggcctcgggacccgaggggagcgctcccagctcccctagattgattgcttggatcactgagatccaggcgtacctcgcagataagactctacccgaggaccgcgaagggagtgaacgcgtccggcgcatctccaagcgctacgtgctggtggaagggaccctctatcggcgcgcggctaacggagtcctcctgaagtgcattcctcgggaacaaggcgtcgagcttctcgccgatgtccatgaaggcgagtgcggagcccactccgcctcacgcaccttggttggcaaggcctttcgccagggtttctattggccgacggctctcaacgatgcggttgacctggtccggcggtgcagggcgtgccagttccacgccaggcaaacccatcagccggcccaggccctgcagaccatacctctttcgtggccgtttgctgtctgggggctcgatatcctgggtccgttcaggcgggccccgggcgggttcgagtatctgtatgtcgctgtcgacaagttcactaagtggcccgaggcttatccggtcatcaagatcgataagcactccgcgcttaaattcatcaggggcatcactgctcggtttggggtgcctaaccgtatcattacggataacggcacccagttcactagtgagctcttcggtgactactgcgaagacatgggcatcaagctctgcttcgcctcccccgcccaccccagaagcaatggccaagtggagcgcgccaacgcggaaatcctcaagggcctcaaaaccaagaccttcaacatcctcaagaagcacggcgactcgtggatcgagaagctgccagcggtgctctgggcgaaccgaaccacgccaagccgagcaaccggggaaacgcctttcttcctcgtctacggcgcggaggcggtcctcccatctgagctcaccctgaggtcccctcgggtcaccatgtattgcgaggctgatcaagatcagcttcgccgagacgacctcgactacttggaagagcgaaggcggcgcgcggccctccgagccgcacgctaccagcagagcctgcggcgctaccatcagcgccacgtccgggcccgatcactctgcgtcgacgacctcgtcctacgccgcgtccaaacgcgtgctggactgagcaagctctcaccaatgtgggagggtccgtatcgagtgatcggcgtcccccggccgggctccgttcggctggccacgggcgacggcacagagctgcctaacccgtggaacatcgaacaccttcgtcgcttctacccctag

SEQ ID NO: 78747 - DNA, 3837 bp, Oryza sativa
  Clone ID: PAT_MRT4530_78523C.1
atggcgtcgtcgtcgtcttcctcaggcacggcagccgccaatctcctccaaggccactcggtttcagagaaactcgggaaagccaaccatgcattgtggaaagcgcaagttagcgctgcagtgcatggagcccgattgctgggctacctcaacggcgatatcaaagctccaaacgccgaaatctcggtcaccatagatgggaagaccacaacaaagccgaatccggcatttgaagattgggaggccaatgaccagcttgttcttggctatctcctgtcatctctttcaagggatgtgctgatccaagtcgccacatgcaagacggcggctgaggcatggcggaacattgaagcactctactccaccggcactcgagcaagggcggtgaacactagactcgccctcaccaacacgaagaaaggaacaatgaagatcgccgagtatgtcgccaagatgcgagcgctttgtgatgagatggctgccggcggtcgtccacttgatgaagaaggccttgtccaatacatcattgctgggctaaatgaagacttcagcccgatcgtctccaacctttgcaacaagtccgatcccatcacggttggggagctgtattcccagctcgtcaactttgaaaccctccttgatctctaccgcagcactggtcagggaggagctgcttttgtcgctaatcgcggcaggggcggcggtggcggcggtgggcgcggcaacaacaacaactccgacggcggcggcggcggcggcggcagaggcgcgccgcgtggacgcggtggcggcggccagggtcgcggtggccatgggcgcggcacaggaggccaagacaggcgccctacctgccaagtttgtttcaagcgtgggcatacagcagctgattgttggtatcgcttcgacgaggactacgttgcagatgagaagctcgttgctgctgctactaactcgtatggtatagatacaaattggtatattgatacaggtgctacagatcacattaccggtgagctagagaagcttaccaccaaggagaaatacaacggcggcgagcagattcacactgctagcggagcagagtctgttgggagaaataaatattatgtgagtttcattgatgattttagtaagtttacttggatatacttgctgaaatacaagtctgaggtttttgagaaatttaaagaatttcaggctttagttgaacgaatgtttgatagaaagattattgccatgcagactgattgggggggagaatatcagaaacttaattccttttttgctcaaataggaattgatcatcatgtgtcatgtcctcacactcatcagcagaatgggtcagctgagagaaaacacaagcatataattgaagtaggcctttctcttttatcttatgcatcaatgcctcttaagttttgggatgaagcctttgttgcagccacttatctcatcaatcgtatacctagtaaaaccatccaaaattctacacccctagagaaactgtttaaccaaaaacctgactactcatccttgagagtgtttagttgtacatgttggcctcatcttcacccttacaatacacacaaactccagtttcgctccaaacagtgcgtgtttttgggttttagtactcaccacaaaggatttaagtttcttgatgtgtcatcaggccgtgtctacatctcaagagatgttgtctttgatgaaaatgtttttcccttctctacactccactcaaatgcaggagccagactcaggtctgaaattcttttgttgccgtcccccttgacaaactataatacggttagtgcagggggaacacatatagttgcaccagtggctaatactccattacctagtgataatttaatttctaatgctgctgatgtgacttctggagaaaatagtgcagcacatgaacaggaaatggagaatgagcaggaaatagagaatgtcatgcatgggaacgacgtgcatggggacgcggcatcgggacctgtgctggatcagccaactgctgacagcagcactgcgccggaccagggagctaacaccagtgacgcggtctctggcgcagcttctgacgcgggtggagacactgccaccctgggagctggagcagcaaatggcgcagcagcaggtggcgaagaatcccagccggtgccgcctgatgtgacgggtacagtagcggctacagtagcccctgcatcgagaccacacactcgtctgcggagtggtattcgaaaagagaaggtatacactaatggcactgttaaatatggttgtttttcttctactggtgaaccacaaaatgataaagaggctttaggagataaaaactggagagatgcaatggaaactgagtataatgctttgataaaaaatgacacatggcacctagttccatatgagaaaggacaaaatatcattgggtgtaaatgggtatataaggttaaaaggaaggcagatgggacacttgacagatataaaactagacttatagcaaaggggtttaaacaaagatatggtatcgattatgaagatacttttagtcctgttgttaaagctgctactattagaattattctgtccattgctgtctctagaggttggagtcttagacagttagatgttcagaatgacttccttcatggattcttagaagaagaagtatacatgcaacaacctcctgggtttgagtcatcctctaaacctgattatgtatgtaaattgaataaggcattatatgggctgaaacaagcaccaagggcgtggtattccaggctgagtaagaaacttactgaacttggttttgaagcttcaaaggctgacacctcattattctttcttaacaaaggagggataattatgtttgtcttggtatatgttgatgatataattgtagctagctctacagagaaggcaactacagcacttctgaaggatctaaacaaggagttcacacttaaggatttgggagacctgcactacttccttggaattgaggtaactaaagtttccaatggcgttatcttgactcaagagaagtatgcaaatgatatgctaaagagagttaatatgtcaaattgcaagccagttagtactcctctttctgttagtgaaaaattaactctatatgagggatcacccttgggtcctaatgatgcaacacaatatagaagtatagttggtgctttacaatacttgaccttgacaagacctgacatagcttattcagtaaacaaagtttgtcagtttcttcatgctcctactaccagtcattggatagcagtaaaaagaatcctaagatacttgaaccagtgcacaagtctaggacttcatgtacacaagagtgcttctactcttgttcatgggtattctgatgcagacggggcaggtagtatagatgacagaaaatcaacaggaggatttgcagtatttttgggttctaatcttgtgtcctggagtgctaggaaacagcctactgtgtcaaggtcaagcacagaggcagaatataaggctgtggcaaatactacagccgaactgatatgggtacaaaccgtgttaaaagaattgggaattgagtctcctaaagctgccaagatttggtgtgataacttaggagccaaatatttatcagctaatcctgtgtttcatgcaaagacaaagcatatacatgttgattatcattttgtaagagaacgagtgtcacagaagctgttagagattgattttgttccatcaggagaccaagttgctgacgggtttacaaaggcactgtcagctcgacttcttgaaaattttaaacacaatcttaacctaactaggttataa

SEQ ID NO: 78748 - DNA, 3102 bp, Oryza sativa
  Clone ID: PAT_MRT4530_78524C.1
atggctcggggctctgctctgctcgacggcagcgtactaccgccttcccgcatcgtgagcgagaggcaggctgggctgccgcgccgcttcatgccggaatccgcgaccggccgggagatagtgatgctgggcgaggcgcgcccagcaccagactacccggggcggtccatcttcttcctccccttcgcaatggctgggctggtcccgccattttcttctttcttcatggatgtcctggagttctacgatctccagatggcgcacctcacccccaatgcggtgatgacattggccatcttcgcgcacttgtgcgagatgttcattggggtgcgcccctctcttcagctgttccggtggtttttcaccgtgcagtcggtgtcaccgccgtcggtggttggcggctgctacttccagccgcgggggccggtgttgaaccgctacatcccctgcgtcctccgcaagaagtgggacgactggaagagcgactggttctacacccccctcgccaacgaagcgcacctccgacttccaagccagcccccggcgcaggtctccagctggcgggcgccggtagatctgggggaggactacgacgccgtcctcgaccgcctggcgggcctgcgatcccaggggctcaccggggccatggtgtacggcgattacctccgccgccggattgcgccgctccaacggcgcgcccggagcgcctgggagtacactgggcctgaagactacatgcggacccaccagggagccagatgggattgggctcccgaggacttcaagatcgtggtccaaagggtgctgaatcttagctccgcggaggcgtctcgcattcctcaggagatcctccccctctgcagcgatcccgaccgcgcctccattctaaccattatgatgggggtcggggcctcagaggagagagcccctaagggccacgacggcgcgggcgagcgccgccggggggaacaatctgccccaggagggggtcgtgcttctgggccccgcgtcgggggctcggggagcagccgccctgccgacgcccaggggaagaggaagctgggaggaacacctcccacatctcctccccgagggggcggggcggcgcgtgccagcagtcggcgcccggagggggccgcgccgacgtcgcagcccgagggggagcgcaagaagaagcggctccgcaagatgggggagacggaaccatcccggggaaacctgatttcccctccaaagtggtcatttaaccgaccccctcgcagcgatgccccgtcacattcctcccgccaccccaagtccggccagtccgaggccgaagatccagcggccgcagaggagcggaggcgagaatctgaccggcgtgaagccgcagaccgccttcgggaagctgaagaggccgcccgggaggccgcccgggttcgccaagcggaggaagctgctcgggaggaggccgcccgggctcgccaggctgaggcgacagctgctgctggcgcgtcacttgggcccactccctcgggcggccctcaggcgacgtcctccgaggcggctcgcgacgaggccgcgggcgcatcgcctgggcctacctcaccgggcgacgcccaggaccaaacgggcccgggggacatccccgagcccagcgcatcctccggggggccaagccgcgtcgcattttctccaaggcggctcttttcctcatcttctgtcgccccgctgagcgccgagccccttctgcaggccctggccgccgcaaacactgcagtgctggatgggttcaacgcccaagtggaggccctgcgtgcggaacgagcggagctcgaggccgcatgggcgcgcgttgaggaggggcggcgctcggtggacgccatggtggaggtgggccgtaaggctcaccgccgccacatctcggagcttgaagcccgcaaggcggcgctggcggagatcgcccgagaggtggaggaggagcgagaggccgcccttatcgccaccaccgcgatgatcgaggcgcaagacaccctccgccttcagcacgcaagctgggaggcggagctgaagaaaaagctcgacgccgcccaaggggtccttgactccgccgctgcccgagagcggcgggtaacggagactgaagcggcgtctcggcggcgcgaggaggcccttgagtcccgtgccatggcgctggaagaacacgccggcaccgtggagaggggcttgacggaccgcgaggccgccgctgctctccgggaggcgacgctggcggcgcacgaggccgcctgcgccgaggaggagtgcgcgctccgcctccgcgaggacgcactcgctgagcgggagcgagctctcgaggaggctgaggccacgaccaaacggctggcggacagcctgtcccttcgcgaggcggcgcaggaggagcaggcgcgccgcaatcttgaatgcgtccgcgccgagagagccgcactggagcagcgggctgctgacctcgaggcgcgggaaaaggagctggacgcgagggcgcctatcggcggggcggccgcgggcgaaagcgacttagccgcccgcctcgcagctgccgaacacaccgtcgcggaaatgcagcgagcgctggactcctccaccggggaggccgaggcccttcgcttggcgggcgagattgggcccgacatgctttgggatgcggtctcccgcatgaagcgcgccggtcggcaagcgggcctctggagaggccagacgtcggtgccccccaccaatctggaaggcctcgctccgcacctcaacaggatggcctgggttctcgaacaactccccgaggagcttgagaagaccatcaagtcatcctcgagggacctcgcgcggggagcggtcgaactcgtgctggcgagctaccaggcccgggaccccaacttctctccatggatggcgctggaggagttccctcccgggaccgaggacgacgcgcgcgcgcgcgtccgggatgccgccgaccacatcgtcaacggcttcgagggctcggcccctcggctcgcgttcgcccctagctccgacgaggagggcgatgccagcagtgaggacgacggtggcgacgaggccggcgacccgggcgcgtcggaatga

SEQ ID NO: 78749 - DNA, 2655 bp, Oryza sativa
  Clone ID: PAT_MRT4530_78525C.1
atggcggggctggtcccgccattctctatttttttcatggatattctggagttttatgatctccagatggcgcacctcacccccaacgcgataatgacgttggccatcttcgcacacctgtgcgagatgtttatcggggtgcgcccatctctccagctgttccggtggttcttcaccgtacagccggtgtcgccgctgacggtagtcggtggctgctacttccagccgcgggggcaggtgctgaaccgctacattccctgcgtcctccgcaaaaagtgggacgactggaagagcgattggttctacacccccctcgccgacgaagcgcgcctccgacttccgagccagcccccggcgcaggcctccagctggcgggcgacggtagatctgggagacggctacgacgccgttcttgaccgcctggcgggtctgcgatcccaggggctcacggaggccatggtgttcggcgactaccttcgtcgccggatcgcgccgctccagcggcgcgcccggggcgcctgggagtataccgggcccgaggactacatgaggacccaccaggggtgcaaatgggactgggaccctgaggtcttcaggatggtggtccaacgggtgctgaatctcagctccgtggaggcatccctcatcccccaaggggtcctccccctctgctgcgatccagagcgcgccaagatcctgaccatcatgcaggtggtcggggcgtctggggagcgggccccccgaggccacgatggcgcgggcgggagccgcaggggggaacaatctaccccgggagggggtcgtgcttctgggccccgcgacgggggcccggggggcagccgccctgccgaagcccgggggaagaggaagcaggagggtactcctcccccatctcctccccgagggggcggggcgtccggccggtctgaggccgaggagacggcgactgcggaggcccggaggcgggaagctgaccggcgagaagccgcggaccgcctccgggaagccgaggaggctgcccaggaggccgtccgggttcgccaggctgaggaggccgctcgggaggaggccagactccgccgggccggggagtccgtccgggtggcagaggcggcgcgcgcacgccaggtggcctgccaaacccccgactcgattccgcccgaggcgacgacgacttcagaggccacccatgacgaggccgcgggcgcgccgctcgggcccgacccctcgggcgacgcttgggacgagccaggttcggggggcgcccccgagtccggcacgtcgatcggcgggccgagccgcgcggcacccacaccgagggggctctcccctcggccttccgctgccccactgagcacggagcccttcctgcaggccttggccgccgcgaacagcacggtgctggacgggttaagtgcccagatggaggccctgcaggcggagcgggcggagctcgacgcggcgtgggcgcgcgtcgaggaggggcggcgctcggtggaggccatggtggaggcgggtcgcaaggcacaccgccggcacgcctcagagctcgaggcccgtcgtagggacctggcggagatcgccagggaggtggaggaggagcgggagactgccctcatcgccaccgccgtgctcgacgaggcgcggaatgacctccgcctccaatacgggagccgggcggcggagctggaggagaagctcgacgctgcccggggggtccttgacgccgccgctgcccgggaacggcgggcggcggagaacgaggcggcgtcccggagagagacctggcggaccgcgaggccgccgtcgcacgaggccgcctgcgccgaagaggagtccgcactccgcttccgcgaggacgcgctcaccgagcgggggcgagctctcgaggaggccgaggccgcggcgcagcggctggcggacatcctgttcctccgcgaggcagcgcgggaggagcaggcgcgccgcaatctggaaggcgcccgcgccgagagggccgcactggatcagcgggccgctgagctcgaggcgcgggcgaaggagctggacgggagagcgcgcagcggcggggcggccgcgggccacggcgacctagtcgcccgcctcgcagccgccgaacacaccatcgccgagctgcagggcgcgctggactcgtccgccggggaggtcgaggccctccgcttggcgagcgaagtagggcccggcatgctttgggacgccgtctcccatctagaccgcgccgggcggcgggcgggcctctggggcgggcggcacgcgaagtacgccgccaaccaggggggcctcgcccagcgcctctcagagatgaccggggccctcgagcggctccccgaggagctcgaggggacgatcaagtcatcctcgagggacctcgcccgggggacggtggagcttgtactggcaagctaccaggccagggaccctgacttctccccgtgggcagtgctggaagagttccctcccggaaccgaggacagcgcacgcgcgcaggtccgggacgccgccgaccacatcgtccacagcttcgagggtacggcccctcggctcgcgttcgcgctcgactccgacgaggagggcggtgacgacggtgcggacgacagcgacgacgaggccgacgacccgggcgcgtcggagtaa

SEQ ID NO: 78750 - DNA, 480 bp, Oryza sativa
  Clone ID: PAT_MRT4530_78526C.1
tgagctatttgtatggagaaaaagcagtgacaatggtaaaagatggttttgaaggcactacaagacatgcctcaagttataaccgtgctgttacgaggatccaagcatccaaaacacttggaagattaagcttcaggcgttgtcaacataatgcataattagttgcatacttcagtggatgattgaacgggatgtttggatatgcaaatatttctatgcatccggactgaatactttctgaacacaaagcaagccaacctgccatggccatgacacgatggttctatccatattttcctatttgtcatgtacggctgggctgggcctagcaccaaaactattcgttgttgtttattattattaggtaattaggttattcgtagatcatggttgtttattttattatgaacattttgataacattttttttaaaaaattaaagcctttatttttccgatcaaaaaaaaaaaaaaaaaaaaa

SEQ ID NO: 78751 - DNA, 1512 bp, Oryza sativa
  Clone ID: PAT_MRT4530_78527C.1
acgaaggaggaccccgcccccccgcaactcacggcgccgcccgcgcgaaaggtcacctcccgcctctcccacccaccgcagccaccccatccgctcaagagggagatgctatacggaagatctccacggcagcaccgttcagtttttgcctagatgacaccacgccccggcgctgcggatgtcgccggggagttgaccagcccgacgctcgccccctagcgccagttcccacctagcgtagccccgtcacaggggtacaaaagtcctgggccatcgagggggtacctgctggtgctcacgaatggagggctcaaccagatgcgcgctgggatcagcgatatggtagcagttgcacgtatgctcaaagctactctcataattccagagcttgataagaaatcattttggcatgacaaaagcaacttctcagatgtatttgatgaggaatattttattcattctttggcaaatgatgtgaaagttgagaaaaaattaccaaaggatttggtgaaagctccaaagtttgttaggtacttcaagagctggtctggaatagattattaccatgatgagatttatcctctgtgggagcaccggcaggttattcgtgctgctaaatctgattctcgccttgcaaacaactaccttcctcctgatattcagaagcttcgctgccgagcctttttccaggcactgagatttgctcctccaatcgaagctttaggcaatctgttggtggagaggatgagatcgtttggaccatacattgctttgcatttacgttatgagaaggatatgcttgcttttagtgggtgcacacatggtctgtcacagaccgaatcagaggaacttgcaatgatcagagaaaacacaagctactggaaggtaaaagatattgatccattggatcaaagatcccatggttattgtcccttgacaccaaaggaggttggtatgtttctttctgctcttggatatccatcgagcactccggtttacatagcggcaggggaaatatatggcggtgaatctcatgtggttgatttgctatcacgctttccaattatgatgaacaaggagaagcttgcctcagctgaagaactacgaccattcaggcaatatgcttctcaaatggcagctttagactacattgtttcagtggagagtgatgtctttattccatcatattcggggaacatggcacgggctgtcgggggtcatcgtcgttttcttagccacaggaagaccatcattcctgacaggaaagcattagttcgcttgtttgataaagttgatggtggattactgaacgaaggggagagactatcacgaaggataatagatatccatcggaaaagacaaggatctccgaggaaaaggaaaggtcctgtatcaggaacaaaaggcaacgataggtttcggtcagaagaggcattttatgagaaccctcttcctgactgcctgtgtcaaccggagtccccagccagcgatgcttctgtggtcagcatctag

SEQ ID NO: 78752 - DNA, 2694 bp, Oryza sativa
  Clone ID: PAT_MRT4530_78528C.1
atgcccagcaccgattggatggcgatggtggccggcgatggtggtggcgacacgtggccgaagggggtggcgcggcgtcgagcggcggtggcgaaacggtgggcgacggcagcaagaatggtgggcggcggtagctatacaacggccggcggcggcagcggaaatgcagcagctgctgcccgcgcccagctccgccccgccggccgagccccgttccgcccccgacggccgcgccaagctcctcccccggtggcggcggcgtgggagggcgggcgcgggaggccgtgccgcgccgccgccgcctcgtcgcccgtcgccggtctcccgcctcccccaccggtctgctgccctgcgcccctgcccactgccgagccgaactgtggaggaaagggagagaggaagatggtgctgacacgtgggttctacgctgactcagctgccacgtcggacaaaactagggtcaaaactaccaagggatctaatttacactggttttgggggccattcctccatgccggtggtgagcggccgctcattggcacacgccatgcgagttcaccgaggcaatgcgcctaccagcttctggtgacgacgacgacactgtcagcagcagccccgaccccgatagccctgcctggttgcccggaaagctgcggcggcatacaagtgccgtaccctttcggcatcggcgacgggtgctcctaccatggcttcaacctcacatgcgacgacgaggcgcaccaccaccagacgccgcccaagctgttcatggccacagacaacggcaccgtcgtccaagtgctcaacatctccttgccggacggcactgtacgcgtccgcagcaagctttcgcagtcatctattgccggctcctcctcctcctcgtctaatgcctcgtcgtcacggtccgacctaccggccgacgggccgttcacggtgtcctccgcgtataactggctggttgccttcggctgcaacatcgtggccgaccttaccccgtacggcaatatcgccgacggcagcagctgcgccgccacatgtatagatggatggcaaaatttcgcaggcccctcgtgctccggcatcgcgcgctgccgtacgtccgttgggaggggtgtccactcgtacacgatccaggtcacgtctctgatagaccgaaattccatgggtgcctcgacatcgacgacatgggcagctgcgttcgtagctgagcagggctggttcagcgcgaatgagaatgccatgttgtacaacttcaccaattggctgccgttcacggtcgagagtgttccggtggtgctggaatggtggctggatttgatccgtgatggagccatactgccgttgtcagttgggcccaatactaccgactttagatgcctaagcttgcatagttcaagctattacaacgatctaaactacgaccgaagacggtgcaactgttcccaaggatacgaaggcaatccttacatccgtgatggatgccgaggtttaataaccattatagcagttagtgctggttttgggctactgttttcacttcttggtgttgccaaaatcacaaataaaatcaaacaacgcagagccaagaagttgagacggaagtttttcaagaagaatcatggactgcttcttcaacaattaatatcttcaaacaaggatatagctgaaaggatgaagattttcagtttagaagaattagaccaggcaaccaacaaatttgatcaaaatcgcattcttgggggcggtggccatggcacagtctacaaaggtatattatctgaccaacgtgtggtggccatcaaaaagtcaaaaattgtggttcaaagggagattgatgatttcataaatgaggttgtcatactttcacaaactaaccataggaatgtggtgaagctatatggttgttgccttgagacagaagttcctttattagtttatgagtttatatcgaatggaactctttcatttcatcttcatggccaaaatgagaatcctttgaagtggaaagatagattgagaatcgcactagaaactgcaagggctattgcatatcttcactcggcagcttctatatcagtgttacatagagatatcaaatctacaaatatactactcactgatactatgacggctaaagtatcggactttggagcttcaaggtcaatttcaattgacgagacaggaatactcaccatcatccagggcacttatggttatctagatcctgaatattattactctagtcgactgactgagaaaagcgatatttatagtttcggtgtcatcctagctgaactattgacaagggtaacaccggttttctcctccgaaacatcagaaaggacaagcctggcatcatactttgtgtcgttcataagagacaaccgcttgtcagatattctggactctcaaattgttaatgaggtgggtgctgaagatgctaaggtggttgctaagcttgcagaagcatgtttaagattaaaaggtgaggaaaggcctacaatgaggcaagtggagacaacacttgaagatgtgcaaaggtcaaaagtccaacttaatcatcagattgcaagagtgagcaatagtaatacactaaaaaatcagacgtacgagggaagtaagtgctatgaaggaactagacaatatagcttggaaaaggagttcattcaatcatctgaatttccaagataa

SEQ ID NO: 78753 - DNA, 789 bp, Oryza sativa
  unsure (1)..(789): unsure at all n locations
  Clone ID: PAT_MRT4530_7852C.1
cagaagagaggtctgccccgtggtcaagccgtgccgcgtcgtcgtctccctcgcctttcccctccgctccgcttcgccgatcaagcttgcattgagacaaagaaatcagctttcatctgtttgagaccaatcaaactcaactagcaaatttcatgtctgatctcgacgtccagcttccatcagcttttgatccgtttgcggaagccaatgctgaggactccagcgttggtgctggatcaaaggactatgtacacgtgcgcattcagcagcgcaacggaagaaagagtctgactactgttcagggcttgaagaaagagtacagttacaacaaaatcctcaaggatctgaaaaaggaattctgttgtaatggtactgtagtccaagatccagagttaggccaggtcattcaacttcaaggtgatcagcgtaaaaatgttgcgacgttcctagttcaggctggaattgtaaagaaagagagcatcaaaatacacgggttttaggctacacataatgcctatgtgctattatatgatacaaaatattgaagtgtctgaagcctgaagttgtgataataccagtttttactacttctaagacatttgaatttgtgtcggtgtgagctcttggttattgatgcaacttgtttcaatatggtttgtacgtgctacctatatgaaaattcggttctgttatattgtctactaaacaaaagtatactgtgtttatctaagctttcgcttctcatgcaattgttgtttggatttggcattcacacnaaaaaagacatgg

SEQ ID NO: 78754 - DNA, 158 bp, Oryza sativa
  Clone ID: PAT_MRT4530_78530C.1
ccggccgggatcttctacctcttctcccatctgagccgccagccactcactcccaatccctaaccccggaaggaacatgttacgagcatgcatggccgtgtataagaacaagaggatgctccatgggcaggaaggtgctcttgaacaagaccgtcgat

SEQ ID NO: 78755 - DNA, 339 bp, Oryza sativa
  Clone ID: PAT_MRT4530_78531C.1
tcgtggacaccccaaggaaaacgatcctgagtgggggatcttaaacgccgttacccttctcaccatcaaaccttcatcgaaagaaaccgccgagatacctgatactgagaattacacgatcggatgggagcttccggtgctcggatgggaggtgagctactgagcagagttcactcttgatgtccaggggggacacacagccatcgagccgaaaacgaggaaggtgcctgcaaatggggaaccaatcatgataggcagtcttaaaggttgacgagccaggaaagattgggctaacgatcaaacaactcctctatcaaacaaggaagaagctcctctgct

SEQ ID NO: 78756 - DNA, 246 bp, Oryza sativa
  Clone ID: PAT_MRT4530_78532C.1
atgcagaatcataagggcgtttgtggaaaagttgtggggtcagcagaccatacagccttatgggtggctccacaccactgcttccgtgatatatatgtaatgccagctctcgtaacttttgcatccttctctcttgttcttgttccttggattgattttgaaactgctgctgttgttcctctcgatgcttttgctgccagtggtgcttctcttgcgacatttggtgatgtttctgatgtggactag

SEQ ID NO: 78757 - DNA, 221 bp, Oryza sativa
  Clone ID: PAT_MRT4530_78533C.1
aactaataccactttccttaaaaactttgatcatacattaaggtggcatgcaccaaaacatccaataacacccatttattctaatactcacacatagtatcccaatacaccagttacttaattaatctataacacacttatttaattcaccaataaacaacacacacacaaaccacactaatatgagtagtttttattgtaaactaattaatgcttattac

SEQ ID NO: 78758 - DNA, 467 bp, Oryza sativa
  Clone ID: PAT_MRT4530_78534C.1
cccacgcgtccggaaaccccatcattccatccatccatctcactgaaagatcaagattcaagcagcagatggaggctagatgagtgcattccttgcaactcccaaccacaaccaagaaagcagtttggaaaggagtgagggcaaagcaaacccaaccaaacccaaccaaggtcaaggggtctcaagtctcaactccaaaagccaatggaatctaggaggaagagacatggaggagagatggccaccactacactctccattgtcccactcaaactcaagtgcacccctcttcttctttcttggtggtggtgagtgtactgcctttatctgctgtctgattgctgcatttcctactcccctttttatccccttccacaaaaccaaaaatccaaagaaaaagagaaatcttccatacccttcttaaatgcaagatccatgccgttgcttgaaaagatgtgtttatgtat

SEQ ID NO: 78759 - DNA, 1447 bp, Oryza sativa
  Clone ID: PAT_MRT4530_78535C.1
gtggcggcgtctaaatagtggatcccccgggcggccgggtgcgcacttgagctccacttcctctcgcgggaggcgtcagccgagagccacagccaacagcaatgggggccggatgggaggagtacaagccgtgcgcggcgatggtggcggcgcagtgcatctacgcggcgctggcgctctgggccaaggccgtgttcaccgggggcatgagcaccatggtcttcgtcgtctaccgccaggccatcgccaccgtcttcctcgtccccatagccatcattgccaacagaaggaagaagaaggagacgaggctaggaatgacgggcttctccttgatcttcgtggcttctctttttggggcaacggtaaaccaatacgtgtactaccagggcctgcatctgggatcgtcgtcgatggcgacggccatgagcaacctgatacccgcgatcaccttcgtgatggcagcgtcagtaggactagaaaaggtggacctcaggagagtgaggagcttggcgaagatattcggcaccaccgtctgcgtcggaggagccatggccatggcgttcttcaagggccccaggctgctcaactcctcctctctgatcgtcgacctgaactttcttctccactcgtcagcgagcagcaagtgggttatgggcgccctgttcctcatctgcagcagctgctgctggtcactctggctcatcttgcaggtgccaatctgcaagtcgtacatggatcccctgacgctgtcggcgtggatgtgcttcctgtcgacgctgcagtcggcggtgctcgtctccttcctcgtgccggacatcaacgcctggaagatccactccctattcgagctcggatgctgccttttcgccggcgtgtttgggtcaggcgtgacgttctacctgcagtcgtggtgcatctcggtcaggggccctctctactccgccatgttcaacccgctctgcaccgtcatcgccaccgtcgtcgccgccgccttcctccacgaggagctgcacatcggcagcttgatgggagcagcggctattgttgccgggctgtacatcgtgctgtggggaaaagcagcggatggcggcggcaagagcggcgggagcgtgccggagcacagccacgacgtggagaaggcggcgatgcggtcggaatcgcagctcgacgtgggtgaaggcatcacggagccgctcctagaggccggcaacacggccgagaagtagggtagaggagattttgaagttgatagccagttgtatcttctacaaacgttttttttttatttatgtctcctggtagggagagcatggtattttggatgtaactatataacattcgaaagtatttagtatggataattttcaaatgtaactattgtataattattctgtaactatcttatagttttttttttaaccaaaggcaggagctctgccattgtttt

SEQ ID NO: 78760 - DNA, 675 bp, Oryza sativa
  Clone ID: PAT_MRT4530_78536C.1
ctccgtactccatctccgatcggcgacccgccctgagccggcggagccgctcgacgttagggccccacctcaccaggcgacggcgtgggcatcctcgattctcaggggtgtggcggcgtcggcggcggcgcaacggtgggcgccgtccatccctcccagccggctcggcctggtgaccggattcagagatgacggcgagatgcaaatttgtcaggcaatgtgattaagtagatatgcatcctggttggtcacaaggtgttatgctcacgcctcgatatggttcttgcgtagccacagaaaggagcagctactatgtgcttactccagccactggagttgtatacaacttgcctgtgaatccagcagaggagcatgtgtaccatgtccagttgatcacctgcacagaccttaccctcatttgcatttgggcatgttgcttccatgggagagtacaaggtgatccatatttacagacctagagctacatcagctctgtgagttcattactgtcaagtgtggcactcaccatgcagacctatgttgaaacacaggcaaacatcaatgttatctcttattgggtggtgtacttgatggatattggattgtgtatatgagctatgataatatgtggtgtaggtaccttcatccatcagtatttcatctgttgtttcaatc

SEQ ID NO: 78761 - DNA, 3030 bp, Oryza sativa
  Clone ID: PAT_MRT4530_78537C.1
atggcacggggttccgctccgcttgacggtagcgtgctgccgccttcccgcatcgtgagcgagagacaggccgggctgccgcgccgcttcatgccggaatctgccaccggccgggagatagtctcgttgggcgagggatgcccggcgccacgctacccggggcggtccgtcttcttcctcccttttgctatggcagggctggttccgccattttcttctttcttcatggatgttctggagttttatgatctccagatggcgcacctcacccccaacgcggtaatgacattggccatcttcgcgcacctgtgcgagatgttcatcggggtgcgcccatcccttcggctgttccggtggttcttcaccgtacagccggtgtcgccgccgtcggtggttggtggctgctacttccagccgcgggggccggtgctgaaccgctacattctctgcgtcctccgcaagaagtgggatgactggaagagcgactggttctacacccccctcgccgacgaagcgcgcctccaacttccgagccagcctccagcgcaggcctccaactggcgggcgccggtagatctgggagatggctacgacgccgtcctcgaccgcctggcgggcctgcgatcccaggggctcacaggggccatggtgttcggcgactatcttcgtcgccggattgcgccactccagcggcgcgcccggggcgcctggagtacactgggtccgaggactgcggtcggggcgtcggaggagcgggctcctcgaggccacgatggcgcgggcgggagccgcaggggggaacaatctaccccgggagggggtcgtgcttctgggccccgcgacgggggcccggggagcggccgccctgccgacgcccgggggaagaggaagcaggaaggaacccctcccccatctcctccccaagggggtggggcggcgcgtgccagcagcaggcgcccggagggggccacgccgacgtcgcagcccgagggggagcggaagaagaaacggccccgcaagatgggggggacagaaccatcccggggaaacctcatttcccctccaaggtggtcatttaaccgaccccctcgcagcgagatcccgtcgcgtccctcccgccattccaagtccggccagtctgaggccgaggacccggcgaccacagaggcacggaggcgggaatctgtccggcgagaagccgcggatcgccttcgggaagccgaggaggccgctcgggaggccgcccgggctcgccagaccgaggaagccgctcgggaggaggccggactccgccaggccgaggtgatgacatcctccgaggcgacccgtgaaactgaccggcaagaggccgcggatcgccttcgagaagccgaggaagctgctcaggtggccgtccgagctcgccaagctgaagaagccgctcgggaggaggacagacttcgccaggccgaggcgacgacgacttccgaagcagctcgcgacgaggccgcgggcgcatcgcttgggcccactctctcgtgcgacgctcaagacaaaccaggtccgggggacatccccgagtccggcacgtccatcggcgggccaagccgcgcggcatcctcttcgaggcggctcttccccacgccttccgttgctccactgagcgcagaacctcttctgcaggccttggccgtcgctaacaccacggtgttggacgggttaagtgcccagatggaggccttgcaagcagagcgggtggagctcgacgccgcatgggcacgtgtcaaagaggggcgtcgctcggtggaggccatggtggaggtgggccgcaaggcacaccgccggcacgtctcagagctcgaagcccgtcggaaggtgctgggggaggtcgccaaggaggtggaggaggagcggggggctgccctcatcgccaccactgtgatgaacgaggcgcaggacaccctccgccttcaatacgggagctgggaggcggagctagggaaaaagctcgacgccgcccggggggtccttgacgctgccgctgcccgagaacggcgggcggcagagaccgaggtggcatcccggcggcgcgaagaagccattgaggcccgtgccatggcgctggaagagcatgcctgcgccgtggagagggacctggcggatcgcgaggccgccgttgctattcgggaggtcacactggcggtgcacgaagccgcctgtgccgaagaagagtccgcactccgcctccgcgaggacgcgctcaccgagcgggagcgagctcttgatgaggccgaggccgcggcgcaacggctggcggacagcctgtccctccgcgaggctgcgcaagaggaacaagcgcgccgtaatctggaaggtgcccgcgccgagagggccgcgctgaaccagcgggccgctgagctcgaggcgcgggagaaggagctggacgcgagggcgcgcagcggcggggcggccgcgggcgaaagcgacttaaccgcccgcctcgcagctgccgaacacaccatcgccgatttgcagggcgcgctagactcgtccgccggggaggtcgaggccctccgcttggcaggcgaggtagggcccggcatgcttcgggacgccgtctcccgtctagaccgcgccggccggcaggcgggcctctggggcgggcggactgcgaagtacgccgccaaccaggggggcctcgcccagcgcctctcggagatagccgggactctccaacggctccccgaggagctcgagaggacgattaagtcatcctcgagggacctcgcccgaggagcggtggagctcgtactggagagttaccaagccagggatcccgacttctccccatggacggcgctggacgagttccctcccgggaccgaggatggcgcgcgcgcgcaggtccgggacgccgccgaccatatcgtccacagcttcgagggttcggcccctcggctcgcattcgccctcaactccgacgaggaggacgatgacagcggagtgggcgatagtggcgacgaggctggcgacccgggtgcatcggagtga

SEQ ID NO: 78762 - DNA, 177 bp, Oryza sativa
  Clone ID: PAT_MRT4530_78538C.1
atgaggccaccactttggttggttctcctgcgccgtgtagcggtcatcacaatagtgatgccggaggacgcgggatgtccatccttgtggacaagtggcggcggcgtgtttcccttgttgatgaagaccatcggcgatgttgcatcggcgaagacaattgcgcagtcgtacggctga

SEQ ID NO: 78763 - DNA, 3142 bp, Oryza sativa
  Clone ID: PAT_MRT4530_78539C.1
atggcacggggctctgctccactcgatggtagcgtgctgccgctttcccgcatcgtgagcgagaggcaggccgggctgccgcgccgcttcctgccggaatctgccaccggccaggagatagttacgctgggcgagggacgcccggcgccacgctacccggggcggaccgttttcttccttcctttcgcaatggcagggcttgttccgctattttcttctttctttatggatgttctggagttttacgatcttcagatggcgcacctcacccccaacgcggtaatgacattggccatcttcgcgcacttgtgcgagatgttcatcggggtgcgcccatcccttcggttgttccggtggttcttcaccgtacagccggtgtcgccgccgtcggtggttggtggctgctacttccagccgcgggggccggtgctgaaccgctacattccttgcgtgctccacaagaagtgggatgactggaagagcgactggttctacacccccctcgccgacgaagcgcgccttcgacttccgaaccagcccccggcgcaggcctccagctggcgggcgccggtagatctgggagatggctacgacgccgtcctcgaccgcctggcgggcctgcgatcccaggggctcacaggggccatggtgtacggggactaccttcgtcgccggatcgcaccactccagcggcgcgcccggggtgcctgggagtacaccgggtccgaggactgtatgaggacccaccggggggtcaaatgggactgggtccctgaagacttcaaggtaatgatccaacgggtgctgaatctcagctccgcggaggcatcgctcatcccccaaggagtcctccccctctgcagcgatccagatcgcgccaccatcctgaccatcatgaaggcggtcggggcctcagaggagcaggctcctcgaggccatgatggcgcgggcgggagctgcaggggagaacaatctaccccaggagggggtcgtgcttccgggctccgtgacgggggctcggggggcttgccgccctgccgacgcccgagggaagaggaagcaagagggttcctcctccccatctcctccccgagggggcggggcggcgcgtgtcagcagcaggcgcccggagggggccgcgccgacgccgcagcccgagggggagcggaagaagaaacggcttcgcaagatggggggacagaaccatcccggggaaaccttatttcccctccaaggtagtcgtttaaccgaccccctcgcaggttcgtcccacgcccattgtggctgtattcattctcccaacgcgagttttcactcacccatcttgtttgtcttctggtctttcttctgtttcagcgagatctcgtcgcgtccctcccgccattccaagtccggccagtctgaggccgaggatacggcgaccgcggaggcccggaggcgagaatctgaccggcgagaagccacggatcgcctacgggaagccgaggaggccgcccgggaggccgtccgggctcgccaggctgaagaagccgctcgggaggaagccagacttcgccaagccgaggcggcgacaacttccgaggcagctcgcgacgaggccgcgggcacatcgcttgggcccactccctcgggcaacactcaggacaagccaggtccgggggacgtccccgagcccggcacgtccatcggcgggccgggccgcgcggcatcctcaccgaggcggctctcccccacgccttccgttgccccactgagcgcagagccccttttgcaggccttggccgtcgcaaacaccacggtgttggacgggttaagtgcccagatggaggccctgcaagcagagcgggcggagctcgacgccgcatgggcgcgcgtcgaagaggggcgacactcggtggaggccatggtggaggtgagccgcaaggcacaccgccggcatgcctcagagctcgaagcccgtcggaaggtgctggaggagatcgccagggaggtggaggaggagcggggggctgccctcatcgccactaccgtgatgaacgaggcgcaggacgacctccgccttcaatacgggagctgggaggcggagctagggaagaagctcgacgccgcccggggggtccttgacgctgccgctgcccgagaacggcgggcggcggagaccgaggtggcatcccggcggcgcgaagaagcccttgaggcccgtgccatggcgctggaagagcgtgcctgcgtcgtggagagggacctggcggaccgcgaggccgccgttgccattcgggaggtcacactggcggcgcacgaagccgcctgtgccgaagaagaatccgcactccgcctccgcgaggatgcgctcaccgagcgggagcgagccctcgaggaggccgaggccgcagcgcaaaggctggcggagagcgcgtccctccgcgaagctgcgcaagaggaacaagcgcgtcgcaatctggaaggtgcccgcgccgagagggccgcactgaaccaacgggccgctgaactcgaggcgcaggcaagggagctggatgcaagggcgcgtagcggtggggcggccacgggcgacagcgacttagccgcccgcctcgcagctgccgaacacaccatcgcggatctgcagggcgcgctgaattcgtccaccggggaggtcgaggcccttcgtctggcaggcgagatagggcccagcatgcttcgcgacgccgtgtcccgtttagaccgcgccgggcggcaggcgggtctctggggcgggcggactgcgaagtacgccgccaaccaggggggcctcgctcagcgcctctcggagatggccgggactctccaacggctccccgaggagctcgagaggacgattaagtcatcctcgagggaccttgcccgaggagcggtggagctcgtactggcgagttaccaggccagggaccccgacttctccccatggatggcgctggacgagttccctcccgggactgaggacggcgcgcgcgcgcggttccaggacgccgccaaccatatcgttcacagcttcgagggttcggcccctcggctcgcgttcgccctcagctccgacgaggagggcgatgacggcggtgtgggcgacagtggcgacgaggctggcgacccgggtgcatcggagtga

SEQ ID NO: 78764 - DNA, 2708 bp, Oryza sativa
  Clone ID: PAT_MRT4530_7853C.1
atgcttttcgccaagctcgatgactcgcccatgctccgcacgcagatacagtcactggaagaaagtgctgaaattctcagggagagatgtttgaagtttcataaaggttgccgcaagtatacggaaggattaggagaagcttatgatggagatattgcatttgcaagctcactcgaaacatttgggggaggccacaatgaccctataagtgttgcttttggtggacctgttatgaccaaatttacaattgccttgagagaactaggcacatacaaggaagtcctccgctcccaggttgagcacatgctaaatgacagattgctgaattttgtggacattgatttgcatgatgttaaggatgcacggaagcgtttcgacaaggctagcctcttgtatgaccaggttcgtgataagtacctgtcactgaagaaaggcacacgagctgacataacaactgccattgaagatggatacgacctattgcatcagatggagccatatattaatcaggttcttgcttatgcacaacaatcaagagaaagggcaaacaaggagcaagcctctcttgtagagagaatgcatgaatacaaaaagcagatagatcgggaaattcgtttatcaaatggtttgactgatgcccataatggtgatggaattcaaacgattgctagaagttcacataaaatgattgaggcagtgatgcagtcggcctcaaaaggcaaggtccagaccattcgtcaaggttacctctcgaaaagatcttcaaacttgagagctgattggaaaagaaggttttttgtccttgatagtcgaggaatgctgtactactatcgcaagcaaattaataggacacctggtggttgttccagtcacccaagaagcattggcaaccccactgaacatggttctgggttgctgagcagactattctcatctcattaccatggcattatacatgatgagaaatctgttgcacggcatactgtaaatttgctgacatcaaccattaaagtggatgcagaacaatcagatctgaggttctgcttcagaataatttcacccacaaaggtctacacactacaggcagagagtgcaatagatcaaatggattggattgaaaagattactggtgtcattgcatctttgcttagctcacaatccccagaacagtgttttctgctaagccctaagagctgtggccatgatggcagtgccagtgaaagtagctcctttactagccaggatctggaaccttccatgtatgatgacttaacattggaaaagaacactggaaatgggcaacatgatgtcagaggcacacattatcacaagactaacatgaaacctgaaaaaccaattgatttgcttaggaaagttgatggcaatatcatttgtgttgattgtggttctatggaacctgattgggcatcattaaaccttggtgcacttctgtgcatagagtgctctggggtacacagaaatctcggagtgcatatatcaaagttaatcagcactacattgttccgcagcgctcatggattagatacggcatggcacttcactgtcagcaagcctaaacactcagatcctttctctgccaaagagaagtttatccatgccaagtatgctgacaaggaatttgtacgaaagtatagcatggatgagattcagctagctcagcagatgtgggataatgtaactgcaaatgacaagagagctgtatacagtctcatcgtgcaatcccgcgccaatgtaaatttagtttatggagagatgtcctatagttcacgttcgactactggaagatcatctcagcaagagcactcttcctcaccatctgatggaagccctgtatttttcgattgccattcacatgaaaaagtttctcctagagagcccctttctcctgccagcacaagttcacgtgtagatgatggggaagaaagatgcgaagatgttggaatggttgaattacttttgcagtacggagctaatgtaaatgcaattgattcaagaggccggacaccccttcatcagtgtatattgaaaggaagacacatacatgctaagcttctactctccaggggggctaatccacaagttgcggaccaagatggcaggacggcattacagtgtgccatcgacggtggaacaagcgacgacgagattcttgtgttgttagaagattatactagataaaatctggtggggaaaaagccctcacttcagtagcatttcttctgtgacacagaccacgcccgttgtgaagtcaagagtaacccggctccaggcttctcccagcttgtgttgctcaatgacccaagtttgtggcgtgaagtagcctatgggttcttctgaagcttcagcaacatgatgtgcctgctccttttcttctcctatatatataccatttcgttgccggattctcttagcgtaggctattcttatttatattcatcttgcaaacggcttggtttttgtttgcagatgattcatgcatagtatgtaagtttgtatatccatcatatcgagttgcttctttctctgtttttttgtatcatctcagaacctgaagtaggtccactagtttccatgaaggatggttggatgtacataccgagatgtgccattgtgatttattatggaatgtgaaatatcacctttttgaaaaggggggcaatttcgttcttgcctctactttgaggtcc

SEQ ID NO: 78765 - DNA, 2613 bp, Oryza sativa
  Clone ID: PAT_MRT4530_78540C.1
atggcacggggctccgcaccgctcgatggtagcgtgctgccgccttcccgcatcgtgagcgagaggcaggccgggctgccgcgccgattcatgccggaatccgccaccggccgggaggtggtcgcgctggccgagggacgcccggcgccacactacccggggcggtccatcttcttcctctctttcgcaatggcggggctggtcctgccattctctatttttttcatggatattctggagttttatgatctccagatggcgcacctcacccccaacgcgataatgacgttggccatcttcgcgcacctgtgcgagatgtttatcggggtgcgcccatctctccagctgttccggtggttcttcaccgtacagccggtgtcgccgccgacggtagtcggtggctgctacttccagccgcgggggcaggtgttgaaccgctacattccctgcgtcctccgcaaaaagtgggacgactggaaaagcgattggttctacacccccctcgccgacgaagcgcgcctccgacttccgagccagcccccggcgcaggcctccagctggcgagcgacagtagatctgggagacggctacgacgccgttcttgaccgcctggcgggtctgcgatcccaggggctcacgggggccatggtgttcggcgactaccttcgtcgccggatcgcgccgctccagcggcgcgcccggggcgcctgggagtacaccgggcccgacgactacatgaggacccaccaagggcgcaaatgggactgggaccctgaggacttcaggatggtggtccaacgggtgctgaatctcagctacgtggaggcatccctcatcccccaaggggtcctccccctctgctgcgatccagagcgcgccaagatcctgaccatcatgcaggtggtcggggcgtcaggggagcgggccccccgaggccacgatggcgcgggcgggagccgcaggggggaacaatctaccccgggagggggtcgtgcttctgggccccgcgacgggggcctggggggcagccgccctgccgacgcccgggggaagaggaagcaggagggaacccctcccccatctcctccccgagggggcggggcggacgagccagcttcgggggacgcccccgagtccggcacgttgatcggcgggccgagccgcacggcacccacaccgaggcggctctcccctctgtcttctgctgccccactgagcgcggagcccttcctgcaggccttggccgccgcgaacagcacggtgctggatgggttaagtgcccagatggaggccctgcaggcggagcgggcggagctcgacacggcgtgggcgcgcgtcgaggaggggcggcgctcggtggaggccatggtggaggcgggccgcaaggcgcaccgccggcacacctcacagctcgaagcccgtcgtagggacctggcggagatcgccagggaggtggaggaggagcgggagactgccctcatcaccaccgccgtgctcgacgaggcgcggaacgacctccgcctccaatacgggagccgggcggcggagctagaggagaagctcgacgccgcccggggagtccttgacgccgccgctgcccgggaacggcgggcggcggagaacgaggcggcgtcccggcagcgcgaagaggcccttgaggctcgcgccacggcgctggaggagcacgcccgcgcccttgacgcgaaggagagagacctggcggaccgcgaggccgccgtcgccacccgggaggcaacactggcggcgcacgaggccgcctgcgccgaagaggagtccgcactccgcttccgcgaggacgcgctcaccgagcgggggcgagctctcgaggaggccgaggccgcggcgcagcggctggcggacagtctgttcctccgcgaggcagcgcaggaggagcaggcgcgccgcaatctggaaggcgcccgcgccgagagggccgcactggatcagcgggccgctgagctcgaagcgcgggcgaaggagctggacgcgagagcgcacagcggcggagcggctgcgggccaaggcgacctagccgcccgcctcgcagccgccgaacacaccatcgccgagctgcagggcgcgctggactcgtccgccggggaggtcgaggccctccgtttggcgagcgaagtagggcccggcatgcttcgggacgccgtctcccgtctagaccgcgccgggcggcaagcgggcctctggggcgggcggcacgcgaagtacgccgccaaccaggcgggcctcgcccagcgcctctcagagatgaccggggccctcgagcggctccccgaggagctcgaggagacgatcaagtcatcctcgagggacctcgcccggggggcggtggagctcgtactggcaagctaccaggccagggaccctgacttctccccgtgggcagcgctggaagagtttcctcccggaaccgaggacggcgcgcgcgcgaaggtccgggacgccaccgaccatatcgtccacagcttcgagggtacggcccctcggctcgcgttcgcgctcgactccgacgaggagggcggtgacgacggtgcggacgacagcgacgacgaggccgacgtcccgggcgcgtcggagtga

SEQ ID NO: 78766 - DNA, 258 bp, Oryza sativa
  Clone ID: PAT_MRT4530_78541C.1
atgctccccccacgagcgtctagaagcttctggaaggaggagaggggggcaaaccctaggctgcgaggtcgagacggcggcggcgggaggaggacgagaggggtttttgtctctcgctacgcggctctcgaagcgaagcggaaggcggtggggctctgcctcgagattcgtgcccggattgatgcggccgtttctgggtgggccgtgttgatggcctcgaatgggcatcgacgtgcgttgatgggccgtgatcgttag

SEQ ID NO: 78767 - DNA, 2973 bp, Oryza sativa
  Clone ID: PAT_MRT4530_78542C.1
atggcacggggctccgttccgcttgacggtagcgtgctgccgccttcccgcatcgtgagcgagaggcaggccgggctgccgcgccgcttcatgccggaatctgccaccggccaggaggtggtcgcgctgggtgagggacgcccggcgccacactacccggggcggtccgttttcttcctccctttcgcaatggcagggctggttccgccattttcttctttcttcatggatgttctggagttttacgatctccagatggcgcacctcacccccaacgcggtaatgacattggccatcttcgcgcacctgtgcgagatgttcatcggggtgcgcccatctctccggctgttccggtggttcttcaccgttcagccggtgtcgccgccgtcgatagtcggtggctgctacttccagccgcgggggccggtgttgaaccgctacattccctgcgtcctccgcaagaagtgggatgactggaagagcgactgctggcgggtgccggtagatctgggagacggctacgacgctgtcctcgaccgcctggcgggcttgcgatcccaggggctcacaggggccatggtgtacggtgactaccttcgtcgccggatcgcgccactccagcggcgcgcccggggcgcctgggagtacaccgggtccgaggactgtatgaggacccaccggggggtcaaatgggactgggtccctgaagacttcaaggtaatgatccaacgggtgctgaatctcagctccgtggaggcatccctcatcccccaaggagtcctccccctctgcagcgatccagatcgcgtcaacatcctgaccatcatgatgacggtcggggcctcagaggagcgagcttctcgaggccatgacggcgcgggcgggagtcgcaggggcgaacaatctactccaggagggggtcgtgcttccgggccccgtgacgagggctcgggggacagccgccctgccgacgcccgagggaagaggaagcaagagggtacctcctccccatctcctccccgagggggcggggcagcgcgtgtcagcagcaggcgcccggagggggccgcgccgacgccgcagcccgagggggagcggaagaagaagcggctccgcaagatggggtggacagaaccatcccggggaaaccttatttcccctccaaggtggtcgtttaaccgaccccctcacagcgagatctcgtcgcgtccctcccgtcattccaagtccggccaatctgaggccgaggatacggcgaccgcggaggcccggaggcgggaatctgaccggcgagaagccgcggatcgtcttcgggaagccgaggaggccgcccgggctcgccaggctgacgaagccgctcgggaggaggccagactccgccaggccgaggcgacgacaacctccgaggcaacccgcgaaactgaccggcaagaagccgcgaatcgccttcgggaagccgaggaagctgcccaggacaagccaggtccgggggacgtccccgagtccggcacgtccatcggcgggccaagccgcgcggcatcctcaccgaggcggttctcccccatgccttccgttgccccgctgagcgcagagccccttctgcaagccttggccgtcgcaaacaccacggtgttggacgggttaagtgcccagatggaggccttgcaagcagagcgggtggagctcgacgccgcatgggcgcgtgtcgaagaggggcgtcgctcggtggaggccatggtggaggtgggccgcaaggcacaccgccggcatgcctcagagctcgaggcccgtaagaaggtgctggaggagatcgccagggaggtggaggaggaacgggaggctgccctcatcgccaccaccgtgatgaacgaggtgcaggacaacctccgccttcaacacgggaactgggaggcggagctagggaagaagctcgacgccgcccggggggtccttgacgctgccgctgcccgagaacggcgggtggcggagagcgaggcggcgtcccggcagcgtgaagaaaccctcgaggcccgtgccatggcgctggaagagcgttcctgcgtcatggtgaaggatctggcggaccgcgaggccgccgttgccatttgggaggtcacactggcggcgcacgaagccgcctgtgccgaagaggagtccgcactccgcctccgcgaagatgcgctcaccgagcgggagcgagccctcgaggaggccgaggccgcggcgcaaaggttggcggagagcgcgtccctccgtgaggctgcgctagaggaccaagcgcgccgcaatctggaaggtacccgcgccaagagggccgcactgaaccagcgggccgctgaactcgaggcgcaggcaaaggagctggatgcaagggcgcgtagcggtggggcggttacgggcgacagcgacttagccgcccgcctcgcagctgccgaacacaccatcgcggatctgcagggcgcgctgaattcgtccatgggggaggtcgaggcccttcgcctgacaggcgagatagggcctagcatgcttcgcgacgtcgtgtcccgtctggaccgcgccaggcggcaggcgggcctctggggtgggcggactgtgaagtacgccgccaaccaggggggcctcgcccagcgcctctcggagatggccgggactctccagcggctccctgaggagctcgagaggacgattaagtcatcctcgagggacctcgcccgaggagcggtggagctcgttctagcgagttatcaggccagggatcccgacttctccccttggacggcgctggacgagttccctcccgggatcgaggacggcgcgcgcgcgcaggtccgggacgccgccgaccatatcgtccacagcttcgagggttcggcccctcggctcgcgttcacccccaactccgacgaggagggcgataacggcggtgtgggcgacagtggcgacgaggctggcgacccgggtgcatcggagtga

SEQ ID NO: 78768 - DNA, 3252 bp, Oryza sativa
  Clone ID: PAT_MRT4530_78543C.1
atggcacggggctccgctttgcttgatggtagcgtgctgccgccttcccgcatcgtgagcgagaggcaggccgggctgccgcgccgcttcatgccggaatctgccaccggccgggagatagttacgctgggcgagggacgcccggcgccatgctacccggggcggtccgtcttcttcctcccttttgcaatggcagggctggttccgccattttcttctttcttcatggatgttctggagttttacgatctccagatggcgcacctcacccccaacgcggtaatgacattggccatcttcgcgcacctgtgcgagatgttcatcggggtgcgcccatcccttcggctgttccggtggttcttcaccgtacagtcggtgtcgccgccgtcggtggttggtggctgctacttccagccgcgggggctggtgttgaaccgctacattccctgcgtcctccgcaagaagtgggatgactggaagagcgactggttctacacccccctcgccgacgaagcgcgcctccgacttccgagccagcccccggcgcaggcctccagctggcgggcgccggtagatctgggagatggctatgacgccgtcctcgaccgcctggcgggcctgcgatccctggggctcacaggggccatggtgtacggcgactatcttcgtcgccggatcgcgccactccagcggcgcgcccggggtgcctgggagtacaccgggtccgaggactgtatgaggacccatcggggggtcaaatgggactgggtccccgaagacttcaaggtaatgatccaacgggtgctgaatctcagctccgcggaggcatccctcatcccccaaggagtcctccccctctgcagcgatccagatcgcgccaacatcctgaccatcatgcaggcggtcggggcgtcggaggagcgggctcctcgagaccacgatggctcgggcgggagccgcaggggggaacaatctaccccgagagggggtcgtgcttctgggccccgtgatgggggctcggggggcagccgccctgccgacgcccaagggaagagaaagcaagagggtacttcctccccatctcctccccgagggggcggggcggcgcgtgtcagcagcaggcgcccggagggggccgcgccgacgccgcagcccgagggggagaggaagaagaaacggctccgcaagatggggggacagaaccatcccggggaaacctcatttcccctccaaggtggtcgtttaaccgaccccctcgcaggttcgtcccacgcccattgtggctgtattcattcttccaacacaagttttcattcacccatcttgtttgtcttctggcttttcttctgcttcagcgagatcccgtcgcgtccctcccgccattccaagtccggccagtctgaggccgaggacccagcgaccacagaggcccggaggcgggaatctgaccggcgagaagccgcggatcgccttcgggaagccgaggaggccgctcgggaggccgcccgggctcgccagaccgaggaagccgctcgggaggaggccggactccgccgggccgaggcgacgacatcctccgaggcgacccgtgaaactgaccggcaagaggccgtggatcgccttcgagaagccgaggaagctgcccaggtggccgtccgagctcgccaagctgaagaagccgctcgggaggaggctagacttcgccaggccgaggcgacaacgacttccgaggcaactcgcggcgaggccgcgggtgcatcgcttgggcccactcccttgtgcgacgctcaggacaaaccaggtccgggggacatccccgagtccggcacgtccatcggcgggccaagccgcgcggcatcctcttcgaggcggctcttccccacgccttccgttgctccactgagcgcagaaccccttctgcgggccttggccgtcgcaaacaccacggtgttggacgggttaagtgcccaggtggaggccctgcaagcagagcgggcggagctcgacgccgcatgggcgcgtgtcgaagaggggcgacgctcggtggaggccatggtggaggtgggccgcaaggcacaccgccggcacgtctcagagctcgaagcccgtcggaaggtgctgggggagatcgccaaggaggtggaggaggagtggggggctgccctcatcgccaccaccgtgatgaacgaggcgcaggacaccctccgccttcaatacgggagctgggaggcggagctagggaagaagctcaacgccgcccagggggtccttgacgctgccgctgcccgagaacggcgggcggcggagaccgaggtggcatcccggtggcgcgaagaagcccttgaggcccagggacctggcggatcgcgaggccgccgttgccatccgggaggcaacgctgactgcgcacgaggcgcctgcgccgaagaggagtccgcgctccgcctccgcgaggacgcgctcaccgagcgggagcgagctctcgaggaggccgaggccgcggcgcaacggctggcggacagcctgtccctccgcgaggcagtgcgggaggagcaggcgcgccgtaatctagaaggtgcccgcgccgagagggccgtgctgaatcagcgggccgctgagctcgaggcgcgggagagggagctggacgcgagggcgcacagcggcgaggcggccgcgggcgaaagcgacttaaccgcccgcctcgcagctgccgaacacaccatcgccgatctgcagggcgcgctagactcgtccgccggggaggtcgaggccctccgcttggcaggcgaggtagggcccggcatgcttcgggacgccgtctcccgtctagaccgcgccggccggcaggcgggcctctggggcgggcggactgcgaagtacgccgccaaccaggggggcctcgcccagcgcctctcggagatagccgggactctccaacggcttcccgaggagctcgagaggacgattaagtcatcctcgagggacctcgcccgaggagcggtggagctcgtactggcaagttaccaagccagggatcccgacttctccccatggacggcgctggacgagttccctcccgggaccgaggacggcgcgcgcgcgcaggtccgggacgccgccgaccatatcgtccacagcttcgagggttcggccccttggctcgcgttcgccctcaattccgacgaggaggacgatgacggcggagtgggcgacaatggcgacgaggctggcgacccgggtgcatcggagtga

SEQ ID NO: 78769 - DNA, 607 bp, Oryza sativa
  unsure (1)..(607): unsure at all n locations
  Clone ID: PAT_MRT4530_78544C.1
attatcattaaatagtggcaaactcaccaggctattgatggtataattagggagtaagagtcataatngcacttcctatggctacctgtgctgaccattacatacggaataagatgttatgtcacaccttagcttgtttcagggccctgctgctgataagagggaattaataccttttaatgtctgcaacctctgcgcacaagatccccggccccgccggggtcgcccccgccgcgcgtcctccgccgccccgccgccggctgacccgcccacctgcctctgctcccggcgccacggggcatgagtggatttcagatctgtgaggctctgatactaaaccgtctagttgaccttcccaataatttatagccatgtaggttcccatcatcatgtttatatttggcacctttgcgaggtaaaagatggcatctttctttcttcactgtagtttgtggttttggattctagttactccgtgcttgtataatggatataccccacttgtattttcttttggctcgttatgttatcctgtatgttcaccttccagttanaattccaaactatgctatgctcgaccaccttttagcttcaaaaaaaaaaaaaa

SEQ ID NO: 78770 - DNA, 2448 bp, Oryza sativa
  Clone ID: PAT_MRT4530_78545C.1
atggcacggggctccgcaccgcttgatggtagcgtgctgccgccttcccgcatcgtgagcgagaggcaggccgggctgccgcgccgattcatgccggaatctgccaccggccgggaggtggtcgagctgggcgagggatgcctggcgccacactacccggggcggtccgtcttcttcctctctttcgcaatggccgggctggtcccgccattctctaatttcttcatggatgttctggagttttatgatctccagatggcgcacctcacccccaacgcaataatgacgctggccatcttcgcgcacctgtgcgagatgttcatcggggtgcgcccatctctccggctgttccggtggttcttcactgtacagccggtgtcgccgccgacggtggtcggtggctgctacttccagccgcgggggcaggtgctgcaccgctacattccctgcgtcctccgcaagaagtgggacgactggaagagcaattggttctacacccccctcgccgacgaagcgcgcctccgacttccgagccagcccccggcgcaggcctccagctggcgggcgacggtagatctgggagacagctacgacgccgttcttgaccgcctggcggcgagatcccgtcgcccccccccccgccattccaagtccggcgggctcgaggccgaggagacggcgaccgcggaggcccggaggcgggaagctgaccggcgagaagccgcagaccgcctccgggaagccgaggaggctgcccaggaggccgtccgggttcgccaggctgaggaggccgctcgaaaggaggccagactccgccgggccggggagtccgtccgggaggaggaggcggcgcgcgtacgccaggcggcctgccaagcccccgacccgactccgcccgaggcgacgacgacttccgaggccacccacgacgaggccgcggacgcgccgctcgggcccgacccctcgggcgatgcttgggacgagccagcttcgggggacgcccccgggtccggcacgtcgatcggcgggccgagccgcgcggcacccacaccgaggcggctctcccctctgtcttccgctgccccactgagcgcggagcccctcctgcaggccttagtcgccgtgaacagcacggtgctggacgggttaagcgcccggatggaggccctgcaggcggagcgggcggagctcgacgcggcgtgggcgcgcgtcgaggaggggcgacgctcggtggaggccatggtggaggcgggccgcaaggcacaccgccggcacgcctccgagctcgaggcccgtcgtagggacctggcggagatcgccagggaggtggaggaggagcgggagactgccctcatcgccaccgccgtacttgaggaggtgcgggacgacctctgcctccaatacgggagccgggcggcggagctagagaagaagctcgacgccacccggggagtccttgacgccgccgctgcccgggaacggcgggcggcggagatcgaggcggcgtcccggcagcgcgaagaggcccttgaggctcgcgccacggcgctggaggagcgcgcccgcgccctggacacgaaggagaaggacctggcagaccgcgaggccgctgtcgccacccgggaggcaacactggcggcgcacgaggccgcctgcgccgaagaggagtccgcgctccgcctccgcgaggacgtgctcaccgagcgggggcgagctctcgaggaagccgaggccgcggcgcagcggctggcggacagcctgttccttcgcgaagcggcgcgggaggaggccgcgctggatcagcgggctgctgagctcgaggcgcgggcgaaggagctggacgcgagagcgcacagcggtggggcggccgcgggccacggcgacctagtcgcccgcctcgcagccgccgaacacaccatcgccgagatgcagggcgcgctggactcgtccgccggggaggtcgaggccctccgcttggcgaacgaggtagggcccggcatgcttcgggacgccgtctcccgtctagaccgcgccgggcggcaggtgggcctctggggcgagcggaccgtgaagttcaccgccaaccaggggggcgtcgcccagcgcctctcagagatggccgggaccctccagcggctccccgaggagctcgaagagacgatcaagtcatcctcgagggaccttgcccggggggcggtggagctcgtactggcaagctaccaggccagggaccctgacttctccccgtgggcagcgctggacaagttccctcccggaaccgaggacggcgcgcgcgcgcaggtccgggacgccgccgaccacatcgtccacagcttcgagggtacggcccctcggctcgcgttcgccctcgactccgacgaggagggcggtgacgacggtgcgaacgacaacgacgacgaggccggcgacccgggcgcgtcggagtga

SEQ ID NO: 78771 - DNA, 3126 bp, Oryza sativa
  Clone ID: PAT_MRT4530_78546C.1
atggcacggggctccgctctgctcgatggtagcgtgctgccgccttcccgcatcgtgagcgagaggcaggccgggctgccgcgccgcttcatgccggaatctgccaccggccgggagatagtcacgctgggcgagggacgcccagcgccacactacccggggcggtccgtcttcttcctcccttttgcaatggcagggctggttccgccattttcttcttttttcatggatgttctggagttttacgatctccagatggcgcacctcacccccaacgcggtaatgacattggccatcttcgcgcacctgtgcgagatgttcatcggggtgcgcccatcccttcggctgttccggtggttcttcaccgtacagtcggtgtcgccgccgtcggtggttggtggctgctacttccagccgcgggggccggtgctgaaccgctacatcccctgcgtcctccgcaagaagtgggatgactggaagagcgactggttctacaccccccttgccgacgaagtgcgcctccgacttccgagccagcccccggcgcaggcctccagctggcgggcgccggtagatctgggagatggctatgacgccgtcctcgaccgcctggcgggcctgcgatcccaggggctcacaggggccatggtgtacggcgactaccttcgtcgccggattgcaccgctccagcggcgcgcccggggcgcctgggagtacaccgggtccgaagactacatgaggacccatcagggagtcagatgggactgggctcctgaggacttcaagatagtggtccaacgggtgctgaatctcagctccgtggaggcatccctcattccccaaggagtcctccccctctgcagcgatccagatcgcgcctccatcctgaccatcatgcaggcggtcggggcgtcggaggagcgggctcctcgaggccacgatggcgcgggcgggagccgcaggggggaacaatctaccccgggagggggtcgtgcttctgggcctcgcgacgggggcccggggggcagccgccccgccgacgcccgggggaagaggaaacagggaggaacccctcccccatctcctccccgagggggcggggcggcgcgtgtcagcagcaggcgcccagagggggccacgccgacgtcgcagcccgagggggagcggaagaagaaacggctccgcaagatgggggggacagaaccatcccggggaaaccttatttcccctccaaggtggtcgtttaaccgaccccctcgcagcgagatcccgtcgcgtccctcccgccattcccagtccggccagtctgaggccgaggacccggcgaccgcagaggcccggaggcgggaatctgaccggcgagaagccgcggatcgccttcgggaagccgaggaggccgctcgggaagccgcccgggctcgccagaccgaggaagccgctcgggaggaggccggactccgccaggccgaggcgacgacatcctccgaggcgacccctcgccaagctgaagaagctgctcgggaggaggccagactccaccaggccgaggcgacgacgacttccgaggcagctcgcgacgaggccgcgggggcatcgcttgggcccactccctcgggcgacgctcaggacaagccgggtccgggggacgtccccgagtccggcacatccatcggcgggccgagccgcgcggcatcttctccgaggcggctcttccccacgccttccgtcgccccactgagcgcagaaccccttctgcaggacttggccgtcgcaaacaccacggtgttggacgggttaagtgcccaggtggaggccctgcaagcagagcgggcggagctcgacgccgcatgggcgcgtgtcgaagaggggcgacgctcggtggaggccatggtggaggtgggccgcaaggcacaccgccggcacgtctcagagctcgaagcccgtcggaaggtgctgggggagatcgccaaggaggtggaggaggagcggggggctgccctcatcgccaccaccgtgatgaacgaggcgcaggacaccctccgccttcaatacgggagctgggaggcggagctagggaagaagctcgacgccgcccagggggtccttgacgctgccgctgcccgagaacagcgggcggcggagaccgaggtggcatcccggcggcgcgaagaagccctcgaggcccgtgccatggcgctggaagagcgtgcctgcgtcgtggagagggacctggcggatcgcgaggccgccgttgccatccgggaggcaacgctggcgacgcacgaggccgcctgcgccgaagaggagtccgcgctccgcctccgcgaggacgcgctcaccgagcgggagcgagctctcgaagaggccgaagccgcggcgcaacggctggcggacagcctgtccctccgcgaggcagcgcgggaggagcaggcgcgccgcaatctggaaggtgtccgcgccgagagggccgcactgaaccagcgggccgctgaactcgaggcgcaggcaaaggagctggacacgagggcgcgcagcgacggggcggccacgggcgaaagcgatttagccgcccgcctcgcagctgccgaacacaccatcgccgatctgcagggcgcgctagactcgtccgccggggaggtcgaggccctccgcttggcaagcgaggtagggcccggcatgcttcgggacgccgtctcccgtctagatcacgccggccggcaggcaggcctctggggcgggcggactgtgaagtacgccgccaaccaggggggcctcgcccagcgcctctcggagatggccgggactctccaacggctccccgaggagcttgagaggacgattaagtcttcctcgagggacctcgcccgaggagcggtggagctcgtactggcgagctaccaggccagagaccctgacttctccccatggacgacgctggatgagttccctcccgggaccgaggacggcgcgcgcgcgcaggtccgggacgccgccgaccacatcgtccacagcttcgagggttcggcccctcggctcgcgttcgccctcaactccgacgaggaggacgatgacggtggagcgggcgacagtggcgacgaggctggcgacccgggtgcatcggagtga

SEQ ID NO: 78772 - DNA, 433 bp, Oryza sativa
  Clone ID: PAT_MRT4530_78547C.1
aggatagaaactgtgattaaattttccaaaagccccaggcctgcaccctgcagggcaggaaaacccggggccctaaggggcctttaaaccaaagaaaaaacaccgccctgggccccccaaaaaacataagcacgggggggcggacatgacgacccttattgagcaagggaaccatcaagccctggccgccgaacccacggaaaaatgccaaaacgcgaaacaaaatgtctggggaggggttccgggggcagaccaaaaaatccaccggacgggagatggcatatgttccaaaccgcgcctccgtacggggaccagaaactcccctgggtggacggtgaggggcacctaacccgggggggaacttcaaccccgcgggccacacatccccagaaccgttaagggggctaagcccaaaagggggggggagggactt

SEQ ID NO: 78773 - DNA, 3165 bp, Oryza sativa
  Clone ID: PAT_MRT4530_78548C.1
atggcacggggctccgctctgctcgatggtagcgtgctgccgccctcccgcatcgtgagcgagaggcaggctgggctgccgcgccgcttcatgccggaatcggccaccggccgggagatagtcacgctgggcgagggacgcccggcgccagactacccggggcggtccgtcttctttctcccttttgcaatggcagggctggttccgctattttcttctttcttcatggatgttctggagttctacgatctccagatggcgcacctcacccccaacgcggtgatgacattggccatcttcgcgcatctgtgcgagatgttcattggggtgcgcccatctcttcggctgttccggtggttctttaccgtgcagtcggtgtcgccgccatcggtagtcggtggctgctacttccagccacgggggccggcgctgaaccgctacatcccctgcgccctccgcaagaagtgggacgactggaagagcgattggttctacactcccctcgccgacgaagcgcgcctccgacttccgagccagcccccggcgcaggcctccagttggcgggcgccggtagatctgggggatggctatgacgctgtcctcgaccgcctggcgggcctgcgatcccaggggctcacaggggccatggtgtatggcgactacctccgtcgtcggattgcgccgctccagcggcgcgctcggggcgcctgggagtacaccgggtccgaagactacatgaggacccaccagggagtgagatgggactgggctcctgaggacttcaagatattggtccaacgggtgctgaatctcaactccgtggaggcggccctcattccccaaggaatcctccccctctgcagcgatccagaccgcgcctccatcttgaccattatgacggcagtcggggcctcagaggagggagctccaaagggccacgacggcgcaggcgggagccgcaagggggatcaatctaccccaggagggggtcgtgcttctgggccccgcgtcaggggctcggggagcaaccgccctatcgacgaccgggggaagaggaagctgggacgaacacctcccccatctcctccccgagggggcggggcagtgcgtgccagcagcaggcgcccggagggggccgcgccaacatcacagcccgagggggagcgcaagaagaaacggctccgcaagatgggggagacagaaccatctcggggaaacctcatctcccctccaaagtggtcgttcaaccgaccccctcgcagcgagatcccgtcgcgtccctcccgtcattccaagtctggccaatctgaggccgaggatccggcggccgcagaggcacggaggcgagaatctgaccggcgagaggccgcagatcgcctacgggaagctgaagaggccgcccgggaggccgcccgggctcgccaggctgaggataccgctcgggaggaggccgcccgagcccaccaggccgaggaagccgctcgggagaaagccggatttcgccaggacgaggcaatggtttcttccgaggcagctcgcgacgaggtcgcgggcgcatcgcttgggcccactccctcgggcgacgctcaggcgacaacttccggggcagctggcgacgaggctgcgggcgcgtcgcctgggcccactccttcgggcgacgcccaggaccaaacaggtccggggaacatccccgagtccggcacgtccattggcgggccgagccgcgcgacatcttctccaaggcagctcttccccacgccttccgtcgccccgctgagcgcagagccccttctgcaggccttagccgccgcaaacaccgcggtgttggatgggttaagtgcccaggtggaggccctgcaggcggagcgtgcggagctcgacgccgcatgggcgcgtgtcgaggaggggcggcgatcggtggaggccatggtggaagcgggccgcaaggcacaccgccggcacgtctcagatcttgaagcccgtaagacggcgctggcggagatcgctcaagaggtggaggaggagcggggggctgccctcatcgccaccaccgtgatgaacgaggcgcaggacaccctccgccttcaatacgggagctgggaggcggagctaaagaaaaagctcgacgccgcccagggggtccttgatgccgccgctgcccgagagcagcgagcaacggagaccgaaacggcgctccggcggcgtgaagaggcccttgaggcgcgtgccatggcgctggaagagcgcgcctgcgtcgtggagaaggacctggcggaccgcgaggccgccgtcgccatccgggaggcaacgctggcggcgcacgagtctgcctgcgccgaagaggagtctgcactccgcctccgcgaggacgcgcttaccgagcgggagcgagctctcgaagaggccgaggccgcggcgcaacggttgacggacagcctgtccctccgtgaggcagcgctggcggagcaggcacgccgcaatctagaatgtgtccgcgccgagagggccgcactggaccagcgggccgctgacctcgaggcgcgggagaaggagctggactcgagggcacgcagcggcggggcggctgcgggcgaaagtgacttagccacccgcctcgcagctaccgaactcaccatcgccgacatgcagcgcgcgctagactcatccgccggggaagccgaggccctccgcttggcgggcgagatagggcccggcatgctttgggatgcagtctcccatctggatcgcgccggtcggcaggcgggcctctggaaaggccagacaatgaagtactccaccaaccagggaggcctcgctcagcacctctcgaagatggccggggctctccagcagctccccgaggagctcgagaagaccgtcaagtcatcctcgagggacctcgcccaaggagcggtggagctcgtcctggcgagctaccaggccagggaccccaacttctctccgtggatggcgctggatgagttccctcctgggactgaagacagcgcgcgcgcgcaggtccgggatgccgccgaccacatcgtccacagcttcgagggctcggcccctcggctcgcgttcgcccccaactccgacgaggagggcgacgccagcggtgcagacgacagtgacgacgaggccggcgacccgggcgcatcggattga

SEQ ID NO: 78774 - DNA, 425 bp, Oryza sativa
  Clone ID: PAT_MRT4530_78549C.1
ccacgcgtccgcggacgcgtgggcggacgcgtgggaaaaaaaaaaaaaaaaaaaaaaaaaaaaagagggggggaaaaaaaaaaaaaaaaaaagggccggccattttaagaacccaagcttacaaccccatacttccaaagggggcgccctttttatagggtcccttttttttactcgtggtccgacgttttacatcttttttaggggaacaccaattgaatttccctggcctgtatttttctaccgtccaatccggtaaaacccggtggttccccaactaaaaagccttgaaccaattcccctttctaccagttggctaaattgaaaggaggccggacccccccttctttcccaacatttaccccccctgattggggaatggcccccccctttacccttccctttacccccgccggggggggggg

SEQ ID NO: 78775 - DNA, 1074 bp, Oryza sativa
  Clone ID: PAT_MRT4530_7854C.1
atggctcggccgagcctccttctacccattgggccgcgcctcacgctcggcctaaaagtccatattcctccctccgtccaacttgtttgggttcaagggccaatagttgttggcgcagggccatctggactcgctgctgctgcatgcctgaaggagaagggaatcgacagccttgttcttgagcgctcgagctgcttagctcctctatggcagctcaagatgtatgaccgcctcagccttcatctacctcgtcagttctgtgaacttcctctctttcctttccctgccagctaccctgattaccccacaaagcagcagtttgtggcttacctggagagctatgctgcaaagtttggtatcaatcctatgtacaaccatacagtggtgtgcgcagaatttgacgagcgactgatgctatggcgggtgaggactacacaggccactggcatgatggaagatgatgttgagtatgtgtcgcagtggctggttgttgcaaccggagagaattcagaggccgtgctgccagtgatcgatggcttggaagagtttcgaggaagtgtcatccacactagcgcatacaagagcggttctaagttcgctgggaagactgtccttgttgtagggtgtggcaactctggcatggaggtgtgcctagacctgtgcaaccacaatggttaccctcgtattgtagtaagagatgcagtgcacatcttgcccagggagatgctaggtcagccgaccttccggcttgcaatgtggctgctcaaatggttgccgatccatatcgtagaccggattttactgcttgttgcacgagcgattcttggtgatacatcacaatttgggttgaaaaggcctagtcttgggccacttgagctgaaatcactgtcaggaaagacacccatccttgacattggcactcttgcaaagatcaagtctggagatataaaggtccgacctgccataagaagaattgcagggcagcaagtaaaatttgtggatggtcgttcagagcagtttgacgccattgtacttgccaccggctacaaaagcaacgttccctgctggttaaag

SEQ ID NO: 78776 - DNA, 2886 bp, Oryza sativa
  Clone ID: PAT_MRT4530_78550C.1
atggcacggggctccgctctgctcgatggtagcgtgctgccgccttcccgcatcgtgagcgagaggcaggctgggctgccgcgccgcttcatgccggaatctgccaccggccgggagatagtcacgctgggcgagggacgcccggcgccagactacccggggcggtccgtcttctttctcccctttgcaatggcagggctggttccgccattttcttctttcttcatggatgttctggagttctacgatctccagatggcgcacctcacccccaacgcggtgatgacattggccatcttcgcgcatctgtgcgagatgttcattggggtgcgcccatctcttcggctgttccggtggttcttcaccgtgcagtcggtgtcgccgccatcggtagtcggtggctgctacttccagccacgggggccggtgctgaaccgctacatcccctgcgccctccgcaagaagtgggacgactggaagagcgactggttctacactcccctcgccgacgaagcgcgcctccgacttccgagccagcccccggcgcaggcctccagctggcaggcgccggtagatctgggggatggctatgacgccgtcctcgaccgcctggcgggcctgcgatcccaggggctcacaggggccatggtgtacggcgactacctccgtcgtcggattgcgccgctccagcgatgcgctcggggcgcctgggagtacaccgggtccgaagacttcacgaggacccaccaggaagtgagatgggactgggctcctaaggacttcaagatattggtccaacgggtgctgaatctcaactccatagaggcggccctcgttccccaaggaatcctccccctctgcagcgatccagaccgcgcctccatcctgaccattatgatggtggtcggggcctcagaggagcgagctccaaagggccacgacggcgcaggcgggagccgcaggggggaacaatctaccccgagagggggtcgtgcttctgggtcccgcgacaggggcccggggagcagccgccctgccgacgcccgggggaagaggaacgagatcccgtcgcgtccctcccgccattccaagtctggccagtctgaggccgaggatccggcggccgcagaggcccgcaggcgggaatctgaccggcgagaggccgtggatcgcctacgggaagccgaggaggccgcccaggaggccgcccgggctcgccaggccgaggaagccgctcgggaggaagtcgcccgggcccgccaggccgaggaagccgttcgggaggaggccggatttcgccaggacgaggcgatggagacttccaaggcagctcgtgacgaggccgcgggcgcgtcgcttgggcccactccctcgggcgacgctcaggaccaaccgggtccgggggacatccccgagtccggcacttccatcggcggcccgagccgcgtggcatcctctccaaggcggctcttccccacgccttctatcgccccactgaacgcagagccccttctgcaggccttggccgccgcaaacaccacggtgttggatgggttaagtgcccaggtggaggccctgcaggcagagcgggcggagctcgacgccgcgtgggcgcgtgtcgaagaggggcgacgctcggtggaggccatggtggaggtgggccgtaaggctcaccgccggcacgtctcggagcttgaaacccgtaagaaggtgctggcggagatcgccaaggaagtggaggaggagcggggggctgccctcattgccaccaccgtgatgaacgaggcgcaggacaccctccgccctcaatacgggagctgggaggcggagctagggaagaagctcgacgccgcccagggggtgcttgacgctgccactgcccgagaacagcgggcggcggagaccgaagcggcgtcccggcggcgcgaagaggcccttgaggcgcgcgccatggcgctggaagagcgcgcctgcgtcgtggagagggatctggcggaccgcgaggccgccgtcaccatccgggaagcaacgctggcggcgcacgaggctgcctgcgccgaagaagagttcacgctccgcctccgcgaggacgcgctcaccgagcgggagcgagctctcgagggggccgaggccgcggcgcaacagctggcggacagcctgtccctccgcgaggcagcgcaggaggagcaggcgcgccgtaatctggaaggtgcccgcgccgagagggccgtactgaaccaacgggccgctgagctcgaggcgcgggcgaaggagctggacgcgagggcgcgcagcggcggggcggccgcgggcgaaagcgacttagccgcccgcctcgcagctgccgaacgcaccatcgccgatctgcagggtgcgctagactcgtccgccggggaggtcgaagccctccgcttggcaggcgaggtagggcccggcatgctttgggacgccgtctcccgcctagattgcgccggtcggcaagtgggcctctggagagggcggaccgtaaagtacgccgccaaccagggaggcctcgcccagcgcctctcgaagatggctggggctctccaacggctccccgaggagctcgagaagacgattaagtcatcctcgagtaacctcgcccaaggagcggtggagctcgtcctggcgagttaccaggccagggaccccaatttctctccatggatggcgctggatgagttccctcctgggaccgaggaccgcgcgcgcgcgcaggtccgggatgccgccgaccatatcgtcgacagcttcgagggctcggctcctcggctcgcgttcgcccccaactccgacgaggagggcaatgccggtggtgcagacgacagtgacgacgaggccggcgatccgggcgcatcggactga

SEQ ID NO: 78777 - DNA, 3176 bp, Oryza sativa
  Clone ID: PAT_MRT4530_78551C.1
atggcacggggctctgctctgctcgacggcagtgtactaccgccttcccgcatcgtgagcgagaggcacgccggactgccgcgccgcttcatgccggagtccgccaccggtcgggagatagtgatgctgggcgaggggcgcccggcaccagactacccggggcggtccatcttcttcctccccttcgcaatggctgggctggtcccgccattttcttctttcttcatggatgtcctggagttctacgatctccagatggcgcacctcacccccaatgcggtgatgacattggccatcttcgcgcacctgtgcgagatgttcattgggatgcgcccctctcttcagctgttccggtggttcttcaccgtgcagtcggtgtcaccgccgtcggtggttggcggctgctacttccagccgcgggggccggtgttgaaccgctacatcccctacgtcctccgcaagaagtgggacgactggaagagcgactggttctacacccccctcgccaacgaagcgcgcctccgacttccaagccagcccccggcgcaggtctccagctggcgggcgccggtagatctgggggaggactacgacgccgtcctcgaccgcctggcgggcctgcgatcccaggggctcaccggggccatggtgtacggcgattacctccgtcgccggattgcgccgctccaacggcgcgcccggtgcgcctgggagtacactgggcctgaagactacatgcggacccaccagggagccagatgggattgggctcccgaggacttcaagatcgtggtccaaagggtgctgaatcttagctccgtggaggcgtctcgcattcctcaggagatcctccccctctgcagcgatcccgaccgcgcctccattctaaccattatgatgggggtcggggcctcagaggagagagcccctaagggccacgacggcgcgggcgagcgccgccggggggaacaatctgccccaggagggggtcgtgcttctgggccccgcgtcgggggctcggggagcagccgccctgccgacgcccaggggaagaggaagttgggaggaacacctcccccatctcctccccgagggggcggggcggcgcgtgccagcagtcggcgcccggagggggccgcgccgacgtcgcagcccgagagggagcgcaagaagaaacggctccgcaagacgggggagacggaaccatgccggggaaacctgatttcccctccaaggtggtcattcaaccgaccccctcgcaggttcgtctcactctcattgcaaccatctttctcccaaaaggaagtttttttttttttttactcattttgttcgtcttctggttttttcttctgcttcagcgatgtcccgtcgcattcctcccgccaccccaagtccggccagtccgaggccgaagatcctgcggccgcggaggagcggaggcgagaatctgaccggcgtgaagccgcagaccgccttcgggaagctgaagaggccgcccgggaggccgcccggattcgccaagcggaggaagccgctcgggaggaggccgcccgggctcgccaggctgaggcaacagctgctgctggcgcgtcaactgggcccactccttcgggcaaccctcaggcgacagcctccggggaggctcgcgacgaggccgcgggcacatcgcctgggcccacctccccgggcgacgcccaggatcaaacgggtccgggggacatccccgagcccagcacgtcctccggggggccgagccgcatcgccttctctccaaggcggctcttctcctcatcttccgtcgccccgctgagcgccgagcccattctgcaggccttggccgccgcaaacaccgcggtgctagatgggttcagcgcccaagtggaggccctgcgcgcggaacgagcggagctcgaggccgcatgggcacgcgttgaggaggggcggcgctcggtggacgccatggtggaggtgggccgtaaagctcaccgccgtcacgtctcagagcttgaagcccggaaggcggcgctgacggagatcgctcgtgaggtggaggaggagcgagcggccgccctcatcgctaccaccacgatgattgaggcgcaagacgccctccgccttcaaaacgccagccgggaggcggagctgaaagaaaagctcgacgccgcccagggagtccttgactccgccgctgcccgagagcggcgggtaacagaggctgaggcggcgtcccggcggcgcgaggagtcccttgaggcccgtgctatggcgctggaagaacacgccggcgccatggagaaaggcttgacggaccgcgaggccgccgctgctctccgggaggcgacgctggcggcgcacgaggccgcctgcgccgaggaggagtgcgcgctccgcctccgcgaggacgcactcgctgagcgggagcgagctctcgaggaggctgaggccacgaccaaacggctggcggacagcctgtcccttcgcgaggcggcgcaggaggagcaggcgcgccgcaatcttgaatgcgtccgcgccgagagagccgcactggaacagcgggctgctgacctcgaggcgcaggaaaaggagctggacgcgagggcgcatatcggtggggcggccgcgggcgaaagcgacttagccgcccgcctcgcagctgccgaacacaccgtcgccgacatgcagcgcgcactagattcctccatcggggaggccgaggccctccgcttggcgggcgagatggggccctccgcatggatcgcgccggtcggcaagcgggcctctggaagggccagacgaggatgcgccccatcaatctggaaggcctcgctccgcacctcaacaggatggcctgggtcctcgaacgactccccgaggagctcgagaagaccatcaagtcatcctcgagggacctcgcccggggggcggtcgaactcgtgctagcgagttaccaggcccgggaccccaatttctctccctggatggcgctggaggagttccctcccgggaccgaggacgacgcgcgcgcgcgcgtccgggatgccgccgaccacatcgtcaacggcttcgagggctcggcccctcggctcgcgttcgcccccaactccgacgaggagggcaacaccagcagtgcagacgatggtggtgacgaggccgtcgactcgggcgcgtcggaa

SEQ ID NO: 78778 - DNA, 234 bp, Oryza sativa
  Clone ID: PAT_MRT4530_78552C.1
ttttcgttccaacaattggaagtgcccgggggttaacaacacatccagtgagtacggatgctgaaagccggaaactatgacgaattggacgacacaaggcgtgctgatttaagtgtcccaagctttgattcaacttttattctcagcatgagtggccgggtacaacacgatccagtgaggtacggatgctggaaaagccctgaaactattcacgagctagctggcttcctgatt

SEQ ID NO: 78779 - DNA, 1855 bp, Oryza sativa
  Clone ID: PAT_MRT4530_78553C.1
agtctcgttaatcgatcattcttgtgttactcttatattataaaattatttgttttgcacttacatttctgttaaaataaaatccggggcttcctgttactccgttttctcaatcctggagacagaacaagaaatgagaacacatttgcaggagtatatacgcagggcatgagcccttgagacggaagaatggagtacgtcacgatgatgacagtgtgttgttgcctctgaatctgattgagcagtgcaggaactgcagcaggttgagcacgctgagtgcagccatcatccagaagaagtagtccagatggccctcgtcgagcttgtccgggatccacccggcgccgccgccgcgcgccgtggccgccgccaccaccctgagcatgccggagttgaggtagttggcgacggcgacggcgagctgcacgagcgccgtgccgaggctcttcatcgacgccggcgactgctcgtagcagaactccagcatgccgatgacggcgaacacctccccggcgcccagcacgaagaaggacggcacctgccacgcgatgctcatccgcgtccccgccgccgccgccgccatcgccagacgccgcgcctcgaccagcgccgagtacgccatggccaccgcggacagcgcgaggccgacgccgatgcgctgcatgtgcgagacgcccctgtccctgccggtgacgcgccgcgccagcggcaccagcgcggcgtcgtagaccgggatcagggcgaggacggcgacgacgtcgaaggtggcgagcgaggccggcggcacggtgaagcggccgacgcggccgtccatggcgacgccctgctcgatcagggtcgacgtcatctgcgcggtcaccatgaagaagccgaccagcgacgcccagaccgggaacgtccgcagcagcatcttgagctcctccacctgcgacacggtgcacagcctccatgggctcgacggcgccgccggcgcgcagttcttgtccgacaagatggcagccttgtccaaaaacctgaattgataggtatgttgagttctgtagtcaccttcagtcactcctggaagctcatgcaggagtgagctatcatcaggcaagttcagcctatgatttcttacagctgcaaccagcacctgaaagacccttgtcagagggctccctcccagtttcttgtacctgtacgccctcctaccggcgatgaacatggcgaggccgaaccccaagagtagcattgggccagcaaaaccgacactccaccctatgttgtcctgaacccagacaaccacggtggacgacagcagcgagcccacgttgattgagaagtagtaccagttgaagaatgagccctttgtcacccgctccaccgggtcggcgccgtcgaattgatcagctccgaaggccggaatgtttggctttatacctccagttccaagggcaaaaaggtagagccctaggtagacagttagacgagaaatacccccattgtagaaagaagcattcaggaacaatggtgatgccgaaaccgtcagaacgatcattccaaggatgataacaaggatggacattactactgtccagtatcttccccaatatgtgtcagccaagaaggctccaatgagtggtgtgaagaagcaactgccgatccagatcgacacactttgtgcagcattgacgttgctttcatggagcacacttgtgaggtatgtgactaagttctttgaaaccccgtagaagcagatgcattcagtgaattcaacactgtcaatattaaccgttccatcgcatgtgtattttgaacattgttcctgtggaggcaggtgatgaatcagtggcctgtcctcatcagatgcctccat

SEQ ID NO: 78780 - DNA, 551 bp, Oryza sativa
  Clone ID: PAT_MRT4530_78554C.1
cgatcccgttccagtgtgatcaaatttcttggaagttcacaactcacagacaatattcagcatcttcggcctacaaagctcactgccacgctacacctgacataccttttgacacgttgatatggagagcatgggcaccggggaaatgcaaactatatgcttggcttattattaagaatagggtatggacctctgaccgccttgcgatcaggggatggcaaaataacggatagtgccccctctaccgaagagaggatgaaatagccatgcacctcatcgctgaatgcagatataccaaaaggatctggagcctagtagcttcttgggcggagtaccaataactcgagcctcaacactggggggacactcatacggtccaagagtggtgcaaaatgatagcaacaattgtgggcattcctatgaaggggttgcatacccttatcctcttcatcgtctgggaagtttggcaggagcacaatcggtggatctttgagcataagaaggccgctacgtccttcctgatcgccaaaataaaagaagaagcatgtgtg

SEQ ID NO: 78781 - DNA, 318 bp, Oryza sativa
  Clone ID: PAT_MRT4530_78555C.1
atgacggccgccgagttcctccctagtgtggtgaacactgacaagctgggcatgctagctggacgtgtagggattgagctcgttgagactgccacagagcttgagatccttcttgccggtgctggttttgatcggggtggggtttggtcggatctggccgcggggttgacctctgccgcatgttgcatagctgccatcatcatagttcacctccacctccaccatcctagccttcccggagcaattgaagccaccatgttcattgtcctagttttcccggagccctcggaggccgtcgctgccatctcaatctgctag

SEQ ID NO: 78782 - DNA, 796 bp, Oryza sativa
  Clone ID: PAT_MRT4530_78556C.1
acactcgcagtccccactccaaaagccggaggaggaggaggcgattcaccgacatcccggagcggatcgcccccggccgtcgcctcttccctcccaccccgccggcccccgcctccgccgccgcgccgctcgcaactccgccgctgccatgacaacgcgcttcaagaagaaccggaagaagcgcggccacgtgtcggccgggcacgggcgcatcgggaagcaccgcaagcaccccggaggccgcggtaacgccggagggatgcaccaccaccggatcctgttcgacaagtaccacccgggctacttcggcaaggtcggcatgcgctacttccacaagctcagcaacaggttccactgccccgccgtcaacgtcgagcgcctctggtccatggtgcccaccgacaaggccgccgaggccggcgccggcaaggcccccgtcatcgacgtcacccagttcggctacaccaaggtgctcggcaaggggatgcttcccccgcagaggcccatcgtcgtcaaggccaagctcatctccaaggtcgccgagaagaagatcaaggccgccggcggcgccgtcctcctcaccgcctaggtactacatacttgggagttgagttggagggaggagggttcttgatatctaaggcgctagtttctttatccttcaaaagactttgatttagctcttgtgctttttctgttatggatgttactactgtatggtatggctacttgaatctgtggtggcaattcaggagttttgaattacatgattatgccggtctaaaaaaaagcggcc

SEQ ID NO: 78783 - DNA, 756 bp, Oryza sativa
  Clone ID: PAT_MRT4530_78557C.1
ccggccgggcttcttcctccccacccacccgccgccgccgtcgccgcccttcgccgccgccatgacgacgaggttcaagaagaaccggaagaagcgcgggcacgtgtcggccgggcacgggcggatcgggaagcaccggaagcacccgggagggcgcgggaacgccggcgggatgcaccaccaccgcatcctgttcgacaagtaccacccgggctacttcggcaaggtcgggatgcgctacttccacaggctcagcaacaggttccactgccccgccgtcaacgtcgagcgcctctggtccatggtgcccgccgaggccggcgccggcgccggcaaggcccccgtcatcgacgtcacgcagttcggctacaccaaggtgctcggcaaggggatgctccccccagagaggcccatcgtcgtcaaggccaagctcatctccaaggtcgccgagaagaagatcaaggccgccggcggcgccgtcctcctcaccgcctaggtactcgggagctagggttcttggcttcttgctatctatctaaagtgttagcttctttttttatctcttgttgtgttggaagacaaagcaaagaaagactacttttgtgctgttgctgctgttttttgtgttatggaacaaattgatggtatggctactaagatctgtggtggctattcatgagttttgattgaattacatgatcatgtaggtttatgtcaaatatttttgtgccgcataacaaacaaaaaaaacaaaaa

SEQ ID NO: 78784 - DNA, 1392 bp, Oryza sativa
  Clone ID: PAT_MRT4530_78558C.1
atggacgaaaccctcgccgccgtcctctcctacctcccgcctcccaccttctccaccgcgaactctcacccttcttctccctccgccgccgacgcggccgccgtcttctcgctggacgaagaggaccgcatcagccggctccccgacgcgctcctccgcagggtcgtctcgcgcctccccaccaaggacgccgcccgcaccgccgcgatctcctcccgctggcgccgcgtctgggcctccatccctctccacctcgacgacggcggcctcgctccgggcgacgtcaccgcggcgctcgccgcccacccgggcccagtcgcctcggcgcgcctcgcctccgcgcacctggcaaccgtggatcccgacgtcgtcgcgtcctggttcgcctccctcgccgccaaggaggtcggtgaactcgccgtcgtgaacggatcatggcccatcgagtggcgtcccccacccgatctcctcggctgcgcctccctccgccgcctctggctcggcctctgccagttcccggacacagccggcctccctccagccttcgccaacctgcaggagatcgttgttgtccactcctccatgcaggaccgcgagcttcacgccgtgctcccccgctgccccgagctcgagagcctcgcgctcgtgcttacacaggactacccaagatacgtccatatctggtcggggagcctccggtgcgtggtgctatggatgtccatggtcagagaggtgcacctcgatgatgcccccaacatggagcggctgcttctggagccgatcgccggagcatccacgcacgtcaagatcatcaatgcgccaaggctaaaggttcttgggtacttcgatgtcggtctgcaccagctcaagatcggttctactgtcatcaaggatgggataaaggtgaagccaagtgcaatggttcggaccctcaggacattggcgttgaaggtgcagtttggtgtcgaggagcaagtgaaactggtgcccctgttgcttagatgcttcccatgcttagaaacattgtatatcatgtcagttccttctgagacaccagttaatgttggagtggagttctgggatctagtaggctacacggaatgtgtccattcacatctgaggaagtttgtgtttcaagctgctcgaggcaaagacagtgagctggcatttgtaaagtttgtaatgggaagagcccaaatgttggagcagatgcttatttttgtggatgatggttcctctagagttgtcgtgctgagtcatttgtcttcagaaggtctcaatcaacccatgttgggtgttggccagatggatcggtgcattctgcattgcagggcactcttcaatgatgtttatgcattgcttctgtgtaccatgtcttctgattttccatag

SEQ ID NO: 78785 - DNA, 3054 bp, Oryza sativa
  Clone ID: PAT_MRT4530_78559C.1
ctactccgtgccctccgcaaaaacactgattaccagtggtaccaagacaggatcaagaagtatggtcctgtgtccaagatgtcagtgtttggttcaccgacagtgctgttgactggcccggcagccaatcgctttgcattttgcaacccagacctcattttcacccagacaaaggcgctgaacgccctcgttggcgtccagggctatctgaggccagagatggtgacaaagtacatttggaagatggataaggaagtcaggaggcacattgacctgcactgggttggtcaaaagactctcacggttgcaccattggcgaagaggctcacctttaacatcacctgctcagtcttctttggagaagaggcaggtcctatcagagaagccctggcaaccgacttcgaggcattggtgaaggctacactatcaattccagtaaatattcccttcaccaagttcaacaagggttatgagacaacttctgttcttatcatcttcttgctccggtacctagccaatgagccagacatcctgggcaatataactgaggaacaagaggagatcgctaggaacaaaggacctaatgagcctttgacctgggatgatgtgtcaaggatgaagtacacatggaaggtggcaatggagacactccggactgttcctgcaatctttggaagcttccgaacagctatcaaagacatcgaataccagggctatcacattccaaaaggctggcaagatctatgtggccctcaaggttcccttggcttcccagtgattggccagagcatctccctacttcgcgccctccgcagtaatactgattaccagtggtaccaggacaggatcaagaagtatggtccagtgtccaagatgtcagtgtttggctcaccgacggtgctgttgactggcccagcagccaatcgctttgtattcagcaaccaagacctcattatcaccgagacgaaggcagcgaacgccctcattgggcggtccatattgacactatcaggtgaggagctaaagcaagtccgcagtgcactgcagggctatctgaggacagagatggtgacaaagtgtattcggaagatggatgaggaggtcaggaggcacatcgacctgaattgggttggtcaaaagacagtcacggttgcaccattggcgaagaggctcacctttgacatcatctgctcagtcatcttcggacagggggcaggtcccatcagggaagcccttgctgctgacttcaagaaaatggtgcaggcaatgctatcgattccagtgaatatacccttcaccaagttcaacaagggcttgagtgcgagccggagggtgaggaaggtgctcaggcaaattgctcgtgacagggaagcagcattgcagcaaggccattctagttcagctgatgatttcttcacatacatgcttgttttgcgctccgaaggcacccactcactcacagtggaggacattgtggacaatgcaatcttactcctacttgctggttatgagacatcgtctgttcttatcaccttcttgctccggtacctagccaatgagccagatatcctgggcaagataactgaagaacaagaggagatcgctaggtacaaaggacctgatgaacctttgacctgggatgatgtttcaaggatgaagtacacgtggaaggtggcaatggagacactacagactgttcccccaatatttggaagcctccgaacagctattaaagacatcgaataccagggctatcacattccaaaaggctggcaagcaaggcaggtcgcccacattctccggctcgagcggcggctcgtcagctgcgcggggctccccgtcggcggcgcgcaccgccggccggtggcggtgcgccagcgggcaagcttcccctcctgcatcttacctgcaggacgccccccaacaagcaggcagcgcagtaagaggatctacgtgatcctcaaaggccatgccattttcagaagaattgaggcaacgaccatctccctacttcgtgctctccatagtaatactgattaccagtggtgccaggacaggatcgagaagtatggtgctgtgtccaagatgtcactttttggctcgccgacagtgctgttggctggcccaggggccaatcactttgtattcagcaaccaggacctcattttcaccgagacaaaggcgatcaacgccctcgttgggcggtccattctgacactctcaggtgaggagctaaagcaagtccgcggtgctctacatggctatctgaggccagagatggttacaaagtatatgcggaagatggatgaggaagtcaggaggcacattgacctgaattgggttggtcataagactgtcacggttgcgccattggcaaggaggcttgcctttgacatcatctgctcagtcatctttggacaaggggtaggtcccatcagagaagcccttgctgccgactttgagacgatggtgaaggccatgctatcaattccagtgaatatacccttcaccaagttcaacaaaggcttgaacgctagccggaggatcaggaaggtgctgaggcaaattgctcgtgacatggaaggagcattgcagcaaggctattctagttcagctgatgatttcttcacatacatgcttgttttgcgctccaaaggcacacactcgctcacagtagaggacattgtggacaatgcaatcgttctcctggctgccggttatgaaacatcgtctgttcttatcaccttcttgatccggtgcctagccaatgagccagacatctttggcaagataactgatgaacaagaggagattgctaggagcaaaggacctaatgagcctttaacctgggatgatgtctcaaggatgaagtacacatggaaggtggcattggagatactacggacaatttctccaatttttggaagcttccgaacagctatcaaagacattgaatacccggggctatcacattccaaaaggctggcaagtcttccatgctcaaagtatcacacatttggacgggaagtttttcaacgatccgatcaagtttga

SEQ ID NO: 78786 - DNA, 643 bp, Oryza sativa
  unsure (1)..(643): unsure at all n locations
  Clone ID: PAT_MRT4530_7855C.1
cacgcgtccgctccgcacgcagatacagtcactggaagaaagtgctgaaattctcagggagagatgtttgaagtttcataaaggttgccgcaagtatacggaaggattaggagaagcttatgatggagatattgcatttgcaagctcactcgaaacatttgggggaggccacaatgaccctataagtgttgcttttggtggacctgttatgaccaatttacaattgccttgagagaactaggcacatacaaggaagtcctccgctcccaggttgagcacatgctaaatgacagattgctgaattttgtggacattgatttgcatgatgttaaggatgcacggaagcgtttcgacaaggctagcctcttgtatgaccaggttcgtgataagtacctgtcactgaagaaaggcacacgagctgacataacaactgccattgaagatgaacttcacaacgctagatcttcatttgagcaagcccgtttcaacctggtcacttcaatttcccatattgaggcaaagaagagatttgaatttttggaggctgntagttcaactatggattctcatcttcgatattntaaacaaggatacgacctattgcatcagatggagccatatattaatcaggttcttgcttatg

SEQ ID NO: 78787 - DNA, 1242 bp, Oryza sativa
  Clone ID: PAT_MRT4530_78560C.1
atggagatggagccctcgcctgcgcctactatggcggatttgccggctgatttgctgcgggagatcttccgccatttgcgatgtgtcgcggaccgcgatgctgcggccgacgtctgcaggacatggcgcggcgcactcgccgagcccacgccgcctccctcgccgccgcgccctctcccttggttactcctcccatccgccggcgatgatttcatccacgtctactgcttctactgcgggatcgaccgctgcagtcttcaccaccgcctcagccccgcgcacggggcgcgctgcttcggctcgcatgagggagggtggctgttcgtcgccttcgagcacaatcgacttcacgccatgatcaacctccggtcacgcgaggattccaagagcagcttgattcctttccccgacctgctccgctcgtatcaggacgaggacgactaccagcgcgcacagaacatggttatactggcagcagcactctcctcttccccaggcggcacgagctgcattggcgcgggcatcgtcatgcgctgggatctcatcgccggctcgtgccgtctcgccttctggcgtatgggagatcgtgttgccgtcgaaggaacaatggcgcccgactcaacagtcagactcagagatgagatacaggatgtcatctatcaggatggcgccttccggttcgtgacgaggaggggattcctcgtcacctgtatccccatgttctacgcagatggtggcctccaaggcactacagagtctgttcagcgcatccggcaccgggagcgcttgcgcgaacatgtccatgcgcgctatctcgtggagtcccgggccaagcttctgatgattgtgagatttgcagctcggccacgttctcccacaagcctattcaaggtgttcgagatggttcaggagatggtgcaggactacaccggcgtggagaaaattgaggacacctggaccgaactggagtcgctggatgggcgtctattcttcgtcgggcgtggctgctccagatcgtatgaatcatctgcctatcctgagcttgggctgggactcaaggagggtgtctacttcctggatgactacgtttacgccgatgagggcatgcccttccgcgatgagggacatcgccgttatccctgcagcgacaacgggaggtggtgcgacgggcacgttcatcgctgtttctcggagcagcgcgcatcgtctgcccactcctctccgacttggttactcccgtga

SEQ ID NO: 78788 - DNA, 717 bp, Oryza sativa
  Clone ID: PAT_MRT4530_78561C.1
gtttcattcataactaacaactttcttgctcattagactttcatattttcccatctttctcatctcaacctaaatccatcaatcctaagcaccaaaaacagaaatcatgggtgtccaagaagtcctcagtcgcaagtccggtgtcatcgtcggtgacgatgtcctccgtctcttcgagtacgctcgcgagcacaagttcgctatccccgccattaacgtcacctcctcttctaccgtcgtcgctgcccttgaggctgcccgcgatgccaaggctcccgtcatccttcagttctctcagggtggtgccgcctactttgctggcaagggtgttagcaacggtgaccaggctgcttccattgccggctctgtcgctgctgcccactacgtccgctctcttgctcccacctacggcatccccgtcgtccttcacaccgatcactgcgccaagaagctcctcccttggctcgatggcatgctcgatgccgacgaggcttacttcaaggagaagggcgagcccctattctcctcccacatgattgatctttccgaggagcccgttgagtggaacattgagaccaccgccaagtacctcaagcgcgctgcccccatggagcagtggctcgagatggagattggcatcactggtggtgaggaggacggtgttaacaacgaggatgttgacaacaactctctctacactcagcccgaggatatcct

SEQ ID NO: 78789 - DNA, 910 bp, Oryza sativa
  Clone ID: PAT_MRT4530_78562C.1
tcaatttttttcaaaaaaacccttgctcttttcgctaatagcgtgtagatccatgttaacatggctgtcggatcgcatgctagggttgatctggccgtccacgtttcccggcctgactgcccttccaccatcatcagatcgttggattaggggaacggacggcgcgcatcgccgcttcgccctcctcccgccgccgccataccgtcgccgcttctctccccagtaaggccgccgcacctgctccggcgttcggtctcccgccggtggatccggccacttggagccttggaagtgagggagcaagccgtcgctaccaccctctgctgctcttcttctccgcacctccatcgcccctctccccctctcagctccgctcagtgccagatccggctcaggggccgccggatttggtaggaggaggaggtagcagcagtgcagctattgaggagaaggaaggaggagggtcgcgacatggccattactgtgatgagaacggttagggctcggttaggtcgatggctaggaacgacgacggctagcggcttggtcaggtcgacggtaaggaacaacaatggctcagtctttcctacgttttttctgcttttcattttatttttctccgggagaggcaacctgatattgttgggctatttgcgctgaaataatatgacatcttgcctggatcacctactgatacgcattggagtcacatcgaggagcccagagtaaccttccgttctgtctttaagcaatatacaatcccaattgtgaatttgtgatgtctaattttatatctctaaaatcccaattggcatgtccaagatacacggacgaagcaatatctgttcatgaatgtgatttgagcaacatatataacaagtaggttgtgttcagttttttttcctcggct

SEQ ID NO: 78790 - DNA, 481 bp, Oryza sativa
  Clone ID: PAT_MRT4530_78563C.1
acggcacgagggagagagagaactagtctcgagttttttttttttttttttttttttttttttttttttttttttttttttttctatcatttgatttatggttaaatatacttttatgtatacatatagttttacacatattacaaaagttttggaataaaacgaagggtcaaacatgttttaaaaagtcaacggtgttaaatatttagggaaggagggagtactatataagtggggaaaagggaaatcatgtacatatgactatatgagcttggcagtctcgtaatcttttggggcacagagctggtacgcttggctggttaacgagctacatccaacattttggtttacagcaagagcattcagcatggcctgtaaataatcggatgaagttcttggaatttaactccgtaaatatttgtggatggtgtcgactaaaccaaaaaaaaacaaaaaaaactcgagggggggcccggtaccc

SEQ ID NO: 78791 - DNA, 2211 bp, Oryza sativa
  Clone ID: PAT_MRT4530_78564C.1
tcaatctttccccccttcagtaagagaagctttggagatgatgtcttgggtggagtcctggcttataccccagttgagcgcttccaccgcagtcccggtgagcacccatccgccacgcacaccctcctcgtctcgtgccgccgcctcctcgtctcgtgacgacaacgccagaaaactccagctctcccccagagttcgtcgctcccacctccgtttaccgcaccggctgtcacgcccgccctcgcgccgcgcacccgagctctgccgcccaccgcccatctccggccgcgcgccgccgccgctagagtcaccgccgcgccgcgtagtcgccaccgtcacgctcaccgagcccgcctgcacctcggccaccattcggttgccgccaatcgtcgccgaagcgccgtttctctcgcacgccggtgagctctccatttccacccaactccggccggccgctctagccgccgtggtcgctctcccggcgccgaccgaccgaccgcctccgtttcccgtgctgttgcttgccaccgcacgacctgtgcccatgcccgagagagagggagtctcatcgtgctctgcattccgccccagctcagcctccgcggcgtgcagtcgctgcccggcggcgccctccaccgccgaaagcaccgcccgcaggtgccagcgccgcccctccatcagcccaccgcccgtccccacgccgccacccacctccccgcccctaggtgtcggtattgccaccagcggtgtggccttcttcatcacgatcccaaacttctcggacaggtcaagctgcacgccctgcggcagcttccagtcgaacgcctgcagcagcatggcaaccgagtacaccatcaccttctcccccatggccatcccggcgcacatcctccggccggacccgaacgggaggtagtccagctggctaccggtgaagtcccccttgtggccgccgtccctggcgaacctatccgggttgaaatcgagtggcttgttccagaccagtgggttccgctggatcgcccagacgttgatgagcacgcggcagccctcggggacgtggtatccgccgaccgtcgcggcggcgctcgggctgtgcggcaccaagaggggcaccggcgggtgcagccggagcgtctccttgatcaccatgcggaggtagtggagctgcgggaggtgggactcctccacgacggcgtcccggcccacgatgctgtcgagttcttgctgcaccttgttcagaacctgagggttctgcagcaactccgccataatccattccacactgttcgacgtggtgtccgtcccgccgaccaccatctccaagaggaagccctttacgttgtccatggtaaaggttgttttgccgtcgctaccttccttttccatcttgagcaagcactccaagaagtccgttgtcatctcgcccccgtcttgctgggatctcatccgctgctgtatgatcttggtgaacaacaggtcgaaccgcgacctgagccgctccatcttcctccggataccctgcaggtcgaacggcttcagcaccggaaacaagtccgagacgttgggcgttccgaggagctcggtgacctctgcgacgagacccctgaactcgctccccaccgccgacctctcgctctcgcttccgatcgttcccccccacatggtgcccgtgatcacattcatggtgttcaggaacatctgcgcgccgacgtccaccggctcgccgggcttggagtggaggtaccggagggtggacctgaactcgcgccgacggaggccgtgcacgctggcgagccccgcggggctcatcatctcctggacgcagacgcggcggagcaggcgccacataggcccgagcgggttgcccacgatattctgtgcgccgccgaaggagacggcgtcgccggcatccagcatgacccggttggcgaagacggagtcctggtcgcggagcacctcgcgggccagctgggcggaattgacgacgatgtccaccttggaaccgaggcggatggagaggatgggcccgtgcttcgcggcgaggctagcgaagtaggtgtgcaagtttgggtcgatgaatgggaggctgccaacgagaggaagccccaccggtcctggtggcaaacggcggctgcgccgccgggtgacggcgaggtacagcaccgttggcacaagcaatgcagcgtagagaagatttgctgttgccat

SEQ ID NO: 78792 - DNA, 274 bp, Oryza sativa
  Clone ID: PAT_MRT4530_78565C.1
aaacaatacaggaacaaactcttttattatagaggggttttgtacaggccagcatccgtcaacaaccatgctgcattgatcaatagattattgatataaatgctgacaactaaactacaactatataaatgctcattattattaactgatacaacatacatacattatctcaacttttaataagcttttattcatatcactatataacaaggcaagacctacgtcaataatacaatatgaaacaactgaacattcaaatcttattttcttgaat

SEQ ID NO: 78793 - DNA, 411 bp, Oryza sativa
  Clone ID: PAT_MRT4530_78566C.1
atggcgaacttcggagcctcccttctcacccttacccccatctcaaacgggaattcaaccgtgctcaagacaatgaggatagaaccaaagcagacggtagttgctggattttgtcctctgacctcagtagatgcattggcttctgcagatggttacaaagttgctaagaaatgtatctttgcaaggaagatcaccgtggtgttgtccagattgcaggagttcgctgcatccattccagcgactgtgcgagagagagacagaggaagcgaggcccagacaggtggagtacagccctcccagacacagacgagcggggcccagcaagaacaacaaagcgacaccaacccgggcccacgagtcagcggcgtaactacccccttcccgaatcacgagggcaccatgaaggcatga

SEQ ID NO: 78794 - DNA, 1011 bp, Oryza sativa
  Clone ID: PAT_MRT4530_78567C.1
atgccccttggagaatattgtgcaggcggtctttggccaagttatgggaatgtaggcatgggcactggagaatatggttgtgcgccgcaccttcacttgggcagcactccgttttctttcgaagtattatcggaagcgacgaataatttctccgaggaacggttgctccgtgaggaaggtcagtttagtgcattctacaagggggacctgacacatttaggcatctctgtagctgctgctgtgaaatggctgaaaataaagtcaggacaggcctttgcggtggagaactacgtgaaggagtttgcaaccatcagcctagcgatcagacatcgcaacattgtgccgttcctaggttggtccagcgagcaagataatctatgcctggtatataaatatgtaaagaactggagcctccacgatcatctctacagtccaggaagacttcttacatggcctacgaggtacaagatagtatttgccataggctccggccttaagcacctccatcaggacgtccgccccacattcccgcacggcaacatcaaaccaagcaatgtgttgctggacgaagagatgaacgcaaagctcggcgatttcgggctgcctcggcacttctttcagtacgatggtgaaaccgcctctagctcatatcgacaaatgccggtcagctctcgaggatacgtggaacctgggttactccacacggatcaggcaaccacctcgtcggacgtctacagcttcggagttgtgctgctggagattgcgtgcggtcagccgcctattatcctccagcaagaccaggctgaagcaaatagccttgttaaattcgtctgggagtgccacaaaaagggttcgataattgaagcagcggacaagcggctgaatggcgagttcaaccgggagcagatggagcgcgtgttgcgggttgggctcttgtgtgctcgccgaggcagcagccagcgcctatccatgggcgacgcaatgatgttgttagagggggttggattttga

SEQ ID NO: 78795 - DNA, 832 bp, Oryza sativa
  Clone ID: PAT_MRT4530_78568C.1
ttttttttttttttttattttggtagtagatacggactgaaaaattacacttggctgaagaggaacgaacaggtagtaacaactcatttgatcgacgaaacaatggaagaattactagatcaagtcaagagaggctataaactgaagaaatggaggacaaaaaaaaaaacagagtgagagaacttcgccacgaacgaacgaacgaagctgttcatgcatcaatttaccctgacatgtgctgctgcattacgacaccagtagagagagtagagtgttcacggcgtcgtgcctgccggcggcgtccccctcgaccggtcctcgctctcctccgtcgttgtccgcccgtggccgctgccgatctcctctatcatcttgaccacgtcggcggtgtccgggcgggcgtccggcgcggtggcgacgcacgccatggcaacctgcagcagcgccaccatctcctcctccgcgctcccgccgagccgcaccagctccacgtcgaacacctccgcggtccactcctcccgcaccaccgactgcacccaccgcgggaggtccaccgcgccgtcgccgtccacggacgcgttcccgggtgacttgccggtgaggagctccaggaacagcacccccagcgagtacacgtcggacttgaacgtcggccgccgcgcgtccaccagctccggcgcccggcacccgccggcgttggggcgcgccgacagcggggcgaagagctggtggaggcagtagtcggcctccgcccgggcgccggcggcccggcggagcaggaggttggacgacttgaggttgccgtgggcgaggctgtgcgcggccctcgtgc

SEQ ID NO: 78796 - DNA, 1482 bp, Oryza sativa
  Clone ID: PAT_MRT4530_78569C.1
cacgggaggaagggggcgctggatctgtggacgcgcagcccacaaccgcgccggatccgtgccgccgtagccggatccgcgcgcatggggcgcagagtggtggccaaatccgccgccgcatcgcctcccgcccacagtcacccgtcgacgccgcacatgccaacatcgcgcccgtcctcgcaccccggcaccactggatccgccgctcctcctcctcgtcactcctctcatcccccaaccaccaccgctgctcctcctcgtcaccaagccatcaccggaaccacctcgctgccactcctcatcccctaatcgccgtcgccctcgccgccgccgccgtcgccgtccgggcgcccgccaccgccacggcctccgggagcgggagcggacgctgtcgcgggcgtccacacatcctccctaactgccggaacgacctcgccgccgcagacgacgctgcgggcgaactctcctctgccctcgctgccgcgggcgtccacgcctcctccctcgccaccgcggttgaccacgccgaccccaacgcccactcctccttcctccacaccgcgtctttcgctctcctccctgcgtcgcctcctcaccccgccgccgcgttgcctcctcaccagccacgcccgccggcctcctctccagacccatgatcgccgccgccctctccaatcaatgacggtgactccaacctgacacaagattggatcgcccctccccaccgcgctgctcctccctcctcagtcctcacctcatcctccaccgctcccgacccttccgctccacacccgattctccaccgccgccgttctcctctaccctctcagctgccgccaccgccagggaggtgactcccccatcgaaccacgtccccaggacaccgacgcccgcctcgttgatcccctcccatctttcgccgctcccctcgccctcctccatgccgtccgcgccacccacgatctctgcctcgatgaccgacagccgcccacgatctccgcctcgatgaccaactatgcgccaccattcctcgcaactccctctagtcctcctccgcgtcgcccccgatctctcctcgaccgtctctgtgccaccgccaccacctgtctccgccgagcgctgttgttccctccgccgccccacgcagaccactgctgtgccaggcgctttaagctccaccggcacccctccgccgccgccccctttttcaccagatccctctccaccgcggcactgcactatatcatgccggagataccaagccctcgacaacaccattaaaatcctatcttgttcatctctttttagtgacacaaagttaaattcctttgtaactgtgcccaaaaccggagccagtgcgttgccctgaaaattaccgagattggtctcgcaggaggaaccatcgccgtcggctgctacactatcacacactttaatatttcttcgttttaagattcgccaggttctgggcctctgggacat

SEQ ID NO: 78797 - DNA, 592 bp, Oryza sativa
  unsure (1)..(592): unsure at all n locations
  Clone ID: PAT_MRT4530_7856C.1
ctgggaaaagaggattcgcgagtttgcgttgcgtgttttctccgggccgctttttacgagccagcaactgtgtgccgtgccgtctggatttttttttcccttcttattattatttttatattacttatattttttcctaaaatttttgatcatgtagtatggttatttgcatgtctactcctatgagatatttttggctgtgtatcaggatttcacagcagttgtttgccttgtttgaactagcacaattgtgaacaatcaggatgcagggtcaggatggttgggctctgatattcaggttccaaaaacacgtctcccatcagcaacaaactgacatgttttcacatccattaacattgttcattgattccattccgaaagatagcaacaacaaggttacacccccaaaattactgcagctatcaaaaaaggcacctttggcttgaagaacaccaggcaccctatgctgcagtgcaaggcgcaaaagaacaaagaaacttggacanaacttctgacgaataatacatcaagaaaaaggctaacagatgaatctgattgcctctagagaaaaagaactcctgtcctgcaaagc

SEQ ID NO: 78798 - DNA, 550 bp, Oryza sativa
  Clone ID: PAT_MRT4530_78570C.1
ggcacgagccggaaaggtctatcatatagagggtttgaccggtttctaccgtggatgtgcaactaatctgttgcggacaactcctgccgcagtaataacatttaccagctttgagatgattcacaggttccttcttgatgtattccctcctttacctgaacagcaaccccaaccgctgaagcattgattgtacaatccttgtgcccctatccatgttgtcactgttgagtagaaacccagtaaaaccatccatggacaccgtttacctttgttagaaggctctcctaaaagagattttgataatgcaacaggtagctaccactgaaagcacaaatcatagtgtaggacagtaattagcatttctgtgtgtattattacttttgatagcatgcaatgaggaggtatatgggtttagggctgtggggacatggtgattttggtggggtatgttgtccgatgatgatgatgatgaaaaaaaaaagatactattatgtggatacaataattgctccattcattttattcctcttttaaaaaaaaaaaaaaaaaa

SEQ ID NO: 78799 - DNA, 2880 bp, Oryza sativa
  Clone ID: PAT_MRT4530_78571C.1
atggtggacaagaacgatggatctgaagggctcaaattcaacacatcacacctgatgcaaacaactgaagaggtagcgagagcatttattgctgcagcttctgcagccactgtacagtcaacacgaccatctgtggtgtactcttccagagaagagagtggcagcccaatgcagaagctgcaacaacaattttcgaagatcctgaaagggttttcaacgtcacctgaagtgtctggatcttacaacccggaggttctcacaacacaaaagcgccagtggtccaggttccaactaaagtcgctgggtaataggtgcatcagagaaccatcacatcttttcgagagcattgtgattgttggactccctcctcaggcagatatccatgagctagaaaacattgcactagggagcaatgaggaagatgtaaagaaaccgagaaatatattcggtaacaatcaccaccaagttcatgcattgtcaaatttggaacctcaggttctttttgcataccctccagagaggcctctaccactcaagtacaaggatatcctctcgttctgtcttcctggaggtgtacaggtccatgcggttgaacggaccccctcattcagtgagctgaatgaaatcctcctaggacaggagcaacttaaagaaagcaaccagtctttcgtgttccgtttacagtcttttgctttgccacctttccggtctgcactcagcagaagtggaagcctcatccttgtgtaccatttcttgaacacaaaatgcttcaagatctcaggatggggatatctatacgcaatattgatattctccttgatgccacttcttttgcatatgactttcacaaacagtattcttatggaagagcgtctcgaatggctcactgatggggttagcttgcttacatcattatcacctgaggaaacctgtgaggatgatgttgtctgcgaaggaactgaacttgcaacagaaaaacaatatttcgatggtcatgcagtagatctggaaaaatcctctgaatcaagtgtgggagtttgttcaaaggagctgtctgacactgacagcagttctgaatgtagagataaccaattggacttaaactgcaaagaagttcaacaggaatgtgtagtacaggatgatcttgtaacaggaacagctcctcagtgtgatactcttgaaaggcctgacaattgtttatcagaagatacaactgccgatcaatctgggattgagcttcatgaactggattctgtaccagttatcctgaaggaatctgataccacagaaaattgtggctattctttacaggatgatgtgaacgatgaacagcttgacatctttgttaatgatactattctacctctcatgcgctctcgcctttgtgaaggttctgaattatctccaggttcccaggactctccttctgaaggcataaatttcagaagcgatagccatgaatcggatttggaggagccatcatcaattggtcatggagacttagttggccacaacaatatatcgcaatgggctaaggcaaaaaaatatggatctctgcaagttgtttctcagtactatcagctgcagtgtcctgccaggggttcatcccttacttttcacccgttggatcaccttcatcctctaaggtttcaccggccaggtgaaacagttcttcatattgctggttctactattgatctgcggtcatgtgatacaagtttagaggtggctgagatgcgcaatgcgctatttgccgaggaggaatcgactgctttatcaacatgggctgtggcatccatttgtggatgcctcaggttggagcatgtaatgacactttttgctgcagcactgctggagaaacagattattattgtttgttctaatttgggaatgctttctgcttcagttttgtccatcatacctctgatacgcccatatcagtggcagagtctactcataccggtcttgccaaacgacatgatggactttcttgatgcacctgttccatacataaacaagacatccgatgtacattccaggctagtgaacgccgtggttattgatgccaacaagaatcagatcaagtctacttctgtcccgcaactcccgcagcagaaggagttgctttctgccctgcgtccataccattccagactagtgggagagagttttctagcaagaaagaggcccgtttatgaatgtacagatgcccaggtggaagctgccaaaggtttcttggcagtgcttagatcctaccttgattcgctgtgttccaacttgagatctcatacgattactaatgtgcaatccaacaatgacaaggtttccttgcttttaagagagagcttcatcggttctttcccgacccgtgagaggccctttatgaagagaccatgtcgatacccaaaatgccatgttcttttcatggcctgtatactggtccatggactaatctcaacgttgggttaccaaactgtatgggtgttcatatgtggttccaaagaaaccatactgaaccagacaaagagtccagttcatggctatgttaagggagtgaaagggctccgctttgcccgtggggcggtagcagcagcagcagcagagcgcagtgaatgtgcctgccacaacgtaccacggaaaaagccttcgaccagtggtcgtcacactgccgccctcctcgccgctactactagctcgctgcatgtgccgccgcctgccgctacctacaacgtcgccccatggtacgacgcgtcgctgcgtcacccccacccccgtgtgtaccagtgtagcttgggctacatagttaagctggccggcgtgtccaccggattaaacccccatggtgatcgagactattctcgctgccgaatcaaagcgtga

SEQ ID NO: 78800 - DNA, 3117 bp, Oryza sativa
  Clone ID: PAT_MRT4530_78572C.1
atggcacggggctccgctctgctcgatggtagcgtgctgccgccttcccgcatcgtgagcgagaggcaggctgggctgccgcgccgcttcatgccggaatctgccaccggccgggagatagttacgctgggcgagggacgcccggcgccagactacccggggcggtccgtcttctttctcccctttgcaatggcagggctagttccgccattttcttctttcttcatggatgttctggagttctacgatctccagatggcgcacctcacccccaacgcggtgatgacattggccatcttcgcgcatctgtgcgagatgtttattggggtgcgcccatctcttcggctgttccggtggttcttcactgtgcagtcggtgtcgccgccatcggtagttggtggctgctacttccagccacgggggccggtgctgaaccgctacatcccctgcgccctccgcaagaagtgggacgactggaagagcgactggttctacactcccctcgccgacgaagcgcgcctcctacttccgagccagcccccggtgcaggcctccagctggcgggcgccggtagatctgggggatggctatgacgccgtcctcgaccgcctggcgggcctgcgatcccaggggctcacaggggccatggtgtatggcgactacctccgtcgtcggattgcgccgctccagcggcgcgctcggggcgcctgggagtacaccgggtccgaagacttcatgaggacccaccagggagcggccctcattccccaaggaatcctccccctctgcagcgatccagaccgcgcctccatcctgaccattatgatggcggtcggggcctcagaggagcgagctccaaagggccacgacggcgcaggcgggagccgccggggggaacaatctaccccgagagggggtcgtgcttctgggtcccgcgacaggggtccggggagcagccgccctgccaacacccgggggaagaggaagcagggaggaacacctcccccatctcctccccgagggggcggggcggcgcgtgccagcagcaggcgcccggagggggccgcgccaacatcgcagcccgagggggagcgcatgaagaagcggccccgcaagatgggggagacggaaccatctcggggaaacctcatttcccctccaaagtggtcgtttaaccgaccccctcgcagcgagatcccgtcgcgtccctcccgccattccaagtccggccagtctgaggccgaggatccggcggccgcagaggcccggaggcgggaatctgaccggcgagaggccgcagatcgcctacgggaagccgaggaggccgcccaggaggccgcccgggctcgccaggccgaggaaactgcttgggagggagccgcccgggcccgccaggccgaggaagctgctcgggaggaggccgcccgagcccaccaggccgaggaagccgctcgggaggaggctgtccgagcccacaaggccaaggaagccgctcgggaggaagccggatttcgccaggacgaggcgatggcgacttccgaggcagctcgcgacgaggccgcgggcgcgtcgctcgggcccactccctcgggcgacgctcaggcgacaacttccggggcagctggcgacgaggctgcgggcgtgtcgcttgggcccactccctcgggcgacgctcaggcgacaacttccggggcagctggcgacgaggctgcgggcgcgtcgcttgggcccactccctcgggcgacgctcaggaccaaacgggtccgggagacatccccgagtccggcacttccatcggcggcccgagccgcgcagagcgggcggagctcgacgccgcgtgggcgcgtgtcgaagaggggcgacgctcggtggaggccatggtggaggtgggccgtaaggctcaccgccggcatgtctcggagcttgaaacccgtaagaaggtgctggcggagatcgccaaggaagtggaggaggagcggggggctgccctcattgccaccaccgtgatgaacgaggcgcaggacaccctccgccttcaatacgggagctgggaagtggagctagggaagaagctcgacgccgcccagggggtgcttgacgctgccgctgcccgagaacagcgggcggcagagaccgaagcggcgtcatggcggcgcgaagaggcccttgaggcgcgcgccatggcgctggaagagcacgcctgcgtcgtggagagggatctggcggaccgcgaggccgctgtcaccatccgggaagcaacgctggcggcgcacgaggctgcctgcgccgaagaagagatcgcgctccgcctccgcgaggacgcgctcaccgagcgggagcgagctctcgagggggccgaggccgcggcgcaacagctggcggacagcctgtccctccgcgaggcagcgcaggaggagcaggcgcgccgcaatctggaaggtgcccgcgccgagagggccgcactgaaccaacgggccgctgagctcgaggcgcgggcgaaggagctggacgcgagggcgcgcagcggcggggcggccgcgggcgaaagcgacttagccgcccgcctcgcagatgccgaacacaccatcgccgatctgcagggcgcgctggactcgtccgccggggaggtcgaagccctccgcttggcaggcgaggtcgggcccggcatgctttgggacgccgtctcccgcctagatcgcgccggtcggcaagtgggcctctggagagggcggaccgtaaagtacgccgacaaccagggaggcctcgcccagcacctctcgaagatggccggggctctccaacggctccccgaggagctcgagaagacaattaagtcatcctcgagggacctcgcccaaggagcggtggagctcgtcctggcgagttaccaggccagggaccccaatttctctccatggatggcgctggatgagttccctcctgggaccgaggaccgcgcgcgcgcgcaagtccgggatgccgccgactatatcgtcgacagcttcgagggctcggcccctcggcttgcgtttgcccccaactccgacgaggagggcaatgccggaggtgcagacgacaatgacgtcgaggccggctatccgggcgcatcggattga

SEQ ID NO: 78801 - DNA, 3057 bp, Oryza sativa
  unsure (1)..(3057): unsure at all n locations
  Clone ID: PAT_MRT4530_78573C.1
atggcacggggctctgctctgctcgacggcagtgtactgccgccttcccgcatcgtgaacgagaggcacgccggactgccgcgccgcttcatgccggagtccgccaccggtcgggagatagtgatgctgggcgaggggcgcccggcaccagactacccggggtggtccatcttcttcctccccttcgcaatggctgggctggtcccgccattttctcatttcttcatggatgtcctggagttctacgatctccagatggcgcacctcacccccaatgcggtgatgacattggccatcttcgcacacctgtgcgagatgttcattggggtgcgcccctctcttcagctgttccagtggttcttcaccgtgcagtcggtgtcaccgccgtcggtggttggcggctgctacttccagccgcgggggccggtgttgaaccgctacatcccctgcgtcctccgcaagaagtgggacgactggaagagcgactggttctacacccccctcgccgacgaagcgcgcctccgacttccaagccagcccccggcgcaggtctccagctggcgggcgccggtagatctgggggaggagtacgacgccgtcctcgaccgcctggcgggcctgcgatcccaagggctcaccggggccatggtgtacggcgattacctccgtcgccggattgcgccgctccaacggcgcgcccggagcgcctgggagtacactgggcctgaagactacatgcggacccaccagggagccagatgggattgggctcccgaggacttcaagatcgtagtccaaagggtgctgaatcttagctccgcggaggcgtctcgccttcctcaggagatcctccccctctgcagcgatcccgaccgcgtctccattctaaccattatgatgggggtcggggcctcagaggagagagcccctaagggccacgacggcgcgggcgagcgccgccgaggggaacaacctgccccaggagggggtcgtgcttctgggccccgcgtcgggggctcggggagcagccgccctgccgacgcccgggggaagaggaagctgggaggaacacctcccccatctcctccccgagggggcggggcggcgcgtgccagcagtcggcgcccggagggggccgcgccgacatcgcagcccgagggggtgcgcaagaagaagcggctccgcaagacgggggagacggaaccatgccggggaaacctgatttcccctccaaggtggtcattcaaccgaccccctcgcagcgatgtcccgtcgcattcctcccgccaccccaagtccggccagtccgaggccgaagatccagtggccgcagaggagcggaggcgagagtctgaccggcgtgaagccgcagcccgccttcgggaagctgaagaggccgcccgggaggccgcccgggttcgccaagcggaggaagctgctcgggaggaggccgcccgggctcgccaagccgaagaagctgcccgggaggaggccacccgggctcgccaggctgaggcgacagctgctgctggcgcgtcgcttgggcctactccctcgggcggccctcaggcgacatcctccgaggcggctcgcgacgaggccgcgggcgcatcgcctgggcctacctcaccgggcgacgcccaggatcaaacgggcccgggggacatccccgagcccagcgcatcctccggggggccaagccgcgttgccttttctccaaggcggctcttctcctcatcttctgtcgccccgctgagcgccgagccccttctgcaggccctggccgccgcaaacaccgcagtgctggatgggttcaacacccaagtggaggccctgcgtgcagaacgagcggagctcgaggccgcatgggcgcgtgttgaggaggggcggcgctcggtggacgccatggtggaggtgggccgtaaggctcaccgccgccacatctcggagcttgaagcccgcaaggcggcgctggcggagatcgcccgagaggtggaggaggagcgagaggccgcccttgtcgccaccaccgcgatgattgaggcgcaggactccctccgccttcaacacgggagctgggaggcggagctgaagaacaagctcgacgccgcccaaggggttcttgactccgccgctgcccgagcgcggcgggtaacagagactgaagcggcgtctcggcggcgcgaggaggcccttgagtcccgtgccatggcgctggaagaacacgccggcaccgtggagaggggcttgacggaccgcgaggccgccgctgctctccgggaggcgacgctggcggcgcacgaggccgcctgcgccgaggaggagtgcgcgctccgcctccgcgaggacgcactcgcggagcgggagcgagctctcgaggaggctgaggccacggccaaacggctggcggacagcctgtcccttcgcgaggcggcgcaggaggagcaggcgcgccgcaatcttgaatgcgtccgcgccgagagagccgcactggagcagcgggctgctgacctcgaggcgcgggaaaaggagctggacgcgagggcgcctatcggcggggcggctgcgggcgaaagcgacttagccgctcgcctcgcggtgccgaacacaccgtcgctgacatcagcgcgcgctgattcttccatcggggaggccgaggccctccgcttggcgggcgagatggggccaacagttnggatcggtctcccgcatggatcgcgccggatggcctgggtcctcgaacgactccccgaggagctcgagaagaccatcaagtcatcctcgagggacctcgcccggggggcggtcgaactcgtgctagcgagttaccaggcccgggaccccgatttctctccctggatggcgctggaggagttccctcccgggaccgaggacgacgcgcgcgcgcgcgtccgggatgctgccgaccatatcgtcgacggcttcgaggggtcggcccctctgctcgcgttcgcccccagctccgacgaggagggcgacgccagcgatgaggatgacggcggcgacgaggccggcgacccgggcgcattggaatga

SEQ ID NO: 78802 - DNA, 2856 bp, Oryza sativa
  Clone ID: PAT_MRT4530_78574C.1
atggcacggggctccgctctgctcgatggtagcgtgctgccgccttcccgcatcgtgagcgagaggcaggctgggctgccgcgccgcttcatgccggaatctgccaccggccgggagatagtcacgctgggcgagggacgcccggcgccagactacccggggcggtccgtcttctttctcccctttgcaatggcagggctggttccgccattttcttctttcttcatggatgttctggagttctacgatctccagatggcgcacctcacccccaacgcggtgatgacattggccatcttcgcgcatctgtgcgagatgttcattggggtgcgcccatctcttcggctgttccggtggttcttcaccgtgcagtcggtgtcgccgccatcggtagtcggtggctgctacttccagccacgggggccggtgctgaaccgctacatcccctgcgccctccgcaagaagtgggacgactggaagagcgactggttctacactcccctcgccgacgaagcgcgcctccgacttccgagccagcccccggcgcaggcctccagctggcaggcgccggtagatctgggggatggctatgacgccgtcctcgaccgcctggcgggcctgcgatcccaggggctcacaggggccatggtgtacggcgactacctccgtcgtcggattgcgccgctccagcgatgcgctcggggcgcctgggagtacaccgggtccgaagacttcacgaggacccaccaggaagtgagatgggactgggctcctaaggacttcaagatattggtccaacgggtgctgaatctcaactccatagaggcggccctcgttccccaaggaatcctccccctctgcagcgatccagaccgcgcctccatcctgaccattatgatggtggtcggggcctcagaggagcgagctccaaagggccacgacggcgcaggcgggagccgcaggggggaacaatctaccccgagagggggtcgtgcttctgggtcccgcgacaggggcccggggagcagccgccctgccgacgcccgggggaagaggaacgagatcccgtcgcgtccctcccgccattccaagtctggccagtctgaggccgaggatccggcggccgcagaggcccgcaggcgggaatctgaccggcgagaggccgtggatcgcctacgggaagccgaggaggccgcccaggaggccgcccgggctcgccaggccgaggaagccgctcgggaggaagtcgcccgggcccgccaggccgaggaagccgttcgggaggaggccggatttcgccaggacgaggcgatggagacttccaaggcagctcgtgacgaggccgcgggcgcgtcgcttgggcccactccctcgggcgacgctcaggaccaaccgggtccgggggacatccccgagtccggcacttccatcgggcggcccgagccgcgtggcatcctcttcaaggcggctcttccccacgccttctatcgccccactgaacgcagagccccttctgcaggccttggcccgccgcaaacaccacggtgttggatggagcgggcggagctcgacgccgcgtgggcgcgtgtcgaagaggggcgacgctcggtggaggccatggtggaggtgggccgtaaggctcaccgccggcacgtctcggagcttgaaacccgtaagaaggtgctggcggagatcgccaaggaagtggaggaggagcggggggctgccctcattgccaccaccgtgatgaacgaggcgcaggacaccctccgccctcaatacgggagctgggaggcggagctagggaagaagctcgacgccgcccagggggtgcttgacgctgccactgcccgagaacagcgggcggcggagaccgaagcggcgtcccggcggcgcgaagaggcccttgaggcgcgcgccatggcgctggaagagcgcgcctgcgtcgtggagagggatctggcggaccgcgaggccgccgtcaccatccgggaagcaacgctggcggcgcacgaggctgcctgcgccgaagaagagttcacgctccgcctccgcgaggacgcgctcaccgagcgggagcgagctctcgagggggccgaggccgcggcgcaacagctggcggacagcctgtccctccgcgaggcagcgcaggaggagcaggcgcgccgtaatctggaaggtgcccgcgccgagagggccgtactgaaccaacgggccgctgagctcgaggcgcgggcgaaggatctggacgcgagggcgcgcatcggcggggcggccgcgggcgaaagcgacttatccgcccgcctcgcagctgccgaacgcaccatcgccgatctgcagggtgcgctagactcgtccgccggggaggtcgaagccctccgcttggcaggcgaggtagggcccggcatgctttgggacgccgtctcccgcctagattgcgccggtcggcaagtgggcctctggagagggcggaccgtaaagtacgccgccaaccagggaggcctcgcccagcgcctctcgaagatggctggggctctccaacggctccccgaggagctcgagaagacgattaagtcatcctcgagtaacctcgcccaaggagcggtggagctcgtcctggcgagttaccaggccagggaccccaatttctctccatggatggcgctggatgagttccctcctgggaccgaggaccgcgcgcgcgcgcaggtccgggatgccgccgaccatatcgtcgacagcttcgagggctcggctcctcggctcgcgttcgcccccaactccgacgaggagggcaatgccggtggtgcagacgacagtgacgacgaggccggcgatccgggcgcatcggactga

SEQ ID NO: 78803 - DNA, 372 bp, Oryza sativa
  Clone ID: PAT_MRT4530_78575C.1
acaaggagatttaccagtagtatagaagaatcaataggccctcgagcggagcgatagagtgcccgtgtggaagaggaagagcggatatgacagagatagacatggtgtataggataataggagacatcatcatgatagtcgggatcgcgaccgcaaatgaacgtgatcgtagtagagtattatgaaaggaacagaagtgtacaaatagaagccctcctgattttgataagattgaagtgaaatcaaaggacgtgttgacacaaagaatgactatctcgtcatttgacgtttatggattacttggaattgtcaaagaagtagtgcatcgaagttgtttatgtgtatacgacctatgaattgataattttaccc

SEQ ID NO: 78804 - DNA, 2631 bp, Oryza sativa
  Clone ID: PAT_MRT4530_78576C.1
atggcgcacctcacccccaacgcggtaatgacattggccatcttcgcgcacctgtgcgagatgttcatcggggtgcgcccatcccttcggctgttccggtggttcttcaccgtacagccggtgtcgccgccgtcggtggttggtggttgctacttccagccgcgggggccggtgctgaaccgctacattccctgcgtccttcgcaagaagtgggatgactggaagagcgactggttctacacccccctcgccgacgaagcgcgcctccgacttccgagccagcccccagcgcaggcctccaactggcggacgccggtagatctgggagatggctacgacgccgttctcgaccgcctggcgggcctgcgatcccaggggctcacaggggccatggtgttcggcgactatcttcgtcgccggatcgcgccactccagcggcgcgcccagggcgcctgggagtacaccgggtccgaggactgtatgaggacccaccagggggtcagatgggactgggctcctgaggacttcaagaaagtggtccaacgggtgctgaatctcagctccgtggaggcatccctcattcctcaaggagtcctccccctctgctgcgatgcagaccgcgcctccatcctgaccatcatgcaggcggtcggggcgtcggaggagcgggctcctcgaggccacgatggcgcgggcgggagccgcaggggggaacaatctaccctgggagggggtcgtgcttctgggccctgcgtcgggggcccggggatcggccgccctgccgacgcccgggggaagaggaacgagatcccgtcgcgtccctcccgctattccaagtccagccagtctgaggccgaggacccggcgaccacagaggcccggaggcgggaatctgaccggcgagaagccgcggatcgccttcgggaagccgaggaggctgctcgggaggccgcccgggctcgccagaccgaggaagccgttcgggaggaggccggactccgccaggccgaggcgacgacatcctccgaggcgacccgtgaaactgaccggcaagaggccgcggatcgccttcgagaagccgaggaagctgcccaggtggccgtccgagctcgccaagctgaagaagccgctcgggaggaggccagacttcgccaggccgaggcggcgacgacttccgaggcagctcgcgacgaggccgcgggcgcatcgcttgggcccaatccctcgggcgacactcaggacaagcccggtccgggggacatccctgagtctggcacgtccatcggcgggccgagccgcgcggcatcctcaccgaggcggctcttccccacaccttccgttgctccactgagcgcagaaccccttctgcaggccttggccgtcgcaaacaccacggtgttggacgggttaagtgcccaggtggaggccctgcaagcagagcgggcggagctcgacgccgcatgggcgcgtgtcgaagaggggcgacgctcggtagaggccatggtggaggtgggccgcaaggcacaccgccggcacgtctcagagctcgaagcccgtcggaaggtgctgggggagatcgccaaggaggtggaggaggagcggagggctgccctcattgccaccaccgtgatgaacgaggcgcaggacaccctccgccttcaatacgggagctgggaggcggagctagggaaaaagctcgacgccgcccggggggtccttgacgctgccgctgcccgagaacggcgggcggcggagaccgaggtggcatcccggcggcgcgaagaagcccttgaggcccgtgccatggcgctggaagagcgtgcctgcgccgtggagagggacctggcggatcgcgaggccgctgttgctattcgggagtccgcgctcaccgagcgggagcgagctctcgaggaggccgacgccgcggcgcaatggctggcggacagcctgtccctccgcgaggctgcgcaagaggaacaagcgcgtcgcaatctggaaagtgcctgcgccgagagggccgcactgaaccagcgggccgctgaactcgaggcgcaggcaagggagctggatgcaagggcgcgtagcggcggggcggccacgagcgacagcgacttaaccgcccgcctcgcagctgccgaacacaccatcgccgatctgcagggcgcgctagactcgtccgccggggaggtcgaggccctccgcttggcaggcgaggtagggcccggcatgcttcgggacgccgtctcccgtctagaccgcgccggccggcaggggggcctcgcccagcgcctctcggagatagccgggactctccaacggctcgccgaggagcttgagaggacgattaagtcatcctcgagggacctcgcccgaggagcggtggagctcatactggcgagttaccaagccagggatcccgacttctccccatggacggcgctggacgagttccctcccgggaccgaggatggcgcgcgcgcgcaggtccgggacgccgccgaccatatcgtccacagcttcgagggttcgacccctcggctcgcgttcgccttcaactccgacgaggaggacgatgacggcggagtgggcgacagtggcgacgaggctggcgacccgggtgcatcggagtga

SEQ ID NO: 78805 - DNA, 1389 bp, Oryza sativa
  Clone ID: PAT_MRT4530_78577C.1
gcagcgctgagtcgtcgagtaccagcaattctccatccatggttggcaaaaagatgcataaccgttgtctcaagcttacgacatgcaacactcaggaattctccatcttcatgacaatccaaaaacaaatgttgagtagtcttatttttttaataaaaaacaacatattaaacacccattccaatttcgtcttgctagattatccttggttaacacaactcccttaagcaagtaccacataaagatcttaatcttaagcggcatcttatgcttccaaatgaacttatttctgtcaatgtaaccattattaattaaagctaagtacattgacctaacagaaaaactgaccgcgcacacaagccttaccacggccgacttcgttcttagcaaagtcccaacggtgaaggactccagcgacagccttatcaccctcgccctcctctccctcacgtacctccctatcgccgcgcccatctcgccgtcgacctgcggctgatcgtgccggcgaccacggtcaggtggcacgcgacgacgatagcgagcgggcgagcacgacggcgtcctccagcgcggaggagccgccctggccgatgaacgggcccatgacgtgcatcgcgtcgccggcgaccgtcacggcggcgcgccgcctcagctggaagaaggcggcgagcgccacctgccaggggggcctgtaccacaccttcgtcgtggtccacagcgatgacgcatggtcgcaccgccgcaccatgtcgacgacgtcggcggctgtggaatgcctgcgcctgctgaggaagaaatggacgagatggtcgttgatgggcagccgtccgacggcgagatcatcgccggcaatggtcaggaactctgttccaaatggatggccgtccgggtagctggcgaggccaagaatggccaaacgaggaagctccgacggattccctaatcccaagtatttagccaccaccgaattggcgccgtcgcagccaatcagcaccttggccttgatggtgtgtccatcctccgtggtaagaaccgggcagcggctgccggagtcttcgtcgacggccgcgacgcgacagccgaagcggatcgtccctgcaggcaggttcttggccagcgtctccaccaaatcctttcttgtcaagcaccgaagctccttcctagcatttgatcgaacagaatggaggcaaaacctcaatgatcttagccagcgccaagatgctccagagctcgccatccgttggcgtggatgccgatggccacgccgtctgctcgcagcgcctcggacctctccagcacgaggctgcttatccccttccggtgaagggcgagagcggtggcgaggccgcagatgccgccgccgacgatgacgatgccatgggcggcgtc

SEQ ID NO: 78806 - DNA, 6396 bp, Oryza sativa
  Clone ID: PAT_MRT4530_78578C.1
atgggtattcttgaatgtgaaagtgaggaggatgtatatcagcaaaaagaccaagttgatgtgatgaacaatactgtcaacattgatgttgattgtggcaatgattatctcactagaaatgatataaatggaacaactattgatttggctgctgtctctcaacgtgaggaagatgtacaagaccaattatatgaagaaaatgatctaagagaattgagcgaagcggatgatatggatcaatcctttgaagctaacatggattcatatgatggaagtcattctgatgctgatatcgaagaaactacagagccaaaaagaggtagaggtatcacaacgatggaaacattctggccaattgtagaaaatgtaaaactgaaagttgactacaatgagcattttcaaccagttggtccctatgcatcaaagttagcaaatgtgattggcaatcttgccaaaggtaaagtcctatcacttgcttatgaagattggactgatgtgcctaacaaggatgatgtctgggataacgtgaaggcccgcagcaatcgtggaaaagcaaatcgtgcaaaaatggttgcagtacacaccattggaactaggagcttagcaaatgttcgtcatgatatgatacaaccaagaattgttgaagcattgcaactaaatcaaaagaggcctgctatgaagatacaaccaagaattgctagagaattgcagcttaatctgaacaaacatgctaggaaggtacaaccaagaattgttgaagaatctcagcttaatcataacagacataatgggatggtgcaaccaggagttgccagagaattgcaagttaatcaaaatatgcatgttacgaagggggtacagaagcatatggccaggtacaataacaacaagcctactgaaattgaaggggccaatgtgggaacaactaaacatgctaatgtcaaaagggcagcattagcttgtgaaaatgtgttggcgcgccaggctggggaggcgtcaagttcttcgccgattagtgcgatgggttccctctccggcatcgacgacctcgtcttccccccgaggcagacgtttcggttcggcagccttgacttcatcaccaacgactttggcaagatctctctcctcgactcggatccgaaccagtcgggagagaaccaggtcctagccccgttcggtattccgaactcggccaagatctgctccaagcttatctcgaccgagtcggcttcaaaccactcggacgagatccaatctacttcaacttcaccagatcaagatgatggggcctacccgccaatcctgatgaaactccccaacgatttggctgccgtcttcactacaagggcgtcttctccacgtaggcctaggcggaagtcggcctcaacactgatcccacctagctccagggaagtcggcgtcatactccagccactcggcacgatttcgacggatcaactcgaaggctacctcagctccctcggcgtcgactcacgaccaacagagatcgtggaatacaacgaattcggctaccgctacgacagccgcgacctcgacgacttcgacgagagctttgaagacaattacacccctctctacttcggcatcttcatgaccgacaacgagacggaagaacaacgccaagcccgagaagcagaagcggaagccgagcgatgccgactagaagaggagcgccaagcgcaagaacaagaacggttgcggcgagagcaacaagaacgcgaacaggctgcaaaggaggccgaagaccgacgacaacgagccttggacgcagggcgacgagcgcgagatcttatcaggcaacaagacgttgaggggacagcggtcttccgcaccccccaacaaaacgctatcgctgcgatcacccttctcgacaccctcctcaaggaagacgcactcaatcaagccgatcacgtcgtcaacatcttgaaccagaccaagaccatgatcgccactttagttccggttaactccggcagcgttcgcacaccgactggtagccggcgtcccgtcgatcttcgcgacacgatcaaccagcgccatgcagcaagaggtcaccgccattcaccggatcgctacgacgacgacgtggatggaatagctgtcttcactaatgacctacgtcgagtggattggccagccggcttcaagccgactggaatcgagaagtatgacggcaccactaatccggagtcttggctcaccgtctacggactcgcaatccgcacagcaggaggagacagcaaggccatggcaaactatctacctgtggccctaggcacctttgaatgccccggcacacagtttgatctctacaacgtcattcagaagcctggagaatcccttcgagattacatccgacgcttctccgagcaacgcaacaagatctccgacattaccgacgacgttatcatcgccgcctttactaaaggcattcgccacgacgacctagtcggcaagatcggacgtaaacctcccaggacggttaagcagatgtttgaaaaagccaatgtgtatgccaaagctgaagatgctattactgcatccaaacagtcgggcaccacttggaagccgaagaaagacacgccggccgcaggagagaggggaagtaacaatcacaaggatcgcaagcgtaagcccgaagaacttgtggcgacaactaccccatcttcccgacaacgttcccgcgtcaacaccttcgacaagataatgagctcccaatgtccgcatcatcccaactccaaccatgtggccaaagattgcttcgtctacaagcaatttgcggaacaatatgccaagaacacacgtaagccttcagacggagatcaaggcacatcaaagaagaaagatgacgaagacgatgccccgactgagatagcaattaagttcgaccgctcggatcatcccgaccgagtggtccacccggggcggtaccccctggtactagacccagtggttcgtaacgtcaagctccgaagaaccctcatcgatggtggcagtgcactcaacatccttttcgccaagaccctggacgatatgcagattcctcgcacagaattaaagccgagtaatgcacccttccacggagtaatcccagggctatcagcaatgccactcggccagatcactcttccattaacttttggtactcgggagaacttccgcacagagaacatctgctttgaagttgccgattttgagacagaatatcacgccatactcggacgcccggcgttagccaagttcatggccgttccacactacacctacatgatgatgaagatgcctggtcctcgagaagtcatatccctacggagcgacatcaagcaagccgtcacatgtgataaagaaagttgcgagatggcccagacccgcgagatcacactcgcccgagaagagatccgactggctgcgaccatggcaagcgaaggagaagtgcccgcaaccaagatgcccaaaagtggagaaagcgatgccaagaccaaaaaggaagatgccaaacccatcaagcagcgactccaccgctttgcacaggacaggaaggatgcgatcaaggaggaattaaccaagctattagcagcgggcttcattaaagaagtccttcatcccgactggctggctaacccagtcctggttcggaaaaagacggggcaatggcgcatgtgtgtcgattataccgacctcaacaaatcttgtcccaaagatccttttgggttacctcgcattgaccaaatcggccgcaatgttgaggcttatgttgatgatgtagtcgtcaagaccaagcagaaggatgatttgattacggatcttgaagaaactttcgcgagcatccgcgctttcaggatgaaactaaaccctgaaaaatgcgtcttcggagtaccgtcagggaagctgcttggatttatggtgtctcaccgaggcatacaagctaacccggagaaagttaatgccatcctcaacatgaaaccgccgagttctcagaaagatgtccagaagctgactggttgcatggcggcgctcagccggtttgtctcacgactcggtgagcgggggatgcccttctttaaactgttaatgaaaacagacaatttccagtggggacccgaagcacagaaagcctttgaagacttcaagaaacttctcagtactccaccagttttggcctcgccacatccacaagagccgctgctgttatatgtgtcggcgacctcccaagttgtgagcacggtcctggttgtcgagcgtgaagaggaatgccatattcaaaaagttcaacgaccaatttatttcgttagcgaggttttggccgactccaagacaagatatcctcagccacaaacttcgatcaagttccaagctttagccgactttgtcgccgagtggaccgagtgccaagaggacacgcccgaggaaaagatggagtattggactatgcactttgacgggtcgaagagactttcaggcactggagccggagttgttttaatttccccgactggagaaaggttaagctacgtattgtggatacatttttctgcgtcccataacgtggcggaatacgaggcgctgctccatggattaaggattgccatctctctgggcattcgccgattaatcgtccgtggagactctcagttagttgttaatcaagtcatgaaagagtggtcctgtctagatgataatatgaccgcttatcgacaagaggtacgcaagttggaagataaattcgacggactcgagctcacccatgtcctccgacataataatgagacagcaaacagactggccaattttggttcaaaacgggaagcagctccttcagatgtgttcgtcgaacatctttacgaaccaaccgtgcccagaaaagaaacaattgaagccatggatactcaaggtgtaagcatgattgaagccgactggagagaacctctcataagatttttgaccaaacaagaactccctcaagacaaaaatgaagccgagcggatttccaggcgcagcagactttacgttattcatgagactgagctgtacaagaaaagtccattaggaatactgcagcgctgtgtgtctttggaggaagggagacaattgctaaaagatattcattcaggcatctgtgctgtgtctgatgctgacaagattgtgcggacatgtgaaggttgtcaattttttgccagacaaattcatctgccagcccaagagttgcaaaccatcccgttgtcctcgccgtttgcggtctgggggctcgacatggtcggcccgtttaaaagggcagtcggcggatacacgcatctctttgtggctatcgataaattctccaagtggattgaagctaaaccggttatcacgatcacagcagataaagctagagattttttcatcaacattgtgcaccggtttgaggtacctaatcggatcatcactgataatggcactcaattcaccgaaggagtgtttaaagatttttgtgaagattttggcatcaaaatttgctatgcctccgtagcgcaccctatgagtaatggacaggttgaacgagccaacggcatgctactccaagggataaaagcacgagtttttgaccgattgaatccctatgccggcaaatgggtggaacagctgccatctgtactttggtccttgcgcaccactcccagtcgggctacgggccagtcgccgttcttcctagtttatggagcagaggcaatgttgcctagcgaggtagaatttgaatctttgcgtttctgcaactttcgtgaggagcgctatggagaagaccgagtagatgatctacaccgactggaagaggcccgtgaagcagccctaattcagtcggcccgatatttgcaagggttgcgtcgttatcataaccgtaacgctcaacaaggtttgacaaaaacttttaagaaatcaggagccaagaccagtcggtcaaagatcggtgtcctgaaatctctcaactacatcaactgctatcttatcggcagatttttgcgcatcgctaatgaggtcaagagcagcttcttcgctcgtcctgtctacaaagccatcaatggcatcaacgtcaacccttggataaagggatttggtcatcgccaacgccagactcgctcccatactcccagcttctttgatgtccttgaaatatgtatccggagcaactctcagcttgtcgaagatttcagaagcatcaagtgtactcggaccggtgttattgaagaacatggcttggatgagtggggtagcggcattagcgactttatcccgggcttcttcaagttttttgatcttgccaaccaggacgtcgaattgagcctacgacttgatcttgcgttgattcctggtggcttcgagggttcccagatgagggactaa

SEQ ID NO: 78807 - DNA, 3021 bp, Oryza sativa
  Clone ID: PAT_MRT4530_78579C.1
atggcacggggctccgcaccgctcgacggtagcgtgctgccgccttcccgcattgtgagcgagaggcaggccgggctgccgcgccgattcatgccggaatctgccaccggccgggaggtggtcgcgctgggtgagggacgcccggcgccacactacccggagcggtccgtcttctttctctctttcgcaatggcaggactggtcccgccattctcttctttcttcatggatgttctggagttttatgatctccagatggcgcacctcacccccaacgcggtaatgacgttggccatcttcgcgcacctgtgcgagatgtttatcggggtgcgcccatctcttcggctgttccggtggttcttcaccgtacagccggtgtcgccgccgtcggtagtcggtggctgctacttccagccgcgggggccggtgctgaaccgctacattccctgcgtcctccgcaagaagtgggacgattggaagagcgactggttctacacccccctcgccgatgaagtgcgcctccgacttccgagccagcccccggcgcaggcctccagctggcgggcgccagtagatctgggagacggctacgacgccgttcttgaccgcctggcgggtctgcgatcccaggggctgacgggggccatggtgtacggcgactaccttcgtcgccggattgcgccgctccagcggcgcgcccggggcgcctgggagtacaccgggtccgaggactacatgaggacccatcaggggcacaaatgggattgggtccctgaggacctgaggatggtggtccaacgggtgctgaatctcagctccgtggaggcatcccttattccccaaggtgtcctccccctctgcagcgatccagatcgcgccagcatcctgtccatcatgcaggcggtcggggcgtcggaggagcgggctcctcgaggccacgaaggcgcaggcgggagccgcaggggggaacaatctaccccgggagggggtcgtgcttctgggccccgcgacgggggtccggggggcagccgccctgccgacgcccgggggaagaggaagcaggagggtaccccttccccatctcctccccgagggggcggggcggtgcgcgccagcagcaggcgcccggagggtgccgcgccgatgtcgcagcccgagggggggcgaaagaagaagcggctccgcaagatgggggagacggaaccatgccggggaaacctcatctctcccccaaggtggtcgtttagccgacctccctgcagatcccgtcgcgcccccttcgcccttccaagtccggtcggtctgaggccgaggagacggcgaccgcggagacccggaggcgggaagctgaccggcgagaagccgcggaccgcctccgggaatccgaggagggtgcccaggaggctgtccgggctcgccaggctgaggaagccactcgggaggaggccagaccgcgctgggccgaggagtccgtccgggaggcggagacggcgcacgcacgtcaggcggcccaccgagcccccgacccgactccgcccgaagcgacgacgacttccgaggccacccacgacgaggccgcgggcgcaccgctcgggcccgacccctcgggcggcgctcaggacgagccggcctcggggcgaggccgcccccgagtccggcacgtctatcggcggaccgagccgcgcggcacccacaccgaggcggctctcccctttgccttccactgccccactgagcgcggagcccctactgcaggccttagccaccgcgaacagcacggtgctggacgggctaagtgcccagatggagatcctgcaggcggagcgggcggagctcgacgcggcttggacgcgcgttgaagaggggcggcgctcagtggaggccatggtggaggcgggccgcaaggctcaccgccggcatacctcagagctcgaggcccgtcggagggacctggcggagatcgccagggaggtggaggaggagcgggagactgccctcatcgccaccgctgtgctcgacgaggtgcgggacgacctccgcctccaatacaggagccgggcggcggagctagagaagaagctcgacaccgcccggggaatccttgacgccgccgctacccgggaacgtcgggcggcggagaatgaggcagcgtcccggcggcgcgaagaggcccttgaggctcgcgccacggcgctggaagagcacgcccgcgcgagggagagggacctggcggaccgcgaggccgccgttgccatccgggaggcaacgttggcggcgcacgaggccgcctgcgccgaagaggagtccgcactccgcctccgcgaggacgcgctcaccgagcgggagcgagctctcgaggaggccgaggccgcggcgcaacggctggcggacagcctgtccctctgcgaggcagcgcgggaggagcaggcgcgccgtaatctggaaggcgcccgcgccgagagggccgcactggatcagcgggccgctgagctcgaggcgcgggcgaaggagctggacgcgagggcgcacaacggcggggcgaccgcgggcgacggcgacctagccgctcgcctcgcagctgccgaacacaccatcgccgatctacagggcgcgctggactcgtccgccggggaggtcgaggccctccgcttggcaggcgaggggggcctcgcccagcgcctctctgagatggccgggactctccagcggctccccgaggagctcgaggagacgatcaagtcatcctcgagggacctcgcccggggggcagtggagctcgtactggcaagctaccaggccagggatccggacttctccccgtgggcggcgctggacgagttccctcccgggactgaggacgacgcgcgcgcgcaggtccgggacgccgccgaccacatcgtccacagcttcgagggtacagccccccggctcgcgttcgccctcgactccgacgaggagggcggtgacggcggtgcgggcgacagcggcgatgaggccggcgacccgggcgcgtcggaatga

SEQ ID NO: 78808 - DNA, 1261 bp, Oryza sativa
  Clone ID: PAT_MRT4530_7857C.1
gtgcccctggctcttgctttaattccttcagttttattataatatcttctttttaagacattgtccctcaatggaaccataagacccaagatcaaagaggaacggcaaatggtttagccaccactctaatgtcctttttcaaggcatttgctccagcaggatctggtattgtgtattcatgcgcccatcgcccgcccccttcttccttctggccagctcatcatagttgactccccagtttggacccccacgaggttcttcccctgttttggacacttccaaccttttcttgtcatgccagagatcctttctttacactattcctccaactgagagcgagtttctgggcaagccctgtgacatggactacatagagtttctatctcctaggtaatttcgtcagcctttgtccaccttcttctgcaatttggggagctaccgatactggacaacaacgggtggacccaaaccttgggccacccaagcagtggcctggggcctggaagtgaagacccatataagctcatctgatttcaccatgtaaaaggatctgagctaaagttggagcggcccagggcctgtctaaagtatgggtccgctcccaaccatataaattcttgttgaagaattcgaaatattcagcaagaaagaaaaatggaagtacaagacgatgaacataaaaattgcgtagttctaagcacgcatccaaaaactgtttctgaaagtggaaaccatgtgtttttttaaaaaaaaataatttaaattgatagtgttgacactaaaaaacaggtggaaagcctgccgccggctagtaacctaatggactttggacgatcacttatgattgtttttcttcttggacattgatctcataaagtttgtttcaatcaatgagatcagaatagtttgtttcaatcaatgacatcagaatattaatttccaatcagatatttcctttaccaaatttgtccatagaatagtttgtcatgttcgcgtaattgtaaacacgcatcaatttcggtcagcaattttaaataggtcggttcaccaaagacgcttgtgcaattacgattgtatatatcataccattacatatagatgcttgaagatctgactttaaaggtatatactagaaaatagatgctttaaacccatacactcaatcaagcggctactctcggggcattgattccaggggtgccaaggtgcacgatcgaccgatccggagatggctaccaaactccagcatctgccatggtaa

SEQ ID NO: 78809 - DNA, 718 bp, Oryza sativa
  Clone ID: PAT_MRT4530_78580C.1
gtcatcaccggcggcggctcggcaactcacgctcgccggcgaacgatggcgcgacggcgcaaacggagggcacctacacgtagagggcaacgcggcgaactcactgagggcttggacgacggcggaggaggcgttcgggtcgacgacgacggcggtgctccggcgatcctcggtggaaacggagggtaggacgaggacggcgacgacttggcgaacccaacagtggccttcccgagcgacgacgacgaccagagcggcggcggcgcacggctggactcgcggcggcgacagcggcgcacgggttgtcgtggaggcggcgctacaagcggcggcgagctgaggcgagggtggcgacgaagggctaggagcggcgatgtaggcccacggcggccaacaacggcgatggaaggtctagggttaggaggaaaaaacgaatccgaatcgagctcgaatccaacgatttccaaacgaaattagccgaagattccaaaagagaaaaggaagaggggatcccgaggatcatttcccctctattgatttgatcggagatggaaagatgcggacggccccacctgtcagcgggagagaggagagtgagcggcggctcgactcggtgggctggttgggccgggtgcaagcaggccgaggagagagagggagagaattgggccgactttcggcccaaagcgaaaagaggatttttaaaacctttttcttt

SEQ ID NO: 78810 - DNA, 406 bp, Oryza sativa
  unsure (1)..(406): unsure at all n locations
  Clone ID: PAT_MRT4530_78581C.1
gtngnaaaaaaaacatngaacaaaaaagggggtaaacgaagttttgggccaaccaaatttttcctaaaaaaaagaaattggtggaaaacaaccctccctgggggggaaaaaaaagttggtcaaccccaaacaccttcatggtctggggggaaaaaaaatcctttggaaaacaaccccgcccttaaaaaaactgggggcggtttttggatgctgaaggaactggaggccccccacaacaccagggggaaaaaccccaaaaaaggaggaaattgggggaggccggctgcccaaaattgcggggggttccggactattttggcaacaaacaccccttgggcgggacggtggtggggggggtaagaagaccaccttggcgcccccaactccggggggggggaaggccgaa

SEQ ID NO: 78811 - DNA, 5790 bp, Oryza sativa
  Clone ID: PAT_MRT4530_78582C.1
ctaagcataaaatcgacgaaggtgttcaatattccaagaattgttgatgagagtaccgtcttcgtgcttgagtcgataagaacctggccgagtgacttcagcaattatgaacggtccttcccataagggagatattttatgccgatcctgtgttgtttgaattttcctcagaaccaggtcgtcgactaaaaaggctcgcgatcgaatattccgattatgataacggcgcaacccttgcaaatatcgagtcgactgaatcaaagctgtttctcgggcttcttctagtcgattgatgtcgtctacttggccctcttcatagccctcctcgttgaatttccgaaatcgtagtgattcaaattccacttcactcggcaacattgcttctgcgccataaaccaaaaagaacggcgactggccggtagcccgattaggagtagtgcgtaaagaccaaagtatggacggcagctgatctacccacttgccagcatagggacatagtcggtcaaaaactcgtgctttgatcccttgaagtatcatgtcgttagcacgctcgacttgtccagtactcataggttgtgccacggaggcgtaacaaattttaatgccgaagtcttcacaaaagtctttaaatgctccgccagtgaattgagtgccattatcagtgatgatccgattaggtaccccaaaccgatgcacaatgttgatgaaaaaatctctagccttatctgctgtgatcatgatgacctgtttagcctcaatccacttggagaatttgtcgatagccataaagagatgcgtgtaaccgccgactgcccttttaaacgggctgaccatgtcaagcccccagaccacaaatggccaggataacgggatggtttgcaactcttgggcttgccggtaagctttgccgacaatggtccgtgcagcggcatgattaccacaaataccagaatgtatatccttcaacaactgtctcccttcttccaaagacacatagtgctgcagtattcctgatggacttttcttgtacagctcggtctcatgaataatgtaaagtctgctgcgcctggaaatccgctcggcttcatttttgtcttgagggagttcttgtttgctcaaaaattttataaaatgttctctccagtcggctttgatcatgcttacgccttgagtatccatggcttcgactgtctcttttctgggcacggtcggttcgtaaagatgttcgacgaacacatctgaaggagctgcttcccgttttgaaccaaaattggccagtttgtcggatgcctcattgttatgtcggaggacatgggtgagctcgagtccatcgaatttattttccaacttgcgtacctcttgtcgataagtggtcatattatcatctagacatgaccactctttcatgacttgattaacaaccaactgagagtctccacggacgattagtcggcgaatacctagagatattgcaatccttagtccatggagtagcgcctcgtattccgccacattatgggacgcagaaaaatgtatccacaatacgtagctcaatctttctctagtcggggagattaaaacaaccccagctctagtgcctgtaagcctcttcgacccatcagaatgcatagtccaatattccatcttttcctctggcatgtctttttggcactcggtccactcggtaaggaaatcagctaaagcttgtgacttgattgaagttcgtggcttgaacgatatgtccaaagacatcaattctaaggcccacttcgcaatccgtccgtttacttcgcggttatgaagtatatccccgagtggaaacgatgtgactaccgtgaccgagtgactttgaaagtagtgagataattttctgacggtaattaagacaccatatagtaacttttgaacctgagaatatcttgtcttggagtcagctaaaacctcgctaacgaaataaattggacgttggactttttgaatatggccttcctcttcacgctcgacaaccaggaccgtactcacaacctgggaggtcgccgacacatataacagtagcggctcttgcggatgtggcgaggccaaaactggtagagtggtgagaagtttcttgaaatcttcaaaggctttctgtgcttcgggtccccactggaaattgtcaatcttcttcagcagcttgaagaagggcatcccccgctcgccgagtcgtgagacgaactggctgagcgccgccatgcaaccagtcagcttttggacgtctttttgggagcttggcggtttcatgttgaggatggcgttgattttctccgggttggcctgtatgcctctttgagataccataaatccgagcaacttccctgacggtactccgaagatgcacttttccgggtttagtttcatcttgaaagcacgaatgcttgtaaaagtttcttctaaatccgcaatcaggtcatccttctgcttggtcttgacgactacatcatcaacataagcttcaatattgcgaccgatctgagttgaaaaacatctttgaatcatgcgttgattggttgctcctgcattcttcaatctaaagggcatggtgatgtagcagtaggccccaaagggcgtaataaacgaggtcttcaagcagtcggattcttttagccggatctgatgatatcccgagtaacagtccaagaagctgagtaactcacagccggccgttgagtcaaccacctggtcaatgcgaggtaacctgaaagggtctttgggacaagatttgttgaggttggtataatcgacacacatgcgccattgccccgtctttttccgaaccaggactgggttagccagccaatcgagatgaaggacttccttaatgaagcctgctgctaacagcttggttaattcctccttgatccatccttcctgtcctgtgcaaaacggcggagtcgttgaatctaactcagcgcctattacagcagtcttatcaggatcggagggatctaagggaatctttttcgtcttggcatcactttcttcggtcttcgtcagcttggttgcaggcgcttctccctcgcttgccgtggtcgcagccagtcggatctcttcgcgggcgagagtagtctcgtgggtttgggccatctcacaactttctttgtcacatgtgacggcctgcttgatgacgctccgtagtgatatgactcctcgaggaccaggcatcttcatcatcatgtaggtgtagtgtgggacggccataaatttagctaaagccggtcgtccaagtatagcataatatgctgtctcgaaatcagcaatttcgaaacaaacattttctgtgcgaaaattctcccgagtgcctaaggtaactggaacagtgatctggccgagtggtgtagctgacaatcctgggataacaccgtggaagggtgcattactcggttttaattccgtgcaaggaatctgcatatcgtccagggtcttagcgaaaaggatgttgagtgcgctgccaccatcgatgagagtccgtcggagcttgacattgcgaaccactgggtctagtaccagggggtaccgccccgagtggaccactcggtcgggatgatccgagcggttgaacttaattgctatctctgaccaccgaagatattggggcgtgttaggctgaaccgcattgatctcccgttctgttagcttctgttttctcttagattcataagccaggggtccgccgaagatgtgattaagttctttgcgatgatcttgaaaaccagtcatggcatcgtcttcatcatctttcttctttgatgtgccttgatctccgtctgagggtttacatgcgttcttgacgtattgctccgcgaactgtttgtagacgaagcaatctttggccacgtggttggagttgggatgatgcggacattggaagttcattatcttgtcgaaggtgttaatgcgggaacgttgtcgggaagacggagaggtggtcgccacaagttcttcgggcttacgcttgcgatccttgtggttgttacttccactccctcccgcggtcggcatatccttctttggcttccaagtggtgcccgattgcttggacgccgtgatagcatcttcggctttggcatactcattggctttttcaaacatctgtttgaccgtcttgggaggtttgcgtccgaacttgccgactaggtcctcgtggcgaatgcctttagtaaaggcagcgatgatgacgtcgtcggtgatgtcggagatcttgttgcgttgctcgaagaagcgtcgaatgtaatctcgaagagattctccagacttctgaacaatgttgtaaagatcgaagtgtgttccgggccgttcaaaagtgccttggaagttggcgatgaagtggtcgagtagctctgcccatgatgcgatcgtgccgcagggtagcccgtgaagccatgaccgggcagaatccgctagggccacaggtagatagttcgccatggctttgctgtctcctcctgctgcgcggattgcgagaccatagacggtgagccaagactcagggttggtggtgccgtcatatttctcaattccagtcggcttaaagccggctggccaatccactcgacgcagatcgcgttcatcatgtcccctgctcctacgactagattcggcgccggcaatgctgaggctcggctggtgagggactcggctaccagtcggggtgcgggtgcttgcagagttggctggaaccgaggcagcgatcatggtcttcgtctggttcaagatgttgactacatgatcggcttggttgagtgcgtcttccttgaggagggtgtcgaggagagtgattgctgcaaccgcgttctgctgggggggtgcgaaagaccgctgtcccatcgacgtcttgttgcccaatgagctctctcgctcgccgcccagattccaaggcacgttgtcatcgatcttcagcctcctttgcaatccgttcgcgatcttgttgctcacgctgtagtcgttctcgctcttgtcgctgtcgctcttcctccagtcggcgacgttcagcttcttgccgtgcgcgatcttggtccgcttctcgggcttagcgttgttcctccctggatctagatcggatcggggccgaagccggagctcgcctagatcttcgagtaggagatgtcttgactgtgaagacagcggcaaatcatcaggaagtttcatcaggattgaaggataggacccgtcgtcttgatctggtcgcggaagagtagattggatctcgtccgagtggtttgaagccgactcgggagagatgatcttggagtaggcctcggccgagttcggaataccaaacgggacggggacctggtctctccccgactggtttgaatccgagtcaagaagagagatcttgccgaagtcgttcgtgatgaagttgaggctgccgaaccggaacgccgtatatccgactaaattacaactgtcatgtagatatgggtatccataatctccacacatgccgccctccgacacccgcaccgcgaacccctgcgccgtgcccacgcgcgtgctgccggcggatggcccctccgtcagcgcgttgttcagcgccacgatgtcgccgaactgacgcggcaccgcgtcaccgccatcgtcgagcaaggagcggccggagacgacgcgcatggcggtgggagccgggccggtgtaggcgtcgtgcatgtagaaatggaggtgggtggtagtggtggaggcgccgttgcggtggaggaagatggcggctgcgaggaggaagcagccgaggaggagggaggagagggacgccat

SEQ ID NO: 78812 - DNA, 1090 bp, Oryza sativa
  Clone ID: PAT_MRT4530_78583C.1
attcaaagtagtacaccgttcccggatcataatcacccccttataagtaaggtatggactccccagcgacccccgtgggcttatctccgccacttcacagtctggaaaaaggatttattgcgtcagcggctcgggttcacggtggaccgggtgcacggggacggtctacggaactaacggccgagatctaatctaatccaaaacggacggccgggatcgaatcgatccaccatgggtctacggatgacgcggcgctaacgtcatcaccggcggcggctcggcaactcacgctcgccggcgaacgacggcgcggcggcgcaaacagagggcacctacgcgtagagggcaacgcggcgaactcaccgagggctcagacgacggcggacggcaacggacagcgacggcgacgaggtcgaagcggcagaggcgttcgggtcgacgacgacggcggtgctccggcggtcttcggcggaaatggaggtcgggacgaggactgcgacgacttggcgatcctgacggtggccctcccgagcgacgacgacgaccggagcggcggcggcgcacggctggactcgcggcggcgacggcggcgcacgggttgtcacggaggcggcgctacaagcggcggcgaactgaggcgagggtggtggcggatagaggaggtcccgggggtccttatataggggctaggaggcggcgacggaggcccacggcggccggcgacagcgatggaaggtttagggttaggaggaaaaaacgaatccgaatcgagctcgaatccaacgatttccaaatgaaattagccgaagattgcaaaagagaaaaggaagaggagatcccgaggatcatttcccctctattgattcgatcagatcgggaaagacgcgggcgaatttggaaggggcggcggcggcttgcgcggctagggcgcggctgcggcggcgcaaggaagacgacgacccaggtaggtaggccccacctgtcagcgggagagaggagagcgagcagcggctcggctcagcgggctagctgggccaggcacaccttgctaaacttggcatacaattgatgttctcgtaacttctctagt

SEQ ID NO: 78813 - DNA, 110 bp, Oryza sativa
  Clone ID: PAT_MRT4530_78584C.1
ccggagacaaagggtctgaagacagaggatcatgatgtccggcgatatctagctgaggtcaatggtgaggaacgatgtggtgccgacgatgttcttactgatcacgacac

SEQ ID NO: 78814 - DNA, 4278 bp, Oryza sativa
  Clone ID: PAT_MRT4530_78585C.1
ctactcggtcttctccgtagcgctcctcgctaaagttacgaagttacttggcaacatcgcttccgctccatagactaggaaaaatggcgactggcccgtagctcgactgggagtggtgcgcaaggaccatagtacggatggcaactgttctaaccacttgctggcatagggatgcagtcggtcgaaaactcgcgcttttattccttgaagtaccatgccattggcgcgttcgacttgtccattgttcatggggtgcgctacagaggcataacaaattttgatgccgaagtcctcatagaaatctttaaatactctgcccgtgaattgagtgccgttatcagtaatgatcctattagataccccaaaccggtgcacaatgttgatgaagaaatctctagccttgtctgccgtgattgtgataaccggtttggcttcaatccacttggaaaacttgtcaacagctacaaagagatgagtataaccaccgactacctttttaaatgggccgaccatgtcgagcccccaaaccgcgaacgaccaagacaacgggatggtttgcaactcctgagccggtagatgagtttgtcgggcgaaaaattgacaaccctcacatattcgcacaattttgtcagcgtcggacacggctgtggaccagaaaaaaccttgccggtaagccttgccaacgatggttcgtgcggcagcgtgattgccacagatgcctgaatgtatatcctttagcaattgtcttccctcctccaaagacacacagcgttgcaggattcccgatggacttttcttgtacagctcggtctcatgtatgacataaagtctactgcgcctggagatctgctcggcttcatctttatcttgagggagttcttgttttgtcaaaaatcttataaggggctctctccagtcggcttcaatcatgcttacgtcttgagtatccgtggcctcgattgtttctttccttggtacggttggctcatagagatgttcaacaaacacgtcggaaggagctgcttctcgttttgaaccaaaattagccagtctgtcggctgcctcattattgcgtcgaagaacatgggtgagctcaagtccatcaaatttgtcttccaacttgcataccccctgtcggtaagcggtcatgttatcatcaaggcaggaccacactttcataacttgattaacgaccaactgagaatctccacgaactatcagatgccgaattcccaaggagattgaaatctttaatccatgaagaagcgcctcatattctgccacgctgtgagatccagaaaaatgtatccacaatacgtagctcagcctctctccagtcagggaaattaggacaacccccactccagtgcaacctgggaagttgccgacacgtataacaatagcggctcttgcggatgtggtgaagctaagactgatggagtagtgagatgtttttttgaagtcttcaaaggctttttgtgcttcgggtccccactggaaattgtcggttttcttcagcaacttgaaaaaaagcatcccctgctcgccgagtcgtgagacgaaccggctgagcaccgccatgcagccagttaattttttaacatctttctgggagctcagcgatttcatgttgaggatggcgttgattttctccaggttggcttgtatgcctctatgggacaccataaatccaagcaacatccctgacggtactccgaagatgcacttttcagggtttaatttcatcctgaaagcacggatactcgcgaaggtctcttctagatccgtaatcaaatcatccttctgcttgatctggtcaatgcgaggtaacccaaagggatctttgggacaagacttgttgaggtcggtgaaatcgacacacatgcgccattgccccgtcttcttccgaaacagaactgggttggccagccagtcgggatgaaggacttccttgatgaaacctactgctaacagcttggtcaattcctccttgatcgcatccttcctatcagcagtcttagtaggatcagagggatctagaggaatcttcttggtcttagcgtcactttctccgctcttgggcatcttggtcacaggcacttctccttcgcttgctgtggacgcagccagtcggatttcttctcgggcgagcgtgatctcgcgggtctgggccatcttgcagctttccttgtcacacgtgacggcttgcttgatgtcgctccgcagggatatgactcctcgaggactaggcatcttcatcatcatgtaggtatagtgcgggacagccatgaacttggctaacgctgggcgtccgagtatggcatgatacgttgtctcgaaatcagcaacttcgaagcaaacgttttctgtgcggaagttctcccgagtgccgaaagtaactggaagagtgatctggccgagtggtgtagcagatagccgcttgcgatccttgtgattggtacttccactcccccctgtagtcatatctttcttcggcttccaagtagtgcccgactgcttggacgcggtaatggcatcttcggctttggcgtactcattggctttttcgaacatctgcttgaccgtcctgggaggcttgcgcccgaacttgccgactaggtcatcgtggcgaatgcccttggtgaaggcggcgatgatgacgtcgtcggtgatgtcagagatcttgttgcgttgctcggaaaagcgtcggatgtaatctcgaagggattctccacacttctgaacaacgttgtaaagatcaaactgtgtaccagggcgttcaaaggtacccacaggcaaatagtttgccatggctttgctatctcctcctgctgcgcaaattgcgagaccgtagatggtgagccaagactccgggttagtggtgccgtcatacttctcgattccagtcggcttgaagccggctggccaatccactcgacgcaggtcgcttgtgaaggcagcaactccatccacgtcatcgtcgtagcgatctggtgaatggtggggagcgtagcctcttgccgcgcggcgctggttgatagtatcgcgaagatcgacggggcgcctgcgatgtggggagcgagattgttcaactcgacgctccctatgtcgtttgggaggcgagtggatagatcgctcatcgtgacccttgctcctgcgactggatcccgcgccgacgacgctgaggcttggttggtgataatcttgagatcgaagagggggaactcggctgccagtcggcgtgcggacgcttgaggagttaaccgggaccgaggcggcgatcatggtcttggtctggttcaagatgttgacggcgatcatggtcttggtctgattcaagatgttgacgacgtgattggcttgattgagtgcgtcttccttgaggagggtgtcgaggagggtgatcgctgcaaccgcgttctgttgaggggtgcgaaaaaccaccgttccctcgacgtcttgctgcccgataagttctcgtgctcgtcgcccgacatccaagtcatgctgtcgccagtcctcagcctcttttgtagcccgttcgcgctcctgttgctcacgctgtagccgttctcgctcttgtgcttggtgctcctcttctagtcggcgtcgttcggcttcctgttgcacgcgttgttcttctgcttctcgggctttatgctgttcttccgtctcgttgtcagccatgaagatgccgaagtagagaggcatgtagttatattcaaagtctttgtcgaagtcgtcgaggtggcggtagtcgtagcggtagccaaagttgtcgtactcaatgatctccgttggccgtgagtcaacgccaggggagctgaggtagccatccagttgttccgtcgaaaccgtgctgagaggctggagtatgacgctgacttccctagagctaggctggatcggggcagaggccggatccagcctagacctacggggagaagatgcccttgtggtgaagacagcagccaaatcatcggggagtttcatcaggattggcggataggccccatcatcttgatcgggtcgtgttggagtagattggatctcgtccgagtggtttgaagccaactcgatggagatgatcttggggtagatctcggccgagttcgggataccgaacggggcggagatctggcctcttcccgactggttcgaatccgagtcgaggagagaaatcttgccgaagtcgttggtgatgaagtcgaggctgccgaaccggaacgcctgcccgggagggaagacgaagtcgtcgatgctagaaacgaaacccat

SEQ ID NO: 78815 - DNA, 816 bp, Oryza sativa
  Clone ID: PAT_MRT4530_78586C.1
gatcctcgggatcccctcttccttttctcttttggaatcttcggctaatttcgtttggaaatcgttggattcgagctcgattcggattcgttttttcctcctaaccctagaccttccatcgccgttgttggccgccgtgggcctacatcgccgctcctagcccctatataaggacactcgggacctcctcttttcgtcgccaccctcgcctcagctcgccgccgcttgtagcgccgcctccacgacaacccgtgcgccgctgtcgccgccgcgagtccagccgtgcgccgccgccgctctggtcgtcgtcgtcgctcgggaaggccactgttgggttcgccaagtcgtcgccgtcctcgtcctaccctccgtttccaccgaggatcgccggagcaccgccgtcgtcgtcgacccgaacgcctccgcagcttcgacctcgtcgccgtcgctgtccgttgccgtccgccgtcgtccaagccctcagtgagttcgccgcgtcgccctctacgtgtaggtgccctccgtttgcgccgccgcgccatcgttcgccggcgagcgtgagttgccgagccgccgccggtgatgacgtcatcgctgacgtcagcgccgtgtcatccgtagacccgtggtggattagatcgatctcggccgttcgttttgtctagattagatctcggccgttcgttcccggctttactttttatatagtatggttcattctggagcaccagactgtgaagtggcggagataagcacacgggggtttctggggagtctatgccttgtttataagggggtgattatgatccaggaata

SEQ ID NO: 78816 - DNA, 243 bp, Oryza sativa
  Clone ID: PAT_MRT4530_78587C.1
ctctccttctattgctgcatgcagcgcctctgcgagtttgatgctcttactcaagtttaccggcaatatcagctgcagccgcagctcatgctgcagcaacagatgcttagcccatgcgtgagttcgtaaggcatgctagtgcagcacagtggcaacccccttcttccaatcacccgtgtttcaactgagaactggccaagtcattgacagcagctgtgcgcaacagctcaggatgatcgagca

SEQ ID NO: 78817 - DNA, 3150 bp, Oryza sativa
  Clone ID: PAT_MRT4530_78588C.1
atggcacggggctccgcaccgctcgagggtagcgtgctgccgccttcccgcatcgtgagcgagaggcaggccgggctgccgcgccgattcatgccggaatctgccaccggccgggaggtggtcgcgctgggcgagggacgcccggcgccgcattacccggggcggtccgtcttcttcctctctttcgcaatggcagggctggtcccgccattctcttctttcttcatggatgttctggagctttatgatctccagatggcgcacctcacccccaacgcggtaatgacgttggccatcttcgcgcacctatgcgagatgttcatcggggtgcgcccatctctccggctgttccggtggttcttcaccgtacagccggtgtcgccaccgtcggtagtcggtggctgctacttccagccgcgggggccggtgctgaactgctacattccctgcgtccttcgcaagaagtgggacgactggaagagcgactggttctacacccctctcgccgacgaagcgcgcctccgacttccgagccagcccccagcgcaggcctccagctggcgggcgccggtagatctgggagatggctacgacgccgttcttgactgcctggcgggtctgcgatcccaggggctcacgggggccatggtgttcggtgactaccttcatcgccggatcgcgccactccagcggcgcgcccggggcgcctgggagtacaccgggtctaaggactacatgaggacccaccaggggggcagatgggactgggcccctgaggacttcaagatggtggtccaacgggtgctgaatctcagctccgtggaggcatccctcatcccccaaggtgtcctccccctctgcagcgatccagagcgcgccaacatcctgaccatcatgcaggcggtcggggcgtcaggggagtgggctcctcgaggccacgatggcacgggcgggagccgcaggggggaacaatctaccccgggagggggtcatgcttctgggccccgtgacgggggcccggggggcagccgccctgccgacgcccgggggaagaggaaacaggaggataccccctctccatctcctccccgagggggcggggcggtgcgtgccagcagcaggcgcccggagggtgctgtgccgacgtcgcagcccgagagggagcgaaaaaagaagcggctccgcaagatgggggggaccgaaccatgccggggaaacctcatctcccccccaaggtggtcgtttagccgacctcctcgcagcgagattccgtcgcgcccccctcgccattccaagtccggccggtctgaggccaaggagacagcgaccgcggaggcccggaggcgggaagctatccggcgagaagccgcggaccgcctccgggaagctgaggaggctgcccaggaagccgtccgggtttgccaggctgaggaggccgctcgggaggaggccagactccaccgggccgggaagtcagcccgggaggcagaggcgacgtgcgcacgccaggcggcctgccaagcccccgacccgactccgcccgaggcgacgacgacttccgaggccacccacgacgaggccgcgggcgcaccgctcggacccgacccttcgggcgatgttcgggacgagccagcctcgggggacgcccctgagtccggcacgtcgattggcgggccgagccgcacagcgcccacaccgaggcggctctcccctctgccttccgccgccccattgaacacagagcccctcctgcaggccctggccgccgcgaacacgacggtgctggacgggttaggtgcccagatggaggtcctgcaagcagagcgggcggagctcgacgcggcgtgggcgcgcgtcgaagaggggcggcgctcggtggaggccatggtggaggcgggccgcaaggcataccgccggcacgcctcagagctcgaggcccgtcggagggagctggcggagatcgccagggaggtggaggaggagcgggagactgccctcatcgccaccgccgtgctcaacgaggcgcgggacgatctccgccttcaatacgggagccgggtggcggagctagagaagaaactcgacgccgcccggggagtccttgacgccgccactgcacgggaatggcgggcgacggagaacgaggcggcgtcccggcggcgcgaagtggcccttgaggctcgcgccacggcgctggaagagcgcgcccgcgcgagggagagggacctggcggaccgcgagaccgccgtcgctatccgggaggcaacgctggcggcgcacgaggccgcctgcgccgaagaggagtccgcactccgcctccacgaggatgcgctcaccgagcgggagcgagctctcgaggaggccgaggccgcggcgcagcggctggcggacagcctgtccctccgcgaggcagcgcgggaggagcaggcgcgccgtaatctggaaggcgcccgcgccgagagggccgcactggatcagcgggccgctgagctcgaggcgcgggcgaaggagctggacgcgagggcgcgcagcggtggggcggccgcgggcgacagcgatctagccgcccgcctcgtagctgccgaacacaccatcgccgatctgcagggcgcgctggactcgtccgccggggaggtcgaggccctccgcttggcgggcgaggtagggcccggcatgcttcgggacgccgtctcccgtctagaccgcgccgggcggcaagcgggcctctggggcgagcggaccgcgaagtacgccgccaaccaggggggcctcgcccagcgcctctcagagatggccgggactctccagcggctccccgaggagctcgaggagacgatcaagtcatcctcgagagacctcgcccggggagtagtggagcttgtactggcaagctaccaggccagggacccggacttctccccgtgggcagcgctggacgagttccctcccggaaccgaggacgacgcgcgcgcgcgcaggtccgggacgccgccgaccacatcgtccacagcttcgagggtacggcccctcagctcgcgttcgccctcgactccgacgaggagggcggcgacggtggtgtggacgacagcgaccacgaggccggtgacccgggagcctcgaagtgagcccccaggcccccgccaatcttaa

SEQ ID NO: 78818 - DNA, 1633 bp, Oryza sativa
  Clone ID: PAT_MRT4530_78589C.1
gtcaaaagattagctttgatttatttatatcttttttgatctgacacagcaaaactatcctcctttggaattaggcaatgcattgtatggtacaattgaatggctaatggcgtctgaaacattaagaacaactcacatctctacaaacactctggatgaagtagtaatttacaacttacaagcaccaagaaactggcaatggcagccaagaaggcgagcgaggcctagaagatggtctgctcgccgagctcctgccctgccatgccttccctgatcaccctctcgaagaactgctcgagcgtgtcgctgccgtagctgggcgtcatctcgtcgctgtactcgccggtgtccgggtcgagcaccagcatgctctccgacgcgtagtacctcccgatcttgccgaactccgccgcgtcctccaccccggggaacaccttggccagcgcgtcgagcacccagatggcggcgtccatgacctggatcggcaccttgatgaacctgggctcgcgccccagcagccggaacagcatctccccttgctccagcggcgtcagcgccttccccggcccgccgatggggaggatcttgttggccttgccctcgtcggagatgcagtcggcgatgaacgcggcgaggtcctcctcgctgatgggcttgcaggcgcagagcttcccgtcgccgaacatgacgtagggctggccgttcttgacggtctcgacctggccgcccaggctcttgaagaaggcggtggggcggacgatgctgtaggtgaaggacgggtcgcgcgacgcctcggcggcgagctcgccctcgaacctgagcttggcgcgctggaactcgaggagcggcttctggacgcagacggcggagaggaggacgaagtgcgcggcgccgaggccgcgcgccgcctggagggtgtgcagcgtggcgcggtagtccacgcgccacgagtcccgcacgccgccgccgcggctggcgaggcagcacaccgcggcgtggatggggccgtgcggcgacaggtcggcgcggagcgcgcccgcgtcggtgacgtcggagaagacgacgcgggcgggggcgaggtccgcgacgacctcgtcggggccgttgcggccgcgcagcccgctccgggggcgcgccacggcgaccacggggtggccgcggcggaggagctcgcggacgacataacgcccgatgtagcccgtggcgcccgtgaccagcacggtggtctccgacggcgccagtgaccggaacggctgcgccgccgacgcagcaggcggtggctctaccgacgaagcaaggaaaggccaaccccgacgggcacccttaggggcggcgttggcggcgcggaaggagacgaagcttggcgccggtcgagcagtgggggacgtggtggaggatgaggaggcggcggtgaggtgggaggagaggaggagggcagccatggcggctgccggctagggaggcggaggtgctcgacggaatgcggggagggaggcggagggcgacgtggaggccggcagtatcagagcccggcacggcgagcgtttgtggtggtggtggcgtcgcgaccaaatccgagagcgcgattgcgctgacgtcacttgatcctgcagccacgggggatccactagtt

SEQ ID NO: 78819 - DNA, 831 bp, Oryza sativa
  Clone ID: PAT_MRT4530_7858C.1
ttatttcgccttcacggctgacctactacacaaacgctgatgagcatcatttttattatcattggctgctacactgctattgactggatcaatgacattgtcatcttcatcaacatcttgccaagcctcttcaacatagcctactcttctgctattgattggcaacttcatcttcacagcttatcatctctgttgctgctaatcgtcattatctcggcttgcctccaccgccgcccatggagtcttcactttcacggctggcttattatgcctctactgataggcgtcttcgtcttcttcaccaggtgcctcgtctgttatcgactgattattttgctgtcatggctgcgcaactctgtcgccattgctgggtgcttcgtcttcactgctgtcaaggcgctgtttgggtttatacagcaattgattggatacaatatcattgctttttgccacccctccacagtcttcagatttggtaaaagtactcaggagaccatggcaaagatgattgaagcactcggctttggagtaatctggtttgagagaagattatctttcgactgtgaaggtcttaggggctactgtagagattatggcgccaacgccgctcccagccgctgcctcctcctcgtcggccgacgacgtcgctcccgccctcgttgtcatcgtcagccgaggatgctgctcccaccctcgtcgtcatcagcggctgcctccgcgacacccaccacccgatccgtgctcccgccggcctccatgccggccaccgcccgatccgcgctcccctccggccgcaccgccgccaacgcccctcccctccgccggatctag

SEQ ID NO: 78820 - DNA, 2766 bp, Oryza sativa
  Clone ID: PAT_MRT4530_78590C.1
atggtacggggctccgcaccgctcgacggtagcgtgctgacgccttcccgcatcgtgagcgagaggcaggccgggctgccgtgccgattcatgccggaatctgccaccggccgggaggtggtcgcgctgggtgagggacgcccggcgccacactacccggggcggtccgtcttcttcctctctttcgcaatggcaggactggttccaccattctcttctttcttcatggatgttctggaactttacgatctccagatggcgcacctcacccccaacgcggtaatgacattggccatcttcgcgcacctgtgcgagatgttcatcggggtgcgcccatctctccggctgttccggtggttcttcaccgtacagccggtgtcgccgccgtcggtagtcggtggctgctacttccagccacgggggccggtgctgaaccgctacattccctgcgccctccgcaagaagtgggacgactggaagagcgactggttctacactcccctcgccgatgaaacgcgcctccgacttccgagccagcccccggcgcaggcctccagctggcgggcgccggtagatctgggggatggctatgacgccgttcttgaccgcctggcaggtctgcgatcccaggggctcacaggggccatggtgtacggcgactaccttcgtcgtcagatcgcgccgctccagcgacgcgctcggggcgcctgggagtacaccgggtccgaggactacatgaggacccaccaggggggcagatgggattgggctcctgaggacttcaagatattggtccaacgggtgctgaatctcaactccgtagaggcggccctcattccccaaggaatcctccccctctgcagcgttccagaccgcgcctccatcctgaccattatgatggcggtcggggcctcagaggagcgagctccaaagggccacgacggcgcaggcgggagccgcaggggggaacaatttaccccgagagggggtcgtgcttctgggtcccgcgacaggggcccggggagcagccgccctgccgacgcccgggggaagaggaagcagggaggaacacctcctccatctcctccccgagggggcggggcggcgcgtgtcagcagcaggcgcccggagggggccgcgccaacatcgcagcccgagggggagcgcaagaagaagcggccccgtaagatgggggagacagaaccatctcggggaaacctcatttcccctccaaagtggtcgtttaaccgaccccctcgcagcgagatcccgtcgcgtccctcccgccattccaagtccggccagtctgaggccgaggatccggcggccgtagaggccctcaggcgggaatctgaccggcgagaggccgcggatcgcctacgggaagccgaggaggccgcccaggaggccgcccgggctcgccaggccgaggaaaccgctcgggaggaggccgcccgggcccgccaggccggggaagccgctcgggaggaagtcggatttcgccaggacgaggcgatggcgacttctgaggcagctcgcgacgaggccgcgggcgcgtcgcttgggcccactccctcgggcgacgctcaggcgacaacttctggggcagctggcgacgaggctgcgggcgcgtcgcttgggcccactccctcgggcgacgctcaggaccaaccgggtccgggggacatccccgagtccggcacttctatcggcggcccgaaccgcgtggcatcctctccaaggcggctctgccccacgccttctatcgccccactgaacgcagagccccttctgcaggccttggctgccgcaaacaccacggtgttggatgggttaagcgcccaggtggaggtcttgcaggcagagcgggcggagctcgacgccgcgtgggcgcgtgtcgaagaggggcgacgctcggtggaggccatggtggaggtgggccgtaaggctcaccgccggcacgtctcggagcttgaaacccgtaagaaggtgctggcggagatcgccaaggaagtggaggaggagcggggggctgccctcattgccaccaccgtgatgaacgaggcgcaggacaccctccgccttcaatatgggagctgggaggcggagctaaggaagaagctcgacgccgcccaggggcgtgaagaggcccttgaggcgcgcgccatggcgctggaagagcgcgcctgcgtcgtggagagggatctggcggaccgcgaggccgccgttaccatccgggaagcaacgctggcggcgcacgaggctgcttgcgccgaagaagagttcacactccgcctccgcgaggacgcgctcaccgagcgggagcgagctctcgagggggccgaggccgcggcgcaacagctggcggttagcctgtccctccgcgaggcagcgcaggaggaggaggcacgccacaatctggaaggtgcccgcgccgagagggccgtactgaaccaacgggccgctgagctcgaggcgcgggcgaaggagctggacgcgagggcgcgcagcggcagggcggccacgggcgaaagcgacttagccgcccgcctcgcagctgccgaacgcaccatcgccgatctgcagggcgcgctggacttgtccgccggggaggtcgaagccctccgcttggcaggcgaggtagggcccggcatgctttgggacgctgtctcccgcctagattgcgccagtcggcaagtgggcctctggagagggcggaccgtaaagtacgccgacaaccagggaggcctcgcccagcgcctctag

SEQ ID NO: 78821 - DNA, 1899 bp, Oryza sativa
  Clone ID: PAT_MRT4530_78591C.1
atggcgagccgcgcgccgtgcctcctcgctgctcggggcatcgcctcgtcgcctcacctcgcccggaggttaaagcaaacagaaaatgagattgttcaaatgttccgaaccccatctcctcggaacgaggatgcggtagcagctctttcgccaaggtacacaaattccgttcgtgtgttggatgagagattcattaggatcctgaaaatattcaagtggggccccgatgctgagagggcattggaggtactcatgctgagagttgatcactggttggtacgagaggttatgaaaacagatgttggggtcaatgtgaagatgcagttttttagatgggctgcaaagaaaaggaattatcaacatgacacatccacttacatggccttgatacattgtttagagctagtggagcagtatggtgaaatgtggaagatgatccaagaaatggtacggagtcctatttgtgttgtcaccccaatggagctttcacaggtaattcggatgctggggaatgccaagatgattggcaaggcaattacaatcttttaccaaatcaaggcacggaagtgtcaaccaactgctcaggcatataatagcatgataatcatgttaattcatgaggggcaatatgagaaagtgcatgaactttacaacgagatgagcaatgaaggccattgccacccagacactgtgacttatagtgcactcatttctgctttctgcaaactcggtcgccaggattcagcaattcgtctgttgaatgagatgaaggagaatggaatgcagccaactgctaagatatataccatgataatatctttgttcttcaaactggacaatgttcatggagcattgagtttgttcgaagagatgaggtacatgtactgccgacctgatgtgtttacttacaccgagttaatcaggggccttggtaaagctgggagaattgatgaagcatatcacttctaccatgaaatgcaacgagaagactgcaagccagacacagttgtcatgaataatatgataaatttcttaggcaaggctggtcgtttggatgatggtttgaagttatttgaggagatgggagtgtcacactgtattccaaatgtggtgacgtacaatactataataaaagcactttttgaatcaaaatcccgtgtttccgaggttttctcatggtttgagagaatgaagggaagtgggatctcccctagtccattcacgtactccattctgattgatggattctgcaaaaccaaccggatagaaaaggccatgatgctactagaggagatggatgagaagggcttccctccatgtccagcagcatattgcagtttgattgatgctcttggaaaggctaaacgttacgatcttgcatgtgagcttttccaggaactaaaagaaaattgtggttcctcaagtgctcgagtgtatgcagtgatgataaaacacttggggaaggctggccgtctggatgatgctataaatctttttgatgagatgagcaaacttggttgcactcctaatgtttatgcatacaatgctctcatgtctggattagcgagagcatgcatgctcgatgaagctcttactacaatgagaaaaatgcaagagcatggatgtcttcctgatattaactcatacaatatcatcttgaatggactggccaaaaccggggggcctcatcgtgcaatggagatgcttactaacatgaaaaattctacaataaaaccagatgctgtatcatataatactgttcttagtgcgttgagccatgctggcatgtttgaggaggcagctgagctgatgaaagagatgaatgcattgggatttgagtatgatcttattacatattcatctatacttgaggcaattggaaaggttgatcaagaataa

SEQ ID NO: 78822 - DNA, 727 bp, Oryza sativa
  Clone ID: PAT_MRT4530_78592C.1
gccgccgccgccgccatggccgacgagctcgacgaactcctcggcttcctctcctctccccagccaaacgtgcgcggcgcggcggcgggcatcgtgcgggggctgacgggcgacgcggacggcctgcgcgccctctcggcgcgcgccgaccgcgcgctgccggcgctgctccggctgctgggggggggggggggcgagctgggcacggggggagcggcggcggactcgctcgtcaacctcagccaggacggcgcgctctcggcccgcctcgtgtccctcggcgtgggcgtggccgccatggacgtcgtggccaagcgcggcggggagcagccgggcctcgcgcgcagcctcgtcatgctgctcgccaacctcacccaggtcgactccggcgtcgcggccctcctccaggttggagatgaaaagatgcaaggactgtatgttgcaaagcttgtgcggtcattctgcaggtcatccagtgagtctgaagaggaagatatctttgaacatgttgcttctatattagtgaacatctcaaaggttgaagctggaaggagaatactgatggaacctaagagaggccttttaaaacagattatacggcaatctgattcaacaaaccaacttagaaagaaaggggttgttagcaccatccgtaactgttgctttgaagctgatacccatatacaaaatttgctctctctagcagaatatatttggccagctctac

SEQ ID NO: 78823 - DNA, 1373 bp, Oryza sativa
  Clone ID: PAT_MRT4530_78593C.1
cgccatggccgacgagctcgacgaactcctcggcttcctctcctctccccagccaaacgtgcgcggcgcggcggcgggcatcgtgcgggggctgacgggcgacgcggacggcctgcgcgccctctcggcgcgcgccgaccgcgcgctgccggcgctgctccggctgctggcgtccgcggggggcgagctgggcacggggggagcggcggcggactcgctcgtcaacctcagccaggacggcgcgctctcggcccgcctcgtgtcgctcggcgccgtcgtggccgccatggacgtcgtggccaagcgcggcggggagcagccgggcctcgcgcgcagcctcgtcatgctgctcgccaacctcacccaggtcgactccggcgtcgcggccctcctccaggtcgcccactgctctttctcccaaatcaaatttcatagggtgaacaccgatattctgaaccctgattacaccttgaagttctgctgttttcaaaaggttggagatgaaaagatgcaaggactgtatgttgcaaagcttgtgcggtcattctgcaggtcatccagtgagtctgaagaggaagatatctttgaacatgttgcttctatattagtgaacatctcaaaggttgaagctggaaggagaatactgatggaacctaagagaggccttttaaaacagattatacggcaatctgattcaacaaaccaacttagaaagaaaggggttgttagcaccatccgtaactgttgctttgaagctgatacccaaatacaaaatttgctctctctagcagaatatatttggccagctctacttttgcccgtagctggaaagaagatctacagtgaagaagatagatcaaaaatgcctcctgagcttgcaaatgcactctcccatgaacgagaggctgttgagaactctgaaattcggcaacaggcacttgaggctatttatatgattgtccttcaggatgaaggacgaagggctttttggtcagtcaatggtccgcgaatactgcaggttggttatgaagacgaggaggacccaaaagtgatggaagcatacgagttaattggatctctgcttgttggcaagggtgatgatgagcaagatcaagaacaaggaggacagaagccttaatttctgctgtttagtttttccctggcttaaagctatcaagagttctccatacaattatgtaagaacatggagaaatatgcataaacagagcaatttgcccacttttcatcgaaagatcaggaaattggttaatgtgcacatgtcaccattaactgggggatttgcctcagggcagaggaatatccagcccccagttggaaaaacaactggattttggattaatgtcccgttttag

SEQ ID NO: 78824 - DNA, 1224 bp, Oryza sativa
  Clone ID: PAT_MRT4530_78594C.1
atggtttctccaccagtgtcatgaatcctggaaggaatgcttgggatgaggagattgtcaaggtagcttacaacgatgatattgcaacagaagttttgctggttcctatatgccgtcatgggggagaggattttgtttcttggccacatgacaagaggggttgtttattgttcgctctgcttacaacttagtgacatcaaatttatttgtggtggcccagagctccaatgggagaggataacactgcagcgaatgtggactcgctgtttaggaaggcacgttggaaaatcaatgcaccgggtaaaatgttgatacatctatggaggtcagtacatgattgtcttcctacagggttccaactcaggagacgccatgttcctgctatggagggatgcatcttttgtggtcatgatgatagaattgagcatgtcttccttgtttgcccctatgctgcaactgtttggaaagccatcaaggagaagtttcagattaacttgtgcatacgagaattatgcaatacgaggcaatgggtgtttgatttcctaacccgtagctctctcattcagaagacagtcctggctgttactccgtgacacatatgggaagcgggaaatttttctaggaacaaccctgttacttcccacccgtgtcaagtgattcacaaaattgtgtcgtatgtagatatgaatgtgcagtactgctccaaggaaaggaatgcctctggtgtgatctctctcccttccagttacaaagtgcaaaccaccgccagcaagcatggtagtactacttaactcagatgctgcactcttccagcttctaatcagacgggtttggcctttgtaattcgagatcagagtgcctcctgcctgcttgctgcaaacaagaggataaccggattgctctctccagaactaactgaagctttggcgatccgtttcgccttggaacatgcaaaggcggaaggtttccagcaagtgttgatggcctccgattgcctttcagttatcaagagaataggcacgagatcgttcaagtgtcagcgttgttgtccgtgatatcaagaatttggagactgagttcctggaatgctcctttattcatgtcaatcatttaaccaatgttgcagctcataccgtagctcgttgttccgaatctgctacatgtaatatttttcgttctgtaatccaggatcatattcgggaggtacttaatgctgatgcaatt

SEQ ID NO: 78825 - DNA, 318 bp, Oryza sativa
  Clone ID: PAT_MRT4530_78595C.1
atggcggcggcgttgaagcaagcggcggcggtagcgaactcgtcgttctcggcggcggcggcgtcgatgtcgtccttcccgcgcggcggcgtcggcgtccaagtcgtccttcccgtcggcggcaacagcgaactcgtcgttcccggcggtggcggcgtcgatgtcgtccttcccggaggcagcggcgtcgatgtcgtccttcccggcggcggcggcgtcgatgtcatccttcccgacggcggcagcgtcgatgtcgtccttcccggaggcggcggcgtcgatgtcgtccttcccggcggcggcgacagcgatggctga

SEQ ID NO: 78826 - DNA, 622 bp, Oryza sativa
  unsure (1)..(622): unsure at all n locations
  Clone ID: PAT_MRT4530_78596C.1
gcacgaggtgaagctcttaggttggatgcatcgaaagctacggagtgctcgtggcgtattcaaagagttcaacaccggagngaggtggggcctgcaactgcatcgccgggcttgcctcgcctgaccacgacaacgactacttctccggcgacgacgccgcccacgcctcgccgccggtcaccgccggcgacctcttcacgttcggcggcggcggccttctcaccatcggcacgctaggcatcgccgccgtcgccatccccggaggcggcgacgatgactacgacatcgacttcgaggtggacgccaccagcgacgacgacggcggcttcaccgtcgaggacgacgacgccgacgtcggcggcgccgtcacgcccaccttcaccttccccgcggcgacggcggcggaggcggtcgtcgccaccgtggagaaggcggtggccgcggtggaggcgatcgcggagaaggacgacgacaccaccacggaggacgacctgatggtggtgagcgccgagctggagaaggtgctcggcggcgtcgacgtggcgtcggcgcgggtgagcttcgccatgggcggcggcgtcggcgtcgactgcccgctccagggcttcctgttcggctcccc

SEQ ID NO: 78827 - DNA, 418 bp, Oryza sativa
  unsure (1)..(418): unsure at all n locations
  Clone ID: PAT_MRT4530_78597C.1
gctgtgggtgttgttttttttttnntttttttttnnttttttttttttttttgtttttttgtttttatttttttttttttttattttttnttttttaaggggaaaaagagggtttatcatcattagtcgaaagactgggcagtgcataacagcaaaacaattgcttgggatttatttatttaggtattctttatccccaagcccacccaaaaggggtcttccccattataaacctcttgggagctcttttattgggttggggggaatgcccccaacccatctcctctattatgcttgagccccttagcctcttcttttgagaggcgatatgcatttgctagaacatcatttgggagagcaccgaaaatgggaccctttccttcaatgggggttaccctaaaggtagggttgggcttta

SEQ ID NO: 78828 - DNA, 506 bp, Oryza sativa
  unsure (1)..(506): unsure at all n locations
  Clone ID: PAT_MRT4530_78598C.1
cggccgagaaagcanaagcaacacaagggntnaactcatcactcacttngctgntngngtctncgnccntgtcggncaagtgcggcaactgcgnctgtgctgncaagagccagtgcgtgaagaaaggtaccagctatggcgtcgtcntngttgnagccgngnaganccacttcgnggaggtcgccgccggcgnagagaacggcggcngcaantgcggcaccagctgctcctgcaccgncngcaagtgcggcaagtgnagtcacgnagcaaccgnacacncgccgccggcgngtcgccnncctnnntnngtccncnnnannanccncccgtntgngtgtggttngtgtgtgtgctgnnnnnngcngnntnnnncccgtgtgttntcgnnnnntnnngcncnggtcgctncggcgncnnngcgtgtntcggcgtntgngtttgtgtgntgtgntgtacccgtgctnnactccgtgnngnannnccgncgtgtnnacgngtggtnngcc

SEQ ID NO: 78829 - DNA, 428 bp, Oryza sativa
  unsure (1)..(428): unsure at all n locations
  Clone ID: PAT_MRT4530_78599C.1
anagttagctgcggccgctctcacatcagtatggtcactgatgttggaagccagccccatacgtcataatttcctatagcaacaatttcactcatatccaacatatgaaggcgaaaaaaatttgaccattacaatttcgtttaatcacacaggcacgtttgtacatataactcggcgagtaatctctacacagttactccgtagttagcacaccgaggaaatgaaaactggaggcttattccaccacataaacctgaaaccagctgttccctccaattacctgaattacagtaggtactactgcatgttcacttcttaaggttttccaaaaaaacttaaataagggactaactaaaaccactcttaattaagtaatggccggaccgtggtcctggccctcgggtcgggtcataatgggctgcggggaa

SEQ ID NO: 78830 - DNA, 717 bp, Oryza sativa
  unsure (1)..(717): unsure at all n locations
  Clone ID: PAT_MRT4530_7859C.1
ccggccgggctcctcggcttctcctccccttgcttgcgccgccgtcgcctcaccctcctccgattgtcgctgcaccggcgtcaccctcctcgccggcggatccagccacccggaggaaggagatggccgcgtgccatcgctgtcctcctatcccctctcatctccaggcaccgtcgcctccctcctcctctccctctcctctatgagctgccagatccgctttaccgtcaccgccgccacctccctctattccaccggcgatgccggcgccctctactccacctccgttggtgccctctcctctgataccaccgcttgcctcatgcggatcgcggcgccgtcgactgctcggggcccgtgggattcgatgaggcttcacctcaagtggatctggccacccgttcaggaggacaagccggcgccacagctctcttctcctctccgcccttttggtctctatgcacggctggttgatctgattgatggctacgaagccgggaggagaaggaggacaacagagtcggctcagctcgctggcatgggagtcgcacctgagtttcacgggagctgggcagccggcagtgaccactgcttttgtgagaggaccgaagatatcacggctcanaacagtgcatggctacctggatcttggttntaatggctgctaactgtctttttctggtntatttgatgtggatggtattggtttcaactgat

SEQ ID NO: 78831 - DNA, 689 bp, Oryza sativa
  Clone ID: PAT_MRT4530_785C.1
atggatcggcagaggcagcagagctccaggggcaatgctagtgctactgcaacgcggggtggtggtggtggtggtggtggtaaggggggagggaacgggaaggcggcggcggcggggaagaagccgatcaaggtggtgtacatctccaaccccatgcgggtgaggaccagcgccgccgggttccgcgccctcgtgcaggagctcaccggccgcaacgccgacccttccaagtacagcccccgcgcctccgcgggcgacgacggcggtggcgccacggcgctgcccgacaccggcgcagccagcgacgccgacgccctcgaggcgggcgcggcgccgggtcgtcatccggcggaaacggcgacgttcgacgaaggcggcggcgggggcgggggcggctacgacgacgacgacgacgacgtcttcaggtcgtagctgctggacaccagctactcggtgttctcgccgccgacgctgctctacgacgaccacccgcacagcaaggtgtagtgacccaccccgatccctcccgccatgaggaagaccaccttgttcgctgtgtgtattgcatgatgaaattgcatgtgtgtgctagcttcaattcagtgtgccgctctatcccttagcctagctcatcaccacatgcctcaaatgaaattaaaaaagagagtggattcttatccctcgagcat

SEQ ID NO: 78832 - DNA, 1428 bp, Oryza sativa
  Clone ID: PAT_MRT4530_78600C.1
atggggggctccagagaggaagatcgtcagcaccacaatcacctcccttctgagctccccctcggcttccggagctcctcaccgacgacgatgatcgcctcttcctccatgagcaaggaatcgagcaactacgacatggccgatttcgatcaagcttcgctttttctctacctagacagtcatgatcaacaatccatccaagaacaacgacaaactctgaacatcttcccttcccagccgatgcatgtagccgacccagctcatgaagcaaagagtgctggggtagccatggccatgcttcccaatggcaaccagctgcaggttcttccttctcatcccagcaagaagcctgatcagcaaggtggtcaaaagattaattccagtgtccctactaatccacctggccctaatcttcccttgcctaactctgccaaggataacaagaatagtagcctcattaaggggccaaaaaaatgtggcttgcagaaggaaggaagcagcagtgggaagggtgcaacaacatccaatgatccagaaagagaaggaaggaggacactagaccctaagacactgaggaggcttgcacagaatagagaggcagcaaggaaaagtaggcttaggaagaaggcttacattcagcagttggagtcaagtaggattaggctaagccagcttgaacaacaagttcacgtggcaagagtacagggtgctatgctgggtgctggagatcagcaccagggccttccttctggcccttcagctgcatcgttgtttgacctggagtatgggagatgggtggaggagcacagcaagctgatattccagctgagggcagccctgaacgagcagatggcggacagccagctgcaggtgttcgtcaacggcgcgatggcgcagcacgacgagctgctgagcctcaagggcgccattgccagggctgacatcttccatctcctctgtggcgtctgggctacccccgccgaacgctgcttcctttggctcggtggatttagaccctctgaggccatcaaggtgatgcttaagcaggtggagccgttgtcggaggggcagctgatgagcatctacgagctccagcaagcggcgaaggggacggaggacgccctcagccacgccatggacggcctccagcagtcgctctccgacaccgtcgccgcccctgacgtcgccgccgccggcggcttcatggggcacatgtccctcgccatgaacaagatctccgctatggaggacatcgtcaggcaggcagatggcctgaggcagcagaccctgcacaagctgcagcatatgctgaccatccggcaagccgcccggtgcttcgtggcaatctccgactacttccaccgcctacgcgcactcagcacactatgggttgcgaggccaaggccggaggaggggccggcaatgtag

SEQ ID NO: 78833 - DNA, 421 bp, Oryza sativa
  Clone ID: PAT_MRT4530_78601C.1
atgcccgccggaattttctgggtctgttacgcgcggcggtttcttggacttcagtttaaattcactcatgaccgttgggcttcacatgaagtcgggggctactgtcagggttacggacgaaaagagacctactcggacaaggctaggttctcaacgtatcgtgtacggttcgacgtctccgagtcctgcttggagattgcttgacccgcgatataaaagggaccccctgggagaacctggggggacggaatctctcacagccaacaccactgccacagtctacgaagtcagagcccgcggaagccagatcgccgggaggtatcacccgtcgacaccgccatctttagggattagccttctcggcgaggtcaaccggatttcggcacggttgataaccagaggagacgtgatcgggacctaa

SEQ ID NO: 78834 - DNA, 2735 bp, Oryza sativa
  unsure (1)..(2735): unsure at all n locations
  Clone ID: PAT_MRT4530_78602C.1
ccattcgccacctgatggagcgcgacggatcgggcctctcgctcattcccagctgccgcaacgggacgcaccccactccattagtctcgtacggccagtctttcccagtccggcgtcgtacaccccggccagtaagcgngggtaactagcctccctatagggcgactgcgggcccgcgcccccccccggggttctcgtctcggtttttttttttttttttttttttttttaaaacagcactaaatcaacattttatttcgtctctcagacagtaccatgctgatgatgcgcacgaccaacacacaacacatgcttacatattcacaaaatgtatgtaggtaatgcacttgaaggtttgagatgctacaaacaaatgaaatcatttagtccattgaagagtggcttgtcaacatacttacaccaaactgactggatacagctgaacaactagatcagttattctgggtttctaagcgaacttcttgtcgaggtgacggtctatgatttcagatacggtttctaagaagattacttcacttgaccctgggagaacatggccctcggcttcctggacgatgtcctcaatctcagagtctctattcacagtttccctgcacagtatacgcccgatgtcatacggtgtgaggcctcgtgctgcacctttctttaaaagcatggtgctgatgcacaggacacgagcacatcttgcagacagctcccacccatggaacttgagaagcttgatgtcctcttcagcgtctagtgatttgatgtatgcaatggtttcatcactgaatggttcacgagcctggggccagtacagccactcaaaggtacaatcttcaaacttctctggcaagcagtaaccatgatcaattggaaccaacttgtaattgccaccttcttcatccttgcacactaaaatgttccctgcatgacgatcagcgtttgctaacctaagatctaacactgctattttgtggacctccttcactggaaatgctcggggacccatatcctcacaacttccattgttctgaatgaacatctgcagtgatccaatcttgaagctcttccccctgtgtaagctccggaccaatgctgtgggaggcacaccagagaacccgatacgttcttcagattcatgatcaccaattggatggtcaagaatataagcagcaacttccctaaatgcaccttcccctacaagtgtccccctcttcatgccttctccatcagtcgacactggaagccctcttgggttgtttttagccataggttcctcatctctgggcttaaacactgcaatattcttctctcctgatgcatcttgcatgaagtaaacaccccctgaaccttcagctgacatcactggcaagtatccattctcaagaccagctatggctgagctaatcattctcatcacttcaagtgatagcttcaccttgtggttaacgataatcggttcaacaagagcaggcctagcaccagctggtttagcagggttcacagcatgagcttcattttgaaggttctctttctcctgcggagtgacaactgtaaccaccgtgtctttatcaacttgctgtgtccgtaactttgctggcttgcggatgaacaaatggatcacagcatcatccttcttgctaatatcagcaatcagctggtggtcctcaagctccttgccatcacattcaagcttgtgatcctcaccaaggtcctcatctccctccactgccagcttactcttgagatacttgacattgcggctctggtccacctggaactgaaacttctttccactggtagtctcgatgttaatcaagcgaagatcagccaagcggataacaaggtgcagaacatttccatcggcaagcccataatccttcacatggcagttgttccttgccagctcgtgcccatcaagcacaagcctctgcttgttaaccacgaaccccttgaaccgctgaatgcgcagcttgaccgaggcgatggactccgagccgagcacactcatcggcatcggtggggcaccaggcacagcaagaaagatgataatcgaatcctgcagctgtgacccggacaaacagtggggcgaccggctgccgtcgaagcagatgggcaggagagcaaactcttccaccatcgggctaatggcaatggcagcagacgacatcttcacaggaggtccttaggatgccgaagcttcctcaactactgctactatttacactaacctaaaaatcagatccttcacactacgaattagaagccatggagaagaaagggcaagggttcctttccttccttagaggatggaggaaaccctctgcgatcgcgagataaccagcgtggttacaatcccatcttgatctccaggcacatcaaaccagacatggttagatgagggggagaagtgacgaaatatctcgcctttgcccaccagtgattgaatcccccacacggaatcagaagagggattaatcaggaagggcccgaaccccctccgatccggacgccaaccgagccacaacctcaccgattcacctcactccaatcaaacccagaggagaggaggggggataccccggagaggggggcggggctaaatccggcgcggcgccttgttcttccttgctccgaagttcacgcgagatggggaagcttcggtttggttttggtttggggagaaagaaatccagcgcgtgcccggagcccggggcccggggatccac

SEQ ID NO: 78835 - DNA, 756 bp, Oryza sativa
  Clone ID: PAT_MRT4530_78603C.1
atgtatgttgtgggtgtgcatgcattgtggcttagcctgaaacttggaaatgggatgcgtcgggagctcaactttaacgccagaacggtagatgttgtgctggcatttactgcaagcatgttgccgaagcgaagcgcactctcgatccccctcactcggatgagaatagtggcagattcaccgtccgggcagcacgggcagctgcgcgggattagttaccgcctgaccgggcaacatatgcttgtcaaagtaggaagagaaaagaagagaggagaaatgggagaggagcgtgttaggggaggtatgtgggctttccctatcgcgtcctcggcgcgggcaatccatcgcgcattagaaagcccccctgcaggctgcaggctgcagatcgatcggtcgaaccgccgaaaacgcctgcagccgactcctgttgccgccggtctgaccgccgtgtgcccgccggtcggaccgccgagatgccgccggtctgaccgccgctttgggcctcggctgcctacatggtccatgatctcacgccaaaatcggaagctccaaaggcaaccattgtttgttgctgctcgagtgaataaaaagcaaaagaagaaaagaaagaaaaaatggatagctaaaattatgcgtccagaaatggacgtcgctgtggagtgcgtccacgtgcggatgctctcagcaatagagtccagcttagttttctgctgcagaccaaagtcccatagctatgtccgtcatcaaacaaccgag

SEQ ID NO: 78836 - DNA, 467 bp, Oryza sativa
  Clone ID: PAT_MRT4530_78604C.1
aagaacagcaaacatccttgcagtttcaaactttggagtacagttaaagaacagcaccagcaaaaacagcactaaatcaacattttatttcgtctctcagacagtaccatgctgatgatgcgcacgaccaacacacaacacatgcttacatattcacaaaatgtatgtaggtaatgcacttgaaggtttgagatgctacaaacaaatgaaatcatttagtccattgaagagtggcttgtcaacatacttacaccaaactgactggatacagctgaacaactagatcagttattctgggtttctaagcgaacttcttgtcgaggtgacggtctatgatttcagatacggtttctaagaagattacttcacttgaccctgggagaacatggccctcggcttcctggacgatgtcctcaatctcagagtctctattcacagtttccctgcacagtatacgcccgatgtca

SEQ ID NO: 78837 - DNA, 481 bp, Oryza sativa
  Clone ID: PAT_MRT4530_78605C.1
gaaaccgaagttcttaaaggaaagaccacctggcttggaaatcgaggggaccagggttttaacagatgtgactgatttaaatgaaccttttgaagccttacaacaagaagggtttgggctggaaaccaccattaatggtcttaaaaaccagctttttgtttgaaaagttgcttccttaaaaggtttggaccatggaaaggcctgttcccccaaaattggaattcttacttgagaaaaaacccaccttttttattgacctgattacccttgaaaccaaaaaggaaaaaaagaaaggggcattggaggatcttcctgttgcttggattaaggtacctgggaaaccccaggaggcccttgataggggtcaaaaaaaaaaaaatgattttgaccttgccttggcccaaatgggtgatcggaaaatggccctgaaaagtttggaaaaaccttttaaggtattgctggataagtcaaaccaggcctt

SEQ ID NO: 78838 - DNA, 628 bp, Oryza sativa
  Clone ID: PAT_MRT4530_78606C.1
ctctgaatttctttctccttataccaaattcaaaccgaagcttccccatctcgcgtgaacttcggagcaaggaagaacaaggcgccgcgccggatttagccccgcccccctctccggggtatcccccctcctctcctctggtcggttcttgcggtgaatcccccgctgatttgtcctgtgaattcttggtttgattggagtgaggtgaatcggtgaggttgtggctcggttggcgtccggatcggagggggttcgggcccttcctgattaatccctcttctgattccgtgtgggggattcaatcactggtgggcaaaggcgagatatttcgtcacttctccccctcatctaaccatgtctggtttgatgtgcctggagatcaagatgggattgtaaccacgctggttatctcgcgatcgcagagggtttcctccatcctctaaggaaggaaaggaacccttgccctttcttctccatggcttctaattcgtagtgtgaaggatctgatttttaggttagtgtaaatagcagcaagagttgaggaagcttcggcatcctaaagacctcctgtgaaaaagtcgtctgctgccattgccattagcccgatggtggaagaatttgctctcct

SEQ ID NO: 78839 - DNA, 4917 bp, Oryza sativa
  Clone ID: PAT_MRT4530_78607C.1
ctattctacccacttgccggcatatggatttagtcggtcgaaaactcgtgcctttattccttggagcaccataccattggttcgttcgacttgtccattgctcatagggtgcgctacggaggcataacagattttaatgccgaagtcttcacaaaagtctttaaatactccgccagtgaattgagtgccattatcagtgatgatccgattgggtaccccaaaccggtgcacaatgttgatgaaaatatctctagctttgtctgccgtgattgtgatgaccggtttagcttcaatccacttggagaatttgtcaacagccacaaagaggtgagtataatcgccgactgcctttttaaacggcccgaccatgtcaggcccccaaacctcaaatggccaagacaacgggatagtcttgtcggtaagccttgccaacgatggtccgtgcggcagcatgattgccgcagatgcgagaatgtatatcctggagatctgctcggcttcatctttatcttgggggagttcttgtttggtcagaaatcttataaggggctctctccagtcggcttcaatcatagctatgtcttgagcgtccgtggcctcgattatttttttccttggtacggctggttcgtaaagatgttcaacaaacacgttggaaggagctgcttcgtgttttgaaccaaaattagctagtttgtcagctgcttcgttattgtgtcgaagaacatgggtgagttcgagtccatcgaacttatcctccaacttgtgtacctcttgtcgataagcggtcatgttatcatcaaggcaagaccactctttcataacttgattaacgaacaactgagaatctccacaaactatcagacgcctaattccgaaagagattgcaatccttagtccgtgaagaagcgcctcatattccgccacgttgtgagatgcagaaaaatgtatccacaacacgtagctcagtctttctccagtcggggaaattaaaacaaccctagccccagtgcccgaaagtctcttcgacccatcaaagtgcatggtccaatactccatcttctcctcgggcatatcttcttggcactcggtccactcggtgacaaagtcagctaaggcttgggacttgatcgaagttcgtggcttgaacgatatatccaagggcatcaattctaaggcccattttgcgatccgcccatttgcttcgcgattatgaagtatattgccgagtgggaacgatgtgaccaccgtaaccgagtgaccttggaagtagtgagatagcttcctgacggtaattaagatgccatacaatagcttttgaacctgaggatatcttgtcttggagtcggccaaaacctcgctaacgaagtagattggttgttggactttttgaacatggccttcttcctcacgctcaatgaccaggactgtgcttacgacctgagaagttgccaatacatataacaacagcggctcttgtggatgcggtgaagctaggaccggtggagtagtgaggagttttttgaagtcttcaaaggcattttgggcttcaggtccccactggaaattgtctgttttcttcaatagcttgaagaagggcatcccccgctcgccgagtcgcgaaacgaaccggctgagtgccgccatgcaaccaatcagcttttgaagttctttatgagaacttggcggtttcatgttgaggatggcattgattttctccgggttggcttgtatgcctctatgagacaccataaatccaagcagcttccctgacggtactccgaagatgcacttttcagggtttaatttcatcctgaaagcgcggatgcttgcaaaggtttcttctaggtccgtgatcaaatcatctttctgcttggtcttgacgactacatcatccgcataagcttcaacgttgcgaccgatctgagttggaaaacatctctggatcatgcgttgataagttgctactgcattctttaatccgaaaggcatggtgatgtagcagtatgccccgaagggcgtgatgaatgaagtctttaagcagtcggattcctttagtcggatctgatgataacaatctaactcagcgcctattacagcagtcttagtaggatcagagggatctagaggaattttcttggtcttggtttcgctttctccactttttgggatcttggttgcaggcacttctcctttgcttgccgtggttgcagctagtcggatgtcttctcgggccatcgtgatctcgcgggtttgggccatctcgcagctttccttgtcgcatgtgatggcttgtttgatgtcgctccgcagggatatgactcctcgaggaccaggcatcttcatcatcatataggtataatgcgggacagccataaatttggctaacgccaggcgcccgagtatggcatgatacgctgtctcgaaatcagcaacttcgaagcagacgttttctgtgcggaagttctccggagtaccgaaggtgacctggagagtgatctggccgagtggcgtagcggatagcactagaatgactccgtgaaagggcgcattactcggtttcagttctgtgcgagagatctgcatgtcgtctagggttttggcgaagaggatgttgagtgcactgccgccatcgatgagggatctgcgaagcttgacgttgcgaaccactgggtctagtaccagggggtaccgccccgggtggaccacttggtctggatgatccgagcggtcaaacttgattgttgtctccgaccaccgaagatattggtgcgtattgggctgaacagcgttaatctcccgtttggtcagcttttgttttcttttagattcataagccagaggtccgccaaagatgtggttgagctccttgcgatggtcttgaaaacctgtcggggcaccatcgtcatcgtccttcttttttgacttgctttgatctccgtcggaggccatccgtgcattcttggcgtattgttctgcaaactgtttgtagacgaagcaatctttggccgcatgattggaattgggatgatgcggacattgggagttcatgatcttgtcaaaagtattgacgcgcgaacgttgtcgggaggaatgtgtagtagttgcaacaagttcctcgggcttacgcttacggtccttgtgattggtacttccactccctcccgtagtcggcgtatctttcttcggcttccaagtggtgcccaccgtcctgggaggcttgctcccgaacttgccgactagatcttcgcgacgaatccccttggtgaaagcagcaatgatgacatcatcggtaatgtcggagatcttgttgcgttgttcagaaaagcgccggatataatctcgaagggattctccagacatctgaatgacgttgtagagatcaaactgtgtgctagggcgttcaaaggtgccctggaagttggcgatgaagtggtcgcgaagttccgcctcgatcgtgccacggggtaacccatgaagccaggactgggcataatccgctaggggcactggcaagtagtttgccatggctttgctgtctcctcctgctgcgcgaattgcgagaccgtagacggtgagccaagactccggattagtggtgccgtcatacttctcgattccagtcggcttgaagccggctggccaatccactcgacgcaggtcgttagtaaaggcagcgactccatccacgtcgtcgtcatagcgatccggtgaatggtggcgggcatagcctcgtgttgcacggcgctggttgattgtatcacgaagatcgacggggcgcctacgaggtggggagcgaggccgttcaactcggcgctccctgtgtcgttcgggaggcgggtggacagatcgctcgtcgtgacccctactcctgcgattggatcccgcgccggtgatgctgaggcttggctggtgataatcttgagatcgaagatggggaactcggctgccagtcggcgtgcggacgcttgcggagttaaccgggaccgaggcggcaatcatggtcttggtctggttcaagatgatgacgacgtgatcaacttggttgagcgcgtcttccttgaggagggtgtcgaggagagtgatcaccgcaaccgcgttttgttgaggggtgtgcaagaccgctgtcccctcaacgtcttgctgcccaataagttctcgcgctcgtcgcccggcgtccaaggcccgttgtcgtcggtcctccgcctcctttgcagcccgttcacgttcctgttgctcacgctgcagccgttcttgctcttgtgcctggcgctcctcttccagtcggcgtcgttcggcctcctgttgtacacgtcgtccttctgcttctcgggcttggcgctgttcttccgtctcgttatcggccatgaagacgccaaaatagagaggggtgtagttatcttcaaagctttcgtcgaagtcgtcaaggtcgcggttgtcgtagcggtagccgaattcatcgtactctacgatctctgttggtcgtgactcgtgagtcgacgccaggggagctgaagtagccttccagttggtccatcgaaaccgtgccgtgtggctggagtatgacgccgacttccgggaagaagacgcccttttagtaaagacgacagccagatcatcggggagtttcatcaggattggcggataggccccattgtcttgatctggtggtgttgaagtagattggatctcgtccgagtggtttgaaaccaactcggtggagatgaccttggggtagacctcggccgagttcgggataccgaacggggcggagatccagcctcttcccgactggttcgaatccgagtcgaggagagaaatcttgccgaagttgttggtgatgaagtctaggctgccaaaccggaacgcctgcccgggagggaagacgaagtcgtcgatgccggagacggaacccat

SEQ ID NO: 78840 - DNA, 4353 bp, Oryza sativa
  Clone ID: PAT_MRT4530_78608C.1
atggcatcaagttcttcgtcgactttgtcttcatcggcagtgctaggacatcccgtctctgaaaagctgtccagagacaacttcctggtttggagagcgcaggttttgccggccgtgcgtggagcacagcttactggatatcttgatggcacaaaagaggtgccatcacctgagatcacggtggagaaaaaggtgggcgacgatttggtgaaggaatccgtcaacaacccagcctattcacagtggattgcgcatgatcaacaagtactcgggtatttactctcgacgctttcgcgagaagttctggtgcaagtcgcacatcttgagagtgccagacaagtctggactgcaattaacgagatgttttcctcgcaatctaaggcgcgaattattcagattcgtgcgcaattggctcgagaattgaagggagattcatcggctgctgcatacttcactaagatgaagggattagcagatgagatggctgcagctgggaagaaacttgatgatgatgatattgtttcatatattcttggaggacttgacgcagattataatcctctggttgcctcggtctcctccaaggactacatatcactcagtgatctatatgcccagctactctcgtttgaggcacatctaaataatcaatctgaaggaggctatcactcgtcggctaacagcgcgtcacgaggagcacgtggacgaggacaaggtcgaggccgtggacgaggtggttttggcagcaatttcggtagtggttttggtggcagaggccgtggtggccgtggccgtggagatggttctcgaccttcctgtcaattgtgtgggaaggaaggtcacacagtgcatacatgctggaagcgttttgatcgatcgttctctggagacgatgtaatctttcagcagcaccatcagcaagcaaagtcggcatcagccgtatcttcttatggggtagatacaaattggtatttggatactgccgctacagatcatattactggggagcttgagaaacttacgacaaaggaaaggtatcatggtaatgagcaagttcatgctgcaaatggcgcaggtatgagtataagtcacataggaaggactatttttcatacccctaatcgaaatctcgctcttaataatgttctttatattcctgaggctaaaaagaatttagtttcagctcatcgtcttgcttatgataatcatgcctttgttgaaattcatcctaaattcttttgtgttaaggatcaaacaacgaagagcactcttcttcaaggtagatcccggggtggtctgtatccaattcctttgaagtctactacacctcagggacgtcaagctcttgtttctactagttctgcagagtctaggtggcatagtcgtcttggtcacccttctttttcggttgtgactagagttcttagaaaacataatatccctgttagtgagtcgagggaagagcgagtttgtgatgcttgtcagcaagctaagagtcatcaactaccttattctaggtcagtcagtcggtcgtctgctcctttggagcttgtcttttcagatgtttggggtcctgctcctcagtccgtggggagattcaaatattatgtaagctttattgatgattatagtaaatttacttggatctatcttttaaagaacaagtccgaagttttccaagtttttactaatttccagcatcttgttgaaagacaacttggtaggaaaattcttacgatgcagactgactggggtggtgaatatcatcgtctaaactctttcttccagaaaatagggatagcacatcatatctcttgtcctcatacacatcaacaaaacggctctgcagaacgcaaacatcgccatattgttgaagtaggattagctctccttgctcatgcttcgatgcctctcaaattttgggatgaggcctttctcacagctacctatttgatcaaccgtatacctagtcgagttattaacttttctacccctttggagcttctgtttcatactaagcctgactattcctttcttcgagttttcggttgtgcttgttggccaaatcttcgtccttataacaaacgtaagctccaatttcgttcaaaaaagtgtgctttccttgggtatagttttcatcacaaagggtataagtgtctagatatttccacaggccgggtctatatatctagagatgttatatttgacgaaactgtttttccctttgttgatcttcattccaatgctggaaaccaacttcgagctgaaatttctcttcttccagaatctttgttatcatcaaggggtatgattaatagtttttcttttgagactaatgctcctaacaatgcttctagtgctggcctgtacgtacaggattctggtgatgataatctggatcaaaatagtggtggtttatctggcattggtccagcttcttctgctcatatgccagaagtatctgtttcggggtcaccgcaagtgtcgcatgtttcggaatctgcacctccatcaccaacttgttctcctgggtcacacgtgagtggtgcggcaggttccggttcggagtctacgccgggattgtccgtttctggtggtgagatgtctggatctactgagactttatctcttgaatcttctgcggattctggaccttctatggctcagcaaggtgaacaacagaacattcagcctgttgtggtgtcccggcctcatactcgtcttcaaagtaatattcgtaagccacttactcgtacagatggaacgattagatggggtatgtatagtggttctgacaaggaacctacttgtttcgatgatgctctagctgatgaaaattggaagaaggccatggatgaggaatataatgcactgattaaaaataatacttggcatttagtgcctgcaccgataggaaaaaatattattgattgcaagtgggtgtttaagatcaagcgaaaatctgatggtacaattgatcggtataaagctcggttggtggcgaaaggatttaagcagaggtatggcattgattacgaggatacttttagtcctgttgttaagatctctactattcgtctcgttctgtctcttgcggtctccaaaggttggagtatacgtcaactagatgtcaagaatgcgtttcttcatggcattttggaagaggaagtatatatgaagcaaccgcctgggtacgttgataagtcttcttcatattatgtgtgcaagttagacaaagcattatatggtttgaaacaggctcctagagcatggtattatcgtctctatgacaaattatgccaacttgggttcagtgcttccaaggcagacacttcattgtttttctataggaaaggtgatgtggttatatacttcttggtctacgtggatgatatcattgtggttagctcaagtgatcaagctattcctgctttacttaaagatcttaatgctgagtttgcacttaaggatcttggtaatttacattacttcttgggtatagaagtaacgccgtcatctgaaggaagtttggtgctgtcacaaaggaaatatgcaactgagttgatcagtagagctgggttaaggaattgcaaaccggtaagtactccacttgctgtttcggaaaagttttcatcggtaggtggagtactgttgagtgaagaagatggtacaaagtataggagtattgttggtgggttacaatatttaacgttaactcgtcctgacatagcctttgcggtgaataaggcatgtcaatatttacactcaccaacaactttgcactggacggcggtaaagagagttttgagatatgttagtggcactttgacatttggtctaaaaattggaagatcagactccactactattagtgcgttctcagatgcagattgggcaggatgttcagatgatagacgttcaactggtggttttgctattttccttggttccaatttaatatcatggagtgcaagaaaacaagctacagtttcccgctctagcacagaagcagagtacaaggcattagctaatgctactgctgaagtcatttggattcaaaccttgcttaaggaacttggagtatcacaaccaaaggctgcagtactttggtgtgacaatattggtgcaacttatctctctgctaaccctgtgtttcatgccagaactaaacacatcgaagtagattatcattttgttagagaacgggttgcgcaacggttgttggatatccggtttatatcttctggtgatcaattagcagatggtttcactaaggcacaatctctaagcaagttgcaaattttcaggaacaatcttaacttgtgcaaagttatgattgagggggagtgttaa

SEQ ID NO: 78841 - DNA, 5424 bp, Oryza sativa
  Clone ID: PAT_MRT4530_78609C.1
ctaagcataaaatcgacgaaggtgttcaatattccaagaattgttgatgagagtaccgtcttcgcgcttgagtcgataagaacctggccgagtgacttcagcaattatgaactgtccttcccataagggagataatttatgccgatcctgtgttgtttgaattttcctcagaaccaggtcaccgactaaaaaggctcgcgatcgaacattccgattatgataacggcgtaacccttgcaaatatcgagtcgactgaattaaagctgcttctcgggcttcttctagtcggttgatgtcatctactcggccctcttcatagccctcctcgttgaagttccgaaatcgtagtgattcaaattccacttcactcggcaacattgcttctgcgccataaaccaaaaagaacggcgactggccggtagcccgactaggagtagtgcgtaaagaccaaagtacggacggcagctgatctacccacttgccagcatagggacgtagtcggtcaaaaactcgtgctttgatcccttgcaatatcatgccgttagcgcgctcgacttgtccgttattcatagggtgcgccacggaggcgtaaaaaattttaatgccgaagtcttcacaaaagtctttaaatgctccgccagtgaattgagtgccattgtcagtgatgatccgattaggtaccccaaaccgatgcacaatgttgatgaaaaaatctctaactttatctgttgtgatcgtgatgaccggtttagcctcaatccacttggagaatttgtcgatagccacaaagagatgcgtgtaaccaccgactacccttttaaacgggccgaccatgtcaagcccccagaccgcaaatggccagaacaacgggatggtttgcaactcttgggcttgccggtaagctttgccgataatggtccgtgcagcggcatggttaccacaaataccagaatgtatatccttcaacaactgtctcccttcttccaaagacacacagcgctgcagtattcctgacggacttttcttgtacagctcagtctcatgaataatgtaaagtctactgcgcctggaaatccgctcggcttcattttcgtcttgaggtagttcttgtttgctcaaaaattttataaacggttctctccagtcggcttcgatcatgcttacgccttgaatatccatggcttcgactgtctcttttctgggcacggtcggttcgtaaaggtgttcgacaaacacatctgaaggagctgcttcccgttttgaaccaaaattggccagtctgtcggctgcctcattgttatgtcggaggacatgggtgagctcgagtccatcgaatttattttccaacttgcgtacctcttgtcgataagcggtcatattatcatctagacatgaccactctttcatgacttgattgacaaccaactgagagtatccacggacgattagtcggcgaatacttagagatattgcaatccttagtccatggagtagcgcctcgtattccgccacattatgggacgcagaaaaatgtatccacaatacgtagctcaatctttctccagtcggggagattaaaacaaccccagctccagtgcctgtaagcctcttcgacccatcaaaatgcatagtccaatattccatcttttcctctggcatgtcttcttggcactcggtccactcggcaaggaaatcagctaaagcttgtgacttgatcgaagttcgtggtttgaacgatatgtccaaagacatcaattctaaggcccacttcgcaatccgtctgtttgcttcgcgattatgaagtatatccccgagtggaaacgatgtgaccaccgtgaccgagtgactttgaaagtagtgagataatttcctgatggtaattaagacaccatataataacttttgaacctgaggataccttgtcttggagtcggctaaaacctcgctgacaaaataaattggtcgttggactttttgaatatggccttcctcttcacgctcgacaaccaggaccgtactcacaacctgggaggtcgccgacacatataacagtagcggctctggtggatgtggtgaggccaaaactggtggagtggtaagaagtttcttgaagtcttcaaaggctttttgtgcttcgggtccccactggaaattgttagtcttcttcagcagcttgaagaagggcatcccccattcgccgagtcgtgagacgaaccggctgagcgccgccatgcaaccagtcagcttttggacgtctttttgggagcttggcggtttcatgttgaggatggcgttgattttctctgggttggcctgtatgcctctttgagataccataaatccgagcaacttccctgatggtactccgaagatgcacttttccgggtttagtttcatcttgaaagcacgtatgcttgtaaaggtttcttctaaatccgcaatcagatcatccttctgcttggtcttgacgactatatcatcaacataagcttcaacattacgaccgatctgagttgaaaaacatctttgaatcatgcgttgataggtcgctcctgcattcttcaatccaaagggcatggtgatgtagcagtaggccccaaagggcgtaataaacgaggtcttcaagcagtcggattcttttagtcggatttgatgatatcccgagtaacagtccaagaagctgagtaactcgtagccggccgttgagtcaaccacctggtcaatgcgaggtaacccaaaagggtctttgggacaagatttgtagaggtcggtataatcgacacacatgcgccattgccccgtctttttccgaaccaggactgggttagccagccagtcgggatgaaggacttccttaatgaagcctgctgctaacagcttggttaattcctccttgatcgcatccttcctgtcctgtgcaaaacggtggagtcgttgcttgatgggtttggcgtcttccttaacatgtaaagagtgctcaatcacctctctggggataccaggcatatcggatggtttccacgcaaaaatatctttattattagcagtcttatcaggatcggagggatctaagggaatctttttcgtcttggcatcactttcttcggtcttcgtcagcttggttgcaggcacttctccctcgcttgccgtggtcgcagccagtcggatctcttcgcgggcgagagtagtctcgtgagtttgggccatctcgcaactttctttgtcacatgtgacggcttgcttgatgtcgttccgtagtgatatgacccctcgaggaccaggcatcttgatcatcatgtaggtgtagtgtgggacggccacgaatttggctagagccagtcgtccgagtatagcatgatatgctgtctcgaaatcagcaacttcgaaacaaacattttctgtgcgaaaattctcccgagtgccgaaggtaactggaagagtgatatggccaagtggtgtagctgacaatcctgggataacaccgtggaagggtgcattactcggctttaattctgtgcgaggaatctgcatatcgtccagggtcttagcgaaaaggatgttgagtgcgctgccaccatcgatgagagttcgtcggagcttgacgttgcgaaccactgggtctagtaccagaggataccgccccgggtggaccactcggtcgggatgatctgagcggtcgaatttaattgctatctctgaccaccggaggtattggggcgtgttaggctgaactgcattgatctcccgttctgttagcttctgctttctcttatattcataagccaggggtccgccgaagatgtgattaagttctttgcgatgatcttgaaaaccagtcggggcatcgtcttcatcatctttcttctttgatgtgccttgatctccgtctgagggcttacgtgcgttcttcacgtattgctccgcaaattgtttgtagacgaagcaatccttggccacgtggttggagttggggtgatgcggacattgggagttcattatcttgtcgaaggtgttgacgcggggacgttgtcgggaagatggagaggttgtggccacaagttcttcgggcttacgcttgcgatccttgtggttgttacttccgctccctcctgcagtcggcgtgtccttctttggcttccaagtggtgcccgactgcttggacgctgtgatagcatcttcggctttggcatactcattggctttttcaaacatatgtttgaccgtcttgggaggtttgcgtccgaacttgccgactaggtcctcgtggcgaatgcctttagtaaaggcggcgatgataacatcgtcggtgatgtcggagatcttgttacgttgctcagagaagcgtcgaatgtaatctcgaagagattctccagacttctgaacgatgttgtagagatcgaagtgtgtaccgggccgttcaaaagtaccttggaagttggcgatgaagtggtcgcgtagctctgcccatgatccgatcgtgccgcggggtagcccatgaagccatgaccgggcagaatccgctagggccacaggtagatagttcgccatggctttgctgtctcctcctgctgcgcagattgcgagactatagacggtaagccaagactcagggttggtggtgccgtcatatttctcgattccagtcggcttaaagctggctggccaatccactcgacacagatcgcttgtgaaggcagcaactccgtccacgtcgtcgtcgtagcgatccggtgaatgatggcctcttgtgcgcggcggttcagcttcttgtcgtgcgcgatcttggtccgcttctcgggcttggtgctgttcctccatttcattgttagccttgaatacgccgaagaagaggggcgtgtagttatcctcatagctgtcgtcgaagttgtcgaggtcgccgtggtcgtagtggtagccgaaatcatcgtagtcgaggatctcggttggtcgagaactgacgccggaggagctgaggtagccatccaactcttccgtcgagactgtcccgagaggttggagtataacgccaaccttcctggatctagatcggatcggggccgaagccggagctcgcttagatcttcgagtgggagatgtcttgactgtgaagacagcggccaaatcatcaggaagtttcgtcaggattgagggataggacccgtcgtcttgatctggtcgcggaagagtagattggatctcgtccgagtggtttgaagccgagtcgggagagatgatcttggagtaggcctcggccgagttcggaataccgaacggcacggggacctggtctctccccgactggtttgaatccgagtcaaggagagagatcttgccgaagtcgttggtgatgaagttgaggctgccaaaccggaacacctgcccgggagggaaggcgaagtcgtcgatgccagaaacgaaacccat

SEQ ID NO: 78842 - DNA, 369 bp, Oryza sativa
  Clone ID: PAT_MRT4530_7860C.1
atggccatgggaggcggcggccctgcggtgggtagcgaggcgccggtggtggcgccgaagccgcggggatggaggatggcggtgggcagcattggcggcgggggcatctctccgccagtggctagaggagggaggagaggggagagagagagggggaggaggtcggccggggggggcctcaccggcgcagttgacgccttccggccagccggcgaggccgggcggcagcatgctggggcggcggcggcggcggaggcggaggcacggtgcgaaactgcggatcgcgctagggagcggcggcacggtatcgggagaaaggaggatgaggaggtttttagggttggtttcattgcacgaattttaaattaa

SEQ ID NO: 78843 - DNA, 660 bp, Oryza sativa
  Clone ID: PAT_MRT4530_78610C.1
atggacctggagaagccaagcaatcaagagagctctcaccctttcttcctcctcccacaacaacaatggccatacatacaattaaaaaaacccaagaaacaacccacaagacaatactgcaagcacacacgcatttctgcaaacagaagcagggcatatagatcaaaagaaccaccattttctcacctctctctctctcttgctcactctttgttggtgattcttgaagctgcttctcctccatcctcccttcctgcagctgctgctgcgcttgtgttgtcttctactgctgctgctagtgaactcccaatccaaatcctccgacgcatcgaggccggtggtggtggccgacgcggtgggtggcggcgaggtcgacggtggtggtggccaacgctgccgcggcagccgggggcgcctcccaccgccaagaactggtggctgcgggcgcaccggcgagccgccgccaagaacgagggagaggaggtggcggacgcagaggacgagcgccccgaggagagagcgggttccgaccgacaccgcgcctccccatcggcgccagagatggcggcggcggccgaggaggaggaagaaagccgccgcgcgtggaggaggagcggtggggcggagaagaagcggcggggaggggcaagggcgatgtaa

SEQ ID NO: 78844 - DNA, 5908 bp, Oryza sativa
  Clone ID: PAT_MRT4530_78611C.1
agcataaaaacgacgaagatgctcaatattccaagagttgtcaacatgagtaccgtcttcacgtttgagtcggtaagaacctggccgagtaacttcagaaattatgaacggtccttcccataagggagataacttgtaccgatctcatgtagtttgggttttcctcaaaaccaggtctctgactaagaaagcccgcgattaaacattgcggttgtgataacgtcgcatcccttgtaaataccgagccgactgaattaaggctgcttcacgggcttcctccagtcggttgagatcatccactcggtcttctccgtagcgctcctccttgaagttgcgaaatcgcaaagattcgaattctacctcgcttggcaacattgcttccgcaccatagaccaggaaaaatggtgactggcccgtagcctgactgggtgtagtgcgcagagaccaaagtacagacggcaactgatctacccatttgctagcatagggatgcagtcggtcgaaaactcgtgctttaattccttgaagtaccataccattggcgcgttcgacttgtccattgctcatgggatgcgctacggaggcataacaaattttgatgccgaagtcttcacagaaatctttaaatactccgccagtgaactgagggccattatcggtgatgatccgattaggtattccaaaccggtgcacgatgttgatgccttgtctgctgtaattgtgacgactggtttggcttcaatccacttggagaatctgtcaacagcaacaaagagatgagtgtaaccaccggtagcctttttgaatgggccaaccatgtcgagcccccaaactgcgaacggctaggataactggatggtttgcaactcctgagctggtaaatgagtctgtcgggcaaaaaactgacaaccctcacacgttcgcacaattttgtcagcatggatacagcggtaggctagaaaaaaccctgccgataggcctagccaacaatggttcgtgcggcagcgtgattgccacagatgcctgaatgtatatctcttagcaattgccttccttcctccaaagacacacagcgttgcagaatccctgatggacttttcttgtacagctcggactcatgtatgacgtaaagtttgctgcgcctggagatccgctcggcttcgtctttatcttgagggagttcttgcttggtcaaaaattttatgaggggctctttccagtcggattcgatcatggttacttcttgagtgtccgtagcctcggttgcttctttccttggtacggttggttcgtaaagatgttcaacaaacacatcggaaggagctgcttctcattttgaaccgaaattggccagtctgtcggctgcctcattgttatgtcgaagaacatgggttagctcaaggccatcgaacttatcttctaacttgcatacctcttgccgataagcaataatattattgtcaaggcaggaccactctttcatgacttgattaacaaccaactgagaatctccacgaactattagacgccgaattcccaaagatatcgcaatccttaatccgtggagaagcgcctcatataacgctacgttatgggacgcagaaaaatgtatccacaatacgtaactcagcctttctccagtcggggaaatcaggacaactcctgctccggtgcctgaaagccgctttgacccgtcaaaatgcatagtccaatactccatcttctctatcggcgtgtcttcttggcactcggtccactcgacgacgaagtctgctaaggcttgggacttgatcgaagttcgcggtttgaaggatagatccaaagacatcaactctaaggcccactttgcaatccgttcatttgcctcgcgattatgaagtatgttcccgagtggaaacgatgtgaccaccgtgaccgagtgaccttgaaaatagtgagataatttcctaacggtaattaaaacatcatataacagcttttgcacctgaggatatcttgtcttggagtcagccaaaacctcgctgatgaaataaattggtcgttggactttttgaacatggccatcttcttcacgctcgacaaccaggactgtgctcacaacttgagatgttgccgatacatataacaaccgcggctcttgcggatgtggtgaagctaagaccggtggagtggtgagaagtttcttgaagtcttcaaaggctttttacgcttcgggtccccactggaaattatcagttttctttagcaacttgaaaaagggcatcccccactcgccgagtcgctagacgaactggctgagcaccacatgcatccagttaacttttgaacatctttctaggaactcggcggtttcatgttgaggatggcgttgattttcttcgggttcgcctgtatgcccttatgggataccataaagccaagcaacttccctgacggtactccaaagatgcactttttagggttatttcatcctgaaggtgcggatgctcgcaaaggtttcttctagatccgcaatcaaatcatccttctgcttggtcttgataactacatcatcaacataagcttcaacgttgcgaccaatctgagttgaaaagcatctctggatcattcgttgataagttgctcctgcgttctttaatccaaaaggcatggtgatgtagcagtaggccccgaagggcgtaatgaatgaagtcttcaagcaatcggactcctttaaatggatctagtcaatgcgaggtaacccgaagggatctttgggacaagatttgttgaggtcggtgtaatcaacacacatacgccattgtcccgtcttcttccgaaccaggaacggatttgccagccagtcgggatgtaggacttctttgatgaagcctgctgctaacagcttggtcaattcctccttgatcgcatccttcctatcctgtgcgatacggcggagtcgttgcttaatgggtttagcgtcttccttaacatgtaaagagtgctcaatcacctctctaggaataccaggcatatcagatggtttccacgcaaagatatctttattattttgaagaaaggtgatgagcgcgctttccgtggatgtagccagtcagatttcctctcgagcgagcgtaatctcgcgggtctgggccatctcgcaacttttcttgccgcaagtgacggcttgcttgatgtcgctccgcagagatatgactccacgaggacctggcatcttcatcatcatgtaggtatagtgtgggacggccatgaacttggctaacgtcgggcgtccgagtatagcaatgtacgctgtctcgaaatcagcaacttcgaagcaaatgttctttgtgcgaaagttctcccgagtgccgaaagtaaccggcaaagtgatctggccgagtggagtagaagatagcacggggatgactccgagaaagggcgcattactcggcttcagttctgtgtgagggatttgcatgtcgtccagagtcttggcaaaaaggatattgagtgcactgccaccatcgatgagggatcgtcggagcttgacgttgcgaaccactgggtctagtaccaggtggtaccgccccgggtggaccactcggtcaggatgatccgagcggttaaacttgatagctgtctctgaccaccgaagatattgcggcgtatcgggctgaacaacattgatctcccgctcggtcagcttttgctttcgcttagattcataagccaggggtccgccaaagatatggttgagttccttgcgagagtcttggaaaccagttggggcatcatcttcatcatccttcttgtttgacatgctttgatctccatcagccggcttgcatgcattcttggcgtattgctctgcgaactgtttgtagacgaagcaatctttggccgcgtgatttgaattcggatgatgcgggcattgggagttcatgatcttgtcgaaagtgttgacgcgcgaacgctgtcgggaggatggtgtagtagttgccacaagttcttcgggcttacgcttgcgatccttgtgattggtacttccactcccccctgtggtcggcgtatctttctttggcttccagatggtccccaactgcttggatgcggtgacagcgtcttcggcttttgcatactcattggctttttcaaacatctgcttgaccgttctaggaggcttgcagccaaacttgccaactaagagttcatgccaaatgaacttggtgaaggcggcgatgatgacgtcgtcggtgatgtcagagatcttgttgcgttgctcggaaaaacgtcggatgtaatctcggagggattctccagacttctggacaacattgtaaagaccaaactaggtaccagggcattcaaaagtgccctagaagttggcgatgaagtggtcgcgaagctccgcgcaagatccgattgtgccacggggtagcccgtgaagacaggaccgagcagagtccgttagggccacgggcagataatttgccatagctttgctgtctcctcctgctgcgcggattgcgagaccgtagacggtgagtcaagactcaggatttctcgtgccatcatacttctcgattccagtcggtttgaagccagccagccaatccactagacgcaggtcacttgtgaaggcggcaactccatcctcatcgtcctcgtaacaatctggtgaatggtgggggatgtagcttcttgccgcatggcgctggttgatagtttcgcgaagatctacgagaagcctacgacatggggagcggggatgttcggctcgatgctccctgtgtcggttaggaggcgagtagacagatcgttcgccgtgatccctgctcctgcggctagatcccgcgccgacgacgctgaggcttggttggtgatagtcttgagatcggagaggcggaactcggctgccagtcggcgtacggacgcttgcggagttcaccgggaccgaagcggcgatcatggtcttggtctgatttaagatgttgacgaggtgattggcttgattgagtgcgacttccttgaggagggtgtcgagaagggtgatcgctgcaaccgcgttctgctggggggtgcgaaaaaccgccgtcccctcaacgtcttgttgcccaataagttctcgtgctcgttgcccggcctccaaggcgcgctgtcgccgatcctcagcctccttcgcggcccgttcgcgctcctgttgctcacgctgtagccgttctcgctcttgtgcttgacgcttctcctcctgtcagcgacgttcggcttcttgtcatacgcgctgttcttctgcttctcgggcttgacgctgttcttccgtctcgttgtcggccatgaaaacgccgaagaagagaggcgtgtagttatcttcgttgccttcgtcgaagttgtcgaggttgcggtagtcgtagtggtagccgaagtcgtcgtactctacgatctccgtcggtcgagaatcgacaccgggggagctgaggtagccatccaattcttccgtcgaaaccgtcccgagaggttggagtatgacgccgacttccctggagctaggctggatcggagccgaagctggatcccgcctaggcctacggggagcggacgcccgtgtggtgaagacgacggctaagtcgtcggggagtttcatcaggattaagggataggccccatcgtcttgatcaggttgtgttggagtagattggatctcgtccgagtggtttgaagccgacttggttgagatgatcctggagtagatctcagccgagttcgggataccgaacggggcggagacctggcctctccccgactggttcgaatccgagtcgaggagagaaatcttgccgaagtcgttggtgatgaagtcgaggctgccgaaccggaacgcctgcccgggaggaaagacgaagtcgtcgatgccggagatgaaacccat

SEQ ID NO: 78845 - DNA, 372 bp, Oryza sativa
  Clone ID: PAT_MRT4530_78612C.1
atgacgacgccgtgcttgtccaccggcacaacgccagacctccgagtagcaagccctttgctctgccccagtttgcatgctcggttgcgtcctcatgctccatccagcactcttgtcctccatagtgctgccctcgccgcaccgcggaaggactgctcgcactcggcgaagatgggccgctcatcctccccagccgtgcgctcgaggacggcgacgtacggcaaggccccgaggatgcggacgacgattggtaagcctcatatgttccccatccatgctctcgagaacggcgatgagaggtctgccatggcgtccgcgaccgctgagctcgtgctgccctcgccccagagatctggttgcagctgctcgtga

SEQ ID NO: 78846 - DNA, 2775 bp, Oryza sativa
  Clone ID: PAT_MRT4530_78613C.1
ctattgccccgtctttttccgaaccaggactgggttagccagccagtcgggatgaaggacttctttaatgaagcccgccgctaacagcttggttaattcctccttgatcgcatccttctcggcgcctattacagcagtcttactaggatcggagggatctaaaggaatctttttggtcttggcatcgctttctccgcttttgggcatcttggttgcgggcacttctcctttgcttgccatggtcgcagccagtcggatctcttctcgggcgagtgtgatctcgcgggtctgggctatctcgcaactttttttatcgcatgtgacggcttgcttgatgtcgctccgtagggatatgacttctcgaggaccaggcatcttcatcatcatgtaggtgtagtgtggaacggccatgaacttggctaacgccgggcgtccgagtatggcgtgatatgctgtctcaaaatcggcaacttcaaagcagatgttctctgtgcggaagttctcccgagttccaaaagttactggaagagtgatctggccgagtggcgttgctgatagccctgggatgactccgtggaagggtgcattactcggctgtaattctgtgcgaggaatctgtatattgtccagggttttggcgaaaaggatgttgagtgcattgccaccatcgatgagggttcttcggagcttgacgttacgaaccagggagtcctgaaaaccagtcggggcatcgtcttcgtcatctttcttctttgatgtgccttgatctccgtctgaaggcttacgtgtgttcttggcatattgttccacaaattgcttgtagacgaagcaatctttggcaacatggttggagttgggatgatgcggacattgggagttcattatcttgtcgaaggtgttgacacgggaacgctgtcgggaagatggagtagttgtcgccacaagttcttcgggcttacgcttgcgatccttgtgattgttacttgccctctctcctgcggccggcgtgtctttcttcggtttccaagtggtgcccgactgcttggaggcgataatagcatcttcggctttggcatattcgttggctttttcaaacatctgcttaaccatcttgggaggtttgcgtccgaacttgccgactaggtcctcgtggcgaatgcctttagtaaaggcagcgatgatgacgtcgtcggtgatgtcggagatcttgttgcgttgctcggagaagcgtcggatgtaatctcgaagggattcttcagacttctgaacgacgttgtaaagatcaaactgtgtgccggggcgttcaaaggtgccctggaagttggcgatgaagtgatcacgaagttccgcccatgatccgatcgtgccacggggtagtccatggagccaggatcgggcggaatccgctagggccacaggtagatagtttgccatggccttgctgtctcctcctgctgtgcggattgcgagtccgtagacggtgagccaagactccggattagtggtgccgtcatacttctcgattccagtcggcttgaagccggctggccaatccacttgacgtaggtcattagtgaaggcagctactccatccacgtcgtcgtcatagcgatctggtgaatggcggtgacctcgtgctgcacggcgctggttgatcgtgtcgcgaagatcgacgggacgctggcgaggtggagagcgaggtcgttcgactcggcgctccctgtgacgttcgggaggcgagtgaatagatcgttcgtcgtggcccctgctcctgcgactggatcctacgccgacgatgctgaggcttggcggatgataatcatgagatcggagatggggaacctggctaccagtcggcgtgcgaacgctgccggagttaactggaactgaagcggcgatcatggtcttggtctggttcaagatgttgacgacgtgatcggcttgattgagtgcgtcttctttgaggagggtgtcgagaagggtgattgcggcgacagcgttctgttggggggtgcgaaagaccgctgtcccctcaacgtcttgttgcccgataagatcccgcgctcgtcgccgttgtgcttctgcttctcgggcttggcgttgttcttccgtctcgttgttggccatgaagacgccgacgtagagaggggtgtagttgtcttcaaagctctcgtcgaagtcatcgaggtcgcggtcgtcgtagcagtagccgaattcgtcgtattccacgatctctgttggtcgtgagtcgacgccgggggagctgaggtagccttcgagttggtccatcgaaatcgtgccaagtggctggagtatgacgccgacttccctgaagctaggcgagatcggtgttgaggtcgacttccgcctaggcctacggggagaagacgcccttgtagtgaagacggcagccaaatcgtcggggagtttcatcaggattggcgagtaagccccatcatcttgatctggtgaagttgaagtagattgtatctcgtccgagtggtttgaaaccgactcgatcgagataagcttggagcagatcttggccgagttcggaataccgaacggggctgaaacctggttctctcccgactggtttggatccgattcgaggagagaaatcttgccaaagtcgttggtgatgaagtcgaggttgacgcggcccctacctagcgcgctaacgtcgccgttgctgctacccgcacaaggtgggggcgcgagcccagccgcccaacgacttccctccactccactccacctcccacgattccccat

SEQ ID NO: 78847 - DNA, 520 bp, Oryza sativa
  Clone ID: PAT_MRT4530_78614C.1
gcacgagggaggaacgggagcaatccttggagagagtaccatagcgctctccccctccttcctcgtagtcggtccgttcgtgaggagagcgccgccgctcgccagattgggcatgtcggccttgtaccttgctcgcggtgcttccaaggtggtcaggagaatcacctcggagacgtcggtcgagctcaagattctcactgagaaatggcaactcgcgactcgcgggcctcgtcttccaggtatttcgtccgattaatttatgtcttcttcgctcttgctggctatgatttattcgcaatattacaatttctccctcctctgtgccaacgtgtgatgagccccaacaatcagagttcaaaaacgttgtaaattcgaatattcaactcttccttttctcgtatcattacgaacatcgagctttctagattgggtgggttgcatatagatgtactgagcatggtatttggaatttcttggattcaaaactaatctgcatttggttgcaaacagtacattcatg

SEQ ID NO: 78848 - DNA, 1554 bp, Oryza sativa
  Clone ID: PAT_MRT4530_78615C.1
gtgattggcttgattgagtgcgtcttccttgaggagggtgtcgaggagggtgatcgctgcaaccgcgttcttttgaggggtgcgaaaaaccgtcgttccctcgacgtcttgctgcccgataagttctcgtgctagtcgcctggcatccaaggcgtgctgtcgccggtcctcagcctcttttgcagcccgttcgcgttcctgttgctcacgctgcagccgttctcgctcttgtgcttggcgctcctcttccagtcggcgtcgttcggcttcctgttgcacgcgttgttcttctacttctcgggctttacgctgttcttccatctcgttgtcagccatgaaaatgccaaagtagagaggcgtgtagttatcttcaaagtcttcgtcgaagtcgtcgaggttgcggtagtcgtagcggtagccgaagtagtcgtactcaatgatctccgttggccgtgagtcgacgccgggggagctgaggtagccatccagttgttccgtcgaaaccgtgccgagaggatggagtatgatgccgacttccctggagctaggctggatcggggccgaggccggatccggcctagtcctacggggagaagacgcccttgtggtgaagacagcagccaaatcgtcggggagtttcatcaggattggcggataggccccatcgtcttgatcgggccgtgttagagtagattggatctcgtccgagtggtttgaagccaactcgggggagatgatcttggggtagatctcggccaagttcgggataccgaacggggcggagatctggcctcttcccgactggttcgaatccgagtcgaggagagaaatcttgccgaagtcgttggtgatgaagtcgaggctgccgaaccagaacgcctggtgcgccattatgtttctcagaagaccggtgacagcaccaccacgctggtggccggagctagctggaggagctcctgcggcttcccgcctccggtcaagcgagctgggagggatggaggaggcgacgggcgccgaagatgtagcgccgtctaatggtgctccgccaccggtggtgaagacgacgacggaaggcgggaatgcagcggcggcagaaggaggatgaggaccggagctgtcgtcactccttgcgacgataaggatggcctcgagtccgccgagagcggcggcaaggctcgtgagtccacctctgcgcccattgccgcagcgcccggcccgccgccgctcgtcgccggcctcccagctcctcccccaccgcccgcgcgccgctcctcccctgtcgcccgctgccgccacattcccgccttccgtcgtcgtcttcaccaccgccggagcaccatcaacggcgccacatctccggcacccgtcgcctcctccatccttcccagttcgcttgattggaggcgagcagccgcaggagctcctccagctccggccaccggcgtggtgctcatgctccgcttccgcagcattctctcgccggaaaaagaaccaaggaaagataaaatcggggtcaaaaccaccgagggatctattgtgactggttttgattag

SEQ ID NO: 78849 - DNA, 502 bp, Oryza sativa
  Clone ID: PAT_MRT4530_78616C.1
gcttgtttttgcaccttgcttgcaaaggggcgacgaggactcctgccgcacgctgcccgcggacgggagagcactctaagctaggtgggccatggcgacggacgaggagatggagagcggcggctccgccggcgagcttatcggccaaggactacacggacccgccgtcggccccgctgagcgacgcggagaacctggggccctggtcgctgaaccgggccgtcatcacccagttcatcgcctcactgctggtcctgtacatcaccgctatcacactgataggcttcaagcaccagacggacgcgtcggactccggagccgacaccacgagctgcgtcatgagcgtgctcagcatctgcatgtccgtgcggcgcgccgaccactatgctagggctactgcacacgcacagcctctgcggcggccacatctacccaagatccactctcggcctcttgctgacgcgcaaactatccatgacgacggccattctctacatctggt

SEQ ID NO: 78850 - DNA, 2997 bp, Oryza sativa
  Clone ID: PAT_MRT4530_78617C.1
atggctcggggttccgctctgctcgacggaagcgtacttccgccttctcgcatcgtgagcgagaggcatgccgggctgccgcgccgctttatgccggaatctgccaccggccgggagatagtgatgctgggcgagggacgcccggcaccagactacccggggcggtccgtctttttcctccccttcgcaatggcagggctggttccgccattttcttctttctttatggatgttctggatttctacgatctccagatggcgcacctcacccctaatgcagtgatgacattggccatcttcacgcacctgtgcgagatgttcattggggtgcgcccatctcttcggctgttccggtggttcttcaccgtgcagtcggtgtcgccgccgtcggtggttggtggctgctacttccagccgcgggggccggtgttgaaccgctacatcccctgcgccctccgcaagaagtgggacgactggaagagcgactggttctacacccccctcgccaacgaagcgcgcctccgacttccaagtcagcccccggcgcaggtctccagctggcgggcgccggtagatctgggggatgactatgacgccgtcctcgaccgcctggcgggcctgcgatcccaagggctcacaggggccatggtgtacggcgactacctccgtcgccggattgcgccgctccaacggcgcgcccggggcgcctgggagtacaccgggtccgaagactacatgcggacccaccagggagtcagatgggattgggctcccgaggacttcaagatcgtggtccaaagggtgctgaatctcagctccgtggagacgtctctcattcctcaaggtatcctccccctctgcagcgatcccgaccgcgcctccattctgaccattatgatgggggtcggggcctcagaggaagaaactcctaagggccacgacggcgcgggcgagagccgccggggggaacaatctaccccaggagggggtcgtgcttctgggccccgcgtcgggggctcggggagcagccgccctgccgacgcccaggggaagaggaagctgggaggaacacctcccccatctcctccccgagggggcggggcggtgcgtgccagcagtcggcacccggagggggccgcgccgacatcgcagcccgagggggagcgcaagaagaaacggctccgcaagatgggggagacggaaccatcccggggaaacctgatttcccctccaaggtggtcatttaaccgaccccctcgcagcgatgtcccgtcacgttcctcccgccatcccaagtccggccagtccgaggccgaagatccgggggccgtagaggaacggaggcgagaatctgaccggcgagaggccgcagatcgccttcgggaagctgaagaggccgcccgggaggccgctcgggaggaggccgcccgggctcgccaagccgaagaagctgctaaggaggaggccgcccgggctcgtcaggctgaggcgatggcgtcttccgaggcagctcacgacaaagctgctggcgctgcgtcctccggcgggccgagccgcgtcgcattctctccaaggcggctcttctcctcgtcttctgtcgccccgctgagcgccgagccccttctgcaggccttggccgccgcaaacaccgcggtgctagatgggttcagcgcccaagtggaggccctgcgagcggaacgagcggagctcgaggccgcatgggcgcgtgtcgaggaggggcggcgctcggtggatgtcatggtggaggtgggccgtaaggctcaccgccgtcacgtctcggagcttgaagcccgcaaagcggcgctggcagagatcgcccgagaggtggacgaggagcgggaggtcgccctcattgccaccaccgcgatgatcgaggcgcaggacaccctccgccttcaacacgggagctgggaggcggagctaaagaaaaagctcgacgccgcccaaggggtccttgacaccgccgctgcccgagagcggcgggcaacggagatcgaagcggcgtcccggcgtcgcgaggaggcccttgaggcccgtgctatggcattggaggaacacgccggcgccgtggagaggggcttggcggaccgcgaggccgccgccgctatccgagaggcaacgctggcggtgcacgaggccgcctgcgccgaagaggagtccgcgctccgcctccgcgaggacgcactcgctgagcgggagcgagctctcgaagaggccgaggctgcggcgcaacggttggcggatagcctttcccttcgtgaggcagcgctggcagagcaggcacgccgcaatttggaatccatccgcgccgagagagccgcactggagcagcgggctgccaacctcgaggcgcgggaaaaggagctggacgcgagggcgcatatcagcggggcggctgcgggcgaaagcgacttagccgcccgcctcgcagctgccgaactcaccatcgccgacatgcagtgcgcgctagactcatccgccggggaagccgaggccctccgcttggcgggcgaaatagggcccggcatgctttgggatgcggtctcccgcctggatcgcgccggtcggcaagcgggcctctggaaaggccagacaaggacgcactccaccaacctggaaggcctcgctccgcacctcacgaagatggcctgggctctccaacaactccccgaggagctcgagaagaccatcaagtcatcctcgagggacctcgcccaaggagcggttgaactcgtactggcgagttaccaggccagggaccccaacttctctccatggatggcgctggaagagttccctcccgggaccgaggacgacgcgcgcgcgcgggtccgggatgccgccgaccacatcgtccacagtttcgaggggtcggcccctcggctcgcgttcgcccccaactccgacgaggagggcgatgccagcggtgcagacgaccgtgacgacgaggccggcgacccgggcgcatcggactga

SEQ ID NO: 78851 - DNA, 315 bp, Oryza sativa
  Clone ID: PAT_MRT4530_78618C.1
caccaaacaagaacatgggggagtttttaacattaaaacccaaaagcccaagcaaaagagggtccattggaaacacaacaccttttttaaagcaaagaacattactccagggggaaaaatgactccttcctcccttttataatactaggaaagattttggggggggggggaatttggccccacagaattttatcccttgggcggggggaaacaaaaacaccctgctgggctgtttccatgcggccccggggacacacagttggctacaggacggagcaggcgtgggggttctggtttttaaaggaaggggtgtat

SEQ ID NO: 78852 - DNA, 532 bp, Oryza sativa
  unsure (1)..(532): unsure at all n locations
  Clone ID: PAT_MRT4530_78619C.1
cgagatcccgtcgcgccccccccgccattccaagtccggccggtctgaggccgaggagacggtgaccgcggaggcccggaggcgggaagctgaccggcgagaagccacggaccgcctacgggaagccgaggaggctgcccaggaggccgtccgggcggtctgtcaagcccccgacccgactccggccgaggtgacgacgacttccgaggccacccacgacgaggccgcgggcgcgccgatcgggcccgacccctcgggcgacgcttgggacaagccagctccgggggacgcccccgagtccggcacgtcgatcagcgggccgagccgcgcggcacccacaccgaggcggctctcccctctggcttccgctgccccaccgagcgcggagcccctcctggcagccttggccgccacgaacaccacggtgttggacgggttaagtgcccaaatggaggtcctacaagcagagcgggcggaacttgacgcggcgtgggcgcgcgtcnaagaggggcggcgctcggtggaggccatg

SEQ ID NO: 78853 - DNA, 324 bp, Oryza sativa
  unsure (1)..(324): unsure at all n locations
  Clone ID: PAT_MRT4530_7861C.1
gctgcagcttataagctgaagggtggacacaccatcagagtgttgggacacatgtttaaccacttaaaacactaatggattcaccatgctgattttgtctgcaaaaggtgcaaatgtcattgacatactacaatcacacggacaagaaagacctgctcatattgagcaatcaaatcaacctgaagtctangatcacaggcaatgccctgaaacatcagcagaatcaacttactctacaacattgtaaacaagatagagagagagttgacatagagatcttaaccttcccagcnntcanagagcangactcagcgacactttgag

SEQ ID NO: 78854 - DNA, 417 bp, Oryza sativa
  Clone ID: PAT_MRT4530_78620C.1
atgccaagattcgtgcatcggcatctctcctccaactccggcgggctccccttcttctccggtaccggtgacaccccaactccggcggagggatggccgtggcgggggaaggactggcggtggccggtggactccggcgggcggcgaggcggcggcagcgccgccgaagctgcgggaatgtaggaggccgccgccggatacggggaagacggcggggcgggggcacctcgtcgtcgccgccatgagaaagtgaaggggaaggggggagggggcttgccggcgccgttgaccttttccggccagccgcgaggcgagcggcggcacggtggggcggtggcggtggtagcggcgacggatcgtgcgtgggacaggaggaggagggtggcggcgtgatctggaaccgaggggaggaggagt

SEQ ID NO: 78855 - DNA, 2742 bp, Oryza sativa
  Clone ID: PAT_MRT4530_78621C.1
atggcacggggctccgcaccgctcgacggtagcgtgctgccgccttcccgcatcgtgagcgagaggcaggccgggttgccgcgccgattcatgccggaatctgccaccggccgggaggtggtcgagctgggcgagggacgcccggtgccacactacccggggcggtccgtcttcttcctctctttcgcaatggccgggctggtcccgccattctctaatttcttcatggatgttctggagttttatgatctccagatggcgcacctcacccccaacgcaataatgacgttggccatcttcgcgcacctgtgcgagatgtttatcggggtgcgcccatctctccggctgttccagtggttcttcaccgtacagctggtgtcgccgccgacggtagtcggtggctgctacttccagccgcgggggcaggtgctgcaccgctacattccctgcgtcctccgcaagaagtgggacgactggaagagcgattggttctacacccccctcgccgacgaagcgcgcctccgacttccgagccagcccccggcgcaggcctccagctggcgggcgacggtagatctgggagacggctacgacgccgttcttgaccgcctggcgggtctgcgatcccaggggctcacgggggccatggtgttcggcgactaccttcgtcgccagatcgcgccgctccagcggcgcgcccggggcgcctgggagtacaccgggcccgaggactacatgaggacccaccaggggcgcaaatgggactgggtccctgaggacttcaggatggtggtccaacgggtgctgaatctcagctccgtggaggcatcccttatcccccaaggtgtcctccccctctgcagcgatccagatcgcgccaacatcctgaccatcatgcaggcggtcggggcgtcgggggagcggcccccccgaggccacgatggcgtgggcgggagccgcagggggaaacaatctaccctgggagggggtcatgcttctgggccccgcgacgggggcccggggggcagccgccctgccgacgcccgggggaagaggaagcaggagggcacgacccccccatctcctccccgagagggcgaggcggtgcgtgccagcagcaggcgcccggagggtgccgtgccgacgccacagcctgagggggagcgaaagaagaaacggctccgcaagatgggggggaccgagccatgccgggggaacctcatctcgctcccgaggtggtcgtttagccgacctccccgcagcgagatcccgtcgcccccccccccccgccattccaagtccggccggtccgaggccgaggagacggcgatcgcggaggcccggaggcgggaagctgaccggcgagaagccgcggaccgcctccgggaagccgaggaggctgcccaggaggccgtccgggttcgccaggctgaggaggccgctcgggaggaggccagactccgccgggccggggagtccgtccgggaggaggagacggcgcgtgcacgccaggcggcctgccaagcccccgacccgactccgcccgaggcgacgacgacttccgaggccacccacgacgaggccgcggacgcgccgctcgggcccgacccctcgggcgatgcttgggacgagccagcttcgggggacacccctgggtccggcacgtcgatcggcgggccgagccgcgcggcacccacaccgaggcggctctcccctctgccttccgttgccccactgagtgcggagcccctcctgcaggccttagccgccgcgaacaccacggtgctggacgggttaagtgcccagatggaggccctgcaggcagagcgggcggagctcgacgcggcgtgggcgcgcgtcgaggaggggcggcgctcggtggaggccatggtggaggcgggccgcaaggcacaccgccggcacgcctccgagctcaaggcccgtcgtagggacctggcggagatcgccagggaggtggaggaggagcgggagactgccctcatcgccatcgccgtgctcgacgaggtgcgggacgacctccgcctccaatacgggagccgggcggcggagctagagaagaagctcgacgccgcccggggagtccttgacgccgccgctgcccgggaacggcgggcggcggagatcgaggcggcgtcccggcagcgcgaagaggcccttgaggctcgcgccacggcgctggagaagcgcgcccgcgccctggacacgaaggagaaagacctggcggaccgcgaggccgccgtcgccacccgggaggcaacactggcggcgcacgaggccgcctgcgccgaagaggagtccgcactccgcctccgcgaggacgcgctcaccgagcgggagcgagctctcgaggaggccgaggccgcggcgcagtggctggcggacagcctgttcctccgcgaagcagcgcgggaggagcaggcgcgccgcaatctggaaggcgcccatgccgagagggccgcactggatcagcgggccgctgagctcgaggcgcgggcgaaggagctggacgcgagagcgcacagcggcggggcggccgcgggcgacggcgacctagccgcccgcctcgcagccgccgaacacaccatcgccgggctgcagggcgcactggactcgtccgccagggaggtcgaggccctccgtttggtgagcgaggtaggacccggcatgcttcgggacgccgtctcccgtctagaccgcgccgggcggcaggcgggcctctag

SEQ ID NO: 78856 - DNA, 1013 bp, Oryza sativa
  Clone ID: PAT_MRT4530_78622C.1
tgggacggaggcggcctgtgctggatctggtggtgtggtggtgctggcccctcggctgtggggatctagcaggctggaggtgcggcgcggcaacgacagccgggcgcgcgatggggagagaagtggcttggcggcatgggcggaggagcggcgcgagcaggcgtgcggagggtcggcacgggtggcggggggagaagtcacaagcgcaggagcagtgaggacggcaggggagatgccacgggcgtctgcctacttagaggagtctatagaaggaggggggagggcagagtcggatatgtgggcgcgtggcgctttggccgacgccgggggcaggcctggccctggtgaggaaaaagtctacaagcaagcaatcaagcacaaagactacacaatgtcaagtgtgccaagaaaattgatgaagaacaagaaaagggaaaacacagagaaagagggaggcgggccaagcactggagcccaagacaacctcctctcccaccaccggattggcctagcacggcccaacaccgtgagcccacccaggacggcacgtgaagagaacgtggcgcgggcatggggcgatgtggctccttccgactggcgcacgcggcatctcccactggctggagggcccacgcgcatgcaggagaaaggcggagccgtggcaatcgctcaagcttcggtggggttgttggaggaaatcaagcccatggtggtggagctagcggggtggaagccaaccatagacaaggcggtggtggagttgcgagaggatattggggacttgcgtcatcaagtgaatcagctctcaaaacagcaagccagtgctatcaagccagcggagcggccgccgctgcttcccacatcgccaggatctcgtccgctgccgaaggaggaggagacttgtccaagtcatggtgacatgggtcacggcccgttaggccaccgcgcgggaatttcactccggggaaaggcgattgggaagaatacctctccattgtctctcccgggcaagg

SEQ ID NO: 78857 - DNA, 2460 bp, Oryza sativa
  Clone ID: PAT_MRT4530_78623C.1
atggcacggggttccgctctgctcgatggtagcgtgctgccgccttcccggatcgtgagcgagaggcaggctgggctgtcgcgccgcttcatgccggaatctgccaccggccgggagatagtcacgctgggcgagggacgcccggcgccagactacccggggcggtccgtcttctttctcccctttgcaatggtagggctggttccaccattttcttctttcttcatggatgttctggagttctacgatctccagatggcgcacctcacccccaacgcggtgatgacattggccatcttcgcgcatctgtgcgagatgttcattggggtgcgcccatctcttcggctgttccggtggttcttcaccgtgcagtcggtgtcgccgccatcggtagtcggtggctgctacttccagccacgggggccggtgctgaaccgctacatcccctgcgccctccgcaagaagtgggacgactggaagagcgactggttctacactcccctcgccgacgaagcgcgcctccgacttccgagccagcccccggcgcaggcctccagctggcgggcgccggggctcacaggggccatggtgtacggcgactacctccgtcgtcggattgcaccgctccagcgacgcgctcggggcgcctgggagtacaccgggtccgaagacttcacgaggacccaccagggagtgagatgggactgggctcctaaggacttcaagatattggtccaacgggtgctgaatctcaactccgtagaggcggccctcattccccaaggaatcctccccctctgcagcgatccagaccgcgcctccatcctgaccattatgatggcggtcggggcctcagaggagcgagctccaaagggtcacgacggcgcaggcgggagccgcaggggggaacaatctaccccgagagggggtcgtgcttctgggtcccgcgacaggggcccggggagcagccgccctgccgacgcccgggggaagaggaagcagggaggaacacctcccccatctcctccccgagggggcggggcggcgcgtgccagtaacaggcgcccggagggggccgcgccaacatcgcagcccgagggggagcgcaagaagaagcggccccgcgacactcaggcgacaacttccggggcagctggcgacgaggccgcgggcgcgtcgcttgggcctactccctcgggcgacgctcaggaccaaccgggtcctggggacatccccgagtccggcacttccatcggcggcccgagccgcgtggcatcctctccaaggcggctcttccccacgccttctatcgccctactgaacgcagagccccttctgcaggccttggccgccgcaaacaccacggtgttggatgggttaagtgcccaggtggaggtcttgcaggcagagcgggcggagctcgacgccgcgtgggcgcgtgtcgaagaggggcgacgctcggtggaggccatggtggaggtgggccgtaaggctcaccgccggcacgtctcggagcttgaaactcgtaagaaggtgctggcggagatcgccaaggaagtggaggaggagcggggggctgccctcattgccaccaccgtgatgaacgaggcgcaggacaccctccgccttcaatacgggagctgggaggcggagctagggaagaagcttgaccgccgcccaggggagcgcgcctgcgtcgtggagagggatctggcggaccgcgaggccgccgtcaccatccgggaagcaacgctggcggcgcacgaggctgcctgcgccgaagaagagttcacgctccgcctccgcgaggacgcgctcaccgaacgggagcgagctctcgagggggccgaggccgtggcgcaacagctggcggtcaacctgtccctccgcgaggcagcgcaggaggagcaggcgcgccgcaatctggaaggtgcctgcgccgagagggccgtactgaaccaacgggccgctgagctcgaggcgcgggcgaatgagctggacgcgagggcgcgcagcggcggggcggccacgggcgaaagcgacttagccgcctgcctcgcagctgccgaacgcaccatcgccgatctgcagggcgcgctggactcgtccgccggggaggtcgaagccctccgcttggcaggcgaggtagggcccggcatgctttgggacgccgtctcccgcctagattgcgccggtcggcaagtgggcctctggagagggcggaccgtaaagtacgccgccaaccagggaggcctcgcccagcgcctctcgaagatggccggggctctccaacggctccccgaggagctcgagaagacaattaagtcatcctcgagggacctcgcccaaggagcggtggagctcgtcctggcgagttaccaggccagggaccccaatttctctccatggatggcgctggatgagttccctcctgggaccgaggaccgcgcgcgcgcgtag

SEQ ID NO: 78858 - DNA, 1110 bp, Oryza sativa
  Clone ID: PAT_MRT4530_78624C.1
atggttccgtggcgccgctcctcctcctcctcttccgccccttcctcgcggcccgcgcggcgtcccgcccgcaccaatgcgagggtctccccagacgtctcgtcggaattgtcgccgttggcgggggaggagggggcaggcgaggagaggtggtcggcgttggtgcccgaccttctggcagatatcctgcggtgcgtggaggccggctcagagaggtggccgccccggcgcgacgtggtggcctgcgccagcgtctgccgccggtggcgcgacgtcgccgtcgccgtcgtgcagccgccgctcgagtccgggaagatcacgttcccctcctcattgaagcagcctggaccaagggacgcaccaatgcagtgtttcatcaagaggaacaagaaaaactctacctttttcctatatcttggattaacacaagcagaactaacagatgatgagaaatttctgttggcggctcggaggtgcaggcgtgggttgcataaggaatatgccatcaccattaactctgatggtctcttccatggaagccagtcatgcgttggaaatctaaagtctaatttcacgggaacaaagttcaccattcgtgattggcaaccaccatatgaaggtgctaaggcgttcagcagcagatccggtcgctggtttggaaacaaacacagatgcccactggtttccacgggtgatgtagaagttggagaggtatcctataaatacagtttactcagaccaagaggtccaagaagaatgagctgcagtgttcagtgtcccgtcctcaagggtactgcagtagatccacaagacggaaaacgacttagcaatagcatccctagttcattggttctgaacagtaaagtaccaagttggcatgagcatcttcagtgctggtgcttgaattttcacggccgggttatggttgcatctgtgaagaacttccagcttattgctccagtcgaaccaggggagccgtcggataagacagtagtactgcagtttggaaaaattgacgatgacgtttttacaatggactaccggcagcctctgtcggcattccaggcatttgctatctgcctctccaactttggcacaaagcttgcttaa

SEQ ID NO: 78859 - DNA, 267 bp, Oryza sativa
  Clone ID: PAT_MRT4530_78625C.1
ccgtgttagctaaggcggtggtcggcgttttatttaagggggcggttcgttctgctacggaaccacgagaccaggtgttgtaatcgtcgctaccaccacgctggtggctcctggggtgcgcagactaatgcctggtgtcgttcaagagcgtccgacgtggtaatggaggatgggctacctgtacacaggtgtgaaggacgttgaaggcacttcaggcatcactctggactaccagcgagacgtgccagccatggagctggggacagg

SEQ ID NO: 78860 - DNA, 5520 bp, Oryza sativa
  Clone ID: PAT_MRT4530_78626C.1
atgggtttcgtttctggcatcgacgacttcgccttccctcccgggcatgcgttccagttcggcagcctcaacttcatcaccaacgacttcggcaagatctctctccttgactcggatttaaaccagtcggggagagaccaggtccctgtgccattcggtatcccgaactcggccgaggcctactccaagatcatctctcccgagtcagcttcaaaccactcggatgagatccaatctactcttccgcgaccagatcaagacgacgggtcctatcccccaatcctgatgaaacttcctgatgatttggccgttgtcttcacagtcaagacatcttccactcgaagatctaggcgagctccggcttcggccccgatccgatccagatccagggaggttggcgttatactccaacctctcgggacagtctcgacggaagagttggatggctacctcagctcccccggcgtcagttctcgaccaaccgagatcctcgactacgacgatttcggctaccactacgaccacggcgacctcgacaacttcgacgatagctatgaggataactacacgcccctctacttcggcgtattcatggctgacaatgaaacggaggaacagcgccaagcccgagaagcggaccaagatcgcgcacggcaagaagctgaacgtcgccaactggaggaagagcgacagcgacaagagcgagaacgactacagcgtgagcaacaggatcacgaacggattgcaaaggaggctgaagatcgacgacaacacgccttggaatctgggcggagagcgagagagctcattgggcaacaagacgtcgatgggacagcagtctttcgcaccccccagcagaacgcggttgcagcaatcactctcctcgacaccctcctcaaggaagacgcactcaaccaagccgatcatgttgtcaacatcttgaaccagacgaagaccatgatcgctgcctcggttccagccaactccacaagcacccgcaccccgactggtagccgagtcccccacttccgatctcatgattatcatcagccaagcctcagcatcatcggcacaggatctagtcgcaggagcaggggtcacgacgaacgatctgttcactcgcctcccgaacgtcacagggagagccgagtcgaacggcctcgctctccacctcaccgacgtcccgtcgaccttcgcgacacgatcaaccagcgccgtgcagcacgaagtcaccgccattcaccagatcgctacgacgacgacgtggacggagtagctgccttcactaatgacctgcgtcgagtggattggccagccggctttaagccgactggaatcgagaagtatgacggcaccaccaaccctgagtcttggctcaccgtatatggtctcgcaatccgcgcagcaggaggagacagcaaagccatggcaaactatctacctgtggccctagcggactccgcccgatcttggctccacggactaccctgtggcacgatcggatcatgggcggaacttcgtgatcacttcatcgccaacttccagggcacctttgaacgccccggcacacagttcgatctctacaacgtcgttcagaagtctggagaatccctccgagattacatccgacgcttctccgaacaacgcaacaagatctccgacatcaccgacgatgtcatcatcgccgccttcactaaaggcattcgccacgacgacctagtcggcaagttcggacgtaaacctcccaggatggttaagcagatgttcgaaaaagccaatgagtatgccaaagccgaagatgctatcaccgcgtccaaacagtcgggcaccacttggaagccaaagaaagacacgccgaccgtaggagggagtggaagtaacaaccacaaggattgcaagcgtaagcccgaagaacttgtggcgaccacctctccatcttcccgacaacattcccgcgtcaacatcttcgacaagataatgaactcccaatgtccgcatcatcccaactctaaccacgtggccaaagattgcttcgtctacaaacagtttgcggagcaatacgtcaagaacgcacgcaaacctgcagacggagatcagggcacatcaaagaagaaagatgatgaagacgatgccccgactggttttcaagatcatcgcaaagaacttaatcacatcttcggcggacccctggcttatgagtctaagagaaaacagaagctaacagaacgggagatcaatgcggttcagcctaacacgccccaatatcttcggtgcgcacttaatatccttttcgctaagaccctggacgatatgcagattcctcgcacggaattaaagctgagtaatgcacccttccacggtgttatcccaggattgtcagctacaccactcggccagatcactcttccagttaccttcggcactcgggagaattttcgcacagaaaatgtttgtttcgaagtcgctgattttgagacagcatatcatgctatactcggacgaccggctttagccaagttcatggccgtcccgcactacacctacatgatgatgaagatgcctggtcctcgaggggtcatatcactacggagcgacatcaagcaagccgtcacatgtgacaaagaaagttgcgagatggctcaaacccatgagactactctcgcccgcgaagagatccgactggctgcgaccacggcaagcgagggagaagtgcctgcaaccaagctgacgaagaccaaagaaagcggtgccaagatgaaaaagattcccttagatccctcggatcctgataagactgctaataataaagatattttcgcgtggaaaccatccgatatgcctggtatccccagagaggtgattgagcactctttacatgttaaggaagacgccaaacccatcaagcaacgactccgccgttttgcacaggacaggaaggatgcgatcaaggaggaattaaccaagctgttagcagcaggcttcattaaggaagtccttcatcccgactggctggctaacccagtcctggttcggaaaaagacagggcaatggcgcatgtgtgtcgattataccgacctcaacaaatcttgtcccaaagacccttttgggttacctcgcattgaccaggtggttgattcaacggccggctgcgagttactcagcttcttggactgttactcgggatatcatcagatccgactaaaagaatccgactgcttgaagacctcgtttattacgccctttggggcctactgctacatcaccatgccctttggattgaagaatgcaggagcgacctatcaacgcatgattcaaagatgtttttcaactcagattggtcgcaatgttgaagcctacgttgatgatgtagtcgtcaagaccaagcggaaggatgacctgattgcggatttagaagaaacttttacaagcattcgtgctttcaagatgaaactaaacccggaaaagagcatctttggagtaccgtcagggaagttgctcagatttatggtatctcaaagaggcatacaggccaacccagagaaaatcaacgccatcctcaacatgaaaccgccaagctcccaaaaagacgtgcaaaagttgactggttgcatggcggcgctcagccggttcgtctcacgactcggcgagcgggggatgcctttcttcaagctgctgaagaagactgacaatttccagtggggacccgaagcacagaaagcctttgaagacttcaagaaactcctcaccactccaccagttttggcctcgccacatccgcaagagccgctactgttatatgtgtcggcgacctcccaggttgtgagtacggtcctggttgtcgagcgtgaagaggaaggccatattcaaaaagtccaacgaccgatctattttatcagcgaggttttagctgactccaagacaaggaaattatctcactattttcaaagtcactcagtcacggtggtcacatcgtttccactcggggatatacttcataatcgcgaagcaaacggacggattgcgaagtgggccttagaattgatgtctttggacatatctttcaaaccacgaacttcgatcaagtcacaagctttagctgatttccttgccgagtggaccgagtgccaagaagacatgccagaggagaagatggaatattggactatgtattttgatgggtcgaagaggcttacaggcactggagctggggttgttttaatctccccgactggagaaagattgagctacgtattgtggatatatttttctgtgtcccataacgtggcggaatacgaagcgctacttcatggactaaggattgcaatatctctagacaaaaatgaagccgagcggatttccaggcgcagcagactttacattattcatgagactgagctgtacaagaaaagcccatcaggaatactgcagcgctgtgtgtctttggaagaagggagacagttgttgaaagatatacattctggtatttgtggtaatcatgctgctgcacggaccattgtcggcaaggcttaccggcaaggttttttctggcctacagctgtgtccgatgccgacaagattgtgcggacatgcgaaggttgtcaattttttgccagacaaactcatttgccagcccaagagttgcaaaccatcccgttgtcctggccatttgcggtctgggggcttgacatggtcggtccctttaaaagggcagtcggcggttacacgcatctctttatggccatcgacaaattctccaagtggattgaggctaaatcggtcatcacgatcacagcagataaagctagatattttttcatcaacattgtgcatcagtttggggtacctaatcggatcatcactgacaatggcactcaattcactggcgaagcatttaaagacttttgtgaagacttcggcattaaaatttgttacgcctccgtggcacaccgtatgagtaacggacaagtcgagcgcgctaatggcatgatactgcaagggatcaaatcacgagtttttgaccgactacgtccctatgctggcaagtgggtagatcagctgccgtccgtactttggtctttacgcactactcctagtcgggctactggccagtcgccgttctttttggtttatggagcagaagcaatgttgccgagtgaagtggaatttgaatcactacgatttcggaacttcaacgaggagggctatgaagagggccgagtagacgacatcaaccgactagaagaagcccgagaagcagctttaattcagtcgactcgatatttgcaagggttgcgccgttatcataattggaatgttcgatcgcgagcctttttagtcggcgacctggttctgaggaaaattcaaacaacacaggatcggcataaattatctcccttatgggaaggactgttcataattgctgaagtcactcggccgggttcttatcgactcaagagcgaagatggtactatcatcaacaattcttggaatattgaacaccttcgtcgattttacgcttag

SEQ ID NO: 78861 - DNA, 218 bp, Oryza sativa
  Clone ID: PAT_MRT4530_78627C.1
taattgatgattggcgaccatggtatgctgctggacaagttgccggattcacgagaagctatgcgaataataacctgatatatgcaactgtgaagggtgctgggcacactgctccagagtataaacctaaggagtgtctcgagatattgggcttcacggccatgcccgtcaccgttgtcccctcatcggtgatgggattcagttgtggcccgacacag

SEQ ID NO: 78862 - DNA, 158 bp, Oryza sativa
  Clone ID: PAT_MRT4530_78628C.1
ggagaaaagaagactgccctcgggtgccaggtaatgctgattctgaagtggtgtcgtcccatgataaggaacaagcaacagcctcaattgctgaagatcttgagacagcttctgaagaaaatgattcaggtttccacttcgacaatccaatgatgcag

SEQ ID NO: 78863 - DNA, 234 bp, Oryza sativa
  unsure (1)..(234): unsure at all n locations
  Clone ID: PAT_MRT4530_78629C.1
tgcccacgcttacgatcatgcgtgcgtccacgcttatggccaatgagaatgatcaaagtgtanactctcattacaagggggagaatgatgactgaaattacatattacaaggtggttagagtgcgctgaccatgcataaaatattgaggcttatgacagatcacgtggatgtgggttttggcaactattccatctcatatggatggacacgaggaatgatttccatggcgtatc

SEQ ID NO: 78864 - DNA, 6223 bp, Oryza sativa
  Clone ID: PAT_MRT4530_7862C.1
acgaagtctacggatgggaagagtcttactcggacaagactgggtcatcaatgtatcgtatagggtctgttatctccgagttctacttggaaaccgcctgacctgcgatataaaagggaccccccggggaggacctgaggcatcgaatctcagagccaacacaaccctcacagcctacgaaattattgtaccaacgtaccccaataccctctatatccggtctacgggtaccacccgtcgacagtggcgcgctaggtagggggccttggtactcaaggttctactactatgtcatccagcctcgtcgacaacagcgtcaacaccaacctcagccaagtattccctgcttcaacaatgctggtgtagactcaagtcggcgaaatcgtcttcccggtttacaccacgacgccgatctcaaccggtccgtcaatgactggaaacgagaacgcagtggctacaaaccaaggtgactccatgtcaaaaaatcctcccgccgaggcggagaacggagcatcgacgacatccgagctcgagaaggattctaatgcggccaaaccttgtcgttccgacatgaaccgcgagccgacgaagatgacttctgaagcgacaaggtcctggtgtcctatccacaaaaccaggaaacacactttgcaagcctgctgggttttcctcaacgtccgcgctgaaattcgcgcctgtaaagagcgtggaattcaacgtatttctccaactcgtgatgtctactgtcctattcacaagacaaagaatcacgacctctcaagctgcaaggtcttttccagcgccatggaagcgccatcccctaaggtccaacaggcacacatccccatcagggataaagacaaggaacgaggagcgatgccaacttcagatcgatttgttggggtaatcaatatcgatcctcacgaactatcagtcttgcaccttcttgaagactatgggtcatcgacaacaagcgcgccgcgggaggtattggctatcgatgatgtcggcatatcagcgtgcaccaatgcagaaacagagaatcaattgaccactccagctcagcacatcagagccgtcaacgctataatgagggaaaccccctacggtcccgttctaaacgacgatctcgcgcgttggacagaatgactacgggaatcagtgaccaacctcagcaacgcgttcgaagaggccgctgccgcagcgcacccagagcagccaccaactggcgatgccaacggtgaaaatcctgaatgaagggaatcgcctcagcgagctacccctcaacctcgcggcactggcgatctccgagatcacatcaacggccgccgagaggcacgacgcacacgagacaatgagaatcgttcccgacgtcatgtctcttcacggcgccatgataacggtgataaccgccacaaccaccacgatcacaacgatcacaaacggcgggtgctagacgatactggttgaggacgtcgccataacgacgactatgatggagaccggcaccaagacaacagcgggagacgacgacaggattctcgagatccaggccgacatcctcgtaatcgtacgccagaaccaagcgacccatcgtcatcgtcatcatcctcgtcttcctcatcatcagacagacatccacgaaggacacacgatcgccgacaacccaccgcccccagcgctgggtgtagggctttcagtcgttccctacatgatgtccgatggcctgagagattccgacccagagcaatagagaagtacgatgggagcaccgacccagaagagttccttcaagtctactccacagtactctacgctgccggagcagacgacaacgcattggcgaattatttgccaactgcgttaaaaggctccgcacgttcatggctgatgcatcttccgccctactcaatctcttcgtgggcagacctgtggtagcagttcgtcgccaacttccaaggaacctacaagcgccacgcgatcgaagacgacctacacgcgttgacacagaacccgggtgaatccttgaggaaatatattcggcgcttcaacgagtgcagaaatacaatccttgaaatcaccgacgcttttgtaattcgcgccttcaaatccggtgtcagagatcgctatactacccaggagttggcgacaagacgcatcacaaccactcggagattgttcgagattgttgagcgatgcgcccacgcagatgatgcgctaagacgcaagaacgataagccgaagaccgagggagaaaagaaaccagccacggacgcacctgagtcaagcaagaagaagaatcgcaaaaatgggaaaaggaaagctcaagcggaagtcctcgcagcagaatacgcgaaccctcccaagcgcccagacccacaaagtagcaacacaaagaaagcttggtgccccatacacaagacgaacagacattctttggaagattgccttgttttcaaaaaatcgctcgagaagcacattgcatctgaaaaaggcaaacgagtacgcgtggtcgaaaaggacgcggaggcggctccctaggaatcggactcagcatatccagactctgacctccacgtttcacacatcaccgccgtcattcctggacgatatccgatcgtggtcgaacccactattcggaacatcaaggtcgcacgggtcctcatcgacggtggcagctcaatcaaccttcttttcgccagcactctggacgcgatgggaattccacaaagcaagttgacaccaaccgatcaaccctttcatggaatcactccccaatcctcgtccagaccattgggcaagattacgttgcctgtgactttcggccaagccaacaacttccgaacagagcagatcacctttgatgtcgctgaattcgatacagcttacaacgccatcatcgggagaactgcacttgcaaagtttatggccgcatctcactacgcgtatcaagtgctcaagatgccgggaccgaagcgaataatcactattcaagggaacgcaaagctggaggtgcaatgcgacaaacggagcctcgacatggtcaagcaaacgcccagcccacccgccacaactgagccacccaagaaagtgagcaaaacaaacaagacgccgaaaccggacggcgcaatcaagattgttccactctccagtgccaaccccgacaagaccgaactcgcgctcatcaccttcctccgcgacaatgctgacgtgttcgcttggtagccgtccgacatgccaggggtccccagggaggtaattgagcacaaactcatggtgcaacccgatgccaagccagtaaagcaaagactgcggagatttgcaccagaccgaaaacaagccatacgagaagtacttcatccagaatggctagccaatccagtcatggtgcggaaggccaacggaaaatggagaatgtacgtcgacttcaccgacctcaataaggcgtgccccaaggatcacttccctcttcctcgaatagatcaactggtggactcaatagccgtctgtgagctgttgagctttctcgacgcttactctggctactaccaaatcagcatggcaaaagaggacgaagagaagacatcattcatcatgccgttcggggtattttgctatgttaagatgccgttcggattgataaccgcaggaaataccttccaacgcacggtccagggcgcacttagcgatcagctcggcaacaatgtcgaggcatacgtcgacgacatcgtcgtcaagaccaagacatgcgactcattgattgacgatctgtgggaaacgttcgacaacctccgacgatatcgcctcatgctaaatccagagaagtgcacgttcggagtaccatcgggaaagctgctcggtttcctcgtctctggcagaggaatagaagcaaatcccgagaagatcaaggcaatcgagaacatgaagtcacccacaagactcaaggaagtacagaagctaaccggatgcatggcagcattgagcaggttcgtcgctagtatgggagaacgagggcaacctttcttcgctctgctgaagaagcaagacaaatttgtatggacacaggaagccgaagaggcattcgttgcactcaagcgctacctatcaaccccctgtacttgttgccccccaacctaatgaagaattattcctctatattgccgccacgccatattccgttagcaccatcatcgttgtcgagagagagaaagtacaacgaccaatctactacatcagcgaagctctccacgacgcaaagacaagatatccacagatccaaaagcttatttacgcggtcatcatgacatcaaggaagctacgccactactttcaagcccacagagtcacagttgtctcctccttccctctcggtgaagtcgtgagaaacaaagacgttgtcggccgcattgcgaaatgggtgttcgagctgagccagtttgatgtccactttgcgccacgaacagccatcaagtcccaggtactcgccgactttgtagccgattggactatgcctgataacaaatcagacaaccaagtcgacaacgaaacgtggactatggcgttcgatggtgcactcaacagccaaggagcaggggcaggatttatcttgatgtctccctccggagatcaattcaagcacgcaatccacctcaacttcagggcgaccaataacacagccgaatacgagggactactcgccgggataagagctgcagccgcacttggggtcaagcgactaattgtgaaaggggactccgagctagtcgcgaaccaggtgcacaaagattataaatgctctaaccctgagttatccaagtatcttgcagaagtcaggaaactagagaaaaggtttgatgggatcgaagtcagacacgtctaccgcaaagacaacatcgagccagatgacctagcacgacgtgcatccagacgagaaccgctcaagcccggcacttttctggacatcctgacgaagccatcagtgaaagaggttagcggcgaagttagcccggacacccccgacattagctcggaggccacaaaggcagaacgcgccgttgccgatatcgagacccagacgactggcgcatcccactaatcaaattcatcaacagcgaggagctgcccgaggatgatacagaggccgagaaaataacccgtaaagcaaaaatctactgtatggttggcgacgatctatacaagaaagcgccaaacggggtacttctcaaatgcgtctcgtccaacgatggcagacacctcctccttgatatacatgaaggcatttgtgggtcacacgccgctggtcggacattggtcaggaaagcttttcgacaagggtttttctggccaaccgcccttaaagatgcatgtgacatgtaaacacacaaagctacccgcgcaagcgctccagactatccctcttacttggccgttctcgtgctgggggctagatatactcgggccattcccacgaggacagagcggctacaggttcctattcgtggcgatcgacaaattcaccaaatggatcgaagcagtacccacgggggaaatcaaggccgacaacgccatcaaattcattaaggggatattttgcagatacggactaccgcaccgcatcataaccgacaacggctcccagttcatcagcgctgatttccaggattattgcatcgggctgggagtcaagatatgcttcgcctcggtctcccaccctcaaagcaacggacaagtcgagagggcaaacggtatagtactacaagggatcaaaaccctactatgggccatatgcaccacaccgacaacgtccaaccaggaaacacccttcttcctcgtgtacggctcagaggccatgctccccagcgagctacgacatcagagtacacgagtacagaagcattccgatgaggaccaggaggagcagcgaaacatcgatgtaaatctactggaggaacatcgcgaacgagttgccattcgagcagccagctatcaataggccctccgccgttaccacgagaagcgcatccgagcacgcatactttcgatcggcgactacgtcctccgatgggttcaaagccaagcatggcgaaacaaactctcacccaaatgggaaggaccttacacgatcacacaagtcttgcggccaggcgcattcaaaattgtagacggcgagggtcgcgagttagcaaattcttggaacattgaccaactacgtaaattctgtgta

SEQ ID NO: 78865 - DNA, 549 bp, Oryza sativa
  unsure (1)..(549): unsure at all n locations
  Clone ID: PAT_MRT4530_78630C.1
aattgtaatacgactcactatagggcgaattgggtaccgggccccccctcgagttttttttttttttttttacaaaatttntatcctcccttgnatacngactncgnntnaaatcacctcccaatgtcanaaatntggtatnataantnacncaantccnatactctttnnctctcctctanctatnacgtctcgctttcggactcagtccatannccngtgtactgntgttgttgaaancnnagngtcagtgcntngnnnncnncnctcnngtcgtnctnnatgngtcgggcccncccccatnatatcctantnccctnntnnangggacaactgggtgggntnngancactnattntttccctaacgggtggcgactaaggcgattaagttctctcattgaggnccangangntgacnacngcctgcacancaaccccaacanngganaaatgttgaagaangattactttagtccttcgcantgacncgcaaangtntctgtccncttnaagcnaanggtcnagtcccctgggtccttancagccc

SEQ ID NO: 78866 - DNA, 516 bp, Oryza sativa
  Clone ID: PAT_MRT4530_78631C.1
ttgattcatgcagaacttgacagtggtagagaactttattcccatccaacgttcgggggaagccgtagccgtgtgtcgcgttcatctttcatggaaaaatcccaaagaaagcgaggaccagatcatctgctgattcttgtccatggtatcattgcaagccccagtgactggacctatggagaagcagtgctaaagaagaggttaggtgacaattttttcatctatgcaatgaaggatgcaagtcaaagtgctgcttgtatagctcctacaactggagggtctgaaaagttggagtgcacttcaggattaggtgcaattgctgggctggaaccaattaattttattaccttagcaaccccacaccttggtgttagagggaaaaatcagcttccatttcttcaagggctatctattctagaaaagattgctgcacctttggctcccttggtgttggccgcactggtgcccaactctttctcacggatggtgaacctagcaagccacctcttctgctag

SEQ ID NO: 78867 - DNA, 576 bp, Oryza sativa
  Clone ID: PAT_MRT4530_78632C.1
atgacgtcagcacgacggccggctcgggaccgcgatctcgccggcgctagggacttcggcggcggaaacggagaccacctacgcgtagagggcaacgagacgaaccccgacggcggcgctccggtggtcgacggcggaaacggaggggcggccgagcttcttctcctcacggcgcacctaacggtgatggcggcgaccgacggcgacgacggagacggcggcgcgacgatgccgaagatgaccggcggcggcggcggacttggggagcgtcgcgacggcgctaggagacacgggaggactcgggagagggggcaaacgaaagaggagatcacggggaaggaagaggagaccgagaggaacaaaacccctcaatcaatcggagaagacggagtcggattcggccggatttggggcgggaaacggcggctagggttcggctcggcggcgcccggccggaggttgacgaagggcctgacagcaaatgaaagctctattcgcaggagcggagttggcaacatcggggaaaatgaaaggttggctacctgcgcgagcgctgggcacatccacgtcggatag

SEQ ID NO: 78868 - DNA, 697 bp, Oryza sativa
  unsure (1)..(697): unsure at all n locations
  Clone ID: PAT_MRT4530_78633C.1
atccagattatgtttcttcaactatttgttatatggttccctccagtcattcttttgtacagcagcgtgctcactatttgtttgctaaaatgttgaccatgcatttgttgaaatactcaataaaaatttgttcgaccactgccaccatggtcactattaggggctccacaccgatatcttcagcaagattgggtaaaatgtcttgctgctgatgtcagtaacattttttttcttcatgtgagttgctaattgttcctcataaggtccttgcaggttcaagaaatacaggattcatgtgatgagaaaaaggaaaatagggttcaactgaactctgaatctaaagaaaaacgaaacatacggcaaaaaaatatggcaaaggccaacataaaggattttgtaggatgtgggctttcatgaagaaggtttgcagctcagctaagttgacgcgggggcagtaagcttctgcaaacctgggctctattttgcacagggagaacacaatagcagaggctaccatgagaagatctgataaatttccatttgagaggctcggttattgatgtttcctaaggatttttagggtttatttggatttatttataggtgtaaatactgcaacgtgtcaaactgaataaaagaagtgcctcattntgtctcaaactgtagtagtaggctaagatttcagattttttagcta

SEQ ID NO: 78869 - DNA, 618 bp, Oryza sativa
  Clone ID: PAT_MRT4530_78634C.1
atgctggctcagcaccctctcatgttcaccagctccctatatcgctgtcgttgcctcctctcctccgctctccttcccaacaccgaccttgttctccgcctccacctcaatccctgccacaacgatgacgcgcatttcgttgccggtgacaccgggggggaggcaaggagagaggagaggaggcggcggcgaggcttcctcacctctgctctctccctgttcccgccaagccactctgccgagctcccggttgctgacaccaacaccgtcgatgctgccatcaacccgctgtcctgctgctcccgtcgctccgccgagttctcgctgctcctgctctctccatctcaatcgacgtcgagtataaagagggaagagagaggagctgaagaactgacaaatgaggagagaggaggaagaggggagggtcaatcaatcgatcgaatcgagggggaacctggcaacaacggcaacgcacagagagagggttttgaccatttggaggtcgtgttggaggccacgtgctccggtggccgcgccaccaccccccacccatcgatgcttcaattatcggtggattcctcctttgctgctgccgccaccacgcccgagaaaaggtag

SEQ ID NO: 78870 - DNA, 1775 bp, Oryza sativa
  Clone ID: PAT_MRT4530_78635C.1
cgctttctttcctccctttgtttgtgcttggttgcaacccttcctcattccaaaaataataataatgtttcactaatttattttcaactgtacgtctgtgcgaaagaaaaaaaaaagcttttgtggacaaaaatacagtaactagctagttttctatatccacactaaacacatcgaacatactccatccgtcccaaaaaaaaaaaaaactcaacatagaaggggatgtgacccctcctagaacaacgaatctggattatccttaggttgagtttttttttttgggacactgcttactactgagacaagtcctacactcctactagagaggcaaaacctttgctttggttatttaggaaaccatagttattatacttctgaccatgcagcacaggggactgaagatcttataagttggcacggaaatatttccgtgactcctgctgttttatgctgtccgccacatgggcgatgacgccggcaccggcattgtgaagccactcattcttaacatgtatgttgttatgagcaaagtaaggccatagtgctgtatggaagttgacatctactttcttccaaccgaccctctgcaagccatggatcatctcctcttccatcatttcgtgatattcttcagtgttttctttgtttggtctactctgtgcagcttctttggctctggcagcttgcagagggaaatgagggccatcagatgatataggcgaacaatattccatattcacaatgtgcttgtagccatccagtgaacgatgtgagggctgcatatggaggaggaaaaaaattactttgtaaggtctttttctcttcttattgaagatgttcgccatccgaccatatataaattttttatcctcatgatcagatgccatctctagcagaagaggtggcttgctaggttcaccatccgtgagaaagagttgggcaccagtgcggccaacaaccaagggagccaaaggtgcagcaatcttttctagaatagatagcccttgaagaaatggaagctgatttttccctctaacaccaaggtgtggggttgctaaggtaataaaattaattggttccagcccagcaattgcacctaatcctgaagtgcactccaacttttcagaccctccagttgtaggagctatacaagcagcactttgacttgcatccttcattgctgttgaataaaggatagaaatagcatatcgcgcaaacaaaccacccaaagaatgtgctaggaaggaaatctttctcaatccagccatcttctgaatcacatccaatacttcatttgctaaccttcttccagcaacatcaatcccatcgaaagttttggtgtagatatttgacgaactagctgcaatgatatagttcactgtaagttttatggctagaaacgaattgttctcatttgcaaagtgcaaaccaatgtagctaccatagatgaaaaaattgtcacctaacctcttctttagcactgcttctccataggtccagtcactggggcttgcaatgataccatggacaagaatcagcagatgatctggtcctcgctttctttgggatttttccatgaaagatgaacgcgacacacggctacggcttcccccgaacgttggatgggaataaagttctctaccactgtcaagttctgacggccggccggaggcggcggtggaggggcggaggcggaggcggaggcggcggagttggtggctataataggaggagaggtggtggtggcaaggagaggaaagcgtggacgccat

SEQ ID NO: 78871 - DNA, 517 bp, Oryza sativa
  Clone ID: PAT_MRT4530_78636C.1
ttttttttttttttttgaaaatcaaactccatgtttagaaacggcatgcagaaaggtatgctttttgttacatacatagatctggcaagtcctaatgccacaatttttctctctcaaatatatactagtatccctaaagtgcaaagcatgaagttagaacagatcagaagaaatggacatggacagcggaagaaatctcaaatcaagtcacaaaatcctacatatcataagcagaacaactctactaccactctccaaatttacagcgcacagtaatttttcaaacaatggacactcctatgcatttcacgcatacgtacatcatcatcaaaacgccgccctcgctgcgctgcgtgcagcctcgcgcttcatctcggcctctttcccgctgccccggaagtaaagatacacacgctgaataacccacatgctgagcagcgactccaggcaaaacattgcgaatccaagaaaataaaacaccccaacgataacagtattgcctattaagctgattgct

SEQ ID NO: 78872 - DNA, 3312 bp, Oryza sativa
  Clone ID: PAT_MRT4530_78637C.1
atggccggcggctcctccccctccccggccgccgcgcccatccaggtgcgctgcgccggatgccgcggcgtcctcgccgtcggcccaggcatgaccgagttcatctgccccaagtgcggcatggcgcagcgcctccccccgcagctgatgcccaagccgccgccctcctcctcctcctccgccgccgcgacccccgcgcctcccgccccggcggcaccgccgccgcctacgtcccggagaggaggcggaggcggcgcggcccttccgcccccgcaggcgcagggggtggaccccacgaagatccagctcccctgcgccaactgccaggccgtgctcaacgtgccccacggcctcgcccgcttccgctgcccgcagtgcggcgtggagctcgccgtcgacctcgccaagctgcacaacttcctggcctcctccaacaacaacgccgccgcggcgccgccggacaacgtcccgccggcctcgggacccgcgtcgcgggcgcctttggtgcctgcgcctccgcccgccccgttcccccccgtgccgacgccaggcatgacgcaggcgccgcagatggtgcctggcgcgttgatcccgatggtgcttcccatcactgatccgcctgaggagatcaacgaggttgcaattgatgttgagcgtgaagaagatgaaggtggtactgttggagaaacgttcactgactataggcctcccaaactctctcttggtctgcctcatccagatccaatagtagaaacttcttctttgtcagctgtacagcctcctgagccaacttacagcttgaacatcatggatgaattggatgagacaaaggccttgtcttgcttgcaaatcgaaacattagtttatgcttgtcagcggcacctttatcatctccctactggtgatagagcaggttttttcattggtgatggagctggtgttggtaagggccggacaattgctggattaatatgggaaaattggcaacagggaaagcataaggcagtgtgggtatctattggctctgatttgaagtatgatgctcgaagagatttggatgacgttggtgcaaaatgtgtacaggtgcaccctttaaataagctaccatattctaagctagactcaaaggccattgggatcaagaatgggtgccacaaggccaaaaatctcattcctgatgcagggagccagcccactcgcactggatctctcgagaaaggtggtgtgggcgctcttgaacttgttgccatggacatgaaagccaggggtatgtatgtttgccgcacactaagttataagggggttgattttgatattgtggaggctccccttgaggaaagaatgatgaatatgtacagaaaggcagccgaattttgggctgagttccgccttgagctcctatcagcaggtgaatcatttacagaaggcatttcaaatcaaatatggcggctatattgggctagccatcagcgtttcttcaggcatatgtgcatgtctgcaaaagtacctgctgttgtgaagttggctaaggaggccctggcagagaataagtgtgtggtggttggtcttcagagcactggagaggctcgaacagaagaagctatcacaaaatatggtgttgaaatggaagactttgtttctggtcctcgggagctgcttctaaagctggtagaagaaaattaccctctacctccgaagcctgattcttttcaacaaggtgaagaaaaagtcacagaaattcaccgtaagcggcattctgccccagatgtatcatttaaaggacgtgttagaaaagtagcaaaactggtagaagtgagtgatgatgacagtgatgattactctccatctgagtcagatcatggatcgacagagtctgatgaggagtttcacatgtgtcaaatctgtaacacagaggaggagaagactctgttgcttcattgttctggttgttctcgacatgttcaccctggttgtctgacaccaccttggactggggtattaactgatgactggtcatgctacacatgcaagaagttagaaggagaggaaaatgaacaagatgctcatgtagctgatttttcacagaggtatgatgctgcagtagagaaaaaaaagaagattttggatatgatacgttctttggatctccctaacaatcctcttgatgacatcattgatcagctaggaggccctgacaatgttgcagaaataactggacggcgtggtatgctaataagagcttctgacggaaaaggcgttgtttatcaggcgcggaatgcgaaagaagtgtcgatggagatgatcaatatgcatgaaaaacagcagttcatggatggcaaaaaactaatatctattatatctgaagcaggatcagctggcgtttcgctgcatgctgatagaagggcaaaaaaccagagaagaagagtacacataacacttgagctcccttggagtgcagatcgtgcaatacaacagtttgggagaactcatcgttctaatcaaacttctgcaccacaatataggcttctctttacaaatcttggtggtgaaaagcgatttgcatcaatcgtagcaaaaagactggagtctctaggagctttaacgcaaggagatcgcagggctggaccttctctgagtgcttttaactacgacagcaattatgggaaaaaagccctaaccatcatgtatagaggaataatggagcagagttactttcaagatgaccaggattcttttccagttgttcctccggggtgttctgacaatcaatctagcatccaagagttcattgctgaagcaaaagctgctctagtatcagttgggattatcagggatgctgtagtgtgcaatggaaaagttgctgggaagctttctggtcggattgttgactcagatatgcatgatgttgctcgttttcttaaccgccttttgggactggctccgaaaatccagaatagaccgttcacattgatagcttgtcaggcgcgtcaactgtactttttactttcaccattgaccgaggagttacttgggaggcaaaaggatggtgctggttcttctaatgatgggttttacgagtccaaaagggaatggatgggaggaaggcatttcatacttgcttttgaaggctcaatcgaagggatgtataaaataattcgacctgctattggtgaagcattaagagaaatgcctttaacagaactgaaaagcaagtacaggaaagtgtcatcaatagaaaaggttaacaaaggttggcaagatgaatatgatgcttcgtccaagcagatactgaagagaatcagaatcagttaa

SEQ ID NO: 78873 - DNA, 247 bp, Oryza sativa
  Clone ID: PAT_MRT4530_78638C.1
cacatacacaaaacaatctttatatgtcagaaacatcatttacataaagctagaaaccacatggctttccagccggaacttttgacacctgatggacacatggttgacacaaacacacacgcacactgatggattcagtcacactgacacaggcatgagctatgacactggatggactctctatatgttcatactgtagacaggctggtgcattgacaattcagtcatagatcgccttggccttaac

SEQ ID NO: 78874 - DNA, 492 bp, Oryza sativa
  Clone ID: PAT_MRT4530_78639C.1
atgttagcttccctaattattttcacccttcttctccacccctcgtctctctctctccctttcttcttcttctcctctcatctccgcgggccgaacccgtgcggcggcggaggcgttgtggagcctccgccgcggagaagggaaggcggcggcaaggagggcagtcggccagcgggaattgcgggagtggcgtggatggcggaggcgctgtggagtccgcgcggcggagatgggaaggcggcggcgagagaggcgatcggtcggcaggagctgtgtgtgcagcggagatgggaagggcgtggcgagggaggcggtcggccggcgggaacggagcgggcggcggaggccggcggcaatgacggcgtggcggaggaacggcacgcagaacggcgggacgatcgaggagatggcggacggagagagaaatgggtgggcccatgcgtggggcccatgattggcaagggaattttggtggccatctttggccagtga

SEQ ID NO: 78875 - DNA, 4539 bp, Oryza sativa
  Clone ID: PAT_MRT4530_7863C.1
atgccgatttcagatcgatttgttgggataatcgacatcgatccccatgaaccatcagtcttgcacctactcgaagactatggatcatcgacaatgagtacgccgcgtgaggtattggctatcgacgatgtcggcacgtcagcgcgcaccggtgcggaagcggagaatcaagtgactactccggcccagctcatcagagccgtcaacgcaatactgagggaaaccccctacgatcacgttctgaacgacgatctcgcacgttggacaaaacgactacgggaatcagtgaccaacctcagcaatgcgttcgaagagaccgctgctgcagcgcacccggaacagccaccaactggcgatgctaatggtgaaaaccctgaacagcgggaatcgcctcatcgagccacccctccacctcgcggcaccggtgatctccgagatcacctgaatggccgtcgagaggcgcgacgcacacgagataacgagaaccattcccggtgtcatatttcttcacggcgtcacaataacgaagatcgaggaggccgttcaagcgaagaccgagaccgtgataaccgccacaaccgccacgatcacgacgatcgcgaacggcgggtgctgggcgatactgatagacatccacgaagaacgtatgatcgccgacaactcaccgcccctagcgctgggtgtagatctttcggtcgttcacttcgggatgtccgatggcctgaaagattccgacctgtagcaatagagaaatatgatgggagcactgacccggaagagttccttcaggtttactccacggcaaacttatggcagcagttcgtagccaacttccaaggaacttacaagcgccacgcgatcgaagacgacctacatgcgttgacacagaacccgggcgaatccttgagggattatgttcggcactttaacgagtgcagaaacacaatccctgagatcaccgatgcttctgtaattcgcgctttcaaatccggtgtcagagatcgctacactactcaggagttgacaacgaggcgcatcacgactactcggagattattcgaaattgtcgatcaatgtgctcatgcggatgacgcactgagacgcaagaacgacaaaccaaagaccggagtagagaagaaaccagccaaggacgcacttgagtcgaacaagaagaaaaatcgcaagagtgggaaaaggaaagctaaatcggaaattctcgcaacagaatacgcggaccctcccaagcgcccagacccacaaggcagtgacacgaagaaagcatggtgctctatacacaagacggacagacattctctagaagattgcctcgtcttcaaaaagtggctcgcaaaacacatggcatcggaaaaaggcaagcgagtacgcgtggttgagaaggacgctgaggcgcctactcaagaattggactcagcatacccagactccgatgtccatgtctcacacatcttcggaggttccacggcatactcctcaaagcgagaatacaagaaagtggaacggcgatatccaattgtggtcgaacccactattcgtaatatcaaggttgcccgagtactgatcgacggcggcagctcaatcaaccttctcttcgccagcgccttggacgcgatggggatcccacgaagtgagttgacacccaccgatcaacccttccatggaatcactcctcagtcatcgtccaaaccattgggcaaaattacgttgcctgtgactttcggccaagcaaacaacttccgaacggaacagatcacctttgatgtcgctgaattcgatacagcatacaatgccatcattgggagaactgcactcgcgaagttcatggctgcatctcactatgcgtatcaagtgctcaagatgccaggaccgaagggaacaatcactattcaagggaacgctaagctagcagtacaatgcgacaaacggagcctcgacatggtcgagcacacgcccagcccgcctgccacaatagagccacccaagaaaccgtccgacatgccgggggtactcagggaggtgattgagcacaaactcatggtgcgacccgatgccaagccagtaaagcaaaaactgcggagatttgcaccagatcgaaaacaagccatacgagaagagctcgacaagcttctcaaagccggtttcatcagagaggtactccatccagagtggctagccaacccagtcatggtacggaaggccaacgggaagtggagaatgtgtgtcgacttcaccgacctcaacaaggcgtgtcccaaggatcattttcctcttcctcaaatagaccaactggtggactcaacagccggttgcgagttgttgagcttcctcgacgcttactccgagaagtgcacgttcggagtaccattgggcaagctactcggcttcctcgtctctggcagaggaatagaagcaaatcgcgagaagatcaaggcaatcgagaacatgaagtcgcctacaagactcaaggaagtacagaagctaaccggatgcatggcagcactaaacaggttcgtcgttaggatgggagagcgaggacaacctttcttcgctctgctaaaaaagcaagacaaatttgtatggacacaggaggccgaagaggcatttattgcactcaagcgctacctatccaatccacctgtacttgttgccccccaacgtaatgaagaattatttctctatattgccgccatgccatattccgttagcactgtcattgttgtcgagagagagaaggtgcaacgaccagtctactacgtcagcgaagctctccacgacgcaaagacaagatatccacagatccaaaaactgctctacgcagtaatcatgacatcaagaaagctacaccactactttcaagcccacagggtcacagtcgtctcctccttctctctcagcaaagttgtgagaaacaaagacgttgtcggccgcattgcgaaatgggtagtcgagctaagccaatttgatatccacttcgtaccacgaacagccatcaagtcacagccgaatatgaaggactacttgggagtcaggcgactgatcgtgaaaggggattccgaactagtcgcaaaccaggtgcataaagattacaagtgctctaaccccgagttatccaagtatctcgcagaagtcaggaagctggaaaaaaggttcgatgggatcgaggtccgacacgtataccgcaaagacaacatcgaaccggatgatctagcacgacgcgcgtccagacgagaaccacttgaacctggcacctttctggacgtcctgacgaggccatcagtgaaagaggcaaggggcgaagatagcccggtcacccctgacaccagctcgggggctatagaggcagagcgcgccgttgccgatatcgagaccacggacgactggcgcaccccactcattaaattcataagcagcgaagagttgcccgaggacgacgcagaagccgagaaaatatcccgtaaagcaaaagtctattgtatgatcggcaacgatctatacaagaaggcaccaaacggggtactcctaaaatgcgtctcgtccgacgacggcagacacctcctcctcgacatacatgaagggatctgtgggtcacatgctgtcggtcagacattagtcggaagagctttccgacaagggttcttctggccaaccgccctcaaagacgcctgcgacatgtgctgggggctagatatactcgggccattcccacgaggacagggcagctacaggtttctattcgtggcgatcgacaagttcactaagtggattgaagcgacacccacgggggaaatcaaggccgacaacgccatcaaattcatcaaagggatattctgcagatttggattgccccaccgtatcataacggacaacggctcccagttcatcagtgccgatttccaggattactgcatcaggttgggagtcaagatctgcttcgcctcggtttctcaccctcagagcaatggacaagtcgagagggaaaacggcatagtactacaaggactcaagacccgcgtctacgacaggctcatgtcacatgacaagaagtgggtcgaagaaattccatctgtactatgggccgtgcgtaccacaccgacaacatccaacaaggagacacgcttcttcctcatgtacggctcagaggccatgctccccaccgagctacgacaccaaagtacacgagtacataagtactccgatgaggatcaggaggagcagcgaaacgacgatgtgaatctactcgaggaacatcgcgaacgagttgccattcgagcagccagctaccaacatgcccttcgtcattaccacgagaagcgcatccgagcacgcacgctttcgatcggtgactacgtcctccgacgggttcaaagccaagcagggcgaaacaagctctcacccaaatgggaaggaccgtacacgatcacacaagttctgtggccaggcgcattcaaaattgcagacggcgatggtcacgagttggcaaattcctggaacattgatcaattacgtaaattctatgtataa

SEQ ID NO: 78876 - DNA, 631 bp, Oryza sativa
  Clone ID: PAT_MRT4530_78640C.1
ggggtggtgcgagaaggattggctgatggttccccccttcactttccttgctctcagatcggggtgcccgcgtgacgtgatgcgagccactgggctgaccacgatgtgtttgtggaattgcctcgccgagggaggcggcggcatacaagtgtacaaggtggcatcatgttgaactctctcctttgctaccaatatggccaagcattctttgtgcatgcaggtggtaaacaattcagatcaagattacagtcaccttccagaattagatctcagtgtcatgctcaatcagggtactcttcaccaatcacaagaccaactcctcatcaatcatacaagccctgtaaggagtccgtctgactgtggtgtcaggtatcatcgatgtttatggtcgcgaggactgaggactatggtagagacttccaccgatcttgaaggcactctggaccaagtgtcaggaatattctctttgtgggttgatagggcgaaatggaccgttcaagggggaacaactataggaaaggatcctacagtcgttgagaccctgagaaatgaatgcaaaaagggaataacctgcatgctcgaggagattcttgcaggacaggctgaggttgaatttttctgcaggcaatga

SEQ ID NO: 78877 - DNA, 1493 bp, Oryza sativa
  Clone ID: PAT_MRT4530_78641C.1
tagtggatccccgggctgcaggatcggcacgaggctttaattatatatactcgctgcgggacgcaccaccccctctccagaattccgccagagagagcgaatcagccactgcacttcttgttcttgttctcttcctcctcccgaatccgatccatccattggccgccgccgccgccgccgcctcgtgcgtcgcgtgttcgtgtccagagacgatgggcagcctcgccgccgagaagaccgtcaccgggtgggccgccagggacgcctccggccacctcaccccctacaactacaccctcaggaagactgggcctgaagatgtggtggtgaaggttttgtattgtggtatctgccatactgacatccaccaggccaagaaccaccttggtgcttccaagtaccccatggtccctggccatgaggtggtcggcgaggtggtggaggtcgggccggaggtgaccaagtacagcgccggcgacgtcgtcggcgtcggcgtcatcgtcggctgctgccgcgagtgccatccgtgcaaggccaatgtggagcagtactgcaacaagaggatttggtcctacaacgacgtctacaccgacggccggccaacccagggcggcttcgcctccgccatggtcgtcgaccagaagtttgtggtgaagatcccggcggggctagcgccggagcaggcggcgccgctgctgtgcgccgggctgacggtgtacagcccactgaagcacttcgggctgatgtcgccaggtctccgcggcggcgtcctggggctcggcggcgtggggcacatgggcgtgaaggtggccaagtcgatggggcaccacgtgacggtgatcagctcgtcggcgaggaagcgcggcgaggccatggacgacctgggcgccgacgcctacctcgtcagctccgacgcggcggcgatggcggccgccggcgactcgctggactacatcatcgacaccgtgccggtgcaccacccgctggagccgtacctggcgctgctgaagctggacgggaagctgatcctgatgggggtgatcaaccagccgctgagcttcatctcgcccatggtgatgctcggccggaaggccatcaccggcagcttcatcgggagcatggccgagacggaggaggtgctcaacttctgcgtcgacaaggggctcacctcccagatcgaggtcgtcaagatggactacgtcaaccaggccctcgagcgcctcgagcgcaacgacgtccgctaccgcttcgtcgtcgacgtcgccggcagcaacatcgacgacgccgacgcgccgcccgcctgatcgccgccgtgcaccctcatggcagcatccgtatgatccgttcttgaacttgtttgtgtgagactctgacgacttgtccatgtaacgtccgtgtgcctttccggtataaattcggcctcgcaatatatggaccattttgcatttccgatcaaaaaaaaaaaaaaaaaaaaaaaaaaaaaaaaaaaaaaa

SEQ ID NO: 78878 - DNA, 339 bp, Oryza sativa
  Clone ID: PAT_MRT4530_78642C.1
atggccggtttcgtgcgttctaatccaaccctagctttggagtttttcatgcgacgcatacattgcagtggccccaacctcatgtgtgcatattatgcagatgcagcagaagctgtactaactcagcagcagattaagcaagctgctgtcaggaccattttcccccagtctcttgctatactattcagcaacagattaagtaacctgccaggaccatttcatactagcagctctttctttggtggtaataaatggtctagcaggtcagtggtaagtggtcctactaatcagcttgcattgcattgctgctgtgctgcctctccatcatccaaacctgag

SEQ ID NO: 78879 - DNA, 493 bp, Oryza sativa
  Clone ID: PAT_MRT4530_78643C.1
tgcccacagcgacccagacccactcgccgtcgccgccgccgcctccgcctactccctcccgcgccgccgccctccggttgtcttcctcgcggttgcggcttggcggctacatggggaagaagcgcggcggccatggccatgccccggcggcgccgcccagggccgggaaccaggcggtgtcgctccgcgaggagagctccgggaagacgcgcgctgacgcggcctccctgctgagggtccagcacctgcagcggctggcggcgtgggcaggcggggaggccggggcgggccccctcggcgccctgctggggcgacgcctcgccgccaacgccgaggcggccgggatacctctggccgcctccaccttcctatgccagagccagtttaaggacttgtccggctagttcaactgcaccatccgcataaagaacaacacaagaaatgccaagcgacgcaagatgttaaacacttgccagaacagcatttcctacct

SEQ ID NO: 78880 - DNA, 2952 bp, Oryza sativa
  Clone ID: PAT_MRT4530_78644C.1
atggcacggggctccgtttcgcttgacggctgggtgctgccgccttcccgcatcgtgagcgagagacaggccgggctgccgcgccggttcatgccggaatctgccaccgggcgggagatagtctcgctggtcgagggacgcccggcgccacgctacccgaggcgggccatcttcttcctcccttttgcaatggcagggctgggtccgccattttcttctttcttcatggatgttctggagttttacgatctccagatggcgcacctcacccccaacgcggtaatgacattggccatcttcgcgcacctatgcgagatgttcatcggggagcgcccatcccttcggctgttccggcgggtcttcaccgtacagccggtgtcgccgccgtcggtggttggtggttgctacttccagccgtgggggccggtgctgaaccgctacattccctgcgtcctccgcaagaagtgggatgactggaagagcgactggttctacaccccctcgccgacgaagcgcgcctccgacttccgagccagcctccagcgcaggcctccaactggcggtcgccgctccgcggaggcatccctcatcccccaaggagtcctccccctctgcagcgatccagatcgcgccaacatcctgaccatcatgatggcggtcggggcctcggaggagcgagctcctaagggccatgacggtgcgagcgggagccgcaagggagatcaatctaccccaggagggggtcgtgcttctgggccccgtgatgggggctcggggggcagccgccctgccgacgcccgagggaagaggaagcaagagggtttttcctccccatctcctccccgagggggcggggtggcgcgtgtcagcagcaggcgcccggagggggccgcgccgacgccgcagcccgagggggagcggaagaagaaacggctccgcaagatggggggaacagaaccatcccggggaaacctcatttcccctccaaggtggtcgtttaaccgaccccctcgcagcgagatcccgtcgcgtccttcttgccaatccaagtccggccaatctgaggccgagaatgcggcgaccacggaggctcggaggcgggaatctgaccggcgagaagccgcggatcgcctacgggaagccgaggaggccgcccggggggccgcccgggctcgccaggctgaggaagccgctcgggaggaggccagactccgccaggccgaggcgacgacatcctccgaggcaacccgcgaaactgatcggcaagaagccgcggatcgccttcgggaagccgaggaagctgcccaggtggccgtccgagctcgccaagctgaagaagccgctcgggaggaggccagacttcgccaggccgaggcggcgacgacttccgaggcagctcgcgacgaggccgcgggcgcatcgcttgggcccactccttcgggcgacgctcaggacaagccaggtccgggggacatccctgagtccggcacgtccatcggcgggctgagccgcgcggcatcctcactgaggcggctctcccccacgccttccgctgccccactgagcgcagaaccccttctgcaggccttggccgtcgcaaacaccacggtgttggacgggttaagtgcccagatggaggccctgcaagcagagcgggcggagctcgacgccgcatgggcgcgtgtcgaagaggggcgacgctcagtggaggccatggtggaggtgggccgcaaggcacaccgccggcacgcctcagaactcgaagcccgtcggaaggtgctgggggagatcgccagggaggtggaggaggagcggggggctgccctcatcgccactaccgtgatgaacaaggcgcaggacgacctccgccttcaatacgggagctgggaggcggagctagggaagaagctcgacgccgcccggggggtccttgacgctgccgctgcccgagaacggcgggcggcggagaccgaggtggcatcccggcggcgcgaagaagcccttgaggcccgtgccatggcgctggaagagcgtgcctgcgtcgtggagagggacctggcggaccgcaaggccgccgttgctattcgggaggttacactggcggcgcacgaagccgcctgtgccgaagaagagtccgcactccgcctctgcgaggatacgctcaccgagcgggagcgagccctcgaggaggccgaggccgcagcgcaaaagctggcggagagcgcgtccctccgcgaagctgcgcaagaggaacaagcgcgtcgcaatctggaaggtgcccgtgccgagagggccgcactgaaccaacgggccgctgaactcgaggcgctggcaagggagctggatgcaagggcgcgtagcggcggggcggccacgggcgacagcgacttagccgcccgcctcgcagctgccgaacacaccatcgcggatctgcagggcgcgctggattcgtccaccggggaggtcgaggcccttcgtctggcaggcgagatagggcccagcatgcttcgcgacgccgtgtcccgtttagaccacgccgggcggcaggcgggcctctggggcgggcggactgcgaagtacgccgccaaccaggggggcctcgcccagcgcctctcggagatggccgggactctccaacggctccccgaggagctcgagaggacgattaagtcatcctcgagggaccttgcccgaggagcggtggagctcgtactggcgagttaccaggccagggaccccgacttctccccatggacggcgctggacgagttccctcccgggaccgaggacggcgcgtgcgcacaggtctgggacgccgccaaccatatcgtccacagcttcgagggttcggcccctcggctcgcgtttgccctcaactccgatgaggaggacgatgacggcggagtgggcgatagtggcgatgaggctggcgacccgggtgcatcggagtga

SEQ ID NO: 78881 - DNA, 486 bp, Oryza sativa
  Clone ID: PAT_MRT4530_78645C.1
ccgtcgcccagaccgcccgcgcctcctcctttgccttctgccgtcgtgcctcctcctccgccttctgtcgccgcgcctcctcctcctccttccgccaccgcgtctcctcctccgccttccgccgccccaccacctcctcctccttccgccgccgcgcctcctcctccttctgctgccacacctcctccttcgccttccgccgccacgcctcaaccgcggtgccctatcaccagggaagtcgccgccccctacgcctaaaatgagctcggtcgtcgtcgctagcacaccaactgtgctacccctccaaaggtacagatccctcctcccccacccctttcccctttaatctctcccccatccctaatatctcctcctctctgctcatcagtcgccccgccacacacagccgatcatcggggaagacctcgctgcttggcacctcccctctgccgccaatcagaatgagggaaatgctttcctagattc

SEQ ID NO: 78882 - DNA, 3027 bp, Oryza sativa
  Clone ID: PAT_MRT4530_78646C.1
atggcacggggctctgctccactcgatggtagcgtgctgccgctttcccgcatcgtgagcgagaggcaggccgggctgccgcgccgcttcctgccggaatctgccaccggccaggagatagttacgctgggcgagggacgcccggcgccacgctacccggggcggaccgttttcttcctccctttcgcaatggcagggctggttccgctattttcttctttcttcatggatgttctggagttttacgatctccagatggcgcacctcacccccaacgcggtaatgacattggccatcttcgcgcacttgtgcgagatgttcatcgggattccctgcgtcctccgcaagaagtgggatgactggaagagcgactggttctacacccccctcgccgacgaagcgcgcctccgacttccgaaccagcccccggcgcaggcctccagctggcgggcgccggtagatctgggagatggctacgacgccgtcctcgaccgcctggcgggcctgcgatcccaggggctcacaggggccatggtgtacggcgactaccttcgtcgccggatcgcaccactccagcggcgcgcccggggtgcctgggagtacaccgggtccgaggactgtatgaggacccaccggggggtcaaatgggactgggtccctgaagacttcaaggtaatgatccaacgggtgctgaatctcagctccgcggaggcatcgctcatcccccaaggagtcctccccctctgcagcgatccagatcgcgccaccatcctgaccatcatgaaggcggtcggggcctcagaggagcaggctcctcgaggccatgatggcgcgggcgggagctgcaggggagaacaatctaccccaggagggggtcgtgcttccgggctccgtgacgggggctcggggggctgccgccctgccgacgcccgagggaagaggaagcaagagggttcctcctccccatctcctccccgagggggcggggcggcgcgtgtcagcagcaggcgcccggagggggccgcgccgacgccgcagcccgagggggagcggaagaagaaacggcttcgcaagatggggggacagaaccatcccggggaaaccttatttcccctccaaggtagtcgtttaaccgaccccctcgcaggttcgtcccacgcccattgtggctgtattcattctcccaacgcgagttttcactcacccatcttgtttgtcttctggtctttcttctgtttcagcgagatctcgtcgcgtccctcccgccattccaagtccggccagtctgaggccgaggatacggcgaccgcggaggcccggaggcgagaatctgaccggcgagaagccgcggatcgcctacgggaagccgaggaggccgcccgggaggccgtccgggctcgccaggctgaagaagccgcttgggaggaagccagacttcgccaagccgaggcggcgacaacttccgaggcagctcgcgacgaggccgcgggcacatcgcttgggcccactccctcgggcaacactcaggacaagccaggtccgggggacgtccccgagcccggcacgtccatcggcgggccgggccgcgcggcatcctcaccgaggcggctctcccccacgccttccgttgccccattgagcgcagagccccttttgcaggccttggccgtcgcaaacaccacggtgttggacgggttaagtgcccagatggaggccctgcaagcagagcgggcggagctcgacgccgcatgggcgcgcgtcgaagaggggcgacactcggtggaggccatggtggaggtgagccgcaaggcacaccgccggcatgcctcagagctcgaagcccgtcggaaggtgctggaggagatcgccagggaggtggaggaggagcggggggctgccctcatcgccactaccgtgatgaacgaggcgcaggacgacctccgccttcaatacgggagctgggaggcggagctagggaagaagctcgacgccgcccggggggtccttgacgctgccgctgcccgagaacggcgggcggcggagaccgaggtggcatcccggcggcgcgaagaagcccttgaggcccgtgccatggcgctggaagagcgtgcctgcgtcgtggagagggacctggcggaccgcgaggccgccgttgccattcgggaggtcacactggcggcgcacgaagccgcctgtgccgaagaagaatccgcactccgcctccgcgaggatgcgctcaccgagcgggagcgagccctcgaggaggccgaggccgcagcgcaaaggctggcggagagcgcgtccctccgcgaagctgcgcaagaggaacaagcgcgtcgcaatctggaaggtgcccgcgccgagagggccgcactgaaccaacgggccgctgaactcgaggcgcaggcaagggagctggatgcaagggcgcgtagcggtggggcggccacgggcgacagcgacttagccgcccgcctcgcagctgccgaacacaccatcgcggatctgcagggcgcgctgaattcgtccaccggggaggtcgaggcccttcgtctggcaggcgagatagggcccagcatgcttcgcgacgccgtgtcccgtttagaccgcgccgggcggcaggcgggtctctggggcgggcggactgcgaagtacgccgccaaccaggggggcctcgcccagcgcctctcggagatggccgggactctccaacggctccccgaggagctcgagaggacgattaagtcatcctcgagggaccttgcccgaggagcggtggagctcgtactggcgagttaccaggccagggaccccgacttctccccatggatggcgctggacgagttccctcccgggactgaggacggcgcgcgcgcgcgggtccaggacgccgccaaccatatcgttcacagcttcgagggttcggcccctcggctcgcgttcgccctcagctccgacgaggagggcgatgacggcggtgtgggcgacagtggcgacgaggctggcgacccgggtgcatcggagtga

SEQ ID NO: 78883 - DNA, 2907 bp, Oryza sativa
  Clone ID: PAT_MRT4530_78647C.1
atggcacggggctctgctccactcgatggtagcgtgctgccgctttcccgcatcgtgagcgagaggcaggccgggctgccgcgccgcttcctgccggaatctgccaccggccaggagatagttacgctgggcgagggacgcccggcgccacgctacccggggcggaccgttttcttcctccctttcgcaatggcagggctggttccgctattttcttctttcttcatggatgttctggagttttacgatctccagatggcgcacctcacccccaacgcggtaatgacattggccatcttcgcgcacttgtgcgagatgttcatcgggattccctgcgtcctccgcaagaagtgggatgactggaagagcgactggttctacacccccctcgccgacgaagcgcgcctccgacttccgaaccagcccccggcgcaggcctccagctggcgggcgccggtagatctgggagatggctacgacgccgtcctcgaccgcctggcgggcctgcgatcccaggggctcacaggggccatggtgtacggcgactaccttcgtcgccggatcgcaccactccagcggcgcgcccggggtgcctgggagtacaccgggtccgaggactgtatgaggacccaccggggggtcaaatgggactgggtccctgaagacttcaaggtaatgatccaacgggtgctgaatctcagctccgcggaggcatcgctcatcccccaaggagtcctccccctctgcagcgatccagatcgcgccaccatcctgaccatcatgaaggcggtcggggcctcagaggagcaggctcctcgaggccatgatggcgcgggcgggagctgcaggggagaacaatctaccccaggagggggtcgtgcttccgggctccgtgacgggggctcggggggctgccgccctgccgacgcccgagggaagaggaagcaagagggttcctcctccccatctcctccccgagggggcggggcggcgcgtgtcagcagcaggcgcccggagggggccgcgccgacgccgcagcccgagggggagcggaagaagatacggcttcgcaagatgggggggacagaaccatcccggggaaaccttatttcccctccaagcgagatctcgtcgcgtccctcccgccattccaagtccggccagtctgaggccgaggatacggcgaccgcggaggcccggaggcgagaatctgaccggcgagaagccacggatcgcctacgggaagccgaggaggccgcccgggaggccgtccgggctcgccaggctgaagaagccgctcgggaggaagccagacttcgccaagccgaggcggcgacaacttccgaggcagctcgcgacgaggccgcgggcacatcgcttgggcccactccctcgggcaacactcaggacaagccaggtccgggggacgtccccgagcccggcacgtccatcggcgggccgggccgcgcggcatcctcaccgaggcggctctcccccacgccttccgttgccccactgagcgcagagccccttttgcaggccttggccgtcgcaaacaccacggtgttggacgggttaagtgcccagatggaggccctgcaagcagagcgggcggagctcgacgccgcatgggcgcgcgtcgaagaggggcgacactcggtggaggccatggtggaggtgagccgcaaggcacaccgccggcatgcctcagagctcgaagcccgtcggaaggtgctggaggagatcgccagggaggtggaggaggagcggggggctgccctcatcgccactaccgtgatgaacgaggcgcaggacgacctccgccttcaatacgggagctgggaggcggagctagggaagaagctcgacgccgcccagggggtccttgacgctgccgctgcccgagaacggcgggcggcggagaccgaggtggcatcccggcggcgcgaagaagcccttgaggcccgtgccatggcgctggaagagcgtgcctgcgtcgtggagagggacctggcggaccgcgaggccgccgttgccattcgggaggtcacactggcggcgcacgaagccgcctgtgccgaagaagagtccgcactccgcctccgcgaggatgcgctcaccgagcgggagcgagccctcgaggaggccgaggccgcagcgcaaaggctggcggagagcgcgtccctccgcgaagctgcgcaagaggaacaagcgcgtcgcaatctggaaggtgcccgcgccgagagggccgcactgaaccaacgggccgctgaactcgaggcgcaggcaagggagctggatgcaagggcgcgtagcggtggggcggccacgggcgacagcgacttagccgcccgcctcgcagctgccgaacacaccatcgcggatctgcagggcgcgctgaattcgtccaccggggaggtcgaggcccttcgtctggcaggcgagatagggcccagcatgcttcgcgacgccgtgtcccgtttagaccgcgccgggcggcaggcgggtctctggggcgggcggactgcgaagtacgccgccaaccaggggggcctcgctcagcgcctctcggagatggccgggactctccaacggctccccgaggagctcgagaggacgattaagtcatcctcgagggacctcgcccgaggagcggtggagctcgtactggcgagttaccaggccagggaccccgacttctccccatggatggcgctggacgagttccctcccgggactgaggacggcgcgcgcgcgcgggtccaggacgccgccaaccatatcgttcacagcttcgagggttcggcccctcggctcgcgttcgccctcagctccgacgaggagggcgatgacggcggtgtgggcgacagtggcgacgaggctggcgactcgggtgcatcggagtga

SEQ ID NO: 78884 - DNA, 3126 bp, Oryza sativa
  Clone ID: PAT_MRT4530_78648C.1
atggcacggggctccgcaccgctcgacggtagcgtgctgccgccttcccgcatcgtaagcgagaggcaggccgggctgccgcgccgattcatgccggaatctgccaccggccgggaggtggtcgcgctgggtgagggacgcccggcgccacactacccggggcggtccgtcttcttcctttctttcgcaatggcaggactggtcccgccattctcttctttcttcatggatgttctggagctttacgatctccagatggcgcacctcacccccaacgcggtaatgacgttggccatcttcgcgcacctgtgcgagatgttcatcggggtgcgcccatctctccggctgttccggtggttcttcaccgtacagccggtgtcgccgccgtcggtagttggtggctgctacttccagccgcgggggccggtgctgaaccgctacattccctgcgtcctccgcaagaagtgggacgactggaagagcgactggttctacacccccctcgccgatgaagcgcgcctccgacttccgagccagccctcggcgcaggcctccaactggcgggcgccggtagatctgggagacagttacgacgccgttcttgaccgcctggcaggtctgcgatcccaggggctcacgggggccatggtgtacggcgactaccttcatcgccggatcgtgccgctccagcggcgcgctcggggcgcctgggagtacaccgggtccgaggactacatgaggacccaccaggggggcagatgggactgggcccctgaggacttcaagatggtggtccaacgggtgctgaatctcagctccgtggaggcatccctcatcccccaaggagtcctccccctctgcagcgatccagatcgcgccaacatcctgaccatcatgcaggcggtcggggcgtcggaggaacggtctcctcgaggtcacgatggcgcgggcgggagccgcaggggggaacaatctaccccgggagggggtcgtgcttctgggccccgcgatgggggcccggggtgcagccgccctgccgacgcctgggggaagaggaagcaggagggtaccccttccccatatcctccccgagggggcggggcggcgcgtgccagcagcaggcgcccggagggtgccgtgccgacgtcacagcccgagggggagcgaaagaagaagcggctccgcaagatgagggagaccgaaccatgccggggaaaccttatctcctcccaaggtggtcgtttagccgacctcttcgcaggttcgtccccgcgcccactgcggccgtattcattctcccatctcccaaggcaagttttcactcacccgtttctttttgtcctctggtttttcttctgcctcagcgagatcccgtcgcgcccctcccgccattccaagtccggccagtctgaggccgaggagacggcgaccgcggaggcccggaggcgggaggctgaccggcgagaagccgcagaccgtctctgggaagccgaggaagctgcccaggaggccgtccgggttcgccaggctgaggaagccgctcgggaggaggccaaactccgccgggccgaggagtccgtccgggaggcggaggtggcgcgcgcacgccaagcgggctgccaaacccccgacccgactccgcccgaggtgacgacgacttccgaggccacccacgacgaggtcgcgggcgcaccgctcgggcccgacccctcgggcgacgtttgggacgagccagcttcgggggacgcccctgggtccggcacgtcgatcggcgggccgagccgcgcggcgcccataccgaggcggctctcccctctgccttccgctgccccactgaacgcggagcccctcctgcaggccttagccgccgcgaacaccacggtgctggacgggctaggtgcccagatggaggtcctgcaggcagagcggacggagctcgacgcggcgtgggcgcgcgtcgaggaggggcggcgctcggtggaagccatggtggaggcgggccgcaaggcacaccgccggcatgcctcagagctcgaggcccgtcggagggagctggcggagatcgccagggaggtggaggaggagcggcagactgccctcatcgccaccgccgtgctcaacgaggcgcgggacgatctccgcctccaatacgggagccgggcggcggagctagagaagaaactcgacgccgcccggggagtccttgacgccgccgctgcacgggaacggcgggcggcggagaacgaggcggcgtcccggcggcgcgaagaggcccttgagactcgcgccaaggcgctggaagagcgtgcccgcgcgagggagagggacctggcagaccgcgaggctgccgtcgccatccgggaggcaacgctggcggcgcacgaggccgcctgcgccgaagaggagtccacactccgcctccgcgaggacgtgctcaccgagcgggagcgagctctcgaggaggccgaggccgcggcgcagcggctggcggacagcctgtccctccgcgaggcagcgcgggaggccgcactggatcagcgggccgctgagctcgaggcgtgggtgaaggaactggacgcgagggtgcgcagcggcggggtggccgcgggcgacggcgacctagccgcccgcctcgcagctgccgaacacaccatcgccgatctacagggcgcgttggactcgtccgtcggggaggtcgaggccctccgcttggcaggcgaggcgggcctctggggcgggcagactgcgaagtatgccgccaaccaggggggcctcgcccagcgcctctcagagatggccgggaccctccagcggctccccgaggagctcgaggagacgatcaagtcatcctcgagggacctcgcccggggggcggtggagctcgtactggcaagctaccaggtcagggacccggacttctccccgtgggcagcgctggacgagtttcctcccgggaccgaggacgacgcgcgcgcgcaggtccaggacgctgccgaccacatcgtccacagcttcgagggtacggccccccggctcgcgttcgccctcgactccgacgaaaagggcggtgacggcggtgagggcgacagcggcgatgaggccggcgacccgggcgtgtcagaatga

SEQ ID NO: 78885 - DNA, 2751 bp, Oryza sativa
  Clone ID: PAT_MRT4530_78649C.1
atggcacggggctccgctccgcttgacggtagcgtgctgccgtcttcccgcatcgtgagcgagagacaggccgggctgccacgccgcttcatgccggaatctgccaccggccgggagatagtctcgctgggcgagggatgcccggcgccacgctacccggggcggtccgtcttcttcctcccttttgcaatggcagggctggttccgccattttcttctttcttcatggatgttctggagttttacgatctccagatggcgcacctcacccccaacgcggtaatgacattggccatcttcgcgcacctgtgcgagatgttcatcgggccggtgtcgccgccgtcggtggttggtggttgctacttccagccgcgggggccggtgctgaaccgctacattccctgcgtcctccgcaagaagtgggatgactggaagagcgactggttctacacccccctcgccgacgaagcgcgcctccgacttccgagccagcctccagcgcaggcctccaactggcgggcgccggtagatctgggagatggctacgacgccgtcctcgaccgcctggcgggcctgcgatcccaggggctcacaggggccatggtgttcggcgactatcttcgtcgccggatcgcgccactccagcggcgcgctcggggcgcctgggagtacaccgggtccgaggactgtatgaggacccaccggggggtcaaatgggactgggtccccgaagacttcaaggtaatgatccaacgggtgctgaatctcagctccgcggaggcatccctcatcccccaaggagtcctccccctctgcagcgatccagatcgcgccaacatcctgtccatcatgatggcggtcggggcctcagaggagcgagctcctaagggccatgacgggggcggggcggcgcgtgtcagcagcaggcgcccggagggggccgcgccgacgccgcagcccgagggggagcggaagaagaaacggctccgcaagatgggggggacagaaccatcccggggaaacctcatttcccctccaaggtggtcgtttaaccgaccccctcgcagcgagatcccgtcgcgtccttcttgccaattcaagtccggccaatctgaggccgagaatgcggcgaccacggaggctcggaggcgggaatctgaccggcgagaagccgcggatcgcctacgggaagccgaggaggccgcccaggtggccgtccgagctcgccaagctgaagaagccgctcgggaggaggccagacttcgccaggccgaggcggcgacgacttccgaggcagctcgcgacgaggccgcgggcgcatcgcttgggcccactccctcgggcgacgctcaggacaagccaggtccgggggacatccctgagtccggcacgtccatcggcgggccgagccgcgcggcatcctcaccgaggcggctctcccccacgccttccgctgccccactgagcgcagagcctcttctgcaggccttggccgtcgctaacaccacggtgttggacgggttaagtgcccagatggaggccttgcaagcagagcgggtggagctcgacgccgcatgggcacgtgtcgaagaggggcgtcgctcggtggaggccatggtggaggtgggccgcaaggcacaccgccgtcacgtctcagagctcgaagcccgtcggaagatgctgggggagatcgccagggaggtggaggaggagaggggggctgccctcatcgccactaccgtgatgaacgaggcgcaggacgacctccgccttcaatacgggagctgggaggcggagctagggaggaagctcgacgccgcccggggggtccttgacgctgccgctgcccgagaacggcgggcggcggagaccgaggtggtatcccggcggcgcgaagaagcccttgaggcccgtgccatggcgctggaagagcgtgcctgcgccgtggagagggacctggcggatcgcgaggccgccgttgccatccgggaggcaacgctgactgcgcacgaggccgcctgtgccgaagaggagtccgcgctccgcctccgcgaggacgcgctcaccgagcgggagcgagctctcgaggaggccgaggccgcggcgcaacggctggcggacggcctgtccctccgtgaggcagcgtgggaggagcaggcgcgccgtaatctggaaggtgcccgcgccgagagggccgcgctgaaccagcgggccgctgagctcgaggcgcgggagaaggagctggacgcgagggcgcgcagtggcggggcggccgcgggcgaaagcgacttaaccgcccgcctcacagctgccgaacacactatcgccgatctgcagggcgcgctagactcgtccgccggggaggtcgaggccctccgcttggcaggcgaggggggcctcgcccagcgcctctcagagatagccgggactctccaacggctccccgaggagctcgagaggacgattaagtcatcctcgagggacctcgcccgaggagcggtggagctcgtactggcgagttaccaagccagggatcccgacttctccccatggacggcgctggacgagttccctcccgggaccgaggacggtgcgcgcgcgcaggtccgggacgccgccgaccatatcgtccacagcttcgagggttcggcccctcggctcgcgttcgccctcaactccgacgaggaggacgatgacggcggagtgggcgacagtggcgacgaggctggcgacccgggtgcatcggagtga

SEQ ID NO: 78886 - DNA, 973 bp, Oryza sativa
  Clone ID: PAT_MRT4530_7864C.1
aagcatgggagaaagacaaaccgacaacacacatgcataatcgtatatacaagatggcgaggggcaatgtattgtccatgcaaatgctactttaagaaaagcagggagagctatctgatctgatactctggaaaagcagagatcagctatctaattatacatgctgtccatgtctattgtgagctcggggcctacatatggggcccctgcaacacggaaaccgtcaggcaagtctgcctcttccagtactgcaaaaccagggagagaggggatgggaatgtcggagaagtaggtggacggccggccgaggtcctcggcgtagggcggcgctagcacgtcgaggagcgcgcacggcgtgacggcggtgagggagtggatgttgccgccgctccgcgggaacaggaccgacgccttgcacggcgcctcccgcatctcgtcgacggcgaccactcgggctaaaccactcttccttgggcccgagcacgggggcgcgttcgcccagtcgtacgacttgacccgcatcgagccgtagagaagcttgctcagcaccaccatttgcgggtggtcgtgcagcggcagcgtcgcgccggccgggaagcagaacacgccgatcgagaaatcgtcgcactcgtggatgtgcacgtaggtgatccgggtgaacgcccgcgccgagagaaaccgccgccccggcgggctcctctcgtcgtcgtcctccgaggacgacgacctctcgccgccgctgccgccgccttcgatcccgacgtccgccgcctccatgccatcgagcaggtcttgcagccacctgatctgcttgagcgtcggcaaccctgctttactccccgacgagaagacggcgtcgcacgcgtcgtacagccgctgcaccttgctctggtggtcgtccatggccacgcgctagctgtgctgccacaggaagcgaagtgacccggctggttttaactttcacacatctaca

SEQ ID NO: 78887 - DNA, 2793 bp, Oryza sativa
  Clone ID: PAT_MRT4530_78650C.1
atggcacggggctccgttccgctcgatggtagcgtgctgctgccttcccgcatcgtgagcgagaggcaggctgggctgccgcgccgcttcatggcggaatctgccaccggccgggagatagtcacgctgggcgagggacgcccggcgccacgctacccggggcggttcgtcttcttcctcccttttgcaatggcagggctggttccgccattttcttctttcttcatggatgttctggagttttacgatctccagatggcgcacctcacccccaacgcggtaatgacattggccatcttcgcgcacctgtgcgagatgttcatcggggtgcgcctatcccttcggctgttccggtggttcttcaccgtacagccggtgtcgccgccgtcggtggttggtggctgctacttccagccgcgggggccggtgctgaaccgctacattccctgcgtcctccgcaagaagtgggatgactggaagagcgactggttctacacccccctcgccgacgaagcgcgcctccgacttccgagccagccccctgcgcaggcctccaactggcgggcgccggtagatctgggggatggctacgacgccgtcctcgaccgcctggcgggcctgcgatcccaggggctcacaggggccatggtgtacggcgactaccttcgtcgccggatcgcgccactccagcggcgcgcccggggcgcctgggagtacaccgggtccgaggactgtatgaggacccaccggggggtcaaatgggactgggtccctgaagacttcaaggtaatgatccaacgggtgctgaatctcagctccgtggaggcatccctcatcccccaaggagtcctccccctctgcagcgatccagatcgcgccaacatcctgaccatcatgatggcggtcggggcctcagaggagcgagctcctaagggccatgacggtgcgagcgggagccgcaagggagatcaatctatctcaggagggggtcgtgcttccgggccccgtgatgggggctcggggggtagccgccctgccgacgcccgagggaagaggaagcaagagggtacctcctccccatctcctccccgagggggcggggcggcgcgggtcagcagcaggcgcccggagggggccgcgccgacgccgcagcccgagggggagcgaaagaagaaacggctccacaagatgggggggacagaaccatcccggggaaaccttatttcccctccaaggtggtcgtttaaccgaccccctcgcagcgagatcccgtcgcgtccttcttgccaatccaagtccggccaatctgaggccgagaatgcggcgtccacggaggcccggaggcgggaatctgaccggcgagaagccgcggatcgcctatgggaagccgaggaggccgcccgggaggccgcccgggctcgccaggctgaggaagccgctcgggaggaggccagactccgccaggctgaggcgacgacatcctccgaggcaacccgcgaaactgaccggcaagaagccgcggatcgccttcaggaagccgaggaagctgcccaggtggccgtccgagctcgccaagctgaagaagccgctcgggaggaggccagacttcgccaggccgaggcgacgacgacttccgaggcagctcacgacaaggccgcgggcgcatcgcttgggcccactccctcgggcgacgctcaggacaagtcaggtccgggggatgtccccgagtccggcacgtccatcggcgggccgagccgcgcggcatcctcaccgaggcggctctcccccacgccttccgccgccccactgagcgcagagccccttctgcaggccttggccgtcgcaaacaccacggtgttggacgggttaagtgcccagatggaggccctgcaagcagagcgggcggagctcgacgccgcatgggcgcgtgtcgaagaggggcgacgctcagtggaggctatggtggaggtgggccgcaaggcacaccgccggcacaactcagagctcgaagcccgtcggaaggtgctgggggagatcgccagggaggtggaggaggagcggggggctgccctcatcgccactaccgtgatgaacgaggcgcaggacgacctccgccttcaatacgggagctgggaggcggagctagggaagaagctcgacgccgcccggggggtccttgacgctgccgctgcccgagaacggcgggcggcggagaccgaggtggcatcccggcggcgcgaagaagccctcgaggcccgtgccatggcgctggaagagcgtgcctgcgtcgtggagagggacctggcggaccgcgaggccgctgttgccattcgggaggtcacactggcggcgcacgaagccgcctgtgccgaagaagagtccgcactccgccttcgcgaggatgcgctcaccgagcgggagcgagccctcgaggaggccgaggccgcagcgcaaaggctggtggagagcgcgtccttccgcgaggctgcgcaagaggaacaagcgcgtcgtaatctggaaagtgcccgcgccgagagggccacactgaaccagcgggccgctgaactcgaggcgcaggcaagggagctggatgcaagggcgcgtagcggcggggcggccacgggcgacagcgacctagccgcccgcctcgcagctgccgaacacaccatcgcggatctgcagggcgcgctggattcgtccaccggggaggtcgaggcccttcgtctggcaggcgagatagggcccaacatgcttcgcgacgccgtgtcccgtttagaccgcgccgggcggtag

SEQ ID NO: 78888 - DNA, 3324 bp, Oryza sativa
  Clone ID: PAT_MRT4530_78651C.1
atggcacggggctccgctctgctcgatggtagcgtgctgccgccttcccgcatcgtgagcgagaggcaggctgggctgccgcgtcgcttcatgccggaatctgccaccggcagggagatagttacgctgggcgagggacgcccggcgccagactacccggggcggtccgtcttctttctcccttttgcaatggcagggctagttccgccattttcttctttcttcatggatgttctggagttctacgatctccagatggcgcacctcacccccaacgcggtgatgacattggccatcttcgcgcatctgtgcgagatgttcattggggtgcgcccatctcttcggctgttccggtggttcttcaccgtgcagtcggtgtcgccgccatcggtagtcggtggctgctacttccagccacgggggccggtgctgaaccgctacatcccctgcgccctccgcaagaagtgggacgactggaagagcgactggttctacactcccctcgccgacgaagcgcgcctccgacttccgagccagcccccggtgcaggcctccagctggcgggcgccggtagatctgggggatggctatgacgccgtcctcgaccgcctggcgggcctgcgatcccaggggctcacaggggccatggtgtatggcgactacctccgtcgtcggattgcgccgctccagcggcgcgctcggggcgcctgggagtacaccgggtccgaagacttcatgaggacccaccagggagtgagatgggactgggctcctgaggacttcaagatattggtccaacgggtgctgaatctcaactccgtggaggcggccctcattccccaaggaatcctccccctctgcagcgatccagaccgcgcctccatcctgaccattatgatggcagtcggggcctcagaggagcgagctccaaagggccacgacggcgcaggcgggagccgccggggggaacaatctaccccgagagggggtcgtgcttctgggtcccgcgacaggggtccggggagcagccgccctgccaacacccgggggaagaggaagcagggaggaacacctcccccatctcctccccgagggggcggggcggcgcgtaccagcagcaggcgcccggagggggccgcgccaacatcgcagcccgagggggagcgcatgaagaagcggccccgcaagatgggggagacggaaccatctcggggaaagctcatttcccctccaaagtggtcgtttaaccgaccccctcgcagcgagatcccgtcgcgtccctcccgccattccaagtccggccagtctgaggccgaggatccggcgaccgcagaggcccgcaggcggcaagctgaccggcgagaggccgcggatcgcctacgggaagccgaggaggccgcccaggaggccgcccgggctcgccaggccgaggaaatcgctcgggagggagccgcccgggcccgccaggccgaggaagctgctcgggaggaggccgcccgagcccaccaagccgaggaagcagctcgggaggaggctgtccgagcccacaaggccaaggaagccgctcgggaggaagccggatttcgccaggacgaggtgatggcgacttccgaggcagctcgcgacgaggccgcgggcgcgtcgctcgggcccactccctcgggcgacgctcaggcgacaacttccggggcagctggcgacgaggctgcgggcgcgtcgcttgggcccactccctcgggcgatgctcaggcgacaacttccggggcagctggcgacgaggctgcgggcgcgtcgcttgggcccactccctcgggcgacgctcaggaccaaacgggtccgggagacatccccgagtccggcacttccatcggcggcccgagccgcgtggcatcttttccaaggcggctcttccccacgccttctatcgccccactgaacacagagccccttctgcaggccttggccaccgcaaacaccacgatgttggatgggttaagtgcccaggtggaggccctgcaggcagagcgggcggagctcgacgccgcgtgggcgcgtgtcgaagaggggcgacgctcggtggaggccatggtggaggtgggccgtaaggctcaccgccggcatgtctcggagcttgaaacccgtaagaaggtgctggcagagatcgccaaggaagtggaggaggagcggggggctgccctcattgccaccaccgtgatgaacgaggcgcaggacaccctccgcgttcaatacgggagctgggaggcggagctagggaagaagctcgacgccgcccagggggtgcttgacgctgccgctgcccgagaacagcgggcggcggagaccgaagcggcgtcccggcggcgcgaagaggcccttgaggcgcgcgccatggcgctggaagagcgcgcctgcgtcgtggagagggatctggcggaccgcgaggccgccgtcaccatccgggaagcaacgctagcggcgcacgaggctgcctgcgccgaagaagagctcgcgctccgcctccgcgaggacgcgctcaccgagcgggagcgagctctcgagggggccgaggccgcggcgcaacagctggcggacagcctgtccctccgcgaggcagcgcaggaggagcaggcgcgccgcaatctggaaggtgcccgcgccgagagggccgcactgaaccaacgggccgctgagctcgaggcgcgggcgaaggagctggacgcgagggcgcgcagcggcggggcggccgcgggcgaaagcgacttagccgcccgcctcgcagatgccgaacacaccatcgccgatctgcagggcgcgctggactcgtccgccggggaggtcgaagccctccgcttggcaggcgaggtcgggcccggcatgctttgggacgccgtctcccgcctagattgcgccggtcggcaagtgggcctctggagagggcggaccgtaaagtacgccgacaaccagggaggcctcgcccagcacctctcgaagatggccggggctctccaacggctccccgaggagctcgagaagacaattaagtcatcctcgagggacctcgcccaaggagcggtggagctcgtcctggcgagttaccaggccagggaccccaatttctctccatggatggcgctggatgagttccctcctgggaccgaggaccgcgcgcgcacgcaagtccgggatgccgccgactatatcgtcgacagcttcgagggctcggcccctcggcttgcgtttgcccccaactccgacgaggagggcaatgccggtggtgcagacgacagtgacgtcgaggccggcgatccaggcgcatcggaatga

SEQ ID NO: 78889 - DNA, 147 bp, Oryza sativa
  Clone ID: PAT_MRT4530_78652C.1
cccacgcgtgcggccacgcgtgcgatctataccatgtatggcggaaccccagacccagcaggatctagacagggatgacggctcatggaggactgggagatcttcagctgtgggactggattaaactgaactacattgataggtcgt

SEQ ID NO: 78890 - DNA, 480 bp, Oryza sativa
  Clone ID: PAT_MRT4530_78653C.1
ggcgggggttctgtagcgctctaatgtggttgaggatgaccgcatccgatgtcagtcgctgaggtcgaaataatagaccagtctcgtgcttgaagaagagctggcggtgaggaatgacacccagagtataccttctgagtctgagaagggtaagctgcatattacctcggacgattatgatcattaggtctaagactggcctgaaggatgtggctcctgtgtccagcagaacagggaacgtcaattcaccagggcaggaggaagacttataccttcagggatctggaggatgaagaggatgattgagagaccactagcttaagcagcgcagtcagtactagttcccgtcggatcagtggcgcagacacaagacaacggttagcttcatgaagaacatcaactgttactgaatgatcgagactctgcagctacagcaaagggaaccgtgttgttgctgggtgacgcattcatcccaattgc

SEQ ID NO: 78891 - DNA, 3114 bp, Oryza sativa
  Clone ID: PAT_MRT4530_78654C.1
atggcacggggctccgctccgcttgacggtagcgtgttgccgccttcccgcatcgtgagcgagagacaggccgggctgccgcgccgcttcatgccggaatatgccaccggccgagagatagtctcgctgggcgagggatgcctggcgccacgctacccggggcggtccgtcttcttcctcccttttgctatggcagggctggttccgccattttcttctttcttcatggatgttctggagttttacgatctccagatggcgcacctcacccccaacgcggtcatgacattggccatcttcgcacacctgtgcgagatgttcatcggggtgcgcccatcccttcggctgttccggtggttcttcaccgtacagccggtgtcgccgccgtcggtggtcggtggctgctacttccagccacgggggccggtgctgaaccgctacattccctgcgccctccgcaagaagtgggatgactggaagagcgactgtttctacactcccctcgccgacgaagcgcgcctccgacttccgagccagcccccggcgcaggcctccaactggcgggcgccggtagatctgggagatggctatgacgccgtcctcgaccgcctggcgggcctgcgatcccaggggctcacaggggccatggtgttcggcgactatcttcgtcgccggatcgcgccactccagcggcgcgcccggggcgcctgggagtacaccgggtccgaggactgtatgaggacccaccagggagtcagatgggactgggctcctgaggacttcaagatattggtccaacgggtgctgaatctcagctccgtggaggcatccatcattcctcaaggagtcctccccctctgcagcgctccagaccgtgcctccatcctgaccatcatgcaggcggtcggggcgtcggaggagcgggctcctcgaggccacgatggcgcgggcgggagccgcaggggggaacaatctaccccgggagggggtcgtgcttctgggccccgcgacgggggcccggggagcagccgccctgccgacgcccgggggaagaggaagcagggaggaacccctcccccatctcctccccgagggggcggggtggcgcgggccagcagcaggcgcccggagggggccacgccaacgtcgcagcccgaggggaagcggaagaagaaacggccccgcaagatggggggacagaaccatcccggggaaacctcatttcccctccaaggtggtcgtgtaatcgaccccctcgcaggttcgtcccacgcccatcgtggccgtattcattccctcaatgcgagttttcactcatccatcttgtttgtcttctggtctttcttctatttcagcgagatcccgtcgcgtccctcccgccattccaagtccggccagtctgaggccgaggacccggcgaccacagaggcccggaggcgggaatctgaccggcgagaagccgcagatcgccttcgggaagccgaggaggccgctcaggaggccgctcgggctcgccagaccgaggaaaccattcgggaggaggccggactccgccaggccgagacgacgacatcctccgaggcgacccgtgaaactgaccggcaagaggccacggatcgccttcgagaagccgaggaagctgcccaggtggccgtccgagctcgccaagctgaagaagccgctcgggaagaggccagacttcgccaggccaaggcggcaacgacttccgaggcagtttgcgacgagggcgcgggcgcatcgcttgggcccaatccctcgggcgacgctcaggacaagccaggtccgggggacatccctgagtccggcacgtccctcggcgggccgagccgcgcggcatcctcaccgaggcggctcttccccacgccttctgttgctccactgagtgcagaaccccttctgcaggccttggccgtcgcaaacaccacggtgttggacgggttaagtgcccaggtggaggccctacaagcagagcaggcagagatcgacgccgcatgggcgcgtgtcgaagaggggcgacgctcggtggaggccatggtggaagtgggccgcaaggcacaccgccggcacgtctcagagctcgaagcccgtcggaaggtgctggaggagattgccaaggaggacaccctccgccttcaatacgggagctgggaggcggagctagagaaaaagctcgacgccgcccagggggtccttgacgctgccgctgcccgagaacagcgggcggcggagaccgaggtggcatcccggcggcgcgaagaagcccttgaggcccgtgccatggcgctggaagagcgtgcctgcgccgtggagagggacctggcggatcgcgaggccgccgttgctattcgggaggtcacattggcggtgctcgaagccgcctgtgccgaagaagagtccgcgctccgcctccgccaggacgcgctcaccgagcgggagcgagctctcgaggaggccgaggccgcggcgcaacggctggcggacagcctgtccctccgcgaggctttgcaagaggaacaggcgcgccgtaatctggaagatgcccgcgccgagagggccgcgctgaatcagcgggccgctgagcttgaggcgcgggagaaggagctggacgcgagggcgcgcagcggcggggcggccgcgggcgaaagcgacttaaccgcccgcctcgcagctgccgaacacaccatcgccgatttgcagggcgcactagactcgtccgccggggaggtcgaggccctccgcttggcaggcgaggtagggcccggcatgcttcgggacgccgtctcccgtctagaccgcgccggccggcaagtgggcctctggggcgggcggactgcgaaagcggtggagctcgtactggcgagttaccaagccagggatcccgacttctcaccatggacggcgttggacgagttccctcccgggaccgaggatggcgcgtgcgcgcaggtccgggacgccgccgaccatatcgtccacagcttcgagggttcggcccctcggctcgcgttcgccctcaactccaacgaggaggatgatgacggcggagtgggcgacagtggcgacgaggctggcggcccgggtgcatcggagtga

SEQ ID NO: 78892 - DNA, 3078 bp, Oryza sativa
  Clone ID: PAT_MRT4530_78655C.1
atggcacggggctccgctttgcttgatggtagcgtgctgccgccttcccgcatcgtgagcgagaggcaggccgggctgccgcgccgcttcatgccggaatctgccaccggctgggagatagttacgctgggcgagggacgcccagcgccatgctacccggggcggtccgtcttcttcctcccttttgcaatggcagggctggttccgccattttcttctttcttcatggatgttctggagttttacgatctccagatggcgcacatcacccccaacgcggtaatgacattggccatcttcgcgcacctgtgcgagatgttcatcggggtgcgcccatcccttcggctgttccggtggttcttcaccgtacagtcagtgtcgccgccgtcggtggttggtggctgctacttccaaccgcgggggccggtgttgaaccgctacattccctgcgtcctccgcaagaagtgggatgactggaagagcgactggttctacacccccctagctgacgaagcgcgcctccgacttccgagccagcccccggcgcaggcctccagctggcgggcgccgcggcgcgcccggggtgcctgggagtacaccgggtccgaggactgtatgaggactcaccagggagtcagatgggactgggctcctgaggacttcaagatagtggtccaacgggtgctgaatctcagctccgtggaggcatccctcattcctcaaggagtcctccccctctgcagcgatccagaccgcgcctccatcctgaccatcatgcaggcggtcggggcgtcggaggagcgggctcctcgaggccacgatggcgcgggcgggagccgcaggggggaacaatctaccccgggagggggtcatggttctgggccccgcgacaggggcccggggagcggccgccctgccgacgcccgggggaagaggaaacaggaaggaacccctcccccatctcctccacgagggggcggggcggcgcgtgccagcagcaggcgcccggagggggccacgccgacgtcgcagcccgagggggagcggaagaagaaacggccccgcaagatgtgggggacagaaccatctcggggaaaccttatttcccctccaaggtggtcgtttaaccgaccccctcgcagcgagatcccgtcgcgtccctcccgccatcccaagtccggccagtctgaggccgaggacccggcgaccacagaggctcggaggcgggaatctgaccggcgagaagccgcggatcgcctacgggaagccgaggaggccgcccaggtggccgtccgagctcgccaagctgaagaagccgctcgggaggaggccagacttcaccaggccgaggcgacgacatcctccgaggcgacccgtgaaactgaccggcaagaggccacggatcgccttcgagaagccgaggaagctgctcaggtggccgtccgagctggccaagctgaagaagccgctcgggaggaggccagacttcgccaggccgaggcgacgacgacttccgaagcagctcgcgacgaggccgcgggcgcatcgcttgggcccactccctcgtgcgacgctcaggacaaaccaggtccgggggacatccccgagtccggcacgtccatcggcgggccaagccgcgcggcatcctcttcgaggcggctcttccccacgccttccgttgctccactgagcgcagaacctcttctgcaggccttggccgtcgctaacaccacggtgttggacgggttaagtgcccagatggaggccttgcaagcagagcgggtggagctcgacgccgcatgggcacgtgtcgaagaggggcgccgctcggtggaggccatggtggaggtgggccgcaaggcacaccgccggcacgtctcagagctcgaagcccgtcggaaggtgatgggggagatcgccaaggaggtggaggaggagcggggggctgccctcatcgccaccaccgtgatgaacgaggcgcaggacaccctccgccttcaatatgggagctgggaggcggagctagggaaaaagctcgacgccgcccggggggtccttgacgctgccgctgcccgagaacggcgggcggcggagaccgaggtggcatcccggcggcgcgaagaagcccttgaggcccgtgccatggcgctagaagagcgtgcctgcgccgtggagagggacctggcggatcgcgaggccgccgttgctattcgggaggtcacactggcggtgcacgaagccgcctgtgccgaagaagagtccgcgctccgcctccgcgaggacgcgctcaccgagcgggagcgagctctcgaggaggccgaggccgcggcgcaacagctggcggacagcctgtccctccgcgaggctgcgcaagaggaacaagcgcgccgtaatctggaaggtgcccgcgccgagagggccgcgctgaaccagcgggccgctgagctcgaggcgcgggagaaggagctggacgcgagggcgcgcagcggcggggcggccgcgggcgaaagcgacttaaccgcccgcctcgcagctgccgaacacaccatcgccgatttgcagggcgcgctagactcgtccgccggggaggttgaggccctccgcttggcaggcgaggtagggcccggcatgcttcgggacgccgtctcccgtctagaccgcgccggccggcaggcgggcctctggggcgggcggactgcgaagtacgccgccaacctggggggcctcgcccagcgcctctcggagatagccgggactctccaacggctccccgaggagctcgagaggacgattaagtcatcctcgagggacctcgcccgagggagcggtgagctcgtactggcgagttaccaagccagggatcccgacttctccccatggacggcgctggatgagttccctcccgggaccaaggatgtcgcgcgcgcgcaggtccgggacgccgccgaccatatcgtccacagcttcgagggttcggcccctcggctcgcgttcgccctcaactccgacgaggaggacgatgacggcggagtgggcgacagtggcgacgaggctggcgacccgggtgcatcggagtga

SEQ ID NO: 78893 - DNA, 3855 bp, Oryza sativa
  Clone ID: PAT_MRT4530_78656C.1
tcatctactcggtcttctccgtagcgattcaaattccacctcacttggcaacatcgcttccactccatagactaggaaaaacggcgactggcccgtagcccgactcggagtggtgcgcagggaccaaagtacagatggcaactgttctacgcatttgccagcatagggacgcagtcgatcaaaaactcgtgcttttattccttgaagtaccataccattggcgcgttcaacttgtccattactcatgggatgcgctacggaggcataacaaattttgatgccaaagtcctcacataaatctttaaatactctgcctgtgaattgagtgccgttatcagtgatgatccgattgggtaccccaaaccggtgcacaatgttgatgaagaaatctctagccttgtctgccgcgattgttataacttgtttggcttcaatccacttggaaaacttgtcaacagctacaaagagatgagtataaccacctactgcctttttaaatgggccgaccatgtcgagcccccaaaccgcgaacggccaagacaacgggatggtttgcaactcctgagccggtagatgagtttgtcgggcgaaaaattgacaaccctcacatgttcgcacaattttgtcagcgtcagacacggctgtgggccagaaaaaaccttgctggtaagccttgccaacgatggttcgtgtggcagcgtgattgtcgcagattcctgagtgtatatcctttaccaattgtcttccctcctccaaagacatacagcgttgtaggattcctgatggactttttttgtacagctcggtctcatgtatgacataaagtctgctgcgcctggagatccgctcggcttcatctttatcttgagggagttcttgttttgtcaaaaatcttatgaggggctctctccagtcggcttcaatcatgcttatgtcttgagtgtccatggcctcgattgtttctttccttggtacggttggctcgtagagatgttcacaaaacacgtcggaaggagctgcttctcgttttgaaccaaaattagccagtctatcggctgcctcattattgtgtcgaagaacatgggtgagctcaagtctatcgaatttgtcttccaacttgcgtacctcttgccggtaagcggttatgttatcatcaaggcaggaccactctttcatgacttggaagtagtgagataatttccttacggtaactaaaacaccatataatagcttttgaacctgagggtatcttgtcttggagtcagccaaaatctcgctaacgaagtagattggtcgttggactttttgaacatggccttcttcttcacgttcaacaaccaggactgtgcttacaacctgggaagttgccgacacgtataacaacagttgctcttgcggatgtggtgaagctaagactggtggagtagtgagaagttttttgaagtcttcaaaggcttttcgtgggtccccacggctgagcgccgccatgcagccagttaacttttggacgtctttctgggagctcggcagtttcattttgaggatggcattgattttctccgggttggcttgtatgcctctatgggacaccataaatccaagcagcttccctgacggtactccgaagatgcacttttcagggtttaatttcatcctgaaagcgcggatgctctcaaaggtctcttctagatccacaatcaaatcatccttctgctttgtcttgacgactatgtcatccacataagcttcacgttgcggccgatagccggccgttgagtcaactacctggtcaatgcgaggtaacccaaaaggatctttgggacaagacttgttgaggtcggtgtaatcaacacacatgcgccattgccccgtcttcttctgaaccaggactgggttggccagccagtcgggatgaaggacttccttgatgaagcccgctgctaacagcttggtcaattctaccttgatcgcatccttcctatcagcagtcttagtaggatcagaaggatctagaggaatcttcttggtcttggtgtcgcttgccccgctctttggcatcttggtcgcaggcacttctccttcgcttgctgtggacgcagccagtcggatttcttctcggtcgagcgtgatctcgcggaactgggccatctcgcagctttccttgtcacacgtgacggcttgcttgatgtcactccgcagggatatgactccttgaggaccaggcatatcgggcgtccgagtatggcgtgatacgctgtcctcaaaacaaatgttctctgtgtggaagttctcccaagtgccgaaagtaatgggaagagtgatctggctgagtggtgtagcagatagccctgagatgactccgtgaaagggcgcattactcggctttaattccatgcgagggatctgcatgtcgtccagagtcttgacgaaaaggatgttgagtgcactgccaccatcgatgagggatctgcgaagcttgacgttgcgaaccactgggtctagtaccagggggtaccgccctgggtggaccacacggtaaggatgatccaagcggtcaaacataattgttgtctctgaccaccgaagatattggggcgtgtcgggctgaatagcgttgatctcccgttcggttagcttttgctttctcttggattcataggacaggggtccgccaaagatgtggttgagttccttgcgatggtcttgaaaaccagtcggggcgtcaacttcatcatccttctttaacgtgctttgatctccgtcagaggccttgcgtgcattcttggcgtattgttctgcaaactgtttatagacgaagcaatctttggccgcgtgattggagtttggatgatgcggacattgggagttcatgatcttgtcagaagtgttgacccgtgaacgttgtcgggaggatggtgtagtagttgccacaagttccttgggtttacgcttgcgatccttgtgattggtacttccactcccccctgtagttggcgtatctttcttcggcttccaagtggtgcccgactgcttggacgcggtaatgacatcttctgcttgaccgtcctgggaggcagggcattcaaaggtaccctggaagttggcgatgaagtggtcgcgaagttctgcccaagatccgattgtgccacggggtaagccgtgaagccaggaccgggcagagtccgctagggccacaggcaaatagtttgccatgactttgctatctcgtcctgctgcgcgaatagcgagaccgtagatggtgagccaagactccgggttagtggtgccgtcatacttctcgattccagtcggcttgaagccggctggccaatccactcgacgcaatttgcttgtgaaggcagcaactccatccacgtcgttgtcgtagcgatctagtgaatggtgggaagcgtattctcttgccgcgcagcgctggttgatagtatcgcgaagatcgacggggcgccttcgcaacgacagaaacgacaagctaacacgcaaaaagaagaaaaagaagggagaaggcgcccttgtggtgaagacagcagccaaatcatcggggagcttcatcaggattggcggataggccccatcgtcttgatcgggctgtgttggagtagattggatctcgtccaagtggtttgaagccgactcggtggagatgatcttggggtagatctcggccgagttcgggataccgaacggggcgaagatctggcctcttcccgactggttcgaatccgagtcgatgagagaaatcttgccgaggtcgttggtgatgaagtcgaggctgccgaaccggaacgcctgcccgggagggaagacgaagttgtcgatgccggaaacaaaacccat

SEQ ID NO: 78894 - DNA, 285 bp, Oryza sativa
  Clone ID: PAT_MRT4530_78657C.1
atggccggggatgcgaggctggccgccgacgcaaagagcatcgtcgttccggaggtcgtcccgggggttgtctgcctcggcttcaaccggatttcgcaaggcccctccatcatcggcaacgtgctcatgcaggagcacatctgggagatcgaccacatgagcactgtgctcaggttcaggaaggacaaatgcatcaaccatcagcagctcaacaggcaccacaagaaggcctcttcttcctcctcctcctcttcctcttctcctcctccttatccggccgcctga

SEQ ID NO: 78895 - DNA, 230 bp, Oryza sativa
  Clone ID: PAT_MRT4530_78658C.1
gcgagcgccggtcgagtgctccctgcgcgtgcggcgccgtcgggccggcggctcgccgagcgacgggcagcggccgaggtgaggaggaggaggaggaggaagaagaagaagtcgcgacgtcgccgtgtcgccgactcgccgtgcgagatctcctcgcgcggccggccgagctgttggtttgccgttgttcgcgtccaacggcgcgcgcgccggcgtcggttgaggtgcgt

SEQ ID NO: 78896 - DNA, 2274 bp, Oryza sativa
  Clone ID: PAT_MRT4530_78659C.1
atggcgctgcgagcccacccgctgctctcttcctcctccttgccgcctccgacccttccaatcctctgcctccgctgtcctggatcttccctctcctccaaacgcttcctccgttcccactcccgctccgcaatccggccgtggcgaaacccctgcgccgcccgtcccggcggacctcgtttcttggggcaagatgacgccgactccgacgccgacgaggaggacgaggaggagtggagatgggcaccatctgccggcccctccggagctcacctcgtcggcgcggtggacgaagacgatagtgttggcgagggcgggggcggcgtcgggtggggcgcacccgatggcgacgctgccgggggatcggggattcgagaatccggtgtggacgacggcgggcaggtgggcgagtgggacctccctatgagctcctttcgggggcgggttcaggtacagcatcaccaagaagaggaggaggaggaggaggaggaggaggaagacgaagatggaggtggctgcgaatggtcggacccgggtttcttcttgcgaggccaagaggaggaggccagcagcagcgtgagcaccaccacggccatggaagagattctcaccttggcgaggagccccgcggtcgacgggcaggcgtttgccgagttcttggcggggtacggccgcggagcactcagtgtggaggaatgcgttgagctgatgaggaggatgggggaggaggggctggcattggggtgtctccaccttctccgatggatgcaggctccggaggaggagccattgttgttgcccccgcaggcatggctgctcgctgttgtggcgcttggacgggctcagatggccgatgaggtgctggagattgtggagagtttgcctcccgagaggagattcagtgaggctgtcctttacaatgctgcaatgtcaggcctagcctatcgcggaagatatgatgatacctggaaagtatttaagctcatggaaaagaaaaatatccagcctgaccacatgacatccttaatcatgttagatgtaatgaacaagagcaagacatctgccaaggatgcatgggaattcttccaacggatggaaagaaaaggtgtcaagtggagcttggacatttgtatttctcttatcaagatcttttgtgacaacggtctgaaaactgaagctcttatcatacagtcagcaatggagaagaaaggaattgcatcaaacacgagcatgtataacacattaataaatgcttactgcaaagccaatcaaattgaagaggcagagggagttttcgttgagatgaaagagaaaggcttgagtgcgacagcaatgacctataatatccttatgggtgcttactgtagaagattgcagccagaagttgttgagtctttactgctggagatgcaagatttaggactacgaccaaatgcgagatcatacaactttctcatacgtgtttatgggcaacagaagaaaatgagtgaaaaggctgaagatgctttcttaaggatgaagacagatggcattatgccaacgtcttctacatacacttcactgctttgtgcatatgcagttaatggattgcatgaaaaggcttatttgacttatgtggatatgaaaagagaaggacttaagccttccttagaaacatatacagcattgattgacatgtttaggagggctggtgacacggagaagctaatggagacatggagatcaatgatcaatgaaaaggttcctggaactagggtaatattccacatggtgcttgatggtctggcaaaacatgggctgtatgttcaggcaacggatgttatatatgagtttagaagggctggtttgcagcctaccgtaatgacatacaacattttgatgaatgcttttgcaaggggaggacaacattataaattaccccaactcttgaaagagatggctgctatggaattaaaaccagattctgtaacatactctacaatgatttatgcgtatgcccgtgttcgtgacttttcgagagcattctattaccacaagctgatggttcgaagtggacaattgcctgatgttagttcatataaaaagttattgaatacattggatgtgaaagctgcaagaaagaacataaaggataagaatgccatagtgggaatcttaaaaggaaagtccagcctaaaacataggaaggagaagaaggatgagttttggaagaacagaaaaaaacgttctatgatgaaccatgtctatgggtacccaaggaaaagatttttgtga

SEQ ID NO: 78897 - DNA, 453 bp, Oryza sativa
  Clone ID: PAT_MRT4530_7865C.1
ctatcccctcctcctcgacttactccattgcggccctacggcgggcggatccatgacccccggcctcgaaggggtggatccagcagtgctagactcgggagcagcggattcacctctgctaacctcggtgacgtcgacgatgagaatgacggtagtagctagggcaacggcgacaatagcaacaagccacgcgagggtagacttggcggcgccggactcgggagcggcggatccgcctccgccgtcctcggcgatgatgatgacaataatgacgaccagggctaggatgacgacgatgacgatggcaagccgcgcgagggcagatcctagtggcgccgaactcgggagaggcagattcgccaatgtcggccttaggagttgcggggactgctgtggcgcccgcgcccctttgccgaccacaatcccatctccttcgagtcttgtgctactcat

SEQ ID NO: 78898 - DNA, 2562 bp, Oryza sativa
  Clone ID: PAT_MRT4530_78660C.1
atgtcgggtcaaacgggggatggtaatgatggtgaaaagggagctaggattccttttgactatccctccacatctacatcttatgtgagtacctacaatggcaaagctccgtacttcaatggtacggactatgccgcttggaagcataagatgaagatgcatttgaagtctattaacccatctatttggagaatagtcgaaaaaggctatgttttgcagaatcccgaagatcccaccaaggaggacgacgagaacgagcacaagaatgctcaagccgctaatgcaatacttagcgccttgagtggaagtgagttcaaccgtgtggatggtattaagagtgccaaagtgatttgggacatgcttcggaacttgcatgaaggcacggatagtgttcagagcccaagcgacatgtacgaccggttgagcaagatcgtcaatgagatcaagggacttggctctaaggacatgactgatgaggttgtggtcaagaagatggttcgggcaatcactccaaggaactctaagcgtccggactacaaaaatatcacacctcatgatttgctcgggcatatccttgcccatgacatgctcgtgcaagagtccaaggatgttatccaatacatcaaccaaagctcaaccgcaagcatcaagaaggaagacttggcactgaaggcaaaggaagaagaagaagagaaccacgagagcaagagcaaggcggagatcgatgatgaagagatggctcttttcgtcaagaagtttggcaagtttatgagacgaagcggcttcttcaagggaaactcttccaagcactactccaacaagtcaagtggaagacactccgcaagggtgtgctacgtgagcaaagagcccgaacacttcattgcggagtgcccccacctcaaggatggttcccacctcaaggaagataagaagggtgagaagaagggtgagaagaaggatgagaagaaggagaagcacaagcatagcaagcgagaacattatggccaagctcatattgggatgatcttcggctccgactccgagtcaagttcaagtgatgaagaaggagtcgccacgttcgccgtcaagccttcatcaccaccgaggctcttcgattactcaagtgatgaggatgctcccatttgcctcatggcaaaggagcccaaggtaccttgtcctctcaagtcatttaatgctgatcttgttagtaatgaggaggatgaggttgaggatgaggttatagatgatgagttgttcaagtccataaccaaggaatccataccacacttgagtgagttgcttgggagaattgaggaccaatatacaaccctggagaggcaagaggctttgctcattcgtgagaaagagcggtctcatgaactcaagagtgaacttgctaaggagagagagaaaaatgaggctttggtacggctttacaagcaaaccaaagagtctcatgctaatcttgaggtggcgaacgctcaacttcaagagagagtggatggcttggacaaagcttacctctcccttgaagagaagttcgaaaccttaaagagtagtgtctctctcccaagcgaggcatcgtgctccaaaattgtcccaagcaataaaccatgtgtgaggtgcaaaaatattgatattgaagcttgtgctactaactctatttcattgagtgctttgcaaaagcaaaatgagaagcttatgggacttcttcacaatggcctacttaagtgccacatgggtagtaaggccctaaaggagtacgtaggctatcaaagggacaacttcaaccatgagggtcttgggaagaatgctagtggtcgtattattgctaagtatgtaggcccaaggggcaagaatatttctatcaagagagtgctttgggtgccgaaggcacttattactaacatgagaggacccaagcaagaatatgtctccggtggaaaaagttgggtgattgatagtgaatgtaccaatcacatgaccggagaagaatcaatgttttcatctcttgattcaaatggcacttctcaagagaacatagtcttcggggacgatggaaagggaaaggttatgggattgggtaagattgcaatctccaatgatctttccattgccaacgttctcttggtaaaatctctaaattacaatcttttgtccgtttctcaattatgctctatgggttacaattgtctttttaccgatgttgatgtgaccgtctatagaaggaatgattcctcggtagtctttacgggtgttctcaagggaaagctttaccttgtggatttttcctcaagtaaagccaaacatgagacatgcttagtggctaagtccaacacggggtggctttggcatcggaggctagcccatgttggtatgaggaatcttcgcaagcttctaaagcacgatcacatccttggactaacaaattatcaatttgagaaagatagggtgtgtagcgcgtgtcaagccggcaaacaaattggagcacatcactccgtcaagaatgtgatgaccacttgtaacaccctgaaaattcgaccgacaaaatcaaaactctaa

SEQ ID NO: 78899 - DNA, 1839 bp, Oryza sativa
  Clone ID: PAT_MRT4530_78661C.1
atgtcgggccaaacaggggatgggaatgatggtgataagggagctaagatcccttatgactacccccctacatctacatcttatgtgagtacctatagcggcaaagctccgtacttcaatggtacggactatgccgcttggaagcataagatgaagatgcatttgaagtctattaacccatctatttggagaatagtcgaaaaaggctatgttttgcagaatcccgaagatcccaccaaggaggacgacgagaacgagcacaagaacgttcaagccgctaatgcaatacttagcgccttgagtggaagtgagttcaaccgtgtggatggcattgagagtgccaaagtgatttgggacacgcttcggaacttgcatgaaggcacggatagtgttcgtgagtccaaggtggagatcctcaagggcccaagcgacatgtacgaccggttgagcaagatcgtcaatgagatcaagggacttggctccaaggacatgaccgatgaggttgtggtcaagaagatggttcgagcaatcactccaaggaactctaacttggtgaccatcattcgtgagcgtccggactacaagactctcacacctcacgatttgctcggacgcatctttgcccatgacatgctcgtacaagagtccaaggatgtcatccaatacatcaaccaaagctcaaccgcaagcatcaagaaggaagacttggctttgaaggcaaaggaagaagaagaagagaaccgcaagagcaagagcaaggcggagatcgatgatgaagagatggctctcttcgtcaagaaattcggcaagttcatgaggcgaagcggcttcttcaagggaggattttccaagcactactccaacaagtcaagtggaagacactctgcaagagtgtgctacgtgtgcaaagagcccgggcacttcatcgcggattgcccccacctcaaggatggttcccacatcaaggaagataagaagaagagtgagaagaaggatgagaagaaggagaagcacaagcatagcaagagggaacattatggccaatctcaccttgggatgatctttggctccgactccgagtcaagctcaagtgatgaagaaggagtcgccacgttcgccgtcaagccttcatcaccaccgagactctttgactactcaagtgatgaggatgctccggtttgcctcatggcaaaggagcctaaggtaccttctcctcttaagtcatttaatgttgatcttgttagtgatgaggaggatgaggttgaggatgagattatggatgacgaattgttcaagtccataactaaggaatccctaccacacttgagtgagttgcttgggagaattgaggaccaatatgcaattcttgagaggcaagagactttgctcattcgtgagaaagagcggtctcatgaactcaagagtgagcttgttaaggagagagagaaaaatgaggcattggtacggctttacaagcaaaccaaagagtctcatgctaatcttgatgtggcgaacgctcaacttcaagagagagtggatggcttggacaaagcatacctcactcttgaagaaaagttcgaaaccttaaagaatagtgtctctctccctagcgagccatcttgttccaaaattgtcccaagcaatgaaccatgtgtgagatgcaaagatattgatattaacgcttgtgctactaactctattgccttgagtggtttgcaaaagcaaaatgagaagcttacgggactccttcacaatggcctacttaagtgctatatgggtagtaaggccctaaatgtcgcgaccgggaaaattgcattttcccgaacgctagtgtattaa

SEQ ID NO: 78900 - DNA, 345 bp, Oryza sativa
  Clone ID: PAT_MRT4530_78662C.1
atggcgtacacgaaaaccacacgcaccgcggcgagaccattcgacagccgacgcgccggagaagaggaggaagaacggccgcgacccgcgccggcgacggacaagaagccggcgatggccgcggcggcggcgagggcgaggatgatcaggcacttcttcacgctgagccgaggcgccatctccgtcgatcgccgccgaggatgcacggcgccggcggcgccgcggcggagctcgacaaggataccggatcaaggcggcgtgcatagcatatgcggttcagcaagcgggatgaagttagcagggaagcaggtgactcacaggatgttgggtttaagttgcaagtaa

SEQ ID NO: 78901 - DNA, 452 bp, Oryza sativa
  Clone ID: PAT_MRT4530_78663C.1
ctcacagggccgagccaagccacccgtcctgttttttgaggagaaaggcaaactcaaacccgagctggttactttaaacagaatggcggatagcgaacgcagggacgcgggccaatctggctggtgtgccatgcttaagggcagagggcaccttctacgcagacaggatgggtgaaagcatggttgagaccaccgttacagcggacgtgatcagagaacgcctcgttgtcggcaactagagcgcaacggacacaggattgcaatgattcaattccactcgacatgacaggatgaaaactgttaaaatttgggcgggagagcttcctctttttgctataaaacagtgtgaaaaaaagaatgtttggcatttttttgataaaagttggattaggtcctattaggtcgttgatttacacgcaacaatgatgaagcttggtcaaggcggaaccccc

SEQ ID NO: 78902 - DNA, 366 bp, Oryza sativa
  unsure (1)..(366): unsure at all n locations
  Clone ID: PAT_MRT4530_78664C.1
aattgttggccctgggggcttggtcgaaatgttgcggggatgtgcgtgttgaatcggtgacngacaaagattgttggcactgtggctactgtgtggggccccccctaaagccccagcnatgatgtgagatgtgtgcaattgactggatgtgtgggtggtgcccagtggtgtgtgcagggtggctgtgtgggtgagccctggggtgttgagtgttgggagtggtgtgcgtgaagggtggtgtgatgctggttggggttggnngactgcggatggtgtgactcttccttgggtatcaatgtaataaggcaagcttttgccttngtctaaaaaaaaggatttgcatttctganctntaaaaaaaaaaaa

SEQ ID NO: 78903 - DNA, 697 bp, Oryza sativa
  Clone ID: PAT_MRT4530_78665C.1
tcaattcattataatcggttcagcactctcccttcctcactttctctctctctctctcacttctcctctgcaggatcacggccggtaggggaggagtgccggcggctggcggaggaggaggtacggtgcggcggctggcgaagacgagtggggagagaagcagcggccgacggagaggagcttggcgttggcagtggcggccgtcggctagacccagcgggcgtcgtcctttgccaggaacgtgtagcggtgagaccggacgtcgagcccggcgggcttgtcggagaggtcgagatcgactcccatggcatgggcgagctccccgttgctgtcagagatgaggagcacctcatcacggcggcatcatccgcgactttgcagaatcgccagcctccccgcttcgccccgtcggcctcctccccacctgccggttgcggtggcagtggcggtggcggtggtgcttgttctggcggtgagcctcctcaccgtggccgtggtggcgagcgcctgtggctccaactgcccgctgaggccgacgccgacacccagcaccgggtcgtcgtcgagcccacgcgacgcgctaaagctgcgcgtctgccatccagctcgcccagagaaaagaagagtgagagagagagaggaggagaagggagagccggagagaagggggagagagagagatgatgacgtggtatac

SEQ ID NO: 78904 - DNA, 161 bp, Oryza sativa
  Clone ID: PAT_MRT4530_78666C.1
ggggcaatgcaaacaacaaataacacataacataccggatccttagttaacagaggccaaatttggcgcagcaccaggtttgacaaaactggcgcagggattagtccattaaatttcgtccgttaaaggaaaaaggaatccggcggggttccccagggaac

SEQ ID NO: 78905 - DNA, 1406 bp, Oryza sativa
  Clone ID: PAT_MRT4530_78667C.1
gcgccgagctcgagcagcggaggagagaaaacttgaggaggaagctctcggggagcggcaacactcaaggaggagcggaacttgcggcagcgatgacactcgggaggccatccgtcggctatgaccctcaagaaggagagacatggaggagatgcgaggcgcacggtcctgtggacctcgagctctgcatccactttgtcagactctacaacctcctcgcatcaaaggtcaaggaggagttgcatggcaactgccgatcttggggaggatggaagtgtgagcatatgagcttggggagaagaggaagaagcgagaagattaagtcaatccgtgctagcactggacataagctttattgccttcttgatttgagattgacctttatttcaccagtgattgaagaggttcaacattttccagtgattgaagctctggtgacttttgggagggtttggtctatggatcctggctatgaggacccagctaagtgtatcagttttaagctgaaagttgaggaagagtttgctgaaatggaatgcatgaatagatggatgctgttgggagaggagaatactaagttttttcaatcaattgccacagagagattcagattgaattccatctctcaaatttatgatcactctggtcaagtggttactttgcatgaccagaaggctaatatgttttttcaaagctttgagagcagaatggggatttctctctctccttcaatgagctttaatctgatggagctttttcctaaccctgtaattttggattgtttggtggattacttctctacccaagaagttgacagcttaattaagataattccaccagacaaagctcctggcccaaatggttataatgggttttttcttaagaaatgttggcccatcatttctcaggatttttataggttgtcagcacactttcatgtgtgctatactgatctgcaaccgcttaatagctcatttataaccttagtacccaaaaagccctctccagaaactgttaatgatttcaagcctatctctctgatgggtatcagtttgaaagtgctaaacaaattaatggcagatcatctgcagggtgtaatgctcaaggttgttcaagaaaatcaatatggatttatcaaaggcaaaacaatccaggattgtttggcatggtcttttgagtacatccaccaatgccatcaatcaaagagagagataattctgttgaagctggactttgaaaaatcttttgattctattgagcattatgcccttatttctatcatgcaaagcatgggttttagtgacaaatggttgcagtgggttcacatgatttttacttcagcacatacctctgttctgcttaatggtgttcctggaaattctttcaaatgtaggagaggggtttga

SEQ ID NO: 78906 - DNA, 682 bp, Oryza sativa
  Clone ID: PAT_MRT4530_78668C.1
agactaagaaaggtcaaggtatggtgtgattccaccggtgaaggaacaactgattggatgaagctcaagaaggctattgaaaattttgttaagtctgaaatggacacagctgttggtgaacgttctctatcactatatctcggggatggcttggagagatttcccgaacttggtgacaatattaaagttgaactaaatggttttgtgagctctttgaagctgcaaggcaagctgaaccaattgcctaattttgatacatcgctgaatggcatcacaaagttgtgcctttcatcaactaatctggaggggcatcattattcagacctgggtaagctgctctgcttgaaatatctcaaactggtcgaaaattaccttgggggctttgtcataaaaatagggactttcccatcccttgagttcctatgcctattgatgccaagctttctatatgctgtacctgaaatccaagaaggagctttgccaaaacttgtttcgcttcagctgctttgtaagcatcttcatggtcttgctggtattaatattaaaaaccatacaaagctccaggaagttgctcttgattcagctgtcagcatggaaaccataaatacttgggaaaatgaagctcagaagcaccccaaaagacccaaggttttgttctttaaaagggttggcacaagtaaga

SEQ ID NO: 78907 - DNA, 3362 bp, Oryza sativa
  Clone ID: PAT_MRT4530_78669C.1
ctaaagcttgcagtttatctaacatcgaccggttccaaataagcttgcagttccagcaactgttaaaaagtgaaaagatgtacaagaaaggtgagaggttgagtatgacattagacgcagagactatatcaaattgcagaaaacccagaaccaaacacaacaagctggctccgtccgaacaatcaatcaatctcaaaccatctcttttttttttacatcagttgacctccaaactggaagggatcgactatccaattatccatgtatctcctggagaacatggcatgctatctgagcttcgactcgtttgatctgctgctccggaagtttgatagggagaagaacgaccttgacgatttagttgatggggcagctccaggcctatcccgtaacctgtctgaattcgttgagttgaagctgccggtggttgattgagctgataagatgctgttagtcttggggccatcaaatgttctcctgctcgaatttacaccttcattaccacctcgtggttcttcaagttcatcttctccttcagaaacaacagatcggctggcgcaaccattacgtgttgctttctcctttttttttacgtgaagactttactggactccttctccgacttgttactatcggtgctgaaactttccgcagggagcttttcgttttctgtgcagtagttgctttaggcaaagatccaactgaccttcaactgttgggcacaggtgcaagtgatgattttggttgaagactttctgggatgcgcttttggggtcaattcttttggtagaaccggagttgatctaattccagtagctttctttgatggttttgattctagcggtacaacactgctcttctttgcaaccttgttatacaagtttggcctagttgctgcacttgatttttcatctgaaataggtgtacttttagctagcctgcttgtctttgttgctgttttagtcttcttttcttcaattcccttaattgctggctttgaagcagcaactgtttcctttttgttcttcaccggttgagcacttctttccacctttgaagttggttgagaagatgagggtgctactggagtccttctccgactagttgctgtcggtgctgaaactgtcccaggagagcttttagttttctgtgcagtagttgctttagtcaaagatccacctgaccatgaacggaggtgatgaatttctccgtgccctttgtggaactggagaattgcgtttctcagctgcagtgccagttttgggggtaattgctgcttcttctgcccaactgtttccttcaagggcctagtgcttgcctcctttgctggccgccttccacctttatcggttcgaactttcgagtctcgcttctctttatgctgaccttgcagtccacctttcttctcatttgtggaagtgatgccagtagtggtgacattagcactcgaaaactttccaggcatgacttgcatcattttcattaacatctgattaagctcagcttccttctggcggttccactcagcagaggccattgcccgatcactgttttcctcttgccctgactttgtctgctcagcagaaatttcagtatgggatgaaaccgctgtctctgtttctggcattgcaacaccttgcatattagtgtgaaaaccttcaacagaaggcgtaacaacagtgttagaagctgaagctgaacctggctcagcctgtgtttcagctccatccttctctgaatcggatcctgtattgttggatttactttgggatgtggaatctatggttttttcttctgaattattgttcaaggaatcacccattcctgcactccaccttcttagtactgactttgtagcaaacaagccagctttcttattttgcgaatccggattctgatccttctgcttgctttcgaagagatttattgcatcctgcacactcatccttcttacattattgtcagatttccttgaaggctggtcagtttcaccattgcaactgccactttcatcatctttatccaaaggaattctttgactaggggggaaatagctgagactcttgatggcaatcgctgttgacctacgagatcctgatctaccaatttgaacccttcgcattggagaagcagatctcctaggtgaagcagacctcatgagtggccggcttctttcaacgacagcctcatcttcagcactggactcagaagaatcatcactttcagttgagctttcacgctcaatttgagcaagctttgctggggaaacattgttggtaataggcctctggataatggtatgagagctgatattacgagtatgaagtgcattttctcccttgtcatctttctcggcagggaaagactgctgttgggagacctcagagggttggcagtctgggatcaacagtaggcaccgcatcaaccagctgaactctgatgcaccgaagtgctgaacaaatgaggataaatcagatacatctctagttgacatattggaaacgactgctctattcaacaacgcaaagatctcctctttcagtacagtcaacctcaaatccagagctcgaagcaattcattcctagcatagtaatcatatagatcgtcagcataaagctggttcagatcttgcagaaatgaaaagcagttcacctgttgttctacgccaatggtaccaaagacacctccggataaagcaccacccataggatttcgttgttccttagaatagagagattgatgaaactttctagtttcctccagttgtgagatttcatgtaaaattccatttgcagattttgaggcatctggtgaatttatggtattcaggaaccgtgctatggtggattttgtgaaccaggaagatccttttgcattcccagacaacgacagcttaaaagtgccagctgttgaacacgattggaacttcctagcatcttccaagtgcaggactaattgatcaaaaggaccagatgcaatcaattctgtattccctttactgcaagcaattgcctcgtatctgttctgggctgaggatacttggaagactgcagaatcaagctccacattgctagcaaccgccccctccatgttgcttacaagttacaaccctgacaacggactaattgctcaaatatcaatcacttcctagactacaacttcccaccataaaagcagttcctcgtccacttcaaaacccggatcgagcggcggcggcctccgctccccgccggcgcccctccgccggctggatcgaggacttcaaaaacgaacccaaaaatctgtgcctctctctctctctctctctctctctctcgagcgaaggaggttgctgcagcgaggcgagtggagcggacgcggg

SEQ ID NO: 78908 - DNA, 1143 bp, Oryza sativa
  Clone ID: PAT_MRT4530_7866C.1
atgagtagagtgtccactagttgaggttttgtttgtctagggtgaacaagccgagggagcgggcgcgcggaccgggtccacgggaagtggggcccacgcgtcagccccacggtccacggtggaccgggcgcacgcggctggcggcggtcggcgccgtgggtcccgcgcgtcagccgcacccgcgggcgcgggcggctgacggccgggtccacttggcagccgcgagggcgcgcccgagggcggcctcgccggcgcggccgacgggagcggcgcgcccgcgccccgatggtcaccgccggcgaccaccggcgcggcggagcggcgcccgagagagaggagggaagggggaaggcgaacggcggtcctcggctcaccccgggacaacgacgacgacgagaacggcggccggagtggaggaaagcggcggcgtggctcgggatgacgatgacgacggtgctccggcggtcggcgggcgaagcggagcggcggacggggtcggcaaccactcggcgaagcggatggaggtgtcgccgagtaaggaggaagaccggagcggcggcggcggcggaacggagctcggcagcgacggcggagagagaggagcacggcgcgagcacgatgccgacggcgagagcgagcggcgagcggcggaaacggaagagcggagctcggggagcaattatatagcaccgagagggggagaacgcggccggagaggaaggaaacgggcgcggggatctcgggctccatagatgtcgccggcgaggattacgggatgaatccggacggatccgagggagagagagaggggaaatcgggggaaacgggagaggggatcgcggggaatgattcccctctctttaatgcgcgcggggacggcgggatgcggcgcaatccgcggcggcggcggcgctagggcacgggcgcggcggaggacgcggcgggaggaaggcgatgacaggtgggtcccacccgtcagcgagagcggcgggcgggcccgcctgtcagcggcgcgcgcgcgcggggaggccgatgggccgcgggggaagagagagagagagggagggactgggccgagccggcccaagaaggaggggggggaaagaggacttcttttagggttttctttttataaaacctttt

SEQ ID NO: 78909 - DNA, 440 bp, Oryza sativa
  Clone ID: PAT_MRT4530_78670C.1
cgcggcggcccggcgacggcggcgtcctcccctcctttagatccgtcaggggcaggaggggaggcgcaggggcggcggcccggcagtggcgggaggggagggatggaggctggcttctccaccgcgagccgttcttctcgagggccagccttcgccggatccgttctggagattgcaggcgccggcgggatctggagctcgtgggcggatccgagccccaaccgccggatctagcggtgatgaatatgattgtgatgatttttgtgattttgttttgtgtccaaatgattgtaaatgtgaagtgattttgttctttggccagatgaacgtgattgtgatgatttttgcgcttccgttttgtgtccaaatgattgtgaatgtgattatttttgtgatttgtgaatgctgcatgaaggcatgcgcgcagctgtgcttttaat

SEQ ID NO: 78910 - DNA, 186 bp, Oryza sativa
  Clone ID: PAT_MRT4530_78671C.1
atgaaggaggtgcggagaatgccaacaaagcgagatggggacagtgcctacgaatggaggccattgcaaatgtcacttgcggaggatgcgatggacgatgccagggtagagaccggcatagctggagtccaggactggctctgctcatcagtcatcaactacaaatgcaccaagtacacatactga

SEQ ID NO: 78911 - DNA, 806 bp, Oryza sativa
  unsure (1)..(806): unsure at all n locations
  Clone ID: PAT_MRT4530_78672C.1
atcccagtagcttctttgatggttttgattctagcggtacaacactgctcttctttgcaaccttgttatacaagtttggcctagttgctgcacttgattttcatctganaataggtgtacttttagctagcctgcttgtctttgttgctgttttagtcttcttttcttcaattcccttaattgctggctttgaagcagcaactgtttcctttttgttcttcaccggttgagcacttctttccacctttgaagttggttgagaagatgagggtgctactggagtccttctccgactagttgctgtcggtgctgaaactgtcccaggagagcttttagttttctgtgcagtagttgctttagtcaaagatccacctgaccatgaactgcgggtcacaggtgcaggtgatggtttgggtgagctctttctggcaggcgcttttggggtcaattcttttggtaggaccggaggtgatgaatttctccgtgccctttgtggaactggagaattgcgtttctcagctgcagtgccagttttgggggtaattgctgccttcttctgcccaactgtttccttcaagggcctagtgcttgcctcctttgctggccgccttccacctttatcggttcgaactttcgagtctcgcttctctttatgctgaccttgcagtccacctttcttctcatttgtggaagtgatgccagtagtggtgacattagcactcgaaaactttccaggcatgacttgcatcattttcattaacatctgattaagctcagcttccttctggcggttccactcagcagag

SEQ ID NO: 78912 - DNA, 1801 bp, Oryza sativa
  Clone ID: PAT_MRT4530_78673C.1
tgttttttttcacgaatgttaccggcaatttaacgtttcacccccaatctaaagattttctggtggaacaatcttacatgatccgaatgaacagtcatcggcaaatatttctcaaaggagaaaatgattacacaagaaaaactaagcagaaatgatcacacaagaagaccaagcaaccttgttattatgcatcagcatcagcatatactcctctcagatagctaagaatctacctttattcccatactaacattcaatggcacaaaatgggaatgagatcccatgaacacatgaaaagcagtagcagcagcatcgcgaaatagttactggtaccgatacaacagatggatcgaaaatctcttacgcgcaaagcagctcttgcaaggagcctaattatgctatgatgaagaacagagaccattcctactgaagacagcatcaaaataccataaccaccatgagtcaaattaagggttcctggcttggaaatccttcatgaacgcgacgagcttctccacaccggcgagcggcatggcgttgtagatggaggcgcgcacgccgccgaccgacctgtgccccttgagctgcaccattccctccttggccgcctcggcgatgaactgcttctcaaaatccccacccttggcgagggtgaacggcacattcatcagcgatcgcacggatttctccacggggcagatgtagtatccgccgctggcatcaatggcgtcgtagaggatgccggccttgtgggcgttcttcttctcgacctcggcgaggccgccctgcgcgagcaggtcctcgaacacgaggccgcagatgtagatggcgaagcacggcggggtgttgtacagggaggcgttgtccgcgtgcgtcttgtagtcgagcatcaccggggtgatgggctgcgcgctgccgacgaggtccttgcggacgatggcgatggtgacgccggaggggccgacgttcttctgcgcgccggcgtagatgaggccgaagcgggagacgtcgacgggcttggagcagaagttggaggacatgtcggcgacgaggatgcccgacttgttcttgggctccgggtagtccttgaactcgacgccatggatggtctcgttggagcagatgtggaggaaccttgcctcggggttctgctcgatggcgtcgaagggcgggagggaggtgtacttgccgtccttgccggaccaggcgacggacgcggcggagaacttcttggcctccttgaacgccttgtcgctccacgacccggagacgacgaagtcggcggggtcggagggggaggcgcagaggttgagcggcgcggcggcgaactgggaggtggcgccgccctggaggaagagcacctcgtgggtgtcgggcacggcgaggagcgcgcggaggtcggcctccgccttcttgatcgcggcgtcgaactccttcccgcggtggctcatctccatgatgctcatgccggagccgcggtagtcgacgagctccgcctgcgccctctggagcacggagagcggcagcgtggccgggcccgcggcgaagttgtagaccccgcggtcggcggcggcggcggcgggggaggaggaggactgcgcgggcgtggccacggccgcgcaggagatcctggctgcccgcgtggggagacggagcggcgaggccgccgcggaggccggcttgggtgccgccgggcggcggaggaggagggagttgggggtggtggcggcggcggcggcggcggccatggcggcggaatggagaggagaggaggggaggagggttttggcggacgcgtggg

SEQ ID NO: 78913 - DNA, 551 bp, Oryza sativa
  Clone ID: PAT_MRT4530_78674C.1
ctttttttttttttttttttttttttttttttttttttttttttttttttttttttttttttttttttttttttttttttttaacaaaaaaaacccccttttgggaaaaaccggaagcataagtaacatcaaaaggaacaaactgggcccaaacagcaatcacagggaaaaagaggaaaggcctttggggggttcagaaatttacgggggcggggacaaaattaccgcaacggggggccccccggggcaaagaaaacttgaaaattaacccagggaaggggagtttttttgggaagggcaggccccttttccccatttaaaaagaactttccccgacatggattttaaaaccctttaaaggggggtttaaaaaaaaaccccaggaggggggggggcccccccggaaaaaagcccaggaccaaaaggggggaaaacgggggggaaaattatcttggggggggaattcttcccaaccctaaaaaaggggggggtatcgccgggacccccggggggccattgggggtaccccttaggggggttaacacaggctt

SEQ ID NO: 78914 - DNA, 258 bp, Oryza sativa
  Clone ID: PAT_MRT4530_78675C.1
atggccaagttcgtcagagctccagtgcacagctgcagctgcagcaatgctcacctctcccaaactgcagcacctgccaagatggtatttgaagaccaggtgagaggagtggtatgttacagagatgataaggggaatatgatctgcgaagggcctatgggggttcaagtcaccgatttcatcgagctgtcgacgcttcgagttttcgaagacgtcgattctctgcagcccaggaaagatcagaaggggaagctctga

SEQ ID NO: 78915 - DNA, 399 bp, Oryza sativa
  unsure (1)..(399): unsure at all n locations
  Clone ID: PAT_MRT4530_78676C.1
atcgcgtctgtcgctgccgaggagaacttcgtcacctcggacatggtgctgcgttgcaagccacgtgacatcgtccggcgggcctccctcaactgcatcgacgacgacgagagcaccggaggcctgtctcaggtccgttcgctgacggtgttcggcgtcctcncgagcccatgaaatcgagcatcgtctacttgcagctgctgcgagtgctcgacttcaaagacgccaaggggctgaaagatgaagatgtacaaggtctcgagaggntcttcttcctcaagtaccttgggctcggcggcaagttcgtcacaaagctcccagagaagtggaagnagctncagaacttggaagncctggatgtgagggagaccgccgtcaaggagctttcagaggcgatcg

SEQ ID NO: 78916 - DNA, 622 bp, Oryza sativa
  Clone ID: PAT_MRT4530_78677C.1
atggataaaggattctacaccaaaagtgaaacaatcacagaaactcgatgttctagcattgtgctgaaggaatacagaaggatccagttgataattgagacgaacaatactaaaactcatttatcagcaagaaatgataatgagtatatatgaaaatggatagagtttcagcttattcatgtagcaattcttaggccttgtatgtctgaatttcagaaaccttatttcagagcttccccttctgatctttcctgggctgcagagaatcgacgtcttcgaaaactcgaagcgtcgacagctcgatgaaatcggtgacttgaacccccataggccatgggaagcaggccttctccggcagccgcatgccaagcctaggcccttcatcgtacccttcgcagatcatattccccttatcatctctgtaacataccactcctctcacctggtcttcaaataccatcttggcaggtgctgcagtttgggagaggtgagcattgctgcagctgcagctgtgcactggagctctgacgaacttggccatggtcgccttccttgtgccacctcttgcggtggaaatggaggaagaaaggtgatggcaagagctcattgccgccgtttggtt

SEQ ID NO: 78917 - DNA, 131 bp, Oryza sativa
  Clone ID: PAT_MRT4530_78678C.1
aaccacaataaccgagctttatttgctttctacccctccatccaaaaagaatccaattctagctatgagcctaaacatatgcgtgtccaggttcgtagctaggatttgcatttttctagaatggagtaggg

SEQ ID NO: 78918 - DNA, 273 bp, Oryza sativa
  unsure (1)..(273): unsure at all n locations
  Clone ID: PAT_MRT4530_78679C.1
agatggccatctgcaccttagcacccaagcgcaagtccagcttgggcatntgttggcncaancctttttgaactanggnacttccncgctctagnccncnctgtgttgttttncttttatcngntaaatanctaagngnctacgccccttntgtncnncttttcttatttagtttcntggnccnctcntncttntgnttnttgaattggcttggtttaaaaaaaaaaaaaaaaaaaaaaaaaaaaaaaaaaaaaaaaaaaaaaaaaaaaaaaa

SEQ ID NO: 78919 - DNA, 564 bp, Oryza sativa
  Clone ID: PAT_MRT4530_7867C.1
cggacgcttggggtcgtggacggccatcaccacggcgctggcgctggtggtggacaacttccacaacaccaaaccatgcctgaacaccgtgtcctactcactgctcgtcttcttatccggaatgattatcacctttatcggattcaacaagacggacctccctggagccatttggtacttaataaccccctactccaaagtcaacagcatcagcagcatctacgtcctctccataatcatcctcctcctctccaacctttcatcaaacctaccaacggtgcttcttatgtatgatgatgtagcgaaggctgttgtgctgatatcgcacactgcataaacaacatcatgactgatgttgtcatgtgagatcaccgtagcagataacctgtcgctgatggggtcaacagcgaacctgatagagtgccaccacgccacaaaggctcccagtaacgcctaaaacctaaccttgtggtaaaacatcatattcgtattgcaatccatgcagcaaccgaatctagcaccatatacaaacccactgagaaagtaacaatcaatcatgcaacc

SEQ ID NO: 78920 - DNA, 2652 bp, Oryza sativa
  Clone ID: PAT_MRT4530_78680C.1
atggcacggggttccgctctgctcgatggtagcgtgctgccgccttcccggatcgtgagcgagaggcaggctgggctgtcgcgccgcttcatgccggaatctgccaccggccgggagatagtcacgctgggcgagggacgcccggcgccagactacccggggcggtccgtcttctttctcccctttgcaatggcagggctggttccaccattttcttctttcttcatggatgttctggagttctacgatctccagatggcgcacctcacccccaacgcggtgatgacattggccatcttcgcgcatctgtgcgagatgttcattggggtgcgcccatctcttcggctgttccggtggttcttcaccgtgcagtcggtgtcgccgccatcggtagtcggtggctgctacttccagccacgggggccggtgctgaaccgctacatcccctgcgccctccgcaagaagtgggacgactggaagagcgactggttctacactcccctcgccgacgaagcgcgcctccgacttccgagccagcccccggcgcaggcctccagctggcgggcgccggtagatctgggggatggctatgacgccgtcctcgaccgcctggcgggcctgcgatcccaggggctcacaggggccatggtgtacggcgactacctccgtcgtcggattgcgccgctccagcgacgcgctcggggcgcctgggagtacaccgggtccgaagacttcacgaggacccaccagggagtgagatgggactgggctcctgaggacttcaagatattgacttcaagatattggtccaacgggttcgtctctcacccatcgtggctgtattcattctctcaacgcgagttttcactcacccatcttgttcgtcttctggtattttctttcgtttcagcgagatcccgtcgcgtccctcccgccattccaagtccggccagtctgaggccgaggatccggcggccgcagaggccctcaggcgggaatctgaccggcgagaggccgcggatcgcctacgggaagccgaggaggccgcccgggctcgccaggccgaggaaaccgctcgggaggaggccgcccgggcccgccaggccggggaagccgctcgggaggaggccggatttcgccaggacgaggcgatggcgacttccgaggcagctcgcgacgaggccgcgggcgcgtcgcttgggcccactccctcaggcgacaacttccggggcagctggcgacgaggccgcgggcgcgtcgcttgggcctactccctcgggcgacgctcaggaccaaccgggtccgggggacatccccgagtccggcacttccatcggcggcccgagccgcgtggcatcctctccaaggcggctcttccccacgccttctatcgccctactgaacgcagagccccttctgcaggccttggccgccgcaaacaccacggtgttggatgggttaagtgcccaggtggaggtcctgcaggcagagcgggcggagctcgacgccgcgtgggcgcgtgtcgaagaggggcgacgctcggtggaggccatggtggaggtgcgccgccttcaatacgggagctgggaggcggagctagggaagaagctcgacgccgcccagggggtgcttgacgctgccgctgcccgagaacagcgggcggcggagaccgaagcggcgtcccggcggcgcgaagaggcccttgaggcgcgcgccatggcgctggaagagcgcgcctgcgtcgtggagagggatctggcggaccgcgaggccgccgtcaccatccgggaagcaacgctggcggcgcacgaggctgcctgcgccgaagaagagttcacgctccgcctccgcgaggacgcgctcaccaaacgggagcgagctctcgagggggccgaggccgcggcgcaacagctggcggtcaacctgtccctccgcgaggcagcgcaggaggagcaggcgcgccgcaatctggaaggtgcccgcgccgagagggccgtactgaaccaacgggccgctgagctcgaggcgcgggcgaaggagctggacgcgagggcgcgcagcggcggggcggccacgggcgaaagcgacttagccgcccgcctcgcagctgccgaacgcaccatcgccgatctgcagggcgcgctggactcgtccgccggggaggtcgaagccctccgcttggcaggcgaggtagggcccggcatgctttgggacgccgtctcccgcctagattgcgccggtcggcaagtgggcctctggagagggcggaccgtaaagtacgccgccaaccagggaggcctcgcccagtgcctctcgaagatggccggggctctccaacggctccccgaggagctcgagaagacaattaagtcatcctcgagggacctcgcccaaggagcggtggagctcgtcctggcgagttaccaggccagggaccccaatttctctccatggatggcgctggatgagttccctcctgggaccgaggaccgcgcgcgcgcgcaggtccgggatgccgccgaccatatcgtcgacagcttcgagggctcggcccctcggcttgcgttcgcccccaactccgacgaggagggcaatgccggtggtgcagacgacagtgacgtcgaggccggcgatccgggcgcatcggattga

SEQ ID NO: 78921 - DNA, 3012 bp, Oryza sativa
  Clone ID: PAT_MRT4530_78681C.1
atgtggggccagtctgcaacggcggcagttgactttgctgctaacccactccactcagttccagctgcaagcgttatgacgaggccatctaggccagttaagaaaccattaggtgattccttgtcttgtgctcctcaaaacacaaggatcattgatctgggtggtgagatggcaagtgccttgacaggggcgatgacctcagtcatcatcaagctcagtgcacttcttggggaggagtacgcaaagctgaaaggattacagagggaggtggagtttatgaaagatgagctgagcagcatgaatgctctccttcataggctggcagaggtagactctgacctcgatgtgcaaacggaggagtggagaaaccaagtacgggagatgtcttatgacatcgaggattgtatcgacggtttcacacatcgccttggccacattggcatagctgaggctgcagggcctgtccaaagggtggcccaacaactcaaggtgctcaaggtgcgccgtcaaatcgccagccaaatccaagagctcaagggacgagtcgaagatgcaagcaagcggcggatgaggtataagcttgacgatcgtatctttgagcctagcatcgcgagggcaattgacccccgtttgccttcgctgtatgctgagtcagacgggcttgttggtattgagacgccgagagctgtgcttgtcaagttgataatggagggagacgatgcatcgtttcagcagctgaaggtgatatccatcgtgggtcctggtggtctgggtaaaactacacttgcgaatgaggtgtaccgtagactggaaggccagttccagtgtcgagcttttgtttctctgtcccagcagcctgacgtaaaaaggattctgagaaacatattctgccaagttagtcagcaagtgtatgatagcacaagtgtatgggatgaggaaaatcttatcgatgcaatcagaggattcctaaaggacaagaggagtgcaattgtaatttcatatggcaggtacttcattgtcattgatgatatctggagtattcaagcatggaagactatcaaatgcgctttgcttatgaataatcttggaagcagaataataactacaacacggagtgttactatagccaagtcatgttgctctcctcaacatgatcatgtctatgaaataatgcctctcagtacagccaatgcaatgagtttatttttgaaacgaatatttggcacagaagatatatgccctccccaattggaagaaatctcctgtaaaatattgaaaaaatgtagtggatctccattggcgattattaccatagctagcttattgactaataaagctagtacaaaagaagaatgggagagggtacataattcaattggttcgacactggaaaaagatccaagtgtcgaagagatgcagaggatattatcccttagctatgatgatcttcctcaccatttgaagacatgtctactatatctatgcatatttccagaagactgtgagattgagagagaccagctggtaaagagatggatcgccgaagggttcattaatacaggaagtggacaagatttggagaaaataggcgagtcgtatcttaatgatcttatcagcagaagcatgattcagccagtgaaagttcgatatgatggccaggttgattcatgccgaatccatgatatgattcttgatctccttatgtccaagtcaataaaggaaaactttgccactttccttggtgaacaaaaccagaaattagtgctgcaaggcaaggttcgccggctctctctcagctattactcccaagagaatgtcatggttccgtcaacagcgatcatttccagttgtcggtcactcagtatctttgggtatgccgaagaaatgccttctctttcagagtttagagttctgcgagtacttgatatagaacatggtgaggatatggacagcaattatctggagcatgtgaggaggctttctcagttgaagtacctgagactgaatgtaagaagtattgatgcactccctgaacaactcggagaactacagcatctgcagactcttgatctggtatcgacgaaacttagaaaatcacccaaaagcattgttcggctgcaaaatttgacgtgtttgcgtatcaataatctggagttacctgaaggtattgggtgcatgcgagctcttcaggaggtatcagagatcaaaattagcaggaacagttcggcgtcttctttgcaggagctgggcaatctgaccaaactgaagattcttgggctatgctggtgtatttctgatattcatggtgggactaaaactttggtcaataacttggtttcatcgctccgcaagctgggcagactcaaccttcgatctctatgcattcagagtagtttcaagtactccatagatttcttgctggattcttggctccccacaccacatctcctccagaagtttcagatgggcatgtgctactacttcccaagaatcccagtttggattgcatcacttgaaaacctcacctacctagatatcaatcttaatccagtaaaagaggaagtattggagatcctcggaaacttacccgcattgctgtttctctggctgacgtcgaaatcggctgatccaaaacaaagactcatcataaacagcaacatgttcatgtgcctgaaggaactctacttcacctgctggagcattgagtcagggttgatgtttcaagaaggctgtatggcaaagcttgagaagctgcatcttccattccatgctgccactgcccttgaatttggcatccatcacctctcttcccttaggctgcttgttgttgagatcatctgcagcggcgcgacgattcggcaggtggagtcattggaggagaccatcaggaagacagctgatctccttccttaccgccccacggtcgaaattcgaacatgggatgaggaaaatatggtggaggaacagaaggagaaagacatgggagaagagggcacccaaacaagctgttga

SEQ ID NO: 78922 - DNA, 2763 bp, Oryza sativa
  Clone ID: PAT_MRT4530_78682C.1
atggcacggggctccgcaccgctcgacggtagcgtgctgccgccttcccgcatcgtgagcgagaggcaggccgggctgccgcgccgattcatgccggaatctaccgccggtcgggaggtggtcgagctgggcgagggacgcccggcaccacactacccggggcggtccgtcttcttcctccctttcgcaatggcagggctggtcccgccattctcttctttcttcatggatgttctggagttttatgatctccaaatggcgcacctcacccccaacgcggtaatgacgttggccatcttcgcgcacctgtgcgagatgtttatcggggtgcgcccatctcttcggctgttccggtggttcttcaccgtacagccggtgtcgccgccgtcggtagtcggtggctgctacttccagccgcgggggccggtgctgaaccgctacattccctgcgtcctccgcaagaagtgggacgattggaagagcgactggttctacacccccctcgccgatgaagtgcgcctccgacttccgagccagcccccggcgcaggcctccagctggcgggcgccagtagatctgggagacggctacgacgccgttcttgaccgcctggcgggtctgcgatcccaggggctgacgggggccatggtgtacggcgactaccttcgtcgccggattgcgccgctccagcggcgcgcccggggcgcctgggagtacaccgggtccgaggactacatgaggacccatcaggggcacaaatgggattgggtccctgaggacctgaggatggtggtccaacgggtgctgaatctcagctccgtggaggcatcccttattccccaaggtgtcctccccctctgcagcgatccagatcgcgccagcatcctgtccatcatgcaggcggtcggggcgtcggaggagcgggctcctcgaggccacgaaggcgcaggcgggagccgcaggggggaacaatctaccccgggagggggtcgtgcttctgggccccgcgacgggggtccggggggcagccgccctgccgacgcccgggggaagaggaagcaggagggtaccccttccccatctcctccccgagggggcggggcggtgcgcgccagcagcaggcgcccggagggtgccgcgccgatgtcgcagcccgagggggggcgaaagaagaagcggctccgcaagatgggggagacggaaccatgccggggaaacctcatctctcccccaaggtggtcgtttagccgacctccctgcagcgagatcccgtcgcgcccccttcgcccttccaagtccggtcggtctgaggccgaggagacggcgaccgcggagacccggaggcgggaagctgaccggcgagaagccgcggaccgcctccgggaatccgaggagggtgcccaggaggctgtccgggctcgccaggctgaggaagccactcgggaggaggccagaccgcgctgggccgaggagtccgtccgggaggcggagacggcgcacgcacgtcaggcggcccaccgagcccccgacccgactccgcccgaagcgacgacgacttccgaggccacccacgacgaggccgcgggcgcaccgctcgggcccgacccctcgggcggcgctcaggacgagccggcctcggggcgaggccgcccccgagtccggcacgccttagccaccgcgaacagcacggtgctggacgggctaagtgcccagatggagatcctgcaggcggagcgggcggagctcgacgcggcttggacgcgcgttgaagaggggcggcgctcagtggaggccatggtggaggcgggccgcaaggctcaccgccggcatacctcagagctcgaggcccgtcggagggacctggcggagatcgccagggaggtggaggaggagcgggagactgccctcatcgccaccgctgtgctcgacgaggtgcgggacgacctccgcctccaatacaggagccgggcggcggagctagagaagaagctcgacaccgcccggggaatccttgacgccgccgctacccgggaacgtcgggcggcggagaatgaggcagcgtcccggcggcgcgaagaggcccttgaggctcgcgccacggcgctggaagagcacgcccgcgcgagggagagggacctggcggaccgcgaggccgccgttgccatccgggaggcaacgttggcggcgcacgaggccgcctgcgccgaagaggagtccgcactccgcctccgcgaggacgcgctcaccgagcgggagcgagctctcgaggaggccgaggccgcggcgcaacggctggcggacagcctgtccctctgcgaggcagcgcgggaggagcaggcgcgccgtaatctggaaggcgcccgcgccgagagggccgcactggatcagcgggccgctgagctcgaggcgcgggcgaaggagctggacgcgagggcgcacaacggcggggcgaccgcgggcgacggcgacctagccgctcgcctcgcagctgccgaacacaccatcgccgatctacagggcgcgctggactcgtccgccggggaggtcgaggcccctcgcttggcaggcgagctagaaattaaggaggccaaagtgagcaatgagagaggatttttggtagatggatcagatttgctgacgtgctactgcgtggagaggggtgacagggaggtgaccaccaagtggttcccgcgatcaatggtcacacgggcgagcgtgataatctcacaggagggagagcctgaaacagatttcagttggtag

SEQ ID NO: 78923 - DNA, 4980 bp, Oryza sativa
  Clone ID: PAT_MRT4530_78683C.1
ctaagcataaaatcgacgaaggtgttcaatattccaagaattgttgacaagagtaccatcttcacgcttgagtcggtaagaacctggccgagtgacttcagcgattatgaacggtccttcccataagggagataacttatgccgatcctgtgtagtttgaattctcctcagaaccaggtcgccgactaaaaaggctcgcgatcgaacatttcgattatgataatggcgtaacccttgtaaataccgagccgactggattaggactgcttcacgggcttcttccagtcggttgatatcatccactcgatcttcttcatatcgctcctcccggaagttacaaaatcggagggattcaaactctacctcacttggcagcatagcttctgcgccataaaccaagaagaacggcgactggccagtagcccgactgggggtggtgcgtaaagaccaaagtacagacggcagctgttctacccacttgccagtatagggatgcagtcggtcgaaaactcgtgctttgatcccttgaagtaccatgccattggcgcgcttgacttgtccgttactcatggggtgtgacacagaggcgtaacaaattttaatgccaaagtcttcacaaaaatctttaaatattccgcctgtaaattgagtgccgttatcagtaatgatacgattcggtactccaaaccgatgtacaatattgatgaagaaatctctagctttgtttgcggtgattgtgacgaccggtttggcttcaatccacttggaaaactttttccacagcatatcaagcccccaaaccgcgaacggccaagacaacgggatggtttgcaactcctgagctggcaagtgagtttgtcgggcaaagaattgacaaccctcacatgttcgcacaattttgtcggcgtcggaaacagctttgggccagaaaaaaccctgccgataagccttgccaacaatggttcgtgcagcagcgtggttaccacagatgcctgaatgaatgtctttttgcaattgtcttccctcttccaaagatacgcagcgttgcaggattcctgatggacttttcttgtacaactcggtcttgtgaatgacatagagtctgctgcgcctggaaatctgctcggcttcatttttgtcttgagggagttcttgtttggttaaaaatcttatgagaggttctctccagtcggcttcaatcatgcttacgccttgagtattcatggcttcaattttttcttttctaggcacggttggttcataaagatgctcaacgaacacatcagaagggattgcttcccgttttgaaccaaaattggccaatctatctgctgcctcattattgtgtcgaaggacatgggtgagctcaagtccatcgaatttatcttccaacttgcgtacctcttgtcgataagcggtcatattatcatcttgacaggaccattctttcatgacttgattaacaaccaactgagaatctcctcggacgattagccggcgaatgcctaaagagatggcaatccttaatccatggagcagcgcctcgtattccgccatgttatgggacgcagaaaaatgtatccacaatacgtagctcaatctttctccagtcggggaaattaggacaaccccagctccagcacccgtaagcctctttgacccatcaaaatgcatagtccaatattccatcttctcctctggcatgtcttcttggtactcggtccactcggtgaggtaatcagctaaagcttgtgacttgatcaaagttcgtggcttgaaagatatgtccaaaggcatcaattctaaggcccacttcgcaatccgtccgtttgcttcgcggttatgaagtatatccccgagtggaaacgacgtgaccaccgtgaccgagtgactttgaaaatagtgagataatttcctgactgtaattaacacaccatataataacttttgaacctgaggatatcttgtcttggagttggccaaaacatcgctaacgaaataaattggtcgttgaactttttgaatatggccttcctcttcacgctcgacaactaggaccatgctcacaacctgggaggtccccgacacatataataatagcggctcttgcggacgtggcgaggccaaaactggtggagtagtgagaagtttcttgaagtctggaaaggctttttctgcttcgggtccccacataaatctgagcagcttgcctgacggtactctgaagatgcacttttcagggtttaatttcatcctgaaagcacgaatgcttgcaaaggtttcttctaaatccgcaatcaggtcatccttctgcttggtcttgatgaccacatcatcaacataagcctcaacattgcggccgatctgagttgaaaaacatctttgaatcatgcgttgataggttgctcccgcgttcttcaatccaaagggcatggtgatgtagcagtaggccccaaagggcgtaataaacgaggtcttcaagcagtcggattcttttagtcggatctgatgatatccagaatagcagtccaagaaactgagtagctcgcagccggccgttgagtcaatcacctggtcaatgcgaggtaacccgaaaggatctttagggcaagacttgttgaggtcggtgtaatcgacacacatgcgccattgcccggtcttcttccgaaccaggactgggttagccagccagtcgggatggaggacttctttgatgaagcctgctgctaacagcttggttaattcttctttgattgcatccttcatatcttgtgcaaagcggcggagtcgttgtttgatgggtttggtgtcttccttgacatgtaaagagtgctcaatcacctctctaggaataccaggcatatcggatggtttccatgcaaaaatatctttattattcagggggtaccgccccgggtggaccactcggtcgggatgatccgagcggtcgaacttaattgctatctctgaccaccgaaggtcttggggcgtgttaggctgaaccgcattgatctcccgttctgttagcttctgctttctcttagattcataagacaggggtccgccgaagatgtgattgagttctttgcgatgatcttgaaaaccagtcggggcatcgtcttcgtcatctttcttgtttgatgtgccttgatctccgtctgagggcttacgtgcgttcttgacatattgctccgcaaattgtttgtagacgaagcaatctttggccacgtggttggagttgggatgatgcagacattgggagttcattatcttgttgaaggtgttgacgcgggaacgttgtcgggaagatggagaggttattgccacaagttcttcgggcttacgcttgcgatccttgtggttgttactgtggttgttacttccactccctcctgcggtcggcgtatccttctttggcttccaagtggtgcccgactgcttggacgccgtaatagcatcttcggctttggcatactcattggctttttcaaacatctgcttgaccgtcttgggaggtttgcgtccgaactttccgactaggtcctcgtggcgaatgcctttagtaaaggcggcaatgatgacgtcgtcggtgatgtcggagatcttgttgcgttgcttagagaagcgtcggatgtaatctcgaagggattctccagacttctgaacaatgttgtagagatcgaagtgtgtaccaggccgttcaaaagtgccttggaagttggcgatgaagtggtcgcgtagctctgcccatgatccaatcgtgccgcggggtagcccgtgaagccatgaccgggcagaatctgctagggccacaggtagataattcgccatggctttgctgtctcctcctactgcgcggactgcgagaccatagacggtgagccaagactcggggttggtggtgccatcatatttctcgattccagtcggcttaaagtcggctggccaatctactcgacgcagttcacttgtgaaggcagcaactccgtccatatcgtcatcgtagcgatccggtgaatgattgcctcttgctgcgcggagctggttgatggtgtcacgaagatcgacggggcgccttcgatgtggggagtgtggacgttcaactcgacgctcccagtcggggtgcgggtgcttgcggagttggctggaagcgaggcagcgatcatggtcttcgtgctgtagtcgttctcgctcttgtcgctgtcgttcttcctccagtcgacgacgttcagtttcttgtcgtgtgcgctcttcgtccgcttctcgggctcggcgttgttcctccgtttcgttgtcagccatgaatacgccgcagaagagaggcgtgtaattatcctcatagctgtcgtcgaagttgtcgaagtcgccgtagtcgaggatctcggttggtcgagaactgacgtcaggggagctgaggtagccatccaactcttccgttgagactgtcccaagagattggagtataacgccaacctccctggatctagattggattggggccgaagccgaagctcgtctagatcttcgaacgggggatgccttggctgtgaagacagtggccaaatcatcaggaagtctcatcaggattgaaggataggacccgtcatcttgatctggtcgctgaggggtagattggatctcgtccgagtggtttgaaactaactcgggagagacgatcttggagtagacatcggccgagttcggaataccgaacggcgagaggacctggtttctccctgactggttcgaatccgagtcaaggagagagagcttgccgaagttattggtgatgaagttgaggctgccgaaccggaacgcctgcccggggggaaggcgaagtcgtcgatgctggagacggaacccatcgcacttagtcggcaaaaacttgacgctgccccttcttggcgcgccaaccgagccctcatgaagatattctatctttattcggtaccctgtacctagctggaatataaccgccat

SEQ ID NO: 78924 - DNA, 5705 bp, Oryza sativa
  Clone ID: PAT_MRT4530_78684C.1
atgggtttcgtctccggcatcgacgacttcgtcttcccacccgggcaggcgttctgattcggcagcctcgacttcatcaccaacgacttcggcaagatttctctcctcgactcgggttcgaaccagtcgggaagaggccaggtctccatcccgttcggtatcccgaactcggccgagatctactccaagatcatctcaaccgagtcggcccaaaaccactcggacgagatccaatctactccaacacgatctgatcaagacgatggagcctatccgccaatcctgatgaaactccccaatgatttggttgccgtcttcaccacaagggcgtcttctccccgtaggtctaggcgagatccggctccggccctgatccagtctagcttcagggaagtcggcgtcatactccagcctctcggcacggtttcaacggaacaactggacggctacctcagctcccccggtgtcgactcatgaccaacggagatcgtggagtacgacgacttcgacgaaggctttgaagacaactacacacccctctacttcggcattttcatggccaacaatgagacgaaagagcagtgtcaagcccgagaagcagaagaacaacgcgtgcgacaagaagccgaacgacgccgactggaggaggagcgccaagcacaagagcgagaacggctacagcgtgagcaagaggagcgcgagcaggctgcaaaggaggctgaggatcggcaacagcgcgccttggaggccgggcagcgagcacgagaactgattgggcagcaagacgtcgaggggatgaaggtttttcgcaccccccaacagaacgaggttgcagcaatcaccctactcgacaccctcctcaaggaagacgcactcaatcaagccaaccacgtcgtcaacatcttgaaccagaccaagaccatgatcgcagcttcgttcccggttaactccgcaagcatccgcatgccgactggcagccgagttccccctcttcgatctcaagattatcatcaaccaagcctcagcatcgtcggcgtgggatccagtcacaggagcaaggatcacaacgagtgatccgtccactcgcctcctgaccgacgcagggagcgtcaagctgaaccgcccctgctccccacatcgcaggcgtcccatcgcaggcgacctgcgtcgagtggattggccagccggcttcaagccgactggaatcaagaagtatgacggcaccactaacccggagtcttggctcaccatctacagcctcgcaattcgcgcagcaggaggagacagcaaagccatggcaaactatctgcctgtggccctagcggattctgcccggtcctggcttcacgggctaccccgtggcacaattagaacttgggcggaacttcgcgaccacttcatcgccaacttccagggtacctttgaatgccctggcacacagtttgatctctacaacgttgttcaaaagtctggagaatccctttgagattacatctgacgcttttccgagcaacgcaacaagatctccgacatcaccgatgacatcatcatcgccgccttcaccaagggcattcgccacgatgacctagtcggcaagttcgggcgcaagcgtcccaggactatcaagcagatgttcgaaaaagccaacgagtatgccaaagccgaagatgccattaccgcgtccaagcagtcgggcactacttggaagccgaacaaagatacgccgaccacaggggggagtggaagtaccaatcacaaggatcgcaagtgtaagcccgaggaacttgtggcaactactacaccatcctcccgacaacgttcacgcgtcaacacttttgacaagatcatgaactcccaatgtccacatcatccaaattccaatcacgcggccaaagattgcttcgtctacaagcagttcgcagaacaatatgccaagaccgcacgcaaaacgactgacggagatcaaagcacgtcaaagaagaaggatgatgaagatgatgccccgactggctttcaagaccatcgtaaggaactcaaccacatctttggcggacccctggcatacgaatccaagcgaaagcaaaagctgaccgaacgggagattaatgctgttcagcccgacacgccccaataccttcggtggtcagagacagcaatcaagttcgaccgctcggatcatcctgaccgatttcggcactcaggagaattttcgcacagagaacgtttgcttcgaagttgctgatttcgagacagcgtaccacgccatactcggatgactggcattagccaagttcatggctatcccgcactacacctacatgatgatgaagatgtcgggtccccgaggagtcatatccctgcggagcgacatcaagcaagccgttacttgcgacaaggaaaactgcgagatggctcagacccgcgagatcacgctcgcccgagaagaaatccgactggctgcgtccacagcaaccgaagaagaagtgcctgcaaccaagatgacgaagtgtggagaaggcgacgccaagaccaagaagattcctctagatctatccaatcctactaagactgctaataataaagatatctttgcgtggaaaccatctgatatgcctggtattcctagagaggtgattgagcactctttacatgttaagaaagatgctaaacctatcaagcaacgactccgccgtttcgcacaagataggaaggatgcgatcaaggaggaactgaccaagctgttagcagcaggcttcatctaggaagtccttcatcccgactggctggccaaccaagtcctggttcggaagaagatggggcaatggcgcatgtgtgttgattacaccgacctcaataagacttgtcccaaagatcccttcgggttgcctcgcattgaccaggtagttgactcaacggccggctgggagctactcagttttttggattgctactcaggatatcatcagatctgactaaaggagtccgactgcataaagacttcatttattacaccctttggggcctattgctacatcaccatgccgtttggattaaacaatgtaggagcaatttatcaacgcatgatccagagatgattttttaactcagatcggtcgtaacgttgaagcctatgttgatgatgtagttgtcaagaccaagcagaaggatgatttgatcacagatctagaagagacctttgtgagcatccgcgctttcaggatgaaattaaaccatgaaaagtgcatcttcggagtaccatcagggaaattacttggctttatggtatcccacaggggcatacaagccaacacggagaaaatcaacgccattctcaacatgaaaccgccaagctcccagaaagacgttcaaaagttgactggttgcatagcggcgcttagccggttcgtctcacgactcggcgagcgggggatgcccttcttcaagctgctaaagaaaaccgacaacttccagtggggacccgaagcacaaaaagcctttgaagacttcaagaaactcctcactactccactaatcttagcattgccacatccgcaagagccgctgttgttatacgggttggcaactgcccaggtcgtgagcacggttctggttgttgagcgtgaggaggaaggccatgtccaaaaagtccataaaaccaatttatttcgttagcgaagttttggccgactccaagacaagatatcctcaggttcaaaagctgttatatggtgttttaattactgtcagaaaattatctcactacttcaaaggtcactcggtttcggtggttacattgtttccacttgggaatatacttcacaatcgcgaagcaaattggcggatcgcaaagtgggccttagagttgatgtctttggacctatccttcaagctgcgaacttcgatcaagtcccaagctttagcagacttcgtcgccgaatggaccgagtgctaagaagacatgcctgcggagaagatggagtactagactatgtattttgacaggtcaaagaggctttcaggcactggagcgggggtcgttctaatttccccgactggagagaggttgagctacatattatggatacatttttctgcgtctcacaacatgacggaatatgaggcgcttcttcacgggcaaaggattgcgatctccttgggaattcggcgtctgatagttcgtggagactctcagttggttgttaatcaagtcatgaaagagtggtcctgccttgatgataacatgaccacctatcggcaggaggtatgcaagttagaagataaattcgatggccttgagctaacccacgctcttcgacataataatgaggtagccgacaaacttgccaattttggttcaaaacgagaagcagctccttccgacgtgttcattgaacatctttatgagccaaccataccaaggaaagaaataaacgaggccatggacgctcaagacgtaagcatgattgaagccgactggagagagcccttcataaggtttttgaccaaacaagaactccctcaagataaagacaaagctgagcggatctccaggcacagcagactttatgtcgtacatgagaccgagctgtacaagaaaagtccatcaggaatcttgcaacgctgtgtctttggaggagagaagacaattgctaaaggatatacattcaggcatctatggcaatcacgctgccgcacgaactatagttggcaaggcatatcggcaaggtttcttctggcccacagttgtatccgatgccgacaagattgtgcgaacatgtgagggttgtcaattctttgcccgacagactcatctatcggctcaagagttgcaaaccatctcactgtcttggccgttcgcggtatgggggctcaacatggttggctcgtttaaaaaggctgtcggtggttatactcatctctttgtagctgttgacaagttttccaagtggatcgaagccaaaccggtcatcacaatcacggtagacaaggctagagatttcttcatcaacattgtgcaccggttcggggtacccaatcggatcatcactaataacagcacccaattaactggcggagtatttaaagatttttgtgaggacttcggcatcaaaatttgttatgactctgtagcgcaccccatgagcactggacaagtcgaacgggccaatggtatagtacttcaaggaataaaaacacgagtttttgaccgactacatccctatgctggcaaatgggtagaaaagttgccatctgtcctttggtccctgcgcaccacacccagtcaggctatgggccaatcgccgttttttctagtctatggagcagaagcgatgttgccaagcgaggtggaatttgagtcgctgtgatttcgtaatttcaacgaggagcgctacggagaagaccgagtagatgatctcaaccgactggaggaagcccgtgaagcagccttaattcagttggctcggtatttacaagggttgcgccattatcacaatcgcaatgttcgatcacaagctttcttagtcggcgaactggttctgaggaaaattcaaaccacacgggatcggcacaaattatctcccttgtgggagggaccattcataatttctgaagttactcgaccaggttcttaccgactcaaacgtgaggacggtactcatatcgacaactcttggaatattaaacatcttcgtcgtttttatgct

SEQ ID NO: 78925 - DNA, 429 bp, Oryza sativa
  Clone ID: PAT_MRT4530_78685C.1
atggtgatctccgaccaccgcacattcacgacctgcccctaccaccgcatggccgcgccagtgtcccggcctccacatcgcaccgagccaccaccgccgcacggcctcatcctcgtcgtctccctgccgtgcctccacctagccgcgcagccgttgcccgggtacggggagcgacggagaggaagccacgctgccgtggggggagccggggagggggagggggaggggcggagatggagggcgtggccggctgagagaaggagaaaaggagggaaaggaaagagggaaacgaaggagagaagggcgagcaagaaagaggcggaggcgaggcggaggaaagagatcgggaaaacaaatgaagagataaggacgggcgaaagaatcgaggtgcgtgggcagttgggcacgccgctctctctccgctcttag

SEQ ID NO: 78926 - DNA, 1794 bp, Oryza sativa
  Clone ID: PAT_MRT4530_78686C.1
atggaggatgattacgacgaggcgctgtctcagctcagggagccggaggtgccgtcgccgccgccgtccccgcgcctcctcgcgatgctgcagtccgcgggcttcgcttccccgcccccgccgacgtcgacgcagcagcagcagggaatcgagctctgcagtgtctgcgctgaagaggcggcggcggcggcggtggcggcggcgcgggggatggaggcgccggggctgaggcccgccacgcagcagcagcagcagcagggaatcgggctctgcagtgtctgcgctgaaggggaggcggcggcgcagcagccaactctcgcgccgccgccggcgcagcaaccgcagcagaatcagggcgttggcttcggcgggaccggggctggagcggcgacgacggtgtcccctgcgccgcgggggacgacgatggcgagggaacgcgcggcggagcagctcgcgtacgacgacgccatcagcaggctgatcaacaagttcgcggggcacgacaaggacgcgatccaggggaagaacacgtcgaacgtgcaggtgttcgatgacatccacgaaggcgacgcgatccgcatggccgagctcgaggagttcgagaagcaggtgctggcattgaacgccgccgcctggaacgacgccgcctcctcctgcggcgaggagccggccgttgcggataacttcctgaacggcgaggagcagcgggaggaggaggaggaggaggaggcggcggagcggaggagctggacgcttgagcggtgggagctggagctgaaggcgagccgccggcgtgtggtggaggcgaacgagcgcgcgcggggggtccagcgcgagcgcgagagggtgcggcggcaggtggcggcgctgctgcagcaacggatgctgaagcgtcagcagatgtccgcgctgtcgcgggaacgcgcgctggcgcacaagcgattcgtgctccagcagcgtcaatggcggcagcagatggtggagcagcagcagcagcagcaacgcgcgccgatgcagcagcagcgcatgccggtggtgcagcaggcggcgccgcggaagcaacgagtcttcacggtgacggtgagtcgggcgtatgcacttcagcaccaacggggaagcacgccggaggagcggcgcgcgtcggtgcgggagcgagtcaggctagagctgcagaaggtggttgcatttctgcagcgacgcgagctggagcagaggtatgagcgggcggcggcactgctgaggcaacgcgcgcagctggagcaggcagcgttacaggagcagctcaagctggagatgcagcagatgcggcggcggcaagagcagcgccagcgcgcgcgtgagctggcgatcatgccgcagccgcaggggcatcgcggccgcggcggcggcacggcgcggcacccggacgccgcaatcgcccaggggggatccggagtcggacacaaccacccccgcgtggaggagcagctgcccgcgcagcagcagcagcatcggcggcagcgcgtgcgatcagtgcgaccgacgttcgtggcgccgcgcggcgtgggcacgtcgagcgggcaggcgtaccgggcaccgcccgcgaggcagatcgttgttcagccgcagccgccgccgcagcagccggagctggcagggcaggcgttccgggcgccggcgccgcagacaccgcagcgaccggagtcggcggggcaggacgtgccggagccgcagccggaggaggaggaaggggaggcggtgggtggcgaggccgtcgtgatggcgccacagccttcgtcgacgagggagcagtag

SEQ ID NO: 78927 - DNA, 310 bp, Oryza sativa
  Clone ID: PAT_MRT4530_78687C.1
acggacacgactcaagctttcctaaagataaaatacgaacaagtccacatggcaaactcttatcatatctctaatttaaaccgacataaatatcctaattaatagatacaattgccttaggcgagctcaatctctatacggcaatatcagttattccaatctaaacccaaaccgagcccaagtcaagctgtattggctacctgccatatcggctcaatccgtttccaactatttggtaagattcaatctcctttgattccgcatcgatatccaactccaaatccatgtgaatcttgttaaatttcgcttt

SEQ ID NO: 78928 - DNA, 483 bp, Oryza sativa
  Clone ID: PAT_MRT4530_78688C.1
aacaaaccacttcaaattggtcggagaagaagagggcgttcgcgcatggggaaggcggcgagcatgagggtggcgctggtgtccgtggtgctcgtgggcctgatcctggtttccacggcccacgccgcgcggcccgagaagctgcccgccgtcgtctccccctccatcgcccccgccgtcggcgaggtcgtcgatgccgccatcaacgccgtcgatctcctgggggtctcgaagatgcaggaggccaacccgtacactcgcggctgcagcaggatcaaccggtgccgcggctgacggacggcacgcgcgcgtcgcaattatacatgtgtatttgagtattgatcatcgacgacgacgatgagctagctggtggacgattgatttcgcgtggtggcgattggatctaattacccgtgtgtgtgtactactccgctcctccgattttaaatatactccacaattattaacttgtttatttttgtt

SEQ ID NO: 78929 - DNA, 4734 bp, Oryza sativa
  Clone ID: PAT_MRT4530_78689C.1
ttagaaggctcgtgatcggacgttacgattatgataacgacgcaacccttgcaggtatcgggccgtctgaattaaggctacttcgcgggcctcttccagtcgatgtagatcatccactcggtcttctccgtagcgctcctcgcgaaagttgcgaaaacgcaaagattcaaattctacctcactaggcaacattgcttctgctccataaactaggaagaatggtgactggctcgtagccgacatgccgttggctcgttcaacttgcccattgctcataggatgcgctacggaagcataacaaattttgatgccgaagtcatcacaaaaatctttaaatactccaccagtgaattgagtgccattatcagtaatgatccgattaggtaccccaaaccgatacacaatgttgatgaaaaaatctctagctttatctgccgtgattgtgatgaccggtttagcttcaatccacttggagaatttgtcaatagccacaaagagatgtgtgtaaccgctgactgcctttttaaacgggccgaccatgtcaagcccccaaaccgcaaacggccaggacagcgggatggtttgcaactcttgggctggtagatgagtttgtctggcgaaaaattgacaaccttcacatgtccgcacaatcttgtcaacatcagacacagccgtaggccagaaaaaaccttgccggtaagccttgccgacaatggtgcgtgcagcagcgtgattgccacagataccagaatgtatatcctttagcaattgtctcccttcctctaaggacacacagcgttgcaggattcctgatggacttttcttgtacagctcggtctcatggataatataaagcctgctgcacctggaaatccgctcggcttcatctttatcttgagggagttcttggttggtcagaaatcgtataaggggctctctccagtcggcttcaaccatagctatgtcttgagtgtccgcggcctcaactgtttctctccttggtacggttggttcgtaaagatgttcgacgaacacgtcagaaggagccgcttcgcgtttggatccaaaatttgctagtctgtcggctgcttcgtcattgtgccgaagaacatgggtgagatcgattccatcgaacttatgctccaacttgcgtacctcttgtcgataagcgatcatattgtcgtcaaggcaggaccactctttcataacttggttaacaactaactgtgaatctccgcaaactatcaaacgcctgattcccaaagagattgtgatccgtagtccgtgaaggagcgcctcgtattctgccatgttgtgagttgcagagaaacgtatccataacacgtagctcagtctctctccagtcagggaaattaaaacaaccccggccctagtgcttgaaaatctctttgacccgttaaaatgcatagtccaatactccatcttctcctcgggcgtgtcctcttggcactcggtccactcggcgacgaagtcggctaaagcttgggacttgatcgaagttcgtggcttgaacgatatgtccaaggacatcagctctaaggcccattttgcgatccacccgtttgcttcacgattatggagtatattgccgagtggaaacgatgtaaccaccgtgaccgagtgaccttggaagtagtgagatagcttcctgacggtaattaagacgccatataatagcttttgaacctgaggatatctagtcttggagttggccaaaacctcgctaacgaagtagattggtcgttggattttttggacatggccttcttcctcatgctcgacgaccaggactgtgcttataacctgggaagttgccgatacatataacaacaacggctcttgcggatgtggcgaagctaagactggtggagtagtaaggagttttttgaagtcttcgaaggctttttgggcttcgggtccccattggaagttgtctgttttcttcaacagcttgaaaaagggcatcccccgctcgccgagtcgcgaaacaaactggctgagcaccgccatgcaaccagtcagcttttgaacatctttctgagaacatggcggtttcatgttgaggatggcattgattttctccgggttggcttgtatgcctctatgagacaccataaatccaagcagcttccctaacggtactccgaagatgcacttttcatggtttaatttcatctggtcaatgtgaggcaacccaaaaggatctttaggacaggacttgttgaggtcggtgtagtcaacacacatgcgccattgtcccgttttcttcgaaaccaggactgggttggccagccagtcgagatgaaggacttccttgatgaagcctgctgctaacagcttagttagttcttccttgatcgcatctttcctatcagcagtcttagtaggatcagaaggatcagaaggatctaaaggaattttcttggttttggcttcgctttcaccactctttgagatcttggttgcaggcacttctccttcgcttgccgtgattgcagccagtcggatgtcttctcgggcgatcgtgatctcgcgagtttgggccatctcgcagctttccttatcgcatgtgacggcttgtttgatgtcactccgcagggatatgacttctcgaggaccaggcatcttcatcatcatgtaggtatagtgcaagacagccataaatttggctaacgccgggcgcccgagtatggcatgatacgctgtctcgaaatcagcaacttcgaagcagacgttttctgtgcgaaagttctcccgagtaccgaaggtgaccggaagagtgatctggccgagtggcgtagcggataacccagggggtaccgccccgtggtggaccacttggtctggatgatccgagcggtcaaacttgattgttgtctccgaccaccgaagatattggggcgtatcaggctgaacagcgttaatctcccgttcggtcagcttttgttttcttttagattcataagccagaggtccgccaaagatgtggttgagctccttgcgatggtcttgaaaacctgtcggggcatcatcgtcatcgtccttcttttttgacgtgctttgatctccgtcggaggtcttcagtgcattcttggcgtattgttggtccttgtgattggtacttccactccctcccgtagtcggcgtatctttctttggcttccaagtggtgcctgactgcttggacgcgataatggcatcttcggctctggtatactcgttggctttttcgaacatctgcttgaccgtcctgggaggcttgcgcccgaacttgccgactagatcttcgtgatgaatccccttggtgaaagcgacaatgatgatgtcatcggtaatgtcggagatattgtagagatcaaactgtgtgccagggcgttcaaaggtgccctggaagttggcgatgaaatggtcgcgaagttccgcccatgatctgatcgtgccacggggaaacccatgaagccaggaccgggcagaatctgctagggccacgggcaagtagtttgccatggctttgctgtctcctcctgctgcgcgaattgcgaggccgtagacggtgagccaagactccggattagtggtgccgtcatacttctcgattccagtcggcttgaagccggccctgctcctgctattggatcccgctccggcgatgctgagacttggctggtgataatcttgagatcgaagatggggaactcggctgcaagtcggcgtgcggacgctggcggagttaaccgggaccgaggcggcaatcatggtcttggtctggttcaagatgttgacgacgtgatcagcttggttgagtgcgtcttccttgaggagggtgtcgaggagagtgatcgccgcaatcgcgttctgttgaggggtgcggaagaccgctgtcccctcaacgtcttgctgcccgataagttctcgcgctcgtcgccttgcgtccaaggctcgttgtcgtcggtcctcagcctcctttgcagcccgttcacgttcctgttgctcacgctgcagccgttcttgctcttgtgcctggcgctcctcttccagtcggcgtcgctcggcctcctgttgtacgcgtcgtccttctgcttctcgggcttggcgctgttcttccgtctcgttgtcggccatgaagacgccgaagtagagaggggtgtaattatgttcaaagctttcgtcgaagtcgtcgaggttgcagttgtcatagcgatagccgaattcatcatactctacgatctctgttggtcgtgagtcgacgccgggggagctgaagtagccttccaattgatccatcgaaaccgtgctaagtgactggagtatgacgccgacttccatggaactaggccggatcggtgctgaagccggatcccgcctaggcctacggggagaagacgcccttgtagtaaagacggcagccagatcgtcgaggagtttcatcaggattggcgggtaggccccatcgtcttgatctggtggtgttaaagtagattggatctcgtccgagtggtttgaaactgactcgtcggagatgaccttggggtagatctcggccgagttcgggataccgaacggggcggagatccggcctcttcccgactggttcgaatccaagtcgaggagagaaatcttgccgaagtcgttggtgatgaagtctaggctgccgaaccggaacgcctgcccgggagggaagacgcagtcgtcgatgccggagacggaacccat

SEQ ID NO: 78930 - DNA, 630 bp, Oryza sativa
  Clone ID: PAT_MRT4530_7868C.1
acctcccattcctcattagtttcattctcatcatcctcgccctcatccatgtcctcatcctcctcttcctctacaacatcattcttgtcctcatccaagtcctcatcctcttccatctcctcctcctcatcatcatcatcattattctcgtcctcatcctcttcgatctcctcgtcctcttccccctcatcctcatcgtcatcaacattctcgtcctcgtataagaactcatcctcttcctcttcctcctcctcctcctcctcctcgtcatcatcatcgtcatgcatcatctcatgctccatttcatgctccatctcactctccattgcatcctcatcagccgcatcgacatgctcaaccacgccgaactctccttcgagctcaacctcttcgggatggcgcaggccgctgtgcgccgcagcgcggggcagtgcgaggccttctggggcgagtacgcgccgacgaagaaatattgtaggactcttggttgactgtatcatctatgcttctattctggagatgtgtgagattctccaagcctttttttgacggaagaaggtagagcgtgctccaccttataatcatttcattaatagaaatgaggtttccaagttacaagttactagaggt

SEQ ID NO: 78931 - DNA, 660 bp, Oryza sativa
  Clone ID: PAT_MRT4530_78690C.1
aactagtggatccccgggctgcaggcttgctcgcccttctctccttcgtttccctcttttctttcccttcttttctccttctctcagccggccatgccctccatctccgcccctccccctccccctccccggctccccccacggcagcgtggcttcctctccgtcgctccccgtaccccttagtccatatgatgtttgtttgtttgttcgtacaaatctgatgctatttttttctcttttcctccttttgtgtcagtcggtcgggcaacgggcaacggctacgcggccaggtggaggcacggcagtggagacgacgaggatgaggccgtgcggtggtggtggctcggtgcgatgcggaggccgggacactggcgcggccatgcggcggtaggggcaggtcgtgactgtgcggtggtcggagatcaccattggcgtcgcctccccctcctcttgatgtatccatggcaacccctaacctgcttcttgtcgctatctccacatagaggtagtggcaatggcaatggaggaagggagccaggctttagcggtttgtagatgatgacgcaatgacgatggtgtctctcaagcggtggctggaggtagaacaaatttaaggattttgctgtttatcttctgatcttgcttttcgttatgcatctg

SEQ ID NO: 78932 - DNA, 3594 bp, Oryza sativa
  Clone ID: PAT_MRT4530_78691C.1
tcacgggaaaagggacgatgacgccagcgatgacgtcaccgacagcggcggcggctcggcggagcggacagctcgggcggcgcacgctcgccggcgaacggcggcacttcggcacaaacggagggcaccagcacgtagaggacgacgcggcgaactcaccggtgaccaaaacggcggcggaagaccaacggacggcggcggcgacgaggaggaagcggcgaagctcttcgggtcgacgacggcgacggcgctccgacggtcttcggcggcggcgaagcggtggacggggacagcgatgacttggcgaacccgatggtggcgacgtgtcacgcccagaaattctcgaaccagaatttctaagcggtgaccaaaacggcggcggaagaccaacggacggcggcggcgacgaggaggaagcggcgaagctcttcgggtcgacgacggcgacggcgctccgacggtcttcggcggcggcgaagcggtggacggggacggcgatgacttggcgaacccgatggtggcgacggcgaccgacgacggcgactgcaacggcggcgcggcgcggcggctgagcgccgccatgcaaccagtcaacttttggacgtctttttgggagcttggcggtttcatgttgagaatggcgttgattttctccgggttggcctgtatgcctctttgagataccataaatccgagcaatttccctgacggtactccgaagatgcacttttccgggtttagtttcatcttgaaagcacgaatgcttgtaaaagtttcttctaaatccacaatcaggtcatccttctgcttggtcttgacgactacatcatcaacataagcttcaacattgcgaccgatcaggactgggttagccagccagtcgagatgaaggacttccttaatgaagcctgctactaacagcttggttaattcctccttgatcgcatccttcctgtcaacagtcttatcaagatcggagggatctaagggaatcttttttgtcttggcatcactttcttcggtcttcgtcagcttggttgaaggcacttctccctcgcttgccgtggtcgcagccagtcggatctcttcgcgggcgagagtagtctcgtgagtttgggccatctcgcaactttctttgtcacatgtgacggcttgcttgatgtcgctccgttgtgatatgacccctcgaggaccaggcatcttcatcattatgtaggtgtagtatgggacggccatgaatttggctagagccggtcgtccaagtatagcatgatatgctgtctcgaaatcagcaacgtggaagggtgcattactcggctttaattccgtgcgaggaatctgcatatcgtccagggtcttagcgaaaaggatgttgagtgcgctgccaccgtcgatgagagtccgtcggagcttgacattgcgaaccactgggtctagtaccagggggtaccgccccgggtggaccactcggtcgggatgatccgagcggttgaacttaattgttatctctgaccaccgaagatattggggcgtgctaggctgaaccgcattgatctcccgctctgttagcttttgttttctcttagattcataagccaggggtccgccgaagatgtgattaagttctttgcgatgatcttgaaaaccggtcggggcatcgtcttcatcatctttcttctttgatgtgccttgatctccgtctgagggtttacgtgcgttcttaacgtattgctccgcgaactgtttgtagacgaagcaatctttggccacgtggttggagttgggatgatgcgggcattgggagttcattatcttgtcgaaggtgttgacacgagaacgttgtcgggaagatggagaggtggtcgccacaagttcttcgagcttacgcttgcgatccttgtggtttttacttccactccctcctgcggtcggcgtatccttctttggcttccaagtggtgcccgactgcttggatgtcgtgatagcatcttcggctttggcatactcattggctttttcaaacatctgtttgaccgtcttgggaggtttgcgtccgaacttgtcgactaggtcctcgtggcgaatgcctttagtaaaggcggcaatgatgacgtcgtcggtgatgtcggagatcttgttgcgttgctcagagaagcgtcgaatgtaatctcgaagagattctccagacttctgaacgatgttgtagagatcgaagtgtgtgccgggccgttcaaaagtaccttggaagttggcgatgaagtggtcgcgtagctctgcccatgatccgatcgtgtcgcggggtagcccgtgaagccatgaccaggcagaatccgctagggccacaggtagatagttcgtcatggctttgctgtcccctcctgctgcgcggattgcgagaccatagacggtgagccaagactcagggttagtggtgccgtcatattttttgattccagtcggcttaaagccggctggccaatccactcgacgtagatcgcttgtgaaggcagcaactccgtccacgttgtcgtcgtagcgatccggtgaatgatggcctcttgctgtgcggcgctggttgatggtgtcgcgaagatcgatgggacgtcttcgatgtggggagtgtggtcgttcaattcggcgctccctatatcgctcgggaggcgagcgaacggaccgttcatcatgtcccctgctcctgcgactagattcggcgccggcaatgctgaggcttggctggtgatagtcttgagatcgaagatgagggactcggctaccagtcggggtgcgggtgcttgcagagttggctgggaccgaggcagcgatcatggtcttcgtctggttcaagatgttgactacatgatcagcttggttgagtgcgtcttccttgaggagggtgtcgaggagagtgattgctgcaaccgcgttctgttggggggtgcgaaagaccgctatcccatcgacgtcttgttgcccaatgagctctctcgcttgccacccagattccaaggcgcgttgtcgtcgatcttcagcctcctttgcaatccgttcgcgatcttgttgctcacgctgtagtcgttctcgctcttgtcgctgtcgctcttcctccaatcggcgacgttcagcttcttgccgtgcgcgatcttggtccgcttctcgggcttggcgctgttcctccgtttcgttgtcagccatgaatacgccgaagaagaggggcgtgtagttatccttatagctgtcgtcgaagttgtcgaggtcgccgtggtcgtagtggtagccgaaatcgtcgtagtcgaggatctcggttggtcgagaactgacgccgggggagccgtcgtcttgatctggtcgcggaagagtagattggatctcatccgagtggtttgaagccgactcgggagagatgatcttggagtaggcctcggccgagttcggaataccgaacggcacagggacctggtctctccccgactggtttgaatccgagtcaaggagagagatcttgccgaagtcgttggtgatgaagttgaggctgccgaaccggaacgcctgcccgggaggaaaggcgaagtcgtcgatgccagaaacgaaacccat

SEQ ID NO: 78933 - DNA, 6053 bp, Oryza sativa
  Clone ID: PAT_MRT4530_78692C.1
agcataaaaacgacgaagatgttcgatattccaagaattgttgataagagtaccatcttcgcgcttgagtcgataagaacctggccgagtgacttcagcaattatgaacggtccttcccacaagggagataatttatgccgatcctgtgtggtttgaattttcctcagaaccaggtcgtcgactaaaaaggctcgcgatcgaacattccgattatgataacggcgcaacccttgcaaataccgagtcgactgaattaaagctgcttcacgggctttttctagtcgattgatgtcgtctactcggccttcttcatagcgttcctcgttgaagttttgaaatcgtagtgattcaaattccacttcactcggcaacattgtttctgcaccataaacaaaaaaaaacggcgactggctggtagcccgactgggagtagtgcgtaaagaccaaagtacggacggcagctaatctacccacttgccagcatagggacgtagtcggtcgaaaactcgtgcttttatcccttgaagtaccatgccattggcacgctcgacttgtccattactcatggagtgtgccacggaggcatagcaaattttaatgccgaagtcttcacaaaagtctttaaatgctccgccagtgaattgaatgccattatcagtgatgatccgattaggtaccccaaaccgatgcacaatgttgatgaaaaaatctctagctttatctgctatgatcgtgatgaccggtttagcttcaatccacttggagaatttgtcaatagccacaaagagatgcgtgtaaccgccaactgcccttttaaacgggccaaccatgtcaagcccccagaccgcaaacggccaggacaacgggatggtttgcaactcttgggctggcagatgaatttgtctggcaaaaaattgacaactttcgcatgtccgcacaatcttgtcagcatcagacacagctgtaggccagaaaaaaccttgccggtaagctttgccgacaatggtccgtgcagcagcatgattaccacaaataccagaatgtatatccttcaacaattgtctcccttcttccaaagacacacagcgctgcagtattcctgatggacttttcttgtacagctcagtcccatgaataatgtaaagtttgttgcgcctggaaatccgctcggcttcatttttgtcttgagggagttcttgtttggtcaaaaatcttatgaaaggttctctccagtcggcttcgatcatgcttacgccttgagtatccatggcttcaattgtttcttttctgggtacagttggttcataaagatgctcaacgaacacatcagaaggggctgcttcccgttttgaaccaaaatttggccagtctgtcggttgcctcattgttatgtcggaggacatgggtgagctcgagtccatcgaatttatcttccaacttgcgtacctcttgtcgataagcggtcatattatcatctagacatgaccactctttcatgacttgattaacaaccaactgagagtctccacggacgattaatcggcgaatgcctagagagatggcaatccttaatccgtggagtagcgcctcgtattccgccacgttatgggacgcaaaaaaatgtatccacaatatgtagttcaatctttctccagtcggggaaattaagacgaccccagcttcagtgcctgtaagcctcttcgacccatcaaaatgcatagtccaatattccatcttttcctctgacatgtcttcttggcactcggtccactcggcaaggaaatcagctaaagcttgtgacttgatcgaagttcgtggcttgaacgatatgtccaaagacatcaattctaaggcccacttcgcaatccgtccgtttgcttcgcggttatgaagtatatccccgagtggaaacgatgtgaccaccgtgaccgagtgactttgaaagtagtgagataatttcctgacggtaattaagacaccatataataacttttgaacctgaggatatcttgtcttggagtcagctaaaacctcgctaacgaaataaattggtcgttggactttttgaatatggccttcctcttcacgctcgacaaccaggaccgtgctcacgacctggaaggtcgccgacatatataacagtagcggctcttgtggatgcggcgaggccaaaactggcggagtggtgagaagtttcttgacgtcttcaaaggctttttgtgcttcgggtccccactggaaatcgtcagtcttcttcagcagcttgaaaaagggcatcccccgctcaccgagttgtgagacgaaccggctgagcgccgccatgcaaccagttaacttttagacgtctttttgagagcttggcggtttcatgttgaggatggcgttgattttctccgggttggcctgtatgcctctttgagataccataaatccgagcaatttccctgacggtactccgaagatgcacttttcagggtttagtttcatcctgaaagcacgaatgcttgcaaaagtttcttctaaatccgtgatcaggtcatccttctgcttagtcttgacgactacatcatcaacataagcttcaacattgcggccgatctgagttgagaaacatctctgaatcatgcgttgataggttgctcctgcgtccttcaatccaaagggcatggtgatgtagcagtaggccccaaagggcgtaataaacgaggtctttaagcaatcagattcttttagtcagatctgatgatatcccgagtagcagtccaagaagctgagtaactcgcagccggccgttgagtcaaccacctggtcaatgcgaggtaacccgaaaggatctttagggcaagacttgttgaggtcggtgtaatcgacacacatgtgccattgcccagtcttcttccaaactaggactgggttagccagccagtcgggatgaaggacttccttgatgaagcccgctgctaacagcttggttaattcctctttgatcgcatccttcctgtcctatgcaaaacggcggagtcgttgcttgatgggtttggcgtcttccttaacatgtaaagagtgctcaatcacctctctaggaataccaggcatatcggatggtttccatgcaaagatatctttattattagcagtcttatcaggatcagagggatctaagggaatctttttcgtcttagcatcgctttcttcggtcttcgtcagcttggttgcaggcacttctccctcgcttgccgtggtcgcagccagtcagatctcttcgcgagcaagggtgatctcgcagatttgggccatctcgcaactttctttgtcgcatgtgacggcttgcttgatgtcgctccgtagtgatatgactcctcgaggaccaggcatcttcatcatcatgtaggtgtagtgtgggacggccatgaatttggctagagccggtcgtccgagtatagcatggtacgctgtctcgaaatcagcgacttcgaaacaaacattttctgtgcgaaaattctcccgagtgccgaaagtgaccggaagagtgatctggccgagtggtgtagctgataatcctaggataacaccatggaagggtgcattactcggctttaattccgtgcgaggaatctgcatatcgtccagggtcttagcgaaaaggatgttaagtgcactgccatcatcgatgagagttcttcggagcttgacgttgcgaaccactaggtctagtaccagggggtaccgccccgggtggaccactcggtcgtgatgatccaagcggtcgaacttaattgctatctctgaccaccgaaggtattggggcgtgttaggctgaaccgcattgatctcccgttctgttagcttctgctttctcttagattcataagccagaggtccgctgaagatgtgattgagttctttgcgatggtcttgaaaaccagtcggggcatcgtcttcatcatctttcttctttgacgtgctttgatctccgtctgagggcttacgtgcattcttgacgtattgctccgcaaattgtttgtagacgaagcagtctttggccacgtggttggagttgggatgatgcggacattgggagttcattatcttgtcgaatgtgttgacgcggggacgttgtcgggacgatggagaggttgttgccacaagttcttcgggcttatgcttgcgatccttgcggttgttacttccactccctcctgtggtcggcgtatccttctttggcttccaagtggtgcccgactgcttggacgccatgatagcatcttcggctttggcatactcattggctttttcaaacatctgcttaaccgtcttgggaggttttttgtccgaacttgccgactaggtcgtcgtggcgaatgcctttagtaaagacgacgatgatgacgtcatcggtgatatcggagatcttgttgcgttgctcggagaagcgtcggatgtaatctcgaagggattctccagacttctgaatgatgttgtagagatcaaagtgtgtaccagggcgttcgaaaatgccttggaagttggcgataaagtggtcgtgtagttctgcccatgatccgattgtgccgcggggtagcccgtgaagctatgaccgggcagaatccgctaaggccacaggtagataattcgccatggctttgctatctcctcctgctgcgcggattgcgagaccatagacggtgagccaagactcggggttggtggtaacatcatatttctcgattccagtcggcttaaagccggttggccaatccactcgacgcagatcgtttgtgaaggcagcaactccgtccatgtcgtcgtcgtagcgatccggtgaatgatggcctcttgccgcgcggcgctggttgatggtgtcgcgaagatcgacggggcaccttcgatgtggtgagtgtggtcgttcaactcggcgctccctgtatcgttcaggaggcgaacgaacagatagttcatcatgtcccctgctcctgcgactagatccggcgccggtaatgctgaggcttggctggtgatagtcttgagatcgaagatgagggactcggctaccagtcggggtgcgggtgcttgcggagttggctggaaccgaggtagcgatcatggtcttcgtttggttcaagatgttgacaacatgatcagcttggttgagtgtgtcttccttgaggagggtgtcgaggagagtgattgctgcaaccgcgttctgctagggggtgcgaaaaaccgctgttccatcgacgtcttgttgcccgatgaggtctctcgcttgtcgcccggattccaaggcgcgctgccgtcgatcttcagcctcctttgcaactcgctcgcggtcttgctgctcacgttgtagtcgttcccgctcctgtcgttgtcgttcttcctccagtcggcgacgttcggtttcttgtcgtgtgcgctcttcctccgcttctcgcgctcggcgctgttcctccgtttcgttgttagccatgaatacgccaaaaaagagaggcgtttagttatcctcatagctgtcgtcgaagtcgccgtggtcatagtggtagccgaagtcgtcgcagtcgaggatctcggttggtcaagaactgacgccaggggagctaaggtagctatccaactcttccgtcgagactgtcccaagaggttggagtataacgccaacctctctggatctagattggatcggggccgaagccggagcttgcctagatcttcgagtgggagatgtcttggttgtgaagacagcggccaaatcatcaggaagtctcatcaggattgagggatagggcccgtcgtcttgatctggtcgcggaggagtagattggatctcgtccgagtggtttggagccgactcgggggagatgatcttagagtaggcctcagccgagttcggaataccaaacggcacggggacctggtttctcccagactggttcgaatcctagtcaaggagagagatcttgcggaagtcgttggtggtgaagttgaggctgccgaaccgaaacgcctgcccgggagggaaggcgaagtcgtcgatgccggagatggaacccat

SEQ ID NO: 78934 - DNA, 3371 bp, Oryza sativa
  unsure (1)..(3371): unsure at all n locations
  Clone ID: PAT_MRT4530_78693C.1
ggatgtaacgtccagcttacgtggcagtaacacggcccattaagcacacagtcaagcctgcatatgcgcggcctttttttttttttgtgtatcaaaagtaacataacataacgcaatactaaacaataataacagtctatatttaaaacaagtcaacattaaggagcaacaaaaaacaatttcaacacataaatccggaaacccctctctaaaagaagcttaaagcttgagttgcaggtttaactagcagggctttgggctccactgttctcaggagcagtaggtgccggagcagcggttgtcgcaggcgcagcaccagtcgcaggggcggaagcagattggtcctgggaggcagcagcagttgtagcttcagtagaatatgcggcaggctgcccgtagcttccactgccataaggatcaccataggactgctgctgaccatagcctgggtggcttgcagcaggtgcaccagggtaaggtggaggtgcgccatagccttgctggttctgagagtaaccatactggccatacccaccaggagcagatccaggaggcggcgcctgtccgtaaggagaagtgttaggaggagccttctgtccctgcggaggtgcgccatagctgccctgactataccctccctgtggttggggctgggtaccatagccagtctgtggtggtggcgccccatatccagactgaggagcagacccttgcaccgggtagcttgaagcagcgctagtaggtggttggcttgaatagccagggtggcttccagcagcaggagttgaagtttgctgcccaggagatgcttgaccagctacaccttgagcaccatagcttggtgcggacccatcctgagttgaattagcggcggacccatagccagaagttccatagccctgctgatcatatccagtctgctgagagtagccctgctgctgcccttgggtctgataataactagaataatcatatgcctgctgctgcccaccactctgctgagcgtaggacgaatcatacccttgggaagcatatgcaggaggctggctggaattatagctagtagcatcaccaggtgcagcagtcccaggggcagattgttgctgttgaggttgctgctgttgattgtaataatcatagcccgtgccagggggggcctgctgagattgctgatttgatgattgatcccacccagtctgataacccccagatgctggagggtagctaccataaggttgctgaggagcgccatattgtgggggtgccccaggataggctccaggctgcatgtaaccataaccaggctgttgcatcggtgcccccccatgcggaccccaatttgactgaggacgaggagggcgatagccctgctgagaatagccacctgacattgggtttctagcacgattctgcaaaaatatagtttgcacatcgagatcaatattctcaagcaacattgctgatgcccatctatcgtctcccatgtgcaaaactatgggggctaaagaagattggacattggtaacctcaatcaccaattgctttgcagtttcaatttgctcttgtgtaccatcaatatacactgttctttcggttgcaggatcaccagggggtaaatgcaaagggacaacctgtatacgagcaccagatttggcttgcatggattttatagtctcaccaccctttccaataaccagaccaaccttattgttagctattttcatttggaattgatcagcgcctggttgaggagcattgtactttcggctagagagattaccagatgaagcagcatcagcctctgccaggacctcattgatcaattgctcagctctgcttatctgatcaggagtgcctgaaagttcaacaggtcttgtctgtgagccaggtagagcatcaaggtctcttgtcacttggatcttagctcctgactgaagttggagattctttatagtttctcccgactttccaatgataacaccaacccttccatttgggatttcaattgttttgcttgtaccctggtatccaccatatgaggagtactgaggtgtgctgccatgagaagataaagatgggatagcagatccgtgcccatttttacgaaaaaggaggcagagtataatggtgacaatcatgataacacaaacagatcgcgcgccaccggccgaggacgagaagccgagcccggtcgcgcggccgccgccgccgccgccgctgctgccgagggaacccaccccggcgcccgcgtcgtcgtcgtcgccgccggcgtcgaggcgggggcgcttcgcctcggcggcgttgaagagcctggccgcgatcgcctgcgcgcgctgcttcgcgagctggatctcgtcggcggggggcgggggcacgctgttgtacgacgccggcgcgccgcccgagggcggggaggcggccggcggggcggaggagaagcccgtgcgacgcgggggcggcgaggggtcgtcgtacttgcgcttggaggagtagtggtcgtcggccatggcgacgcggggggagtagggtttgggatacaatagtgccattcagtttatatatgttgcaccgtcaaaaataaattgactgataagtgattatactactcaactaagtagaatatctatttcattgataatcaaaacagataagcaccaataatttcttttgtccatggtctcctccaagaatatggtataaacaaaggagaaatattttgcagttttctaacagcttaggtatggtaacctgcaagttcacagaggagaaaatatagacgagaaataaacaaataaggaatccaacgtgcccttgttacatgaatctaagtttgaactatatagattttcacggttattattagagtaacatcaagttgtatcgaaacctatcccaaaaagagataagggaccagcccaacttaaaaagtatacgagaccaggtatatgaggttagatcacaaacangatatccaaactattagttaaaaattaatcttctatcaagcaggatcccgaatatgaaaatttatgccataacaaacctggtctccagtgtagatgtgtgtgccacataccaaggtatggacagtattatgttgagagaatcaatataaaaatatagttggagatgggaaatatatacattaattgagagaatcaatataagaatatagttcagagttgaataggcagcaccaagcacacacaatatgtagctaacaaatcagaacattgatccaagagtactattagggtataatggagatttttgcatcaatagttagaagattattttaactgtacacatttaaaataatgagaatcaatagagcagctatgaagacaaaaaaaattataaatcagtttgtg

SEQ ID NO: 78935 - DNA, 295 bp, Oryza sativa
  Clone ID: PAT_MRT4530_78694C.1
gttggaaaattttacaacgacttcttccaaaaattgtttccggactagacagccacgtcgtttacatagggaatggactataagccccgaattcatataggctcccatataggcattactgttagagcccttcatagcattataatgggttggcaggaagcccatcacgaaactgagggatagaagcctccacgactcggattacacacatacggctggggcataatcttcataacctgccggtgcgtcaaaccattagtaccatgacaggcccaatctactgctgccttctatt

SEQ ID NO: 78936 - DNA, 457 bp, Oryza sativa
  Clone ID: PAT_MRT4530_78695C.1
ttgtgcaggtttcacgttcgccccacggtctatatccaagtacatgagtctggggacttctccagtggactgggagaacttaaaggatgctgctgctaatcactgaatcaagatggtactgctggcctgtttggaggcgatgcatcgaagattaagactgaatgatgcttgttaaacatatactccctccgtttcataataccagactttctagccttgctcatatttatatatatgttaataaatctagacacatatttgtatagatttactaacatctatatgaatatggacaatactaaaaagacttgcattataaaacggaggaagtatatgtttacaggggtcttggcaattttgcattcgggtgcaagaaacgtgtttgtttccctgcgctggtggttaggagtatttatgtaaatttctctagttggaccaacagcccgtagcttgtcga

SEQ ID NO: 78937 - DNA, 6045 bp, Oryza sativa
  Clone ID: PAT_MRT4530_78696C.1
agaggaaagatacaaacgaaatgcctaagcgtaaaatcgatgaaggtgttcaatattccaagaattgttgatgatagtaccatcttcgcgcttgagtcgataagaacctggccgagtgacttcagcaattatgaacggtccttcccataagggagataatttatgccgatcctgtgttgtttgaattttcctcagaaccaggtcaccgactaaaaaggctcgcaatcgaacatttcgattatgataacgacgcaacccttgcaaatatcgagtcgattgaattaaagctgcttctcgggcttcttctagtcggttgatgtcgtctactcggccctcttcatagccctcctcgttgaagttccgaaatcgtagtgattcaaattccacttcactcagcaacattgcttctgcgccataaaccaaaaagaacagcgactggccggtagcccgactaggagtagtgcgtaaagaccaaagtacggacggcagctgatctacccacttgccagcataggggcgtagtcggttgaaaactcgtgctttgatcccttgcagtatcatgctgttagcacgctcaacttgtccgttactcatagggtgtgccacggaggcataacaaatttttaatgccgaagtcttctcaaaaatctttaaatgctccaccagtgaattgagtgtcattgtcagtgatgatccgattaggtaccccaaaccgatgcacaatgttgatgaaaaaatctctagctttatctgctgtgatcgtgatgaccggtttagcctcaatccacttggagaatttgtcgatagccacaaagagatgtgtgtaaccgccgactgcccttttaaatgggccgaccatgtcaagcccccagaccacaaacggccaggacaacgggatggtttgcaactcttgggctggcaaatgaatttgtctggcaaaaaattggcaaccttcgcatgtccgcacaatcttgtccgcatcggacatagctgtaggccagaaaaaaccttgtcggtaagctttgccgacgatggtccgtgcaacagcatgattaccacaaataccagaatgtatatccttcaacaattgtctcccttcctccaaagatacacagcactgtagtattcctgatggacttttcttgtacagctcagtctcatgaataatgtaaagtctgctgcgcctggaaatccgctcggcttcatttttgtcttgagggagttcttgtttgctcaagaattttataaacggttctctccagtcggcttcgatcatgcttacaccttgagtgtccatggcttcaattgtctcttttctgggcacggttggttcataaaaatgttcgacgaacacatctgaaggagctgcttcccgttttgaaccaaaattggccaacctgtcggctgcctcattgttatgtcggaggacatgggtgagctcgagtccgtcgaatttatcttccaacttgcgtacctcttgtcgataagcggtcatattatcatctaaacatgaccactctttcatgacctgattgacaaccaactaagagtctccacggacgattaatcggcgaatgcctaaagaaattgcaatccttaatccatggagtagcacctcgtattccgccacgttatgggatgcagaaaaatgtatccacaatacgtagctcaatctttctccagtcggggaaattaagacgaccccagctccagtgcctgtaagcctcttcgacccatcaaaatgcatagtccaatattccatcttttcctctggcatgtcttcctggcactcggtccactcggcaaggaaatcagctaaagcttgtgacttgatcgaagttcgtggcttgaatgatatgtccaaagacatcaactccaaggcccacttcacaatccgtccgttcgcttcgcggttatgaagtatatccccgaggggaaacgatgtgaccaccgtgaccgagtgactttgaaaatagtgagataatttcctgacggtaattaagacaccatataataacttttgaacctgaggataccttgtcttggagttggctaaaacctcgctgacaaaatagattggtcgttggactttttgaatatggccttcctcttcacgctcgacaaccaggaccatactcacaacctgggaggtcaccgacacatataacagtagcggctcttgtggatgtggcgaggccaaaactggtggagtggtgagagatttcttgaagttttcaaaggctttttgtacttcgggtccccactggaaattgtcagttttcttcagcagcttgaagaagggcatcccccgctcgccgagtcgcgagacgaactggctgagcgccgccatgcaaccagtcagcttttggacgtcttttcgggagcttggcgatttcatgctgaggatggcgttgattttctccgggttggcctgtatgcctctctgagataccataaatccgagcaacttccctgacggtactccgaagatgcacttttccgggtttagtttcatcttgaaagcacaaatgcttgtcaaagtttcttctaaatccggaattaggtcatccttctgcttggtcttgacgactacatcatcaacataggcttcaacattgcgaccgatctgagttgaaaaacacctttgaatcatgcgttgataggttgctcctgcgttcttcaatccaaagggcatggtgatgtagcagtaggccccaaaaggcgtaataaacgaggtcttcaagcagtcggattcttttagtcggatctgatgatatcccgagtaacagtccaagaagctgagtaactcacagccggccgttgagtcaaccacctggtcaatgcgaggtaacccaaaagggtctttgggacaagatttgttgaggtcggtataatcgacgcacatgcgccattgccccgtctttttccgaaccaggactgggttagccagccagtcgggatgaaggacttccttaatgaagcctgctgctaacagcttggttaattcctccttgatcgcgtccttcctgtcctgtgcaaaatggcggagtcgttgcttgatgggtttggcgtcttccttaacatgtaaagagtgctcaatcacctctctggggataccaggcatatcggatggtttccatgcaaaaatatctttattattagcagtcttctaaggatcggagggatctaagggaatctttttcgtcttggcatcactttctttggtcttcgtcagcttggtcgcaggcacttctccctcgcttgccgtggacgcggccagtcggatctcttcgcgggcgagagtggtctcgtgggtttaagccatctcgcaactttctttgtcacatgtgacggcttgcttgatgtcgctccgtagtgatatgacccctcgaggaccaggcatcttcatcatcatgtaggtgtagtgcgggacggccatgaacttggctagagccggtcgtccgagtatagcatgatatgatgtctcgaaatcagcgacttcgaaacagacattttttgtgcgaaaattctcccgagtgccgaaggtaactggaagggtgatctgaccgagtggtgtagctgacaatcctggaataacaccgtggaagggtgcattactcggctttaattccatgcgaggaatctgcatatcgtccagggtcttagcgaaaaggatgttgagtgcgctgccaccatcgatgagagtccgtcggagcttgacattgcgaaccactgggtctagtactagggggtaccgccccgggtggaccactcggtcgggatgatccgagcggtcgaacttaattgctgtctctgaccaccgaagatattggggcatgttaggctgaaccgcattgatctcccgttctgttagcttctgttttctcttggactcataagccaggggtccgccgaaaatgtgattaagttctttgcgatgatcttgaaaaccagtcggggcatcgtcttcatcatctttcttctttgatgtgccctgatctccgtctgcaggtttgcgtgcgttcttgacgtattgctccgcgaactgtttgtagacgaagcaatctttggccacgtggttggagttgggatgatgcggacattgggagttcattatcttgtcgaaggtgttgacgcggggacgttgtcgggaagatggagaggtggtcgccacaagttcttcgggcttacgcttgcgatccttgtggttgttacttccgctctcccctgcagtcggcgtgtccttctttggcttccaagtggtgcccgactgtttggacgtggtgatagcatcttcggttttggcatactcgttggctttttcgaacatctgcttaaccgtcctgggaggtttacgtctgaacatgccgactaggtcctcgtggcgaatgcctttagtgaaggcggcgatgatgacgtcgttggtgatgtcggagatcttgttgcgttgttcggagaagcgtcggatgtaatctcgaagggattctctagacttctgaacaacgttgtagaggtcaaactgtgtgccggggcgttcaaaggtgccctggaagttggcgatgaagtgatcacgaagttccacccatgatcagatcgtgccacggggtagtccgtggagccaggatcgggcggagtccgctagggccacaggtagatagtttgccatggccttgctgtctcctcctgctgcgcggattgcgagtccgtagacggtgagccaagactctggattggtggtgccatcatacttctcgatcctagtcggcttaaagccgactggccaatccactcgacgcaggtcattagtgaaggcagctactccatccacgtcgtcgtcgtagcgatttggtgaatggcggtgacgtcgtgctgcacggcgctggttgatcgtgtcgcgaaggtcgacgggacgctggcgaggtggagaacgaggccgttcagctcggcgctccctgtgacgttcgggaagcgagtgaacagatcgttcttcgtgacccctgctcctgcgactagatcctgtgccggtgacgctgaggcttggctgatgatgagggactcggctaccagtcggggtgcgggtgcctgcggagttggctggaaccgaggcagcgatcatggtcttcgtctggttcaagatgttgacaacatgaacggctaggttgagtgcgtcttccttgaggagggtgtcgaggagagtgattgctgcaaccgcgttctgctggggggtgcgaaagaccgctgttccatcgacgtcttgttgcccaatgagttctctcgctcatcgcccggattccaaggcgcgttgtcgtcgatcctcagcctcctttgcaacccgttcgcgatcttgttgctcacgctgtagtcgttctcgctcctgtcgctgtcgctcttcctctagtcggcgacgttcagcttctgtcgtacgcgatcttggtccgcttctcgggctcggcgctgttcttccgtttcgttgtcagccatgaatacgccgaagaagagaggcgtgtagttatcctcatagctgtcgtcgaagttgtcgaagtcgtcgtagtcgaggatctcggttggtcgagaactgacgtcgggggagctgaggtagccatccaactcttccgtcgagactgtcccaagaggctggagtataacgccaacctccctggatctagactggatcggggccgatgccggagctcgcctagatctccgagtgggagatgttttggctgtgaagacggcggccaagtcatcaggaagtttcatcaagattgagggataggacccatcgtcttgatctgatcgtggaagagtagattggatctcatccgagtggtttgaagccgactcaggagagatgatcttggagtaggcctcggctgagttcggaataccgaacggcacggggacctggtttctccccgactggtttgaatccgagtaaagaagagagatcttgccgaagtcgttggtgatgaagttgaggctgccgaaccggaacgcctgcccgagggagaaggcgaagtcgtcgatgccagaaatggaacccat

SEQ ID NO: 78938 - DNA, 405 bp, Oryza sativa
  Clone ID: PAT_MRT4530_78697C.1
atgcagtcggtcgaaaactcgtgcttttattccttaaagtaccataccattggcacgttcgacttgtccattgctcatggggtgcgctacggaggcataacaaattttgatgccgaagtcctcacagaaatctttaaatactccgcccgtgaattgagtgtcgttatcggtgatgatccgattgggtaccccaaaccggtgcacaatgttgatgaagaaatctctagccttgcctaccgtgattgtaatgaccggtttggcttcgatccacttggaaaatttgtcaatagctacaaagagatgagtgtaaccaccgacaacctttttaaacgggccgaccatgtcgagcccccaaaccgcaaacgaccaagacaacgggatggtttgcagctcctgagccggtag

SEQ ID NO: 78939 - DNA, 5052 bp, Oryza sativa
  Clone ID: PAT_MRT4530_78698C.1
ctaagcgtaaaatcgacgaaggtgttcaatattccaataattgttgatgagagtaccgtcttcgcgcttgagtcgataagaacccggccgagtgacttcagcaattatgaacggtccttcccataagggagataatttatgccgatcctgtgttgtttgaattttcctcagaaccaggtcgccgactaaaaaggctcgcaatcgaacatttcgattatgataacggcgcaacccttgcaatcgagtcgactgaattaaagctgcttctcgagcttcttctagtcgattgatgtcgtctactcggccttcttcataaccctcctcgttgaagttctgaaatcgtagtgattccaattccacttcactcggcaacattgcttctgcgccataaaccaaaaagaacggcaactggccggtagcccgactaggagtagtgtgtaaataccaaagtacggatggcagctgatctacccacttgccagtgtagggatgtagtcggtcaaaaactcgtgctttgatcccttgaagtatcatgccgttagcgcgttcgacttgtccgttactcatggggtgtgccacggaggcgtaacaaattttaatgccgaagtcttcacaaaagtctttaaatgctccgccagtgaattgagtgccattatcagtgatgatccaattaggtaccccaaaccgatgcacgatgttaatgaaaaaatctctagctttatctgctgtgatcgtgatgaccggtttagcctcaatccacttggagaatttgtcgatagtcacaaagagatgcgtgtaaccgccgactgcccttttaaacgggccgaccatgtcaagcccccagaccgcaaacggccaggacaacgggatggtttgcaactcttgggctggcagatgaatttgtctggcaaaaaattgacaaccttcgcatatccgtacaatcttgtcagcatcagacacagctgtaggccagaaaaaaccttgccggtaagctttgccgacaatggtccgtgcggcggcatgattaccacaaataccagaatgtatatccttcaacaattgtctcccttcttccaaagacacgcagcgctgcagtattcctgatggacttttcttgtacaactcagcctcatgaataatgtaaagtctgctgcgtctggaaatccgctcggcttcatttttgtcttgagggagttcttgtttagtcaaaaattttatgagaggttctctccagtcggtttcgatcatgcttacgccttgagtatccatggcttcaattgtttcttttttgggtacggttggttcgtaaagatgttctacgaacacatcagaaggggctgcttcccgttttgaaccaaatttggccagcctgttggctgcctcattgttatgtcggaggacatgggtgagctcgagtccgtcgaatttatctttcaacttgcgtacctcttgtcgataagcggtcatattatcatttaggtatgaccactctttcatgacttgattaacaaccaactgagagtctccacggacgattaattggcgaatgcctagagagatggcaatccttagtccatggagtagcgcaacctgggaggttgccgacacatataacagtagcggctcttgtggacgtggtgaggccaaaactggtggagtggtgagaagtttcttgaagtcttcaaaggctttttttgcttcgggtccccactgaaaattgtcagtcttcttcagcagcttgaagaagggcatcccccactcgccgagtcgtgaaatgaaccggctgagcgccgccatgcaaccagtcagtttttggacgtctttttgggagcttggcggtttcatgttgaggatggcgttgattttctccgggttggcctgtatgcctctttgagataccataaatccgagcaacttccctgacggtactccgaagatgcacttttccgggtttagtttcatcttgaaagcacgaatgcttgtaaaagtttcttctaaatccgcaatcaggtcatccttctgcttggtcttgacgactacatcatcaacataagcttcaacattgcgaccgatctgagttgaaaaacatctttgaatcatgcgttgataggttgctcctgcgttcttcaatccaaatggcatggtgatgtagcagtaggccccaaagggcgtaataaacgaggtcttcaagcagtcggattcttttagtcggatctgatgatatcctgagtaacagtccaagaagctgagtaactcacagccggccgttgagtcaaccacctggtcaatgcgaggtaacccaaaagggtctttgggacaagatttgttgaggtcggtataatcgacacacatgcgccattgccccgtctttttccgaaccaggactgggttagccagccagtcgggatgaaggacttccttaatgaagcctgctgctaacagcttggttaactcctccttgatcgcatccttcctgtcctgtgcaaaacggcggagtcgttgcttgatgggtttggcgtcttccttaacatgtaaagagtgctcaatcacctctcttgggataccagacatatcggatggtttccacgcgaaaatatctttattattagcagtcttatcaggatcggagggatctaagggaatctttttcgtcttggcatcactttcttcgttcttcgtcagcttggttgcaggcacttctccctcacttgccgtggtcgcagccagtcggatctcttcgcgggcgagagtagtctcgtgagtttgggccatctcgcaactttctttgtcacatgtgacggcctgcttgatgtcgctccgtagtgatatgactcctcgaggaccatgcatcttcatcatcatgtaggtgtagtgtgggacggccataaatttagctaaagccggtcgtccaagtatagcatgatatgctgtctcgaaatcagcaacttcgaaacaaacattttctgtgcgaaaattctcccgagtgccgaaggtaattggaagagtgatctggctgagtggtgtagctgacaatcctgggataacaccgtggaagggtgcattacttggctttaattccatgcgaggaatctgcatatcgtccaaggtcttagcaaaaaggatgttgagtgcgctgccaccatcgatgagagtccgtcggagcttgacattgcgaaccactgggtctagtaccagggggtaccgccccgggtggaccactcggtcgggatgatccgagcggtcgaatttaattgctatctcagtcggggcattgtcttcatcatctttcttctttgatgtgccttgatcttcgtttgaaggtttacgtgcgttcttgacgtattgctccgcgaactgtttgtagacgaagcaatctttggccacgtggttggaattgggatgatgcggacattgggagttcattatcttgtcgaaggtgttgacgcgggaacgttgtcgggaagatggagaggtggtcgccacaagttcttcgggcttacgcttgcgatcattgttgttgttacttccactccctcctgcggtcggcgtatccttctttggcttccaagtggtgcccgactgtttggacgcggtaatagcatcttcggctttggcatactcgttggctttttcgaacatctgcttaaccgtcctgggaggtttacgtccgaacttgccgactaggtcctcgtggcgaatgcctttagtgaaggcggcgatgatgacgtcgtcggtgatgtcggagatcttgttgcattgttcggagaagcgtcggatgtaatctcgaagggattctccagacttctgaacgatgttgtagagatcaaactgtgtgccggggcgttcaaaggtaccctggaagttggcgatgaagtgatcacgaagttccgcccatgatccgatcgtgccacggggtaggccgtgaagccaggatcgggcggaatccgctagggccacaggcaaatagtttgccatggccttgctgtctcctcctgctgcgcggattgcaagtccgtagacgatgagccaagactccggattagtggtgccgtcgtacttctcgattccagtcggcttaaaaccggcagtcggggtacgggtgcttgcagagttggctggaaccgaggcagcgatcatggtcttcgtctggttcaagatgttgacaacatgatcggcttggttgagtgcatcttccttgaggagggtgtcgaggagagtgattgctgcaaccgcgttctgctggggggtgcgaaagaccgctgttccatcgacgtcttgttgcccaatgagctctcttgctcggcgcccagattccaaggcgcgctgtcgtcgatcttcagcctcctttgcaatccgttcgcgatcctgttgctcacgctgtagtcgttctcgctcttgtcgctgtcgctcttcctctagtcggcgacgttcagcttcttgccgtgcgcgatcttggtccgcttctcgggcttggcgctgttcctccgtttcgttgtcagccatgaatacgccgaagaagaggggcgtgtagttatcctcatagctgtcgtcgaagttgtcgaggtcgccgtggtcgtagtggtagccgaagtcatcgtagtcgaggatcttggttggtcgagaactgacgccgggggagctgaggtagccatccaactcttccgtcgagactgtcccaagaggttggagtataacgccaacctccctagatctagatcggatcagggccgaagctggagctcgcctagatcttcgagtgggagatgtcttgactgtgaagacagcggccaaatcatcaggaagtttcatcaggattgggggataggacccgtcatcttgatctgatcgcggaagagtagattggatctcgtccgagtggtttgaagccgactcgggagagatgatcttggagtaggcctcgggcgagttcggaataccgaatggcacggggacctggtctctccccgactggtttgaatccgagtcaaggagagagatcttgccgaagtcattggtgatgaagttgaagctgccgaaccggaacgccgccat

SEQ ID NO: 78940 - DNA, 227 bp, Oryza sativa
  unsure (1)..(227): unsure at all n locations
  Clone ID: PAT_MRT4530_78699C.1
nctnttgagatcgnncgaatttcaaacaccattcaatgcatctcgcatgcaacatgctgcagctgcttgcattgtgctgtcttcttcttcttgcatttgcatccatctcttttatggcgtngccgctgtttctgtttcttgctaacgtgctcaactctgccggtccatggcgatggtgcggcggtgcgggtgctaatggaacagtgggcggcggcngcngcngtcga

SEQ ID NO: 78941 - DNA, 1200 bp, Oryza sativa
  Clone ID: PAT_MRT4530_7869C.1
acggaagcggaccccgtgtgtcaaccgaggcgagtggccaacaaacggactccactagacaccacacggcctgcacacgtggaaaccacgcggctaccgagcgggcacactaacacggtcaccacgcgcacaagcgaacgtctgccgacgccgatacacgggtaccggggccgacaaccgcacaatggcacgggcgacaccgaaaggacgaggacagggcagcgagggagagggaaccttaccaccacgcgacgaggcgtgggagcgacaacgacgaacgggcgcggcggagacagacgggcacaacggagacgaacggcgaggggacggcttcggcggcgatccttggacgaaagcgagctgcggccggcacgaggcttgacgacgcggagccgaggacgaacacgaggacggggctgcagcgactcgcttgacgaacgcggacgacggacgagaacggcttgacggagggacgaacgccacgacgatcgggaacgacgagaggacgagggcgacgacgacgaccgggaccggcgaggaggcgacgaggacagccggcagcggctgcacggggacgaggacgacgaggaccacgccgctacgatgccgacgacggaggcggcgccgcgagacgacgagccgggcgaccgacgggacgtcgacgacgagaacggtcggagatgacgatgaaggcaggcagcagcggctgagaggaggaggggacagcgtggaacacgccgctacgacgttggtgaaggtggtggtgcagcggggcgacgagccgacgaggaggaaggagaggccggcgcggagacgacggcgttccggcgaagttcgggcgaggaggaggtgatgccggggatgagagcggcgtcgtggagccgaggaaggtggtggcgacgtcgaccggcgctcaggcagggagatagaggcggctggaggcggccggcgcgaaggaaagaggagggcgacggcgggaacgcgcctccggcggtcaccgcgcgaaacggagggtaggccgagggagagggggcagctgcgatgctggaggaggcgacggcgcggccggaagacgctccggcgaggcgggagaggcggctggagaccggccggcaacgtgggagagagagggcgacggtggggagggagctagggaccacggggaggctcgggatggggctaaaacgagagaacggggga

SEQ ID NO: 78942 - DNA, 678 bp, Oryza sativa
  Clone ID: PAT_MRT4530_786C.1
gacatcacccgtcccatccatctcctctgctccaagaagcaaacaccaagaaacaaagagggagggagagagagagatagagggagagagtccttttctctcaccacctctcctttcaagctcagtacggtggccgctcaccggatccaagaagaaaacctctcttccgtttatgattctttctcttgagttcttgaggttttatttggtttttctttgagattttactcgtttttctcgaattctcgatttcgatgattcggaactaaataggttctctaatgacaagtaagagcaagaaatttctagcacggagaagctctcatgagattgacagaagagagtgagcacacagcgtgatggccggcataaaatctatcccgtcctcgccgcgtgctcactcctctttctgtcaccctctttctctcagggctcaactcctatccagatctattagcaggcttacaaaatcactaaattactttgatttggtgttactcaatttgattgttgtgatctagccttttcctccaaagaagcactagaaaccaccccttatgcttggtagagagaaacctcatgcttggtacagagaaattcagccacaagaagacagagaacgcatgcttgaaccatgctgtcgccggaactactaccgaggagagtgatacggatgct

SEQ ID NO: 78943 - DNA, 542 bp, Oryza sativa
  unsure (1)..(542): unsure at all n locations
  Clone ID: PAT_MRT4530_78700C.1
gtccccttcttctcctcctctctctctctccgacacgcccctttaactcgctcccgattccaaaaaattccgccatagattaaagcgagaaaccccaagcaaccaccaccaccacgacccggagtcctcccggatcgatcagtccaaccctgcgaatcaaatcccaagccttctcgacgctggcctcgatcgattgggaggccgcgtctgcgtccccttctctttccggaggaagctggtggcttgctgtgcggcggtggcatcgtcggttggaggcgcgggggagcactcgtcgcgtcccgggggagatcgaatctagcggcggacgggcaatgcggttggtttccggggtgatttgaggcgggaggctgggatctgggtctggaagggaggtggggagctctgtcggtggggtggggggtggggggagttggtggcgagtcgaccgcgtgctcgggtttgtgagtgagtatggagcgcgtaattggggcaagtttaagctcgngaagaagtcgtgagtggatccttcggggagnctatct

SEQ ID NO: 78944 - DNA, 321 bp, Oryza sativa
  Clone ID: PAT_MRT4530_78701C.1
atggcgaaggtcacggcgatgggaggctccacagctctcggcgacagcgaagatctagccggaagggagggagcggcggcgaccgtggcgatgatggtagcaagcggtggcggatctgacgacagggtcggcggcaccagggcaaccgtgacgacgacgaccgtgactgcggcgatgacaacgatgatgctgcgcgctggcggggagcacggatctggcggctccttccctcccctccttctccctatcccagatctagccaaaggggaggtggcagcggcagccatggcggcgacggcaggtgggcggcagcggatctga

SEQ ID NO: 78945 - DNA, 401 bp, Oryza sativa
  unsure (1)..(401): unsure at all n locations
  Clone ID: PAT_MRT4530_78702C.1
cacctctcctctctcggtgcagatcccggccggagctgcggtcggagggcggtggcggcggcagctaccggcgatggcagaggcggctcaaggcggtggatgcgcggagggtggaaccagcggcggctcccctcctcccagatccggtgtagacggctgcggaggatggaggcggcgtggagggtggacacggcggcggctccgcggggagggcagtggcggcggccgtctcctccagatctggcgccatcggacccaaaccctatcctgcccaacgctcggccgccgcctcacccacacggggcgcaggacttcccccgccacctttcgacctacccaactcgtcaacgtcgtcgtacgacctacanccgacgacgacgagtattncgtactaccccgtt

SEQ ID NO: 78946 - DNA, 408 bp, Oryza sativa
  unsure (1)..(408): unsure at all n locations
  Clone ID: PAT_MRT4530_78703C.1
ggcgggcggcgcgacccgaaggcgacggcgacggcgacagcacggctctctcatccggccggcaccttctttccgtcacagaaggctatagttcgtcatttggagcaatcactgatgttggattttatgtaattaaaatgtgatggtagcagcttcatgaagtacttaaactctcattttgggagatcctgggagaagtttgggttttgttgtgtatttagacttagctagtgcagcctgttttgagtttgctatgtgagatatttggaaagtgaaaataattgtatttattacgcaaccctcctactacacgaagtagtctaagagggtcccataatcgtataaaagtggagacaccccnnanaaaaataataatttaatataaaaaataaattttattaaaaaata

SEQ ID NO: 78947 - DNA, 176 bp, Oryza sativa
  unsure (1)..(176): unsure at all n locations
  Clone ID: PAT_MRT4530_78704C.1
gagaaggaaggacaccaaggcnngggaagcnganaccccgcgggggcacanngaaaaggggncccgcgcgacgccccaggcaaagcaagacaccacggcgnccaacccagaggacaaaagcacccgcgcccgggaggccaccaagcgaaccggnnnccaaacangcaggcgggaac

SEQ ID NO: 78948 - DNA, 1280 bp, Oryza sativa
  unsure (1)..(1280): unsure at all n locations
  Clone ID: PAT_MRT4530_78705C.1
atgcccccgaccggagcgctccacgccggcggccgccacctcctcccgctccgccgcgccccgggtgcggcccagcagccatggtcccacgtccgctcccacctcatctcctcctccaagcgcccctccccctccccctccccgccgccgccgccgcccccgccgctgccggttgccccgtctacctccgccttcgtgcagaccgcgggcaggaggagcgggggcggggccggggccggggccgccgtcgggtccggggtggtcgcgtggtacctcggctcgatcgaggcgcggcccgtgctgaccaagagcgtcaccgccgccgccatcttcaccgtcgccgacctctcctcccagatgatcacacttggccctgaagattcacttgatctagttaggactctgcggatggctagttatgggctgctgatctcaggaccttccttgcatatttggttcaactttgtctcaaaattgctccccaaacaggacgtaatgaacaccttcaagaagatgtttcttgggcaagcggtttatggaccaattattaattcagttttcttctcatacaatgcaggattgcaaggtgagaccatcccagagatcatggcaagactgaagagagatttaatcccgaccatcaaaagtggacttatatactggccactttgtgactttatcactttcaagtttatccccgttcatttacagccgctagtgagcaattccttctcgtttctttggaccatctacataacatacatggctagcttaaagaaagcagatgttgatgtgaccacgagttcataatcagagctgaatgaactccatgtgtcgattgtgttaactattagtacttttgcaagatggtcttcacaggaattaactggactatgatgcggctggctatatcactatctgctcctctcaatgggaggctagaaacagagatgaacttatccctacctattatttctttagtggtgtatagtgtccactaaacctgcttcctcttttttcccatttttttttnattttggcctgaaggccttttgtttggatgataggggaaacccatactaggcatttattctatctttccgggtttctcattccacggctcagaagccaagcaattttcaccaaatttactgtaaccagctatggaggtgtaaggtaattttgttcttttcagtaagataagtcggaccgaacaaggtttatgctccaacatcttttacatatgatgcagcttttgttgaagaaaaaaaaaaaaaaaa

SEQ ID NO: 78949 - DNA, 1140 bp, Oryza sativa
  Clone ID: PAT_MRT4530_78706C.1
atgtcgatgaacccggtggcaatccccatagacgaaggacctagtggccacgagcagcaggagcagaagccacggtcgtacggctcgccgcactcatgctttgcctccactcagaggccagttcttaaaaacaaaaaacaacggaagagatcgccgacgacaccatcaagctccccttcatccacgacgccgacgtctactccgccgcgccgcccgacctcgccgccaggcacgtccccgcccggggcaccgaccgcggcgacggcgccggcgcggtgtactacttcttctgcccggtgcaccgcggcggcggcggcgtcggggccaggcggcggcagcgcgcggtcggcggcggcggcggcgccaacggggaggccgggcactgtggctgctggcacccggagggcgggcaagaaggccgtgctcgacgccggcgggcgccgcgtcgggcacctgcgcaggctgtcctacggggtgagggagagggggtccggccgccgcttgaccaggctcgggtggtgcatgacggagttcggcgtcgaccacggcggcggcggcggcggcgaggccgacgccggcggcctggtcctctgcaagatgtaccggtcgcctcgcgccgctcaagtagaggcaagcctgcaggccgcggcggcgtccacctcgggctccaagaggaagcaggcggctgacgatctgatccatgctccggcgagctcgcggcaccggcacgccgacgtgatgcccgccggagtcaacggcgacgaggtcggcagcattcatccgtccgtccagttcccaccgccgccggaggagcagacgctcgtgcagacgagggacggccctcgcacggaccacgaggtgatcatggcgctggcgatgggggcaaccgtcgacgagttgcttggcccgaagcacggcgagcccggcgaatcctcgccgttcccggcgccggcggcagagccatgctccattagcggcggcggcgacattttctggacggcgtccggtgtcgtgccgtgcccagacatggcaatggcatttccagcgccgccggcgggagaattcagctgggacaaggagctcgcgtggattcgagagttgttgtcgggatcccggccgtcctcgtgttccgccgtgtga

SEQ ID NO: 78950 - DNA, 814 bp, Oryza sativa
  Clone ID: PAT_MRT4530_78707C.1
atgctagctccaggagttcccagatttcctccacctccaccaccaccagatacaaggccaccatttatggctcctggagttaatgccaggccccttccaccaccccctccgggattacctccagcacagatgcaaatggcaccctttggtgtacctcctggtccaccaccaatgcttccgcctccattttatccaggacccccaattcaaacaggtgattttgctgcctttggtccaaggccaaatgtacctcagcagccatcatatgtcaagtcagctgccccaacagttgtaaagagaccattagcacaacatactcctgagctcacagctatggttcctgcatcagttcgagttaagagagaatcggctctcctcaaaccaaaaccaaaggtgcaacagtcagcaacaacatcatcttctgccctgaaaccgtcagtggctccaattagatctgagccccggccttcgtcctcagtatccaagccacaaagcattgatgattcctacatggcattcttggaagatatgaaggaattgggtgctcttgatgagtagctcaattagtctgactgcaaattgcagttgttgacatgaactaagcatgagccctctttgcgttagggctcacgagtaggttttcatgtactcagaaaccatgtccatttccccatgagaaaacaatattccagatctagttttgtgaaaatggggaaacgttcataatcaaatatcagttgctgtgcaacacaactgtaccaagtcaaatcaatagagcatgattgcctaaaaaaaaaaaaaaaaaaaaaaaaaa

SEQ ID NO: 78951 - DNA, 134 bp, Oryza sativa
  Clone ID: PAT_MRT4530_78708C.1
atgcctcaccacaggactacagcataggctaggctacaggacgatgaacacaaagaagcatcagctgctgcggtcattgggcgggtgcgaacctatatcggagcgacaagacaaccgttactgtattgtcaatc

SEQ ID NO: 78952 - DNA, 780 bp, Oryza sativa
  Clone ID: PAT_MRT4530_78709C.1
atggcgatgacgacggcggcggtggcggcggcggcgcagcccaaggaggtgaagctgtacggcgcgtggggcagcgcgcacgccgccatggccaggaacgcgctggagctcaagggcgtgcgctacgagtacgtcgaggaggacctcgagcgcaagagcgagacgctgctgctgcgcctcaaccccgcccacgccgggaaggtcccggtgctggtcgtcgtcgacgacgacggcggcggcggcggctgccccctcgccgagtcgctcgtcatcctcgagtacgtcgacgaggtgtggccacaggcgccgcggctgcttccgccgccgtcgtccccgcgcgctcgcgccgcggccaggttctgggcgaggttcttccacggcgaggtgtcgccgctgtcgcgcgcggcggcggtgctcgcgccgacgccggaggagcgggcggaggcggtgcgggagatgaaggcgcggatggccgtgatggaggccgggtttgagagggacttcccgtcgtcggtcgtcggcggcccgttcgtgcacggcgcgacgccggggctgctcgacgtgatactgggctcctgcgccgccgggacgagggcgatctccgccatggccggcgaggaggtcgtggagccggacgcgctgccgcacgtgcacgccagcatggccgcgttcgacgagcgcgtcgcagggttcgggaccagcgtgccgcacgagctcctcctcgcgcggctgctcgagagggaggagaggcggcgcgccgccgcgtcggcgtcggcgtga

SEQ ID NO: 78953 - DNA, 1058 bp, Oryza sativa
  Clone ID: PAT_MRT4530_7870C.1
atggatttattgcgtcagccgaggggaggggcgcgcggaccgggtccacgggagtggggcccacgcggcagcctcacggtccacggtggaccgggcgcacccgggctcgcaccgaccggcgccgtgggtcccacgcgtcagccgcacccgagggcgcgggcggctgacggccgggccccacatggcagccgtgggacgagcccgaaggcggccacgccggcacagccgacgggaggtggcgcactcgtgccccgattggaagggaagggggaaacgaatcggcggtccacggctcaccccgggtcgacggcgacgacgggaacggcgaccggagcggaggaaggcggcggcgcggctcgggtagacggggacggtggcgttccggcgatcggcgaccgaaacggagaggtggacgaggtcggcgaggacgcggcgaagccgaaggagacggcgccgaagcgggagacggtccggggcgacgacggcggcggaccggagctcggcggtgacggcggagagagagagcgacggcgcgagctcgattccggcggagagagagagcggcgagggtcggaaacggcggagggaggcacggggagtgtttatatagggttgggagggggagagagtggccggatgtgggggaaacgggcgcggaagatccggccgccattgatgcgccggcgaggttagggggaaagtttccgaacgaatccgagggagagagggagggaaaaatggggggaaagatggagggaatcacggggaatatttcccccctcttgattgcacgcggggtggacgggagcggcgggatttgcggcggcggcggcgctagggcacgggcgaggcggcgggagcggcgggaggaaggggatgacgggtgggccccacccgtcagcgagggaggcgggcgggcccgcccatcagcggcacgcgcgcggggaggaggccggatgggccgcggggagaggagagggagggggagggagctgggccgagccggcccaagggggagagggggatggaaagggaactttttagggtttttcttttta

SEQ ID NO: 78954 - DNA, 1211 bp, Oryza sativa
  unsure (1)..(1211): unsure at all n locations
  Clone ID: PAT_MRT4530_78710C.1
atcggcacgcacccccaacccaaaaccgcccaaagagaggaggcatccaaccaccaatccatctcctcctcctctctctctctctacgcggctcagccatggtggagaaggccagcgccgtggcgcgcaagctcgacgtctccgtcggccgctgctcgacgtccccgtacgggagcggcggtctcccgtcgccgacgagcccgctcgaccgcgcggcgcttcacgcgccgtcgccgcgcggcgtgtggcggcaccgcgacgcgggcggggtcgggctcggcatcctggcggcgctcgaggcgcaggaggaggaggaggcgcggaagcccgcggtgtccgccgtcgccatcgcggcgtcggcgtcggcgtcgtcctccgcggccgccaccaccacccggcgccgcgccgcgaggctggaggtctcggagctcgggtgcagcgggcggtgcgccaccagcctgtgcggctccggcgccggcgcggcggcgttccgggtggcggagttcctggcgtgctgcgacctctgccggcggccgctcgacggcaaggacatcttcatgtacagaggggagcgcgccttctgcagcatggagtgccgctaccacgccatcgtcagcgacgagttccaacaggagaaggaccggaagcgccgcgccgccgccgccgccgccccgagggatatccccagcaaggtctccgccgccccatcaaccgcggcggcggagatcgccggatcgccgtgctccggcggcggccagatcttcttcaccaccggaatcgtagccgcctgatcagcagaaagaaaggaaggacgccgcggctgtaacataaaagaaaataataattaaaaaataagaaaagatgagaagaggaagaggaaaaataataattaagggtgtattaattatgtgtagagagattagagaggtgttttggtgggaggatttttgctctccttgtttgctttgcaagagggaggcattggttttggtcttgatttttgttttctttttgcctctttatgtaatatttttggtggtgctacaagaggaagaccaagcaagaaagggatgatgacaagttttccaagaattgttgcttcctttttctttttgttgtctccaatctcaactcttataagggaatactcataatttcattcatctaagagttacagtatctccaaataagagtgaaaaaaaaaaaaaaan

SEQ ID NO: 78955 - DNA, 4170 bp, Oryza sativa
  Clone ID: PAT_MRT4530_78711C.1
ctaggacaacgggatggtttgcaactcttgggctggcagatgaatttgtctggcaaaaaattgacaaccttcgcatgtccgcacaatcttgtcagcatcagacacagctgtaggccaaaaaaaaccttgccggtaagctttgccgacaatggtccgtgcggcagcatgattaccacaaataccagagtgtatatccttcaacaattgtctcccttcctccaaagacacacagcgctgcagtattcctgttggacttttcttgtacagctcagtctcatgaataatgtaaagtctgctgcgcctggaaatccgctcagcttcatctttatctggagggagttcttgtttggttaaaaatcttatgaggggctctctccagtcggcttcaatcatgcttacatcttgggtgtccgtagccttgattatttctttacttggtacagtcggctcataaacatgttcgacgaatacgtcagaaggagctgcttctcgctttgaaccgaaattatccaatctgtcggctgcctcgttgttgtgtcgaagaacgtgggtgagttcgagtccatcgaatctgtcttccaacttgcgtacttcctgtcgataagcagtcatgttatcgtcaaggcaggaccactctttcatgacttggttaacaaccaactgggaatctccacgaacgatcagtcgccagatgcccaaagagattgcgattcgtagtccgtgaaggagcgcctcgtattccgccacattgtgtgatgcggaaaaatgtatccacagcacataactcagtctttctccagttggggaaattaaaacaactccggctccagtgcctgaaagtctcttcgacccgtcaaagtgcatagtccaatactccatcttttcctcgggcgtgtcctcttggcactcggtcgtgaccgagtgaccttggaagtagtgggataatttcctgacggtgatcaagacaccgtacaacagcttctgaacttgaggatatcttgtcttggagtcagccaaaacttcactaacgaagtagatcggtcgctggactttctgaacatggccttcttcttctcgctcgacaaccaggaccgcactcacgacctgaggggtggccgagacatatagtaacaacggctcctgtgggtgtggcgaggccaaaactggtggagtagtgagaagtttcttgaaatcttcaaaggctttctgtgcttcgggtccccactggaaattgtctgttttctttaacagtttaaagaaaggcatcccccgctcaccgagtcgtgagacaaaccggctgagcgccgccatgcatccagtcagcttctggacatctttctgagagctcggcagtttcatgttgaggatggcattaactttctccgggttggcttgtatgcctctgtgagacaccataaatccaagcagcttccctgacggtactccgaagacgcatttgtcagggtttagtttcatcctgaaagcgcggatgctcgtgaaagtttcttcgagatccgtaatcaaatcatccttctgcctggtcttgacgactacatcatcaacataagcttcaacattgcggccgatctgagttgaaaaacacctctgaatcatgcgttggtaggttgctcctgcgttcttcaatccaaagggcatggtgatgtagcagtaggccccgaaaggcgtaataaatgaggtcttcaagcagtcggattcttttagtcggatcaggactgggttagccagccagtcaggataaaggacttctttaatgaagcccgctgctaacagcttggttaattcctccatgatcgcatccttcctgtcctgtgcaaaacggcagagtcgttgcttgatgagtttggcgtcttccttaacatgtaaagagtgctcaatcacctctgctgtctcgaaatcagcaacttcgaaacaaacgttttctgtgcgaaaattctcccgagtactgaaagtaaccggaagagtgatctggccgagtggtgtagcagataatcctgggatgacaccgtgaaagggtgcattactcggctttaattccgtacgagggatctgcatatcgtccagggtcttggcgaaaaggatgttgagcgcactgccaccatcgatgagggttcttcggagcttgacgttgcaagccactgggtctagtaccagggggtaccggcccgggtggaccactcggtcgggatgatccgagcggtcgaacttaattgctatctctgaccatcgaaggtattggggcgtgttgggctgaactgcgttgatctcccgttcggttagtttctgctttctcttagattcgtaagctaggggtccgccaaagatgtgattaagctccttgcaaaagtcctgaaaaccagtcggggcatcgtcttcgtcatctttcttctttgatgtgccttgatctccgtctgaaagcttatgtgcgttcttggcatattgttccgcaaattgcttgtagacgaagcaatctttggccacatggttggagttgggatgatgcggacactgggagttcattatcttgtcgaaggtgttgacgcgggaacgttgtcgggaagatggagtagttgtcgccacaagttcttcgggcttacgcttgcgatccttgcgattgttacttcccctctctcctgcggccggcatgtctttcttcggtttccaagtggtgcccgactgtttggacgcaataatagcatcttcggctttggcatactcgttggctttttcaaatatctgcttaaccgtcttgggagatttgcgtctgaacttgccgactaggtcctcgtggtgaatgcctttagtaaaggcagcaatgatgacgtcgtcggtgatgtcggagatcttgttgcgctgctcggagaagcatcggatgtaatctcgaagggattttccagtcttctgaatgacgttgtagagatcaaactgtgtgccggggcgttcgaaggtgccctggaagttggcgatgaagtgatcatgaagttccgcccatgatccgatcgtgccacggggtagtccatggagccaggatcgggcggaatccgctagggccacaggtagatagtttgccatggctttgctgtctcctcctgctgcgcggattgcgagtccatagacggtgagccaagactccggattagtggtgccatcatacttctcgattccagtcggcttgaagccggcagtcggcgtgcgaacgctgccggagttaaccggaactgaagcggcgatcatggtcttggtctggttcaaaatgttgacgacgtgatcggcttggttgagtgcgtcttccttgaggagggtgtcgagaagggtgatcgcggcgacggcgttctgttggggggtgcggaagaccgctgtcccctcaacgtcttgttgcccgataagatctcgtgcttgttgccgtgcttctgcttctcgggcttggcgttgttcttccgtctcgttgtcggccatgaagacgccgaagtagagaggggtgtaattgtcttcaaagctctcgtcgaagtcatcgaggttgtggttgtcatagcggtagccgaattcgtcgtattccacgatctctattggtcgtgagtcgacgccgggggagctaaggtagacttcgagttgatccgtcgaaatcgtgctgagtggctggagtatgacgccgacttccctggagctaggcgggatcggtgttgaggccgacttccgcctaggcctacggggagaagacgcccttgtagtgaagacggcagccaaatcgtcgtggagtttcatcaggattggcgggtaggccccatcattttgatctggtgaagttgaagtatattggatctcgttcgagtggtttgaagccaactcgatcgagataagcttggagcagatcttggccgagttcggaataccgaatggggctgaaacctggttctctcccgactggtttggatccgagtcgaggagagagatcttgccgaagtcgttggtgatgaagtcgaggctgctgaaccgaaacgccaccttgagcacaaacgtagtgtccttggagagcagcactgcatgtcgcaggcggccacgatctcgacgccgccggcctgcaccgccgtgcaccgccgcaataggcgcacgcgaccaccggaaccgttcgatgggcttgagcgccggctgcat

SEQ ID NO: 78956 - DNA, 718 bp, Oryza sativa
  unsure (1)..(718): unsure at all n locations
  Clone ID: PAT_MRT4530_78712C.1
atgcaaacctgcaatctgtccctgaattgaacatttaccccctgcaaattgcatgccaaatcccccaattcccgtgcaaaaaccccaaaagcatcaaaaacaattacccatgcaaatcaaaatgcaagccccacatcaatcccggtaattaacaatggaatgccattaagggtaaaaggaaaacaccttgcggaggttcatccgcgaaaatttcttgctgtcccccgtgcccaattcgggacaaactcctgcccaattcccgcccccggggggattcactatttctaaaacgggcgccccccggggggaacccccccctttgttnccccttaatgangggtttatttccaacctnggggttanccngggccnaaccnnttcccgnnttnaaaaangnttccccccccatttccccccncctttttaaaaccggaaacctaaanttttttaacccngggnngcccaaaaatttaaccccccccccttnattggntttgncccccngcccctttccnttggggaaaanttttntcccccccctttttnaaanccccnccccnggaananggttntttttgggcccnccccccccccccaaaacccccccggntttngggggaaaggtttcccccnnggggtttgnttcccantgggaaacgaaaaatttcanggcccaggcgaacnaangctttggttttcnngccccccaaaanaaaat

SEQ ID NO: 78957 - DNA, 3000 bp, Oryza sativa
  Clone ID: PAT_MRT4530_78713C.1
atggcacggggctctgctctgctcgacggcagtgtactgccgccttcccgcatcgtgaatgagaggcacgccggactgccgcgccgcttcatgccggagtccgccaccggtcgggagattgtgatgctgggcgaggggcgcccggcaccagactacccggggcggtccatcttcttcctccccttcgcaatggctgggctggtcccgccattttctcatttcttcatggatgtcctggagttctacgatctccagatggcgcacctcacccccaatgcggtgatgacattggccatcttcgcacacctgtgcgagatgttcattggggtgcgcccctctcttcagctgttccggtggttcttcaccgtgcagtcggtgtcaccgccatcggtggttggcggctgctacttccagccgcgggggccggtgttgaaccgctacatcccctgcgtcctccgcaagaagtgggacgactggaagagcgactggttctacacccccctcgccgacgaagcgcgcctccgacttccgagccagcccccggcgcaggtctccagctggcgggcgccggtagatctgggggaggagtacgacgccgtcctcgaccgcctggcgggcctgcgatcccaggggctcaccggggccatggtgtacggcgattacctccgtcggcggattgcgccgctccaacggcgcgcccggagcgcctgggagtacactgggcctgaagactacatgcggacccaccagggagccagatgggattgggctcctgaggacttcaagatcgtagtccaaagggtgctgaatcttagctccgcggaggcgtctcgccttcctcaggagatcctccccctctgcatcgatcccgaccgcgtctccattctaaccattatgctgggggtcggggcctcagaggagagagcccctaagggccacgacggcgcgggcgagagccgcccggggaaaaaatctgccccaggagggggtcgtgcttctgggccccgcgtcgggggctcggggagcagccgccctgccgacgccccggggaagaggaagctgggaggaacacctcccccatctcctccccgagggggcggggcagtgcgtaccagcgcgatgtcccgtcgcattcctcccgccgccccaagtccggccagtccgaggtcgaagatccagcggccgcagaggagcggaggcgggagtctgaccggcgtgaagccgcagcccgccttcgggaagctgaagaggccgcccgggaggccgcccgggttcgccaagcagaggaggctgctcgggaggaggccgcccgggctcgccaagccgaagaagctgcccaggaggaggccgcccgggctcgccaggctgaagcggcagctgctgctggcgcgtcactcgggcccactccctcgggcggccctcaggcgacatcctcccgaggcggctcgcgacgaggccgcgggcgcgtcgcctgggcctacctcaccgggcgacgcccaggaccaaacgggcccgggggacatccccgagcccagcgcatcctccggggggccaagccgcgtcgccttttctccaaggcggcttttctcctcttctctcgtcgccccagtgagcgccgagcccattatgcaggccttggccgccgcaaacaccgcggtgctagatggatttagcgcccaggtggaggccttgcgagcggaacgagcggagctcgaggccgcatgggcgcgtgtcgaggaggggcggcgctcggtggacgccatggtggaggtgggccgtaaggcccaccgccgccacatctcggagctcgaagcccgcaaggcggcgctggcggagatcgcccgggaggtggaggaggagcgagaggccgccctcgtcgccaccaccgcgatggtcgaggcgcaagacaccctccgtcttcagcacgcaagctgggaggcggagctgaagagcaagctcgacgccgcccaaggggttctcgactccgccgctgcccgagagcggcgggcaacggaagccgaagcggcgtcccggcggcgcgaggaggcccttgaggcccgtgccatggcgctggaagaacatgccggcgccgtggagaggggcttgatggaccgcgaggccaccactgctctccgggaggcgacgctggcggcgcacgatgccgcctgcgccgaggaggagtccgcgctccgccttcgcgaggatgcactcgccgagcgggagcgggctctcgaggaggccgaggccacgacgcgacggctggcggacagcctctccctccgcgaggcggcgcaagaggagcaggcgcgccgcaaccttgaaagcgtccgcgccgagagagccgcgctggagcagcgggttgctaacctcgaggcacgggagaaagagctggccgcgggggcgcgcatcggtggggcggctgcgggcgaaagcgacttagccgctcgcctcgcggctgccgaacacaccgtcgctgacatgcagcgcgcgctggactcctccaccggggaggccgaggcccttcgcttggcgggcgagattgggcccggcatgctttgggacgcggtctcccgcatgaagcgcgccggtcggcaagcaggcctctggggaggccagacgacggtgccccccaccaatctggaaggcctcgctccgcacctcaacaggatggcttgggttctcgagcgactccccgaggagctcgagaagaccattaaggcatcctcgagggacctcgcccggggggcggtcgaactcgtgctggcgagttaccaggcccgggatcccaacttctccccatggatggcgctggaggagttccctcccgggaccgaggacgaggcgcgcgcgcgggtcggggatgctgctgaccacatcgtcaacggcttcgagggctcggcccctcggcttgcgttcgcccccagctccgacgaggaaggcgacaccagcagcgaggacggcggtggcgacgaggccggcgacccgggcgcatatgaatga

SEQ ID NO: 78958 - DNA, 517 bp, Oryza sativa
  unsure (1)..(517): unsure at all n locations
  Clone ID: PAT_MRT4530_78714C.1
ttggncatcctctatagcggccgccctttttttttttttttttttttttttttttttttttttttttagtcaacaagttcagggaatgaactcagaaatgaaccggtacaaccgagaatattaagttcaggtacatcccaggataagatcagaaaatactatagcaaatgttccaaattttgtttctgaattctccttaatccacatgaattgtccttaatacaatctaggataagatcagaaaataagacctctcttgacctctcttacaagcaataactcatatattatttgtcaagacaaagccaagtgaataatccacatcaggttatcctccagatgatactccagccatgctccctggtcctccaaaaacaaccaggctcaatagtccaatgcataatgtaaataacagggccggcagaagaatctggaacatggtaatcttaaagcgaccttatataatctgcacaaataatattggaaattatttgaaatactatcaagtgacaggagc

SEQ ID NO: 78959 - DNA, 3069 bp, Oryza sativa
  Clone ID: PAT_MRT4530_78715C.1
atggcacggggctccgcaccgctcgagggtagcgtgctgccgccttcccgcatcgtgagcgagaggcaggccgggctgccgcgccgattcatgccggaatctgccaccggccgggaggtggtcgcgctgggcgagggacgcccggcgccgcattacccggggcggtccgtcttcttcctctctttcgcaatggcagggctggtcccgccattctcttctttcttcatggatgttctggagctttatgatctccagatggcgcacctcacccccaacgcggtaatgacgttggccatcttcgcgcacctatgcgagatgttcatcggggtgcgcccatctctccggctgttccggtggttcttcaccgtacagccggtgtcgccaccgtcggtagtcagtggttgctacttccagccgcgggggccggtgctgaaccgctacatttcctgcgtccttcgcaagaagtgggacgactggaagagcgactggttctacacccctctcgccgacaaagcgcgcctccgacttccgagccagcccccggcgcaggcctccagctggcgggcgccggtagatctgggagatggctacgacgccgttcttgaccgcctggcgggtctgcgatcccaggggctcacgggggccatggtgttcggcgactaccttcgtcgccggatcgcgccactccagcggcgcgcccggggcgcctgggagtacaccgggtccgaggactacatgaggacccaccaggggggcagatgggactgggcccctgaggatttcgagatggtggtccaacgggtgctgaatctcagctccgtggaggcatccctcatcccccaaggtgtcctccccctctgcagcgatccagagcgcgccaacatcctgaccatcatgcagccggtcggggcgtcaggggagcgggctcctcgaggccacgatggcgcgggcgggagccgcaggggggaacaatctaccccgggagggggtcgtgcgtctgggccccgtgacgggggcccggggggcagccgccctgccgacgcccgggggaagaggaaacaggaggataccccctccccatctcctccccgagggggcggggcggtgcgtgccagcagcaggcgcccggagggtgctgtgccgacgtcgcagcccgagggggagcgaaaaaagaagcggctccgcaagatgggggtgaccgaaccatgccggggaaacctcatctcccccccaaggtggtcgtttagccgacctcctcgcagcgagattccgtcgcgcccccctcgccattccaagtccggccggtctgaggccgaggagacagcgaccgcggaggcccggaggcgggaagctgtccggcgagaagccgcggaccgcctccgggaagctgaggaggctgcccaggaagccgtccgggttcgccaggctgaggaggccactcgggaggaggccagactccaccgggccgggaagtcagcccgggaggcagaggcgacgcgcgcacgccaggcggcctgccaagcccccgacccgactccgcccgaggcgacgacgacttccgagtccacccacgacgaggccgcgggcgcaccgctcggacccgacccttcgggcgacgttcaggacgagccagcctcgggggacgcccctgagtccggcacgtcgattggcgggccgagccgcatagcgcccacaccgaggcggctctcccctctgccttacgccgctccactgaacacagagcccctcctgcaggccctggccgccgcgaacacgatggtgctggacgggttaggtgcccagatggaggtcctgcaagcagagcgggcggagctcgacgcggcgtgggcgcgcgtcgaagaggggcggcgctcggtggaggccatggtggaggcgggccgcaaggcataccgccggcacgcctcagagctcgaggcccgtcggagggagctggcggagatcgccagggaggtggaggaggagcgggagattgccctcatcgccaccgccgtgctcaacgaggcgcgggacgatctccgccttcaatacgggagccgggtggcggagctagagaagaaactcgacgccgcccggggagtccttgacgccaccactgctcgggaacggcgggcgacggagaacgaggcggcgtcccggcggcgcgaagtgacccttgaggctcgcgccacggcgctggaagagcgtgcccgcgcgagggagaaggacctggcggaccgcgagaccgccgtcgctatccaggaggcaacgctggcggcgcacgaggccgcctgcgccgaagaggagtccgcactccgcctccgcgaggatgcgctcaccgagcgggagcgatctctcgaggaggccgaggccgcggcgcagcggctggcggacagcctgtccctccgcgaggcagcgcgggaggagcaggcgcgccgtaatctggaaggcgcccgcgccaagagggccgcactggatcagcgggccgctgagctcgaggcgcgggcgaaggagctggacgcgagggcgcgcagcggcgaggcggccgcgggcgacggcgatctagccgcccgcctcgcagctgccgaacacaccatcgctgatctgcagggcgcactggactcgtccgccggggaggtcgaggccctccgcttggcgggcgaggtagggcccggcatgcttcgggacgccgtctcccgtctagaccgcgtcgggcggcaagcgggcctctggggcgagcggaccgcgaagtacgccgccaaccaggggggcctcgcccagcgcctctcagagatggccgggactctccagcggctccccgaggagctcgaggagacgatcaagtcatcctcgagagacctcgcccgggggggcagtggagcttgtactggcaagctaccaggccagggacccggacttctccccgtccgggacgccgccgaccacatcgtccacagcttcgagggtacggcccctcggctcgcgttcgccctcgactccgacgaggagggcggcgacggtggtgtggacgacagcgaccacgaggccggcgacccgggagcctcgaaatga

SEQ ID NO: 78960 - DNA, 3027 bp, Oryza sativa
  Clone ID: PAT_MRT4530_78716C.1
atggcacggggctccgcactgcttgatggtagcgtgctgccgccttctcgcattgtgagcgagaagcaggctgggttgccgcgccgcttcatgccggaatctgccaccggccgtgagatagtaatgctgggtgagggacgcccggcgctagactacccggggcggtccgtcttctttctccccttcgcaatggcagggctggttccgccattttcttctttcttcatggacgtcctggagttctacgatctccagatggcgcaccttatccccaacgcagtgatgacattgggcatcttcgcacacctgtgcgagatgttcattggggtgcgcccatctcttcggctgttccggtggttcttcaccgtgcagtcggtgtcgccgccgtcggtggttggtggctgctatttcctgccgcgggggccggtgttgaactgctacatcccctgcgtcctccgtaaaaagtgggatgactggaagagcgactggttctacacccccctcgccgacgaagcgcatcttcgactttcgagccagcccccggcgcaggcccccagctggcgggcgccggtagatctgggggatggctatgacgccgtcctcgaccgcctcgcgggcctgcgatcccaggggctcacaggggccatggtgtacggcgactacctccgtcgtcggattgcgccgctccagcggcgcgctcggggcgcctgggagtacacggggtccgaagacctcatgaggacccaccagggagtgagatgggactgggctcctgaggatttcaagatattggtccaacgggtgctgaatctcaactccgtggaggcgtccctcattccccaaggaatcctccccctctgcagcgatccagaccgcgcctccatcctgaccattatgatagcggtcggggcctcagaggagcaggctccaaagggccacgacggcgcaggcgggagccgcaagggggaacaatctaccccgggagggggtcgtgcttctgggccccgcgacaggggcccggggggcaaccgccctaccgacgcccgggggaagaggaaactgggaggaacacctccctcatcttctccccgagggggcggggcggtgcgtgccggcagcaggcgcccggagggggccgtgccaacatcgcagcccgagggggagcgcaagaagaagcggctgcgcaagatgggggagacagaaccatcccggggaaacctaatttcccctccaaggtggtcatttaaccgaccccctcgcagtgatatcccatcgcgttcctcccaccatctcaagtccggccagtccgaggccgaagatccggcggccgcagaggcacggaggcgggaatctgaccggcgagaggccgcagaccgcctacgggaagctgaagaggccgcccgggaagccgcccgggctcgccaggctgatgataccgcttgggaggaggccgcccgggcccgccaagccgaggaagccgctcgggaggaggccgcccgggttcgccaggccgaagaagccgctcgggaggaggccgcccgggttcgccgggctgaggcgatggcggcttccgaggcagttcacgacgaggccgcggacgcctcgcttgggcccaccccttcgggcgacgcccaggaccaaacggagccccttctgcaggccttagccgccgcaaataccgcggtattggatgggttcaacgcccaggtggaggccctgcaggcggagcgtgcggagctcgacgccgcatgggcgcgtgtcgaggaggggcggcgctcggtggaggccatggtagaagcgggccgcaaggcacaccgccggcacgtctcagatcttgaggcccgcaagacggcactggcggagatcgctcgagaggtggaggaggagcggggggctgccctcatcgccaccactgcgatgatcgaggcgcaggactccctccgccttcagcacgggaactgggaggcggagctgaagaaaaagctcgacgccgcccagggggttcttgatgccgccgctgcccgagagcagcgagcgacggagaccgaagcggcgctccggcggcgtgaagaggccctcgaggcgcgcgccatggcgctggaggagcgcgcctgcgtcgcggagaaagtcctggcggaccgcgaggccgccgtcacctcccgggaggcaacgctggcggcgcacgagtctgcctgcgccgaagaggagtccgcactccgcctccgcgaagacgcgcttgccgagcgggagcgagctctcgaagaggccgaggccgaagcgcaacggttggcggactccctgtccctccgtgaggcagcgctgacggagcaggcccgtcgcaatttggaatccgtccgcgccgagagagccgcactggagcagcgggctgccgatctcgaggcgcgggaaaaagagctggatgcgagggcgtgcatcggcggggcggctgcgggcgaaagcgacttagccgcccgcctcgcagatgccgaacacaccgtcgcggacatgcagcgcgcgctagactcatccgccggggaagccgaggccctccgcttggcgggcgagatagggcccggcatgctctgggatgcagtctcccgtctggatcgcgccggtcggcaggcgggcctctggaaaggccagtcaatgacacgccccgccaacctggagggcctcgctccgcacctcacgaagatggcctgggctctccaacaactccccgaggagctcgagaagaccatcaagtcatcctcgagggacctcgcccaaggagcggttgaactcgtactagcgagttaccaggccagggaccccaacttctctccatggatggcgctggaagagttcccttccgggaccgaggacgacgcgcgcgcgcgggtccgggatgccgccgaccacatcgtccacagtttcgaggggtcggcccctcggctcgcgttcgcccccaactccgacgaggagggcgatgccagcggtgcagacgatcgtgacgacgaggccggcgacccgggcgcatcggactga

SEQ ID NO: 78961 - DNA, 3075 bp, Oryza sativa
  Clone ID: PAT_MRT4530_78717C.1
atggcacggggctccgctctgctcgatggtagcgtgctgccgccttcccgcatcgtgagcgagaggcaggctgggctgccgcgccgcttcatgccggaatctgccatcggccgggagatagtcatgctgggcgagggacgcccggcgccagactacccggggcggtctgtcttctttctcccctttgcaatggcggggctggttccgccattttcttctttcttcatggatgtcctggagttctacgatctccagatggcgcaccttacccccaacgcggtgatgacattagccatcttcgcgcatctgtgcgagatgttcattggggtgcgcccatctcttcggctgttccggtggttcttcactgtgcagtcggtgtcgccaccgtcggtggtcggtggctgctacttcctgccgcgggggccggtgttgaaccgctacatcccctgcgtcctccgcaagaagtgggatgactggaagagcgactggttctacacccccctcgccgacgaagcgcgcctccgacttccgagccagcccccggcgcaggcctccaactggcgggcgccggtagatctgggggatggctatgacgccgtcctcgaccgcctggcgggcctgcgatcccaggggctcacagggaccatggtgtacggcgactacctccgtcgtcggattgcgccgctccagcggcgcgctcggggcgcctgggagtacaccgggtccgaagactacatgaggacccaccagggagtcagatgggactgggctcctgaggacttcaagatagtggtccaacgggtgctgaatctcaactccgtggaggcgtccctcattccccacggaatcctccccctctgcagcgatccagaccgcgcctccatcttgaccattatgacggcggtcggggcctcagaggagggagctccaaagggccacgacggcgcaggcgggagccgcaggggggatcaatctaccccgggagggggtcgtgcttctgggtctcgcgacggaggcccggggagcggccgccctgccgacgcccgggggaagaggaagcagggaggaacacctcccccatctcctccccgagggggcggggcggtacgtgccagcagtaggcgcccggagggggccgcgccgacatcgcagcccgagggggagcgcaagaagaaacggctccgcaagatgggggagacagaaccatctcggggaaacctcatctctcctccaaagtggtcgttcaaccgaccccctcgcagcgagatcccgtcccgtccctcccgccattccaagtctggccaatctgaggccgaggatccggcggccgcagaggcccggaggcgggaatctgatcggcgagaggccgcggatcgcctacgggaagcccaggaggccgcccgggctcgccaggccgaggaaaccgcttgggaggaggccgcccgggcccgccgggccgaggaaaccgctcgggaggaggctgcccgagcccgccaggctgaggaagccgctcgggaggaggccggatttcgccaggacgaggcgatggcgacttccgaggcagttcgcgaccaagaccaaacaggtccgggggacatccccgagtccggcacttccatcggcggcccgagccgcgtggcatcctctccaaggcggctcttccccacgccttctatcaccccgctgagcgcagagccccttctgcaggccttggccgccgcaaacaccgcggtgttggacgggtttagcgccccggtggaggccctgcaagcagagcgggcggagctcgacgccgcttgggcgcgtgtcgaggaggggcggcgcttagtggaggccatggtggaggtgggccgcaaggctcaccgccggcatgtctcggagcttgaagcccgtaagaaggtgttggcggaaatcgccaaggaagtggaggaggagcggggggctgccctcattgccaccaccgtgatgaacgaggcgcaggacaccctccgccttcaatacgggagctgggaggcggagctagggaagaagctcaacgccgcccagggggtgcttgacgctgctgctgcccgagaacagcgggtggcggagaccgaagcggcgtcccggcggcgtgaagaggcccttgaggcgcgcgccatggcgctggaagagcgcgcctgcgccgtggagacagatctggcggaccgcgaggccgccgtcgccatccgggaggcaacgctggcggcgcacgagtcagcctgcgccgaagaggagtccgcactccgcctccgcgaggacgcgctcaccgagcgggagcgagctcttgaggaggccgaggccgcggcgcaacggttggcggacagcctgtccctccgtgaggcagcgctggcggagcaggcgcgccgcaatctagaatgtgtccgcgccgagagggccgcactggaccagcgggccgctgacctcgaggcgcgggagaaggagctggactcgagggcacgcagcggcggggcggctgcgggcgaaagtgacttagccacccgcctcgcagctaccaaactcaccatcgccgacatgcagcgcgcgctagactcatccgccggggaagccgaggccctccgcctggcaggcgagatagggcccggcatgctttgggatgcagtctcccgtctggatcgcgccggtcggcaggcgggcctctggaaaggccagacaatgaagtactccaccaaccagggaggcctcgctcagcacctctcaaagatggccggggctctccagcagcttcccgacgagctcgagaagaccatcaagtcatcctcgagggacctcgcccaaggagcagtggaactcgtactagcgagttaccaggccagggaccccaacttctccccatggatggcgctggatgagttccctcccgggaccgaggacagcgcgcgtgcacaggtccgggatgccgccgaccacatcgtccacagcttcgagggctcagcccctcggctcgcgtttgcccctaactccgacgaggagggcgatgctggtggtgcagacgacagtgacggcgaggccggcgacccgggcgcatcagactga

SEQ ID NO: 78962 - DNA, 2673 bp, Oryza sativa
  Clone ID: PAT_MRT4530_78718C.1
atggcacggggctccgcaccgctcgatggtagcgtgctgccgccttcccgcatcgtgagcgagaggcaggccgggctgccgcgccgattcatgccggaatctgccaccggccgggaggtggtcgcgctgggtgagggacgcccggtgccacactacccggggcggtccgtcttcttcctctctttcgcaatggcggggctggtcccgccattctctatttttttcatggatattctggagttttatgatctccagatggcgcacctcacccccaacgcgataatgacgttggccatcttcgcgcacctgtgtgagatgtttatcggggtgcgtccatctctccggctattccggtggttcttcaccgtacagccggtgtcgccgccgacggtagtcggtggctgctacttccagccgcgggggcaggtgctaaaccgctacattccctgcatcctccgcaaaaagtgggacgactggaagagcgattggttctacacccccctcgccgatgaagcgcgcttccgacttccgagccagcccccggcgcaggcctccagctggcgggcggcggtagatctgggagacggctacgacgccgttcttgaccgcctggcgggtctgcgatcccagggactcacgggggccatggtgttcggcgactaccttcgtcgccggatcgcgccgttccagcggcgcgcccagggcgcctgggagtacaccgggcccgaggactacattaggacccaccaggggcgcaaatgggactgggaccctgaggacttcaggatggtggtccaacgggtgctgaatctcagctccgtggaggcatccctcatcccccaaggggtcctccccctctgctgtgatccagagcgcgccaagatcctggccatcatgcagcgagatcccgtcgcgcccccccgccattccaagtccggccggtctgaggccgaggagacggcgaccgcggaggcccggaggcgggaagctgaccggcgagaagccgcggaccgcctccgggaagccgaggaggctgcccaggaggccgtccgggttcgccaggctgaggaggccgctcgggaggaggccagactccaccgggccgaggagtccgtccgggaggcagaggcggcgcgcgcacgccagacggcctgccaaacccccgacccgactccgcccgaggcgacgacgacttccgaggccacccacgacgaggccgcgggcgcgccgctcgggcccgacccctcgggcgacgcttgggacgagccagcttcgggggacgcccccgagtccggcacgtcgatcggcgggccgagccgcgcggcacccacaccgaggcggctctcccctctgtcttccgctgccccactgagcgcgaagcccttcctgcaggccttggccgccgcgaacagcacggtgctggactggttaagtgcccagatggaggccctacaggcggagcgggcggagctcgacgcggcgtgggcgcgcgtcgacaaggggcggcgctcggtggaggccatggtggaggcgggccgcaaggcgcaccgctggcacacctcacagctcgaggcccgtcgtagggacctggcggagatcgccagggagctagaggagaagctcgacgccgcccggggagtccttgacgccgccgctgcccgggaacggtgggcggcggagaacgaggcggcgtcccgtcagcgtgaagagggccttgaggctcgcgccacggcgctagaggagcgcgcccgcgccctggacgcgaaggagagagacctggccgaccgcgaggccgccgtcgccaaccgggaggcaacactggtggcgcacgaggccgcctgcgccgaagaggagtccgcactccgcctccgcgaggacgcgctcaccgagcgggggcgagctctcgaggaggccgaggccgcggcgcagcggctggcggacagcctgttcctccgcgaggcagcgcgggaggagcaggcgcgccgcaatctggaaggcgcctgcgccgagaaggccgcactggatcagcgggccgctgagctcgaggcgcgggcgaaggagctggacgcgagagcgcacagcgacggggcggccgcgggccacggcgacctagccgcccgcctcgcagccgccgaacacaccatcgccgagctgcagggcgcgctggactcgtccgccggggaggtcgaggccctccgcttggcgagcgaggtagggcccggcatgcttcgggacgccgtctcccgtctagaccgcgtcgggcggcaggcgggcctctggggcgggcggtacgcgaagtacgccgccaaccaggggggcctcgcccagcgtctctcagagatggccggggccctcgagcggctcccagaggagctcgaggagacgatcaagtcatcctcgagggacctcgcccggggggcggtggagctcgtactggcaagctaccaggccagggaccctgacttctccccgtgggcagcgctggaagagttccctcccggaaccaaggacggcgcgcgcgcgcaggtccgggacgccgccgaccacatcgtccacagcttcgagggtacggcccctcggctcgcgttcgcgctcgactccgacgaggagggcggtgacgacggtgcggacgacagtgacgacgaggccgacgacccgggcgcgttggagtga

SEQ ID NO: 78963 - DNA, 288 bp, Oryza sativa
  Clone ID: PAT_MRT4530_78719C.1
gccggatgaccttttcaaattaaattaatgttaaagggagaaagaagaaaacaggaacagaacaaacagaaaaggaaggtttaacataaaagtcaacctccacaggcagacaaaacacccaacagtcaaaaaagtattggggatccagtaggcaaaacacagaaaacaaaggcctactaaagaacaaacatttgaagggaaaacgggaaaacgcaaaatacccaggcaggggagccgaattacagaaaggcaagaacaatgagaggttctaaaaccagaaggagagaa

SEQ ID NO: 78964 - DNA, 795 bp, Oryza sativa
  Clone ID: PAT_MRT4530_7871C.1
atggatgaagtcgggggtcgatggacattctccagggcaaatgaaggctacacgagctgcggcccggtagtcgagatgtcgtggcagagggttggtgcgctgctgcttggggctcagtcctgcctgcctgtcccgggggttccggccgtaggcaggattggaatcgagcccgcgccgtcgcactctctctccgccgtcgccgccgagctccggtccgccgccgtcgtcgccccggaccatctcccgccccggcgccgcctccttcggcttcgccgcatcctcgccgacctcgtccacccctccgcttcgctcgccgaccgccggaacgccgtcgaccccgtcgacccgagccgcgccgccgccttcctccgctccggccgccgttttcgtcgtcgccgtcgactcggggtgagccgtggaccgccgtttcgtttccccctttccctcccctctctcggccgctgctccgccgtgccggtggtcgccggcggcgaccatcggggcgagggcgctgcctcccgccggccgcgccgccgtggctgccttcgggcgcaccgagcggctgccgcgtggggcccggccgtcagccgcccgcgccctcgggtgcggctgacgcgtggggcccgcggcgccggtcggagtaagccgcgtgcacccggtccaccgtggaccgtgaggctgccgcgtgggccccactcccgtggacccgacgctgcagcttcggaggatccgctcttcgtggaagttgaagccggcatttgggaaagcgagcaaggcaagacacatcatccttga

SEQ ID NO: 78965 - DNA, 516 bp, Oryza sativa
  Clone ID: PAT_MRT4530_78720C.1
atgaacataccaagaacgcaatgcgaccaacagaacaaacagagaactgcctctgtcgatgttgaagttcgcaaaagctctggctcccagagctccatctccagagacggcggcagcggcggctccggctccaggtgcagacatggtggacgacgagacaacgacgaacagagcagtcgtgtagagcagtcgtgcgggaagcactccccaataacttggtcacccgcctacccggtgcagatctcaggcgaaggttgccacatggcctcatataaacactcctacatcgtcacgtggcattctataataacacctgggtgccagcggccagctagcggatctgccatccccgccctcaagagcaatgagtccgtcaaccctgccctcaggagcggcggcagcgggagcgggcagatcagtcgcccaagacctcgagagcggtggcggtgggagcggcggcccgacgacgacggcaccggcggtgacgactacaacgacgatgaaggtagcgactag

SEQ ID NO: 78966 - DNA, 3190 bp, Oryza sativa
  Clone ID: PAT_MRT4530_78721C.1
atggcaattaaggaccggttcacgggaaacactgggagacttaccgtgcttaccacaagcgggagtggagctgaagatcttcctagtgggaagtgtcttaccgaagttgatttcgtcgctgtcgtcaaggattacctgtggagtggagtcaccccgctgcagaagtcaagtttccaagtctagctcgtttttcttttctgctgcatttgtaatcatctccatttttgtaagacgtggatctgtatgtcaaaaattgtcgtttgtgtaccctggctggtcctagacagggatttaatgcacattcagcttcgaaattctggttcgtgaatttctgggcatgacacatgtcttcttggcactcagtccactcagtgacgaagtcggctaaagcttgggacttgatcgaagttcgcggcatgaaggatatatccagggacatcaattctaaggcccactttgctatccgcccatttgcttcacgattatgaagtatatccccgagtggaaacgatgtgaccaccgtgaccgagtgaccttggaagtagtgaggtaatttgctgacggtcattaaaacaccatataacagcttttgaacctgaggatatcttgtcttggagtcagccaaaaccttgctaacgaagtagattggtcgttggactttttgaacatggccttcttcttcacgctcaacaactaggactgtgcttacaaccataaatccaagcagcttccctgacggtactccgaagatgcacttttgagggtttagtttcatcctgaaagcgcggatgcttgcaaaggtctcttctagatccgtaatcaaatcatccttctgcttggtcttgacgactagatcatccacataagcttcaacgttgcggtcgatttgagttgaaaaacatctttggatcatgcgttgataagttgctcctgcgttctttaatccaaacggcatggtgatgtagtagtaggccccgaagggcgtgatgaacgaagtctttaagcagtcggatctgatgatatcctggtcaatgcgaggtaacgcaaagggatctttggggcaagacttgttgaggtcggtgtaatcaacacacatgcgccattgtcccgtcttcttccgaactaggactgggttggccagccagtcgggatgaaggacttccttgatgaagcctgctgctaacagcttggtcaattcctccttgatcgcatccttcctatcctgtgcaaaacggcggagtcgttgcttgattggtttagcgtcttccttaacaagtaaagagtgctcaatcaccaaatctaactcagcgcctattacagcagtcttagtaggatcagaggaatctaggggaatcttcttggtcttggcgtcgccttctccgctctttggcatcttggttgcgggcacttctccttcgcttgctgtggacgtagccagtcggatttcttctcgggcgagcgtgatctcgcgggtctgggccatctcacagctttccttgtcgcatgtgacggcttgcttgatgtcactccgcagggatatgtctcctcgaggaccaggcatcttcatcatcatgtaggtatagtgcgggacagccatgaacttggctaacgccgggcgtccgagtatgacatgatgttctctgtacggaaattctcccgagtgcagggggtaccgtcccgggtggaccactcggtctggatgatccgagcggtcaaacttaatcgttgtctctgaccaccgaagatattggggcgtgtcaggttgagcagcgttgatctccgttcggtcagcttttgctttctcatccttcttctttgacgtgctttgatctccgtcggaggctttatgtgcgttcttggcgtattgttctgcaaactgtttgtagacgaagcaatctttggccgcgtgattggaattgggatgatgcggacattgggagttcataatcttgtcaaaggtgttgacgtgcgaacgttgtcgggaggatggtgtagtagttgccacaagttcctcgggcttacgcttgcgatccttgtgattggtacttccactcccccctgtagtcggtgtatctttcttcggcttccaagtggtgcccgactgcttggacgtggtaatggcatcttcggctttggcatactcattggctttttcgaacatctgcttgaccgtcctgggaggcttgcgcccgaacttgccgactaggtctgtgtggcgaacgcccttggtgaaggcggcgatgatgacgtcgtcggtgatgtcggagatcttgttgcgttgctcggaaaagcgtcggatgtaatctcgaagggattctctagacttctgaatgacgttgtagagatcaaactgtgtaccagggcgttcaaaggtaccccgtgaagccaggaccgggcagaatccgctagggccacaggcaaataattcgccaattgcgagaccgtagacggtgagccaagactccgggttagtggtgccgtcatacttctcgattccaatcggcttgaagccggctggccaatccactcgacgcaggtcgcttgtgaaggcagcaactccatccacgtcgtcgtcgtagcgatctggagaatggtggggagcgtagcctcttgccgcgcggcgctggttgatagtatcgcgaagatcgacggggcgccgctgtcccctcgacgtcttgttgcccaataagttcctatgcttgtcgcccggcatccagggcacgttgtcgccagtcctcagcctcttttgcagcccgttcgcgttcctgtggctcacattgtagccgttctcgctcttatgcttggcgctcctcttccagtcggcgtcgttcggcttcctgttgtacacgtagttcttctgcttctcgggctttacgctcttcttccgtctcattgtcagccatgaagatgccgaagtagaggggtgtgtagttgtcttcaaagccttcgtcgaagtcgtcgaggttgcgtagtcgtagcggtagccgaagtcgtcgtactccacgatctccgatggtcgcgagtcgatgccgggggagtaggtggagatctggcctcttcccgactggtttgaatccgagtcgaggagagaaatcttgccgaagtcgttggtgatgaagtcgaggctgccgaattggaacgcctgcccgggagggaagacaaagtcgtcgatgccggaaacgaaacccat

SEQ ID NO: 78967 - DNA, 673 bp, Oryza sativa
  Clone ID: PAT_MRT4530_78722C.1
ttaggtggcaacaggcgatctgacacacgcctcgccccgtcccgtcaggatgagagtctctaggcactcgtccctagccagagccagcgtgctagctcctggagatggcacgttggtcctggtcaggtatatgccaggcggtctgacactggtcatgtcgtcggcaaacagctgtgttcccacgtcgcgcctgcttccggcggaagtggaggtaggtatgggccgtcccatcagaaggtcattcggacggcaaccatacaagtctccgtgatcagagagggagagagtaagagctctctggttctccagctcttttgtagcttcttcgtacatagattcaccaaaacacaggagtagggtattacgcttctcagcggcccgaacccagggcccccggccgaaccggcaaaggggggcctgcgcggtctcccggtgaggagccccacgctccgtcacatccgcagagataggaaaatcagcggggcaagggcaccataccgccgcctgcttaaggaggagatgcgggaaagggtggagttaggaggcctcgttgacatcattcgcgccttccggctagctggcggggccagattgacgaaatttgatggccaggcactggtgtcggcatcagagccacgaggtttggagtgggcaggagcagacgacctgacta

SEQ ID NO: 78968 - DNA, 445 bp, Oryza sativa
  unsure (1)..(445): unsure at all n locations
  Clone ID: PAT_MRT4530_78723C.1
gtccgactgagctgcggttgtgtgcaaaccttgaaataatatatatctactaattgcataaaggtttatggaggattgaatatgaagcaactagtatattcagtgaatatcacttaagttgttcacaaagtagaaacgggcctcttttttgttttgttaatttaatactggcacaacttgaggacaaggttgatggtgcaatactgaaacgcattgtgcttcattttcagttgtgctgagccagcgcctcaaggtatatttgcgaatttttccctgttactgaccgaaggcagagtagaggaacctgatgtggntgatctcggcacgatatttgaagaagaacaaaccaaagctcctgtgctaactggaagccaagaagatggagacgacgaagatatagattgggatgacccgttgcatttcccagctgggaaaaggagattga

SEQ ID NO: 78969 - DNA, 438 bp, Oryza sativa
  Clone ID: PAT_MRT4530_78724C.1
atggtcggcccgttcaaaaaggcagtcggcggttatactcaccactttgtggctgttgacaaattttccaagtggatcgaagctaaaccggtcattacaattacgacagacaaggctagagatttcttcatcaacattgtacaccggttcagggtacccaatcggatcatcactgataacggcacccaattcacaggcggagtattcaaagatttttgcgaggacttcggcatcaaaatttgttatgcctctgtagcgcaccccatgagcaatggacaggttgaacgtgccaatggcatgtttatggagcggaagcaatgttgccgagtgaggtggaatttgaatctctacgatttcgcaacttcagcgaggagcgctatggagaagaccgagttgatgatatcaaccgactggaagaagcccgcgaagcagccttaa

SEQ ID NO: 78970 - DNA, 5311 bp, Oryza sativa
  Clone ID: PAT_MRT4530_78725C.1
gaaatgcctaagcacaaaattgacgaaggtgttcaatatttcaaagagatgagtgtaaccaccgactgctttttaaatggaccgaccatatcaagcccccaaactgcgaacagctaagacagcaggatggtttgcaactcctgagctggtaaatgagcttgtcgggcaaagaattgacaaccctcacatgttcgcacaattttgtcggcgtcggaaacagctgtgggccagaagaaaccctgccgataggctttgccaacaatggttcatgcagcagcatgattaccacagatgcctgaatgaatatctttcagcaattgtcttccctcttccaaagatacacagcgctgcaaaattcctgaaggacatttcttgtacaactcggtctcgtgcatgacgtagagtctgctgcgcctggaaatctgctcggcttcatttttgtcttgagggagttcttgtttagtcaaaaatcttatgagaggttctctccagtcggcttcaatcatgcttacgccttgagtatccatggcttcaattgtttcttttctgggcacggtcggttcgtaaagatgttcgacgaacacatctgaaggggctgcttcccgttttgaaccaaaattggacagtctgtttgctgcttcattattatgtccgaggacatgggtgagctcaagtccatcgaatttatcttccaacttacgtacctcttgtcgataagcggtcatattatcatttagacaagaccactctttcatgacttgattaataaccaactgagaatctccacggatgattagtcggcgaatgcctagagagattgcaatccttaatcgatggagcagcgcctcatattccgccatgttatgggacgcagaaaaatgtatccacaatacgtagctcaatctttctccggtcggggaaattagaacaaccccagctccagtgcctgtaagcctcttcgacccatcaaaatgcatagtccaatattccatcttttcctctggcatgtcttcttggcactcggtccactcggcgagaaaatcagctaaagcttgtgacttgatcgaagttcgtggcttgaaagatatgtccaaagacatcaattctaaggcccacttcgcaatccgtccgtttgcttcgtggttatgaagtatatccccgagtggaaacgatgtgaccaccatgaccgagtgactttgaaagtagtgagataatttcctgacggtaattaagacaccatacaataacttttgaacctgaggatatcttgtcttggagtaggccaaaacctcgctaacgaaataaattggtcgttgaacttgttgaatatggccttcctcttcacgctcgacaactaggaccgtgctcacaacctgggaggtcgccgacacatataacagtagcggctcttgtggatgtggcgaggccaaaacttgtggagtagtgagaagtttcttgaagtcttctaaggctttttgtgcttcgggtccccactagaaattgtcggttttcttcagcagcttgaaaaagggcatcccccgctcgccgagtcgtgagacgaaccggctgagcgccgccatgcaaccagtcagattttggacatctttctgggagctcggcggtttcatgttgaggatggcgttgattttctccgggttggcctgtatgcctctttgagataccataaatccgagcaacttccctgacgttactccgaagatgcacttttcagggtttagtttcatcctgaaaacatggatgcttgcaaaagtttcttctaaatctgcaatcaagtcatccttctgcttggtcttgacaactacatcatcaacgtaagcttcaacattgcggccgatctgagttgaaaaatatatttgaatcatgcgttgataggttgctcctgcgttcttcaatccaaagggcatggtgatgtagcagtaggccccaaagggcgtaataaacgaggttttcaagcagtcggattctttcagtcagatctgatgataccccgagtagcagtccaagaaactgagtaactcacagccggccgttgagtcaaccacctggtcaatgcgaggtaacccgaaaggatctttagggcaagacttgttgaggttggtgtaatcgacacacatgcgccactgcccgatcttcttccgaactaggactggattagccagccagtcgggatggaggacctctttgatgaagcctgctgctaacagcttggttaattcctctttgatcgcatctttcctatcttgtgcaaaatggcggagtcgttgtttgataggtttggcatcttccttgacatataaggagtgctcaatcacctctctaggaataccaggcatatcggatgatttccacgcaaaaatatctttattattaacagttttggtaggatcggagggatctagtggaatcttcttagttttgtcgttgccttctttggtctttgacagcttggtcgcaggcacttctccttcacttgccatagtcgtagtcagtcggatctcttcacgagcaagggtgatctcgcgggtttgggccatctcgcaactttctttgtcacatgtgacggcttgcttgatgtcgctccatagtgatatgactcctcgaggagcaggcatcttaatcatcatgtaggtgtagtgtgggacggccatgaatttggctagagccggtcatccgagtatagcatggtacgctgtctcgaaataagcgacttcgaaacaaacattttcggtgcgaaaattctcccaagtgccaaaggtaaccggaagagtgatctggccgagtggtgtagctgacaatcctgggataacaccgtggaagggtgcattactcggctttaattccatgtgaggaatctgcatatcgtccagggtcttagcgaaaaggatgttgagtgcgctaccaccatcgatgagagttcttcggagcttgacattgcgaaccactgggtctagtaccagggggtaccgccccgggtggaccactcggtcgggatgatccgagcagtcgaacttgattgctatctctgaccaccgaaggtattggggtgtgttaggctaaaccgcattgatctcccgttctgttagcttctgctttctcttagattcataagccaggggtccgccgaagatgtgattgagttctttgcgagagtcctgaaaaccagtcggggcatcgtcttcgtcatctttcttctttgatgtgccttgatctctgtctgaaggcttacgcgcgttcttggcatattgttccgcaaattgcttgtagacgaagcaatctttggccgcatggttggagttgggatgatgcggacattgggagtttattatcttgtcgaaggtgttgacgcgggaacgttgtcgggaagatggagaggctgttgccacaagttctccgggcttacgcttgcgatccttgtggttgttacttccactccctcctgcagccggcgtgtctttcttcggtttccaagtggtgcccgactgtttggacgcggtaatagcatcttcggctttggcatactcgttggctttttcaaacatctgcttaaccgtcttgggaggtttgcgtccgaacttgccgactaggtcctcgtggcgaatgcttttagtaaaggcggcgatgatgacgtcgtcggtgatgtcggagatcttgttgcgttgctcggagaagcgtcggatgtaatctcgaagggattctccagacttctgaatgacgttgtagagatcaaactgtgtgccggggcgttcaaaggtgccttggaagttggcgatgaagtgatcacgaagttccgcccatgatccgatcgtgccacggggtagtccatggagccaggatcgggcggaatccgctagggccacaggtagatagtttgccatggccttgctgtctcctcctgctgcgcggattgtgagtccgtagacagtgagccaagactccggattagtggtgccgtcatacttctcgattccagtcggcttgaagccggctggccaatccactcgacgcaggtcattagtgaaggcagctactccatccacgtcgtcgtcgtagcgatctggtgaatgacggtgacctcgtgctgcatggcgctagttgatcgtgtcgcaaagatcgacggggcgttggcgaggtggagagcgaagccgttcgactcggcgttccccgtgacgttcgggaggcgagtgaaaatatcattcgtcgtggtccctgctcctgcgacggatcctgtaccgatgatgctgaggcttggctgatgataatcatgagatcggagatggggaacccggctaccagtcggcgtgcgagtgcttgcggagttggctagaaccgaagcagcgatcatggtcttcgtctggttcaagatgttgacaacatgatcaacttgattgagtgcgtcttccttggggagggtgtcgaggagagtgattgctgcaaccgcgttctgctggggggtgcgaaaaaccgttgttccatcgacgtcttgttgcccgatgagctctctcgctcgtcgcccggattccaaggcgcgctaccgtcgatcttcagcctcctttgcaactcgctcgcgatcttgttgctcacgctgtagtcgttctcgctcttgtcgttgtcgttcttcctcctgtcggcgacgttcagtttcttgtcgtgcgcgctcttcctccacttctcgagctcggtgctgttcctccgtttcgttgtcagccatgaatacgccgaaaaagagaggcgtgtagctatccttatagctatcgtcgaagtcgtcgtggtcgtggtggtagccgaagtcgtcgtagtcgaggatttcggttggtcgagaacttacgccaggggagctaaggtagccgtccaactcttccgtcaagactgtcccaagaggttggagtataacgccaacctctctggatctagattggatcggggccgaagccggagctcgcctagatctttgagtgggagatgtcttggctgtgaagacagcggccaaatcattaggaagtctcatcaggattgagggataggacccgtcatcttgatctggtcgctgaggagtagattggatctcgtccgagtggtttaaagccgacttgggagagatgatcttgaagtagttctcggccgagttcagaataccgaacggcgtggggacttgatctctccccgactggttcgaatccgagtcaaggagagagatcttgccgaattcgttcgtgatgaagttgaggctgctgaaccggaacgcctgcccaggagggaaggcgaggtcgtcgacgccggagacggaacccat

SEQ ID NO: 78971 - DNA, 2643 bp, Oryza sativa
  Clone ID: PAT_MRT4530_78726C.1
gacgagtgcgccccccgcgcgcccggcgctcccactgcggcaggcgctctgcaaggagctactcaccgcgctccccgcagaccttccccccctcctccgcgccccgcgccctccacctagcccgggccgcgccgcccagcatccgcccgggccagtggcgcagcctttgggccgttatgacgctcctccccgtcgccagcctatctcagcccttcctcgcagccgcactcccctcccacccctccgtctcccatctcctccggctgtccgatagtagcggcccgctgacggcgaagatcgacgacctcctcgcccacgtcgcgctcccttccccaggcaacctcccctgcgaccacctccaggcctggaaccagaatgcgaccaccgtgacgttgggcctcggggccgcggcccccctggaggcgcggcggcagccgggcggagagaacacggcggccatggacgcagcgcgcgaggcgttcgagcagcgccggaagctcttcgccgtcgcctgcgacgacgccgacgcgctcgtccagtcggctcgccagagtatcgtctccgaccccgggcgcttcgtcgacgtggtgaccacccccgacgaggattcggtgcgctctccgacgaggtcctccgcggaatcctcctcgtcgagcggattcggtgcgctccccgacgaggtgctccgccacatcctcctccgcctcccctccgccgccgccgccgcgcggaccagcctcatctcccgccgctggcgaaacctctggtccaccctcctcccgaagctgcggttccccggcgtcactgacctcgcccgcgtcggcgccgccctccgcctccgcgtcgccccggtccgcctcctgcgcatcgagagcagcgaccgcgccccggataagatcgtcgccgtcctccacttggccgcgcccctcctcgagggcaagctctgcttcgacgtcatcacgcccaccatccgcttgcgcggccgcctcggcatccagctgccaccatccggcgtcttcgcgaggctcaccctccatctcgtcgtcaacagcgacgagctccatctcgacggcgcgacgagttccagctcgtccttgacggcggcgacgagctccatctcatcctcgacggcgcgaagtgctccatcccgaatacgcgacgagctctatcttggttcctcgaggacatggccctcgacatcggcggcggcggggccggcgacctcctgagcgcgctccccgacgacgtcctccacctcatcctcctccgcctccgctccgccgccgccgcggcgcgcaccagcgtcctcgcccgccgctggcgcagcctctggaccaccctcccggagctacggttccccgccgtcaccgacctcgcccgcgtcaccgccgcgctcctctcccacgacgccccgctcctccaccgtctcgagctctgcagccacgaccccgccccgcacgaggtcgccgccgtcctccacttggccgcgcgcagcttagcaggcaagctcctcctcgacatcgtgatgaggaagaagagaaatccggtggcggcggcggcggccgggattggggccgcgtttcacatcccctgcttccggaaggccacggagatcagcatccgcttcgcctaccttaccatccggctgcctcccttcggtgtcttcgcgaagctgtccgtgctgcgcttgacccgcttccggcttgacgacagccagtgtgatcatctcggcgacatcgtctcctccgagcggcttgtcaaatcagccatccgctccaagactctcctcaccgttggcctctttgagctggaagaactgcagcagctcacgatttctgctcccatgcttagaacactgcatctggtccattgcttagacaagagggcgcatttcaaagcagtctcaaatgtcgacctctatctcatttatccatctagcatggttgactgtgagttcttgatggaggacatgaatactctccctgccattgagatcttatctctgaggtcaataacagcaggccatgcctttggaccttgtgtattccaattgcttaggacgtctactggtgtaagagagttgcacctggacttggatcatcaccttaagggagaagtttcttgctcatctggctgcatctgttacaagccgtcggactgggagagtatggatatctgcttgaattttctccagaaagttgaaatcaacaatttgagtggagcagagtatgaaatatgttttgtgaagcgactgttgacatgggcgccagtgctcaagatgattacagtaatgtttggtccttcagtaactgtcagcgaggaggttttcaatctgctgtgaagctacttagcttctctaccccagggatttgcatggaaatttacttgccccgcaatggaactagggtaaagtatagtgcagcgaactagacctagaggtgattaactgacgatgaaatggagcacagtaatcactgaaaccaggcaaattcgggccttcctttcagatcaactagggttaaggatgtccgtctgtcatgatacaggattgtcgtaaacttggttatggttgattgcacgactcacaacttgcgccttaatgtgtgtttacatgctctgaggaaagttttcatcccgctggtg

SEQ ID NO: 78972 - DNA, 142 bp, Oryza sativa
  Clone ID: PAT_MRT4530_78727C.1
aaaaggaaaaggaatggacatatgtaacagacagcaagttacaattaaactggagtgcaaacttggtaaaatctggatctacatactataagccagcacagaaaactagagaattgccatttatggacgcttacaaaacagc

SEQ ID NO: 78973 - DNA, 1083 bp, Oryza sativa
  Clone ID: PAT_MRT4530_78728C.1
ttaaaaatcaccaaggtgcaattttaatcccaggaaaatcctttttcttttttttcttttccctccttttcctttgttgggccgtcggcccatccctctcccgctcggccttccccttgtgggccggcccgttctccttccccctctctccgggacgctgacaggtggggcccacctgtcaggtcgtccccttcctccagccacccgcctccgacggcaaccgccgccgaatccgccacgccaccgcctcctccgctcttcccgcgcccacgccgcgccgctcccgcgtcctccccacgtcgccgcctcttcccccgcatctcccggcccgcgcgcgcttgagagggcgggattcgatttcgaatcccacccctctctctctctctcctccccacgtcgccggccaaatcgggagggttcccggccacgtcctcccctcccttgcccataaaagcactctcccgagccccctctttcgttttccctcattcgccgcgctctcccgtgcctcctatcgcgctcgcgccgcttgttgctagcgccgccgcttgccgtcgccttcggccgcgcgtcactgccgctagggtcgccgccgcgccaacccaccaccgccgttagcttcgccgccgcgagagctacctcggccgccgcttcgttgccgcgaatcaccgccggagctccgatttccccgcgtcgccggtgtgctcgccattgtttccatctccggccggccattttggtcgtcgcggtcgctttctccatccctaacgcctctccatcttctcctagggtgtcgccgccgcccgtccgtgcctccgcatcaccggtcgtcgccgccgctttcttccttcgcgccggccgccgtgctcgaaggtgaggaatcccctctcctccttcctttcctctctctcccatgagcgccgccgccctccgcgcgtgcgccgtcgtcttcggccgccgccccatggctggccggccggcttgagccgtgccgagcatgccgccgccacctccctcccttgtgccgctgccaatggggcccacgtgccggcgcccccttcctctctcttgaaccgctgacat

SEQ ID NO: 78974 - DNA, 993 bp, Oryza sativa
  Clone ID: PAT_MRT4530_78729C.1
ggatcggctcgtcttcccccctcttctttggttggcttcgtctccgcgcactcacacaccaccaccaaaggggaacggaagcgaacccctcctccgccgccgccgccggagatcgcccgctgtcccgccaatccgccgctgcggcctctggttgtcgtcgcgaagccggcgcctgcgctcagctgggatggcgtcgagtggagatccatcggcagtcgtcgtgcctaggaacttcagactgctagaagagcttgagagaggggagaagggcatcggtgatggatcagtaagctatggaatggatgatgcagacgatatctacatgcgctcttggacaggcacaattattggtccccataacactgtccatgagggccggatataccaactgaagcttttctgcgacaaggactacccagacaggccaccaactgtaaaatttcactcaagaatcaacatgacctgtgtaaacccagagaatggattggttgaccaaaggaagttcagcctgttgtcaaattggcgccgcgagtacacaatggaggctatcttgacccaacttaagaaagagatggcagcatcacacaaccggaaactagtgcagcctccagaggggacattcttctagaagcaggcgcccgccactcatctccgcatgccatggatgaaccattgtaattctctttctatatatcgcatgagatttgagccgtctgaacatttggtgcaaatgattgtagctgaacttcgctggtactaccttgtacgtggtccgtgtacgtcctgtgtttgtgtcgtgtctcgcttgtttggttaacagtttgccagtacggcattacctcaagagacaaaactaacgaattggggtaaaatctttgtaatgaatctagtgatgctctgcagatttggctatgtttctgaagtggtactatgctggttctttttctggcattgcaagtctaaaaaaaaaaaaaaaaacctcgtgccgaaaaa

SEQ ID NO: 78975 - DNA, 367 bp, Oryza sativa
  unsure (1)..(367): unsure at all n locations
  Clone ID: PAT_MRT4530_7872C.1
tgatgttatgtnggtcaagttttgtctcaactccattngggtttaatgtgatcctagtgttcntcagttattcgcgatgaaatantgaactgtatttatgttaagttgttctgnccgctttcattttctcctacctggtttagttagataggaaagaaaaatcacctttaaggattaggagatggtaaaatgaatatattttgttgctgttttgtcattgatatgtatagcatggaagctggttgtttccaaagagtggggtgcgggtacatcaaagtgctcaaacatgtaacttgataacattacaatacaatacacagagcgcgacctctcttcacatgggtaaaaaaaaaaaaaaaaaaaaaaa

SEQ ID NO: 78976 - DNA, 2827 bp, Oryza sativa
  Clone ID: PAT_MRT4530_78730C.1
atggcacggggctccgcaccgctcgacggtagcgtgctgccgccttctcgcatcgtgagcgagaggcaggccgggctgctgcgccgattcatgccggaatctgccaccggccgggaggtggtagagctgggcgagggacgcccggcgccacactacccggggcggtccgtcttcttccttcccttcgcaatggcagggctagtcccgccattctcttctttcttcatggatgttctggagttttatgatctccagatggcgcacctcacccccaacgcagtaatgacgttggccatcttcgcgcacctgtgcgaaatgttcatcggggtgcgcccatctctccggttgttccggtggttcttcaccgtacagccggtgtcgccaccgtcggtagtcggtggctgctacttccagccgcgggggccggtgctgaaccgctacattccctgcgtccttcgcaagaagtgggatgactggaagagtgactggttctacacccctctcgccgacgaagcgcgcctccgacttccgagccagccccctgcgcaggcctccagctggcgggcgccggtagatctgggagacggttacgacgccgttctcgaccgccttgctggtttgcgatcccaggggctcacgggggccatggtgttcggcgactaccttcgtcggcagatcgcgccgctccagcgacacgcccggggcgcctgggagtacaccgggcctgaggacatcatgaggacccaccaggggcgcaaatgggactgggaccctgaggacttcaggatagtggaggtcggggcgtcgggggagcgggccccccgaggccacgatggcgcgggcgggagccgcaggggggaacaatctaccccgggagggggtcgtgcttctgggccccgtgacgggggcccgaggggcagccgccctaccgacgcccgggggaagaggaaacaggaggataccccctccccatctcctccccgagggggcggggcggtgcgtgccagcagcaggcgcccggagggtgctgtgccgacgtcgcagcccgagggggagcgaaaaaagaagcggctccgcaaaataggggggaccgaaccaagccggggaaacctcatctcccccccaaggtggtcgtttagacgacctcctcgcagcgagatcccgtcgcgcccttctaggccattccaagtccggccggtctgaggccaaggagacggcgaccgcggaggcccggagacaggaagccgaccggcgagaagccgcaaactccctccgggaagccgaggaagctgcccaggaggctgtccgggctcgccaggctgaggaagccgcttgggaggaggccagactccaccgggccgaggaggccgtccgggagacggaggcggcgcgtgcacgccgtgcggactgccaagcccccgacccgactccgcccgaggcgacgacgacttccgaagccacccacgacgaggccgtgggcgcaccgctcgggcccgatccctcgggtaacgctcaggacgagccagcttcgggggacgtccctgagtccggcacgttgatcggcgggccgagccgtgcggcatcctttacgaggcggctcttccccatgccttccgctgccccactgagcgcagagccccttctgcaagccttggccactgcgaacaccacggtgttggacgggttaagtgcccagatagaggtcctgcaggcagagcgggcggagctcgacgcggcgtgggcgcgtgtcgaagaggggcgacgatcggtggaggccatggtggaggcgggccgcaaggcacaccgctggcacacctcggagatcgaggcccgtcgtagggacctggcggagatcgccagggaggtggaggaggagcgggagactgccctcattgccaccgccgtgtttaacgcggcgcgggacgacctctgcctccaatacgggagccggggggtggagctagagaagaagctcgacgcgtcccggcagcgcgaagaggcccttgaggctcacgccacggtgctggaggagcgcgcccgcgccctggacacgagggagagggaactggcgggtcgcgaggccgccgtcgccatccgggaggcaacgctggcggcgcacgaggccgcctgcgccgaagaggagtccgcactccgcctccgcgaggacgagctcactgagcgggagcgagctctcgaggaggccgaggccgcggcgcagctgcgggaggagcaggcgcgcctcaatctggaaggcgcccgcgccgagagggccgcactggatcagcgggccactgaactcgaggcgcgggcgaaggagctggacgcgagagcgcgcagcggcggggcggccgcgggtgacggcgacctagccgcccacctcgcagccgccgaacacaccatcgccgagctgcagggcgcgctggactcgtccgccggggaggtcgaggccctccgcttggcaggcgaggggggcctcgcccagcgcctctcagagatggccgggactctccagcggctccccgaggagctcgaggagacgatcaagtcatcctcgagagacctcgcccggggggcagtggagcttgtactggcaagctaccaggccagggacccggacttctccccgtgggcagcgctggacgagttccctcccggaaccgaggacgacgcgcgcgcacaggtccgggacgccgccgatcacatcgtccacagctttgagggtacggcccctcggctcgcgttcgccctcgactccgacgaggagggcggcgacggtggtgtggacgacagcgacgacgaggccggcgacccgggagcctcgaagtga

SEQ ID NO: 78977 - DNA, 163 bp, Oryza sativa
  Clone ID: PAT_MRT4530_78731C.1
gccggcctcgggacgccgccgctccggcttttgtctggtgctgagctggaccgctccggggcgccacgtcagctgacatcatcaccgttggggtgcagcgtgcacgtgtacacgaccacgtcccgcagctggtacggccgcacgtcgacacacgccgccacac

SEQ ID NO: 78978 - DNA, 744 bp, Oryza sativa
  Clone ID: PAT_MRT4530_78732C.1
atggccgtccccaggagatcagagatggtggccggcgataaaggcgccgtcgaaagctgcaggaaccaccaccacggagaatgcgccgtcgacctcgcctcgtcctgctgcacgtgtgcgccgcccgccacgacggcggcttcgtcgaggaagaagagaccgcgcgtcgtcgtcgccgatgagacgacgacgacgaacaccgtcgtcgacgacgacgatgaggatgacgacccgtcggccttgctgcggcggcgggcgaggtggaagcaggggctggaggcggtgaagacggccgtggcgtggcgtctggcggcgaaggacgacgagatcaggcgggcgcgccgggagatggcggagcgcctccggtgcgcgtgggcggtgtcgcgggcgtggcagagcatcgccgtggcgcgggagggggagaaggccgcgttgcagggcgagaacgccgcgctgcgcgtcgagctcgaccatgtgctccgggcgaagccgcggtggcaccacgacgacgacgacgccgagtcctgctgctacggtgacaacttcaccgacgacaccggcggcaaggaggaggacgagggcggcggcgacgcgagcacggcggcgaggtgcttcgggtgcggcgagagagcgtgctgctggcagtggcacctgtgcgccgcgtgcgcggcggtggcggcggcgtgggcgtgcccggcgtgcggctactccaacatggacatggacgacacatgcatggtgtag

SEQ ID NO: 78979 - DNA, 271 bp, Oryza sativa
  Clone ID: PAT_MRT4530_78733C.1
cacatagtactacaagtcgatttgccgtatgccgtcgccggagccgcattacgtgtggcggcgtgtgtcgacgtgcggccgtaccagctgcgggacgtggtcgtgtacacgtgcacgctgcaccctgcaggcctgcaccctgctctgacgtggcgccccggagcggtccagctcagcaccagacaaaagccggagcggcggcgtcccgaggccggcctacgtggcaggaggacgtgggggcccaccgtcgccgcgcggttcgcatccaacg

SEQ ID NO: 78980 - DNA, 1252 bp, Oryza sativa
  Clone ID: PAT_MRT4530_78734C.1
ctactggtcgagcgcgttggggccggagcagtagctgaggatggggttccacacccactgcaccaagaacttgcggccgccgacgccgttgacgttgtacgacgcgccggagcggccgtcggtgagcagctggccggtgtacgcgccgccgccgccggtgccgtagatcccctcgcacaggtcggcgatctccgtcgggaacgacgggtcctcgccggcgtaccacgcgttggcgagcgggttcgacgccagctcggccagctcgtgcgcgatgacgctcaccatcccgtccacgcccacgtcgccgttcggcggcgcctccgccctccgccccccgcccacgtacgacgggatggcgaacgggtacgcgcacacctccgggcaccgcgccgccgagttccccacccacgcgtacggcagcgtgtacccgaccaccgacgggaacgtgaagtagtggaagccgcacacctgcccgcagaagttctccaccaccacctccggcgaggtcagcaccaggtacacgccgctcgagtccacggggagcggccgcgtccgcgccgtcacggcgtcccgcaccacggactggatgtcgagccgcgtcagccgcccgccccgcgacgcgcgcgcgtcgcacttctcccgcccgagcctcaccaccccggacacgttcgccgaggtctggtcggtgtacagccgcacggtgcgccaccacgccgccacggacggcgacgggatgccgccatcgccggagcccgagcccggcggcgagagcgaccggaggaacgcgcggatggtgcgcttctgctcggcgggccaccggccgtaccagatcgggtggaccgtgatgtcggcggcgaggacggggcccatgtggtactgcagcttgacgaaatccgacgacccctcgaacttcttggacgccccgatcccctcaacctcgccgctcccattccgtggcggccacggccgccacgcgacggcggcgagcggcgcgagcacgaggaggacgacgcagcagaggctgaaccggtgcatcgccatcgccatcgccatggaggtggaggaggtggcggtggtggtgggtttaatggtggttttcttggctcgggaaaagatttatagagagaaagaggaagaagctagagtgacactgttctccgtatgtggggagctagtgaaggtctcgtttctttggaggctccaacttttattttgttctacgtgtaccaagcttttgtttcgtgtgggggct

SEQ ID NO: 78981 - DNA, 687 bp, Oryza sativa
  Clone ID: PAT_MRT4530_78735C.1
ctttttttttttttttttttttttttttttttttttttttttttttttttttttttttttttttttttttttttttttttttttttttttttttttttttttttaaaaaaatccccaaaaaaaaaagggcggccaaacatcccaagggaagggggggggtggaaaaccaattataaaaaaaaagacccttaaaaaaggaggggggacccaaacccgggcccccccaaaaaaaaaccaaaacaacccctggggttttgggcccccaaaggggcccaaaccccaacccctttttttccaaaaaaaaaaccggaaaaaaatcccggaggccaaaagggggcctatttgccaaaaccaaattaaaatcgggggggggaaaaaaaaaatttttaaacccggggcctttttgaaaggccaaccggtaaagggaacaacccggttaaaaaccacccaaccccggggggggggaattattttaagcccccaaacaaaaaacttttaaaaggcttcccctggacaaaaaggaaaaatttgggcccatttttgtttttgggcccggaaaagggccccccttggggaaaaaaaaatttggggaatcccaggggggaaccccccacccggtccaaaaatttaggggggggggggggggaaataccagcccccaaaaaaaaccctggggcttggaagccc

SEQ ID NO: 78982 - DNA, 406 bp, Oryza sativa
  Clone ID: PAT_MRT4530_78736C.1
aaaaaaaaaaaaaaaaaaaaaaaggggagaaggagaaaaaaaaaaaaaaaaaaaaaaaaaaaaaaaaaagagaacaacacgtaaaaaaggaaccaaaacaaaaaaacacaaaaaaaaaaaaaaaaataggggggtgcttttttgtgggcctcaatgctttttacctggccgcttgctttacaacttcttgtgggggggggggcctgcactttaactaacttggccgcctttttccacctccccttttggccaactccctgtttttccccacttgcctggcttggttgcccttccccttttttccgcttgctgttttgccaatgggcccccccctgttgcggttccttaaccgcggccggtgtggttgtttctctgtgcctccccttttcacttgcctttaccctag

SEQ ID NO: 78983 - DNA, 457 bp, Oryza sativa
  Clone ID: PAT_MRT4530_78737C.1
gcatgctcaatgggctggagatcatgaagctggggcgcgccgataatttgaactccgccggatcgcacggcaggaggaagaagattctcatcggcacgctctcggcggcgctcggcgtcgctgttcttgcgtgcgcgctgctctgcttgctcgccgtgctgcgcaggcgtagacaggcgccgactccggcgccggaggagaaggagagcacgcagctgccgtggtcgcagcacacgcaggatggctccagctgggttgacatgtcgaacgcgtcgggcgcgggcatgaccggcgggctgcacaggatgagcatgcagctcaacatctcgctggcggacatcacggcggccacggagaacttcaacgagcgcaacctcatcggcgtcggcgggttcgggaacgtgtatagcggcgtgctccgcgacggcacccgcgtggcggtgaagcgcgccatgcg

SEQ ID NO: 78984 - DNA, 141 bp, Oryza sativa
  Clone ID: PAT_MRT4530_78738C.1
atgctgtctgccgtggaggagatgccgtcgggattgccaagcttgccggagaagcttgattcgccgtcagcgggacaggaggaagagaggcgcgacggcctgtggctaggagagatcgtcggtctcggactcgcggagtag

SEQ ID NO: 78985 - DNA, 717 bp, Oryza sativa
  Clone ID: PAT_MRT4530_78739C.1
agtgatgtgatatgatcgactagctagaggcatcattgcaatattcagactggaatatatgaggaaacccaccgttgatgatgttcaacatatcatagaagaagtggaagaagtgctcaaacagttagaaagcaatgtacacacatggagactatggtgcagcaacaatcatcgtggaggcagtggcatcctgtgaccggtggatttggcattgtttgttcggtgtagcaggatcaaatgatgagatcagtgttttgaaccaatcccatacattcacttattaactcatgggtatatcgataaggatgcgctacacagtggaaattaatataatttgggatactatacgccaatggaatctatctagaatgggcaactcttgttcagtcgatctggcatcgtcaattggagaaggaaaaaatgtttcctcttcatcaagaatcaacgagaaaagatgttgaatgtgcatttggtatattaatagcctgtttcgaggtggtcactactcttactcacttatgggagcaatcgggcattatcaatataatgacgagatgtattataaaacacaatatgattgtgaaggatgaatgtcacctagggcctatggacgcacatgagtttgagcaggggcggagctagcacaaaataaagagggttccacttgcttgctttactctgatttgaattaaatttagcttgatacgggtgtctaat

SEQ ID NO: 78986 - DNA, 911 bp, Oryza sativa
  Clone ID: PAT_MRT4530_7873C.1
aaggtcaacaaaattagcattacacttttctgccgggcacctttttatttcgcattcgccgccgccgccgcggattgcgccgcatcccgccgtccccgcgcgcattaaagagaggggaatcattccccgcaatcccctctcccgattccccctctttcccctctctctctcccttggattcgctcggaatcaatcccgcaaacctcgccggcgtattcaatggagccgagatctccgcgcccgtttcctctctctccggccacactctctccctcccgttgctatataattgctccccgagctccgctcttccgtttccgccgctcgccgctcgctctcgccgtcggattcgtgctcgcgccgtgctcctctctctccgccgtcgccgtcgaccttcggttcgccgccgacgtcgctccggtcctccttccgactcggcgacccctccgtccgcttcgccgagtggttgccgactccgtccgcgcctccgcttcgcccgccgaccgccggagcaccgtcgtcatcgtcatcccgaaccgcgccgccgtcttcctccgctccggccgccgttctcgtcgtcgtcgttgtcccggggtgagccgaagaccgccgttcgctttcccccttccctcctctctctcgggtgccactccgccgcgccgttggtcgccggcggcgaccatcggggcgcgggtgcgcgccgctcccgtcggccgcgccggcgaggccgccctcgggcgcgctctcgcggctgccaagtgggcccggccgtcagccgcccgcgcccgcgggtgcggctgacgcgcgggacccacggcgccgaccgccgccagccgcgtgcgcccggtccaccgtggaccgagcggctgacgggtgggccccacaccccgtggacccggtccgcgcgcccg

SEQ ID NO: 78987 - DNA, 603 bp, Oryza sativa
  Clone ID: PAT_MRT4530_78740C.1
atgatgacggcgcacggcgacgcgacggcgcgacggcacgggcgcggggcgcgaggctgcggcacggggctccggggtgacgcgatgggcggcagcggcgacgcgacggcgggcagcacggggctcggggcgacgagcgcgcggcgcgacagcgacgcgacggcggcgtggcgcggcagcggcgatggaacgcgcgtgcagcgacgggacggcgacggcgacggcgcggcagcggcggcgcggggtgcgaggagacggcgacggcgcgcggcgtggcgcggggcgcgagacgacgcgacggcgatggcgacggcgacacgacagcgacggcgacagcgcgcagcgcgcggcgcggcagacggcagcggcgcggggcgcaaggcggcagcggcgcggggctcggggcgatgtgacagcaagcagcgcggcgcgaggcaagaggtgacgcgacagcaacggcgacggcgacgcgacggcgacggcgacgcgacggcgacggcgacgcgacggcgacggcgcgcggcagcggcggcgtcggcgcatggcagcggcgggttagggcaagagaacgcgatcgaacacttacggcgcaatgaacagtga

SEQ ID NO: 78988 - DNA, 1503 bp, Oryza sativa
  Clone ID: PAT_MRT4530_78741C.1
atgtctccgccgttgctgctcctccgggcgctcaccctcgccggccgcaaggccaaggcggcgtgcctgcctcgcccccgcgccctcgtcatgctcgccgccggcgcgcacggcgcgacccgggccaccaccaccgtcccgctgccgtgccttcctctcagggcgctctccagccgcgccggtgaagtggacccccgcccccgcccccgccccgaggagatcatcatcggtggcggcgcggacatggtgtcgcctaccgccgctgcctccggtggcggagaagccatggtcggagtcgggatgtctgctccttggctgatcggcgccgccggtgcgagcgcgagcgcgagcgcgaccatcaagttggggtcggatccggtggctccggcgaccgccaccgaagactctgctctcctccgcgctcgtcacctcttgagcaaggcagagcaacaccacctcgccgcggcgctcgtctgcctcgtcaagaacctgccgctgccggcgatccaagaccctgaattcgttgtgctcgaggccgacgacagcatggtggagctcatccgcgacctgatcgtcgccggcggtggccatcctgagcatggcgaaacgaccggaggcttcgtctccctggcgccctgcgtgttcgacgatgcgcgtgacaagaagacactgccgccgtcatcgggcatcaccaatgtcagctctctcgccactgccaacggcatcaagatcatgatcccggtgcagtctgcttctaaagggagtcgacgtcgtctgtcctcgatgcagaccactcgatgcctctcaagtactcccaatgtcagcatccctgatgataccagcaccagcagtgccaatggcgacaagaggagagcaaacaggatcagactcgttgatgtcagtgtgagagtcaccgagttggagcagcttgtgaggagccttgagaagagactggaggatgtggaagcgaaatgggacgccaacctgcgcattgctgagttgcgcgcggacatcgctgagaagcgcgctgatcagcttgagaaattgctggagaagacagtggagggtatggagagaatggtgaataacaagatggagcagacgattacttgggtactgcaaaagaacttccagcaggaagagttggctcactctcgccacagctccttgctcctacactgcactcagcttgctcaagaaatggctgcaactaaagatgaactccactcagtgaggagaaactacagggatgatatcctgacctccaaattcaccgtgtcaatcactgcgtggcgcatcgtgctggtgctactggggggcttcggtggagtcacggcgttctacgtgccttacgtcatcaaagatatcaagctggagacatgcgaagaagtagccaagaggatttcagagatgctgcagggtatcgcggatgcaattaaagagctaagagaggaggtgaaggctaataaggttccttggtggaggagacttttcaagaaatga

SEQ ID NO: 78989 - DNA, 358 bp, Oryza sativa
  unsure (1)..(358): unsure at all n locations
  Clone ID: PAT_MRT4530_78742C.1
ccccttgttgatcatgtccgccgcctcgcggtnccgctgccggatcagcttcgcgggctctccggcgttgccgctctccagctctccggcgcgtcatcatgatgaggctgcatgcatgcggttgtactactattacaacacacgcagcatgcaatgcagttgtacttcctactctcacttgatccccctcttggcgaagacgagctcacactggaacgacttgcccctggatgttgggcagcttcatcaagttcttggagatgtgtccatggtgttgtccaggttgtacctgcagcaattaattaantaattaatcaaaaaaaaaaaaaaaaaaaaacaaaaaaaaaaaaaaaaaaaa

SEQ ID NO: 78990 - DNA, 468 bp, Oryza sativa
  Clone ID: PAT_MRT4530_78743C.1
cccccgataaatgggagaatttctaggccgtgaaagcgaacgtggaagctcctttttctattcctttaataatataatagatattgtactagggtccaacttaaagatatcaaaatcatttacttttatatactttccctttctacccagtatccctgaaaacaaattgaagtactagacatacacgcggctagcataaaccatgtgtgtatccaagtatcatgcggtcgtaagccaccacaacatacactatacgtatagtatgttgagatggaccaccaataaaactctccctcacggttagcagttaaaaaatagggatttccctgttgctctataattagcggttcttactttacagttggccgtgaagatatattgctttggcagtttacaggctaaccttagcggtttttggccgccaaagaaattacggattattgtatacacatgctggtctcctccgtt

SEQ ID NO: 78991 - DNA, 274 bp, Oryza sativa
  Clone ID: PAT_MRT4530_78744C.1
gttgtgagttgttgtaaagttgcgagagagagagagagagatcagttagtttgttgagtggaagcagatcaggaagatgctggagaagctgtgggacgacgtggtggtcgttcctcttccggtgtccgttctcgtgtagcttcgtccggctgttacttccctcccccttgtctttttcttagttgtcgtctgcttgtcgtgctgtttttcttcctagcttacttatttcgcttccttctacctcctcttctcctttattctcttttgatttttt

SEQ ID NO: 78992 - DNA, 382 bp, Oryza sativa
  Clone ID: PAT_MRT4530_78745C.1
ccgggctgcaggaattcggcacgaggagagagagagagagagagaactagtctcgagtttttttttttttttttttttttataacatggattctcttgcacatcatagaagccggaaaacagacgaagtacatattctccagtatacaactaaaattttagaagctaatcagctataaagagtaattagagagtacactaaaagcatgcagtgcactagaactctggtttacattacgaacatgtaagtgcttcgccatcactcaccactcatcaaggttagtgataaaatggataaaacacagggaagccctgctttttctttaacaacagatgtttgccagggctgcgttcatgaactgcgctgcaaaacgggctcctcc

SEQ ID NO: 78993 - DNA, 1209 bp, Oryza sativa
  Clone ID: PAT_MRT4530_78746C.1
atggctgcgaagtggcaggaggcgccggcgccgggtgtgagggtcctcctgttcgccgtcgcggccgccgcgctgctgctggtcgtgtcggcacggaaggtgggggagacgtgcgcggcggaccggaactgcgacgccgggctgcactgcgagacgtgcgtggccgacggcaacgtccgcccgcgctgcacccgcgtcacccccgtcgacccgcagaccaaggcgcgggacctgccgttcaaccggtacgcgtggctgacgacgcacaactcgttcgcgcggctcggcacgcggtcgcggacggggacggccatcgccacggcctggaaccagcaggacaccatcaccgaccagctcaacaacggcgtgcgaggactgatgctggacatgtacgacttccgcaacgacatctggctctgccactccttcggcggcgcctgccagaacttcaccgcattcgtgccggcggtggaggtgctgggcgagatcgagcggttcttggcacggaacccgtcggaggtggtgacggtgttcgtggaggactacgtggagtcgcccatggggctcacccgcgtcctcaacgcctccggcctgacaaagtacgtgttcccggcgtggcggatgcccaagagcggcggcgactggccgcggctcagcgacatggtccgcgacaaccaccgcctcctcctcttcacctccaagtccgccaaggaggccgcagagggcatcccctacgagtggcactacgtcgtcgaaaaccagtatgggacgaaggggatgatcaaggggaggtgcccgaaccgcgcggagtcggccgccatgaacgacctctcgaggtcgctggtgctggtgaactacttcagggacctaccgaatttcccggtggcctgcaaggacaactcggcggagctgctcgacatgctcaccacctgccatgacctgtccgcggacagatgggccaatttcatcgccgtcgatttctacaagagaagtgatcgaggtggtgcggctgaagccacggacagggccaacggcggactgggcaatggtacatgcacgaccgctcggcacggcggcacgcccaaaggcatctttaacgcgacatcgggcgccacggcgttgctgcggccgccgacggcgacgttgcaatggcagcagctcatcatactggtgccatctacgctggctgctctactcttgagcctttga

SEQ ID NO: 78994 - DNA, 1541 bp, Oryza sativa
  Clone ID: PAT_MRT4530_78747C.1
ttctttctctcgccgtcgccgagctagttgagccgcggatggatagccccggtggtgcggcggcggcggcggcggcggcggagtccagcaatcgcgcgggagaagatgctaaaagtgatggtgtatcttgtcagaattcgcgacggccaaacctttcattacaaataccaaacagggcatttgatgacactctgccaacgtcaactagaatcaaaatatcacccagcccaaattctgcaagaagtggtttaccaccaaggccgaattcaactagaacaaaatcatccatcaggggcatcattccacaaaggagcttcaaagcaaagagttcattacaggatggtgaccagacaattcttctaattcctgacacaccatcatcatcaggacagcaggtgaaggcaactacatcaagatcattttctttcacaaaggtcatcaactccttatcagcgaagcgaacccactctcttccagttactcctgttgcagcttcaggaccttcttctcatgaaggtcatgcagacaacctgccaagtacagttaagaatgaggttgaaacacaaattaggcgctcactctcagcaccaggaaatcatgatagtaaggatctgaggaggacggcttcatcaggccttatacgtgtgattcccacaaccccacgacctgttcctgttgaaactgttgcatcaaatgatggcattgaagaagcagtagatgctcctgaagatggaggtgaagacattcctgaagaagatgctgtctgcagaatttgcctagttgaactcaatgaaggaggtgaaacacttaaattggagtgcagctgcaagggagaacttgctcttgcacaccaggagtgtgcaataaaatggtttagcatcaagggaaacaagacatgcgatgtttgcaggcaggaagttcagaatctacctgtgactttattgagaatacagattcgaactgttaacagacaaccgcggaatggtgttcagcaaagagcagcacatccacacagattttggaaggagactccagttctagtcatggtcagcacgcttgcgtacttctgtttcttggagcaactcttgttaaaaatgggggcagtccttgcaatcctacttgcatcgttcactggtttcggcatcgctattagtctaaatgcaatgctaatagaatacctgaggtatcatggtgatgataaatcaggttccctgaactgtatatccaacttcgacgaaatccgagacatggtgaagatgtttgtgaatttacagtcacatcatgatcattttcattacaacttcagtcagcagcaagcttatgcatctcaagcagacagaaccattacaagcagacaagcttatccaacttacacactaccacatgcttctgaagcagacaacactattcaaccacacaatatccacagccagaaagcagggttcttcagtcagatggggaccttgaagaagaggcacatggatggctggtccatttctttgcctgtcattgtccccaagaactggtgccaaattatgtaa

SEQ ID NO: 78995 - DNA, 5159 bp, Oryza sativa
  Clone ID: PAT_MRT4530_78748C.1
agtgtaaaatcaacgaaggtgttcaatattccaagaattgttgatgagagtaccgtcttcgcgcttgagtcgataagaacccggccgagtgacttcagcaattatgaacggtccttcccataagggagataatttatgccgatcctgtgttgtttgaattttcctcagaaccaggtcaccgactaaaaaggctcgcgatcgaacattctgattatgataacggcgcaacccttgcaaatatcgagtcgactgaattaaagctgcttctcgggcttcttctagtcgattgatgtcatctactcggccttcttcatagccctcctcgttgaagttccgaaatcatagttattcaaattccacttcactcggcaacattgcttctgcgccataaaccaaaaagaacggcgactggccggtagcccgactaggagttgtgcgtaaagaccaaagtacggacgacagctgatctacccacttgccagcgtagggacgtagtcggtcaaaaactcgtgctttgatcccatgaagtatcttgccattagcgcgctcgacttgtccgttactcctagggtgtgccatggaggcataacaaattttaatgccgaagtcttcacaaaagtctttaaatgctccgccagtgaattgagtgccattattagtgatgtccgattaggcaccccaaaccgatgcacaatgttgatgaaaaaatctctagctttatctgctgtgatcgtgatgaccggtttagcctcaatccacttggagaatttatcgatagctacaaagagatgtgtgtaaccgccgactgcccttttaaataggccgaccatgtcaaggccccagaccgcgaacggccaagacaacgggttggtttgcaactcttgggctggcaaatgagtttgtctggcaaaaaattgacaaccttcgcatgtgcgcacaatcttgtccgcatcagacacagctgtaggccagaaaaaaccatgccggtaagctttgccgacaatggtccgtgcagcagcatgattaccacaaataccggaatgtatatccttcaacaactgtctcccttgttccacagacacacagcgctgcagtattcctgatggactttttttgtacagctcagtctcatgaataatgtaaagtctgctgcgcctggaaatccgctcggcttcgtttttgtcttgaggaagttcttctttgctcaaaaattttataaacggttctctctagtcagcttcgatcatgcttatgcctcgagtatccatggcttcgactgtctcttttctgggcacggtcggttcgtaaagatgttcgacgaacacatctgaaggagctgcttcccgttttgatccaaaattggccagtctgtcggctgcctcattgttatgtcggaggacatgggtgagctcgagtccatcgaatttattttccaacttgtgtacctcttgtcgataagcggtcatattatcatctggacatgaccactctttcatgacttgattaacaaccaactgcgagtctccacggacgattaaccggcgaatgcctaaacagattgcaatccttaatccatggagtagcgcctcgtattccgccacgttatgggacgcagaaaaatgtatccacaatacgtagctcaatctttctccagtcggggaaatcaagacaaccccagctccagtgcctgtgagcctcttcgacccatcaaaatgcatagtccaatattccatcttttcctctggcatgtcttcttggcactcggtccactcggcgaggaaatcagctaaagcttgtgacttgatcgaagttcgtggcttgaacgatatgtccaaagacatcaattctaaggcccacttcgcaatccgtccgttcgcttcgcggttatgaagtatatccctgagtggaaacgatgtgaccaccgtgaccgagtgaccatataataacttttgaacctgaggatattttgtcttggagtcggctaaaacctcgctaacgaagtaaattggtcgttggactttttgaatatggccttcctcttcacgctcgacaatcaggaccgtgctcacaacctgggaggtcgccgacacatataacagtagcggctcttgtggatgtggcgaggccaaaactggtggagtggtgagaagtttcttgaagtcttcgaaggctttttgtgctttgggtccccactagaaattgtcagtcttcttcagcagcttgaagaagggcatcccccgctcgccgagtcgtgagacgaatcggctgagcgccgccatgcaaccagtcagcttttggacgtctttttgggagcttggcggtttcatgttgaggatggcgttgattttctccgggttggcctgtatgcctctctgagataccataaatccgagcaacttccctgacggtactccgaagatgcacttttcaggattcttccaaatccgcaatcaggtcatccttctgcttggtcttgacgactacatcatcaacataagcttcgacattgcgaccgatctgagttgaaaagcatctttgaatcatgcgttgataggttgctcctgcgttcttcaatccaaagggcatggtgatgtagcagtaggccccaaagggcgtaataaacgaggtcttcaagcagtcggattcttttagtcggatctgatgatatcccgagtaacagtccaagaagctgagtaactcgcagccggccgttgagtcaaccacctggtcaatgcgaggtaacccaaaagggtctttgggacaagatttgttgaggtcggtataatcgacacacatgcgccattgccccgtctttttctgaaccagactgacttagccagccagtcaggatgaaggacttccttaatgaagcctgctgctaacagcttggttaattcctccttgatcgcatccttcctgtcctgtgcaaaacggcggagtcgttgcttgatgggtttggcgtcttccttaacatgtaaagagtgctcaatcacctctctggggataccaggcatattggatggtttccacgcaaaaatatctttattattctgaagaaaggtgatgagcatgctttcgcagtctttatcaggattagagggatctaaggaaatctttttcgtcttggcatcattttcttcagtcttcgtcagcttggttgcaggcacttctccctcgcttgccgtggtcgcagccagtcggatctcttcgcgggcgagtagtctcgtgggtttgggccatctcgcaactttctttgtcgcatgtgacggcttgcttgatgtcgctccgtagtgatatgactcctcgaggaccaggcatcttcatcatcatgtaggtgtagtgtgggacggccataaatttagctaaagccggtcgtccaagtatagcatgatatgctgtctcgaaatcagcaacttcgaaacaaacattttctgtgcgaaaattctcccgagtgccgaaggtaactggaagagtgatctggccgagtggtgtagctgacaatcctgggataacaccgtggaagggtgcattactcggttttaattccgtgcgaggaatctgcatatcgtccagggtcttagcgaaaaggatgttgagtgcgctgccatcatcgatgagagtccgtcggagcttgacattgtgaaccactaggtctagtaccagggggtaccgccccgggtggaccatgatccgatcatgccacggggtagtccgtggagctaggatcgggcggagtccgctagggccacaggtagatagtttgccatggccttgctgtctcctcctgctgcgtggattgcgagtccgtagacggtgagccaagactccggattagtggtgccgtcatacttcttgattccagtcggcttagagccggctggccaatccactcgacaggtcattagtgaaggcagctactccatcaacgtcgtcgtcgtagcgatttggtgaatggcggtgacctcgtgctgcacggcgctggttgatcgtgtcgcgaaggtcgatgagacgctggtgaggtggagagcgaggccgttcgactcggcgctccctgtgacgttcgggaggcgagtgaacagatcgttcgtcgtgacccctgctcctgcgattagatcctatgccgatgatgctgaggcttggctgatgataatcatgagatcggaggtgagggactcggctaccggtcggggtgcgggtgcttgcggagttggctagaaccgaggcaacgatcatggtcttcgtatgttgacaacgtgattggcttggttgagtgcgtcttccttgagggggggtgtcgaggagagtgattgctgcaaccgcgttctgctggggtttgcgaagaccgctgttccatcgacgtcttgttgcccaatgagctctctccctcggcgcccagattccaaggcgcgttgccgtcgatcttcagcctcctttgcaatccgttcgcgatcttgttgctcacgctgtagtcattctcactcctgtcgctgtcgctcttcctccagtcggcgacgttcagcttcttgccgtacgcgatcttggtccgcttctcgggcttggcgctgttcctccgtttcgttgtcagccatgaatacgccgaagaagaggggcgtgtagttatcctcatagctgtcgtcgaagttgtcgaggtcgctgaggtagtagtggtagccgaaatcgtcgtagtcgaggatctcgattagtcaagaactgatgccgggggagctaaggtaaccatccaactcttccgtcgagactgtcccaagaggttggagtataacgccaacctctctggatctagattggatcggggccgaagccggagctcgcctagatcttcgagtgggagatgtcctggtagtgaagacagcggccaaatcatcaggaagtttcatcaggattgagggataggacccgtcgtcttcatctggtcgcggaagagtagattggatcttgtccgagtggtttgaagccgactcgggatagatgatcttggagtaggcctcggccgagttcggaataccgaatggcacggggacatggtccgagtcgaggagagagatcttgctaaggtcgttggtgatgaagttgaaactgccgaaccggaacgcctgcccgggagggaacgcgaagtcgtcgatgccagaaacgaaacccat

SEQ ID NO: 78996 - DNA, 2580 bp, Oryza sativa
  Clone ID: PAT_MRT4530_78749C.1
atggcacggggctccgctctgctcgacggtagcgtactaccgccttcccgcattgtgagcgagaggcaggctgggctgccgcgccgcttcatgccggaatccgccaccggccgggagatagtgatgctgggcgaggcacgcccagcaccagattacccggggcggtccatcttcttcctccccttcgcaatggccgggttggttcctcccttttcttctttctttatggatgttctggagttctacgatctccagatggcgcacctcactcccaacgcatcggtgtcgccgccgtcggtggtcggcggctgctatttcctgccgcgggggccggtgttgaaccgctacatcccctgcgccctccgcaaaaagtgggatgactggaagagcgactggttctacacccccctcgccgacgaagcgcatctccgacttccgagccagcccccggtgcaggcttccagctggcgggcgccggtagatctgggggatggctatgacgccgtcctcgaccgcctcgcgggcctgcgatcccaggggctcaccggggccatggtgtacggcgactacctccgtcgtcggattgcgccgctccagcggcgcgctcgggccgcctgggagtacatcgggcccgaagactatatacggacccaccagggggtcagatgggattgggcccccgaggacttcaagatactgatccaacgggtgctaaatctcaactccgtggaggcgtccctcatcccccacggtatcctccccctctgcagcgacccggatcgcgtctccatcttgaccattatgacgacggtcggggcctcagaggagcaggctcctaagggccatggcggcgcaggtgggagccgccggggggatcaatctacccccggagggggtcgtgcttctgggccccgcgtcgggggctcggggagcaaccgccctaccgacgcccgggggaagaggaaactgggaggaacacctcccccatctcctccccgagggggcggggcggcgcgtgccagcagcaggcgcccggagggggccgcgccaacatcgcagcccgagggggagcgcaagaagaaacggctgcgcaagatgggggggacagaaccatcccagggaaacctaatttcccctccaaggtggtcatttaaccgaccccctcgcagcgatgtcccgtcgcgtccctcccgccatcccaagtccggccaatccgaggccgaagatccggcggccgcagaggaacggaggcgagaatctgaccggcgagaggccgcagatcgccttcgggaagctgaagaggccgcccgggaggccgctcgggctcggcaggcggaggataccgctcgggaggaggccgcccgggcccgccaagccgaggaagccgctcgggaggaggccgcccgggcccgccaagccgaggaagccgctcgggaggaggccgcccgggcccgccaaactgaggcgatggcgtctttcgaggcagcccacgacaaagctgctggcgcgtcgcttgggcctactccctcgggcgacgctcaggcgacagcctccggggcggctcgcgacgaggccgcgggcggatcgcctgggcccgctccctcgggcgacgcccaggaccaaacgggtccgggggacatccccgagctcagtgcgtcttctggcgggccgagccgcgtcgcattttctccaaggcggctcttctcctcatcttctgccgccccgctgagtgccgagccccttctgcaagccttggccgccgcaaacaccgcggtgctagatggattcagcgcccaggtggaggccttgcgagcggaacgagcggagctcgaggccgcatgggcgcgtgttgaggaggggcggcgctcggtggacgccatggtggaggtgggccgtaaggctcaccgccgccacatctcggagcttgaagcccgcaaggcggcgttggcggagatcgcccgagaggtggaggaggagcgagaggccgccctcatcgccaccaccgcgatgattgaggcgcaggactccctccgccttcaacacggacgctgggaggcggagctaaagaaaaagctcgacgccgcccagggggcggcggccaccggcgcggcagcgcgcacgggagacagaggagggaggcaaggtgggagaggaggagctcaccaaggacgcggcgacgagggatggggaaaggcggggaagctcggcgtcggcgctcctcggggcgaaggcggaacggcggcccggcggcgttccgcgagcgagaaccggcggacggcggccggagggaccggcgcgaggggaaccgtgttccggcgggatcccggccgtgaaaagcggcggccgaggcggtggagagaggtggtgcgcgtggcgacggtgcctcggaagcggggaggggaaaaggagcggatgccgggcggccggctgaaggcggcggcagcggggaagagaggtggtgctcgaggcggcagtgttccagaggcggagaggggaaatggagtggaggccgggctgcggcacggcgccgcgaagccgacagaggtggcggattggcgcggcggtgggtggagcggctga

SEQ ID NO: 78997 - DNA, 846 bp, Oryza sativa
  Clone ID: PAT_MRT4530_7874C.1
tgacggccgggcccacctggcagccgcgagggcgcgcctgaaggcggcctcgccggcacgccttacgggaccggcgcgcccgcgccccgatggtcaccgccggcgaccatcggcgcgccggagcggcgcccgagagagcggagagaagggggaaagcgaacggcggtcttcggctcaccccgggacaacgacgacgacgagaacggcggccggagcggaggaaagcggcggcgcggttcgggatgacgatgacgacggtgctccggcggtcggcgggcgaagcggagcggcggacggggtcggcggcaacacggcgaagcggatggaggtgtcgccgagtcgggaggaggaccggagcgacgacggcggcgaaacggagctcggcggcgacggcggagagagaggagcacggcgcgagcacggatccgacggcgagagcgagcggcgagcggcggaaacggaagagcggagctcggggagcaattatatagcaccgagagggggagaacgcggccggagaggaaggaaacgggcgcggggatctcgggctccatagatgtcgccggcgaggattacgggatgaatccggacggatccgagggagagagagaggggaaatcgggggaaacgggagagggaatcacggggggcacgggcccgcggcggaccccgcgggaggaaggcgatgacaagtgggccccacccgtcagcgagagtggcgggcgggcccgcctgtcaacggcgcgcgcgcgcgcggggagccgatgggccgcgggagaggagagagagagggagagggaagtgggccgagccggcccaagagggaagggggggaaaaaagaactt

SEQ ID NO: 78998 - DNA, 2988 bp, Oryza sativa
  Clone ID: PAT_MRT4530_78750C.1
atggcacggggttccgctctgctcgatggtagcgtgctgccgccttcccggatcgtgagcgagaggcaggctgggctgtcgcgccgcttcatgccggaatctgccaccggccgggagatagtcacgctgggcgagggacgcccggcgccagactacccggggcggttcgtcttctttctcccctttgcaatggcagggctggttccaccattttcttctttcttcatggatgttctggagttctacgatctccagatggcgcacctcacccccaacgcggtgatgacattggccatcttcgcgcatctgtgcgagatgttcattggggtgcgcccatctcttcggctgttccggtggttcttcaccgtgcagtcggtgtcgccgccatcggtagtcggtggctgctacttccagccacgggggccggtgctgaaccgctacatcccctgcgccctccgcaagaagtgggacgactggaagagcgactggttctacactcccctcgccgacgaagcgcgcctccgacttccgagccagcccccggcgcaggtctccagctggcgggcgccggtagatctgggggatggctatgacgccgtcctcgaccgcctggcgggcctgcgatcccaggggctcacaggggccatgggagtgagatgggactgggctcctgaggacttcaagatattggtccaacgggtgctgaatctcaactccgtagaggcggccctcattccccaaggaatcctccccctctgcagcgatccagaccgcgcctccatcctgaccattatgatggcggtcggggcctcagaggagcgagctccaaagggccacgacggcgcaggcgggagccgcaggggggaacaatctaccccgagagggggtcgtgcttctgggtcccgcgacaggggcccggggagcagccgccctgccaacgcccgggggaagaggaagcagggaggaacacttcccccatctcctccccgagggggcggggcggcgcgtgccagtaacaggcgcccggagggggccgcgccaacatcgcagcccgagggggagcgcaagaagaagtggccccgtaagatgggggagacagaaccatctcggggaaaccttatttcccctccaaagtggtcgtttaaccgaccccctcgcagcgagatcccgtcgcgtccctcccgccattccaagtccggccagtctgaggccgaggatccggcggccgcagaggccctcaggcgggaatctgaccggcgagaggccgcggatcgcctacgggaagccgaggaggccgcccaggaggccgcccgggctcgccaggccgaggaaaccgctcgagaggaggccgcccgggcccgccaggccggggaagccgctcgggaggaggccgcccgggcccgccaggccggggaagccgctcgggaggaggtcggatttcgccaggacgaggcgatggcgacttccgaggcagctcgcgacgaggccgcgggcgcgtcgcttgggcccactccctcaggcgacactcaggcgacaacttccggggcagctggcgacgaggccgcgggcgcgtcgcttgggcctactccctcgggcgacgctcaggaccaaccgggtccgggggacatccccgagtccggcacttccatcggcggcccgagccgcgtggcatcctctccaaggcggctcttccccacgccttctatcgccctactgaacgcagagccccttctgcaggccttggccgccgcaaacaccacggtgttggatgggttaagtgcccaggtggaggtcctgcaggtagagcgggcggagctcgacgccgcgtgggcgcgtgtcgaagaggggcgacgctcggtggaggccatggtggaggtgggccgtaaggctcaccgccggcacgtctcggagcttgaaactcgtaagaaggtgctggcggagatcgccaaggaaatagaggaggagcggggggctgccctcattgccaccacccgggcggcggagaccgaagcggcgtcccggcggcgcgaagaggccctcgaggcgtgcgccatggcgctggaagagcgcgcctgcgtcgtggagagggatctggcggaccgcgaggccgccgtcgccatccgggaagcaacgctggcggcgcacgaggctgcctgcgccgaagaagagttcacgttccgccttcgcgaggacgcgctcaccgaacgggagcgagctctcgagggggccgaggccgcggcgcaacagctggcggtcaacctgtccctccgcgaggcagcgcaggaggagcaggcgcgccgcaatctggaaggtgcccgcgccgagagggccgtactgaaccaacgggccgctgagctcgaggcgcgggcgaaggagctggacgcgagggcgcgcagcggcggggcggccacgggcgaaagcgacttagccgcccgcctcgcagctgccgaacgcaccatcgccgatctgcagggcgcgctggactcgtccgccggggaggtcgaagccctccgcttggcaggcgaggtagggcccggcatgctttgggacgccgtctcccgcctagattgcgccggtcggcaagtgggcctctggagagggcggaccgtaaagtacgccgccaaccagggaggcctcgcccagcgcctctcgaagatggtcggggccctccaacggctccccgaggagctcgagaagacaattaagtcatcctcgagggacctcgcccaaggagcggtggagctcgtcctggcgagttaccaggccagggaccccaatttctctccatggatggcgttggatgagttccctcctgggaccgaggactgcgcgcgcgcgcaggtccgggatgccgccgaccatatcgtcgacagcttcgagggctcggcccctcggcttgcgttcgcccccaactccgacgaggagggcaatgccggtggtgcagacgacagtgacgtcgaggccgacgatccgggcgcatcggattga

SEQ ID NO: 78999 - DNA, 4652 bp, Oryza sativa
  unsure (1)..(4652): unsure at all n locations
  Clone ID: PAT_MRT4530_78751C.1
cggacntggtnactcacttctgcttcactctctctctctccccgatcccaatctcggagagagagacgtcctcatccatccatcccatccactcgagttgatcgatcgcccggacgccgccgcaggggccatggggtcgctcaccagggcggaggaggaggagacggcggcggccgaggagtggtcgggcgaggcggtcgtctacgtcaacggcgtccgccgcgtgctccccgacggcctcgctcacctcaccctgctccaatacctcagagacattggtcttcctggaacaaagcttggatgtggtgaaggtggctgtggagcctgcactgtgatggtctcatgctatgatcaaactacaaagaagacacagcattttgcaatcaacgcatgcttggctccgctttattctgtggaaggaatgcacataatcacagtagagggaattgggaatcgtcagcgagctgtgtggaactatttatgtgatgaggtagttacttgttggctaaagaccttgagaaaggaacgtttagccatggcccacggttcacaatgtggattttgcacccctggttttgtgatgtcgatgtatgcattgctgagatcaagtgaacagcctcctactgaagagcagattgaagatagccttgcaggaaatttatgtcgctgtactggctacagaccaataatagacgccttccgtgttttctcgaaaagagatgatcttttgtacaacaattcatctctgaaaaatgcagatggccgacctatctgcccttcaacaggaaaaccatgttcctgcggagatcagaaagacatcaatggtagtgaatcttcattattgacacctacgaaaagctactcaccttgttcatacaatgagattgatggaaatgcgtacagtgagaaagaactcattttccccccagaacttcagttgagaaaagttacgtcacttaaattgaatgggtttaatgggattcggtggtatagacctcttaaactaaagcaagtattgcatttgaaagcatgctacccaaatgcaaaactaatcattggtaactctgaagtaggagttgaaacaaagttcaagaatgcccagtataaggtcttgatctcagttactcatgttccagagcttcatacccttaaagtgaaagaggatggtatacatattggttcttctgtaagacttgcacagctccaaaatttcctcagaaaggttattttagagcgtgattcacatgaaatttcatcctgtgaggcaatactgcggcaattaaaatggtttgctgggacacaaatcaggaatgttgcttctgttggaggtaacatttgtactgctagtccaatatcagatctaaatccactttggatggctacaggtgcaacgtttgagataattgatgtgaacaataatattaggaccattcctgcaaaagatttttttctgggttatcgtaaagttgacttaaaacctgatgagatattgctctctgttatactgccatggacaaggccatttgaatttgtcaaagaattcaagcaggcacatagaagggaggatgacattgcgttggtgaatgctggaatgcgtgtctatataagaaaagttgaaggtgattggataatttcggatgtttcaattatctatggaggggtagctgcagtttcacaccgtgcttcaaaaactgaaacctttctcactggaaaaaaatgggactatggattgttggataagacttttgatctgttgaaagaagacgtagttctggctgaaaatgcacctggtggaatggttgaatttcgcagttcacttactttgagtttctttttcaaatttttccttcatgttactcatgaaatgaatataaaaggattttggaaggatggattacatgcaaccaatctttcagccatacagtctttcactagacctgtcggtgttggaactcaatgttatgaattggttagacaaggaactgcagttggccaacctgtggttcacacatcagctatgcttcaggttactggtgaagcggaatatactgatgacacaccgacaccccccaataccttgcatgctgctctggtgctgagtacgaaagctcacgcacgcatattatctattgatgcttcacttgccaaatcttcccctgggtttgcgggtctcttcctttcaaaagacgtgcctggcgctaaccatactgggcctgttatccatgacgaggaggtttttgcatctgatgttgttacatgtgttggccagattgttggacttgttgtggcagatacccgtgataatgcaaaagctgctgcaaataaagtcaatattgagtattctgaacttccagcaattttatccatagaggaagctgtgaaagctggtagctttcatccaaatagcaagagatgcctagtaaaaggtaatgttgaacaatgttttctgtcgggtgcatgcgatagaattatagaaggaaaagtacaagttggaggtcaagagcacttctacatggagcctcagagcactcttgtatggccagttgattctggaaatgaaattcatatgatttcatctacccagaaggctccccagaagcaccaaaagtatgttgctaatgttcttggtcttccacaatcaagagttgtttgcaagactaagcgtattggtggtggatttggtggaaaagaaaccagatcagcaatatttgctgcagcagcatctgtagctgcttattgtttaaggcagcctgtaaagcttgttttggacagggatattgacatgatgacaactggacagaggcacagtttcctagggaagtacaaggtgggatttaccgatgatgggaagatattggccttagaccttgatgtttataacaatggtggtcattcacatgatttgtcccttccagtcctggagcgtgctatgtttcattcagacaatgtctatgatataccaaatgtcagagtcaatgggcaagtatgtttcacaaatttcccaagcaatactgctttcagaggttttggtggtccacaagctatgctgattgcagagaattggattcagcacatggctacagaactcaagcgaagtcctgaggagataaaagaacttaattttcaaagtgagggatctgtgcttcattatggccagttgcttcaaaattgtacaatacattcagtatgggatgaactaaaggtttcttgtaattttatggaagctcgcaaagctgtaattgattttaacaataataaccgttggagaaagcgtggcattgctatggttcccaccaagtttgggatatccttcactacaaaattcatgaatcaggctggtgctttagtgcaagtttacactgatggaactgtccttgtaacgcatggtggggttgaaatggggcagggtttacacacaaaggtagcccaagttgcggcttcatcattcaatatccctcttagctctatatttatctcagaaacaagcactgataaggtaccaaatgcaacaccaacagcagcctctgctagttcagatttatatggtgctgcagttttggatgcttgtcagcaaattatggctcggatggaacctgttgcttcaagaggaaaccacaagtcctttgctgagttggttctagcatgctacctggaaaggatagatctctctgctcatggattttatatcactcctgatgttgggtttgactgggtgtctggcaagggaactccattctactatttcacatacggagcagcatttgcagaagttgaaattgataccctaactggggatttccacacaaggacagtagatattgttatggatcttggctgttcaattaatccggctattgatattggccagattgaaggaggttttatccaaggattaggttgggcggccctggaagaactaaaatggggggatgataaccacaagtggattcgacctggacatcttttcacttgtgggcctggctcttacaaaataccctctgtaaatgatatacctctaaacttcaaggtctcacttttgaagggcgttttgaatccaaaggtcattcactcatccaaggctgtaggagagccaccgtttttcctcggttcagccgtcttgtttgccataaaggatgcgatatctgccgcaagagctgaggagggtcacttcgactggttcccactcgacagcccagcaacaccggaaagaataagaatggcatgcgtggattccatcacaaagaaatttgctagcgtatattaccgtcccaagcttagtgtatagtggctactgccaaagtacaagggtcattaaaggtttatgcttgtcgtacgtatatttgtacagtcccaagctactgtgtaaacataaatataggcgacagtttaggggataaaaagttaccttttcctcttcttttttaccccccaggaagaaaacactagaaataaaagcaatgttcacatcgacttgctgtctagctgtgtactggaatagaagtgcagggctcagcccaatggcgtgttctcagatgctgtctactccctgtgtttaaaactatatagtaattttcagggttcaaaatttatattgaaatataacaacttctcaacctaaaaaaaaaaaaaaaaanaaaaaanaaaaaaaaaaa

SEQ ID NO: 79000 - DNA, 3756 bp, Oryza sativa
  Clone ID: PAT_MRT4530_78752C.1
atgccattcaccagatcgctacgacgacgacatggatggagtatctttactaacgacctgcgtcgagtggattggccagccggcctcaagccaactggaatcgagacgtatgacggcaccaccaatccggagtcctggcttaccgtctacggtctcgcaatccgcgcagcaggaggagacagcaaggccatggcaaactacttacctgtggccttagcggattctgcccggtcctggcgccatggattaccccgtggcacgattggatcatggacggaacttcgtgaccacttcatcgccaacttccaaggcacctttgaacgccccggcacacagtttgatctctacaacgtcattcagaagtctggagaatcccttcgagattacatccgacgcttctccgaacaacgcaacaagatctccaacattaccgacgacgtcatcatcgccgctttcaccaaaggaattcatcacgaagaactagtcggcaagttcgggcgcaaacctcccaagacagtcaaacagatgtttgaaaaagccaatgagtatgccaaagacgaaaacgccattgccgcatccaagcagttgggtcctacttggaagccaaagaaagatgcgccgactacgggagagggtggaagtaacaatcacaaggaccgcaagctggtccacccggggcggtaccccccggtactagacccagtggttcgcaacgtcaagcttcgcagatccctcatcgatggtggcagtgcactgaatatcctcttcgccaagacactggatgacatgcagatccctcgcaccgagttaaagccgagtaacgcgcccttccacggagtcatcccagggttatccgctatgccactcggccagatcactcttccagtcacctttggtactcgggagaatttccgcacagagaacgtctgcttcgatgttgctgatttcgagacagcgtatcacgccatactcgtacacccggcgttagccaagtttatggccatcccgcactacacctacatgatgatgaagatacctggtcctcgaggagtcatatccgtacggagcgacatcaaacaagccgtcacatgtgataaggaaagttgcgagatggccaaaacccgcgagatcgcgatagctcgagaagacatccgactggctacaaccacgtcaagggaaggagaggaaagcgcgctcgtcacctttcttcaaaataataaaaatatcttcgcgtggaaaccatccgatatgcctggtattcctagagaggtgattgagcactctttgcatgttaaggaagacgctaaacctatcaaacaacgactccgccgctttgcacaaaacaggaaggacgcgatcaaggaggaattgaccaagctgttagcagcaggcttcatcaaagaagtccttcatcccgactggctggctaacccagtcctagttcgaaagaagaccgggcaatggcgcatgtgtgtcgattacaacgacctcaacaagtcttgccccaaagatcctttcgggttgcctcgcattgaccaggtagtcgactcgaccgccggctgcgagctgctcagtttcttggattgctactcggggtatcatcaaatccgattgaaggaatccgactgcttgaagacttcgttcattacgcccttcggggcctactgctacattaccatgcctttcggactaaagaacgatggagcaacttatcaatgcatgatccagagatgtttctcaactcaaattggtcgcaatgttgaagcctatgtggatgatgtagtcatcaagaccaagcagaaggatgatttgattacggatctggaaaaaaccattgcgagcatccgcgctttcaggatgaaactaaaccctgaaaaatgcaccttcggagtaccgtcagggaagttgcttggatttatggtgtctcacagaggcatacaggtcaacccggagaaagtcaacgccatcctcaacatgaagccgccgagttcccagaaagacgttcaaaagctgactggatgcatggcggcgctcagccggtttgtctcacgactcggcgagcgggggatgcccttcttcaaactgttaaagaaaacagacaatttccagtggggacctgaagcacagaaagcctttgaagatttcaagaaacttcttactactccactagttttggcctcaccacacccacaagaaccgctattactatacgtatcagccacctctcaggttgtgagcacggtcctggttgtcgagcgtgaagaagaaggccatgttcagaaggtccagcgaccgatctacttcgttagcgaggttttggccgactccaagacgagatatcctcaagttcagaagctgttgtacggtgttctaatcaccgtcaggaaattatcccactacttccaaggccactcggtcacggtggttacatcgtttccactcggcgatatcctccataatcgcgaagcaaacgggcgaatcgcaaaatgggccttaggactgatgtccttggatataccgttcaagccgcgaacttcggtcaaatcccaagctttagccgactttgtcgccgagtggaccgagtgccaagaggacacgcccgaggaaaagatggagtattggactatgcactttgacgggtcaaagagactttcaagcactggggccggagttgttttaatttccccaactggagaaagactaagctatgtgctatggatacatttttccgcatctcaaaacgtggcagaatacgaggtgctccttcacggactacggatcgcaatctctttgggaatcaggcgtctgatagttcgcggagattcacagttagttgttaacaaagttatgaaagagtggtcctgcctcgacgacaatatgatcgcttatcgacaagagccgtttgcggcttggggccttgacatggtcgggccgttcagaaaggcagtcggcggttacacacatctctttgtggctatcgataaattctctaagtggattgaagctaaaccggtcatcacaatcacggcagataaagctagagattttttcatcaacattgtgcatcggtttggggtacctaatcggatcatcactgataatggtactcaattcactggtggagtatttaaagatttttgtgaagacttcggcattaagatttgttatgcctccgtagcgcatcctatgagcaatgggcaagtcgagcgagccaatggcatggtactccaaggaataaaggcacgagtttttgaccgactgaatccttatgccggcaaatgggtggaacaactgccatctgtactttggtccttgcgcaccacccctagtcgggctacgggccagtcgccattcttcctagtttatggagcagaagcaatgttgcctagtgaagtagaatttgaatcattgcgttttcgcaattttcgcgaagagcgctacagggaagaccgagtggatgacctacaccgactggaagaggcccgcgaagcagccttaattcagttggcccgatacttgcaagggttgcgtcgttatcacaatcgtaatgtccgatcgcgagctttcttagtcggcgacctggttttgaggaaaattcaaactacacgagatcggcacaagttatcccctttatgggaagggccatttataatctctgaagtcactcggccaggttcttatcgactcaagcgtgaggacggtacacctatcgacaactcttggaatatcgaacatcttcgtcgtttttatgcttaa

SEQ ID NO: 79001 - DNA, 3114 bp, Oryza sativa
  Clone ID: PAT_MRT4530_78753C.1
cggcccgagggagagaactagtctcgagttttttttttttttttttattttggccgcccagggccatctctgcgccgcggtctccgattgctgcattggcatcccgcccgcggtcaccctgctcctgccttgataagagaccggaaggaattgcatggatgaatcatgaattgaattgttacatcacaagaacaccgctcttgttcaagggcagtgtcttctccttcctgcgccagatggcgtcatggcgattgcaatttgcaagatcattctacaacaacaatggatacgtggattactccaccatgtatatggtgagcttgtgctcacgcgcacgtgcaagatggatttggctaatcatcagagggacctaatcttccatgacctgagctttggcggcagctgcgcgagcatggtgttcgtcgccgccacgctcctcgtgctggtcaccagcttgaaccactggctctccgggtcgcagctgttgtccgcgctcaggcaccggcacgggttggtcaccaagctccggccatcgtcgccgacgtccaggcagagcatgccgccgttgctggtctcgggggacgacgacgacgacgaggcgttgacggcgaggtgcagcttggagtccgaggtgaggctccaccgcgccagctcgtcgccgcacgacaggccgaggcgcgccggccggccggcgccctcggcgcggaggcacagcagcgggctgtcccgcggcgacagcctctgctggctcgccgtgtacgcccacgcctccgcctcgccgcaggaccccagctccagcgtcgtctgcaccaccgacgacgaccgccgcaccacgcaccgccccgtcgtcgggtggaacatcaccgtgtacggcgccgcctccgccagaccaggccctctcaaggggccgtgttctcaaaaggaagtccagtcggcggtgtcgttgcggggcttgcaccacgcccagtcgagcacgccgtagacctcgtcgaggcccaggacgccctcccggaggtagtaactcccctgcagcgtccagagcgcccagtcgaggtcgaggtcggcggcgacggcggcgacgcagccgtagtaccggttgtcgttgacgttgccgccgcggttgtcgacgccgaactcgctgaggaacaccggccacccttggtcgagcaggtacagcgcgcggcgcgacacgctcgccgccacccgcgcgcacacctggttggcgttccccgcccgccacgcctgcccgtcggagaagccgtaccagtgcacctcgaacgccaccttcccggcgaagctgacgttcacctgccgcgagttgaggaacgccaggtcgttgtcgaagctcatgccggacaggatcaccaccacgcgcgggttcgccgcgtgcaccgcctccgccccgcgctgcatgtacttgtaccagtcggcggagttctggcgggggccccggagctcgttgcggaggctcatggcgacgacgctggggacggcggcgaacatggtggccatcttggtgaggccgtcgacccacacgtccgggtcgaagtacgcgtcgccgaagaagccgttgccgtcgttgttgccgcagcaccaccccggcttgctcacgtggttgtccagtatcaccatcacgccgttctcccccaggaatcacctcgccttgaaggcgtcgatgagcttgaggtcgacgagggaggggttgttgacgcggatggcggcgagggactcggtgaggttgaggcgctggaaggactgggcgacggtgagggaggagtaggaggcgttggtcaccatgaacgtggcccaggtgaggcggacgcagttgaaacccatggcgaccacgtccttggcgatggcgcccaccggctgcttgcccagcccttccgccagcatcggctccaggtgcgacggccagttcacgcacgccagcttcaccctgttcccgccctcgtcgacgatccacctcgacgccgtcgacagcgtcgtcgctgccgccgccgccgcggggcgcccatggctggccagaccaagaaccgccaccgcggcgagccacaccaccacgagcctcatgtcgacgccggccgtccggcaatgcgagacaccgagaagaagcagcggcgaggtggatttatagcgagtactacggcggcggggttgcttcggcatggggaatggcgaggcttcacgggattgccatgggcggaagacgacgatctctcctaagctatgctgctggtccttgacatgtgtgaagtggagaggccatgaatgagggtgagtgagcaaatcgcattgctgatgtttcaagaatgcaaccaaatactgttttatctttccagtaaatgataggtgaatttgatttgggaccacgaagttgagagtgttgtcgaattccaggcccgacaagataacaaggacgtcaggatttgctgtatgcacagattcagcaccctccttcatgtaccacaaactaacattttcataggggccccggagttcgttcctcaagctcatgcccacaacattttttgttttcctaaacattgttgccattgtcttgaggccattcaaccattcttctgggtcaaagtacttgtcaccaaagaagccattaccatcagttgtgctgcagcaccatcctggagtggtcatttggttatcaagtatgaccataatattgttcctggccaaagctgacactacttcctggaacacatcgatgaggggcaggtcaaggagtccggggttgttgacccggacgccggcgacggactcccgcatgccaaagcgctccagcgaccaccgcagcggcaggctcgccagcgtggcgttggtggcgaggtaggtcggccaggtgagcctgacgcagttgaaccccatcgccgccacgcgcgccgcgatgtcccccacgccgcggcgcgacaggccctccgccgccacgggctccaggtgcgacgcccagttcgcgcacgccagcttcacgcgccgcccgtccgcgcccaccacccaccgcgacgccgtcgagagcggcagcggcgggagcgaggcggcggcggcggcgagcgggagcagcagcaggagaagtggagtgggacaagcggaggaagccat

SEQ ID NO: 79002 - DNA, 2871 bp, Oryza sativa
  Clone ID: PAT_MRT4530_78754C.1
atggcacggggctccgctccgctcgatggtagcgtgctgccgccttcccgcatcgtgagcgagaggcaggccgggctgccgcgccgcttcatgccggaatctgccaccggccgggagatagtcacgctgggcgagggacacccggcgccacgctacccggggcggtccgtcttcttcctcccttttgcaatggcagggctggttccgccattttcttctttcttcatggatgttctggagttttacgatctccagatggcgcacctcacccccaacgcggtaatgacattggccatcttcgcgcacctgtgcgagatgttcatcggggtgcgcccatcccttcggctgttccggtggttcttcaccgtacagccagtgtcgccgccgtcggtggttggtggctgctacttccagccgcgggggccggtgctgaaccgctacattccctgcgtcctccgcaagaagtgggatgactggaagagcgactgctccgtggaggcatccctcatcccccaaggagtcctccccctctgcagcgatccagatcgcgccaacatcctgaccatcatgatggcggtcggggcctcagaggagcgagctcctaagggccatgacggtgcgagcgggagccgcaagggagatcaatctaccccaggagggggtcgtgcttccgggccccgtgatgggggctcggggggcagccgccctgccgacgcccgagggaagaggaagcaagagggtacctcctccccatctcctccccgagggggcggggcggcgcgtgtcagcagcaggcgcccggagggggccacgccgacgccgcagcccgagggggagcggaagaagaaacggctccgcaagatgggggggacagaaccatcccggggaaaccttatttcccctccaaggtggtcgtttaaccgaccccttcgcagcgagatcccgtcgcgtccttcttgccaatccaagtccggccaatctgaggccgagaatgcggcgaccacggaggcccggaggcgggaatctgaccggcgagaagccgcggatcgcctacgggaagccgaggaggccgcccgggaggccgcccgggctcgccaggttgaggaagccgctcgggaggaggccagactccgccaggccgaggcgacgacatcctccgaggcaacccgcgaaattgaccggcaagaagccgcggatcgccttcgggaagccgaggaagctgcccaggtggccgtccgagctcgccaagctgaagaagccgctcgggaggaggccagacttcgccaggccgaggcgacgacgacttccgaggcagctcgcgacgaggccgcgggcgcatcgcttgggcccactccctcgggcgacgctcaggacaagccaggtccgggggacgtccccgagtccggcacgtccatcggcgggccgagccgcgcggcatcctcaccgaggcggctctcccccacgccttccgctgccccactgagcgcagagccccttctgcaggccttggccgtcgcaaacaccacggtgttggacgggttaagtgcccagatggaggccctgcaagcagagcgggcggagctcgacgccgcatgggcgcgtgtcgaagaggggcgacgctcagtggaggccatggtggaggtgggccgcaaggcacaccgccggcacgcctcagagctcgaagcccgtcggaaggtgctgggggagatcgccagggaagtggaggaggagcggggggctgccctcatcgccactaccgtgatgaacgaggcgcaggacgacctccgccttcaatacgtgagctgggaggcggagctagggaagaagctcgacgccgcccggggggtccttgacgctgccgctgcccgagaacggcgggcggcggagaccgaggtggcatcccggcggcgcgaagaagcccttgaggcccgtgccatggcgatggtagagcgtgcctgcgtcgtggagagggacctggcggaccgcgaggccaccgttgctattcgggaggtcacactggcggcgcacgaagccgcctgcgccgaagaggagtccgcactccgcctccgcgaagatgcgctcatcgagcgggagcgagccctcgaggaggctgaggccgcggcgcaaaggctggcggagagcgcgtccctccgtgaggctgcgctagaggaacaagcgcgtcgcaatctggaaggtgcccgcgccgagagggccgcactgaaccagcgggccgctgaactcgaggcgcaggcaagggagctggatgcaagggcgcgtagcggcggggcggccacgggcgacagcgacttagccgcccgcctcgcagctgccgaacacaccatcgcggatctgcagggcgcgctgaattcgtccaccggggaggtcgaggcccttcgcctggcaggcgagatagggcccagcatgcttcgcgacgccgtgtcccgtttagaccgcgccgggcggcaggcgggtctctggggcgggcggactgtgaagtacgccgccaaccaggggggcctcgcccaacgcctctcggagatggccgggactctccagcggctcccggaggagctcgagaggacgattaagtcatcctcgagggacctcgcccgaggagcggtggagctcgtactggcgagttaccaggccagggaccccgacttctccccatggacggcgctggacgagttccctcccgggaccgaggacggcgcgcgcgcgcaggtccgggacgccgccaaccatatcgtccacagcttcgagggttcggcccctcgactcgcgttcgccctcaactccgatgaggaggacgatgacggcggagtgggcgacagtggcgacgaggctggcgacccgggtgcatcggagtga

SEQ ID NO: 79003 - DNA, 3144 bp, Oryza sativa
  Clone ID: PAT_MRT4530_78755C.1
atggcacggggctctgctctgctcgacggcagtgtactgccgccttcccgcatcgtgaacgagaggcacgccggactgccgcgccgcttcatgccggagtccgccaccggtcgggagatagtgacgctgggcgaggggcgcccggcaccagactacccggggcggtccatcttcttcctccccttcgcaatggctgggctggtcccgccattttctcatttcttcatggatgtcctggagttctacgatctccagatggcgcacctcacccctaatgcggtgatgacattggccatcttcgcacacctgtgcgagatgttcattggggtgcgcccctctcttcagctgttccggtggttcttcaccgtgcagtcggtgtcaccgccgtcggtggtcggcggctgctacttccagccgcgggggccggtgttgaaccgctacatcccctgcgtcctccgcaagaagtgggacgactggaagagcgactggttctacacccccctcgccgacgaagcgcgcctccgacttccaagccagcccccggcgcaggtctccagctggcgggcgccggtagatctgggggaggagtacgacgccgtcctcgaccgcctggcgggcctgcgatcccaagggctcaccggggccatggtgtacggcgattacctccgtcgccggattgcgccgctccaacggcgcgcccggagcgcctgggagtacactgggcctgaagactacatgcggacccaccagggagccagatgggattgggctcctgaggacttcaagatcatagtccaaagggtgctgaatcttagctccgcggaggcgtctcgccttcctcaggagatcctccccctctgcatagatcccgaccgcgtctccattctaaccattatgttgggggtcggggcctcagaggagagagcccctaagggccacgacggcgcgggtgagcgccgccggggggaacaacctgcccccggagggggtcgtgcttctgggccccgcgtcgggggctcggggagcagccgccctgccgacgcccaggggaagaggaagctgggaggtacacctcccccatctcctccccgagggggcggggcggcgcgtgccagcagtcggcgcccggagggggccgcgccgacgtcgcagcccgagggggtgcgcaagaagaagcggctccgcaagacgggggagacggaaccataccggggaaacctgatttcccctccaaggtggtcattcaaccgaccccctcgcagcgatgtcccgtcgcattcctcccgccaccccaagtccggccagtccgaggccgaagatccagcggccgcagaggagcggaggcgagagtctgaccggcgtgaagccgcagcccgccttcgggaagctgaagagaccgcccgggaggccgcccgggttcgccaagcggaggatgctgctcgggaggaggccgcccgggctcgccaagctgaagaagttgcccgggaggaggccgcccgggctcgccaggctgaggcgacagctgctgctggcgcgtcgcttgggcccactccctcgggcggccctcaggcgacatcctccgaggcggctcgcaacgaggccgcgggcgcatcgcctgggcctacctcaccgggcgacgcccaggaccaaacgggcccaggggacatccccgagcccagcgcatcctccggggggccaagccgcgttgcattttctccaaggcggctcttctcctcctcttccgtcgccccggtgagcgccgagcccattatgcaggccttggccgccgcaaacaccgcggtgctagatggatttagcgcccaggtggaggccttgcgagcggaacgagcggagctcgaggccgcatgggcgcgcgtggaggaggggcggcgctcggtggacgccatggtggaggtgggccgtaaggctcaccgccgccacatctcggagctcgaagcccgcaaggcggcgctggcggagatcgcccgagaggtggaggaggagcgagaggccgccctcgtcgccaccaccgcgatgatcgaggcgcaggactccctccgccttcaacacgggagctgggaggcggagctaaagaaaaagctcaacgccgcccaggaggtcctcgacgccgccgccgcccgagagcagcgagcaacagaggctgaagtggcgttgcggtggcgcgaagatacccttgaggcccgtgccatggcgctggaagaacacgccggcgccgtggagaggggcttggcggaccgcgaggccgccgctggtctccgagaggcgacgctggcggcgcatgaggccgcctgcgccgaggaggagtccacgctccgcctccgcgaggatgcactcgctgagcgggagcgatctctcgaggaggccgaggccacgacgcaacggctggcggacagcctgtccctccgcgaggcagcgcaggaggagcaggcgcgccgcaatctggaatgcgtccgtgccgagagagccgcactggagcagcgggctgccgacctcgaggcgcgggcaaaagagctggacgcaagggcgcgcgtcggtggggcggctgcgggcgaaagcgacttagccgctcgcctcgcggctgccgaacacaccgtcgctgacatgcagcgagcgctggacacctccaccggggagtccgaggccctccgcttggcgggcgagatggggcccgacatgctttgggactcggtctcccgcatggatcgcgccggtcggcaagcgggcctctggaaaggccagacgaggatgcgccccgtcaatctggaaggcctcgctccgcaccttaacaggatggcctgggtcctcgaacgactccccgaggagctcgagaagaccatcaagtcatcctcgagggacctcgcccggggggcggtcgaactcgtgctggcgagttaccaggcccgggaccccaatttctctccctggatggcgctggaggagttccctcccgggaccgaggacgacgcgcgcgcgcgcgtcggggatgctgctgaccacatcgtcaacggcttcgagggctcggcccctcggctcgcgttcgcccccagctccgacgaggagggcgacgccagcggcgaggacgatggtggcgacgaggccggcgacccgggcgcatttgaatga

SEQ ID NO: 79004 - DNA, 5425 bp, Oryza sativa
  Clone ID: PAT_MRT4530_78756C.1
ctaagcataaaatcgacgaaggtgttcaatattccaagaattgctgacaagagtaccatcttcgcgtttgagtcgataagaacctggccgagtgacttcagcgattatgaacggtccttcccacaagggcgataacttatgccgatcctgtgtagtttgaattctcctcagaaccaggtcgccgactaaaaaggctcgcgatcgaacattccgattatgataacggcgcaacccttgtaagtatcgagctaactggattagggctacttcacgggcttcttccagtcggttgatatcatccactcgatcttcctcatagcgctcctcccggaagttgcgaaatcgaagggattcaaattctacctcacttggcaacattgcttctgcgccatagaccaagaagaacggcgactggccggtagcccgactgggagtagtgcgtaaagaccaaagtatggacggcagctgatctacccacttgctagcatagggacgcagtcggtcgaaaactcgtgctttgatcccttgaagtaccatgccattggcacgctcgacttgtccgttactcatggggtgtgccacggaggcgtaacagattttaatgccaaagtcttcacaaaagtctttaaatactccgccggtaaattgagtgccgttatcagtaatgatacgattcggtaccccaaaccgatgtacaatgttgatgaagaaatctctagctttgtctgcagtgattgtaacgaccggtttggcttcaatccaattggaaaacttatccacagctacaaagagatgagtataaccgccgagtgcctttttgaatggaccgaccatatcaagcccccaaaccgcgaacggccacgacaacgggatggtttgcaactcctgagctagtaggtgagtttgtcgggcaaagagttgacaaccctcgcatgttcgcacaattttgtcggcgtcggaaacagctgtgggccagaagaaaccttgccgataagtcttgccaacaatagttcgtgcagccgcgtgattaccacagatgcctgaatgaatatcttttagcaactgtcttccctcttccaaagatacgcagcgttgtaggattcttgatggacttttcttgtacaactcggtctcgtgaatgacatagagtctgctgcgcctggaaatctgctcggcttcatttttgtcttgagggagttcttgtttggtcaaaaatcttatgagaggttctctccagtcggcttcaatcatgtttacaccttgagtatccatggcttcaattgtttcttttctaggcacggttggttcataaagatgctcaacgaacacatcagaaggggctgcttcccgttttgaaccaaaattagccaatctgtctgctgcctcattattgtgtcgaaggacatgggtaagctcgagtccatcgaatttatcttccaacttgcgtacctcttgtcgataagcagtcatattatcatctagacaagaccactctttcatgacttgattaacaaccaactgagagtctccacggacgattagtcggcgaatgcctagagagattgcaatccttaatccatggagcagcgcctcgtattccgccacgttatgggacgcagaaaaatgtatccacaatacgtagctcaatctttctccggtcggggaaattaaaacaaccctagctccagtgcctgtaagcctcttcgacccatcaaaatgcatagtccaatattccatcttttcctctggcatgtcttcttggcactcagtccactcggcgaggaaattagctaaagcttgtgacttgatcgaagttcgtggaacctgggaggtcgccgacacatataacagtagcggctcttgtggatgtggcgaggccaaaactggtggagtagtgagaagtttcttgaagtcttcaaaggctttttgtgcttcgagtccccactggaaattgtcagtcttcttcagcagcttgaaaaagggcatcccccgctcgccgagtcgtgagacgaaccggctgagcgccgccatgcaaccagtcagcttctggacgtctttttgggagcttggcggtttcatgttgaggatggcgttgattttctccgggttggcctgtatgcctctttgagataccataaatccgagcaacttccctgacggtactccgaagatgcacttttcagggtttagtttcatcctgaaagcacgaatgcttgcaaaagcttcttctaagtccgtgatcaggtcatccttctgcttgatcttgacgactacatcatcaacataagcttcaacattgcggccgatctgagctgagaaacatctttgaatcatgcgttgataggttgctcctgcgttcttcaatccaaagggcatggttatgtagcagtaggccccaaagggcgtgataaacgaggtcttcaagcagtcggattcttttagtcggatctgataatatcctaagtagcaatccaaaaaactgagtagctcgcagccggccgttgagtcaactacctggtcaatgcgaggtaacccaaaaggatctttgggacaagacttgttgaggtcggtataatcgacacacatgcgccattgccccgtctttttccgaaccaggactgggttagccagccagtcgggatgaaggacttctttaatgaagccctctgctaacagcttggttaattcctccttgatcgcatccttcctgtcagaagtcttattaggatcagagggatctaaaggaatctttttggtcttggcatcgctttctccgcttttgggcatcttggttgcaggcacttctccttcgcttgccatggtcgcagccagtcggatctcttctcgggcgagtgtaatctcgcgggtttgggccatctcgcaactttctttatcacatgtgacggcttgcttgatgtcgctctgtaatgatatgactcctcgaggaccaggcatcttcatcatcatgtaagtgtagtatggaacggccatgaatttggctagagccggtcgtccgagtatagcatggtatgctgtctctaaatcagcaacttcgaaacaaacgttttctgtgcgaaaattctcccgagtgccaaaagtaaccggaagagtgatctggccgagtggtgtagcggataatcctgggatgacaccgtggaagggtgcattactcggctttaattccgttcgaggaatctgcatatcgtccagggtcttagagaaaaggatgtcgagtgcactgccaccatcgatgagagttcttcggagcttaacattgcgaaccactgggtctagtaccagggggtactgccccgggtggaccactcggtcgggatgatccgagcggtcgaacttgattgctatctctgaccactgaaggtattggggcgtgttaggttgaaccacattgatctcccgttctgttaacttctgctttctcttagattcataagccaggggtccgccgaagatgtgattgagttctttgcgatgatcttgaaaaccagtcggggcatcgtcttcatcatctttcttctttgatgtgccttgatcttcgtctgagggcttacgtgcgttcttgacgtattgctccgcaaactgtttgtagacgaagcaatctttggccgtgtggttagagttgggatgatgcggacattgagagttcattatcttgtcgaaggtgttgacgcgagaacgttgtcgggaagatggagaggttgttgccacaagttcttcgggcttacgcttgcgatccttgtggttgttacttccactccctcctgcggtcggcgtgtctttccttagcttccaagtggtgcccgactgtttggacgcagtaatagcatcttcggctttggcgtactcattggctttttcaaacatctgcttaaccgtcttgggaggtttgcgtccgaacttgccgactaggtcctcgtggcgaatgcctttagtaaaggtggcgatgatgacgtcgtcggtgatgtcggagatcttgttgcgttgcttggagaagtgtcggatgtaatcttgaagggattctccagacttctgaacgatgttatagagatcaaagtgtgtgctagggcgttcaaaagtgcttggaagttggcgatgaagtggtcgcgtagttctgcccatgatccgatcgtgccgcggggtagcccgtggagccatgaccgtgcagaatccgtagggccacaggtagataattcgccatggctttgctgtctcctcctgctgcgcggattgcgagaccatagacggtgagccaagactcagggttggtggtgccatcatatttctcgattctagttggcttaaagccggctggccaatccactcgacgcagatcacttgtgaaggcagcaactccgtccacgtcgtcgtcgtagcgatccggtgaatgatggcctcttgctgcgcggcgctggttgatggtgtcgcgaagatcgatggggcgccttcgatgtggggagtgtagtagttcaacttggcgctccctatatcgttcgggaggcgaacgaacagaccgttcatcatgtcccctgctcttgcgactagatccggcgccggcaatgctgaggcttggctggtgatagtcttgagatcgaagatgagggactcggctaccagtcggggtgcgagtgcttgcggagttggctggaatcgatgcagcgatcatggtcttcgtctggttcaagatgttgactacatgatcatcttggttgagtgcgtcttccttgaggagggtatcgaggagagtgattgctgcaaccgcattctgctggggggtgcgaaagaccgctgtcccatcgacgtcttgttgcccaatgagctctctcgctcgccgcccagattccaaggcgcgctgtcgtcgatcttcagcctcgctgtagtcgttctcgctcttgtcgctatcgctcttcctccagtcggcgacgttcagcttcttgccgtgcgcgatcttggtccgcttctcggacttggcgctgttcctccatttcgttgtcagccatgaatacgccgaagaagaggggcgtgtagttatcctcatagctgtcatcgaagttgtcgaggtcgccgtggtcgtagtggcagccgaagtcatcgtaatcgaggatctcggttggtcgagaactgacgccgggggagctgaggtagccatccaactcttccgtcgagactgtcccaagaggttggagtataacgccaacctccctggatctagatcggatcgaggccgaagccggagctcgcctagatcttcgagtgggagatgtcttgactggtctctccccgactggtttgaatccgaatcaaggagagagatcttgccgaagtcgttggtgatgaagttgaggctgccgaaccggaacgcctgcccgggagggaaggcgaagtcgtcgatgccagaaacgaaacccat

SEQ ID NO: 79005 - DNA, 3141 bp, Oryza sativa
  Clone ID: PAT_MRT4530_78757C.1
atggcacggggctccgctccgcttgacggtagcgtgctgccgccttcccgcatcgtgagcgagagacaggccgggctgccgcgccgcttcatgccggaatctgccaccggccgggagatagtcacgctgggcgagggacgcccggcgccacgctacccggggcggtccgtcttcttcctccctttcgcaatggcagggctggttccgccattttcttctttcttcatggatgttctggagttttacaatctccagatggcgcacctcacccccaacgcggtgatgacattggccatcttcgcgcacctgtgcgagatgttcatcggggtgcgcccatcccttcggctgttccggtggttcttcaccgtacagccggtgtcgccgccgtcggtggttggtggctgctacttccagccgcgggggccggtgctgaaccgctacattccctgcgtcctccgcaagaagtgggatgactggaagagcgactggttctacacccccctcgccgacgaagcgcgcctccgacttccgagccagcccccggtgcaggcttccagctggcgggcgccggtagatctgggagatggctacgacgccgttctcgaccgcctggcgggcctgcgatctcaggggctcacaggggccatggtgtacggcgactaccttcgtcgccggatcgcgccactccagcggcgcgcccggggcgcctgggagtacaccgggtccgaggactgtatgaggacccaccggggggtcaaatgggactgggtccctgaagacttcaaggtaatggtccaacgggtgctgaatctcagctccgtggaggcatccctcatcccccaaggagtcctccccctctgcagcgatccagatcgcgccaacatcttgaccatcatgatggcggtcggggcctcagaggagcgggctcctcgaggccatgatggcgcgggcgggagctgcaggggagaacaatctaccccaggagggggtcgtgcttccgggccccgtgatgggggctcggggggcagccgccctgccgacgcccgagggaagaggaagcaggagggtacctcctccccatctcctccccgagggggcggggcggcgcgtgtcagcagcaggcgcccggagggggccgcgccgacgccgcagcccgagggggagcggaagaagaagcggctccgcaagatggggggacagaaccatcccggggaaacctcatttcccctccaaagtggtcgtttaaccgaccccctcgcaggttcgtcccacgcccattgtggccatattcattctcctaacgcgagttttcactcacccatcttgtttgtcttctggtctttcttctgcttcagcgagatctcgtcgcgtccctcccgccattccaagtccggccagtctgaggccgaggatacggcgaccgcggaggcccggaggcgggaatctgaccgtcgagaagccgcggatcgtctaccggaagccgaggaggccgcccgggaggccgtccaggctcgccaggctgaagaagccgctcgggaggaggccagacttcgtcaggccgaggcggcgacgacttccgaggcagctcgcgacgaggccgcggacgcatcgcttgggcccactccctcgggcgacactcaggacaagccaggtccgggggacgtccctgagtccggcacgtccatcggcgggccgagccgagcggcatcttcaccaaggcggctctcccccatgccttccgttgccccactgagcgcagagccccttctgcaggccttggccgtcgcaaacaccacgatgttggacgggttaagtgcccagatggaggccctgcaagcagagcgggcggagctcgacgccgcatgggcgcgtgtcgaagaggggcgacgctcggtggaggccatggtggaggtgggccgcaaggcacaccgccgtcgcgcctcagagcttgaggcccgtcggaaggtgctggaggagatcgccagggaggtggaggaggagcggggggctgccctcatcgccactaccgtaatgaacgaggtgcaggacgacctccaccttcaatacgggagctgggaggcggagctagggaagaagctcgacgccgcccggggggtccttgatgctgccgctgcccgagaacggcgggcgacggagaccgagacggcgtcccggcggcgcgaagaagcccttgaggcccgtgccatggcgctggaagagcgcgcctgcgtcgtggagagggacctggcagaccgcgaggccgccgttgccattcgggaggtcacactggcggcgcacgaagccgcctgtgccgaagaagagtccgctctccgcgtccgtgaggatgcgctcaccgagcgggagcgagccctcgaggaggccgaggccacagcgcaaaggctggcggagagcacgtccctccgcgaggctgcgcaagaggaacaagcgcgtcgcgatctggaaggtgtccgcgccgagagggccgcactgaaccagcgggccgctgaactcgaggcgcaggcaagggagctggatgcaagggcgcatagcggcggggcggccacgggcgatagcgacttagccgcccgcctcgcagctgccgaacacaccatcgcggatctgcagggcgcgctgaatttgtccactggggaggtcgaggcccttcgcctggcaggcgagatagggcccagcatgcttcgcgatgccgtgtcccgtttagaccgcgccggacgacaggcgggtctttggggcgggcggactgcgaagtacgccgccaaccaggggggcctcgcccagcgcctctcggagatggccgggactctccaacggctccccgaggagctcgagcggacgattaagtcatcctcgagggacctcgcccgaagagcggtggagctcgtactggcgagctaccaggccagggaccccgacttctccccatggacggcgctggacgagttccctcccgggaccgaggacggcgtgcgcgcgcaggtccgggacgccgccaaccatatcgtccacagcttcgagggttcggcccctcggctcgcgttcgccctcaactcagacgaggagggcgatgacggcggtgtgggcgacagtggcgacgaggctggcgacccgagtgcatcggagtga

SEQ ID NO: 79006 - DNA, 5163 bp, Oryza sativa
  Clone ID: PAT_MRT4530_78758C.1
ctatgtagtttgaattctcctcagaaccaggtcgccaactaaaaaggctcgcgatcgaacattccgattatgataacggcgtaacccttgtaaataccgagctgactggattagggctgcttcacgggcttcttccagtcggttgatgtcatccactcgatcctcttcatggcgctcttcccggaagttacgaaatcggagggattcaaactctacctcactcggcagcattgcttctgcgccataaaccaagaagaacggcgactggccagtagcccgactgggggtggtgcgtaaagaccaaagtacagacggcagctgttctacccacttgccagcatagggacgcagtcggtcgaaaactcgtgctttgatcccttgaagtaccatgccattggcgcgttcgacttgcccgttactcatggggtgtgccacagaggcgtaacaaattttaatgccaaagtcttcacaaaaatctttaaatattccgcccgtaaattgagtgccgttatccgtaatgatacgattcggtactccaaaccgatgtacaatattgatgaagaaatctctagctttgtctgcggtgatggtgacgaccggtttggttttaatccacttggaaaacttttccacagctacaaagagatgagtataacccccgactgcctttttgaatggaccgaccatatcaagcccccaaaccacgaacggccaagacaacgggatggtttgtaactcctgagctggtaagtgagtttgtcgggcaaagaattgacaaccttcacatgttcgcacaattttgtcggcgtcggaaacagctgtgggccagaaaaaaccctgccgataagccttgccaacaatggttcgtgcagcagcgtgattaccgcagatgcctgaatgaatgtcttttagcaattgtcttccctcttccaaagatacacagcgttgcaggattcctgatggacttttcttgtacaactcggtctcatgaatgacatagagtctgctgcgcctggagatctgcttggcttcatttttgtcttgagggagttcttgtttggttagaaattttatgagaggttctctccagtcggcttcaatcatgcttacgccttgagtatccatggcttcaattgtttcttttctgggcacggttggttcgtaaagatgttcgacgaacacatctgaaggagccgcttcctgttttgaaccaaaattggccagcctgtctgctgcctcattattatgtcggaggacatgggtgagcttgagtccgtcgaatttatcttccaacttgcgtacctcttgtcgataagcggtcatattgtcatctagacaggaccattctttcatgacttgattaacgaccaactgagaatctcctcggacgattagtcggcgaatgcctaaagagacggcaatccttaatccatggagcaacgcctcgtattccaccacgttatgggacgcagaaaaatgtatccacaatacgtagctcaatctttctccagtcagggaaattaaaacaaccccagctccagtgcctgtaagcctcttcgacccatcaaaatgcatagtccaatattccatcttttcctctggcatgttttcttgacactcggtccaaaccttagaggtcgccgacacgtataacagcagcggctcttgtggatgtggcgaggccaaaactggtgtagtgagaaattttttgaagtcttcaaaggctttttgtgcttcgggtccccactggaaattgtcagttttcttcagcaacttgaagaagggcatcccccgttcaccgagtcgcgaaacgaaccggctgagcgccgccatgcaatcagtcagcttttggacatctttttgtgagcttggcggtttcatgttgagcatggcgttgattttctccgggttggcctgtatgcctctttgagataccataaatccgagcaacttccctgacggtactccgaagatgcacttttcagggtttagtttcatcctgaaagcacgaatgcttgcaaaagtttcttctaaatccgcgatcaggtcatacttctgcttggtcttgacgactacatcatcaacataagcttcaacaatgcgaccgatctggtcaatgcgaggtaacccgaaaggatctttagggcaagacttgttgaggtcggtgtaatcgacacacatgcgccattgcccagtcttcttccgaaccagaactgggttagccagccagtcgggatggaggacttctttaatgaagcctgctgctaacagtttggctaattcctctttgatcgcatccttcctatcttgtgcaaagcggcggagtcgttgtttgatgggtttggcgtcttccttgacatgtaaagagtgctcaatcacctctctgggaataccaggcatatcggatggtttccacgcaaaaatatctttattattagcagttttggtaggatcggagggatctagtggaatcttcttagttttgtcgtcgccttcttcggtctttgacagcttggtcgtaggcacctctccttcgcttgccgtagtggcagccaatcggatctcttcgcgagcgagagtgatctcgtgggtttgggctatttcgcaactttctttgtcacatgtgacggcttgcttgatgtcgctccgtagtgatatgactcctcgaggaccaggcatcttcatcatcatgtaggtgtaatgtgggacggccatgaatttggctagagccggtcgtccaagtatagcatggtacgttgtctcgaaatcggcaacttcaaaacaaacgttttctgtgcgaaagttttcccgagtgccgaaggtaaccggaagagtgatctggccgagtggtgtagcggataatcctaggatgacaccatggaagggtgcattactcggctttaattccgttcgaggaatctgcatatcgtccagagtcttggcgaaaaggatgttgagtgcactgctaccatcgatgagggttctttggagcttgacgttacgaaccactgggtatagtaccagggggtaccgccccgggtggaccactcggtcgggatgatccgagcggtcgaacttaattgctatctctgaccaccgaaggtattggggcgtgttaggctgaaccgcattgatctcccgttctgttagcttctgctttctcttagattcataagccaggggtccgccaaagatgtgaattagttctttgcgatgatcttgaaaaccaagtgggacatcgtcttcaccatctttcttctttgatgtgccttggtctccgtctgagggcttacgtgcgttcttgacgtattgctctacaaactgtttgtagacgaagcaatctttcgccacgtgattggagttgggatgatgcggacattgggagttcattatcttgtcgaaggtgttgacgcgggaacgttgtcgggaagatggagaggttgttgccacaagctcttcgggcttacgcttgcgatccttgtggttgttacttccactccctcctgcggtcggctgcatcggatcccatataagaagctcgctctttacccgatcattcaaacattttgtgggcggcgctcctgctctattgttgcgtagcaatacaagcctgctcatgctgcttcggcggcgctttttcgccttctcttcgctctggacaggagcctcattggctttttcaaacatctgcttgaccgtcttgggaggtttgtgtccgaacttgccgactaggtcctcgtggcgaatgcctttagtaaaggcggcaatgatgacgtcatcggtgatgtcggagatcttgttgcgttgctcagagaagcgtcgaatgtaatctcgaagagattctccagacttctgaatgatgttgtagagatcgaagtgtgtaccaggccgttcaaaagtgccttggaagttggcgatgaagtggtcgcgtagctctgcccatgatccgatcgtgccgcggggtagcccgtgaagccatgaccgggcagaatccgctagggccacaggtagataattcgccatggctttgctgtctcctcctgctacgcggattgcgagaccatagacggtgagccaagactcagggttggtggtgccgtcatatttctcgattccggtcgacttaaagccagctggccaatccactcgacgcagatcgcttgtgaaggcagcaactccgtccacatcgtcgtcgtagcgatccggtgaatgatggcctcttgctgcgcggtgctggttgatggtgtcacgaagatcgatggggcgccttcgatgtggggagtgtggtcgttcaactcgacgctccctgtatcgttcgggaggcgaacgaacagaccgttcatcatgtcccctgctcctgcgactagatctggcgccgtcaatgctgaggcttggctggtgatagtcctgagatcgaaggtgagggactcggctaccagtcggggtgcgggcgcttgcggagttggcctcctttgcaatccgttcgcgatcttgttgctcacgctgtagtcgttctcgctcctgttgctgtcgctcttcctccagttggcgacgttcagtttcttgccatgcgcgctcttggtccacttctcgggctcggcgttgttcctccgtttcgttgtcagccacgaatacgccgaagaagagaggcgtgtagttatcctcatagctgtcgtcgaagttgtcgaagtcgtcgtggtcgtagtggtagccgaagtcgtcgtagtcgaggatctcggttggtcgagaactgacaccgggggagctaaggtagccatccaactcttccgtcgagactgtcccaaggggttggagtataacgccaacctccctggatctagatcggatcggggccgaagccggagctcgcctagatcttcgagcaggagatgtcttggccgtcatcttgatctggtcgcggaggagtagattagatctcgtccgagtggtttgaagccgactcgggagagatgatcttggagtaggcctcggccgagttcggaataccgaacggcgcggggacctgatctctccccgactagttcgaatccgagttaggagagagatcttgccgaagtcgttggtgatgaagttgaggctgccgaaccggaacgcctgtccgggagggaaggcgaagtcgtcgatgccagaaacggaacccat

SEQ ID NO: 79007 - DNA, 1158 bp, Oryza sativa
  Clone ID: PAT_MRT4530_78759C.1
tcccagctacctaaccgattgcccaacaagaaaatagcaatggttagccggggcactttcgtttttgccgtcctagtggcgctaccgatactgtcactccccgtctctggctacgagcagaactacactgccggcagacggagcaccatgtcgctgggcagaggctacggctggtcctccggcggcgcgacgtggtacggcggcccgcaaggcgacggcagcgaaggcggcgcgtgcggttaccagagcgccgtcgggcagcgcccgttctcgtcgatgatcgccgccggcgggccctccctcttcaagaatggcaaaggctgcggctcatgctaccaaattaagtgcaccggcaaccgggcgtgctccggccgcccagtgaccgtcgtgatcaccgactcctgccctggaggggtatgcctgaacgaggcggcgcacttcgacatgagcggcaccgccttcggcgccatggccaaccgtggcatgggcgaccgcctccgctccgccggagtcctcaagatccagtataagagggtgccgtgcaggtttgccatgaacgtggccttcaaggtggacgcgggctccaacccgtactacctcgccatcctggtccagtacgcgaacggcgacggcgacctcgccgcggtgcacatcatgaaggcccgcggcggcggcgggtggaaggcgatgcagcagtcgtggggcgccacctggcgcctcaactccaacaccgggaagccgctgagcccgccgttctcgatccggctcacctcgggctccggcaaggtgctcgtcgccaacaacgtcatcccctccgggtggcaggccgggttgacctaccgatccaccgtgaactacgccgcctaatgcggcggcgtcgtgcgcgactacgtacgcgcgtgtttgttaacgtcgccgcgatagatccatcgcgaggcagaagctcgcctcgtcgaagtgagttcggtgtgtgcgcgtccgggaatcgtgcgcagccgcggtaaaagaggagttcgatctgttagtgttaagtgttcgtgatgtgtgttctccctccgtggccgtttgcagagctgcttctagtgacgtctcttgcttggttataacttaaccgaattctgcgttgcgatttgcactaaaaaaaaaaaaaaaaaaaaa

SEQ ID NO: 79008 - DNA, 5133 bp, Oryza sativa
  Clone ID: PAT_MRT4530_7875C.1
ctcctggtttggaatggtatattcctggtttggagatagaactgtgtagccaggaatggttgttcagaaagtttgggcctatgcaacgggatgccgcgcttcaagcctgagtacttgttcggtgttgagggatttgtccaggagctgcgtacgatgtcctttaccataggattcgggactgcccctttgtatgcccagattcctcatgatcgtgataaagagaagtgctgtgtcaaggtcaccttgaatagtgatcgtgaagacctcccatcggtgatcttcgaggctggagggggaagctatcctcatgcttgtcaggaggtggcaaggatcgccataggagagctctggaccgttacaatgatctgttggccgacactgagtatcgctaccatcctcatcagccccagggaagggaccgtgccagctatgttgaccctgaaggaattgagaatgatgctagcacaagacatttggtcgagatgctgtgggccatggatgagtcccacgctgaagtcgtgtcagctactcaagctcgtgaagaccggaaccatggtaagatctacaagctggaggacaaggttgatcgtctggagaaggaactgaccgaattgaagggagaagcgccaccacagaaggccagggttcgtcttaccgcaaggaagagagctctttttattccccgctaccagttggtgcccaagatggtgaacacttgcagcaatggaaatgggcccaacaacaacaacaacaacaacaaatgagagattcccacgcttgcccaagtcctagctcaacaggcccaactcatgaacatgatgatgcaacaactccagaaccaacagaactaggggaacaatcacgctcctccccagaacaagttagcagaatttcttcgtgtgaggccgcccactttttccagcactaccaatccggttgaggctggtgattggctgcacgtcatagaaaagaagctggacctgcttcagggcactaaccaagaaaaagtctcctttgcttcacatcagcttcatggccctgcctctaagtggtgggatcacttccgtctcaacagggctactgctgaaccaatcacttggcttgagttcactgccgctttcaggaagactcacgtaccatcgagagtggtgtctctcaagaagaaggagttcagggcgctcactcagggatcccgttctgtcaccaagtacatgcatgaattcaatcgtctggcccgttatgctccggaggatgtgtgcacagatgaagagcgtcaagagaagttcttggaaggactgaatgatgagctttcttaccctctgatgactagggattattctgatttccagaagttggtggataaggccattcgccaggaggataagtacaaccgaatggaacagaagaaacgcaggattgctcacttcaaagctcagcagaggaatagtcagaggtcgcgtctcactatgggacctcaggcagtgtcacagggaggatcttcgtctgttgttcgtccacagcgtcagttcttcaacaacaatgctggcaataacaaccgcaaccaagctccacgccctgttgcaactccagtccagcaccagcctgtcaagagggagcaaggaaacaagccaggggtgtgcttcaactgtggtgaagcaggtcattattctgacaagtgtccgaagcctcgacgtgtgaagattgttcctgtgcagaataactccaatgcaccaacgtcaaaggctcgtgtcaatcatgttgctgctgcagaagcccaaggtgctccagatgtgattttgggtatgtttcctgttaactcagttcctgcaacagtgcttttcgattctggtgctacacattcttttttgtctatgagttttgcgggaaatcatgggatggagatggaagatcttagacgtcctttgatggttagtaccctagtaaccaaggactctcatcacaacgtagcccttctgtcagaatagagattcaaggtgttccatttctggccaactttattttgttagaatccaaagaccttgatgtcatcctagggatggactggttagctagatacaaaggtgtgatagactgtgacaatagtaaagtaactctcaccagcaatgatggtcaagttgtaactgttcatgcattgcctactgaacctttaaggtcaagtttgaaccaaataacattggaagagattcccatagtacgggactacccagatgtgttcccggatgatttacctggtatgccgcctaagagagatatataattcagaatagatctggtaccagggacaaccccgatccataagagaccttatagaatggcagccaatgaattagcagagggggatcaagagacaagtagatgatttgcttcagaaaggatacattagaccaagttcatctccatggggagctccagttatttttgtggagaagaaagatcatacccagaggatgtgtgtggattatcgtgcactgaataatgtgaccatcaagaataagtacccaatgcctagaattgatgatttgtttgatcagcttaaaggtgccaccgttttctccaagatcgatcttcgatcaggatatcaccagttgaggattaaagaggaagatatacctaagacggcttttaccactcagtatgggttatttgaatgtattgtcatgtctttcagacttaccaatgcccctgctttcttcatgaacttgatgaataaggtgtttatggaatacctggataagttcgtggtggtctttattgatgacattcttatctactcccgaaccaaagaagagcatgaagaacatcttcgtcttgcactagagaagctacgagaacatcagctttttgccaagtttagcaaatatgaattttggttgtctgaagtaaagtttcttgggcacgtcatctcagccagaggagttgccgtcgaccctagtaatgtggaatccgtaactaattggaaacaaccgaatacagtttcagagattcgtagtttcctgggtcttgcaggctattaccggaggttcatagagaatttttccaagattgctaagcacatgacacgcctgcttcagaaagacgtgaagtacaagtggtcaaaagaatgtgagcagagctttcaagagttgaaaaatcgcttaatatcagcacccattttgattttgccggatccaaagatgggtttccaagtgtattgcgatgcatctaagcttgggttaggttgtgttctgatgtaagatgggaaggtggttgcctacgcatctcgtcagttatgtccccatgagaagaattaccctacccatgatcttgagttagctgcagtggttcatgccttgaagatttggcgtcactatctctttggtactcatacggaggtgtacacggatcacaagagtttgaagtatatcttcacccagccagatttgaatatgagacagcgaatatggttggaattaattaaggattatgacatgggaattcattatcacccgggaaaggctaatgttgtagcagatgctctcagcaggaaaggcaattgcaatgctacggaaggacgacagttgccatgggagttatgcaaggaatttgaaagactgaatttgggaattgtcagtagaggttttgttgcagctttagaagcgaagtccacactcattgattagtgattaggttagagaagctcaaaccaatgatcctgatatccaagaaatcaagaagaatatgagaagaggaaaggctatcggttatttggaagatgagcaaggaactatatggttgggtgagagaatttgtgtcccagacaacaaggagttgaagggtacagtcctgaaggaagctcatgacactttatactccattcaccctggtagtaccaagatgtaccaagatctcatggagaaattttggtgggcgagtaggaagcgtgagatagcggagtatgtagctgtgtgtgatgtatgtcagcgagtcaaggcagaacatcagaaacccgcaggtttgctgcagcctttaaagataccagaatggaagtgggaggaaattgggatggatttcatcactggtctgcccagaatgtcatctggccatgattctatttgggtgatagtcgacaggcttacaaaagttgctcattgcatccctgtgaggacaacatattccggaaatcgtttggcagaattgtatatggcaaggattgtgtgtttgcatggtgttcctaagaaaatagtatccgatcaagcgagccagtttacttcaaagttctggaagaagcttcttgaagagatggcttctaagctgaatttcagtacctcatatcatccgcaaacagacggacaaactgaaagggtaaatcagattttggaagacatgttgagagcttgtgttttagacttcgatggaagttgttataagaatttgccttacgcagaattctcgtacaacaacagttaccaagctagtcttcaaatggctccttatgaagcactgtatggtcggaagtgccgcactccacttttgtgggatcaaacgggagaacgtcaggtttacgggactgatattctgagggaagcagaagagaaggtaaagatcattcaagaaagattacgtatagcccagtgtcgtcataagagatatgctgacaatcgccgcagggatctaagttttgagaaaggagatcatgtgtaccttcgtgtcacgcctcttcggggagtttatcgttttcacaccaaagggaaattggcaccgcgttttgtgggaccatataagattgtcagtagaagaggtgaggtcgcctatcagttggagttacctcaatccttggcaggtgttcataatgtgttccatgtgtcacagctaaaatagtgtttgagggtacccactgaagaagctaatcctgagcagatagaaatccaggaggatctgacttatgttgagaaaccaatccgtatcttggagacagatgagagaagaaccaggaatcgagttatccgtttctgcaaggtccaatggagcaatcactcggaagaagaagctacctgggaacgagaagatgaattaaagtcagctcatccgcatctcttcgccagctcttccgaatctcaaggacgagattctgtt

SEQ ID NO: 79009 - DNA, 1749 bp, Oryza sativa
  Clone ID: PAT_MRT4530_78760C.1
atggcacggggctccgcaccgctcgatggtagcgtgctgccgccttcccgcatcgtgagcgagaggcaggccgggctgccgcgccgatttatgccggaatctgccaccggccgggagatggtcgcgctgggcgagggacgcccggcgccagactacccggggcggtccgtcttcttcctctctttcgcaatggcggggctggtcccgccattctctaattttttcatggatattctggagttttatgatctccagatggcgcacctcacccccaacgcgataatgacgttggccatcttcgcgcacctgtgcgagatgtttatcggggtgcgcccatctctccggctgttccggtggttcttcaccgtacagccggtgtcgccgccgacggtagttggtggctgctacttccagtcgcgggggcaggtgctgaaccgctacattccctgcgtcctccgcaagaagtgggacgactggaagagcgattggttctacacccccctcgccgacgaagcgcgcctccgacttccgagccagcctccggcgcaggcctccagctggcgggcggcggtagatctgggagacggctacgacgccgttcttgaccgcctggcgggtctgcgatcccaggggctcacgggggccatggtgttcggcgactaccttcgtcgccggatcgcgctgctccagcggcgcgcccggggcgcctgggagtacaccgggcccgaggactacatgaggacccaccaggggcgcaaatgggactgggaccctgaggacttcaggatggtggtccaacgggtgctgaatctcagctccgtggaggcatccctcatcccccaaggggtcctccccctctgctgcgatccagagcgcgccaacatcctgaccatcatgcaggaggtcggggcgtcgggggagcgggccccccgaggccatgatggcgcgggcggaagccgcaggggggaacaatctagcccgggagggggtcgtgcttctgggccccgcgacgggggcccggggggcagccgccctgccgacgcccgggggaagaggaagcaggagggtacccctcccccatctcctccccgagggggcggggcggtgcgtgccagcagcaggcgcccggagggtgccgtgccgacgccgcagcccgagggggagcgaaagaagaaacggctccgcaagatgggggggaccgagtcatgccgggggaacctcatttcgcccccgaggtggtcgtttagccgacctccccgcagcgaaatcccgtcgcgcccccccgccattccaagtccggccggtctgaggccgaggagacggcgaccgcggaggcccggaggcgggaagctgaccggcgagaagccgcggaccgcctctgggaagccaaggaggctgcccaggaggccgtccggaggcggcgcgcgcacgccaggcggcctgccaaacccccgacccgactccgcccgaggcgacgacgacttccgaggccacccacgacgaggcgcgggcgcgccgctcgggcacgacccctcaggcgacgcttgggacgagccagcttcgggggacgcccccgagtccggcacgtcgatcggcgggccgagccgcgcggcacccacaccgaggcggctctcccctctgccttccgctgccccattgagcgcggagcccctcctgcaggcctcggccgccgcgaacaacacggtgctggacgggttaagtgcccagatggaggccctgcaggcgtag

SEQ ID NO: 79010 - DNA, 1663 bp, Oryza sativa
  Clone ID: PAT_MRT4530_78761C.1
ccttttagggtttgtcccgccgacgccaatcgccgccgcctgtcgccgccgccgccgccgcctccatattctagctctcggtgatctctgatggagcccgaaggcggcgtcaggctgccaaccctagatcgcgtcaggcgcggcgtcagaagtagctgtgataccgagagctgggaatgctttcaatgcggttcgataaacctccctgttgagaaactactgtttgatctaccagcattccattgtcgtggatgcgaagctccgtttcttggtgaaatgaacttctgctatgacctcgtcaaggcaaacaagcgttctctgattggtgggctcgacaatatcaagaatcaatacgataatcctgaatgtatcgcctattctatagcctcttgccttgagatagcagacaggattaagacggttcttcagggaaaaaatcccgactccgtaaaagagatagacccaactgccattgttgacatgtttgatggtaagtgcttggccaactgttctgatggcacatcgggaatcggaaaacttgttacaatggcgcttgctgtccaaactgatggcatacaatctggccgatcattcaaggctttacactgctgtagcagtggaaacaattgataagtatgactttgaagggatatgtgccacacttgctgatggcattccgcttgttggtgcgttttactgcggcagcagattggaaaagcttgagtattgccaaatttacagagtgcccaaactatccaaattcctggatagaaatctgattcctactggccatgctgctgttatcattggggctggaatgcgctgcgggatacaatatttgtattttctaaattcgtggggtaacttcttttgcccacgctatgacaaagatggtaatcttgtgaaagctggagttggaaagttgaggttttatgatttgctctgcaatccgattatgttcataacagattctgccaagcgtgttgggttgaataggcagctactgcctatgggcactgggaagctgtcagatcacaacaagagcatgctgatgggccgaaaacaaactgatgttatacctgaagacctatctattggcgtaacctccgagtttgttgggaatcaaccacaaaatttcttcaaaaagaaaaatggctaatgccactttggatggtgatggtcaaactcaaaagagaaacaagtgtagaactttcggccgaagttctgtcgatctcaatgaagccaacaacaaacggaatgcaaaggaagatgagatgtgaggtcatggggatgaagaaccctgcagacatacttttgctttgtgaaaaagggcctgatgttttttgctctgagagttggtagggtttgtgagccacctcaccaagcatcaatgatgcatatttttcattatgctacacttggatgtctcaatttaatctactgagactctttttcgttgatgatcactggctcactgctcatgtaaatcctggagagtatttattgttgaaacgaagacatgatcttctgtgtgtttgagcagaggaacgaattggatcctctctgtgtttgagcagatgaacgaattggatcccattcgtttaccagataatgagctctaggtacaacaagatatttggaatatataggaggaatatcatcc

SEQ ID NO: 79011 - DNA, 175 bp, Oryza sativa
  Clone ID: PAT_MRT4530_78762C.1
aggagatcgaaatgaggcggctcagaacacacggaagacatagagtcttagctgctatcacttaccctcatacctaaagactagtatgttgaacctgagcctatgttcagaagatcatttgattgaaagggatactctgatgtggaagagggtcgctgaaggcttggtccaagag

SEQ ID NO: 79012 - DNA, 125 bp, Oryza sativa
  Clone ID: PAT_MRT4530_78763C.1
atggtggccgacgaagaaaatggcaatggctgggtgggtgagcaggaggaaatcctctccagggaaggtcagcttcgacaattgtcgaatgttttggagtcggcaaaggataaaaagtcttgcag

SEQ ID NO: 79013 - DNA, 441 bp, Oryza sativa
  Clone ID: PAT_MRT4530_78764C.1
gccagacagtccaccacgcgtacggctaggcggtctgtaccaagactctaagcatcagcagcctggttgtggagctgcagaacaaagcacacgtaacgcaggcagacggaagggaacgatccggcgaccatgagatatccgtggagccggcggcaggactggtcgccatctacggccgcgatgtggggaaggcggtgaacaacgaacctatcaatccgggctcgctgatcatggcgagcaggtgtctgcaaggacagcctgagccggcatgaggccgccgcacagtatatgacagtgaggaagcttgacgcgctgtgccaatagtccagctagaccgcctcagcaacgagggcgcgctgctcctaatggagaatatcagcatctctgatgaccacatcaactacgacccgtttatcatcgattggaggggctggatgaact

SEQ ID NO: 79014 - DNA, 345 bp, Oryza sativa
  Clone ID: PAT_MRT4530_78765C.1
atgcaaggctgcttccctttcaggagtactcatcgtcggcaaccgcttcgtcacggcggcggcggcggcgtgaccgtcgtcgtgtcccgcggcggcggcggcggcggcgccgcccgcgtcaagatcgtcgtgggcgaggacgagctggaccgcatcgccgccggcgtcacgcggaggcaatgcgcggttgggtcgccggagctcctgcagcagcaggcgagggcgaccgaggtggcggcggccccgatgccgatgcggcggccggagtcggagggtggcgcgctcgtggccggccggcgcggcgagtggcagcctgcgctggatggcataccggaggaagcgtaa

SEQ ID NO: 79015 - DNA, 113 bp, Oryza sativa
  Clone ID: PAT_MRT4530_78766C.1
gaatttgctgctcgcctgctcggggccacagagggttacgggctgggctgggctatgtctgggagcatagcagacaaggctgcaggaaccaagcagcacagcatcaacagcag

SEQ ID NO: 79016 - DNA, 1075 bp, Oryza sativa
  unsure (1)..(1075): unsure at all n locations
  Clone ID: PAT_MRT4530_78767C.1
ttggggggggggccttttgggccggggcccnnncccntttttttccgggngnaaaaaaccgggaaagggttcccaaacctttgggtttnngggggaancccccccaaaaagggcccccccttnanaaaaacccttnggggggntttccctttgggaaaaaagggnaaaccttntttccctttnttnttntttnaagggncccttntttccccaaaggggggggggtttntttccccccnttnggggaaatttncccaaaaancacccaacggttttccccccgggggggggggaaaaaaagggncccttnttngggnaaattnttnnttngggncccaanaaatttnaaaccccccctttncccnnnnaantttgggnaaaaccccccnaaatttnttnnttnnttggggncccnaanccctttnggggaaaaaaantttnttncccctttaaaacccncccaaantttntttggggggggtttttttttttnggggaaaacccaaantttccccaaanaaancccngggncccccccttttntttntttnaaaaaaattttttttggggaaaaagggnccccttttggggggggggcccnaaaggnccccnaaanaaacccccttttnaaantttccccnggggggggncccnannttttggggnaaaaaaaatttnggggaaaaanaancccctttntttnaaangggntttnggggccccctttnggggggggnttttggggccccttttgggggaaaaaggggggggntttttttggggggggggaaaaatttttttccccccgggaaaaaccccaaaaggggcccccaaaaccccttttttttcccccaaaggggnccccntttntttcccccctttggggggttttttttnaaaccccctttnaaaaaaaaaggggttttttaaanccccaaaaaaaaaccccttttncccccaaanggggggggggggggaaaaanttttccccnttttgggggcccccttttnaaaanttttnaaaaaaaacccccaaaaaaaaaaaaaacccccnnaatttttgggggaaaaaaac

SEQ ID NO: 79017 - DNA, 939 bp, Oryza sativa
  Clone ID: PAT_MRT4530_78768C.1
aacccccggtgacaccccctcaaaccctagccgccgccgcctcgcgtctcctccgcctccccatcgcgcagccacctccgcatccgccgccgcctccgcctccgcctctaccaccccctcgcgctgccaccttcgcctctgcctcctctgcctcgcgtggccgtcgccgggcgcgccgcctccggctcacgccgccgctgccggccatcgcctctggccgccgacgtccggatccgacctcccatgtgtttgggggacgcggatctgaccgccgcagcgtcgtcctccgctatcgtcgccatcgccgagcgtcgccgctgcatccttcgccgcacctccgtccgccgccgcagcccgcatcccctcctctcgcccctccctctccgacccgggcgattcgcaagccgccgccaccgcatgggctccaggaaccaccatcgtcgtgtcctccgcgcactaacccgcccccaaggccccaaccctagccgcctccgcccgcctctcctcctccctctcctctcacgccgccggcgccggcgcctccccaaccctagccgccgccccagtcccctcctccctctcgtcccacccgtgctctccctctccctctcacgccgccgccgccgcctcgaagcttcccctccccacggcctccgaggacctcgccgccgtgggccccggcgagagggaggggtggctggacgaccccgccgtgctccctcccctcgcgccgcgcgcgcgcgccctcgccgtcgccgttgcggcgcggtccgtgctcgcggttgccccggtcgccggaggaggtggcagggtcacggtgaggcccgcgctggggcccgacgacggccggatctccgccgtggagtggatcccgctcgctggggaggacgccggggaggctggtgagagagtggccgtcgccgtgggcacggacgccag

SEQ ID NO: 79018 - DNA, 499 bp, Oryza sativa
  Clone ID: PAT_MRT4530_78769C.1
gcgccggcgcctccccaaccctagccgccgccccagtcccctcctccctctcgtcccacccgtgctctccctctccctctcacgccgccgccgccgcctcgaagcttcccctccccatggcgccgcgaggctacctggcggaggtggctctcctcacgtcggcctccgaggacctcgccgccgtgggccccggcgagagggaggggtggctggacgaccccgccgtgctccctcccctcgcgccgcgcgcgcgcgccctcgccgtcgccgttgcggcgcggtccgtgctcgcggttgccccggtcgccggaggaggtggcagggtcacggtgaggcccgcgctggggcccgacgacggccggatctccgccgtggagtggatcccgctcgctggggaggacgccggggaggctggtgagagagtggccgtcgccgtgggcacggacgccaggtggcttctgttatactctctcgccggcgatctgctgcacaagcaggg

SEQ ID NO: 79019 - DNA, 465 bp, Oryza sativa
  Clone ID: PAT_MRT4530_7876C.1
atggagaaccagggttcacgattccgacgcgccccttcctcccttgtcctccgagtcgccactacggcactaccggaaagccatatggtgtgcggcgaggaatttcggatcaaaattttgaaatttcagtatttcggtgagcccacggctagattcagtgagactggacccgacgagaccagatttggcactcagattgtgggcgacttcggtgagacaactacggcggtggtgacatggcaaaatgacctgagacagcaggggtcagtgatgcaagaaaacagcagcatggctcacggccttgctgtgcctccagcaatcgacgtgtggggagatggtgggagtttgggagcaagttgggcaccggtgggaggttggtggtggggcgctagaacggtggtcgcgtgcagtgaagttcttcggatggtggcagctgatggtaataacgaggatgcaacgatatga

SEQ ID NO: 79020 - DNA, 600 bp, Oryza sativa
  Clone ID: PAT_MRT4530_78770C.1
atgccccgaaaacccaaggtttcctccgcaaggttcgtccacggaggggtaagaaggggtagagaaaatgcctcgagccgaggtccgagtaccaagcgctgcagcgctgaagaaaagctcgaacgaccttcaacaaaggggtacctgtacccgaaaccgacacaggtaaaggaagttggtgaactgatgacagggaagccggcgaccgtaactataacggtcctaagcttaggtggaaggcgaagaaggcccccttccgggggggcccgagccatcagtgagataccactctggaagagctcggattctaaccttgtgtcagacccgcgggccaagggacagtctcaggcagaagggagcttgactgcaagactcacccatcgagcagagacgaaagtcggccttagtgatccgacggtgccgagtggaagagtccacatcgacgggaaggtttggcacctcgatgtcggctcttcgccacctggagctgtaggtggttccaagggttgggctgttcgcccattaatgcggtacgtgagctgggttcagaacgtcgtgagacagttcggtccatatccggtgtgggcgttagagcattga

SEQ ID NO: 79021 - DNA, 429 bp, Oryza sativa
  Clone ID: PAT_MRT4530_78771C.1
atggaagcggtggcgcttcggcaggcccagccgtccgctgccttcgcctccgcactctccgggggccctcactgccaatatgctccgcggccatgctgccgccgcctccggtctatgtcgtcgaccaccgcctcctttcctccgctgtggagcctggagctcgaagcaggggaggtcgcgatgggcggagatggacggggaggcatcgttgtcgctgtcggtgagcagctcgcaagggttgtggtgggcgccgttcctcatcaccgctttgcatcgtgtgcggcggccacggcaagaagggagcgagttgggcgccgcgatgacgtcgacctcttccgctggtcctcgtccccgctctgtgatatggacggccgtcgcggcaacgacgacgaggtaagcggtgaccgcgaccggaatggagcgaggtag

SEQ ID NO: 79022 - DNA, 2162 bp, Oryza sativa
  unsure (1)..(2162): unsure at all n locations
  Clone ID: PAT_MRT4530_78772C.1
cggcacgagcctctggccaccccgctcttcttgagctagcgactccgtgcttgagtagcaaaggagcgagtgagcatttggttctctgccatggcgaccacaacggcagaaagggatggagttgaggaggagcagaagaagaggaagcagggaggcttcaggaccatgccattcatactggcgaacgagatctgcgaccggttcgccacggcggggttcggcgcgaacctgatcacgtacctgacgcagcagctgcacctgccgctggtggaggcgtccaacacgctgaccaacttcaacggcacgtccagcctcaccccgatcctgggcgcgctcgccgccgacgccttcgccggccgcttctggaccatcatcgccggatccgtcttctaccagctcggcatgctcgccctcgtcgcgtccgcgctgctcccttcgctccgccccgcgccgtgcgcgccgacgcacggcgccgcgtcgtgccgccgcgccaccgggtggcagctcgccgtgctctacctcgccctgctctgcacgtccctcggctccggcggcatccgcccctgcgtggtggcgttcggcgccgaccagttcgacggccagcagcagaagcagcggcagaagggtggcggtggcgcggcggcggcggcggcggggaggaagcggagctacttcgacctctacttcttcacgatggggctcgcggtgctgctcgccctgacggtggtggtgtacatccaggagaacgtggggtgggggtgggggttcgggatcccggccatcgccatgttcgtctccatcgtggtgttcgtggcagggtacccgctctacgtcaggctgaagcctgggggcagcccgttcacgcggctggcgcaggtggtcgccgccgcgttccggaagcgccgcgccgccgtgccggaggaccccggcatgctgtaccaggacaaggagctcgacgcgctcatctccaccaatggcaggctgctccacacaaaccagctcacgttctttgaccgagctgcgatcgtgacgccgggtgacatcgccggctccggcgagccggacctgtggcggctgtcgacggtgcaccgcgtggaggagctcaagtccatcgtccggctgctgcccatctggtcggccggcatcctgctcgccaccgccgcgtcgcacaacggcaccttcaccatccagcaggcgcgcaccatggaccgccacctcacccctcgcttggagatcccgccggcgaccatgtccatcttcacgacggtggcgatgctcgccggcctcgccctctacgaccgcgccttcgtgcccctggcgcgccgcgtcacgggcctcccctccgggatcacctacttccagcgcatggccatcgggctgggcatctccatcctcggcgtcgcgtcggcagcgctcgtcgaggtgaggcgccgcggcgccgccgcggaccacggcctcctcgacagccccgccgccgtcgtgcccatcagcgtgttctggctggtgccgcagtacgccgtccacggcgtggcggaggcgttctcgtcggtggcgcacatggagttcctgtacgaccaggcgccggagagcatgcgcagcagcgccgccgcgctcttctggctctccagctccctcggcaactacatgggcacggtgctcgtcacggcggtgcagcgcgccacgcgcggcggcggcgagtggctccaggacaacatcaaccggggcaggctggactgctactactggctcgtcaccaccctcatggtgctcaaccttggatactacctcgtctgcttccacttctacaccatgaagccattagaggtggcagaggaagacgatgacgagaaggagtgtgagctctcctccgtccacaaaaatggcggccccggcgggttggtgtgacgaggttgantagntttttaaatacttgacgttagaaacgttgagaccatatgtatagaccaaatttttaatatatttgttgatgttttttatatattatattgtactagaaaagatgcccgtgtgttgcaacgggtgaagctattttaatcttattgttgttcaatgtgattcactatgagaattcgcttggatatttttttttctagaaattaatgtcaagttaacatttgagtttttttaaaaaaaaaaaaaaa

SEQ ID NO: 79023 - DNA, 933 bp, Oryza sativa
  unsure (1)..(933): unsure at all n locations
  Clone ID: PAT_MRT4530_78773C.1
atgtcgtggtggcatgtcggtgcacgggaacgtgtcgtggggctgtgtcttaagtgtagtgcttctgagcggaagatggagttagaggaccaaggctcagaccccatgtcagtgtcggcccagcagagtgctttcgccgttggtgttctttccgatctcaatgcatttcaccgcttcaccggaaattccctctgcccctaccagttagccgatgcttattcctcagataccgtcattgtttcttctccgagaaaagaagttgacgacccgagtctgggccatgtctcagtcccagtgtggctgatcatcctctcggaccagctactgatcatcgccttggctcgaactgatgacttccaccacgtcaaggtttccatgaagaagatcttgttcagcatgttctattcgatactggtaggagaagaacccgactcgttagtcttcgggacggagtggaagaagggcggagactctcgaatgaggaaaaggatccctttgaaagaattgaacgaggagccgtatgaggaaaagctcgaacgaccttcaacaaaggggtacctgtacccgaaaccgacacaggtcaaggaagttggtgaactgatgacagggaagccggcgaccgaagccccggtgaacgcggcccgtaactataccggtcntaaggtagcaaaattccttgtcggcttaggtggaaagcgaagaaggcccccttccgggggggcccgagccatcagtgagataccactctggaagagctcggattctaaccttgtgtcagacccgcgggccaagggacagtctcaggcagaagggagcttgactgcaagactcacccatcgagcagagatgaaagtcggccttagtgatctgacggtgccgagtggaagggccgtcgctcaacggataaaagttactctagggataacatgctga

SEQ ID NO: 79024 - DNA, 453 bp, Oryza sativa
  Clone ID: PAT_MRT4530_78774C.1
atgccccgaaaacccaaggtttcctccgcaaggttcgtccacggaggggtaagaaggggtagagaaaatgcctcgagccgaggtccgagtaccaagcgctgcagcgctgaagaaaagctcgaacgaccttcaacaaaggggtacctgtacccgaaaccgacacagtgccggaaggtcaaggaagttggtgaactgatgacagggaagccggcgaccgaagccccggtgaacggcggccgtaactataacggtcctaaggtagcgaaattccttgtcggcttaggtggaagacgaagaaggcccccttccgggggggcccgagccatcagtgagataccactctggaagagctcggattctaaccttgtgtcagacccgcgggcctttcctgcgcagcttaggtggaaggcgaagaaggcccccttccgggggggcccgagccatcacaattga

SEQ ID NO: 79025 - DNA, 327 bp, Oryza sativa
  Clone ID: PAT_MRT4530_78775C.1
aaaaaaaagggggccctagaaaggcctcccattcataatggctgggggggcgtttagggtggcccctccggttaaggtgatcaaccaaaccccttgggacagaccttgcaccacgtataaccttttcttttcacaacaaaacaccaaacgggcgcagctccaaaggataaccatgcaacgggcgcacacccgttcatttaccagaggcccccccaaaaccaaaaaaacgggcctagcaatactccccattttaggccccaactttgggggggccaaccgcccccaagtttaaccgcgccctggattcaaatattcaaagaagggggg

SEQ ID NO: 79026 - DNA, 3590 bp, Oryza sativa
  Clone ID: PAT_MRT4530_78776C.1
atggcttccctcctcacgctcccctccctctccctctccaaccctagcgcctccgccgccgccgcgggagccggagcggcgccgtctctgcgcctccgcgccgccttccgctgctgggcgctgcggcgcgcgggcggcggccggtgggcggccgcgggggccatcgcgtcgcccaactcggtgctcagcgagcacgcgttcaagcggctgcagctcagcgacgaggaggaggaggaggaggagggggcctacgggagtgacgaggagggggtcgaggcggtgggtggcggggagggggacgaggacgagctcgccattgccaggctcggcctgcccgagcagctcgtatccacgctcgagaagcgcgggattacccacctgttccccatccaggtttcggtattaggcggagacagcgagggaattggtgttagtgtaggatttgttggggggatgagttcgtggacagttagggctgtattgattccagctcttgacggccgtgacctgattgctagagcaaagacaggaaccgggaagacgctagccttcggcattcccatgatcaagcaattaatggaggaggatgatggacggagtgtgaggcgaggtcgtattcctcgtgttttggttctagcacctactagggagttagccaagcaagttgagaaggaaataaaagaatcagcacccaagctcagtacagtctgtgtttatggaggtgtctcatataatgtccagcagaacgcactctcccgtggtgttgatgttgttgtaggaacacctggtcgcattattgatttgataaatggcggaagtcttcagttgggagaagttaagtacttggtccttgatgaggctgaccaaatgcttgcagttgggtttgaggaggatgtggaaacgatattacaacagctaccagctgagaggcaaagcatgctcttctctgccaccatgcctggttgggtgaagaaattatctaggcgatacttgaacaatcctttgacaattgacttggtcggcgatcaagatgaaaaacttgctgaaggaatcaaactttatgctatcccgctcacatctacatcgaagcgcactgttcttagtgatctcattacggtgtatgcaaagggtgggaaaaccattgtgttcaccaagacgaaaagggatgcagacgaggtatcattagcactgacaaacagtattgcttcggaggcactgcatggtgatatttcacagcatcagcgtgagaggacactaaatggttttcgtcaagggaaatttactgttctcgtagcaaccgatgttgctgcccgtggtcttgatataccgaatgttgatttgattatccattatgaattgcccaatgatccagagacttttgttcatcgttctggacgcactggccgagctgggaaagcaggaactgcaatcttgatgttcacaaacagccagagaaggacagttagatcacttgagcgtgatgttggatgcagatttgacttcataagtcctccagcaattgaggatgtgctggagtcctctgctgaacatgtcatagctactttaagaggtgtgcacacggagtcgattcagtacttcattccagcagctgaaagactgcaagaagaattaggacctaatgctcttgcttctgcattggcacatctgagtggattttctcagccaccctcttcacgttctcttatcagtcatgagcagggatgggtgactttgcaactaactagagatccaggatatggaagggggttcttttctcctagatctgttactggctttctgtctgatgtttcttcagctggatatctgctgatgaagttggcaaaattttccttacagcagatgagaaggttctttcgatttacctgaggagcgtggttggcattaacataacaactcaagtctgttttacagttacgaaccttcttgcgtcaggaaactcaaaagggaagcatgcacagttcttatgtgacatgtgccagttctatagagactggcatgccgaatccgatggctttgatggaattttcctccatgatcctgtgagcttcactgccctagttcaccctgagtacttcacgttcaagaagggtgttgtgagagtagaaacccagggcatttgcactggtcacactttaatggaccaaggattgaaaaagtggaattcagagaatccatggtctggctacaagccaatctcagttgcatggacagttgatgtgccaaatgttctcgcattcgtgaaggaactcctcatggctccatgagcgattttacgcctatttcttgtgcttttggatacacaagcaaatttgacaaatacagagttgtgattagatcctggaaaccggaagctttctattcccctatgaataagaagatatggttgttttgatttcttgagttcaagtctggtggctcaaaacaacctggttccacctaagaacagaataaggactggtttgttctgggctagtaggcatcagacctgaggaccaaaacaatctgttatcttattatatgtaataggaggattagaagtttgcttcctagctacaagcaaaatatatgtagtaaattgaaattctgcatacgaaagacagcattattacaaactgtttcagacatttgtgccacagatatacatttcaaattcggaaacaaaataaaaaaaaaaaagctacctgcattacaggatgatggtcctgctactgatagttatggccgattctcaaactcggaccggggtttcaggaacagacggtccaggggtggtggctcaagaggcgggcggggtggttgggactctgatggtgaagacagatttcgccgtggtggcaggagcttcagatctgacaatgatagttggtcagatgatgactttggtggcgggagaagatcgaaccgttcgtcatcctttggtggccgcgggtcatcttacggcagtcgtagctcgtcatcctttggtggccgctcatcatcttttgggtctagggacagcagcaggagcttcagtggtgcttgcttcaactgtggcgaaagcgggcaccgagcatcagactgcccaaacaagtagatggtagaaacaacactcttccctgccgctcgggagttgctccttctgggcttgatcatttccaacaagcggctggactattcaacacatgccaaggaacaccaaagcccagtcccccttcatctgatccatacatgcccaacactattgcctgacgaagattttgcactggttagtacagctctgtgtcgtcattccgtcgtgaagattttggcacgctgaccaccaaaggagagccttctgttcatttatatgtaatacgggttttacagggacgttaaatttttgttaccacctgggagttctcaataggatgttaagattaaatgaaccgtgtgtacagctcgttcctacacgactggactggctgatgccatcagaaactgttcgcgccaattagaatcactgtccaatgtcaaacaactttacaaaaaaaaaaaaaaaaaagttggcaccggggccccaccaagaaacctgcagcccgggggatccacta

SEQ ID NO: 79027 - DNA, 852 bp, Oryza sativa
  Clone ID: PAT_MRT4530_78777C.1
atggcggcctatcaggactccccacctatcagacgccacatatctccacctctgatcaagaggttgacaggagagttcgagagtgatggagataaatatccacatgagcctacggtggcttgcttagcctcctctattgctcagttgcccgctgagaaccgaaggcttaaagacaacgtggtagagggacatgtcgagcttgccgagctcaaggatgaccttgcttccctcctattggtatttgagaggcgggtggtggccaggagcccaggaggccactacgggcgaggcgaagcagcacccctcgtcagcgcggcagatcttgaagatggtgatgctaaagccctcatgggccttgtagaagatgcggacggtgggcacagagtcattgcggggtgcgttggcactgccgccgacataggcctcaccgccctaggggacgatcttccaacactgggaagttgtgcacctcctggaactccgtcgctggtgccgctgccaagcaggggcggatcccacaattccgaatacccatcacataaatcctggatccgccactgctgccaagctcaccacccgggatcgtgttggctcctcgtcgacggcgccatcgactcccgcctccatcaccagccatcggatactgtccaccgtgccaccatggaccagtctccaccgccgcgctgttcccagcgccgctgttctaggacgccgcctggacttcaccactgccctggggggctggcctcgacgcttcttcaccgcctacaccggctgcccactgttggccaccgggtcgctgctcccgacggcgccatcgactctgctgatgtcctccccaccactttttaa

SEQ ID NO: 79028 - DNA, 1188 bp, Oryza sativa
  Clone ID: PAT_MRT4530_78778C.1
atggccgcacatgtgctctacttcaagcaatttcgcctccggaggcggtgggatgtggtcgtggaacgggataggaagcgacgcgatgttgccgcaggacaactaaacgttggtgtggtgggagaactcggaggtgaagttggaggtggtgcggatgcggatacggctcaccgacttggtgaagaaccacgtgagcatgaagcgtgagctggtgcgcgtcagcccggtgaaccgcctcctccggagcttcccccgcaccctcaactcactgttccggacgcatctcgcagtcgagccgggcgtccagtagctcgtgcaccaaggccatcgccgatgccaaggtgctcttccagcgtcgccgacgcctttccatctcctgagagaccccgacagcttgggcgccgcgtacgcgccgttgaatttcgagaacatatttgtatggttgaattgtgatgagaaaattgacgtcgttcttatatgtgagcgagaggcgcggtcgatggcgggagactggactagcgcgagaggcgcgtctggtggtggaggaggccggcacggcgcgatgaggcgcggccggcggtaaatgaggcgaccacggtgtgagtaggagtggccggggggtgtggcgtggtcttcggcgcacgaatgctggccgacgggggcgccggtgcagtggttccacatgtcagcagaggttgagcagtggtagagcatcggtgcgtcagccatgaacttgcaggtgatgagcggcgggtgaaaacccagcccggccatcatggatgctccgtcaccctgatttgtgccatcgttgaaaagttcattggcccgctgccgctgaagagcggagcgcctgcagcccgctccggatggatgccacgtggatgacctagggattgaacggttagctcggcccggctcccggcgctgcgtgacgaggatgcaaatggcttggctccaggcgcagacgcggctttcagcctcgccgacggctcgattcaacgcagatcgtgtctcctcgcctggatatcggctacatcgacgaccgtctttctgttcctgttccaggcggccgccgccggcgagccgcagcgccaggcaattgatcccgcggcgcgtttggatgctggctgcgactgtacccgtcttccaatttctggcggccgccacggacgaaacgcaatacttcat

SEQ ID NO: 79029 - DNA, 1566 bp, Oryza sativa
  Clone ID: PAT_MRT4530_78779C.1
atggctgatgtggagggccaacagcctcgctaggttagtgctgtattccgggtacaagaccggtttgccaatgtgagtttggggaaagtgcctgagccaggaagcgtgctttggactgatgggcttctatctccttgtgagctcattaaaggtcatacgcagctggttcgccacatttcctggccgactgttgatagcatgcagaagtaagaggtccgtgtggatattaagcgggaaatgagtattgacgggcggtgtggcgcctgcatgagactagcagagcgcgatgtggtggagaatccccgccaggcgcagtttgctaataatccgtcgctgttcaaacatatgacgttacatgtcagggcaatcctgaagaacaagttgctaacgtgagtatggggaaagatcatgtgccaggaagcgagctctggatcgaagggctcatctgttctttagacctcggaaagaatcgcaagaaggtgtgtctacacaatagatgaccttcgatttatagcatgcaggcgaaagaggtcacttagcataggagggggcctacaagttgaaatgggcggcatatcagacggaatgcaaaaccatgaagaggaagacgtacccattgtccgtcagtcttagttagcacagaactctcttctgaccgcaatgcatgtcaaaggcccttcatccaatataaatgtgataagagtggctggtggcggggtggtgttttctgtaatcgctggcctttttcgaataaatgctgatggcgtaactggaccgcagaatactccatacgcttttggcgattacacagtacttctcttctttgtaggcttcgtccttattggggtaggactaatctatctggggtttcacaatccagtgactcacgagaaggacaaggtgaggaagatcgagctccagatcatattgaatcaagaaatcagaaggttagcaacacaggtaatcagagttaaatggtctctgcatgcaagggaagagatcataattgagctccttagacatttgaggggaaataccacaagagttatcttagatagcattagaaaggacacaagagaaatgttggaggagcaggaagctgtccgtggccgcttgttcactattcaggatgttatgcaaagcactgttcgagcatggttacaaccaggttttgctcttctccaggatagaagccttcgtatcacccacaatttggctatttttgggggtggcggcatggttttatccataatcactggcctttttggaatcaatgttgatggcataccgggagcgcagaatactccatacgcttttggcttgtttgcaggacttctcttctttgtaggcttcgtccttattggggtaggaatactctatcttgggttacaaaatccagtgaccaatgagaaggtcaaggtgaggaagctcgagctccaggatcttgtttcagcgttccagcatgaagcagaacagcacggcaaggtgagggaaggtctcagccggcacagctcgtctcctaagtcatcatcggcctctaatgtagactacgttctaatttcttaa

SEQ ID NO: 79030 - DNA, 2081 bp, Oryza sativa
  unsure (1)..(2081): unsure at all n locations
  Clone ID: PAT_MRT4530_7877C.1
tttttttttttttttacnccaaaaatccgataaaacgggcgtgttccagtttttcttttttttttttttttttttttaatgcaacataatcgactataaatataggcatatacatataagcataggtagattacacaccaaacaacctgtatcaccattgacaacgactcacacgcctctacacagtcatcacaaagccaacctgcccaaagctgcactagaagagacgccatatgcacagttagtcacacacacgcacgcacaaaggcacaaaagccacaaaggcaaaccgaggaaatggaagcatctgctacgccgagaagaagacggagacaggacgatatgcatcctcacagtgagccagccaaccaccgccactataaaacgttacattattgtccgtggctttattcgattcgcgcaggcgtttgtagggccggaaaacttgtatagtagatcatcatatatggtgatagctgcagaagaaaacgaattatatatgggccatggactggagctgtgtggaggataaaatggtcaataggtaattgagtccgtgatggttggtgttcatcattggcctccggtgtacacacatgagccatagctggggttgtcagaggtgagcgtggcggaggagcggaagtcgcagttccaggggtggcggccggcggcctggtagagctggttcatggcgtaggcggcgtgggcgcgcaccgtgttgggctcgaagcacgcgccaccggcctggatggcgccgcagtccacgcccacctgcgcgcacgcgtagtccaggtcggcctgcaggtccgcctccgtcgcgccggcgctcgccacgcaccacccgccgccgccgcccctcggctgctgctgcgatgccccgccgttgctcgggctcgccgcgccgccggacgacgacgtcaggccggcgtcgtacgccatggtgaggtcggtgtggtacagcccgaacgagcgctccgacgtcgggccgggcttgaggtcctcgtcgtagagcgcgaacaggtacgtgtccacgggcttgcccggcatcagcggcgtgccggcgccggaccgcaggtgggagacgaggttggagacgtaggccctggcgttgtccgccgtggcgccggcctccccggcgtcgcccctggtcggccacccggtctccgccaccacgatctccacgtcgccgtacccggcgcgccccagcgccgacttgacggcgtccacctgcgcgtcgaacatgttggtgtacttgatcttggacccggcgtcgacgcggccggcattgggctggaagaggcagaaggccagcgtctccggccgcgggtcggactggtaggcgaagtaggggtaggggttgatcatgaatggcgcggtggtcttgctcaggaagcccaggatctgggtcagctgcggcgagatgtccgggtggaaggcgccggtggacggcgggtcggactgcgcgagcacggccatggtgttcacggtggagaacttgatcctggcggccccgtcgccggccgcggcggcggcggcgcggaggttctgcatggcggggaggagcgcggcggcgagggaggcgtccccggactcgaggacctcgttcccgacggccacgacggagatggtcgacgccggcacgaacgggagcacgttggcggcgagccaccgggacgcggcggcggggtcggcggcgagcgaggggatgtcgccgttggccacgccaaccacgagcgagatgcccgtgccggcgagcgcgcgcatgatccccggatcaacgccgtacagcctgaccttggagatggtcgtcgacttgagcagcttcgccgtctcctccggcgccggcaggttgtccgccacctcgccgtagttcaccccgatgtacgattgcgctctcgacgcggcgacgaagcagcagagcgagacggccagagccaaaaggagctttctcgactcggcctccatggattcgagctcgcgccgcgcccagagcagaaaggagaagtgtgaaagcagcagcagcagcagcagacgaacaaagaagctctggacgcggcggccaagtgtggcgtgaagag

SEQ ID NO: 79031 - DNA, 408 bp, Oryza sativa
  Clone ID: PAT_MRT4530_78780C.1
aagataacaaatgcctttaaagatttacccgataccaaacgaattttacgtgagctatgtttattaccacaactttgtcatcctcatttgattcaattgtataacatagtacgtcctgcacgattaagtgctttagatgatatttatttggtaacagatctaatggaaatggatttacatcgtgtgattcattcctctcaaacgttatcagatggacatgttgcctatatcatgcgtcaaatctttcgtgcattacgatatttacattctgcagatattttacatcgtgatttaaaaccttctaatatcctcattacaagcacttgccatattaaactttgtgatttaggattatctcgttatgttaattttgcgacacccaccgagcaaaactttgtcccacttacg

SEQ ID NO: 79032 - DNA, 348 bp, Oryza sativa
  Clone ID: PAT_MRT4530_78781C.1
atgtgctgggggccggcgcggagggagcaaaccagcagcgacgcgtgctcggaggaggctgtggtggatccagcagtggttgggtgtacgagccgtggatccagcggcgtcgaggcatgcgggcgacggatcccgtggcggcgggtcggcgacggcaacacaacggtggtctcaaggacagtgggtcggttggcgagcttcggcgccgagctgtcaccgctcgtcctttgcgtgtcggcctcctccttcctccgcgcacgtgatgccgttgcccgccctccgcacgccggcgaggttgctattgtacctgctctcacaacgctcacgggcgacacgatcaatgagtga

SEQ ID NO: 79033 - DNA, 3042 bp, Oryza sativa
  Clone ID: PAT_MRT4530_78782C.1
atggcacggggctccgcactgctcgatggtagcgtgctgccgccttcctgcatcgtgagcgagaggcaggccgggctgccgcgccgattcatgccggaatctgccaccggccgggaggtggtcgcgctgggcaagggatgcccggcgccagactacccggggcggtccgtcttcttcctctcttttgcaatggcggggctggtcccgccattctctatttttttcatggatattctggagttttatgatctccagatggcgcaccttacccccaacgcgataatgacgttggccatcttcgcgcacctgtgcgagatgtttatcggggtgcgcccatctctccggctgttccggtggttcttcaccgtacagccggtgtcgccgccgacggtagtcggtggctgctacttccagccgcgggggcaggtgctgaaccgctacattccctgcgtcctccgcaaaaagtgggacgactggaagagcgattggttctacacccccctcgccgacgaagcgcgcctccgacttccgagccagcccccggcgcaggcctccagctggcgggcggcggtagatctgggagacggctacgacgccgttcttgaccgcctggtgggtctgcgatcccaggggctcacgggggccatggtgttcggcgactaccttcgtcgccggatcgcgccgctccagcggcgcgcccggggcgcctgggagtacaccgggcccgaggactacatgaggacccaccaggggcgcaaatgggactgggaccctgaggacttcaggatggtgatccaacgggtgctgaatctcagctccgtggaggcatccctcatcccccaaggggtcctccccctctgctgcgatccagagcgcgccaagatcctggccataatgcaggtggtcggggcgtcgggggagcgggccccccgaggccacgatggcgcgggcgggagccgcaggggggaacaatctaccccgggagggggtcgtgcttctgggccccttgacgggggcccggggggcagccgccctgccgacgcccgggggaagaggaagcaggagggtacccctcccccatctcctccccgagggggcggggcggtgcgtgccagcagcaggcgcccggagggtgccctgccgacgccacagcccgagggggagcgaaagaagaaacggctccgcaagatgggggggaccgagccatgccgggggaacctcatctcgcccccgaggtggtcgtttagccgacctccccgcagcgagatcccgtcgcgccccccccccctccccccccgccattccaagtccagccggtctgaggccgaggagacggcgaccgcggaggcccggaggcgggaagctgaccagcgagaagccgcggaccgcctccgggaagccgaggaggctgcccaagaggccgtccgggttcgccaggctgaggaggccgctcgggaggaggccagactccgccgggccggggagtccgtccgggaggcagaggcggcccgcgcgcgccaggcgacctgccaagcccccgacccgactccgcccgaggcgacgacgacttccgaggctacccacgacgaggccgcgggcgcgccgctcgggcccgacccctcgggcgacgcttgggacaagccagcttcgggggacgccctcgagtccagctcgtcgatcggcgggccgagccgcgcggcacccacaccgaggcggctctcccctctgccttccgctgccccactgagcgcggagcccctcctgcaggccttggccgccgcgaacagcacggtgctggacgggttaagtgcccagatggaggccctgcaggcggagcgggcggagctcgacgcggcgtgggcgcgtgtcgaggaggggcggcgctcggtggaggccatggtggaggcgggccgcaaggcacaccgccggcacgcctcacagctcgaggcccgtcgtagggacctggcggagatcgccagggaggtggaggaggagcgggagactgccctcatcgccaccgccgtgcttgacgaggcgcgggacgacctccgcctccaatacgggagccgggcggcggagctagaggagaagctcgacgccgcccggggagtccttgacgccgccgctgcccgggaacggcgggcggcggagaacgaggcggcgtcccggcagcgcgaagaggcccttgaggctcgcgccacggcactggaggagcgcgcccacgccctggacgtgaaggagagagacctggcggaccgcgaggccgccgttgccacccgggaggcaacactggcggcgcacgaggccgcctgcgccgaagaggagtccggactctgcctccgcgaggacgcgctcaccgagcgggggcaagctctcgaggaggccgaggccgcggcgcagcggctggcggacagcctgttcctccgcgaggcagcgcgggaggagcaggcgcgccgcaatctggaaggcgcccgcgccgagagggccgcactggatcagcgggccgctgagctcgaggcgcgggcaaaggagctggacgcgagagcgcacagcggcggggcggccgcgggccacggcgacctagccgcatgcctcgcagccgctgaacacaccatcgccgagctgcagggcgcgctggactcgtccgccggggaggtcgaggccctccgcatggcgagcgaggggggcctcgcccagcgcctctcagagatggccggggccctcgagcggctccccgaggagctcgaggagacgatcaagtcatcctcgagggacctcgcccggggggcggtggagctcgtactggcaagctaccaggccagggaccctgacttctccccatgggcagcgctggaagagttccctcctggaaccgaggacggcgcgcgcgcgcaggtccgggacgccgctgaccacatcgtccacagcttcgagggtacggcccctcggctcgcattcgcgctcgactccgacgaggagggcggtgacgacggtgcggacgacagcgacgacgaggccggcgacccgggcgcgtcggagtga

SEQ ID NO: 79034 - DNA, 833 bp, Oryza sativa
  Clone ID: PAT_MRT4530_78783C.1
actagtggatccccgggctgcaggcacaaaaccccccctcctctcctcctctggctccctctgccacccagccaccacaggatggcatcctcctcctcacctccactcctcctcctcgtctccctcctcgccgccgtcgccgccgccttcctcgcggcgcaagctctcgcccaacaccaaccccaaggaaatgatacggcggcggcgggggaggggtggaggccgaggctgaggaagacgtacgtggagggcggcgccgccgggatggtgccgcggcggcggaggctggtggggaggttccagatatgcgcggtgtgcacctgctgcgggggcccgcacggggtgtgcatcccggcgccctgctgctacgccatcaactgcaacatcccgaaccgccccttcggcgtctgctccttcaccccgcgaacctgcaactgcctcaactgccacctctagcagatatgcagcacagcacatcagccaagaaaatcaggcaagaaaccccaagtaaaagaaaaaaaacagtaatgcttaatgctgcttttaatctctttgtttttttttctcttcctgatttggctttggtgggtgccaatccggcatgtgctcagctgatgtttgtttgggggtggtgcgtcgcttggatcatatagttagtagttgtagtgagtggaaatattggtagctatgagtagctttgtgatggatggatggatggatgttttttggttagtttttttttccccattttggggggtgactggttaatgtggtgcctattgaattgtggatataattaattagtatcttggtaaaaaaaaaaaaaaaaaaaa

SEQ ID NO: 79035 - DNA, 3144 bp, Oryza sativa
  unsure (1)..(3144): unsure at all n locations
  Clone ID: PAT_MRT4530_78784C.1
atggcgcggggctctgctctgctcgacggcagtgtactgccgccttcccgcatcgtgaacgagaggcacgtcggactgccgcgccgcttcatgccggagtccgccaccggtcgggagatagtgatgctgggcgaggggcgcccggcaccagactacccggggcggtccatcttcttcctcccctttgcaatggctgggctggtcccgccattttctcacttcttcatggatgtcctggagttctacgatctccagatggcgcacctcacccccaatgcggtgatgacattggccatcttcgcacacctgtgcgagatgttcattggggtgcgcccctctcttcagctgttccggtggttcctcaccgtgcagtcggtgtcaccgccgtcggtggttggcggctgctacttccagccgcgggggccggtgttgaaccgctacatcccctgcgtcctccgcaagaagtgggacgactggaagagcgactggttctacacccccttcgccgacgaagcgcgcctccgacttccaagccagcccccggcgccggtctccagctggcgggcgccggtagatctgggggaggagtacgacgccgtcctcgaccgcctggcgggcctgcgatcccaggggctcaccggggccatggtgttcggcgattacctccgtcgccggattgcgccgctccaacggcgcgcccgaagcgcctgggagtacactgggcctgaagactacatgcggacccaccagggagccagatgggattgggctcctgaggacttcaagatcgtagtccaaagggtgctgaatcttagctctgcggaggcgtctcgccttcctcaggagatcctccccctctgcatagatcccgaccgcgtctccattctaaccattatgttgggggtcggggcctcagaggagagagcccctaagggccacgacggcgcgggcgagagccgccgggggaaacaatctgccccaggagggggtcgtgcttctgggccccgcgtcgggggctcggggagcagccgtcctgccgacgccccggggaagaggaagctgggaggaacacctcccccatctcctccccgagggggcggggcggcgcgtgccagcagtcggcgcccggagggggccgcgccgacatcgcagcccgagggggtgcgcaagaagaagcggctccgcaagacgggggagacggagccatgccggggaaacctgatttcccctccaaggtggtcattcacccgtccccctcgcagcgatgtcccgtcgcattcctcccgccaccccaagtccggccagtccgaggccgaagatccagcggccgcagaggagcggaggcgagagtctgaccggcgtgaagccgcagcccgccttcgggaagctgaagaggccgcccgggaggtcgcccgggttcgccaagcggaggaaactgctcgggaggaggccgcccgggctcgccaagccgaagaagctgcccgggaggaggccgcccgggctcgccaggctgaggcgacagctgctgctggcgcgtcacttgggcccactccctcgggcggccctcaggcgacatcctccgaggcggctcgcgacgtggccgcgggcgcatcgcctgggcctacctcaccgggcgacgcccaggaccaaacgggcccgggggacatccccgagctcagcgcgtcctccggggggccaagccgcgtcgccttttctccaaggcggcttttctcctcatcttccgtcgccctggtgagcgccgagcccattatgcaggccttggccgccgcaaacaccgcggtgctagatggatttagcgcccaggtggaggccttgcgagcggaacgagcggagctcgaggccgcatgggcgcgcgtcgaggaggggcggcgctcggtggacgccatggtggaggtgggccgtaaggcccaccgccgccacatctcggagcttgaagcccgcaaggcggcgctggcggagatcgcccgagaggtggaggaggagcgagaggccgccctcatcgccaccaccgcgatggtcgaggcgcaagacaccctccgccttcaacacgcaagctgggaggcggagctgaagaacaagctcgacgccgcccaaggggttctcgactccgccgctgtccgagagcggcgggcaacggaagccgaagcagcgtcccggcggcgcgaggaggccctcgaggcccgtgccatggcgctggaagaacacgccggcaccgtggagaagggcttcacggaccgcgaggccgccaccgctctccgggaggcgacgctggcggcgcacgaggccgcctgcgccgaggaggagtccgcgctccgccttcgcgaggatgcactcgctgagcgggagcgagctctcgaggaggccgaggccacgacgcaacggctggcggatagcctctccctccgcgaggcggcgcaagaggagcaggcgcgccgcaaccttgaatgcgtccgtgccgagagagccgcgctggagcagcgggctgccgacctcgagacacgggagaaggagctggccgcgagggcgcgcatcggtggggcggctgcgggcgaaaacgacttagccgctcgcctcgcggctgccgaacacaccgtcgctgacatgcagcgcgcgctggattcctccaccggggaggtcgaggcccttcgcttggcgggcgagatcgggcccgacatgctttgggatgcggtctcccgcatgaagcgcgccggtcggcaagcaggcctctggagagaccagacgacggtgccccccaccaatctggaaggcctcgctccgcacctcaacaggatggcttgggtcctcgaacgactccccgaggagctcgagaagaccatcaagtcatcctcgagggacctcgcccggggggcggttgaactcgtgctagcgagttaccaggcccgggaccccaatttctctccctggatggcgctggaggagttccctcccgggaccgagnacgacgcgcgcgcgcgcgtcggggatgctgctgaccacatcgtcaacggcttcgagggctcggcccctcggctcgcgttcgcccccagctccgacgaggagggcgacgccagcggcgaggacgacggtggcgacgaggccagcgacccgggtgcatttgaatga

SEQ ID NO: 79036 - DNA, 1926 bp, Oryza sativa
  Clone ID: PAT_MRT4530_78785C.1
atgccgtgcgcgcgcgccgaggacgcgctgccctccgccgccatcgccgccctcgagatgccatcctccgccgccgccgccgcagcagcaggcggtctgatccagaaggtgggcggcggccggagatcgggcgggtcggggcgggcgttgcatcggtcggcgcatctgtcggcggaggacgacggccacgcgccgccgccggcgagctgcagcaaggatgataagatcggtggtggtgggaagagagaagggagccagaggagcaggatgaggaagtacaggtcgcagctcgagcaggaagtcaagaaattacagaggcagctcgaagaagagattgatttgcatgttgcgctggcagacgctgttatgcaaaatgctggacctgtactgaactcctctgtgaagattccatacaaggcacaagaattactaactaacattgcctccttggaaagtgccgtatcgaagcttgaaaaggacttaaatgaactatattaccagctttgtcatgaaaggaatgaaaggttacttgccgaaagtaaaccagggtgcttgccatctacatccccagatcactcattgtcaacttgcacgtgcacatgggaagaacacatatcatcattgagagatttaaagtttggaggatctgagtcaatgaggtcaacacaacaagatttatactctgaacttgaatatgaacaagatgttggagaagatcctgaggagagacaaatggtttctctaaatagactatttgaaaaacaccgggatgtttctttaaatagacttctggaaaaacaccgggatgaagagatgcaagaatcttgctctactgataaagaaggcgaagaagatgagaagattgatactctatcatttgaacaatccatactaaagataactagcatgaaattagggaatctttggaacaatcctaaccagctctcagaggagatggttcgttgcatgagaaacattttcctccgtctatctgaatcctcgaagatgttaccaaaggaatcttctgattgttcatcttcctcagcagaacgtctttctggttctacactggcatccttctcagattcatccatcattccctcaatgctacgaagtccttcagttgactcgaatcgcaatgatgagatgacaactgaagccagcaactttgatccatataaagttaatgggaaggaaagccgaagagatattggaaattatcattcagcagctgaagtatcttggatgtctgttggaaaggagcaacttgaatatgcatctgaagctctaaaaaaattcagatttcttgtggaacagctatcaaaggttaaccctaatagtatgaactgtgatgagcggctagccttttggattaatttgtacaatgcactgattatgcatgcatatctagcatatggagttccacgaaatgatatcaagcttttttccctaatgcaaaagtccttgatgctagctcttaacaagttcaaaattactgaggagcacaagaaatactcgattgatgggacagaaccccttgtgttgtttggactcagctgcggaatgttctcttcacccgccgtgaggatcttctctgcagcaaatgtccgtcaggagcttcaggaatctttgagagactatgtccaagcgtctgttggtataagcgaccgagggaaactgctaatcccaaagttactgcagagctatgccaaggggaatgtcgaagattctttgctcgctgactggatctgccatcaccttacacctgatcaagttgcagtcatccgagattcttcttcacagcggaagcagcggcttcttggagcacgcagttttactgttgttgcattcgactcaaaattccgctatctgttcttgcctgacagcagtggctcccagaagccagaacccaaacggacttcgtga

SEQ ID NO: 79037 - DNA, 2664 bp, Oryza sativa
  Clone ID: PAT_MRT4530_78786C.1
atggcacggggctccgcaccgctcgatggtagcgtgctgccgccttcccgcatcgtgagcgagaggcaggccgggctgccgcgccgattcatgccggaatctgccaccggccgggaggtggtcgcgctgggcgagggacgcctggcgccagactacccggggcggtccgtcttcttcctctctttcgcaatggccgggctggtcccgccattctctaatttcttcatggatgttctggagttttatgatctccagatggcgcatctcacccccaacgcaataatgacgttggccatcttcgcgcacctgtgcgagatgtttatcggggtgcgcccatctctccggctgttccggtggttcttcaccgtacagccggtgtcgccgccgacggtagtcggtggctgctacttccagccgcgggggcaggtgctgcaccgctacattccctgcgtcctccgcaagaagtgggacgactggaagagcgattggttctacacccccctcgccgacgaagcgcgcctccgacttccgagccagcccccggcgcaggcctccagctggcgggagacggtagatctgggagacggctacgacgccgttcttgaccgcctggcgggtctgcgatcccaggggcttacgggagccatggtgttcggcgactaccttcgtcgccggatcgcgccgctccagcggcgcgcccggggcgcctgggagtacaccgggcccgaggactacatgaggacccaccaggggcgcaaatgggactgggtccctgaggacttcaggatggtggtccaacgggtgctgaatctcagctccgtggaggcatcccttatcccccaaggtgtcctccccctctgcagcgatccagatcgcgccaacatcctgatcatcatgcaggcggtcggggcgtcgggggagcgggccccccgaggccacgatggcgcgggcgggagccgcaggaggaaacaatctaccccgggagggggtcatgcttctgggccccgcgacgggggcccggggggcagccgccctgccgacgcccgggggaagaggaagcaggagggcacgcccccccatctcctccccgagggggcggggcggtgcgtgccagcagcaggcgcccggagggtgccgtgccgacgccgcagcccgagggggagcgaaagaagaaacggctccgcaagatgggggggaccgagccatgccgggggaacctcatctcgcctccgaggtggtcgtttagccgacctccccgcagcgagatcccgtcgcgcccccccgccattccaagtccggccggctgaggaggccgctcgggaggaggccagactccgccgggccggggagtccgtccgggaggaggaggcggcgcgcgcacgccaggcggcctgccaagcccccgacccgactccgcccgaggcgacgacgacttccgaggccacccacgacgaggccgcggacgcgccgctctggcccgacccctcgggcgatgcttgggacgagccagcttcgggggacgcccccgggtccggcacgtcgatcggcgggccgagctgcgcggcacccacaccgaggcggctctcccctctgccttccgctgctccactgagcgcggagcccctcctgcaggccttagccgccgcgaacaccacggtgctggacgggttaagtgcccagatggaggtcctgcaggcagagcgggcggagctcgacgcggcgtgggcgcgcgtcgaggaggggcggtgctcggtggaggccatggtggaggcgggccgcaaggcacaccgccggcacgcctccgagctcgaggcccgtcgtagggacctggcggagatcgctagggaggtggaggaggagcgggagactgccctcatcgccaccgccgtgctcgacgaggtgcgggacgacctccgcctccaatacaggagccgggcggcggagctagagaagaagctctacgccgcccggggagtccttgacgccgccgctgcccgagaacggcgggcggcggagatcgaggcggcgtctcggcagcgcgaagaggcccttgaggctcgcgccacggcgctggaggagcgcgcccgcgccctggacacgaaggagaaggacctggcgggccgcgaggccgccgtcgccacccgggaggcaacactggcggcgcacgaggccgcctgcgccgaagaggagtccgcactccgcctccgcgaggacgtgctcaccgagcgggggcgagctctcgaggaggccgaggccgcggcgcagcggctggcggacagcctgttcctccgcgaggcagcgcgggaggagcaggcgcgccacaatctggaaggcgcccacgccgagagggccgcactggatcagcgggccgctgagctcgaggcgcgggcgaaggaactggacgcgagagcgcacagcggcggggcggccgcgggcgacggcgacctagccgcccgcctcgcagccgccgaacacaccatcgccgagctgcagggcgcgctggactcgtccgccggggaggttgaggccctccgcttggcgaacgaggtagggcccggcatgcttcgggacgccgtctcccgtctagactgcgccgggcggcaggcgggcctctggggcgggcggtacgcgaagtacgccgccaaccaggggggcctcgcctag

SEQ ID NO: 79038 - DNA, 333 bp, Oryza sativa
  Clone ID: PAT_MRT4530_78787C.1
atgggggagctccccaaaatggacctagaattcaggaggcttgtcgacgaagaggaggagctcaacgaggacgggggttgcggtcggggtgaccgtgcaccacgcggcgctgtcggcctccccctgctgctcttggagatgtggtccgccgccaccgcttcgctgtcgcgctcacccaccgctgctcctgcccgtcaccgcgctcgaccgccgccgctccaatcccacgttcgcccaccgtcgctccgcccgccacccgccgaccaccgccgcgctcgcttgccacccgccgctagcctcctcaataaagaagagaagatagaaaagaaatag

SEQ ID NO: 79039 - DNA, 2694 bp, Oryza sativa
  Clone ID: PAT_MRT4530_78788C.1
atgggttccgtctccggcatcgatgacctcgtcttcccttccgggcaggcgtttcggttcggcagcctcgacttcatcaccaacgacttcggcaagatctctctccttgactcggatccaaaccagtcgggaaagaaccaggtctcagtcccgttcggtattacgaactcggccaagatctactccaagcttatctcgatcgagtcggcttcaaaccactcggacgagatcccatctactccgacaccgccagatcaagatgatggggcctacccgccaatcctgatgaaactccccgacgatttggctgccatcttcactacaagggcgtcttctccccgtaggcctaggcggaagtcggcttcaacaccgatcctgcctagctccagagaagtcggcgtcatactccagccactcggcatgatttcgacggatcaactggaaggctacttcagctcccccggcgtcgactcacgaccaacagagatcgtggagtacgacgaattcggctaccgctatgacaaccgcgacctcgacgacttcgacgagagctttgaagacaattacacccctctctacttcggcgtcttcatggccgataacgagacggaagaacaacgccaagcccccggcttcaagccgactggaatcgagaagtatgacggcaccactaatccggagtcttggcttaccgtctacggtcttgcaatccgcgcagcaggaggagacagcaaggccatggcaaactacttacctgtggccctagcggattctgcccgatcctggctccatggattaccccatggtacgattggatcatgggcagaacttcgtgaccacttcatcgccaacttccagggcacctttgaacgccccggtacacagtttgatctctacaacgtcattcagaagtctggagaatcccttcgagattacatccgacgcttctctgaacaacgcaacaagatctccaacattaccgacgacgtcatcatcgccgctttcaccaaaggaattcgccacgaagatctagtcggcaagttcgggcgcaagcctcccaagacagtcaaacagatgtttgaaaaagccaacgagtatgccaaagccgaagacgccattatcgcatccaagcagtcgggtcctacttggaagccaaagaaagatgtgccgactacgggaggaggtggaagtaacaatcacaaggactgcaagcgtaagcccgaggaactcgtcgcgactactacacactcttctcgacaacgttcgcgcgtcaacacttttgacaagatcatgaactcccaatgtctgcatcatcccaactccaaccacgcagctaaagattgcttcgtctacaagcagtttgcagagcaatatgccaagaatgcacggaagacccctgacggagaacaaagtacgtcgaaaaagaaggatgatgatgatgatgccccgacaggttttcaagatcaccgcaaggagctcaaccatatctttggcggccctctagcttacgaatctaaaagaaagcaaaagctgactgaaagggagatcaatgatgttcagtccgatacgccccaatatcttcggtggtcggagataacaatcaagtttgaccgctcggatcatcctgaccgagtggtccacccggggcggtaccccctggtactagacccagtggttcgcaacatcaagcttcgcagatctctcatcgatggtggtagcgcactcaatatcctcttcgccaaaaccctagacgacatgcagatcccgcgcaccgagttaaagccgagtaatgcacccttccatggagtcatcccagggctatcggcaacaccactcggccagttcactcttccggtcacttttggtactcgggagaacttccgcacagagaacatcagcttcgaggtcactgatttcgagacagcgtatcacgccatactcggacgcccggcgttagccaagttcatggccgtcccgcactacacctacatgatgatgaagatgcctggtcctcgaggagtcatatccctacggagcaacatcaagcaagccgtcacatgtgacaaggaaagttgcgagatggctcaaacccgcgagatcgcgattgctcaagaagacatccgactggctgcaaccacggcaagcgagggagaagtgcctacagccaagatctcaaagagtggagaaagcgaagccaagaccaagaaaattcccctagatccttctgatcctactaaaactgctgtgataggcgccgagttagattatatctttgcgtggaaaccatctgatatgcctggtattcctagagaggtgattgagcactctttgcacgttaaggaagatgctaaacccatcaaacaacgactccgccgctttgcacaagacatgaaggacgcgatcaaggaggaattgaccaagctgttagcagcaggcttcatcaaagaagtcattcatcccgactggctggctaacccagtcctagttcgaaagaatactgggcaatggcacatgtgtgtcgattacaccgacctcaacaagtcttgccccaaagatcctttcgggctgcctcgcattgaccagatccgattgaaggaatccgactgcttgaagacttcgttcattacgcccttcggggcctactgctacttcaccatgcctttctgtaacgccccgattttcgttcgggattaa

SEQ ID NO: 79040 - DNA, 607 bp, Oryza sativa
  Clone ID: PAT_MRT4530_78789C.1
gccacaacagcagccggcgccgccgccttctcctcctccctggtcctcctccgccaccgggcgcttggccgccgcgctcctcctcgtatccaccatctccgcccccctcgctcgctcgcatcgacgcgctgtcctcgtcgccgtcgcggtccgagaggggaggggagagacctcaagctcgccgatggagggggggggagagagctcaagctcgccctgccgccccgctgtcgccgttgagctcgcgccttgctcgccgatgcctcccccctcacgcgcagctgcggtcggcgacacctcccctcgggccgcggccggcaacaccaccccccgcacgcacacagcgccgccgtcctcctctcccagtcgtcgctgctcaagtcgagctcaccctgccgccgtcgagctcgtgtctgccccgctcacgccgagctcgccaaccccggtcggcaacacctccccccgcgcgcgccgagctcgccgacgcctgcccttgtacctgccgccgccccccctcttcgcccccgctcccgtgtcgaccggcggaggcacaggagagaaaaaaaggaagaagggagaaaaaaaaagaaggaagcaaaaaatataa

SEQ ID NO: 79041 - DNA, 1125 bp, Oryza sativa
  Clone ID: PAT_MRT4530_7878C.1
atggctcccccaatcgccgggaacggacgcgccaactccggccaccttccatggccgccggccgtgtttcccgtcgccgttccgccctctcccatgcccggctccctcccctccgctataaaacggaatcccctcgctccgttctatcgttttatccccctcccgcgatctcccgtggtctctagccacctccccgccgtcgtcccctctctcccgtgccgccggccgtcttcagccgcccctgccgccgcgtcagcacgccggccggccgtgccgtcgcctcctccagcgtcgcagccgcctcctcttcgccggcctaccatctgtttcccgcgaagacctccggaagtgcatccccaccggcaacagtggcgttgccgccactgttccgcctccggccgcctctgccgcgtcccttgtgcgccggccgacgtcgccaccacctctcccggcaccggaacgccatcctcttccccggccaagccacggcgtcgcccgtatttcgccggaacgccgtcgcgcgcgccgcctctccctcggtctcgtcggcagcccctttcgccgtgccagtgcgccggccgacgtcgccgtctccacctccggcatcacagcggcaaggtcgccctcggcctcgcctccccttcgaccgaaccgctccgcggtccatcgtcgtcgtctccgttcgttctcctcgtcgacgtcccgtcggtctcccggctcgtcgtctcgctgcgcctccaccgtcatcgtcatcgcagcggcgtgttccacgccgtcctcgtctccgtgcagctgctgctagctgtccctcgtcgcctcctcgccggccccggtcgctgcagccccgtcatcgtcttcgtcctcgcctccgcgtcgtcaagcctcgtgccggccgtgtctcgccttcgttcaaggatcgccgccgaagtcgttccctcgccgtccgtctccgccgcgtccgttcgtcgttgtctttcccacgcctcgtcgcgtggtggtaaggatctctcctctcgctgccccgtcctcgtcctttcagtgtcgccccgtacccgttgtgcggttgtcaaccccggccgtgtggtgtctagtggagtccgtttgtcggccactcgcctcggttga

SEQ ID NO: 79042 - DNA, 533 bp, Oryza sativa
  Clone ID: PAT_MRT4530_78790C.1
ccaagggccgtgtcccaggggttgcaacgttgtccaacacacatatggcaagtacagtgtttcatacggtcgagcttcagccagcggacatgctgcttattatgaccaacatacactatggcaagttgtaaagaaggcaacataagagaaggatgtggctggacaatgtgcattgcaaggccaaatgcctgaactgctaatgggtaagccaacaatgtggcaggaaagagtgtgccatctgtgccagtgctgctccacaaatggatgttctagccaaatgcatatcgcatctcaagagaagaggctgcaggaggctcaagcataacagaggagatgagttcaggtgcattcactccaatgccaaatacaagagctaccaagacgtttataatcggccagatcctgcttagtcggcttgcggataaagaataactaaataaataaattccaacaattgttttctgctatgtacatgtccatctttcgactaatgatgataaaccctctctttaccgttaaaaaaaaaaaaaaaa

SEQ ID NO: 79043 - DNA, 3057 bp, Oryza sativa
  Clone ID: PAT_MRT4530_78791C.1
atggcacggggctccgctctgctcgatggtagcgtgctgccgccctcccgcatcgtgagcgagaggcaggctgggctgccgcgccgcttcatgccggaatctgccaccggccgggagatagtcacgctgggcgagggacgcccggcgccagactacccggggcggtccgtcttctttctcccttttgcaatggcagggctggttccgccattttcttctttcttcatggatgttctggagttctacgatctccagatggcgcacctcacccccaacgcggtgatgacattggccatcttcgcgcatctgtgcgagatgttcattggggtgcgcccatctcttcggctgttccggtggttcttcaccgtgcagtcggtgtcgccgccatcggtagttggtggctgctacttccagccacgggggccggtgccgaaccgctacatcccctgcgccctccgcaagaagtgggacgactggaagagcgactggttctacaccccccttgccgacgaagtgcgcctccgacttccgagccagcccccggctcaggcctccagctggcgggcgccggtagatctgggggatagctatgacgccgtcctcgaccgcctggcgggcctgcgatcccaggggctcacaggggccatggtgtacggcgactacctccgtcgtcggattgcgccgctccagcggcgcgctcggggcgcctgggagtacaccgggtccgaagacttcatgaggactcaccagggagtgagatgggactgggctcctgaggacttcaagatattggtccaacgggtgctgaatctcaactccgtggaggcggccctcattccccaaggaatcctccccctctgcagcgatccagaccgcgcctccatcctgaccattatgatggcggtcggggcctcagaggagcgagctccaaagggccacgacggcgcaggcgggagccgccggggggaacaatctaccccgagagggggtcgtgcttctgggtcccgcgacaggggcccggggagcagccgccctgccgacgcccgggggaagaggaagcagggaggaacacctcccccatctccccgagggggcggggcggcgcgtgccagcagcaggcgcccggagggggccgcgccaacatcgcagcccgagggggagcgcaagaagaagcggccccgcaagatgggggagacagaaccatctcggggaaacctcatttccccccccctaaagtggtcgtttaaccgaccccctcgcagcgagatcccgtcgcgtccctcccgccattccaagtccggccagcctgaggccgaggatccggcggccgcagaggcccggaggcgggaatctgaccggcgagaggccgcggatcgcctacgggaagccgaggaggccgacgaggcgatggcgacttccgaggcagctcgcgacgaggccgcgggcgcgtcgctcgggcccactccctcgggcgacgctcaggcgacaacttccggggtagctggcgacgaggctgcgggcgcgtcacttgggcccactccctcgggcgacgctcaggcccaaccaggtccggaggacatccccgcgtttggcacgtccatcggcgggccgagccgcgtggcatcttctccgaggcggcttttccccacgccttctgctgccctactgagcgcagagccccttctgcaagccttggccgccgcaaacaccacggtgttggacgggttaagtgcccaggtggaggccctgcaggcagagcgggcggagctcgatgccgcttgggcgcgtgtcgaagaggggcgacgctcggtggaggccatggtggaggtgggctgtaaggctcaccgccggcacatctcggagcttgaaacccgtaagaaggtgctagcggagatcgccaaggaagtggaggaggagcggggggctgccctcattgccaccaccgtgatgaacgaggcgcaggacaccctccgccttcaatacgggagctgggaggcggagctagggaagaagctcgacgccgcccagggggtgcttgacgctgccgctgcccgagaacagcgggcggcggagaccgaagcggcgtcccggcggcgcgaagaggcccttgaggcgcgcgccatggcgctggaagagcgcgcctgcgtcgtggagagggatctggcggaccgcgaggccgccgtcaccatccgggaagcaacgctggcggcgcacgaggctgcctgcgccgaagaagagctcgcgctccgcctccgcgaggacgcgctcaccgagcgggagcgagctctcgagggggccgaggccgcggcgcaacagctggcggacagcctgtccctccgcgaggcagcgcaggaggagcaagcgcgccgtaatctggaaggtgcccgcgccgagagggccgcactgaaccaacgggccgctgagctcgaggcgcgggcgaaggagctggacgcgagggcgcgcagcggcggggcggccgcgggcgaaagcgacttagccgcccgcctcgcagctgccgaacacaccatcgccgatctgcagggcgcgctggactcgtccgccggggaggtcgaagccctccgcttggcaggcgaggttgggcccggcatgctttgggacgccgtctcccgcctagattgcgccggtcggcaagtgggcctctggagagggcggaccgtaaagtacgccgccaaccagggaggtctcgcccagcgcctctcgaagatggccggggctctccaacggctccccgaggagctcgagaagacaattaagtcatcctcgagggacctcgcccaaggagcggtggagctcgtcctggcgagttaccagaccagggaccccaatttctctccatggatggcgctggaagagttccctcccgggaccgaggaccgcgcgcgcgcgcaagtccgggatgccgccgaccatatcgtcgacagcttcgagggctcggcccctcggctcgcgttcgcccccaactccgacgaggagggcaatgccggtggtgcagacaacagtgacgacgaggccggcgacccgggcgcatcggattga

SEQ ID NO: 79044 - DNA, 1158 bp, Oryza sativa
  Clone ID: PAT_MRT4530_78792C.1
ttaccaaactacccattctactattccgcttttataatatagctgcctcttcgtcttcttcttccccaatttccccttctcctctccttctcttcccgctttgcttcccaatttctccacgccaccgagcaattcgtgagagggagaagggatcggaaaccctaaccctagcggtgggagcccccatggatgcgcggatgcggtgagcgggggtggttttcttggtgggtgaggcgaggtggttgggggtatgggtggggggaggaggaggaggagcgcggcgatggcgatggagggggaggtggagggtggtgggaggaggcgggtggtgcggatcatcttccgcgacgaggacgcgacggattcgtcgagcagtgaggaggagggggagggggaggtggtggcggcgaggcgggtggtggtgaagcggacgcggctgcggtgccaggaggtggagaggaggttcaccggcgtgcggcggcggccgtgggggaggtgggcggcggagatccgcgaccccaaggagaacgggcggcgcgtgtggctcggcaccttcgacaccgccgaggccgccgccgccgcctacgacgacgcctgcctccgcctccgcggccccggcgccgccctcaacctcccctcccgccgctgcgtcgctcccgctccgcctccaccgcctcctccgccgccgccgacggccgaggagaagaagctgctgctgttcccgccgccgctgcctccgaggaagaaggcgatgctattcccgctgccgctgccgccgaggaagaagccgctgctgtacccgccgccgctgccgccgaagaagaagccgctaccaccaccatcaccaccgccacagccgccgctgccggagaaggagaacaccccgctcccgccgctgctgctgcctccaaagaagaagccgcttccgccgccgtcaccgacagcggcagcgaaggaggagcccatcgagctcgagcatgcggcgccgccgccgcctttcgtgccccggccggtgtggcccctcctggccagcggcggcggcgggaagcggaagaagcagtcgggctgcggcggccgcatccccgccctcaacaccgccgccgccgccgtcgaggagaccggccgcgcctgatcctcctcctcgcctaccgccctctg

SEQ ID NO: 79045 - DNA, 358 bp, Oryza sativa
  Clone ID: PAT_MRT4530_78793C.1
aaggttaatttttggtaaaaaccgaacaagccgatcaattttattattgttaaattcaaagcacaaaagatggcctgatttttaaactacttattcatgcgacagtgcaccccctgggctgtttccaaatttccattattactttaaaacttatacaggtattgtaaaacctgcaggaacccataaaggtcaccatactcatctcacataaatccaacatagggtcattctgtggcatttaacttaagcttttcaccagactcatcgacactgttatcactttaaaggacaacggattttgtgagggcaaatggacgggtaattgctttctaccccacctagataacttagatttttt

SEQ ID NO: 79046 - DNA, 4839 bp, Oryza sativa
  Clone ID: PAT_MRT4530_78794C.1
ttaatgaacatttaatataaattctattattaatttattaaataatttataaatcctgaaacgaaaatcaggatgtgacactggccgagtaacttcagcaattataaacggtccttcccataagggagataatttatgccgatcctgtgtggtttgaattttcctcagaaccaggtcgccgactaaaaaggctcgcgatcgaacattccgattatgataacggcgcaacccttgcaaataccgagtcgactgaattaaagctgcttcacgggcttcttctaatcgattgatgtcgtctactcggccctcttcataacgctcctcgttgaagttccaaaatcgtagtgattcaaattccacttcacttggcaacattgcttctgcaccataaaccaaaaagaacggcgactggccggtagcccgactgggagtagtgcgtaaagaccaaagtacggacgacagctgattgacccacttgccagcatagggacgtagtcggtcgaaaactcgtgcttttatcccttgaagtatcatgccattagcacgctcgacttgtccgttactcatggtgtgtgccacggtggcatagcaaatttttataccgaagtcttcacaaaagtctttaaatgctccgccagtgaattgagtgccattatcagtgatgatccgattaggtaccccaaaccgatgcacaatgttaatgaaaaaatatctagctttatctgccgtaatcgtgatgaccggtttagcctcaatccatttggagaatttgtcaatagccacaaagagatgcatgtaacccccgactgcccttttaaacgggccgaccatgtcaagcccccagaccgcaaacggccaggacaacgggatggtttgcaactcttgggctggtaggtgaatttgtctggcaaaaaattgacaaccctcgcacgtccgcacaatcttgtcagcatcagatacagctataggccagaaaaaaccttgccggtaagctttgccgacaatagtccgtgcagcggcatggttaccacaaataccagaatgtatatccttcaacaattgtcttcttgccttgagtatccatggcttcaattgtctcttttctgggcacggttggttcgtaaagatgttcaacgaacacatctgatctgaaggagctgcttcccgttttgaaccaaaattggccagcctgtcggctgcctcattgttatgtcgaaggacatgggtgagctcgagtccatcgaatttgtcttccaacttgcgtacctcttgtcgataagcggtcatagtatcatctagacaggaccactctttcatgacttgattaacaaccaactgagagtcccctcggacaattaatcggcgaatgcctagagagatggcaatccttaatccatggagtagcgcctcgtattccgccacgttatgggacgcagaaaaatgtatccacaatacgtagctcaatctttctccaatcggggagattaaaacaaccccagctccagtgcctgtaagcctcttcgacccatcaaaatgcatagtccaatattccatcttttcctctggcatgtcttcttggcactcggtccactcggcaaggaaatcagctaaagcttgtgacttggtcgaagttcgtggtttgaacgatatgtccaaagacatcaattctaaggccaacttcgcaatccgtccgtttgcttcgcgattatgaagtatatccccgagtggaaacgatgtgaccaccgtgaccgagtgactttgaaagtagtgagataatttcctgacggtaattaagacaccatataataacttttgaacctgaggataccttgtcttggagtcggctaaaacctcgctgacaaaataaattggtcgttggactttttgaatatggccttcctcttcatgctcaacaaccaggatcgtgctcacaacctgggaggtcgccaacacatataacagtagcggctcttgtggatgcggcgaggccaaaactggtggagtggtgagaagtctcttgaagtctttaaaggctttttgtgcttcgggtccccactgaaaattgtcagtcttcttcagcagcttgaaaaagggcatcccccgctcgccgagtcgtgagacgaaccggctgagtgccgccatgcaaccagtcagcttttggacgtctttttgggagcttggcggtttcatgttaaggatggcgttgattttctccgggttggcctgtatgcctctttgagatatcataaattcgagcaacttccctgacggtactctgaagatgcacttttcagggtttagtttcatcctgaaagcatgaatgcttgtaaaagtttcctctaaatctgtgatcaggtcatccttctgcttggtcttgacgactacatcatcaacataagcttcaacattgcggccgatctgagtcgagaaatatctctgaatcatgcgttgataggttgctcctgcgttcttcaatccaaagggcatggtgatgtagcagtaggccccgaagggtgtaataaacgaggacttcaagcagtcggattctttcagtcgaatcaggactgggttagccagccagtctggatgaaggacttccttgatgaagcccgctgctaacagcttggttaattcctccttgatcgcatccttcctgtcctgtgcaaaatggcggagtcgttgcttgatgggtttggcgtcttccttaacatgtaaagagtgctcaatcacctctctaggaataccaggcatatcggatggtttccatgcaaagatatctttattattttgaagaaaggtgatgagcgcgcattccggaagagtgatctggccgagtggtgtagctgataatcctgggataacaccgtggaaggatgcattactcggctttaattccgtgcgaggaatctgcatatcgtccagggtcttagcgaaaaggatgttgagtgcactgccaccatcgatgagagttcttcggagcttgacattgcgaaccactgggtctagtaccagggggtaccgccccgggtggaccactcggtcgggatgatccgagcggtcaaacttgattgctatttctgaccaccgaaggtattggggcatgttgggctgaatcacattgatctcccgttctgttagcttctgctttctcttagattcataagccagaggtccaccgaagatgtgattgagttctttgcgatgatcttgaaaaccagtcggggcatcgtcttcatcgtctttcttctttgatgtgccttgctctccgtttgaaggcttaagtgcattcttgacgtattgctccgcaaattgtttgtagacgaagcagtctttggccacgtggttggagttaggatgatgcggacattgggagttcattatcttgtcgaatgtgttgacgcggggacgttgtcgggaagatggagaggttgttgccacaagttcttcgggcttacacttgcgatccttgcggttgttacttccactccctcctgcggtcggcgtgtccttctttggcttccaagtggtgcctgactgcttggacgccgtaatagcatcttcggctttggcatactcgttggctttttcaaacatctgcttgaccgtcttgggaggtttgcgtccgaacttgccgactaggtcctcgtggcgaatgcctttagtaaaggcggcaatgatgacgtcgtcggtgatgtcggagatcttgttgcgttgctcggagaagcgccggatgtaatctcgaagggattctccagacttctgaacgacgttgtagagatcaaactgtgtgccggggcgttcaaaggtgccaggcagatagtttgccatggccttgctatctcctcctgctgcgtggattgcgagaccatagacggtgagccaagactcagggttggtggtgccgtcatatttctcgatttcagtcggcttaaagccggctggccaatccactcgacgcagatcgcttgtgaaggcagcaacgccgtccacatcatcgtcataacgatctggtgaatggtggcctcttgctgcgcggcgctggttgatggtgtcgcgaagatcgatggggcgccttcgatgtggggagtgtggtcgttcaactcgacgctccctatatcgttcgggaggcgaacgaacagaccgttcatcatgtcctctgctcctgcgactagatccggcgccggcaatgctgaggcttggctggtgatagtcttgagatcgaagatgagggacttggctactagtcggggtgcgggtgcttgcagagttggctggaaccgaggcagcgatcatggtcttcgtgctgtagtcgttctcgctcctgtcgctgtcgctcttcctccagtcggcgacgttcagcttcttgccgtgcgcgatcttggtccgcttctcgggctcggcgctgttcctccgtttcgttggcagccatgaatacgccgaagaagaggggcgtgtagttatcctcatagctgtcgtcgaagttgtcgaggtcgccgtggtcatagtggtagccgaagtcgtcgtagtcgaggatcttggttggtcaagaactgacgccgggggagctgaggtagccatccatctcttccgtcgagactgtcccaagaggttggagtataacgccaacctccctggatctagactagatcggggccgatgccggagctcgcctagatctccgagtgggagatgttttggctggtctctccccgactggttcgaatccgagtcaaggagagagatcttgccgaagtcgttggtgatgaagttgaggctgccgaaccagaacgcctgcccgggagggaaggcgaagttgtcgatgccagaaacggaacccat

SEQ ID NO: 79047 - DNA, 6088 bp, Oryza sativa
  Clone ID: PAT_MRT4530_78795C.1
agaggaaaatacaaaatgtaatgcctaagcataacaacgacggagatgttcaatgttccgagagttgtcgacatgagtaccgtcttcacgtttgagtcggtaagaacctggccgagtaacctcagaaattatgaatggcccttcccataagggagataacttgtgccgatctcgcgtagtttgaatttttctcaaaaccaggtctccaactaagaaagcacgtgatcgaacattgcgattgtgataacagcgcatcccttgtaaataccgagccgattgaattaaggctgcttcacaggctcctccagtcggttgatatcatctactcggtcttctccgtagcgctcctcgctgaaattacgaaatcgcagcaactcaaattccgcttcgcttggcaacatcgcatctgctccatagactagaaaaaacggcgactggcccgtggccagactgggtgtggtgcgcagggaccaaaagatagatggcaactattctacccatttgccagcatagggatgtagtcggtcgaaaactcgtgtttttattccttgaagtaccataccattggcacgttcgacttgtccgtagctcatggggtgcgctacagaggcataacaaattttgatgccgaagtcctcacaaaaatctttaaatactccgccagtaaactgagtgccgttatcagtgatgatccgattgggtaccccaaaccggtgcacaatgttgatgaagaaatctctagccttgtctgccgtgattgtgatgaccggtttggcttcgatccatttggaaaacttgtcaacagctacaaagagatgaatataaccaccgacagcctttttaaacgggccgaccatgtcgagcccccataccgcaaacggccaagacaacaggatggtttgcaactcttgagccggtagatgagtctgccgggcaaaaaacggacaaccctcacatgttcgcacaattttgtcagcgtcggatacagctgtaggccagaaaaaaccttgccgatatgccttgccaactatggttcgtgcagcagcgtgattgccacagatgcctgaatgtatatcctttagtaattgttttccctcctccaaagacacacagcgttgcaagattcctgatggacttttcttgtacagctcggtctcatgtacaacataaagtctgctacgcctggagatccgctcggcttcgtctttatcttgagggagttcttgtttggtcaaaaatcttatgaagggctctctccagtcggcttcaatcatgtttacgtctcaggcgtccgtggccttgtttatttcttaatttggtacgatcggctcataaagatgttcaacgaacacgtcggaaggagctgtttctcgttttgagccaaaattggccagtctgtcggctgcctcattattatgtcgaagaacgtgggttagctcgaggccatcgaatttatcttctattttgcgtacctcctgccgataggcagtcatgttatcatcaaggcaggaccactctttcatgacttgattaacaaccaactgagagtctccacgaactatcagatgccgaattcctaaggagatcgcaatccttagcccgtgaagaagtgcctcgtatcccgccacattgtgagacgcagaaaaatgtatccacaatacgtagctcaacctctctccagtcgggaaaattagaacaacccccgctccagtgcctgaaagcctctttgacccgtcaaaatgcatagtccaatgctctatcttttccgcaggcgtgtcttcttggcacttggtccattcggcgacgaagtctgctaaagcttgggacttgatcgaagttcgcggcttgaaggatagatccaaagacatcaactctaaggcccactttgtgatccgcccatttgcttcgcgattgtgaagtatatccccgagtagaaatgacgtaaccaccgtaaccgagtgaccttgaaagtagtgagataatttcctgacggtaatcaaaacaccacataatagcttttgaacttgaggatatcttgtcttggagtcagccaaaacttcgctaacaaaataaattggtcgttggactttttggatatggccttcctcctcacgctcaacaaccagaactgtgctcacaacctgggcagttgccgacacatatagcaacagcggctcttgcggatgtggcaaagccaagaccggtggagtagtgaggagtttcttgaagtcttcaaaggctttttgtgcttcgggcccccactggaaattgtcagttttctttaacagcttgaagaagggcatcccccgctcgccgagtcgtgagacaaaccagctgaacgccgccatgcaaccagtcaactttagaatgtctttctgagagctcggcggtttcatgttgagaatggcgttgattttctccgggttggcttgtatgcccctatgggataccataaagccaagcaacttccctgacggtactccgaagatgcacttttcagggtttaatttcatcctgaaagcgcggatgctcgcaaaggtctcttctaaatccgtgatcaaatcatccttctgcttggtcttgacgactacatcatcaacataggcttcaacgttacgaccgatctgagttgaaaaacatctctggattatgcgttgataagttgctcctgcattctttaacccgaaaggcatggtgatgtagcaatagaccccaaagggtgtaataaacgaagtctttaaacagtcggactcctttagtcggatctgatgatatcctgagtagcaatccaaaatgctaagtagttcgcagctggccgttgagtcaactacctggtcaatgcgaggtaacccgaagggatctttgggacaagacttgttgaggtaatcaacacacatgcgccattgccccgtcttcttccgaactaggattgggttggccagccagtcgggatgaatgacttccttgatgaagcctgctgctaacagcttggtcaattcctccttgatcgcgtccttcctatcttgtacgaaacggcggagtcgttgcttgataggtttagcatcttccttaacatgtaaagagtgctcactcacctctctaggaataccaggcatattagatggtttccatgcaaagatatctttattattagcagtcttagtaggatcagagggatcaagaggaatcttcttggtcttggcgtcgccttctccgctctttgtcatcttggttgcaggcacttctccttcggttgctgtggacgcggccagtcggatctcttgtcgggcgagcgtgatctcgcgggtctgggccatctcgcagctttccttgtcgcaagtgacggcttgcttgatgtcgctccgcagggatatgactcctcggggacctggcatcttcatcatcatgtaggtgtagtgtgggacagccatgaacttggctaacgccgggcgtccgagtatggcatggtacgctgtctcgaaatcagcaacttcgaagcaaatattctctgtgcaagagttctcccgagtaccgaaagtaaccggcaaagtgctctggccgagtggagtagaagacagcccggggatgacttcgtgaaagggcgcgttactcggtttcaattccgtacaagggatctgcatgtcatccagagtcttggcgaaaaggatgttgagtgcactgccaccatcgatgagggatcgtcaaagcttgacgttgcgaaccactgggtctagtaccagggggtaccgccccgggtggaccactcggtcagggtgatccgagcagtcaaacttgatagctatctctaaccaccaaagatattggggtgtgccgggctgaacagcattgatctcccgttcggtcagcttttgctttcgtttggattcataagccaagggtccaccaaagatgtggttaagttccttgcgatggtcttgaaaaccagtcggggcatcatcttcatcatccttcttctttgacgtgctttgatctccgtcattcgtcttgcgtgcgttcttggcgtattgttctgcaaactgcttgtagacgaagcaatctttggccgtgtgattggaatttggatgatgtggacattgggagttcatgatcttatcaaaagtgttgacgcgcgaacgttgtcgggaggatggtgtagtggttgccacaagttcctcgggcttgcacttatgattcttgtgattggtatttccactccccccctgtggtcggcatatctgtcttcggcttccaagtagtgcccgactgcttggacgcggtaatggcatcttcggctttggcatactcattggctttttcgaacatctgcttgaccgtcctgggaggcttgcgcccaaacttgccgactaggtcatcgtggcgaatgcccttagtgaaggcggcgatgatgacgtcatcggtgatgtcggagatcttgttgcgttgctcggaaaagcgccggatgtaatctcgaaaggattctccggacttctggacaacgttgtagagatcgaactgagtgccagggcgttcaaaggtgccttggaaattggcgatgaagtggtcgcgaagttccgcccaagatccgattgtgccacggggaagcccgtgaagccaggaccgggcagaatgcgctagtgctacaggcagatagtttgccatagctttgctgtctcctcctgctgcgcaaattgcaagaccgtagacggtgagccaagactcagggttagtggtgccgtcatgcttctcgattccagtcggcttgaagccggccgaccaatccactcgacgcaggtcgcttgtgaatgcagcgactccatccacgtcgtcgtcgtagcgatctggtgaatggtggggacgtagcctctcgctgcgcggcgctggttgatagtttcgcgaagatcgatgggacgcctgcgatgcggggagcggggacgttcagctcgacgctccctgcgtcggtcaggaggcgagtggacggatcgctcgttgtggtccctactcctgcgactagatccggcaccgacggcgctgaggctcggttggtgatagtcttaagatcgaagaggggggactcgactgccagtcggtgtgcgaatgcttgcggagttaatcgggaccaaagttgcgatcatggtcttggtctggttcaagatgttgacgacgtgattggcttgattgagtgcgtcttccatgaggagggtgtcgaggagggtgatcgctgcaaccgcgtctgttgaggagtgtgaaaaaccgcagttcccttgacgtcttgctgcccaatgagttctcgtgctcgtcacctggcatccaaggcgcgttgtcgccggtcctcagcctcctttgcagcccgttcgcgctcctattgctcatgctgcagccgttctcgctcttgtgcttggcgctcctcttcgagtcggtgtcgttcggcttccttttgtacgcattgttcttctgcttcccgggctttacgctgttcttccgtctcgttgtcggccatgaaaatgccgaagtagagaggcgtgtaattatcttcaaagtcttcgccaaagtcgtcgaggttgcggtagtcgtagcggtagccgaagtcgtcgtactcaatgatctccgttggccgtgagtcgacgccgggggagctgaggtagccatccagttgttccgtcaaaactgtgccgagaggctagagtatgacgccgacttccttagagctagactggatcggggccgaggccggatcccgcctagacctacgggaagaagacgcccttgtggtgaagacggcagccaaatcatcggggagtttcatcaggattgggggataagctccatcgtcttgatcatgtcgtgttatagtagattggatctcgtccgagtggtttgaggccaactcggctgagatgatcttggggtagatctaagccgagttcggaataccgaacggggcagagacctagcctcttcccgactggttcgaatccgagtcgaagagagaaatcttgccgaagtcgttggtgatgaagtcgaggctgccaaaccagaacgtctgcccgggtgggaagacgaagtcattgatgccggagacgaaacccat

SEQ ID NO: 79048 - DNA, 460 bp, Oryza sativa
  Clone ID: PAT_MRT4530_78796C.1
tgtccgactttttttagatatagatttgagtcttcgagaacacggcttccttcttcggaattttgtcggaaatttgacggaaattaccgataaaaaacggttaccgacaaaacggtcggaaaaaagcccatatcatttccgctaacatttccggaagagattaccgttttcatttccgacaccgacaatttccgataccgactgaaacggtcggtgcaaaccggaaacggtagccggaattcttggatatttccataccgttttcacccctacctcggtgagcacaatgcgccggtaatccgcccgagctttctgccatgtaccagtagcgaccactcgtgagttcaggggaaatttcaatgcaagccttgttctgtttttctttgaagaatgtgttgaagtttaacacgaccggggcactctggttatatttgtgtttggagtaaacattgtaagccat

SEQ ID NO: 79049 - DNA, 5355 bp, Oryza sativa
  Clone ID: PAT_MRT4530_78797C.1
atgggtttcatttctggcatcgacgacttcgccttccctcccgggcaggcgttccggttcggcagcctcaacttcatcaccaacgacttcggcaaaatctctctccttgactcggactcaaaccagtcggggagagaccaggtcctcgtgccattcggtattccgaactcggccgaggcctactccaagatcatctctcccgagtcggcttcaaaccactcggacgagatccaatctactcttccgcgaccagatcaagacgacgggccctatccctcaatcttgatgaaacttcctgatgacttggccgacgtcttcacagccaaaacatcttccactcggagatctaggcgagctccggcatcggccccgatccagtctagatccagggagatcctcgactacgacgacttcggctaccactacgaccacggcgacctcgacaacttcgacgacagctatgaggataactacacgccccttttcttcggcgtattcatggctgacaacgaaacggaagaacagcgccgagcccgagaagcggaccaagatcgcgcacggcaagaagctgaacgtcgccgactggaggaagagcgacagcgacaggagcgagaacgaatacagcgtgagcaacaagatcatgaacgggttgcaaaggaggctgaagatcgacggcaacgcgccttggaatccgggcgacgagcgagagagctcattgggcaacaagacgtcgacgggacagcgacgaagaccatgatcgctgcctcggttccagccaactccgcaagcatccgcaccccgattggtagccgagtccctcacctccgatctcatgatcatcatcagccaagcctcagcatcaccggcacaggatctagtcgcaggagcaggggtcacgacgaacgatctgttcactcgcctcccgaacgtcacagggagcgccgagctgaacggcctcgccctccacctcgccagcgtcccgtcgaccttcgcgacacgatcaaccagcgccgtgcagcacgagtcggctttaagccgaccggaatcgagaagtatgacggcaccactaaaccggagtcttggctcaccgtctacggactcgctatccgcgcagcagaaggagacagcaaggccatggcaaattatctacctgtggccctagcggactccgcccgatcctggctccacggactaccccgcgacacgatcggatcatgggcggaacttcgtgatcacttcatcgccaacttccagggcacctttgaacgccccggcacacagtttgacctctacaacatcttcgacatcaccgacgacgtcatcatcgccgccttcactaaaggcattcgccacgaggacctagtcggcaagttcggacgtaaacctcccaggacggttaagcagatgttcaaaaaagccaacgagtatgccaaagccgaagatgctatcaccacgtccaaacagtcgggcaccacttggaagccaaagaaggacacgccgactgcaggggggagtggaagtaacaaccacaaggatcgcaagcgtaagcccgaagaacttgtagcgaccacctctccatcttcccgacaacgtccccgcgtcaacaccttcgacaagataatgaactcccaatgtccgcatcatcccaactcaaaccacgtggccaaagattgcttcgtctacaaacagttcgcggagcaatacgtcaagaatgcacgcaaacctgcagacggagatcagggcacatcaaaaaagaaagatgatgaagacgatgccccgactggttttcaagatcatcgcaaagaacttaatcacattttcggcggacccctggcttatgagtccaagagaaaacagaagctaacagaacgggagatcaatgcggttcagcctaacacgccccaatatcttcgatggtcagagacagcaattaagttcgaccgttcggatcaccccgaccgagtggtccacccggggcggtaccccctggtactagacccagtggttcgcaatgtcaagctccgacggactctcatcgatggtggcagcgcactcaacatccttttcgccaagaccctggacgatatgcagattcctcgcacggaattaaagccgagtaatgcacccttccacggtgttatcccaggattgtcagctacaccactcggccagataactcttccagttaccttcggcactcgggaaaattttcgcacagaaaatgtttgtttcgaagttgccgatttcgagacagcatatcatgctatacttggacgaccggttttagccaaatttatggccgtcccacactacacctacatgatgatgaagatgcctggtcctcgaggggtcatatcactacggagcgacatcaagcaggccgtcacatgtgacaaagaaagttgcgagatggcccaaacccacgagactactctcggtcgcgaaaagatccgactggctgcgaccacggcaagcgagggagaagtgcctgcaaccaagctgacgaagaccgaagaaagtgatgccaagacgaaaaagattcccctagatccctccgatcctgataagactgctaataataaagatatttttgcgtggaaaccatccgatatgcctggtatccccagagaggtgattgagcactctttacatgttaaggaagacgccaaacccatcaagcaacgactccgccgttttgcacaagacaggaaggatgcgatcaaggaggaattaaccaagctgttagcagcaggcttcattaaggaagtccttaatcccgactggctggctaacctagtcctggttcggaaaaagacggggcaatggcgcatgtgtgtcgattataccgacctcaacaaatcttgtcccaaagacccttttgggttacctcgcattgaccaggtggttgactcaacggccggctgcaagttactcagcttcttggactgttactcgggatatcaccagatccaactaaaagaatccgattgcttgaagacctcgtttattacgccctttggggcctactgctacatcaccatgccctttggattgaagaacgcaggagcaacctatcaacgcatgattcaaaggtgtttttcaactcagatcggtcgcattgttgaagcctatgttgatgatgtaatcgtcaagaccaagcagaaggatgacctgattgcggatttagaagaaacttttacaagcatttgtgctttcaagatgaaactaaacccggaaaagtgcatcttcggagtaccgttagggaagttgctcggatttatggtatctccgagaggcatacaggccaacccggagaaaatcaacgccatcctcaacatgaaaccgctcagctcccaaaaagacgtccaaaagctgactggttgcatggcccaccatggcggcgctcagccgtggggacccgaagcacaaaaagcctttgaagactttaagaaatttctcaccactccaccagttttggcctcgccacacccacaagagccgctactgttatatgtgtcggcgacctcccaggttgtgagtacggtcctagttgtcgagcgtgaagaggaaagccatattcaaaaagtccaacgaccaatttattttgttagaaaggttttagccgactccaagacaatgtatcctcaggttcaaaagttattatatggtgtcttaattaccgttaggaaattatctcactattttcaaagtcactcggtcacggtggtcacatcgtttccactcggggatatacttcataatcgcgaagcaaacggacggattgcgaagtgggccttagaattgatgtctttggacatatctttcaaaccacgaacttcgatcaagtcacaagctttggttgatttccttgccgagtggaccgagcgccaagaagatatgccagaggaaaagatggaatattggactatgcattttgatgggtcgaagaggcttacaggcactggagctggggtcgtcttaatttccccgactggagaaagattgagctacgtattgtggatacattttcctgcatcccataacgtggcggaatatgaggcgctactccatggattaaggattgcaatctctttaggcattcaccgattaatcgtccgtggagactctcagttggttgtcaatcaggtacgcaagttggaagataaattcgatggactcgagctcacccatgtccttcgacataacaatgaggcagctgacagactggccaattttggttcgaaatgggaagcagccccttctgatgtgttcgttgagcatctttatgaaccaactgtgcccagaaaagaagtagttgaagccatggatactcacggcgtaaacatgcttgaagccgactggagagaacctctcataaaatttttgaccaaacaagaactccctcaagacaaaaatgaagccgagcggatttccaggtgcagcagactttacattattcacgaagctgaactgtacaagaaaagtccatcaggaatactgcagcgctgtgtatctttggaggaagggagacaattgttgaaggatatacattctggtatttgtggtaatcatgctgctgcacggaccatcgtcggcaaagcttaccggcaaggttttttctggcctacagctgtgtccaatgcagacaagattgtgcggacatgcgaaggttgtcaatttttcgccagacaaactcatttgccagcccaagagttgcaaaccatcccgttgtcctgtccgtttgcggtctgggggcttgacatggtcggcccatttaaaagggcagtctgcggttacacgcatctctttgtggctatcgacaaattctccaaatggattgaggctaaaccagtcatcacgatcacagcagataaagctagagattttttcatcaacattgtgcatcggtttggggtacctaatcggatcatcactgataatggcactcaattcactggcggggcatttaaagacttttgtgaagacttcggcattaaaatttgttatgcctccgtggcacaccctatgagtaacggacaagttgagcgtgctaacggcatgatactgcaagggatcaaagcacgagttttcaaccgactacgcccctatgcttgcaagtgggtagatcagctgccgtccgtactttggtctttatgcactactcctagtcgggctaccggccagtcgccgttctttttggtttatagcgcagaagcaatgttgccgagtgaagtggaatttgaatcactacgattttggaacttcaacgaggagggctatgaagagggtcgagtagacgacatcaaccgactagaagaagcccgagaagcagctttaattcaatcgactcgatag

SEQ ID NO: 79050 - DNA, 2994 bp, Oryza sativa
  Clone ID: PAT_MRT4530_78798C.1
atggcacggggctccgctccgctcgatggtagcgtgctgccgccttcccgcatcgtgagcgagaggcaagccgggctgccgcgccgcttcatgccggaatctgccaccggccgggagatagttacgctgggcgagggacgcccggcgccacgctacccggggcggtccgttttcttcctccctttcgcaatggcagggcaggttccgccattttcttctttcttcatggatgttctggagttttacaatctccagatggcgcacctcacccccaacgcggtaatgacattggccatcttcgcgcacctgtgcaagatgttcatcggggtgcgcccatcccttcggctgttccggtggttcttcaccgtacagccggtgtcgccgccgtcggtggttggtggctgctacttccaaccgcgggggccggtgctgaaccgctacattccctgcgtcctccgcaagaagtgggatgactggaagagcgactggttctacacccccctcgccgatgaagcgcgcctccgacttccgagccagcctccggcgcaggcctcctgctggcgggcgccggtagatctgggagatggctacgacgccgtcctcgaccgcctggcgggcctacgatcccaggggctcacaggggccatggtgtacggcgactaccttcgtcaccagatcgcgccactccagcggcgcgcccggggcgcctgggagtacaccgggtccgaggactgtatgaggacccaccggggggtcaaatgggactgggtccctgaagacttcaaggtaatgatccaacgggtgctgaatctcagctccgcggaggcatccctcatcccccaaggagtcctccccctctgcagcgatccagatcgcaccaacatcctgtctatcatgatggcggtcggggcctcagaggagcaggctcctcgaggccctgatggcgcgggcgggagctgcaggggagaacaatctaccccaggagggggtcgtgcttccgggctccgagacgggggctcggggggctgccgtcctgccgacgcccgagggaagaggaacgagatctcgtcgcgtccctcccgtcattccaagtccggccaatctgaggccgaggatacggcgaccgcggaggcccggaggcgggaatctgaccggcgagaagccgcagatcgcctacgggaagccgaggaggccgcccgggaggccgtccgggctcgccaggctaaagaagccgctcgggaggaagccagactccgccaggccgaggcgacgacaacctccgaggcaacccgcgaaactgaccggcaagaagccgcggatcgtcttcaggaagccgtggaaattgaccaggtggccgtccgagctcaccaggctgaagaaaccgctcaggaggaggccagacttcgccaagccgagacagcgacgacttccgaggcagctcgcgacgaggccgcgggcacatcgcttgggaccactccctcgggcgacactcaggacaagccaggtccgggggacatccccgagcccggcacgtccatcggcgggccaagccgcgcggcatcctcaccgaggcggctctcctccacgccttccgttgccccactaagcgcagagccccttctgcaggccttggccgtcgcaaacaccacggtgctggacgggttaagtgcccagatggaggccctgcaagcagagcgggtggagctcgacgccgcatgggcgcgtgtcgaagaggggcgacgctcggtggaggccatggtggaagtgggccgcaaggcacaccgccggcacgcctcagagctcgaagcccgtcggaaagtgctggaggagatcgccagggacgtggaggaggagcggggggctgccctcatcgccactaccgtgatgaacgaggcgcaggacgacctccgccttcaatacgggagctgggaggcggagctagggaagaagctcgatgccgcccggggggtccttgacgctgccgctgcccgagaacggcgggcggcggagaccgaggtggcatcccggcggcgtgaagaagcccttgaggcccgtgccatggcgctggaagagcgtgcctgcgtcgtggagagggacctggcggaccgcgaggccgccgttgccattcgggaggtcacactggcggcgcacgaagccgcctgtgccgaagaagagtccgcgctccgcctccgcgaggatgcgctcaccgagcgggagcgagccctcgaggaggccgaggccgcagcgcaaaggctggcggagagcgcgtccctccgcgaagctgcgcaagaggaacaagcgcgtcgcaatctggaaggtgcccgcgccgagagggccgcactgaaccaacgggccgctgaactcgaggcgcaggcaagggagctggatgcaagggcgcgtagcggcggggcggccacgggcgacagcgacttagccgcccgcctcgcagctgccgaacacaccatcgcggatctgcagggcgcgctgaattcgtccaccggggaggtcgatgcccttcgtctggcaggcgagatagggcccagcatgcttcgcgacgccgtgtcccgtttggaccgcgccgggcggcaggcgggtctttggggcgggcggactgcgaagtacgccgccaaccaggggggcctcgcccagcgcctctcggagatggccgagactctccaacggcttcccgaggagctcgagaggacgattaagtcatcctcgagggacctcgcccgaggagcggtggagctcgtactggcgagttaccaggccagggaccccgatttctccccatggatggcgctggacgagttccctcccgggactgaagacggcgcgcgcgcgcgggtccatgatgccgccagccatatcgtccacagcttcgagggttcggcccctcggctcgcgttcgccctcagctccgacgaggagggcgatgatggcggtgtgggcgacagtggcgacgaggctggcgacccgggtgcatcggagtga

SEQ ID NO: 79051 - DNA, 4656 bp, Oryza sativa
  Clone ID: PAT_MRT4530_78799C.1
agcataaaaacgacgaaggtgctcgatattccacgaattgtcgacgttagaaccatcttcacgcttgagtcgataggaacccggccgagtgacttcagcaattatgaacggtccttcccataagggagataatttatgccgatcctgtattgtttgaattttcctcataaccaggtcaccgactaaaaaggctcgcgatcgaacattccgattatgataacggcgcaacccttgcaaatatcgagtcgactgaattaaagctgcttctcgggcttcttctagtcgattgatgtcgtctactcggccctcttcatagccctcctcgttgaagttccgaaatcgtagcgattcaaattccacttcactcggcaacattgcttctgcaccgtaaaccaaaaagaacggcgactggccggtagcccgactaggagtagtgcgtaaagaccagagtacggacgacagctgatctacccacttaccagcatagggacgtagccggtcaaaaactcgtgctttgatcccttgaagtatcatgccgttagcgcgctcgacttgtccgttactcatagggtgtgccacggaggcgtaacaaattttaatactgaagtcttcacaaaagtcttgaaatgctccgccagtgaattgagtgccattatcagtgatgatccgattaggtaccccaaaccgatgcacaatgttgatgaaaaaatctctagctttatctgctgtgatcgtgatgactggtttagcctcaatccacttggagaatttgtcgatagccacaaagagatgcgtgtaaccgccgactgcccttttaaacgggccgaccatgtcaagcccacagaccgcaaacggaatcttgtccgcatcggacacagctgtaggccagaaaaaaccttgccggtaagctttgccgacaatggtccgtgcagcagcatgattaccacaaataccagaatgaatatccttcaacaactgtctcccttcttccaaagacacacagcgctgcagtattcctgatggacttttcttgtacagctcagtctcatgaataatgtaaagcctgctgcgcctggaaatcctctcggcttcatttttgtcttgagggagttcttgtttgctcaaaaattttataaacggttctctccagtcagcttcaatcatgcttacgccttgagcatccatggcttcgactgtctcttttctgggcacggtcggtttataaagatgttcgacgaacacatctgaaggagctgcttcccgttttgaaccaaaattggccagtctgtcggctgcctcattgttatgtcggaggacatgggtgagctcgagtccatcgaatttattttccaacttgcgtacctcttgtcgataagcagtcatattatcatctagacatgaccactctttcatgacttgattaacaactaactgagagtctccacggacgattaatcggcgaatgcctaaagagattgcaatccttaatccatggagtagcgcctcgtattccgccacgttatgggacgcagaaaaatgtatccacaatacgtagctcaatctttctccagtcggggaaatcaagacgaccccagctccagtgcctgtaagcctcttcgacccatcgaaatgcatagtccaatattccatcttttcctctggcatgttttcttggcactcggtccactcggcaaggaaatcagctaaagcttgtgacttgatcgaagttcgtggcttgaatgatatgttcaaagacatcaactctaaggcccacttcgcaatccgtccatttgcttcgtgattgtgaagtatatctccgagtggaaacgatgtgactaccgtgaccgagtgactttgaaaatagtgagataattttcttgtcttggagtcggctaaaacctcactgacaaaataaattggtcgttggactttttgaatatggccttcctcttcacgctcaacaaccaggaccgtgctcacaaccataaatccgagcaactttcctgacggtactctgaagatgcacttttccgggtttagtttcatcctgaaagcacgaatgcttgtaaaagtttcttctaaatccgcgatcaggtcatccttctgcttggtcttgacaactacatcatcaacataagcttcaacattgcgaccgatctggtcaatgcgaggtaacccaaaagggtctttgggacaagatttgttgaggtcggtataatcgacacacatacgccattgccccgtctttttccgaaccaggactgggttagccagccagtcgggatgaaggacttccttaatgaagcctgctgctaacagcttggttaattcctccttgatcgcatcctttctgtcctgtgcaaaacggcggagtcgttgcttgatgggtttggcgtcttccttaacatgtaaagagtgctcaatcacctctctggggataccaggcatatcggatggtttccacgcaaaaatataatctaactcagcgcctattacagcagtcttatcaggatcggagggatctaagggaatctttttcgtcttggcatcgctttcttcggtcttcgtcagcttggttgcaggcacttctccctcgcttgtcgtggtcgcagccagtcggatctcttcgcgggcgagaatagtctcgtgggtttgggcgatctcgcaactttctttgtcgcatgtgacggcctgcttgatgtcacttcgtagtgatatgactcctcgaggaccaggcatcttcatcatcatgtaggtgtagtgtgggacggccataaatttagctaaagctggtcgtccaagtatagcatgatatgctgtctcgaaatcagcaacttcgaaacagacattttttgtgcgaaaattttcccccgtgccgaaggtaactagaagagtgatctggccgagtggtgtagctgacagtcgcttgcgatccttgtggttgttacttccactccctcctgcggtcggcgtgtccttctttggcttccaagtggtgcccgactgtttggacgcggtaatagcatcttcggctttggcatactcgttggctttttcaaacatctgcttaaccgtcctggggggtttacatccgaacttgccgactaggtcctcgtggcgaatgcctttagtgaaggcggcgatgatgacgtcgtcggtgatgtcggagatcttgttgcgttgttcggagaagcgccggatgtaatctcgaagggattctccagacttctgaacaacgttgtagagatcaaattgtgtgccggggcgttcaaaggtgccctggaagttggcaatgaagtgatcacgaagttccgcccatgatccgatcgtgccacggggtagtccgttgagccaggattgggcggagtccgctagggccacaggtagatagtttgccatggccttgctgtctcctcctgctgcgcggattgcgagtccgtagacggtgagccaagactccggattagtggtgccgtcatacttctcaattccagtcggcttaaagctggctggccaatccactcgacgcaggtcattagtgaaggcagctactccatccacgtcgtcgtcgtagcgatttggtgaatggcggtgacctcgcgctgcacggcgctggttgatcatgtcgcgaaggtcgacgggacgctggtgaggtggagagtgaggccgtttagctcggcgctccctgtgacgttcgggaggcgagtgaaaagatcgttcgtcgtgacccctgctcctgcgactagatcctgtgccgatgatgctgaggcttggctgatgataatcatgagatcggaagtgagggactcggctactagtcggggtacgggtgcttgcggagttggctggaaccgaggcagcgatcatggtcttcgtctgattcaagatgttgacaacatgatcagcttggttgagtgtgtcttccttgaggagggtgtcgaggagagtgattgctgcaaccgcgttctgctggggggtgcgaaagaccggttcagcttcttgccttgcgcgatcttggtccgcttctcgggcttggcgctgttcctccatttcgttgtcagccatgaatacgccgaagaagaggggcgtgtagttatcctcagagctgtcatcgaagttgtcgaggtcgccatggtcatagtggtagccgaaatcgttgtagtcgaggatctcggttggtcgagaactgacgccgggggagctaaggtaaccatccaactcttccgtcgagactgtcccaagaggttggagtataacgccaacctctctggatctagattggatcggggccgaagccggagctctcctagatcttcgagtgggagatgtcttgacagtgaaaacagcggccaaatcatcaggaagtttcatcaggattgagggataggacccgtcgtcttgatctggtcgcggaagagtagattggatctcgtccgagtggtttgaagccgacttgggagagatgatcttggagtaggcctcggccgagttcggaataccgaatggcacgaggacctggtctctccccaactggtttgaatccgagtcaaggagagagatcttgccgaagtcgttggtgatgaagttgaggctgccgaaccggaacgcctgcccaggaaggaaggcgcagtcgtcgatgccagaaacgaaacccat

SEQ ID NO: 79052 - DNA, 390 bp, Oryza sativa
  Clone ID: PAT_MRT4530_7879C.1
atggtttttctggacgaggcagggcagcagcagctgccggaggtgagggtgaacataatccacgacgacaacgacgatggcggcgacctcccgccatcgtcgctgtcgttccggtggaagacgaagaagtaccgtctgtggcgagtcccggagcaggtgcgcgccatcaacaaggaggaagcgtacgcgcccaagttcgtgtccgtcggcccgtaccatcgtcgtcacgccggcgccggcgatcgcaaccgcctctgcggcgagaagctcaagaagcgctacctccacgagctcctcagggacgtcgagcctgacgaccacaagcatggaggcatcctccaacgctgcaaaagcagcctccaggagattgtggacgatattcgttggtaa

SEQ ID NO: 79053 - DNA, 810 bp, Oryza sativa
  unsure (1)..(810): unsure at all n locations
  Clone ID: PAT_MRT4530_787C.1
tacgccacatccatccgtggcttccgtcccccgagtttactactgctccacgacgccccgctcccatccacacccgcaaccacctcgctcgctaaaaatccccacgatttgtcctcacatggccacgcccagaacggccggaactagccctcgctctcgtcgtcctactccagattgccgctgctcgacggagccagatcgtcggtagggaggaggaggaggaggaggtggtggtggtggtggtggtgtgggggtgatggatcggcagaggcagcagagctccaggggcaatgctactgcaacgaggggtggtgggtcgtcggggaagggtggtggtngttgtgtcgggaaggcggcggggaagaagccatcaaggtggtgtacatctccaaccccatgcgggtcaagaccagcgccgccgggttccgggccctcgtgcaggagctcaccggccgcaacgccgacccttccaagtacagcccccgcgcctccgccgacgacgacgacggcggcggcggcggcggcggcggcgagctggccgccgccagtgacggcgcgggagagcccgggcccggcgccgccgcggcctcgcccgacaccggcgccgcagccgccagcgacgccgccgacgccctcgtggcggcgggtcatccggcggcggcgacgttcgacgacgaaggcggcggtggcggcgggggatactacgacgacgacgacgacgacatcttcaggtcgcagctgctggacaccagctactcggtgttctcgccgccgacgctgctctacgaccacccgcacagcaaggtgtag

SEQ ID NO: 79054 - DNA, 207 bp, Oryza sativa
  Clone ID: PAT_MRT4530_78800C.1
atgacgcgggggcggcgactgagggcggcggcctcggcgcggagctgcggtgccgccgtgctggtcacccacgacccggcactccggcccggcgccaagatggagctcggctgcctcgtgcgcgccaacatcgccgccaacgacgacacccacgcctgtgcactgcagcgggaggacgacgacggcagcgccggacgagcttgttaa

SEQ ID NO: 79055 - DNA, 446 bp, Oryza sativa
  unsure (1)..(446): unsure at all n locations
  Clone ID: PAT_MRT4530_78801C.1
cgccgacacacggcgacgtggtcgccgcgcacgacgcgacacgagccgagatccccaacccaccggcggcggcgcgagcacacgatccgccccccatctccggcgccggcgatggcgatgccgtcgagcgcctccgccacggcgcggatgctcaccgtgccggcgctgctcctcctcctctcctccgccgcgctccttgtcttcctcatcctaccgtccctctccccgtcccccgccgcgcacctctgcgcctgctcgcccccgaccaccacgcacaccaccactaccgtcaccaccaccaccaccaccggctccccggcgcccgtcaccacctcccccgccgacgtcgcctggctcaagtctcagctcgcctccaactccctcccgctcctcgcctnccacgacgcatggcaccgcctccgcaagggcatcaacccccgcacccg

SEQ ID NO: 79056 - DNA, 1586 bp, Oryza sativa
  Clone ID: PAT_MRT4530_78802C.1
ttaaaaatggtgttaaacagggtggagttatctctccttgcatgttctgtttgtatctagatgggctgatagaagagttatgtgacaatgggatagggtgctttatgggcaatgtttttgcaggagcatttggttatgcagatgacttgacactgctgtcacctagcgtgactgctcttcaagaaatgattaaaacttgtttagattatgccattaaatttgatattttgtttaaccctgaaaagagtcagttaatagttttcagctgtaatggtaaaccagttatggatccaggaatcacgataaatggaagacatattgatattgcatcaaaagtaactcatctagggaatgatatttctaagaatataaatgattttgatatctcaaaacaatggcgggttgcaataagaagggtttggaaaattccatggcagacacactgtcatcttttgccttatttagcaggtgttatggatccagagttatggtttgcaaaaagatgtttatcttttgttttgaaagctatgaattccaaaaattatacagtggcacatatagctggaatggccaggtatggagctcattctgtgttgggaggtaacataagattcttgaatgataagtacttcatggataacaatgaaattcaaaagcagtgggctgtgcaatgccaagtgaatgatgagacaatacgaatagttgaacaaggctcaaggccatgtaccttccagtgtgaatatatagcggactttatgaggaagaaaaaaaacttagcagtaaaggtgggcaagttgaatttgcacctacaaaagtgggaagagctaaaagtgaataagaatatgaatgtgaacagatttgtatttgtacggaagtatttacaagaacaggttaagacagcctacttaaatattagcgattcatttctaggagtcacaaagacggaaaagaaagagtggataactgatgatacttggcaagccatagataaacggaagggtgcgaaaaaacaagccatggaagcaaaatcagacatactgaaagaaagccccggctctgacaatctcaacgcagaactttttaaggcggtcccagaattagcagcaaaaatccttctgccactattcgcaactatatgggaaacaaaggcagttcctgacgattggtcagagggagttattgtaaaattaccaaagaagggatcactaaaaaactgcaataactggcgtggcatcacactattgtcaataccaagcaaaatattggcaaagatagtttttacccgtaccatagatgctgttgaccaaagcctcagaagggaacagacaggttttcggaaaggaaaaggatgcactgaccatatatttgcactacgtaatagcatagagcaattcgatagcatccacctaaacagcctttggagaatactacgtaaatatgggataccagagcagctagatcttgtaattaagagcttttacatcaatttcacatgcagagttggaaacagtaaccataagttccaggtgaagattgagataggcaaggatgtgtcatatcagcactgctcttcaatatcgccatag

SEQ ID NO: 79057 - DNA, 482 bp, Oryza sativa
  Clone ID: PAT_MRT4530_78803C.1
atgccaagattcgtgcatctgcttctctcctccaactctggcgggctccccttcttctccggtgccggcgacacccctaactccggcagggagcaggccgtgggcagcggaggaccagcggtgggcggtggactttggcgggcggcgaggcggcggcggcaccgccgaagccacggggatggaggagggcagtgggccggcgtcggcggcggggccaaagcaagcgtgcggttaggaggcagcgggcagtggttgcggatccgacggcagggagccgtcggagacagggaagatggcggggtaggggcacctcgccgtcgccgccttgaggagaaagagagggggggaagggggagaggggagggggagggggctcgccggggggcctcgctgacgccgttaactctttccgattagccggcgaggcgggcagcggcgcggtggggtggtggcggcggtggatcacgcgtgggacgggagga

SEQ ID NO: 79058 - DNA, 120 bp, Oryza sativa
  Clone ID: PAT_MRT4530_78804C.1
atgggccacgttaaggcccagtccatgccctacaggcccacagatatacatgttatatataataacttattgaaccgcggttcaaccggcggttcaccggtcagaccgtcggaccggtga

SEQ ID NO: 79059 - DNA, 516 bp, Oryza sativa
  Clone ID: PAT_MRT4530_78805C.1
tgttgtgctggcgcggtggcggaggtggtgggacctggttctggtggtgggtgccgcggtggtgaggatgaggatggtggcggcggtgatcgaggacgttgagcacgcgctgttgaccccgacggttctgctgcggggcctgtctgacgccatggtcaccgacttggtttctggcctgcgcggcgtccgccacgccatggttaagatgctcatcacctactttgacaaccttcctttcgtatatgtacaggtgttgtttttatgtattgaatctttttgttaccaactctttttgtccttacatttctatctttctgctttgattatttcttcctttcttctactctttctagtttatcttctttttatcttttctttttacttttgcttcttcctttactattggttttctccttttatcttcttcttttttctttactgctctttctctattttttttttttttccctcttttttcttattctttcttttcttctgtcatttcttacttctttt

SEQ ID NO: 79060 - DNA, 1557 bp, Oryza sativa
  Clone ID: PAT_MRT4530_78806C.1
atgggaggcgatcatgggaagctcatgaagagcttgaagggtgcagctcagaagtatctcggcgtcggcttcttgctcggcttcttccttgttctcctcacatacttcaccgtctccgagcagttcgcgatcgctgcacccaacgcaattcggaaaacatcaccgggacacgcctccccgacgatccccccgcctgtggaagagaagaggccacagctgccccctatcatagagcagcggcaagcaccaaaggcagagcatgagcatgcagcggtggtacaggagaagaccccgtcagctgaagagatagagatacagaaagaaacagaagaggaccacaccaaggagaagcccactgatgacgtcaccaccacggtggaggagagcgcgccggcgaagaagccggcgtgcgacatccaggggccatgggcgtccgacgtgtgcagcatcgacggcgacgtgcgcatccacggcgcggcgcacgacgtcgtgatcccgccgccgatcgagggcggcggcagcaacccgaacccgcgggagtggcgcgtcgtgccctactcgcggaagcacatgggcgggctcaaggaggtggcggtgcgggaggtggcgtcggcggcggaggcgccggcgtgcgacgtgcggtcgccggtgccggcgctggtgttcgccatgggcgggctgacgggcaactactggcacgacttctccgacgtgctcatcccgctgtacctgcaggcgcggcggttcgacggcgaggtgcagctcgttgtggagaacatccagatgtggtacgtgggcaagtacaagcgcgtcctggaccggctgtcgcgccacgacatcgtcgacatggacagggacgacaaggtccggtgcttccccggcgcggtggtcggcatccggatgcacaaggagttcagcatcgacccggcgcgggatcccacgggccactccatgccggagttcaccaagttcctccgcgacaccttctcgctgccgcgcgacgcgccggtgagcctcgtcgacaatgccgcggcggtgaggccgcggttgatgatcatctcgcggcggcacccgcggaagctgatgaacgtggaggaggtggtgcgggcggcggagcggatcgggttcgaggtggtgatcggcgacccgccgttcaacgtggacgtcggcgagttcgccaaggaggtgaaccgcgcggacgtgctgatgggcgtccatggcgcggggctgacgaactcggtgttcctgccgacgggggcggtgctgatccaggtggtgccgtacgggaagatggagcacatcgggaaggtggacttcggcgatccggcggaggacatgaggctcaagtacatggcgtactccgccggcgtggaggagagcacgctggtggagacgctggggcgcgaccacccggcggtgcgcgacccggagtcggtccaccggagcgggtgggggaaggtcgccgagtactacctcggcaagcaggacatccgcctcgatctcgcccgcttcgagcccctcctccgcgacgccatggattacctcaaacaccagtag

SEQ ID NO: 79061 - DNA, 291 bp, Oryza sativa
  Clone ID: PAT_MRT4530_78807C.1
atgggcggaagagggaagaagaagtcggtgctggcctcgctgttcgggttcaagagcggcggcgagaggcggcggcagcagcagcaggaggagatggcgacggctgcggcggccggaaggaagcagcagcagaggtcgtactactgcccggagcggaggaggagggtgtggccgagcgacgaggacaacgacaactactacgccgagcgtgacatcgaccggagggcctccgagttcatcgacaaggtgcatcgcgggatgctgatcgccggcggcgagcaagatggctag

SEQ ID NO: 79062 - DNA, 339 bp, Oryza sativa
  unsure (1)..(339): unsure at all n locations
  Clone ID: PAT_MRT4530_78808C.1
ctctaagtttttcccttgctcgtctgcgccgccacctcctccaccttctcttcccctcccaaccatgacggcggccgagatcgggaagcaggagggagatgagccagtcgttgttgaagatgacgatgacgatgaagatgatgacgacgaggatgacaaagatgacgatgatgcggagggaggtgatgcnagtggaagatctaagcagagtcgtagtgcaaaatacagcaggaaggccatggcgcagcttggcctgaagcctatcactggcgtgcgccgtgttactgttctcatgctttttttttcctttttgtcttcgcgccgccggctgccttcctc

SEQ ID NO: 79063 - DNA, 1866 bp, Oryza sativa
  Clone ID: PAT_MRT4530_78809C.1
aaaccaagtttctaagtttcatcataacataagtacataactgtatgagtagcaatggtacagtatctttctacacttggaatctgtagttctgtattctatatggtgaccaacaccaactatctcaagcagaatattggaagatattggtcatcatgtggaatggagggcgagagagcataaatgctatacagctctctgcaaataattagactatacatgatttcaatggggttaggtagcactgctttgataaaaattctcatttgattgtgttctgttctctcactccttgttggacactgcctctggaagtttgaatgtgggaggcttgtctgcacctttcctcgagtattctctccacctcctcgctgccgccgctgctcgctttgctctctcccttgcttcgtcctcgttctttcgatatcttgttggtgctccccagacatcactccatgagctgcccttaccagaatcttcttggctcacacgtcttctgaccttttccatccgaaacacatcaactgaacttcccatcccagctagcatcaaaccaacattcactctttctactcttcgcatttcatcttcaaggagtgaaagttgtgcagctgatgtccaatggatgcagtcaactggacaagtgtcaatagcttcttgaattagttcggcattgcctgattgattgtaaactcttgcccgaccaaaatcttcctcaatttcgaagaccttagaacacacattagcacagtttttacatcctatgcagctaaactcatcgacaaacacatgatccctaggggcactgtcatcgaagaaggggttggttgctgttgcggcatagccatgaatctcatcatacaccgctcgctggatgggatcggtaagtaccgtgtaaacttcattgatgaacatgcagaagttcgtcacatcggggtcattgccactgagatcaggatggcatgctttcatgcaattgtagtacgctttcttgatctgctgaggtgttgcatccggcataacgccaagaacagcgtagtagtcttcggcgacgccaccaccggagctgggcgactccgccgccaccgcggaaaccgtcaggaccccccttccggacgtccgccgtctccggtgccagtctctcctcctcccggccccggcgaaccttgtgattgcccatcgccggacactgccggagcagggggtgggtgtggaggagcaatggaacttggcaaccgagtcggcaagcagcggtggtgacaggagaggagccatggataaactcctgtttggttatatagtagttaataatacctatgcagctaaactcatcgacaaacacatgatccctaggggcactgtcatcgaagaaggggttggttcctcttgcggcatagccatgaatctcatcatacaccgctcgctggatgggatcggtaagccccgtgcaaacttcattgatgaacatgcagaagttcgtcacatcggggtcattgccactgagatcaggatggcatgctttcatgcaattgtagtacgctttcttgatctgctgaggtgttgcatccggcataacgccaagaacagcgtagtagtcttcggcgacgccaccaccggagctgggcgactccgccgccaccgcggaaaccgtcaggacccccgttccggacgtccgccgtctccggtgccagtctctcctcctcccggccccggcgaaccttgtgattgcccatcgccggacactgccggagcagggggtgggtgtggaggagcaatggaacttggcaaccgagtcgccaagcagcggtggcgacaggagaggagccatccgatgggaagcggcgtaccttcgatcgctccgacgag

SEQ ID NO: 79064 - DNA, 2211 bp, Oryza sativa
  Clone ID: PAT_MRT4530_7880C.1
atggcggcgggagggaaggggtgggtggagagggcgcggcgcggggtgaagacggcgtggttcatggtggccatggtggcgtcgctgctgatggcgtcggcgccggcgctggtggccgccggcgacgtggccgtcgcgctgtggctcgaggtgcggctcgggtgcctccgctgccacggcctgcgcggccacctcgagcgttacggcttccggagctcgctcgtggacataccgcttgtctccatcgctcgatccgtcgtcattacctgtgtatacctcatgtctgatgcttctgggctctcccatggcccgtaccttggaacagcaacttgctgttccctggcttctctgctcatcttgttgattaaggccagcgtttacagtccggcgcaggagattgggcctgagctctcgccgtcattggcggatcacaagctcagtctcaagaagctatcgggaatgccggtgcttttcctgtcctccttggtctttgctcttggccatgttgttgtcgcttacaggacaagctgcagggctcggcggaagctgcttatccatggcattgaccctgaatctattctggcatacaagaatgcatatcctggatgctacaagactcctcgatctcccacaccatacagtggaaaattttattctaggagtgacagtgagacgaagagaaaatctgttgctcacgacgatagggatattccaatcagtttccttgcagacggtgatagcatgttcattgcttgccaggggatcactgtgcattacaaactttccgatccatcgagttgcatatcttcagctacagacacttttccagaaatccatcatgatgttatttcagcaagcatttctcctagaagacagagacatgatagcccaccatcagcctccactaatacccgtcgtcttttgaataggagcttcagccatcaataccatcagacatcgctatatgcaccattgttggtagagccagtgacctctccaactttgtcggatgacacccctgttcttagtgttgatgatggcagtgctgatgtatgtttgaaacctatgggatttgatcttgaggctggagaacaggggaaatttgctgttgttttggtgcatgggtttggaggtggggtgttctcatggagacacgttacaaatttgctttctcgtcaagtgggttgcactgtgctggccttcgatcgccctggatgggggttaacatctcgacctcgcagaaaggattgggaagacaaaaatctaccaaatccatatgagcttggatctcaggttgatcttcttatttcattttgctcggacatgggcttacgctctgtggttttagttggtcatgatgatgggggcctgcttgccctaaaagctgcagaaaagttgcgagcatctggagattcaagaaaggttgaagtgaagggagttgtgcttataggtgtaagcttatcaagagaagtcattcctgcatttgctcgtatactcctgcatacccctctaaggaaaaagcacatggtgatcaatagacgtgcatggtttgatgctaccaagttaacaacagatgttctgaacctctacaaggctccactatttgttgaaggctgggatgaagctctccatgaagtaggacgtctttctttctcgactgtcctatcatcaaaaagagcagcagatttactaagatcagtggaagacctccctgttctggttgtagcaggctctgaggatgctcttgtttcttcgaagtcaacgcaagtaatggcttcaaggcttgtaaattctaggctggtaacgatatcaaattgtgggcatttgccacatgaggagtgtcccaaggcattgctttcggctctttctccattcatatcaggactggtgtcatcagatgattcattgcaaagattgtagcatactagttcttttcgttttgccttttgccctgtctttctgtcctctacactgagtagatctctctagttggtgtgagtttgtgtgagccaatgtagtgcagtagtggagcctgacccaaaatctcaagggttcctagagctcctctaattttttgccccatataatgatacctccgaatgatttcaattaagccagttgaatctgtacagcacaggcttgctgtgttcagttcaaaaaaaaaaaactcgagactagttctctccctcgtgccgattcctgcagcccggg

SEQ ID NO: 79065 - DNA, 400 bp, Oryza sativa
  Clone ID: PAT_MRT4530_78810C.1
aattaaacatatttcctgtttggtgcacatagaactggctgttgtaaataaatttatctgtttgattagttgttcgagcctatcatttggctgatatttagccacaccaatattagttcttattcaatactagaaaatgaggagcattgaacactgaattgcttgttatgtttatatgttgtcatgtagtcctgtaactgttatatgttgtgttgccttacccttttgcataacaactctaatttatgatataactatcctttaatagtgcctaactagcatgatgcatttgtttgtgtgtgaaactaaaagagctacaactctagtgcttttgttaatagtcggatatacagttgttattgtcataaaactgcagttaaatgtatttgaccaatgcaca

SEQ ID NO: 79066 - DNA, 642 bp, Oryza sativa
  Clone ID: PAT_MRT4530_78811C.1
atgtggctgagggaggacaaagatggagagttgagagaagagactgggaattggaaaaatagatttgtctcaccatgtttcttggttgatgatcaacagatgattaaattcatggtggatggaaaatgcaatcaactggagattaaatggctagcatttgcgtttgatcaggagatgatcaaatcaactggcacgcctttgaacccaagagcaagatttaggacttgtattggagttaagcagatctcccaggtcagtgtgtgtttttcgcatcaacacgcttttggcacgctcggtgggatgcgagttgtgacatttttcatcatggtggacaacaagcagacttctaaaccaccatctgacattggccctgacaacatcattccaataacactggataagctaacaccagaacagatgttagagtatgagcagatgatgaacaacttgaagagtcagtgcttacattcattcaagcaaactcgctcaggaacggtcatccaaaggtataaactaaagatggttcccaatgatgattcggaatcaggcacatctaaagatggcaaggctaaaggtgataaagctaataatgatgaacccaaggatgaggctgtaataccctatatattaaaagatatttag

SEQ ID NO: 79067 - DNA, 381 bp, Oryza sativa
  Clone ID: PAT_MRT4530_78812C.1
atgaagtctccactggccgacgatgacgaagagggagagaggagcttcgtcgcgaccaccgggaccgggatggcttcttccgcgtcccttccagagcgcggcatggccaggatggtggctctcctcgtcaacctcgccgacgaagctccggcggcagcggcggtcctcttcgtcgccctcgcgacccgcgcggtgctcgccgttcgccacctcgaccgccgcgacccgtgcggcactcgccgtccgccttgcgctcgccgtccgccgcctcgaccgccgcgacctgcgcgacgctcaccgtccgccggcgcaacccccgcgacccgcgcggcgctcgccgaccgctgccgagccgcgcgcgctcgccgtccgctttgctga

SEQ ID NO: 79068 - DNA, 3093 bp, Oryza sativa
  Clone ID: PAT_MRT4530_78813C.1
atggcacggggttccgctctgctcgatggtagcgtgctgccgccttcccggatcgtgagtgagaggcaggctgggctgtcgcgccgcttcatgccggaatctgccaccggccgggagatagtcacgctgggcgagggacgcccggcgccagactacccggggcggtccatcttctttctcccctttgcaatggcagggctggttccaccattttcttctttcttcatggatgttctggagttctacgatctccagatggcgcacctcacccccaacgcggtgatgacattggccatcttcgcgcatctgtgcgagatgttcattggggtgcgcctatctcttcggctgttccggtggttcttcaccgtgcagtcggtgtcgccgccatcggtagtcggtggctgctacttccagccacgggggccggtgctgaaccgctacatcccctgcgccctccgcaagaagtgggacgactggaagagcgactggttctacactcccctcgccgacgaagcgcgcctccgacttccgagccagcccccggcgcaggcctccagctggcgggcgccggtagatctgggggatggctatgacgccgtccttgaccgcctggcgggcctgcgatcccaggggctcacaggggccatggtgtacggcgactacctccgtcgtcggattgtgccgctccagcgacgcgctcggggcgcctgggagtacaccgggtccgaagacttcacgaggacccaccagggagtgagatgggactgggctcctgaggacttcaagatattggtccaacgggtgctgaatctcaactccgtagaggcggccctcattccccaaggaatcctccccctctgcagcgatctagaccgcgcctccatcctgaccattatgatggcggtcggggcctcagaggagcgagctccaaagggccacgacggcgcaggcgggagccgcaggggggaacaatctaccccgagagggggtcgtgcttctgggtcccgcgacaggggcccggggagcagccgccctgccgacgcccgggggaagaggaagcagggaggaacacctcccccatctcctccccgaggggtcggggcggcgcgtgccagtaataggtgcccggagggggccgcgccaacatcgcagcccgagggggagcgcaagaagaagcggccccgtaagatgggggagacagaaccatctcggggaaacctcatttcccctccaaagtggtcgtttaaccgaccccctcgcagcgagatcccgtcgcgtccctcccgccattccaagtccggccagtctgaggccgaggatccggcggccgcagaggccctcaggcgggaatctgaccggcgagaggccgcggatcgcctacgggaagccgaggaggccgcccaggaggccgcccgggctcgccaggccgaggaaaccgctcgggaggaggccggatttcgccaggacaaggcgatggcgacttccgaggcagctcgcgacgaggccgcgggcgcgtcgcttgggcccactccctcaggcgacactcaggcgacaacttccggggcagctggcgacgaggccacgggcgcgtcgcttgggcctactccctcgggcgacgctcaggaccaaccgggtccgggggacatccccgagtccggcacttccattggcggcccgagccgcgtggcatcctctccaaggcggctcttccccacgccttctatcgccctactgaacgcagagccccttctgcaggccttggccgccgcaaacaccacggtgttggatgggttaagtgcccaggtggaggtcctgcagacagagcgggcggagctcgacgccgcgtgggcgcgtgtcgaagaggggcgacgctcggtggaggccatggtggaggtgggccgtaaggctcaccgccggcacgtctcggagcttgaaactcgtaagaaggtgctggcggagatcgccaaggaagtggaggaagagcggggggctgccctcattgccaccaccgtgatgaacgaggcgcaggacaccctccgccttcaatacgggagctgggaggcggagctaggggaagaagctcgacgccgcccagggcgggcggcggagaccgaagcggcgtgccggcggcgcgaagaggcccttgaggcgcgcgccatggcgctggaagagcgcgcctgcgtcgtggagagggatctggcggaccgcgaggccgccgtcaccatccgggaagcaacgctggcggcgcacgaggctgcctgcgccgaagaagagttcacgctccgcctccgcgaggacgcgctcaccgaacgggagcgagctctcgagggggccgaggccgcggcgcaacagctggcggtcaacctgtccctccgcgaggcagcgcaggaggagcaggcgcgccgcaatctggaaggtgcccgcgccgagagggctgtactgaaccaacgggccgctgagctcgaggcgcgggcgaaggagctggacgcgagggcgcgcagcggcggggcggccacgggcgaaagcgacttagccgcccgcctcgcagctgccgaacgcaccattgccgatctgcagggcgcgctggactcgtccgccggggaggtcgaagccctccgcttggcaggcgaggtagggcccggcatgctttgggacgccgtctcctgcctagattgcgccggtcggcaagtgggccactggagagggcggaccgtaaagtacgccgccaaccagggaggcctcgcccagcgcctctcgaagatggccggggctctccaacggctccccgaggagctcgagaagacaattaagtcatcctcgagggacctcgcccaaggagcggtggagctcgtcctggcgagttaccaggccagggaccccaatttctctccatggatggcgctggatgagttccctcctgggaccgaggaccgcgcgcgcgcgcaggtccgggatgccgccgaccatatcgtcgatagcttcgagggctcggcccctcggcttgcgttcgcccccaaccccgacgaggagggcaatgccggtggtgcagacgacagtgacgtcgaggccggcgatccgggcgcatcggattga

SEQ ID NO: 79069 - DNA, 147 bp, Oryza sativa
  Clone ID: PAT_MRT4530_78814C.1
atgggtgcagcagtgctgcgctttgcttgcttgcgggcttcttttctcctccagatgaggcaatggatggcgtcatggcgcaggacgaacctccgtggactaaccatgttgaaccttctcctcccggacctctggtgcccgtcctga

SEQ ID NO: 79070 - DNA, 6063 bp, Oryza sativa
  Clone ID: PAT_MRT4530_78815C.1
agaggaaagatacaaacgaaatgcctaagcgtaaaatcgacgaaggtgttcaatattccaagaattgttgatgatagtaccatcttcgcgcttgagtcgataagaacctggtcgagtgacttcagcaattatgaacggtccttcccataagggagataatttatgccgatcctgtgttgtttgaattttcctcagaaccaggtcaccgactaaaaaggctcgcgatcgaacattccgattatgataacgacgcaacccttgcaggtatcgagtcgattgaattaaagctgcttctcgggcttcttctagtcggttgatgtcgtctactcggccctcttcatagccctcctcgttgaagttccgaaatcggagtgattcaaattccacttcactcggtaacattgcttttgcgccataaaccaaaaagaatggcgactggccggtagcccgactaggagtagtgcgtaaagaccaaagtacggacgacagctgatctacccacttgccagcataggggcgtagtcggtcgaaaactcgtgctttgatcccttgcagtatcatgccgttagcgcgctcaacttgtccgttactcatagggtgtgccacggaggcataacaaattttaataccgaagtcttcacaaaagtctttaaatgttccgccagtgaattgagtgccattatcagtgatgatctgattaggtaccccaaaccgatgcacaatgttgatgaaaaaatctctagctttatctgctgtgattgtgataaccggtttagcctcaatccatttggagaatttgtcgatagccacgaagagatgtgtgtaaccgccgactgcccttttaaatgggccgaccatgtcaagcccccagaccgcaaacggccaggacaacgggatggtttgcaactcttgggctggcaaatgagtttgtctggcaaaaaattgacaaccttcgcatgtccgcacaatcttatctgcatcggacacatctgtaggccagaaaaaaccttgccggtaagctttgccgacaatggtccgtgcagcagcatgattatcacaaataccagagtgtatatccttcaacaattgtttcccttcctccaaagatacacagcgctgcagtattcctgatggacttttcttgtacagctcagtctcatgaataatgtaaagtctgctgcgcctggaaatccgctcggcttcatttttgtcttgagggagttcttgtttgctcaaaaactttataaacggttctctccagtcggcttcaagcatgcctacgccttgagtatccatggcttcagttatctcctttctgggtacggtcggttcgtaaagatgttcgacgaacacatctgaaggagctgcttcccgttttgaaccaaaattggccagtctgtcggctgcctcattattatgtcggaggacatgggtgagctcgagtccgtcgaatttatcttccagcttacgtacctcttgtcggtaagcggtcatattaacatctagacatgaccactctttcatgacttgattaacaaccaactgagagtctccacagacgattagtcggcgaatacctagagatattgcaatccttagtccatggaatagggcttcgtatttcgctacgttatgggacgcagaaaaatgtatccacaatacgtagctcaatctttctccagtcggggaaatcaagacgaccccagctccagtgcctgtaagcctcttcgacccatcaaaatgcatagtccaatattccatcttttcctctggcatgtcttcttggcactcggtccactcggcaaggaaatcagctagagcttgtgacttgatcgaagttcgtggtttgaaagatatatccaaagacatcaattctaaggcccacttcgcaatctgcccgtttgcttcgcgattatgaagtatatccccgagtgaaaacgatgtgaccaccgtgaccgagtgactttgaaaatagtgagataatttcctgacggtaattaagacaccatataataacttttgaacctgaggataccttgtcttggagtcggctaaaacctcgctgacaaaatagattggtcgttggactttttgaatatggcctttctcttcacgctcgacaaccaggaccgtactcacaacttgggaggtcaccgacacatataacagtagcggttcttgtggatgcggtgaggccaatactggtggagtggtgaggagtttcttgaagtcttcaaaggctttttgtgtttcgggtcctcactggaaatcgtcagttttcttcagcagtttgaagaagggcatcccccgctcgccgagtcatgagacgaaccggctgagcgccgtcatgcaaccagtcaacttttggacgtctttttgggagcttggcggtttcatgttgaggatggcgttgattttctccgggttggcctgtatgcctctgggttggcctgtatgcctctgagataccataaatccgagcaacttccctgacagtactccgaagatgcacttttccgggtttagtttcatcttgaaagcacgaatgcttgtgaaagtttcttctaaatccgcaatcaggtcatccttctgcttggtcttgacgactacatcatcaacataggcttcaatattgcgaccgatctgagttgaaaaacacctttgaatcatgcgttgataggttgctcctgcgttcttcaatccaaagggcatggtgatgtagcagtaggccccaaagggtgtaataaacgaggtcttcaagcagtcggattcttttagtcggatctgatgatatcccgagtaacaatccaagaagctgagtagctcgcagccggccgttgagtcaaccacctggtcaatgcgaggtaacccaaaagggtctttgggacaagatttgttgaggtcggtataattgacacacattcgctattgccccgtctttttccgaaccaggactgggttagccagccagtcgggatgaaggacttcctttatgaagcctgctgctaacagcttggttaattcctccttgatcgcatccttcctgtcttgtgcaaaacagcggagtcgttgcttgatgggtttggcgtcttccttaacatgtaaagagtgctcaatcacctctctggggataccaggcatatcggatggtttccacgcaaaaatatctttattattagcagtcttatcaggatcggagtgatctaggggaatctttttcgtcttggcatcactttcttcggtcttcgtcagcttggttgcaggcacttctccctcgcctgtcgtggttgcagatagtcggatctcttcgcgagcaaaagtagtctcgtgggtttgggccatctcgcagctttctttgtcgcatgtgacggcctgcttgatgtcgctccgtagtgatataacccctcgaggaccaggcatcttcatcatcatgtaggtgtagtgtgggacggccataaatttggctaaagccggtcgtccaagtatagcatgatatgctgtctcgaaatcggcaacttcgaaacaaacattttctgtgcgaaaattttcccgagtgccgaaggtaactggaagagtgatctggccgagtggtgtagctgacaatcctgggataacaccgtggaagggtgcattactcggctttaattccgtgcgaggaatctgcatatcgtccagggtcttagtgaaaaggatgttgagtgcgctgccactatcgatgatattccgttagagcttgacattgcgaaccactgggtctagtaccagggggtaccgccccgggtggaccactcggtcgggatgatccgagcggtcgaacttaattgctgtttctgaccaccgaagatactggggcgtgttaggctgaactgcattgatctcccgttctgttagcttctgttttctcttggactcataagccaggggtccgccgaagatgtgattaagttctttgcgatgatcttgaaaaccagtcggggcatcgtcttcatcatctttcttctttgatgtgcgttcttgacgtattgctccacgaactgttttgtagacgaagcaatctttggccacgtggttggaattgggatgatgcggacattgagagttcattatcttgtcgaaggtgttgaagcggggacgttgtcgggaagatggagaggtggtcgccacaagttcttcgggcttacgcttgcgatccttgtggttgttacttccactcccccctgcagtcggcgtgtccttctttggcttccaagtggtgcccgactgtttggacgcggtgatagcatgttcggctttggcatactcgttggttttttcgaacatctgcttaaccgtcctgggaggtttacgtccgaacttgccgactaggtccccgtggcgaatgcctttagtgaaggcggcgatgatgacgtcgtcggtgatgtcggagatctttttgcgttgctcggagaagcgtcggatgtaatctcgaagggattctccagacttctgaacgacgttgtagagatcaaactgtgtgccggggcgttcaaaggtgccctgaaagttggcgatgaagtgatcacgaagttctgcccatgatccgatcgtgccacggggtagttcgtggagccaggatcgggcggagtctgctagggccacaggtagatagtttgccatggccttgctgtctccacctgctgcgcggattgcgagtccgtagacggtgagccaagactccggattggtggtgccgtcatacttctcgattccagtcggtttgaagccgactggccaatccaatcgatgcaggtcattagtgaaggcagctactccatccacgtcgtcgtcatagcgatttggtgaatgacggtgacctcgtgctgcacggtgctggttgatcgtgtcacgaaggtcgacgggacgctggcgaggtggagaacgaggctgtttagctcggcgctccctgtgacgttcgagaagcgagtgaacagatcgttcgtcgtgacccctgctcctgtgactagatcctgtgccggtgatgctgaggcttggctgatgatgagggactcggctaccagtcggggtgcgggtgcttgcggagttggctggaaccgaggcagcgatcatggtcttcgtctggttcaagatgttgacaacatgatcggcttggttgagggcgtcttccttgaggagggtgtcgaggagagtgattgctgcaaccgcgttctgctggggggtgcgaaagaccgctgtcccgtcgacgtcttgttgcccaatgagctctctcgctcggcgcccagattccaaggcacggtgccgtcgatcttcagcttcctttgcaatccgttcgtgatcttgttgttcacgctgtagtcgttctcgctcctgtcgctgtcgctcctcctccagtcggcgacgtttagcttcttgccgtgcgcgatcttgttctgcttctcgggctcggcgctgttcttctgtttcgttgtcagccatgaatacgccgaagaagaggggcgtgtagttatcctcgtagctgtcgtcaaagttgtcgaagtcgccatggtcgtagtggtagccgaagtcgtcgtagtcgaggatctcggttggtcgggaactgacgccgggggagctgaggtagccatccaactcttccgtcgagactgtcccaagaggttggagtataacgccaacctccctggatctagactggatcggggccggtgccggagctcgcctagatctccgagtgggagatgttttggctgtgaagacggcggccaagtcatcaggaagtttcatcaagattgagggataggacccgtcgtcttgatctgatcgtgggggaatagattggatctcgtccgagtggcttgaaatcgactcaggagagatgatcttggagtaggcctcggccgagttcggaataccgaacggcacggggacctggtttctccccgactggtttgaatccgagtcaaggagagagatcttgccgaagtcgttggtgatgaagtcgaggctgccgaatcggaacgcctgcccgggaggcaagacgaagtcgtcgatgccagaaacgaaacccat

SEQ ID NO: 79071 - DNA, 5721 bp, Oryza sativa
  Clone ID: PAT_MRT4530_78816C.1
tcaataagaacctggccgagtaacttcagaaactatgaacagtccttcccacaagggagataacttgtgccgatctcgtgtagtttgaattttcctcagaaccaggtcgccgactaagaaagctcgtgatcgaacattgcgattgtgataacggcgcatcccttgtaaataccgagccgactgaattaaggttgcttcacgggcttcttccagtcggttgagatcatctactcggtcttctccatagcgctcctcgctgaagttacgaaatcgcaaagattcgaattctacttcacttggcagcattgcttctgcaccatagactagaaagaacggtgactgtcccgtagcccgactgggtgtggtgcgcagggaccaaaggacagatggcaattgttctacccatttgccagcatagggacgcaatcggtcaaaaactcgtgcttttattccttgaagtaccataccattggcgcgttcaacttgtccattactcatgggatgcgctacgggggcataacaaattttgatgccgaagtcttcacaaaaatctttaaatactccgccagtgaattgagtgccgttatcagtgatgatccgattgggtaccccaaaccggtgcacaatgttgatgaaaaaatctctagccttgtctgtcgtgattgtgacgaccggtttggcttcgatccacttggaaaatttgtcaacagctacaaagacatgagtataaccactgatagcctttttaaacgggccgaccatgtcgagcccccaaaccgtgaacggccaagataacgggatggtttgcaactcttgagctggtagatgagtctgtcgggcgaaaaattggcaaccctcacatgttcgcacgattttgtcagcatcggatacagctgtgggccagaaaaaaccctgccgataggccttgtcaacaatggttcgtgcgatagcatgattgccacatatgcctgaatatatatcccttagcaattgtcttccttcctccaaagacacatagcgttgcaggatccctgatggatttttcttgtacagctcggtctcatgtatgacataaagtttgctgcgcctggagatccgctcgacttcgtttttatcttgagggagttcttgtttggtcaaaaatctcatgaggggctctctccagtcggcttcaatcatgcttacttcttgagtgtccgtggcctcgattatttttttccttggtacggttggctcataaagatgttcaacgaacatgtcggaaggagttgcctctcgttttgaaccaaaattagccagtctgtcggctacctcattattatgtcgaagaacgtgggttagctcaaggccatcgaatttatcttctaacttgcgtacgtagctcagcctttctccagtcagggaaattagaacaacccccgctctggtgcctgaaagcctctttgacccgtcaaaatgcatagtccaatactccatcttctccacaggcatgtcttcttggcactcggtccactcggcgacgaagtctgctaaagcttgggacttgatcaaagttcgcggcttgaaggatagatctaaagacatcaactctaaggcccactttgcgatccacccatttgctttgcgattgtgaagtatatccctgagtggaaacgatgtaaccaccgtaaccgagtgaccttgaaaatactgagataatttcctaacagtaatcaaaacgccatacaacagcttttgaacctgaggatatcttgtcttggagtcagccaaaaccttgctaacgaagtagattggtcgttggactttttgaacatggccttcttcttcacgctcaacaactaggactgtgcttacaacctgggaagttgccgacacgtataacaacagcggctcttgcggatgtggtgaagctaagactggtggagtagtgagaagttttttgaagtcttcaaaggctttttgtgcttcgggtccccactagaaattgtctgttttcttcaacagcttgaaaaagggcatccccggctcgccgagtcgtgaaacaaaccggttgagcgccgccatgcaaccggtcagcttttgaacatctttctaggagctcggcggtttcatgttgaggatggcattgattttctccgggttggcttgtatgcctctacgggacaccataaatccaagcagcttccctgacggtactccgaagatgcacttttgagggtttagtttcatcctgaaagcgcggatgcttgcaaaggtctcttctagatccgtaatcaaatcatccttctgcttggtcttgacgactagatcatccacataagcttcaacgttgcggtcgatttgagttgaaaaacatctttggatcatgcgttgataagttgctcctgcgttctttaatccaaacggcatggtgatgtagtagtaggccccgaagggcgtgatgaacgaagtctttaagcagtcggatctgatgatatcctgagtaccaatccactgagtagctcgcagccggccgttgagtcaactacctggtcaatgcgaggtaacgcaaagggatctttggggcaagacttgttgaggtcggtgtaatcaacacacatgcgccattgtcccgtcttcttccgaactaggactgggttggccagccagtcgggatgaaggacttccttgatgaagcctgctgctaacagcttggtcaattcctccttgatcgcatccttcctatcctgtgcaaaacggcggagtcgttgcttgattggtttagcgtcttccttaacaagtaaagagtgctcaatcaccactctaggaataccaggcatatcagatagtttccacgcaaataaatctttattattagcagtcttagtaggatcagaggaatctaggggaatcttcttggtcttggcgtcgccttctccgctctttggcatcttggttgcgggcacttctccttcgcttgctgtggacgtagccagtcggatttcttctcgggcgagcgtgatctcgcgggtctgggccatctcacagctttccttgtcgcatgtgacggcttgcttgatgtcactccgcagggatatgtctcctcgaggaccaggcatcttcatcatcatgtaggtatagtgcgggacagccatgaacttggctaacgccgggcgtccgagtatgacatgatgttctctgtacggaaattctcccgagtgctgaaagtaataggaagagtgtggccgagtggtgtaacaaatagccccgggatgactctgtgaaagggcgcattactcggctttaattccgtgcgagggatctgcatgtcgtccagggtcttggcgaaaaggaggttgagtgcactgccaccattgatgagggatctgcgaagcttgacgttgtgaaccaccgggtctagtaccagggggtaccgtcccgggtggaccactcggtctggatgatccgagcggtcaaacttaatcgttgtctctgaccaccgaagatattggggcgtgtcaggttgagcagcgttgatctccgttcggtcagcttttgctttctcttggattcataagccaggggtcaaccaaagatgtggttgagctccttgcgatggtcttggaaaccagtcagtgcatcatcttcaccatccttcttctttgacgtgctttgatctccgtcggaggctttatgtgcgttcttggcgtattgttctgcaaactgtttgtagacgaagcaatctttggccgcgtgattggaattgggatgatgcggacattgggagttcataatcttgtcaaaggtgttgacgtgcgaacgttgtcgggaggatggtgtagtagttgccacaagttcctcgggcttacgcttgcgatccttgtgattggtacttccactcccccctgtagtcggtgtatctttcttcggcttccaagtggtgcccgactgcttggacgtggtaatggcatcttcggctttggcatactcattggctttttcgaacatctgcttgaccgtcctgggaggcttgcgcccgaacttgccgactaggtctgtgtggcgaacgcccttggtgaaggcggcgatgatgacgtcgtcggtgatgtcggagatcttgttgcgttgctcggaaaagcgtcggatgtaatctcgaagggattctctagacttctgaatgacgttgtagagatcaaactgtgtaccagggcgttcaaaggtaccctggaagttggcgatgaagtggtcgcgaagttccgcccatgatccaattgtgccacagggtaacccgtgaagccaggaccgggcagaatccgctagggccacaggcaaataattcgccaattgcgagaccgtagacggtgagccaagactccgggttagtggtgccgtcatacttctcgattccaatcggcttgaagccggctggccaatccactcgacgcaggtcgcttgtgaaggcagcaactccatccacgtcgtcgtcgtagcgatctggagaatggtggggagcgtagcctcttgccgcgcggcgctggttgatagtatcgcgaagatcgacggggcgcctgcgatgtggggagtgtggtcattcaactcgatgctccctgtgtcgtttgggtggcgagtggatagatcgctcgtcgtgacccctactcctgcgagtagatcccgcgccgacgacgctgaggcttggttggtgatagtcttgagatcgaagatggggaactcggctgccagtcggcgtgtggacgcttgcggagttaatcgggaccaaggcggcgatcatggtcttggtctggttcaagatgttgacgacgtgattggcttgattgagcgcgtcttccttgaggaggatgtcgaggagggtgatcgctgcaaccgcgttctgttgggggggcggaaaaccgctgtcccctcgacgtcttgttgcccaataagttcctatgcttgtcgcccggcatccagggcacgttgtcgccagtcctcagcctcttttgcagcccgttcgcgttcctgtggctcacattgtagccgttctcgctcttatgcttggcgctcctcttccagtcggcgtcgttcggcttcctgttgtacacgtagttcttctgcttctcgggctttacgctcttcttccgtctcattgtcagccatgaagatgccgaagtagaggggtgtgtagttgtcttcaaagccttcgtcgaagtcgtcgaggttgcgtagtcgtagcggtagccgaagtcgtcgtactccacgatctccgatggtcgcgagtcgatgccgggggagctgaggtagccatccagttgttcgtcgaaaccgtgccgagaggctggagtatgacaccgacttccctggagctaggccgggccggggctaaagccggatcccacctaggcctacggggagaagacgcccttgtggtgaatacagcagccaaatcatcgggagtttcatcaggattggcggataggccccatcgtcttgatcgggtcgtgttgaagtagattggatcccgtccgagtggtttgaagccaactcggtggagatgatcttggggtagacctcggccgagttcgggataccgaactaggtggagatctggcctcttcccgactggtttgaatccgagtcgaggagagaaatcttgccgaagtcgttggtgatgaagtcgaggctgccgaattggaacgcctgcccgggagggaagacaaagtcgtcgatgccggaaacgaaacccat

SEQ ID NO: 79072 - DNA, 1236 bp, Oryza sativa
  Clone ID: PAT_MRT4530_78817C.1
atggagtttcccaccgccggtggtagccgcttcgccgacggacacatgaacaacaacaatggatttgtgcaagcagtagcaggagacccgttggcggtggtgagggacgcgctgctgtcgcagctccagcatgatcgtcttcgtcaggagatcatcgtcgccgagctcgccaagatagagcgcgccatggctctgcgcgatgcctcgccgtcgccgtcaccgagccccggcacgccgctggaaagactgcggcaagtcagcatactgttaagaaagttagctccttgtaaggcagatacttgtttgctcggtcagtactttgctaattttcttttcagttgtaagacatggagctgcgccgtgtgcgaggtgcaaacaagcagcgaacgcaacctacgggatcattatggagggcagaagcaccagtcgaaagtggcaggattggagttgaaggcgaagacggcgacagtgaaaacgacggcgaagccttctcctgttgcagggcagagagcacacgctgccagatggagctgcagcgtttgccaggtacactgcaatggcgaatggcatttcgatacccacctgaagggcaagaggcaccaagcaaatacccaagccctgctggaacaaagcaacaagaattcagggaattcagaatcacacgatggaaccaaggcgcaaccgagcaatgtgagccatcacgccgagaagaagaagaggaagaagaagaaggaggaggaggaggaggcgacatggatctgcagagcttgccaagctgtctgtacctgtgaatcagacttgcagaaccaccttaggggcaggaggcatcagctgaaagttcaggccttgcctgaagctgcgaaacaagagaagaacaatcctcccaagcttgcaaagaaccctaataagcaaccctcggaatgggtttgcagtctctgccaggccaaatgtaacactgaatctcagcttgagcatcaccgcagaagcacgaggcaccagcagaaggtagaatctcttggatggaatgcgaaagagagtgacctggggactctgcaaggaatgtcttcggatggctctagcagcaagagtgtaaaaatctcagcgacgatggataaacagaaggctacgtatttttgcgaggtttgcagtttgaagtgcaccagccagagaatgctggcggatcatcttagtgggaagaaacacattaaacagttggagttgcagctattcagctaa

SEQ ID NO: 79073 - DNA, 2868 bp, Oryza sativa
  Clone ID: PAT_MRT4530_78818C.1
atggcggggctggtcccgccattctctatttttttcatggatattctggagttttatgatctccagatggcgcacctcacccccaacgcgataatgacgttggccatcttcgcgcacctgtgcgagatgtttatcggggtgagcccatctctccggttgttccggtggttcttcaccgtacagccggtgtcgccgccgacggtagtcggtggctgctacttccagccgcgggggcaggtgttgaaccgctacattccctgcgtcctccgcaaaaagtgggacgactggaagagtgattggttctacacccccctcgtcgacgaagcgcgcctccgacttccgagccagcctccggcgcaggcctccagctggcaggcggcggtagatctgggagacggctacgacgccgttcttgaccgcctggtgggtctgcgatcccaggggctcacgggggccatggtgttcggtgactaccttcgccgccggatcgcgccgctccagcggcgtgcccggggcgcctgggagtacactgggcccgaggactacatgaggacccaccaggggcgcaaatgggactgggaccctgaggacttcaggatggtggtccaacgggtgctgaatctcagctccgtggaggcatccctcatcccccaaggggtcctccccctctgctgcgatccagagcgcgccaacatcctgaccatcatgcaggaggtcggggcgtcgggggagcgggccccccgaggccacgttggcgcgggcgggagccgcaggggagaacaatctaccccgggggggggtcgtgcttctgggccccgcgacggggacccgggggggagccgccctgccgacgcccgggggaagaggaagcaggagggtacccctcccccatctcctccccgagggggcggggcggtgcgtgccagcagcaggcgcccggagggtgccgtgccgacgccgcagcccgagggggagcgaaagaagaaacggctccgcaagatgggggggaccgagccatgccgggtgaacctcatctcgcccccgaggtggtcgtttagccgacctccccgcagcgagatcccatcgcaccccccccccccccgccattccatgtccggccggtctgaagccgaggagacggcgaccgcggaagcccggaggcgggaagctgaccggcgagaagccgcggaccgcctccgggaagccgaggaggctgcccaggaggccgtccgggttcgccaggctgaggaggccgctcgggaggaggccagactccgccgggccggggagtccgtccgggaggcagaggcggcacgcgcacgccaggcggcctgccaagcccccgacccgactccacccgaggcgacgatgacttccgaggccacccacgacgaggccgcggacgcgccgctcgggcccgacccctcgggcgatgcttgggacgagccagcttcgggggacgcccccgggtccggcacgtcgatcggcgggccgagccgcgcggcacccacaccgaggcggctctcccctctgccttccgctgccccactgagcgcggagcccctcctgcaggccttagccgccgcgaacaccacggtgctggacgggttaagtgcccagatggaggtcctgcaggcagagagggcggagctcgacgcggcgtgggcgcgcgtagaggaggggcggcgctcggtggaggccatggtggaggcgggccgcaaggcacaccgccggcacgcctccgagctcgaggcccgtcgtagggacctggcggagatcgccagggaggtggaggaggagcgggagactgccctcatcgccaccgccgtgctcgacgaggtgcggaacgacctccgcctccaatacgggagccaggcggcggagctagagaagaagctcgacaccgcccggggagtccttgacgccgccgctgcccgggaacggcgggcggcggagatcgaggcggcgtcccggcagcgcgaagaggcccttgaggctcgcgccacggcgctggaggagcgcgcccgcgccctggacgcgaaggagaaggacctggcggaccgcgaggccgccgtcgccacccgggaggcaacactggcggcgcacgaggccgcctgcgccgaagaggagtccgcactccgcctccgcgaggacgcgctcaccgagcgggagcgagctcttgaggaggccgaggccgcggcgcagcggctagcggacagcctgttcctccgcgaagcagcgcgggaggagcaggcgcgccacaatctggaaggcgcccgtgccgagagggccgcactggatcagcgggccgctgagctcgaggcgcgggcgaaggagctggacgcgagagcgcacagcggcggaacggccgcgggcgacggcgacctgccgcccgcctcgcagccgccgaacacaccatcgccgggctgcagggcgcactggactcaccgcgccgggcggcaggcgggcctctggggcgggcggaccgcgaagtacgccgccaaccaggggggcctcgcccagcgcctctcagagatggccgggaccctccagcgactccccgaggagctcgaggagacgatcaagtcatcctcgagggacctcgcccggggggcggtggagctcgtactggcaagctaccaggccagggaccctgacttctccccgtgggcagcgctggacgagttccctcccggaaccgaggacggcgcgcgtgcgcaggtccgggacgccgccgaccacatcgtccacagcttcgagggtacggcccctcggctcgcgttcgccctcgactccgacgaggagggcggtgacgacggtgcggacgacagcgacgacgaggccggcgacccgggcgcgtcggagtga

SEQ ID NO: 79074 - DNA, 2697 bp, Oryza sativa
  Clone ID: PAT_MRT4530_78819C.1
atggcagggctggttccgccattctcttctttcttcatggatgttctggagctttatgatctccagatggcgcacctcacccccaacgcagtaatgacgttggccatcttcgcgcacctgtgcgagatgttcatcggggtgcgcccatctctccggttgttccggtggttcttcaccgtacagccggtgtcgccaccgtcggtagtcggtggctgctacttccaaccgcgggggccggtgctgaaccgctacattccctgcgtccttcgcaagaagtgggatgactggaagagcgactggttctacacccctctcgccgacgaagcgcgcctccgacttccgagccagcccccggcgcaggcctccagctggcgggcgccggtagatctgggagacggctacgacgccgttcttgatcgcctggccggtttgcgatcccaggggctcacgggggccatggtgttcggcgactaccttcgtcgccgaatcgcgccgctccagcggcacgcccggggcgcctgggagtacaccgggcccgaggacaccatgaggacccaccaggggcgcaaatgggactgggaccctgaggacttcaggatagtggtccaacgggtgctgaatctcagctccgtggaggcatccctcatccctcaaggggtccttcccctctgctgcgatccagagcgcgccaacatcctgaccatcatgcaggaggtcggggcgtcgggggagcgggccccccgaggccacgatggcgcgggcgggagccgcaggggggaacaatctaccccaggagggggtcgtgcttctgggccccgtgacgggggcccggggggcagccgccctgccgacgcccgggggaagaggaaacaggaggataccccctccccatctcctccccgagggggcggggcggtgcgtgccagcagcaggcgcccggagggtgctgtgccgacgtcgcagcccgagggggagcgaaaaaagaagcggctccgcaaaataggggggaccgaaccaagccggggaaacctcatctcccccccaaggtggtcgtttagtcgacctcctcgcaggcccggaggcgggaagccgaccggcgagaagccgcaaaccgcctccgggaagccgaggaagctgcccaggaggctatccgggctcgccaggctgaggaagccgcttgggaggaggccagactccaccgggccgaggagtccatccgggagacggaggctggcgcgtgcacgcgggcgtgactgccaagcccccgacccgactccgcccgatgctgacgacgacttcctgaagccacccacgacgaggccgcgggcgcaccgctcgggcccgacccatcgggcgatgctcagtgacgagccagcttcgggggacgtccctgagttcggcacgtcgatcggcgggccgagccttgcccagatggaggtcctacaggtagagcgggcggagctcgacgcggtgtgggcgcgtgtcgaagaggggcgacgctcggtggaggccatggtggaggcgggccgcaaggcacaccgctggcacacctcggagctcgaggcccgtcgtagggacctggcggagatcgccagtgaggtggaggaggagcgagagactgccctcattgccaccgccgtgtttaacgcggcgcgggacgacctctgcctccaatacgggagccggggggcggagctagagaagaagctcgacgcgtcccggcagcgcgaagaggcccttgaggctcgcgccacggtgctggaggagcgcgcccgtgccctggacacgaaggagagggaactggcgggtcgcgaggccgccgtcgccatccgggaggcaacgctggcagcgcacgaggccgcctgcgccgaagaggagtccgcactccgcctccgtgaggacgcgctcaccgagcgggagcaagctctcgaggaggccgaggtcgtggcgcagcggctggcggacagcctgtccctccgcgaggcagcgcgggaggagcaggcgtgccgtgatctggaaggcgcccgcgccgagagggccgcactggatcagcgggccgctgagctcgaggcgcgggcgaaggagctggacgcgagggcgcgcagcggcggggcggccgcgggcgacggtgatctagccgcctgcctcgcagctgctgaacacaccatcgccgagctgcagggcgcgctagactcgtccgccggggaggtcgaggccctccgcttggcaggcgaggtagggcccggcatgcttcgggacgccatctcccgtctagaccgcgccgggcggcaggcgggcctctggggcgggcggatcgcgaaatatgccgccaaccaggggggcctcgcccagcgcctctcagagatggccaggactctccagcggctccccgaggagctcgaggagacgatcaagtcatcctcgagagacctcgcccggggggcagtggagcttgtactggcaagctaccaggccagggacccggacttctccccgtgggcagcgctggacgagttccctcccggaaccgaggacgacgcgtgcgcgcaggtccgggacgccaccgtccacatcgtccacagcttcgagggtacggcccctcgactcgcgttcgccctcgactccgacgaggagggcggcgacggtggtgtggacgacagtgacgacgaggccggcgacccgggagcctcaaagtga

SEQ ID NO: 79075 - DNA, 1083 bp, Oryza sativa
  Clone ID: PAT_MRT4530_7881C.1
atggggatagaacagtgtcttcagctcttcctagccaatatgccgaagaacgaatctttattatcggccactacatatttctggtctaacaccatcaatgccatcatcttcggacatgggccgatgacacccacccttttggatattaaaatgttaacgggcttagacatcacctcattggctaatcccatcagcttgaaaaacaagagcgaatacaaaattaaaaccaaggctggaggtggttggtcaggatatatcaaaagatgtagagccattggaccaattacagatgaggaacatatctctttccttaacttatggttggagagattcattttctgtggcacaacttgtggccctacagccaattttcttcatctggctcaagctattcatgaggagaagtcaatccctctagaatggaaaaaacatatcttctatcagccaactgctttttatctcacaatcatcaatacttccatcggtcctcaggatgaagacgatgggacaaaatcttcaatccgagccaaattactcatttcagatgatttaaaagcaaatttgctagatttggtcaatcggctcaatgtatctcttgatgcattagttgtagattgtgagccagtttggtctaaattcaatgctatccaagctcttatttctaaagacctagctgatgttatctctccagcagcacatcttgatcaatataacttaaaactccaacgggcacaacaaaggttgatagatcggcaggaaaggcaatccttggaagcgaccgtcacctccagccgacagcagattttggattacaaaagcaagctggacaaattaatcgttggtccagaatcttctcaaaaaaagcttgacaagctcaaacaaaaggaatccgaactcctagcacaactggagcagattcggcaagagatggcatcggagcaacaatcaaatatcattgaatttaaaagctatcgaagagcaaagataaaaataaaggcatcgatcaaatatcttgcaggcctgacaagagcaatgaagccgatcccagggaccgatgccgaagaccgcagaactattgaataa

SEQ ID NO: 79076 - DNA, 1148 bp, Oryza sativa
  Clone ID: PAT_MRT4530_78820C.1
cgaggaggagagggaggggagagaagggagagggggtcggggagaaagaagagcgagcgagcagctttggctacggccaaaccctacagcgcctccaccaccactccttgccttttttggccgcagccgctcgtgtggttggttggttcatcggcgatcgaagatggtgcgggggaagacgcagatgaagcggatagagaaccccacgagccgccaggtcaccttctccaagcgccgcaacggcctgctcaagaaggccttcgagctctccgtcctctgcgacgccgaggtcgcgctcatcgtcttctccccgcgcggcaagctctacgaattcgccagcgccagtacgcagaaaacaattgaacgctataggacgtatacaaaggaaaatatcggcaacaagacagtacagcaagatatagagcaagtaaaagctgacgctgatggtttggcaaagaaacttgaagctcttgaaacttacaaaagaaaactgctgggtgaaaagttggatgaatgttctattgaagaactgcatagcctggaggtcaagctggagagaagcctcattagcatcaggggaaggaagacaaagctgcttgaggagcaggttgccaaactgagagagaaggagatgaagctgcgcaaggacaatgaagagttacgcgaaaagtgtaagaatcagcctcccttgtctgctcctttgactgtccgggccgaagatgagaacccggaccgtaacatcaacaccaccaacgacaacatggatgtcgaaactgagctattcatagggctgcctggcagaagtcgctccagcggcggtgctgcagaagatagccaagcgatgccccattcttaagtaacaggccaggaataagctggatctctgcgttgagaaaggagatgatgctaggcatgcaatgacaccaaaccatcctaaaaacagaccacgctgtatattttacttacccgtattgtcgtccatggatgcgaaatgctagacgcatatgcacccacccattcagcaccaccaggcagaaacccttcgatcggcagactccactacccatctaaatctaaatcgagagatctcaagtgcatacttgtactcctgcttgattgtggcttggtatttgatgtgatgttggagc

SEQ ID NO: 79077 - DNA, 468 bp, Oryza sativa
  Clone ID: PAT_MRT4530_78821C.1
gccatctactgccccaccagcgtcctcttctacggccccgccaacgccggccagtgcccctccggctaaccagctggctctagctactccggcagctcatggccggccgttacgccggcgaccgggcatgcggcacgcgcgccgaggtgcgtgactgcgcgggatcgatcgatcgatcaaggaaggaataattaaagtaggcaactagacatacgtattgtcaacgtgtgtcatggtgttccacttgcagtagcgactaggtagcgagactgtgtgtgtacgttcagttctagtttgagaggtagcgcggctgtgatgtttcgatcgcttgttgtcagtgtagcattggtggtttctccattggttctctgttcaaacttgtatgatttgtccgcttgcaaattttgcaaattttttaagacgttgaaatctaggccatctggttcactcgatccaaagttccaaaca

SEQ ID NO: 79078 - DNA, 2493 bp, Oryza sativa
  Clone ID: PAT_MRT4530_78822C.1
atggcacggggctccgcactgcttgatgggctggttccgccattttcttctttcttcatggatgtcctggagttctacgatctccagatggcgcaccttacccccaacgcagtgatgacattgggcatcttcgcacacctgtgcgagatgttcattggggtgcgcccatctcttcggctgttccggtggttcttcaccgtgcagtcggtatcgccaccgtcggtggtcggcggctgctatttcctgccgcgggggccggtgctgaaccgctacatcccctgcgtccttcgcaagaagtgggatgactggaaaaacgactggttctacacccccctcggcgacgaaaggcgccttcgactttcgagccaacccccggcgcaaggcttcagctggcgggcgccggtagatctgggggatggctatgacgccgtcctcgaccgcctcgggggcctgcgatcccaggggctcaccggggccatgagaagcaggctcctaagggccatgacggcgcaggcggaagccgccgaggggatcaatctacccctgaagggggtcgtgcttctgggccccgcgtccgggggctcggggagcaaccgccctaccgacgcccgggggaagagcaacctgggaggaacacctcccccatctcctccccgagggggcggggcggtgcgtgccagcagcaggcgcccggagggggccgcgccaacatcgcagcccgagggggagcgcaagaagaagcggctgcgcaagatgggggagacagaaccatcccggggaaacctaatttcccctccaaggtggtcatttaaccgaccccctcgcagtgatatcccatcgcgttcctcccaccatcccaagtccggccagtccgaggccgaagatcctgcggccgcagaggcacggaggcgggaatctgaccggcgagaggccgcagaccgcctacgggaagctgaagaggccgcccgggaggccgcccgggctcgccaggctgaggataccgctcgggaggaggccgcccgggctcgccaagccgaagaagccgctcgggaggaggccgcccgggaccaaacaggtccgggggacatccccgaggccggcacgtccattggcgggccgagccgcgcggcatcttctccaaggcagctctttcccatgccttccgtcgccccgctgagcgcagagccccttctgcaggcccttgccgccgcaaacaccgcggtgttggatgggctaagtgcccaggtggaggccctgcaggcggagcgtgcggagctcgacgccgcatgggcgcgtgtcgaggaggggcggcactcggtggaggccatggtggaagcgggccgcaaggcacaccgccggcacgtctcagacctcgaggcccgcaagacggcactggcggagatcgctcgagaggtggaggaggagcggggggctgccctcatcgccaccacagtgatgaacgaggcgcaggactccctccgccttcagcacgggaactgggaggcggagctgaaaaaaaagctcgacgccgcccagggggtccttgatgccgccgctgcccgagagcagcgagcagcggagaccgaagcggcgctccggcggcgtgaagaggccctcgaggcgcgcgccatggcgctggaggagcgcgcctgcgtcgcggagaaggacctggcggaccacgaggccgccgtcgcctcccgggaggcaacgctggtggcgcacgagtcggcctgcgccgaagaggagtccgcactccgcctccgcgaggacgcgcttgccgagcgggagcgagctctcgaagaggccgaggccgaggcgcaacggttggcggactccctgtccctccgcgaagcagcgctgacggagcaggcccgccgcaatttggaatccgtccgcgccgagagagccgcgctggagcagcgggctgccgacctcgaggcgcgggaaaaggagctggacgcgagggcgcgcatcggcggggcggctgcgggcgaaagcgacttaaccgcccgcctcgcagatgccgaacacaccgtcgccgacatgcagcgcgcgctagactcatccgccggggaagccgagccctccgcgggcctctggaaagggcagacaataaagcctgccgccaacctgggaggccttgcccagcgcctctcgaagatggccggggctctccagcagctccccgaggagctcgagaagaccatcaagtcatcctcgagggacctcgcccaaggagcggtggagctcgtcctggcgagctaccaggccagggaccccaacttctctccgtggatggcgctggacgagttcccacctgggactgaagacagcgcgcgcgcgcaggtccgggatgccgccgaccacatcgtccacagcttcgagggctcggcccctcagctcgcgttcgcccccaactccgacgaggagggcgatgccagcggtgcagacgacgtggaagacgaggccggcgacccgggcgcatcggaatga

SEQ ID NO: 79079 - DNA, 650 bp, Oryza sativa
  Clone ID: PAT_MRT4530_78823C.1
ccaatcgggtggggtgtcaaagacagaaaccaaaaggcagccagtcatcagagcggtcactgcggcacacgtcgtggggcgtggttggaggttcgctcaagtcgtggtcgtcctcgtcccggttggatggactagggggtgcaatgcaaatagcgtatggttacgggcggggaccaaaaaggaaagccgaggaggagagggaggggagagaagggagagggggtcggggagaaagaagagcgagcgagcagctttggctacggccaaaccctacagcgcctccaccaccactccttgccttttttggtgagtcgccctttgccgactctcagatccccttgcgttttaccacttttgccttgtccgccgcccctccaattgggataaaaaagaaaagagctgcatctctcgctgctcctcctcctcctcctccgccgtgcaggccgcagccgctcgtgtggttggttggttcatcggcgatcgaagatggtgcgggggaagacgcagatgaagcggatagagaaccccacgagccgccaggtcaccttctccaagcgccgcaacggcctgccaagaaggccttcgagctctccgtcctctgcgacgccgaggtcgcgctcatcgtcttctccccgcgcggcaagctttag

SEQ ID NO: 79080 - DNA, 720 bp, Oryza sativa
  Clone ID: PAT_MRT4530_78824C.1
atggccgagtttctcttcgaggacatcttcactgtcaccaggcccgaccctgatggcaagaagtttgacagagtttctcgtatcgaagctcgcagtgaccagttcgatatgtacatgcagttagatgttgccacagatgtctatcctatgcatccaggtgacagatttaccatggtcttggttcctactttgaacttagatggtaccccagatagcgccttctttacacaggctggcaggaaaactctggctgacaaatatgagtatgtcatgcatgggaagctttataagatctcagaagacaaagacacctctgatccaaagactaaaaaagtggagatgtatgcatcatttggtggcctcctagtgatgcttaagggtgatccctccagtgctgcgaattttgagctggaccagaggctgttcctacttatgcgcaaggtgtagaattgtcgaatttttaggagaaaatttgtcgacaaatgtataggtagtcccttacttaaataaatgggtgaactacataatatcctaatgttgatgggcctttgtgtgggtctgtggatttaaccttacttcttggtgcctatcgttaacgctgttctgatctgcgggtgatggaattttatttgttgtttggaagcttatcctaagtaaattcggatcaaaaaaaaaaaaaatctctaaaaaaaaaaaaaaaaaaaaaaaaaaaaaaaaaaa

SEQ ID NO: 79081 - DNA, 649 bp, Oryza sativa
  Clone ID: PAT_MRT4530_78825C.1
gtagaaattagggatttcaatcttgtattgattttggccctaaatgacatatatgtacacaagagaggggaacacaagagaggggaaagtactctaatacccttgacatactactacacttaacacccccactcaaatgcaatgtgtatgcaataacattgcatttgaagggtaaactaaacactaggacacaaactaaatattagcctatctccaaagtcttgatgatgtcgtcaaagtgtgccaattcttggatgatgacgatgaagaagaaaaagatccatctcctcttcaatgaagtggacctcggagccttcacaaactgttcttcggccctcggtaccttgaagccttcacaactcgttcttcggctcttcattgattcagagatgttgacaatgatggaaagcccttcacaaactgttcttcggaccttcatagatctgatgacgacgatgatggtgatgatgaaggaccttcacaaattgttcttcggtccttcattgattgatgatgatgtcaactccgatgggaagctggtgatatgacagaccagctccaatgtggagctggtgaagtgatagaccaactccgacggagagctgatatgaagctggagataaattggcatggcttcgacggattgaag

SEQ ID NO: 79082 - DNA, 4839 bp, Oryza sativa
  Clone ID: PAT_MRT4530_78826C.1
tcagtcaaaaatgcgtgctttgatcccttgaagtatcatgccgttagcgtgctcgacttgtccgttactcatggggtgtgccacggaggcgtaacaaattttaatgccaaagtcttcacaaaagtctctaaatgctccgccagtgaattgagtgccattatcagtgatgatccgattaggttccccaaaccgatgcacaatgttgatgaaaaaatctctagctttatttgccgtgatcgtgatgaccggtttagcctcaatccacttggagaatttgtcgatagccacaaagagatgcgtgtaaccgccgactgcccttttaaacgggccgaccatgtcaagcccccagaccgcaaacggccaggacaacgggatagtttgcaactcttgggctggcagatgaatttgtctggcaaaaaattgacaaccttcgcatgtccgcacaatcttgtcagcatcagacacagctgtaggccagaaaaaaccttgccggtaagctttgccgacaatagtccgtgcagcagcatgattaccacaaataccagaatgtatatccttcaacaattgtctcccttcttccaaaaatacgcagcgctgcagtattcctgatggacttttcttgtacaactcagtcttatgaataatgtaaagtctgctgcgcctggaaatccgctcggcttcatttttgtcttgagggagttcttgtttggtcaaaaattttataagaggttctctccagtcggtttcaatcatgcttacgccttgagtatccatggcttcaagtgtttcttttctgggcacggttggttcataaagatgttcgacgaacacatctgaaggagctgcttcccgttttgaaccaaaattggccagcctgtcggcagcctcattgttatgtcggaggacatgggtgagctcgagtccatcgaatttatcttccaacttgcgtaccacctgggaggttgccaacacatataacagtagcggttcttgtggatgtggcgaggctaaaactggtgtagtggtgagaagtttcttgaagtcttcaaaggctttttgtgcttcgggtccccactggaaattgtcagtcttcttcagcagcttgaagaagggcatcccccactcgccgagtcgtgagacgaaccggctgagcgccgccatgcaaccagtcagcttttggacgtgtttttgggagcttggcggtttcatgttgaggatggcgttgattttctccgggttggcctgtatgcctctttgagataccataaatccgagcaacttccctaacggtactccgaagatgcacttttccgggtttagtttcatcttgaaagcacgaatgcttgtaaaagtttcttctaaatccgcaatcaggtcatccttctgcttggtcttgacgactacatcatcaacataagcttcaacattgcgaccgatctgagttgaaaaacatctttgaatcatgcgttgataggttgctcctgcgttctttaatccaaagggcatggtgatgtagcagtaggccccaaagggcgtaagaaacaaggtcttcaagcagtcggattcttttagtcggatctgatgatatcccgagtaacagtccaagaagctgagtaactcgcagccggccgttgagtcaaccacctggtcaatgcgaggtaacccaaaagggtctttgggacaatatttgttgaggtcggtataatcgacacacatgcgccattgccccgtctttttccgaaccaggactgggttagccagccagtcgggatgaaggacttccttaatgaagcctactgctaacagcttggttaattcctccttgatcgcatccttcctgtcctgtgcaaaatggcggagtcgttgcttgatgggtttggcctcttgcttaacatgtaaagagtgctcaatcacctctctaggaatactaggcatatcagatggtttccacgcaaagatatctttattattttgaagaaaggtgatgagcgcgctttcctctccttcgcttgccgtggtggcagccagtcggatttcttcgcgagcgagagtgatctcgtgggtttgggccatctcgcaactttctttgtcacatgtgacggcttgcttgatgtcgctccgtagtgatatgaccccttgaggaccaggcatcttcatcatcatgtaggtgtagtgtgggacggccatgaatttggctagagccggtcgtccgagtatagcatggtatgctgtcttgaaatcagcaacttcaaaacaaacgttttctgtgcgaaaattctcccgagtgccgaaggtaactagaagagtgatctggccgagtggtatagctgacaatcctgggatgacaccgtggaagggtgcattactcggctttaattccgtgcgaggaatctgcatatcgtccagggtcttagcgaaaaggatgttgagtgcactgccaccatcgatgagagtccgtcggagcttgacattgcgaaccactgggtctagtaccagggggtaccgccccgggtggaccactcggtcgggatgattcgagcggtcaaacttgattgcgatttctgaccaccgaagatactggggcgtgtcaggttgaacagcattgatctcccgttcagtcaacttctgcttccgtttagattcgtaagccagggggccgccgaagatgtgattgagttctttgcgatggtcttgaaaaccagtcggggcatcgtcctcatcgtctttcttctttgatgtgccttgatctccgtctgaaggcttacgtgcggtcttggcatattgctccgcaaattgcttgtagacgaagcagtctttggccacgtggttggagtttggatgatgcgggcattgggagttcatgatcttgtcgaaggtgttgacgcgcgaacgctgtcgagaagagtgagcggcggttgcaacaagttcctcaggcttacgcttgcggtccttatgattgttacttccactccctcctgtagccggcgtgtccttctttggcttccaactgggacccgactgcttcgatgcggtgacggcgtcttcggctttggcgtactcgttggctttttcaaacatgagcttgactgttctgggaggtttgcgcccgaatttgccgaccaattcttcgtggcgaatccctttggtgaatgcggcgatgatgacgtcgtcggtgatgtcggagatcttgttacgttgttcagaaaatcgctgaatgtaatctcgaagagattctccggacttctgaatgacgttgtaaagatcatattgtgtgccggggcgttcaaaggtgccttggaagttggcgatgaagtggtcgcgtagttcggcccaagatccaattgtaccacggggcaatccatggagccaggatcgggcggaatctgctaaagccacaggcagatagtttgccatggccttgctgcctcctcctactgcgcggattgcgagtccgtagacggtgagccaagactccggattggtggtgccgtcatacttttcaattccagtcggcttgaaactgactggccaatccactcgacgcaggtcattggtgaaggcagccactccatccacgtcgtcgtcgtagcgatcaggtgaatagcggtgacctcgtgctgcacggcgctggttgatcatgtcgcgaagatcgacgggatgctggtgaggcggagagtgaggccgttcgactcggcgttccctgtgacgttcgggaggcgagtgaacagatcgttcgccgtggtccctgctcctacgactggatcctgtgccgatgatgctgaggcttggttgatgataatcttgagatcgaagatgagggactcggcttccagtcggggtgcgggtacttgcagagttggccggaactgaggcagcgatcatagtcttcgtctggttcaagatgttgacaacatgatcagcttgattgagtgcgtcttccttgaggagggtgtcgaggagagtgattgctgcaaccgcgttctgctggggggtgcgaaaaaccgttgttccatcgatgtcctgttgcccaatgaggtctctcgctcgtcgcccggattccaaggcgcgctgtcgtcgatcttcagcctcctttgcaactcgctcgcgatcttgttgctcacgctgtagtcgttctcgctcttgtcgttgtcgttcttcctccagtcggcgacgttcagtctcttggcatgtgcgctcttggtccgcttctcgggcttggcgctgttcctccgtttcgttgtcagccatgaatacgccgaagaagaggggcatgtagttatcctcatagctatcgtcgaagttgtcgaggtcgccgtggtcatagtggtagccaaaatcgtcgtagtggaggatctcggttggtcgagaactgacgccgggggagctgaggtagccatccaactcttccgtcgagactgtcccgagaggttggagtataacgccaacctccctggatctagatcggatcggggccgaagccggagctcgcctagatcttcgagtgggagatgtcttgactgtgaagacagcggccaaatcatcaggaagtttcatcagtattgagggataggacccgtcgtcttgatctggtcgcggaagagtagattggatctcatccgagtggtttgaagccgactcgggagagatgatcttagagtaggtcttggccgagttcggaataccgaatggcacttggacctggtctctccccgactggtttgaatccgagtcaaggagagagatcttgccgaagtcattggtgatgaagttgaggctgccgaaccggaacgcctgcccgggaggaaaggcgaagtcgtcgatgccagaaacgaaacccat

SEQ ID NO: 79083 - DNA, 4873 bp, Oryza sativa
  Clone ID: PAT_MRT4530_78827C.1
ctaagaattgttgatgagagtaccgtcttcgcgcttgagtcgataagaacccggccgagtgacttcagcaattatgaatggtccttcccataagggagataatttatgccgatcctgtgttgtttgaattttcatcagaaccaggtcaccgactaaaaaggctcgcgatcgaacattccgattatgataacgacgcaacccttgcaaatatcgagtcgactgaatgaaagctgcttctcgggcttcttctaatcgattgatgccgtctactcggccctcttcatagccctcctcattgaagttccgaaatcgtagtgattcaaattccacttcactcggcaacattgcttctacgccgtaaaccaaaaagaacggcgactggccggtagcccgactaggagtagtgcgtaaagaccaaagtacggacggcagctgatctacccacttaccagcatagggacgtagtcggtcaaaaactcgtgctttgatcccttgaagtatcatgccgttagcgcactcgacttgtccgttactcatagggtgtgccacggatgcgtaacaaattttaatgccgaagtcttcacaaaagtctttaaatgctccgccagtgaattgagtgccattatcagtgatgatccgattaggtaccccaaactgatgcacaatgttgatgaaaaaatctctagctttatctgttgtgatcgtgatgaccggtttagcctcaatccacttggagaatttgtcgatagccacaaagagatgcgtgtaaccgccgactgcccttttaaacgggccgaccatgtcaagcccccagaccgcaaagggccaggacaacgggatggtttgcaactcttgggctggcaaatgagtttgtctggcaaaaaattgacaaccttcgcatgtccacacaatcttgtccgcatcggacacagctgtaggccagaaaaaaccttgccggtaagctttgccgacaatggtccgtgcagtagcatgattaccacaaataccagaatgtatatccttcaacaattgtctcccttcctccaaagatacacagcgctgcagtattcctgatggacttttctcttgtcggtaagcggtcatattatcatctagacatgaccactctttcatgacttgattaacaaccaactgagagtctccacggacgattaatcggcgaatgcctaaagagattgcaatccttaatccatggagtagcgcctcgtattccgccatgttatgggatgcagaaaaatgtatccacaatacgtagctcaatctttctccagtcggggaaatcaagacgaccctagctccagtgcctgtgagcctcttcgacccatcaaaatgcattgtccaatattccatcttttcctctggcatgtcttcttggcactcggtccactcggcaaggaaatcagctaaagcttgtgacttgatcgaagttcgtggaacctggtaggtcgccgtcacatataacagtagcggctcttgtggatgtggcgaggccaaaactggtggagtggtgagaagtttcttgaagtcttcaaaggctttctgtgcttcgggtccccactggaaattgtcagtcttcttcagcaacttgaagaagggcatcccccgctcgccgagtcgtgagacgaaccggctgagcgccaccatgcaaccagtcagcttttggacgtccttttgggagcttggcggtttcatgctgaggatggcgttgattttctccgggttgggctgtatgcctctttgagataccataaatccgagcaacttccctgacggtactccgaagatgcacttttccgggtttagtttcatcttgaaagcacgaatgcttttaaaagtttcttctaaatccgcaatcaggtcatccttctgcttggtcttgacgactacatcatcaacataagcttcgacattgtgaccgatctggtcaatgcgaggtaacccaaaagggtctttgggacaagatttgttgaggtcggtataattgacacacatgcgccattgccccgtctttttccgaaccaggactgggttagccagccagtcgggatgaaggacttccttaatgaagcccgctgctaacagcttggttaattcctccttgatcgcatccttcctgtcctgtgcaaaacgacggagtcgttgcttgatgggtttggcatcttccttaacatgtaaagagtgctcaatcacctctctggggataccaggcatatcggatggtttccacgcaaaaatatctttattattagcagtcttatcaggatcggagggatctaagggaatctttttcgttttggcatcactttcttcggtcttcgtcagcttggttgcaggcacttctccctcgcttgccgtggtcgcagccagtcggatctcttcgcgggcgagagtagtctcgtgggtttggggcatctcgcaactttctttgtcgcatgtgacggcctgcttgatgtcgctccgtagtgatatgactcctccaggaccaggcatcttcatcatcatgtaggtgtagtgtgggacggccataaatttagctaaagccggtcgtccaagtatagcatgatatgctgtctcgaaatcagcaacttcgaaacaaacattttctgtgcgaaaattctcccgagtgccgaaggtaactggaagagtgatctggccgactggtgtagctgacaatcctgggataacatcgtggaagggtgcattactcggctttaattccgtgcgaggaatctgcatatcgtccggggtcttagcgaaaaggatgttgagtgcgctggcaccatcgatgagagtccgtcggagcttgacattgcgaaccactgggtctagtaccagggggtaccgccccaggtggactactcggtcgggatgatccgagcggtcgaacttaattgctatctctggccaccgaagatattggggcgtgttaggctgaaccgcattgatctcccgttctgttagcttctgttttctcttagactcataagccagggttccgccgaagatgtaattaagttctttgcgatgatctggaaaaccagtcggagcatcgtcttcatcatctttcttctttgatgtgccttgatctccgtctgaaggtttacgtgcgttcttgacgtattgctccgcgaactgtttgtagacgaagcaatctttggccacgtggttggagtttggatgatgcggacattgggagttcattatcttgtcgaaggtgttgacgcgggaacgttgtcgggaagatggagaggtggtcgccacaagctctttgggcttacgcttgcgatccttgtggttggtacttccactccctcctacggtcggagtgtccttctttggctttacaagtggtgcccgatcgttggctttttcgaacatctgcttaaccgtcctgggaggtttacgtctaaacttgccgactaggtcctcgtggcgaatgcctttagtgaaagcggcgatgatgacgtcgtcggtgatgtcggagatcttgttgcgttgttcggagaagcgtcggatgtaatctcgaagagattctccagacttcacaggtagatagtttgccatggccttgctgtctcctcctgctgcgcggatagcgagtccgtagacggtgagccaagactccggattagtggtgccgtcatacttctcgattccagtcggcttaaagccggctggccaatccactcgacgcaggtcattagtgaaggcagctactccatccacgtcgtcgtcgtagcgatttggtgaatggcggtgacctcgtgctgcacggcgctggttgatcgtgtcgcgaaggtcgacgggacgctggtgaggtggagagcgaggccgttcgactcggcgctccctgtgacgttcgggaggcgagtgaacagatcgttcgtcgtgacccctgctcctgcgactagatcctatgccgatgatgctgaggcttggctgatgataatcatgagattggagctgagggactcggctaccagtcggggtgtgggtgcttgcagagttggctggaaccgaggcagcgatcatggtcttcgtctggttcaagatgttgacaacatgatcagcttggttgagtacgtcttccttgacgagggtgtcgaggagagtgatagctgcaaccgcgttctactggggggtgcgaaagaccgctgttccatcgacgtcttgttgcccaatgagctctctcactcagcgtccagattccaaggcgcgttgccgtcgatcttcagcctcctttgcaatccgttcgcgatcttgttgctcacgctgtagtcgttctcgctcctgtcgctgtcgctcttcctctagtcggcgacgttcagcttcttgccgtgcgctatcttggtctgcttctcgggcttgacgctgttcctccgtttcgttgtcagccatgaatacgttgaagaagaggggcgtgtagttatcctcatagctgtcgtcaaagttgtcgaggtcaccgtggtcgtagtggtagccgaaattgtcatagtcgaggatctcggttggtcgagaactctctggatctagattagatcggggccgaagccggagctcgcctagatcttcgggtgggagatgtccgtcgtcttgatctggtcgcggaagagtagattggatctcgtccgagtggtttgaagccgagtcaaggagagatgatcttggagtaggcctcggccgagttcggaataccgaatgccacggggacctggtctctccccgactggtttgagtccgagtcaaggagagagatcttgccgaagtcgttggtgatgaagttgaggctgccgaactggaacgcctgcccgggagggaaggcgaagtcgtcgatgccagaaaagaaacccat

SEQ ID NO: 79084 - DNA, 6588 bp, Oryza sativa
  Clone ID: PAT_MRT4530_78828C.1
ctaagcgtaaaatcgatgaaggtgttcaatattccaagaattgttgatgagagtaccgtcttcgcgcttgagtcgataagaacccggccgagtgacttcagcaattatgaacggtccttcccataagggagataatttatgccgatcttgtgttgtttgaattttcctcagaaccaggtcaccgactaaaaaggctcgcaatcgaacatttcgacaatgataacggcgcaacgcttgcaaatatcgagtcgattgaattaaagctgcttctcgggcttcttctagtcggttgatgtcgtctactcggccctcttcatagccctcctcgttgaagttccgaaatcgtagtgattcaagttccacttcactcggcaacattgcttctgcgctgtaaaccaaaaagaacggcgactggccggtagcccgactaggagtagtgcgtaaagaccaaagtacggacggcagctgatctacccacttaccagcattgggacgtagtcggtcaaaaactcgtgctttgatcccttgaagtatcatgccgttagcgcgctcgacttgtccgttactcatagggtgtgccacagaggcgtaacaaattttaatgccgaagtcttcacaaaaatctttgaatgctccgccagtgaattgagtgccattatcagtgatgatccgattaggtactccaaaccgatgcacaatgttgatgaaaaaatctctagctttatctgctgtgatcgtgatgaccggtttagcctcaatccacttggagaatttgtcgatagccacaaagagatgcgtgtaaccgtcgactacccttttaaacgggtcgaccatgtcaagcccccagaccgcaaacggccaggacaacggaatggtttgcaactcttgggctggcaaatgagtttgtctggcaaaaaattgacaaccttcgcatgtccgcacaatcttgtctgcatcggacacagctgtaggccagaaaaaaccttgccggtaagctttgccgacaatggtccgcacaatcttatccgcatcggacacagctgtaggccagaaaaaaccttgccggtaagctttgccgacaatggtccgtgcagcagcatgattaccacaaataccagaatgtatatccttcaacaattgtctcccttcctccaaagatacacagcgctgcagtattcctgatggacttttcttgtacagctcagtctcatgaataatgtaaagtctgctgcgtctgaaaatccgctcggcttcatttttgtcttgagggagttcttgtttggtcaaaaattttacaagaggttctctccagtaggcttcaatcatgcttacgccttgagtatccatggcttcgactatctcttttctaggcacggtcggttcataaagatgttcgacgaacacatctgaaggagctgcttcccgttttgaaccaaaattggccagtctgtcggccgccttattgttatgttggaggacatgggtgagctcgagtccatcgaatttgttttccaacttgcgtacctcttgtcgataagcggtcatattatcatctagacatgaccactctttcatgacttgattaacaaccaactgagagtctccacggacgattaatcggcgaatgcctaaagagattgcaatccttaatccatggagtagcgcctcgtattccgccacgttatgggacgcagaaaaatgtatccacaatacgtagctcaatctttctccagtcggggaaatcaagacgaccccagctccagtgcctgtaagcctcttcgacccatcaaaatgcataatccaatattccatcttttcctctggcatgtcttcttggcactcggtccactcggcaaggaaatcagctaaagcttgtgacttgatcgaagttcgtggcttgaatgatatgtccaaagatatcaactctaaggcccacttcgcaatccgtccatttgcttcacgattgtgaagtatatctccgagtggaaacgatgtgactaccgtaaccaagtgactttgaaaatagtgagataatttccggctgagtgccgccatgcaaccagtcagcttttggacgtctttttgggagcttggcggtttcatgttgaggatggcgttgactttctccgggttggcctgtatgcctctttgagataccataaatccgagcaacttccctgacggcactccgaagatgtacttttccgggtttagtttcatcttgaaagcacgaatgcttgtaaaagtttcttctaaatccgcgatcaggtcatccttctgcttggtcttgacgactacatcatcaacataagcttcaacattgcgaccgatctgagttgaaaaacatctttgaatcatgcgctgataggttgctcctgcattcttcaatccaaagggcatggtgatgtagcagtaggccccaaagggcgtaataaacgaggtcttcaagcagtcggattcttttagtcggatttgatgatatcccgagtaacagtccaagaagcagagtaactcgcagccggccgttgagtcaaccacctggtcaatgcgaggtaacccaaaagggtctttgggacaagatttgttgaggtcggtataatcgacacacatgcgccattgccccatctttttccgaaccaggactgggttagccagccagtcgggatgaaggacttccttaatgaagcctgctgctaacagcttggttaattcctccttgatcgcatccttcctgtcagcagtcttatcaggatcgaagggatctaagggaatctttttggtcttggcatcactttcttcggtcttcgtcagcttggttgtaggcacttctccctcgcttgccgtggtcgcagccagtcggatctcttcgcgggcgagagtagtctcgtgggtttgggccatctcgcaactttctttgtcgcatgtgacggcctgcttgatgtcgctccgtagtgatatgactcctcgaggaccaggcatcttcatcatcatgtaggtgtagtgtgggacggccataaatttagctaaagccggtcgtccaagtatagcatgatatgctgtctcgaaatcagcgacttcgaaacaaacattttctgtgcgaaaattctcccgagtgccgaaggtaactggaagagtgatctggccgagtggtgtagctaacaatcctgggataacaccgtggaagggtgcattactcggctttaattccgtgcgaggaatctgcatatcgtccagggtcttagcgaaaaggatgttgagtgcgctgccactatcgatgagagtccgtcggagcttgacattgcgaaccactgggtctagtaccagggggtaccgccccgggtggaccactcggtcgggatgatccgagcggtcgaacttaattgctatttctgaccaccgaagatattggggcgtgttaggctgaaccgcattgatctcccgttctgttagcttctgttttctcttagactcatacgccaggggtccgtcgaagatgtgattaagttctttgcgatgatcttggaaaccagtcggggcatcgtcttcatcatctttcttctttgatgtgccttgatctccgtctgaaggtttacgtgcgttcttgacgtattgctccgcgaactgtttgtagatgaagcaatctttggccacgtggttggagtttggatgatgcggacattgggagttcattatcttgtcgaaggtgttgacgcgggaacgttgtcgggaagatggagaggtggtcgccacaagttcttcgggcttacgcttgcgatccttgtggttgttacttccactccctcctgcggtcgatgtatccttctttggcttccaagtggtgcccgactgtttggacgcggtaatagcatcttcggctttggcatactcgttggctttttcgaacatctgcttaaccatcctggggggtttacgtccgaacttgctgactaggtcctcgtggcgaatgcctttagtgaaggcggcaatgatgacgtcgtcggtgatgtcggagatcttgttgcgttgttcggagaagcgtcggatgtaatctcgaagggattctctagacttctgaacgacgttgtagagatcaaactgtgtgccggggcgttcaaaggtgttctcgattccagtcggcttaaagccggctggccaatccactcgacgcaggtcattagtgaaggcagctactccatccacgtcgtcgtcgtagcgatttgttgaatggcggtgacctcgtgctgcacggcgctggttgatcgtgtcgcgaagatcgacaggacgctggtgaggtggagagtgaggccgttcgactcggcgctccctgtgacgttcgggaggcgagtgaacagatcgttcgtcgtgacccctgctcctgcgactagatcctgtgccgatgatgctgaggcttggctgatgataatcatgagatcggaggtgagggacttggctaccagtcggagtgcgggtgcttgcggagttggctggaaccgaggcagcgatcatggtcttcgtctggttcaagatgttgacaacatgatcagcttggttgagtgcgtcttccttgaggagggtgtcgaggagagtgattgctgcaaccgcgttctgctggggggtgcgaaagaccactgttccatcgacgtcttgttgcccaatgagctctctcgctcggcgcctggattccaaggcgcgttgctgtcgatcttcagcctcgccgaagaagaggggcgtgtagttatcctcatagctgtcgtcgaagttgtcgaggtcaccgtggtcgtagtggtagccgaagtcgtcgtagtcgaggatctcggttggtcgagaattgacgccgggggagctaaggtaaccatccaactcttccgtcgagactgtcccaagaggttggagtataacgccaacctctctagatctagattggatcagggccgaagccggagctcgcctagatcttcgagtaggagatgtcttggcggtgaagacggcggccaagtcatcaggaagcttcatcaggattgagggatagaacccgtcgtcttgatctggtcgcggaagagtagattggatctcgtccgagtggtttgaagccgactcgggagagatgatcttggagtaggcctcggccgagttcggaataccgaatggcacggggacctggtctctccccgactggtttgaatccgagtcaaggagagagatcttgccgaagtcgttggtgatgaagttgaggctgccgaaccggaacgcctgcccgggagggaaggcgaagttgtcgatgccagaaacgaaacccatcgcacttagtcggcgagaacttgacgctacccctacctgactcaggtcgtcaggcgtgacggccctgttcgtttcttcgagcaccaccttcttcctctcaagtccggccaccgagcaccaattccttgcagccaaaacatccttctgaggccgaacttccctgccggcgagctcacttggtgcccctctctcaaagacagctcgagctctcaattttttcacaatcttatagttattgaagcctgctttcttgaagagatcacgccagtcattttcgtctcgctgtcggcctttggtcgccaccatcatacccacatccataaggagttgggcttccagtagtggtccagaaggagctccaatcactatgtcaatgatgatcaccttccctccatctttgcgggctggaatagctttcttacattgagttagtattttcacacaatcctcgtcactccagtggtgaagcacaagcttgagcatgacagcttgagcaggtgggatggcgcggaacatgtcacccgctacatagttcaccacaccatcaccgcgtttattgccaatcacccggggaaagtccagcacggtgcacttgatatgtgggaacgcctcgacgatggccttcgccgctgcgccatcgccgccgcggcagtcggtcagcgactgcaccccctggaacacctcggaacactccctcagaaccgtggcgaagcccgagtggtcgtacgccgcgagagcttggttgaagaccgtgtcgacctccgggtggaggctcgccatgctctcgtcgaacagcaccgcgccgtgcacctcctcgaacggcgacggcggcgccgaggacgacggcggcaggtccttcccgaaccagtccgcgagccccatcgccgcctccacgaagtgcctggacgtcgcggcgagcaccacaagcacctggctcgggtggccgtcgacgacgggcgctgcgccttcgccttccaccaggagccacgacagcggggtgaggcggtacatcccggcccacccggtggcggtgtcgtcggcagcggcgaagacgcccgagttgaccagcagccgcatgaggcggcggaggaacgggagcttggcgggcgggagggagagggcggcgacaaggtcgggcagcgaggcggtgccgccggcgcggtggatggcggtggggatgccgagcttgacggcgcactgaaacgccatggacgtgacgaagtagaggctgtggcgcaacatgtcggcctgcgcgtgcagcagctcgtcgtcggtcggtggtgccaacat

SEQ ID NO: 79085 - DNA, 408 bp, Oryza sativa
  Clone ID: PAT_MRT4530_78829C.1
atggagccactttacaaacaagtacatggaaagaaagatctttatgtgagttctttggtggacatgtacgctaagtgtggcagggtcagggatgcaaggatgatctttgaagcaatgccatctaggaatgtggtttcatggaatgcaatgattggtggctatgctatgcatggagaggctgagaatgctcacaagcatggaatttctccgaggatggagcactactcatgtatggttactctgcttggtcgggctgggttcatggaaatgtggtccttgctgagcccgtgggtgatggcggtgctggatctgctgcctcctcgctgggagggctcgccaccgccactccccatcgccaagtgtccgccgcctcccccgcgcctgatatggagcgccgccacgaagtag

SEQ ID NO: 79086 - DNA, 320 bp, Oryza sativa
  Clone ID: PAT_MRT4530_7882C.1
gccgcaccctaatctctccctctcacgcgggacgcggcgccaccacaatcgccgctgccctcgactgccgccgctccgccgtcgtcgcatccgtcatctcgccgccaccgatccccgcgccaccgccgtcaccgccgccctcggctgccgccgctccgccgttgtcgcatccgtcgtctccccgccaccgatccccgccgccggctcgccctcaaccgatccccatcaccgtcgtcacatccgtcgccctcaaccgatccccatcgccgtcgtcgtccaggattcacgtcgccgccgacgccttccgcgccgagctattc

SEQ ID NO: 79087 - DNA, 500 bp, Oryza sativa
  unsure (1)..(500): unsure at all n locations
  Clone ID: PAT_MRT4530_78830C.1
tccactcctgcttcctccaccagtccacggcccgcgtcgccgcgcgcgtcgcctccccgtcnccggcgacacggacccacctcctcctctgccgctcccagaacangacnacccnacntctcccgccgcgcggcgctcgcgctgctggccggaaccaccgcngcngtnggggtnaaagtggccccgccgccgcgggctacggcgangcggcnaacgtnttcnggaacccaanaccaacacnganttcatcncctacagcggcgaagggttcaactgctgatccntccaantggaacccngcnagganccnagttccccggacaggtcctccgctacgangaacacttccancccacagcaaacgtctccgtcataatcnacccccccccccaanaaaacntcnccganttcggctcccccaagaattcctcccccangtcaattcttgcttgcaagccggcttactccgcnaganaaatctgaaggtnggtttaattcga

SEQ ID NO: 79088 - DNA, 1943 bp, Oryza sativa
  Clone ID: PAT_MRT4530_78831C.1
gcaggcgacgacgagaagcggcggcgcgtgccatgtcgaggttctggaggccggggtcggagaagccgacggcggcatgtcgaggttctggaggccggggtcggagaagccgacggcggcgatcgtcgaggacgaggagggcggcgtcctcttcctgcccacaagcaccagctcctcctcctcatccgggtttgggtacgcgagcttggagcggcagcggcagcggctgccggtgtacaagtaccggaaggccatcctctacctggtggagcggcacgccacgaccatcgtcgtcggcgagaccggcagcggaaagtccacgcagatccctcagtaccttaaagaggctggatgggccgagggtggtcgacttataggctgcactcaaccaagacgattggccgtgcagggtatgaccatgattaaatttctgacagatggggtattgatcagagaaatgatggaagatcctcttctgaccaagtataggcgaaagaattctatgcttgagtctgctgatcatttgcccaacccagaacctgctattctttctgtggaaggtaaaggttacacagtggaaatccattatgttgaagaacctgtttcagactacttacaggctgctgtgaatactgtacttattattcacgaaaaggaaccaccaggggatattttggtatttttaactggccaggatgacatagacgcagctgttaagatgctaaatgaagaaattcaacaccgtggaagacattatttaggttgttattcttctgatgacctgctgattctgcccttgtactctggccttccgcggggagatcaagacctcatttttactccaacttcaaaaggtaaaaggaaggttgtgatatcaacaaacattgctgagacgtcattaactctagagggcgtggtgtatgttgttgatagtgggttttccaagcagaagtgttacaatccgatttctgatatcgagagtttagttgtcgcaccaatatccaaggcatccgcaagacaaagagcaggccgagctggaagggtgcgaccaggaaagtgctttaggctttatacagaggaattttaccttaaagaaatgcagccagaagggattcctgaaatgcaaaggtctaaccttgtttcctgcataacacagttgaaagctctaggaatagacaacattttgggatttgattggccagcttctccatcaccagaggcaatgattcgagctcttgaagttctatattccctgggaatccttgatgaacatgccaaactaacagtacccctgggcttccaagttgcagagatccctctttctgtgtgggtttccacgagaggagtgaaaaaagagtttgatgattttaagctccgttttgctgctgctgagaagaaggttattaacatcaggggctagctcgtcagtattttcaaggggtttggtatatcactaagatcatgtgatagagatacggaggtagtaagataaggtattatcgctggagcctttgcttatgcatgccatcttgagggcagattttttcctcatacatctccagcatatagtcagaacgtaatatccctgtaaaagcctattataagggttaattcaaagtggttcatctaccagtctctagtttcaagtgataagcactttatgcgtaatgttattgccattgaaccatcatggcttacggaagctgcaccacatttttatcagttccggacacccaatcctgcccttcactaactatatgatggtaaatttatttctttctgtttactcattatcaaccgtcttccgtagttacaattttgtgaagtttatccatgttgatcgcagaaaactgcaacttgatctttgcacctttttgccctttttggctattctactttttacttaagggtagttggatggagtttcaccacttttagcactc

SEQ ID NO: 79089 - DNA, 5353 bp, Oryza sativa
  Clone ID: PAT_MRT4530_78832C.1
ctaagcgtaaaattgacgaaggtgttcaatattccaagaattgttgatgagagtaccgtcttcgcgcttgagtcgataagaacccggccgagtgacttcagcaattatgaacggtccttcccataagggagataatttatgccgatcctgtgttgtttgaattttccgtagaaccaggtcaccgactaaaaaggctcgcgatcgaacattccgattatgataacggcgcaacgcttgcaaatatcgagtcgactgaattaaagctgcttctcgggcttcttctagtcggttgatgttgtctactcggccctcttcatagccctcctcattgaagttccgaaatcgtagtgattcaaattccacttcactcggcaacattgcttctgcgccataaaccaaaaagaacggcgactggccggtagcccgactaggagtagtgcgtaaagaccaaagtacggacggcagctgatctacccacttgccagcataggggcgtagtcggtcaaaaactcgtgctttgatcccttgcagtatcatgccgttagcgcgctcgacttgtccgttactcatagggtgtgccacggaggcgtaacaaattttaatgccgaagtcttcacaaaagtctttaaacgctccgccaatgaattgagtgccattatcagtgatgatccgattgggtaccccaaaccgatgcacaatgttgatgaaaaaatctctagctttatctgctgtgatcgtaatgaccggtttagcctcaatccacttggagaatttgtcgatagtcacaaagagatgcgtgtaaccgccgactgcccttttaaatgggccgaccatgtcaagcccccagaccgcaaacggccaggacaacgggatggtttgcaattcttgggctggcaaatgagtttgtctggcaaaaaattgacaaccttcgcatgtccacacaatcttgtccgcatcggacacagctgtaggccagaaaaaaccttgccggtaagctttgccgacaatggtccgtgcagcagcatgattaccacaaataccagaatgtatatccttcaacaattgtctcccttcctccaaagatacacagcgctgcagtattcctgatggacttttcttgtacagtttagcttcatgaataatgtaaagtctgctgcgcctggaaatccgctcggcttcatttttgtcttgagggagttcttgtttggtcaaaaattttatgaggggttctctccagtcggcttcaatcatgcttacgccttgagtatccatggcttcaattgcttcttttctgggcacggttggttcataaagatgctcaacgaacacatcagaaggggctgcttcccgttttgaactaaaattggccaatctatcggctgccttattgttatgtcgaaggacatgggtgagctcgaatccatcgaatttatcttccaacttgcgtacctcttgtcggtaagcggtcatattatcatctagacatgaccactctttcatgacttgattaacaaccaactgagagtctccacggacgattaatcggcgaatgcctaaagagattgcaatccttaatccatggagtagcgcctcgtattccgccacgttatgggacgcagaaaagtgtatccacaatacgtagctcaatctttctccagtcggggaaatcaagacgaccccagctccagtgcctgtgagcctctttgacccatcaaaatgcatagtccaatattccatcttttcctctggcatgtcttcttggcactcggtccactcggcaatgaaatcagctaaagcttgtgacttgatcgaagttcgtggcttgaacgatatgtccaaatacatcaactctaaggcccacttcgcgatccgtccatttgcttcgcgattgtgaagtatatccccgagtggaaacgatgtgactaccgtgaccgggtgactttgaaagtagtgagataatttcctgacggtaattagggcaccatatagtaacttttgaacctgaggatatcttgtcttggagtcggctaaaacctgggaggtcgccgacacatataatagtagcggctcttgcggatgtggcgaggccaaaactggtggagtggtgaggagtttcttgaagtcttcaaaggctttctgtgcttcgggcccccactggaaattgtcagtcttcttcagcagcttgaagaaaggcatcccccgctcgccgagtcgtgaaacgaaccggctgagcgccgccatgcaaccagtcagcttttggacgtctttttgggagcttggcggtttcatgttgaggatggcgttgattttctccgggttggcatgtatgcctctttgagataccataaatccgagcaatttccccgacggtactccgaagatgcacttttccgggttcagtttcatcttgaaagcacgaatgcttgtaaaagtttcttctaaatccgcaatcaggtcatccttctgcttggtcttgacgactacatcatcaacataagcttcaacattgcgaccgatctgagttgaaaaacatctttgaatcatgcgttgataggtcgctcctacattcttcaatccaaagggcatggtgatgtagcagtaggccccaaagggcgtaataaacgaggtcttcaagcagtcggattcttttagttggatctgatgatatcccgagtaacagtccaggaagctaagtaactcgcagccggccgttgagtcaaccacctggtcaatgcgaggtaacccaaaagggtctttgggacaagatttgttgaggtcggtataatcgacacacatgcgccattgccccgtctttttccgaactaggactgggttagccagccagtcgggatgaaggacttccttaatgaagcctgctgctaacagcttggttaattcctccttgatcgcatccttcctgtcctgttcaaaacggcggagtcgttgcttgatgggtttggcgtcttccttaacatgtaaagagtgctcaatcacctctctagggataccaggcatatcggatggtttccacgcaaaaatatctttattattatcagtcttatcaggatcggagggatctaggggaatctttttcgtcttggcatcactttcttcggtcttcgtcagcttggttgcaggcacttctcgctcgcttgccgtggtcgcagccagtcggatctcttcgcgggcgagagcagtctcgtgggtttgggccatctcgcaactttctttgtcgcatgtgacggcctgcttgatgtcgctccgtagtgatatgactcctcgaggaccaggcatcttcatcatcatgtaggtgtagtgtgggacggccataaatttagctaaagccggtcgtccaagtatagcatgatatgctgtctcgaaatcagcaacttcgaaacaaacattttctgtgcgaaaattctcccgagtgccgaaggtaactggaagagtgatctggccgagtggtgtagctgacaatcctgggataacaccgtggaagggtgcattactcggctttaattccgtgcgaggaatctgcatatcgtccagggtcttagcgaaaaggatgttgagtgcgctgccaccatcgatgagagtccgtcggagcttgacattgcgaaccactgggtctagtactagggggtatcgccccgggtggaccactcggtcgggatgatccgagcggtcgaacttaattgctatctctgaccaccgaagatattggggcatgttaggctgaaccgcatttatctcccgttctgtcagcttttgttttctcttagactcataagccaggggtccgccgaagatgtgattaagttctttgcgatgatcttgaaaaccagtcggggcatcgtcttcatcatctttcttctttgatgtgccttgatctccgtctgaaggtttacgtgcgttcttgacgtattgctctgcgaactgtttgtagacgaagcaatctttggccacgtggttggagttgggatgatgcggacattgggagttcattatcttgtcgaaggtgttgacgcggggacgttgtcgggaagatagagaggtggtcgccacaggttcttcgggcttacgcttgcgatccttgtggttgttacttccactccctcctacagtcggcgtgtccttctttggcttccaagtggtgcccgactgtttggacgtggtgatagcatcttcggctttggcatactcgttggctttttcgaacatctgcttaaccgtcctgggaggtttacgtccgaacttgccgactaggtcctcgtggcgaatgcctttagtgaaggcggtgatgatgacgtcgtcggtgatgtcggagatcttgttgcgttgttcggagaagcgtcggatgtaatctcgaagggattctccagacttctgaacgacgttgtagagatcaaactgtgtgccgaggcgttcgaaggtgcccttttgaagaaccgaaaatttcccttttcctactgtttctgattttacactaagcacattatgttcattcggcaacccttgtcggttccttagaacaactggtatgtacaataagttgacgtcgaacataactgggctgcttggagccactcttggccttccaggagctgaagtaaggcccttcggaaatgctagcgggccaggtatgtataatcgccgtagtcctccaaccttcattgacaatatcccttcatcaagtccctttatcacctgtcctgaaccaacacggaatatgtagggctgccccttttccagagaactgtcaaatatctgtccattcggtaccatggcaacataatttgcagcaacctggaagccaatgggtggacttgggccttcacccactttgatatccttgtactgaagaccagactctgtagtcaccatgggcacattttcgaggtccttctcgcaggcggcgtcgcagagcttgggcttctcctcgggaggcagcccggcggcgagggcatcatcgaacgcggccaggccgagcgccagcgccgacgatacccccacggcgactccaagaacgctcctcctccgggaccgggtggcgctggtacagaccacgccgccgtcatccactccgcgctgctgcggcggcggcgccgttcccgcctcaccggcggcctcgcacctgcagcagcagcagaagcatcgccgcgccgctgaactcagcgccctgctgcccctgaacgccctgccgtcgggaagccacggtttggaggaagggagcgggcggcgggccgaggggaggaggagcggcgaggcggtggcggtggaggaggacgaagcggttgcagccatggtggaagaagaaggaagaggagagcggacgcgtgggcggacgcgtggg

SEQ ID NO: 79090 - DNA, 2172 bp, Oryza sativa
  Clone ID: PAT_MRT4530_78833C.1
ggagagagagaactagtctcgagttttttttttttttttttgcttggtaagtaattacctcatgaggaaatattaacctagggtacagagacgtagatgcttttctacaccatcctgcttttctacaccatccttgccaagttctgtaaaatgtagagtcgaacaacacaagaaaaatcaccaatagtctgcgcatgaacattttccatccttgaagtgatgaaatcggttggtgtctctaacatatatctccctcctctcgaaagatgatatgaacttcattgcttcatggcagtcaccacaaatccgaagattctttatcacctgaaggggtgttccatgacttgtgcttataaggcccaatgctacagccaacttctcactgtgcacagaaaggatatcatccttttcttgctcttccacatcatgtaggacataatctgtacttggtgcaaagcctagcctcctcatctccatagtaaggtgttttagcttctcagttattgcagccatcatggggtgtgaactatcaccagccaacaacatgtgtaccttgttcttgatctctatccaactacagcctttttctttcttcaaccctacagtcttcatcatatccctcagcctattgaccccatcccacattttcttggatgcataaatgttggaaagcaggacataattaccagcattttctggctctagttgaaatagattttctgctgcaacctcagcaaggaccacatttccatgaaccctgcaagagcccagcaatgacccccaaatacaaccgtctggctcaaacggcatctgatttatgatatcatacgcatcatcaagcttaccagcccgaccaagcagagtaaccatacatgcgtaatgctccatcctcggagaaattccatgcttgtgctgcatttcattaaagtaactacgcccctcctctgtccagccagcttggctgcaggcaccaaggacacaagtgaaggtgactaggtcaggcttctctttggaactttgcatggatcggaacaaccgcacagcattctcagcctctccatgcatagcatagccaccaatcattgcattccatgaaaccacattcctatatggcattgcttcaaagatcatccttgcatccctgaccctgccacacttggcgtacatgtccaccaaagcactccccacataaatgtcatgatgaaagcccttcctaagagaaaaacagtgtgcagaacgaccatgcatcagagctgcaatatttgcaaaagctggcagcacgcacggtattgtaactgaatttggctcgattccttctgactgcatctccctgaaaagatcaacggcttccagatcccttccattctgcacacaacaagctacaatcgaggtccaggaaacaacattcaactcaatccctctgccgacaaactccctgaacaaccttaaagcctcagagacttgagcattccgtgacagcccagcgacgagggcattgcaagaggcaacatccatatggcttgactcatcaaacacccggactatctcatcagctcgtccgcacttgccatacatgtcgatgagcgcagtggccacacaagcatccaacctgcacccggccttcaccacatacccatggagctgctcaccgacagcgacatctccaacatccccaaccgcagatagcgcacacgagactccggtcgcgtcaggcaagaacccttccccgtgcatcctcacaagcgccaggaccgcgtcccgtgcgcgcccgctccggttcagcccggagacaagcccgttccaggtgatcacattcggctcgacgccatcgctccgcatccgctcgaggagcccccacgctccctcggcgtccccgtgagaggcgtgagcggcaatgagcgcgctccagcccacgacggtcctgtgcggcattccgtcgagcacgctgcgggcgtcggccgtggcgccgaagcggaggtaggcgtggaggagcgaggacgcgacgaaggcgtcccgcgagacgcccgcgacggcggcggccgcgtgcagggcgcgggcgaggcgcagcgccgagcatgacttgagcgcggaggggaggaggcgcgggtccggcgggaaggagacgtggcgtaggaagttgaggacggagctggtggtggagcgggtggacat

SEQ ID NO: 79091 - DNA, 646 bp, Oryza sativa
  Clone ID: PAT_MRT4530_78834C.1
caaaatctagctagacagcgccaaagtttaacggtgaataacgagccagctcaactcaactcgttaaccttagcgagctccaagactaacacaactagatacgtcatcaagttgtccaagttctacaatccaattcggttacctactacagtgttgacttcaaacggccactaaatatacatacgaactccgttttgggtctatgagtacctgatgaaaagcaaccagagtcctctttccaacggatcaagccttatcttcaaatttcatctcagtcggtcgcaatcatagaaacaaacgcatgtcagctagaccccctaattactcgtcttcggaacctcacattatcgtgagttctaattcctatttgcagttcagattgctttgtatcttgttattatttgtttcttcgatttgcttgcaggaataagattgatctgcaccggcaatatcaataactcactgagagatgtatcgatcgctaaggcacaacacaacaatatctcgtatggctgtagtcgtgtcaacaacttctctcccaaatcatagttatctttaactcaccgaaagatcgggccaataagaacagttagcgtatgaattatctctgcctttttaaaaaaaaatcaaagctataatagtatac

SEQ ID NO: 79092 - DNA, 602 bp, Oryza sativa
  Clone ID: PAT_MRT4530_78835C.1
ccggccgggatcctcaaacatataagactactatcatctgtcaatccatgagttaacactcatcattatataatcattaatggcaataaacaccaacataatatttgccctgatggcctcaattgctctttctgcaactgccacataatgaaatcgccactatactactatgttcacaccaacttatgcatgggcagcatgaatccctgaatcaccgacatgaagcataactacggcaagccgagctccacacccatgatgatgacgcatgcaatggatcttcagcagcacttatgctgcatgcagctacgaggaatgaaggctcagagcacactagagcgaccagttgcctagaagatcgcaccagcatgcaacaagatattttcgctggtactcggggagcatgagatgatgaacatgggatgcagatgccatacatgtgcaacatggcccctgtcaacttccaactctcttcctgtggctgatgatgatcaaacgtggattacatgcactctaggaataatgcgatacatactatcgcgtgcaaacactacaaataagaaccattgcatagaatatcactcattttcagacttgcaaaa

SEQ ID NO: 79093 - DNA, 720 bp, Oryza sativa
  Clone ID: PAT_MRT4530_78836C.1
tcatgcttgggcagctccggcacgacggggtgcggcggctcctcgtgcttgggaagctccggcacgacggggtgcggtggctcgtcgtgcttaggaagctccggcacgacggggtgcggtggctcctcgtgcttgggaagctccggcacgacggggtgcggcggctcctcgtgcttgggaagctccggcacgacggggtgcggcggctcctcgtgcttaggaagctccggcacgacggggtgcggcggttcctcgtgcttgggaagctccggcacgacggggtgcggcggctcctcgtgcttgggaagctccggcacggcggggtgtggcggcagctcaggtttgggcaactccggcacggcggcgtgtggcacctccggctttggcagctccggcacgacggggtgtggcggctcctcgtgcttgggcaactccggcacgacggcggggtgcggcggctcttcgtgcttgggcaactccggcacgacggggtgcggcggctcctcatgcttgggcagctccggcacggcggggtgcggcgggtactcctcctcgagccaccgtgccgcgctgctcatggagctgcacgagagcagcagcagcgcggcgaggaagagaaccgaggaagacatggcgttcttgttggagaccatgctggtgagctagctatgcctatgctacctcagtgtgtgagagctagtgtgctgtgatcccggccgg

SEQ ID NO: 79094 - DNA, 1293 bp, Oryza sativa
  Clone ID: PAT_MRT4530_78837C.1
tttttttttttttttttttttccttcaaaaactcaaagggggtagaatgctacttgtagtacattagatggaacaatggacaaggacaaaaggatcacatcagtcattacaccatccatgctgcaatccagattagatgatatcatcgcccctcaaaacttatctccagttccgaatggctaactaaaactgataaggttagatgatgaaaatgttacaggaagagaacatacataaagatgaaatagatgggactcccgtctaccaaaaccatcaatcacaaaaacacccgaccatcaacatgcggcagataaagcgcagcagcaatgggcatgcgaacaggtgagcacttggctgattccaaaggttgattccagttcccagtgtaaaagaagacataagccatcgcatcttctaaagatcatcaatatgaagaaaccaatccccacttcacgatttcgaactacatcatttgaagatggagatcagcagcctgctgcgccagctcgttcatcatggcctcatcaaagaacttgttgatgctcacatcctcactcatgcccttccttcgcctagtcttcaccataaactcacgagcaagatgctgtattggtgctggttccagaggccggaggacaatattcttgtctaaagggtcaccaggaacaatagcccagtgatcgaacactgataggcaaaaggcccgtccctgtgtatggtacctcaggtcggtctcaaatccaaatgactctataacaggtaaaaatgccttaacaacatagattggagttcctggtttgggtacatccgctgttacatgccctcgacgacgggatagcaccgtatatatggcagagacacagtcaattggtgtttggatctcaatataatatacaggctccataaggcgtggattagccattaggaacgctgagtaaaccacacgacgagctgttggaattatctgaccaccaccacggtgcaacggttcaggagctatgtttgcatttaagatcttgaatttcacatttctaattggttcatcacacagcggaccttctctagcaccccattgaaacccttgaacaattgaatctttgactgcattgagcaagtttttatccacctcgactgaaagggtgtcatctaagagaatgttaggaccctgcttttcaggcccaaaagcccatattgaccttgctgctagcacatcccactggtagcgttgacgaaagaagtcagtgatttccatttgccttgagtccaggctaacaaggccgttctcaaagtcaa

SEQ ID NO: 79095 - DNA, 1743 bp, Oryza sativa
  Clone ID: PAT_MRT4530_78838C.1
aaaagagaaaaaatactgtacattaatcggatcatgctttggagttcttcagcttagatgtatttgccacaatagaatgtgcagagaacacgaaaaaaaagaaaaatctgatttctgaacgttgatgagagcagcagaatcgatcactgtgtgaatgtgaagcttaggcctcgaggacttggcaatggaggacgcggttcttggcgcggccgcggccgccggcgatggcggagaggagattcgcgacgaacgccttcatctgccccttgccgacgaccgtctcccaccgcgggcttgcggcggcgacgtcgacgacggagacgctcatgtcgttccggacgacgcagagcttcccgtggagggcgaccatggcggccgcctccaccgcgtgggagctccccgcgtgctgcccgccgtcgacgcggccgctccacgcgccggcggcctcgtcgtaggcgcgcaggcggcacccgtccttgcagtcggcggcgtagaggcggccgccgagcgacgcgctcgggctcctccacccggtcaccatggcatcgagctcgtgcgccgccgaccacgcgtccgcctccggcgagtacacctggctcatcacctgccgctgcgcgcccagccccttcacgtaccacctcccgccgtgcaccgcgctgacgaacggcatcagcgacgccgccatgtcggacacgaacgaccaccggttcttggccgggtcgaacacctccaccgacctgaggccaccaccaccaccgccgccaacgccgcaaccctcgccgccggcgacgtacaggcggttgcccatcacgcagcacccgaagccgtgccggcgccgcagcatgtccggcgcgcggtgccaccggttgctccgggcgctgtagaacaccacccgccgcatcggcccccggcgcgggtcgctgccgccgagcaggtagaggtggcagccgccgagcacggcgcagccgaacccggcggcgccggcgtactcccccggaacgggcggcagcgcgcgccacgccagccgcgccgggtcgagcacgtcccacgacacgcgcccctcgccgtcgcgcttgacggcgtacacccactgctcggcgaggcccagccgccgccggaggccgtagaagtagttgccggcgagcagccgggaccacctcctgcacaccagcctcagcttccagtgatcacctcgcggcacgcggatgaggcacgccacggcgaggtcgtcggggagacccgggatgagcgggcactgccggccgccgccgccaccggcgccgccgccgccgcggtggtcgcgccccggcgatctcttgggcttgagcgggtggatggacgccctgaggctcggctgcgcgcacgccttcgccctcggcatcagcctcgccgcggcggcgccggcgaccgatctctccactctgcacaagcatgctgagctatcaaccggaggagcttggttccttctgtccatggcctgtccctgaagcaaagtatcaagaaaccacagcagcaagaacatactactcaccaccaatcacccagagatatatatatatacataatcacaccaaaatcatcaccatgcttctacagctccaacacccattgcacatgattcatgaacagaagagggtaagagaactgcaaaacctcccaaccagaagcctctcctttatgctggttgatcatcaggaggaggaagaagaagaagaagaagggtcaaggagaagacattagatg

SEQ ID NO: 79096 - DNA, 573 bp, Oryza sativa
  Clone ID: PAT_MRT4530_78839C.1
atgaacagagagactctggaggaggaggctgagaggatcaacgccacccagtcgcgccatttggcgctgaagcccattctctctaggagtattagcaggtcgtacccgaacctcgccgccgcgccgccgccgccgtgccgcttcgacgacgacgaccgcaacctcgacctcagcttccagtacagctgcctcaccggccgcggcgccgccaccgccgccgacgaccgccgcctccctgcgccggcgcccttcgctgtcgtcgccatcctcctccggccgccgccgccgccgtacagtccgtccagaaacgccatctcgatccgcctttctccggctgcaggccggatggctgtgggtatcaccgccggcggcggggccagcgagccactcaccggccggcaggaatggtccgggctaaagtggatttcagccgggcggcggatggcgacagcgtcgatggcgtcggcgggtggcggatctggcggcgctgccctcaggagggccggatccaccgccatagggagcggctacagcggcggcgggcggcgcgtctacggcgatggctcggcatag

SEQ ID NO: 79097 - DNA, 1389 bp, Oryza sativa
  Clone ID: PAT_MRT4530_7883C.1
ttttttttttttttcgagaccgaaagtggagctactttttcttcaagaattggatgatagtacaactttgtacagagcatacaaaaccaaacctggctgctccaatacaaacaggtagggcaaattgtgtcaacacaacttttaaaaaaaaagagcctcctatgaatatgatatctctacacttgcagtgctgcaaaaaaatgtggaagactgaagagagttgcaggcccagcaattatggatatgggctgaaccgtctttgaattttgagatcagtaaactgtaaacatgcaactgaactgcagctgttccagtacgcaggcactgcataatcactcagcgagtgttgttcacttggaagccatacatcaaccataaagaatatatatatctatgtcagaaaaggacctccaatttaatcaggaggccgaccatgatgaagataagaatgacaagggtagtcgcacacatgaccatgccccctttcttctgtgtcctctcagccttttgcaattgtttataaccctcttcaacggaagctgcaacattctgtatattgtagtctatccgatctatgatagttccctgatctatcacaagaactgaaaggtccttcatgatctgtgcaagctcgttaactgattcgacaacctgctcgatttctctttctctttctctggtgaatgcttcgcttttcttaagttttgacatctgaacctccgtgaaacccacatcctcaaattcatcatctccaagttcaaatgtcgacttagaaccattcatgttcatttccaaatcaactccatcttgcccctctttctgttggcgtagctgctttaaataagttgactgttttttacggaactccatcgaaaggctttgcaggtctgtagcgagtgaacgctggacattctttcggacatttgaatcctctgaagaatctttcatggatagcttctgaagtctcttctccgacctcttcagtaagtctgttacctcatgtgtaagaatctcaattgctcgctggtcatctctaccatcaccaaaggatggcatcaaggctttggcatgtgccttagccagctctgccatcttcgttcttgcccgctgcatgttggcagatatctcttcggaaacatcaacccatgccgggggcagcccgaccgtcacagcacttctactggaggcggcggaggggtcgtcggtgctgaggggggcgtaggggcggttggagcgcagcagcgaggccatctcgatcaccggccccccgcctcctcctcctcctcctcctccggacgatgacgacgacggagcccccgccggcgcgcggacgtggcgcagcgcgtcgcggtacttgcggtacagaggcgtccggttccgcgtcgccat

SEQ ID NO: 79098 - DNA, 263 bp, Oryza sativa
  Clone ID: PAT_MRT4530_78840C.1
atgaaaaaaccatcactaggttaaagtgcttatgtctgccaaatttagtacgggccaatacaccggtccatccccaggttatggggctcacaaactagacaaacggccgcgactgaaaattgaattactggagccggacaggatgtttaattttcaacgctgaatgtatgtgcaagactaggactggatagtcgggccgtactgatcgtatggggcagtctggtcgaagcatgtgactaagattgcctttgaaaagaaacccg

SEQ ID NO: 79099 - DNA, 355 bp, Oryza sativa
  unsure (1)..(355): unsure at all n locations
  Clone ID: PAT_MRT4530_78841C.1
ggaccgcttcaagnccggcaagaacaggtggtttttcncntaagtccgcttntgngctctctcctgcggcggcggcggcgncgatgggatggtactggtgcccggccatctcatcctttttctctttttctaaagcttttcgctttntgngtngcngccnatgaatggttttggattttctaaattaatttcaatccccctgatgtaatggtnctactgcctgcttntgtgggtgtggatgtttngtngtntggatnttttnaagaagcntnttgggngnaaaaaaaaaaaaaaaaaaaaaaaaaaaaaaaaaaaaaaaaaaaaaaaaaaaaaaaaaaaaaaaaaaaaaaaaaaa

SEQ ID NO: 79100 - DNA, 244 bp, Oryza sativa
  Clone ID: PAT_MRT4530_78842C.1
tattctcatgggcggacgcgtaggcaccagccggcgcctccgactacggctggggcgccaacaacaagctcctcccgcgcgctccgagcccatcatggcagacgtcaaaatcgagactgatgtcaccttcggcgcacagccaaagaagaggacattccgcaagaacagctaccgcggcgtcgacctacacacgctcctcgacatgaccaccaatgaccttgaacagctctttcccgcgcgcgcc

SEQ ID NO: 79101 - DNA, 1019 bp, Oryza sativa
  Clone ID: PAT_MRT4530_78843C.1
cccgggctgcgtccggcacaccggagtgggcggagccggaggaggtggccgcgtcactccccgctccggcgatccggccgagctctccctctccaggttcccttcgcgagcttgggggaacaggatggcttccgcgcaggatcccttctacatcgtcaaggacgagatccaggagtcgatagaaaaaattcaagatactttgcatcagtggaagcaaacaccggaaaacactggagaacatgtgcatctgaccaaagaaataatagcaagctgcgaaagtatccagtggcaggtggttgaactggagaaagctatttcagttgctgagagagatccagcttactatggacttaacgaggttgaaataggaaaaaggaggaactggactagcactgctcgtaaccaggtggtctccataaggcggtgtgttgaagctggaaagcaaaagagtgcctttggccattcagtcaatccttctgaattagtgaggtccaagcagcacattgctcaagataacgatgacttcattgcttcagaatcagatcagcagatgctcctgattaagcgacaggatgaggaattggatgagcttagtgctagtgtccagcgaattggaggtgttggtctcaccatacatgatgaacttgttggacaggaaagacttttgggggagctaagccttgacatggaaactacgaccaataggctcgactttgtgcagaaaagggtggccatggtcctgaagaaggccagcttgaaaggccagattatgatgatagcattcttggtggttcttttcatcattcttttagttttggtgttcttgacttgagaaatttggtgtgagttaacattcttgttgtgttcagaactatacgagagtgcagagttttgagtcattgtgtattcttatcgggtgcatagagcagacagcttaagtacattgcatgtaattgtgtcggtagtttgttccttctgaaattggctctgccaagtgatatatcattcttttccccggc

SEQ ID NO: 79102 - DNA, 1776 bp, Oryza sativa
  Clone ID: PAT_MRT4530_78844C.1
atggatcgccacgcgccgccgccgccgccgctggagatggccgccggcggcgatcgcctgagcaagctggaggacgaggtgctcggccacatcctctccttcctcccggctagggaggcggcgcgcgcgtcgtcgctctcgtcgcggtggcgccacgtgttcgccgccgtgcacacggtgtccatggccgagaccgacgccgaccaccccgcgatccgcggctacgtcagcccgtcgtaccgccgcggcctcgaccccctcgcgccgccggtcttctccgccgtcgtcaccaccgcgctcctctcgcgccaccgccgcctccaccgccgccccgtcccgctgcgcgcgctccgcgtcgacatgatgggctacgtgcgcgccgactccgccgccgtcgatcagtgggtctcctacgccgtgcagcaggcggccgccgaccacggcctcgagatcgatctccgcctcggccgccccgcgatctgcgaccgcgcctactctctccgcgacggcgagaacatcgccgaggacgacgacgacgacgacgacgatgacaatgccgaggacgagcaacatgacaacgccgccgacgacgacgacgagaaacaagaagcgagagatcgctcgccgtcgccggcgagacgggctcctagtcatagcccctctagctcggactacgacgacgacgtcgcctcctccgacgacaagaaggtccgtggctacactcctgtctttcgtccatggcggccggtgcacaccatcccgagcatgctcttctcctgcgccgtgctgcggtcgctcaccctcggctcctgcggcttcgcgctcccggccaccgtcgccctcccttccgtcgagacgctggtcctctcccacgtcaagggcccagcgagcgacgtgcagcggctggtctccggctgcccgcgcctcgccgacctgacgctcgaggcctgcggcgcggtgaccgcggtcaccatcctcggcggcgcgcgcctccgcaggctggccatccgctgctgccaccgcctcgccgccgtcgccgtcgacgcgtcggagctccacaccttcgagtacaggggcgccgtgccgcgcagccgcgacttcctcacgctccaccacggcgacgcggacgccagacggcggcgcggcatcgcgtgctgccacgtcgacatctgcggcaaggaggcgacctcggaggaggagctcaccggcctgaggcggttcctgcagctgttcgccgacgacgccacgcacctccacctccaatccgcccgcctcggcgccggcgccgacaaggacgcgctggccagcttccccaccttccccaacctccgccacctcgagctctggggaagccttcccgacgacgacgccgccgccgcggtgaccacggtcaccacgatcctcaacagcacgccggggctggaggccctgtcgctggtgttccacccgcacggcaacggcgacggcgactcgtactcgcagaatgagctccgcgacgcgcaccagctcaggtacaacccgcacgccgtgctcgccgcggcggcgggcgccatggtggtgccttgcctgaggagcacggtgagggagatcaacctggtgcactaccagggcggcatggcgcagcggtcgctggccaagttcttgctctgcaacgcgccggcgatcgccgagctgttctgcgtgtccgccgaggggccattgttcatgctggaacagctgaagcaagagctaagaggatggttgatgaataagtcggccaaaacatgctttcgctga

SEQ ID NO: 79103 - DNA, 1023 bp, Oryza sativa
  Clone ID: PAT_MRT4530_78845C.1
atggccgccgccgcagtgaagtcgccggagccgccgttcgcgttccgccccgcccgtcccccgctcccgccgctgctggacgacgaggaggatggcgagttcgagttcagcgtccccgcggccgccgccgtgctgtccgccgccgacgagctgttctccggcgggaggctcgtgccgatgctccccccgccaccgcggcgtcccccttcttcttcttccccgccgtgctcgcccccgccgtgcctggaggttcccccctccgagccggcgtcccctcgcgccccgcggtgtggtgggcatcggtggcgcgatctgctcacgctcgtgtcgaagaggacgagcgacggcgaggcgaaggatcgggtggtgggtgggagtccgaggcggcgggaggcgcacgcccagccgctcctctcgcgggcctcgtcgtcttcctcgtcggcctcgtcgtgcgactccgggatcaggaacgcgcggcggccgccgcggacgcgctccgcgccggtggcgagcctcctccacctcatgtccaagaagcccgccgccgtggacgcgccgccgaagcggcgagaccatcatcaccagcggttcctggcccgcgcctcctcgtcgtcgtcgtcctcggcctcctcctcctccgactccgggaggaactcccgcacgccgtggcacccgcccggccccgcgcggccgcggccggcggtggccgccgagagcccgcgggtgagcgcgtccgggcgcgtggtgttccgcggcctggagcggtgctcgagctcgccggcgacggcgggcatcggcccgcggcggccgcggccgagaggcatggagcggtcgttctcggccaatgtgcgcgtggatccggtgatcaacgtgttcggattcgggcatctgttcctgccatcttcgccggccaaggagaagaaggccgacaaggacagggacatcgccggcggcggcggcggcggcggccggaggaacaggccggcgaagctggccatggtgctgagagatccgcaagattag

SEQ ID NO: 79104 - DNA, 190 bp, Oryza sativa
  Clone ID: PAT_MRT4530_78846C.1
atgacccaagcgtgcagcagctttgagaccacagatgttcccatgtggggtcctgctgctgaacacacactgtcacctgatgtctcttggagcaaaccgcacactggcgctacatcttcatttgaagacggcatatttgagggctacctggtagctgtcacaatatatattcggtgctgcactgagagca

SEQ ID NO: 79105 - DNA, 778 bp, Oryza sativa
  unsure (1)..(778): unsure at all n locations
  Clone ID: PAT_MRT4530_78847C.1
ttttttttttttttttttttttttttttttttttttttttttttgttgctttacattcagtaactagtttanattctttcctgcattcagcanaaccatcttccattgactcagattcataatccagngtattcactagtactattcagcatctaataacttttttttttttttttatgcaaagcgacaacagtaacttctatttaccactcggcacgatttcgcgatcaagttaaaatctttgtaatatccaccccttcccatattctgccctgtattacacctaccaggcagtacaaatcttctatagtgctacagtccaaaagaacataaaaaaaccttaactgaagaaacgagctagaaatggcgacccgattacgggaacttctcaacaatgttgttgctgctggcttgcagtaattcaattcttcacactactgctgctattggtcttgctccttggctgtccagtacgtcttgacgaccaggaggatcttctcccggacgagcgggccatcttcatggtcgacgatctggctgtcccacctcatcccgtccgcggggctcttcaccttcaccagcatgtccacgtcgtctctgatgatcaccgtgccctcgggcctcaggatcctgtccatctccagcaggatgatatccatctcgcacctgttcttgtacaaggtgaagaccgagtccgcatggatgagatcgtacgtccgtggataagtggacatgccctcgcaccagtcctggtagcttccaatgagcccacgctcgt

SEQ ID NO: 79106 - DNA, 361 bp, Oryza sativa
  Clone ID: PAT_MRT4530_78848C.1
aaccacctttttgggtttttttttttttttttgttaaaaaccaacattcaactggcccaccaccaattaccggaaccaacagccaattaagtacaggggttgaatcatttgaaattcaggggcagctagattgttcctttgtttcctaaggactacaatagggggggtttttttttgtttggcagttaaaccttgggggtgtctagtccctgcacggggaaatggaagccggtattgctttccacaaaattgtttacccttccgcctttttacgggtttttacagaaaaacattaacaaattttgccctgaaccgagtggtaattctcagggcgacgacggatttagagtttttttttttt

SEQ ID NO: 79107 - DNA, 1189 bp, Oryza sativa
  Clone ID: PAT_MRT4530_78849C.1
gcatcgacttcagaaacagcagttatgtagatggatacgccatgatgatctggacatgctaaccgatgagctagaaaggaaacgataccgaacattgatactcatggctgacacatttctggctaacgatttgcgtcagtttccctctgctaaacgtaaagcttctctttatacgtcaacacttgcaaacattttcatcttgatgttgaagggttctactggcattcagttattatcattattttctggttacatgaaagacgacgtgtcatcagctgttgagactcagcttgcagaatcttgtcgcctcgagagtggtgttgaaacctgcaggcttctggtttcttcagttgcagtgaaatgcgaagcgtctaattcaccttccacaactgtaggctttgacagaatgatcgccgcggactatgacctgttccatcacatgagcttctcgccgtcgcttcagaatcttcagtcaccaacgtttttcaccacgagaagttcagagagctacttgggagagagctcgatctatggcggaggcgccaggcctgcactcgcgcagttcagctattcccagccaattgctgctacttctgctgctcatttggtgagatggacggcggccggggagccgatgaccggcgacggcggtttcaggagctccaagaggctcaagacagcaactacggcgacgacacaacctccaaggcatggggtgaagtgccatgcaaagccaagaaatcaaactacgaaggcaacatgtaagaagaggagccagaaactgggcgacagaatcacagctctgcagcagttagtttcaccttacggcaagacagacaccgcatcggtgctccacgaagcagccgcctgcatacggcaactccaccaacaaatccagattctgacagcgccttaccctggaacaagctcctcctctgcatcgtcgcagcagcaggtcgtattttctgttcttgaaagttgcagccatgtcatgtccttctttactgcaattgcaacagttttgtggctgcaggatgccggaggaggaggaggcacggcgacggagcttcgccggcgaggcctgtgcgtggcggcgctgtcgccggccgtcgtgagcctcgcggcagagggcggtcgccgccgcacggacgtcgaggatcagaagaggatctggttcagtaatcagtag

SEQ ID NO: 79108 - DNA, 212 bp, Oryza sativa
  Clone ID: PAT_MRT4530_7884C.1
gcgcggacgcgtgcgtgcatatttacactgtatctcaatctcacatgttgaggtagtaagggatgcgaaagtgaccctgaattacagataagtaagaccaggcaaattcttaacatgctgagttgctgactcagtagtttgctagccgtcagtctgtcacatatgcatgttatgttaaacatttagtgatgtttgatcttgatgtgttactg

SEQ ID NO: 79109 - DNA, 1047 bp, Oryza sativa
  Clone ID: PAT_MRT4530_78850C.1
atggacgggctgcacacggagctcgcgctggggctgatcgggtgctgcggcggcgacgggcagcagcagacggcgccgttcgtggcgaagacgtaccagatggtgtgcgacccgcggacggacgcgctcgtccggtgggggagggacaacaacagcttcgtcgtcgtcgaccccgccgccttctcgcagctcctcctcccctgcttcttcaagcacggcaacttctccagcttcgttcgccaactcaacacctacgtcagtatcattcaatcgccggcgccgggattccggaaggttcaccctgaccggtgggagttcgcgcacgagtcgttcctgcgcggccagacgcacctgctgccgcgcatcgtgcgccgcaagaagcgtggcgagggcggcggtggcggtggcggcgcgtcctgctctttcggtggcggcgccggcgagcaccaggtggctgctgctgcggccagcgtgggaatgtcgggagaggaggaggatgcggcggaggacgtgctggccaaggaggccgcgctgttcgaggaggtgcagaggctgcggcacgagcagacggccatcggggaggagctggcgcggatgagccagcggctgcaggcgacggagcggcggcccgaccagctcatgtccttcctcgccaagctcgccgacgaccccaacgccgtcacgggccacctcctcgagcaggccgccgagaggaagcgccggcgccagcacctcccttcccacgagcccaccgtctgtcccctcccgccggcgccgccgccacaacctccgcagccgctcctggctctcgccggcgccgcggccatggacggcacctactggtggacgacggagcatcatcatcatcatcatcatcagatgaagcccatgacggtgttgccatccttggagccgcccaccgctagctgcggcgtgcaccaagtgccggagctcgggggtggcggcgtgatgggcttaacgacggacggtgaggccaaggtggagccgccattcccattctgtctacttggtcaagctttcttttaa

SEQ ID NO: 79110 - DNA, 453 bp, Oryza sativa
  Clone ID: PAT_MRT4530_78851C.1
atggctgtgtcctgtccctggcgagccggaactagccagtcaggcaccatactcggcccattgtaccatgcaagcctggtgctgttcatgccgaagaatgcctaccgaggtctcgcacacgatgaccttggcccgcatgctcttcccggcgcctggtggtccatgcaggagcactgggtgtgtcagcggcagcttgacgccctcccggagctcctgcttctgcgcctcgcaaccattgatgtcgtcgtacatgacgcccggcttgtcggtgtccgccatgatcggaaccgtggtgccgagcagccggcgatgtcggagggaaccacgccgacgagtgcgagcgatagacggtgcagcttgacattcaccgagggcttgaggaggtcgtggtggagagaaatgggaaaaaaagagaagacgatgaatctgacaggtgggcccacgtgcagatga

SEQ ID NO: 79111 - DNA, 975 bp, Oryza sativa
  Clone ID: PAT_MRT4530_78852C.1
catgaaagattggttgggattgccagtgagctgttcagtacagtatgcgtcgatctatgcgactatacaccaacggtatctcgactgtaaaatttgctacagaagcagagttcagtgcctggcaaaatcattatgatgtaacaaggccgaagagcgtgcgaaaaatagagttggaacagctcacgacggccagttcctgtaccagccggcccacgccgagacgagcccactgatccccaacgtgacagcgtggttgcagaacgggttgggctcgatgtccgcgatgccgatgacgaggtcggcgacgttggcggccgtcgccatgagccgcatcaccctgtccatccggatcttcttcacctccttgtccttgtccttcccgccctccctgagcagcttcctctcctgcctgaggcccctcctgatcatgatgaggtccatggcgatgaagaacacgtagccgacggactcgccgaaggcggagatgaagctcatgcgtcgcgcgagccaggcgtcgaggacgccgacgcgggagagccacgtgaagtggtcgaagaagaagtagaccatctcgccggcgttggcgagcacggcgagcgcgccgaactcccccggcgcgcggcgcagcccgttgagccccgtgaggaagcggcccgtgcggaaggccttgcggctgagccccgcggacgtctcccagttcttggcgcgcccggcgaggcccgggctggacgactccgccgcccagtgcgcgagcttggacacgtactggaacgtcttgaccagcttgtcgatgccatcgcgcttcgcgaggaagaccacgagcttgtcgagcgtgtcgccggcgctcatggctgcggctgcggtggcttggaaggctcagtgggagagcgcgcgtgcatgcctcgggcagagggcgccctctggcttgggaagtgagaagcgacgcggcgcctgcagcccggggatccactagtt

SEQ ID NO: 79112 - DNA, 156 bp, Oryza sativa
  Clone ID: PAT_MRT4530_78853C.1
tggcggcggcggcagagaagcccttctcatccccaagatgtacagccatatcttatcacctccctagattgctgttgtgagaatggacatcctattatcctacttctgttgcatcctgctttcatcgctcgcagtgattctactttaactcttatc

SEQ ID NO: 79113 - DNA, 300 bp, Oryza sativa
  Clone ID: PAT_MRT4530_78854C.1
cctaacccatacatgcggcgtaaaacccacaaggggtcggggcgcctcggccctcggggccgaaacgggagcggtccgacccctcggggagacaaagagaagggcggccacatcaccctcgggccccccccccgagggggcctagtgaaggtttgggtcacagctctgacagtgctagttgcctttcaaatgggttttaagtgggtccaggtgagaaacacgatacctcacaaagacctgcgctaccaagttgggaaccgacccacaacgacgtggaagtccggctccgacgtgtcgtag

SEQ ID NO: 79114 - DNA, 418 bp, Oryza sativa
  unsure (1)..(418): unsure at all n locations
  Clone ID: PAT_MRT4530_78855C.1
cgacggcgacgttgcaatggcagcagctcatcatactggtgccatctacgctggctgctctactcttgagcctttgagagaacatggcagaaacaccaagcatcaccacggcagcctttccccccaaatttgctgtacatagattgcatctgcctcccagaaacagattagatcccgctttacattgtacatcaaacattcgcaagagttttggatacctgattggttgggtctacattgtaatcgatcaagaatttgtttgtactcaaaaaaaaaaaaaaaaaaaaaatccgatgaatgagcacatcaaaaacacgtacttccatcaaaaaaaaaaaaaaaaaaaaaaaaaaaaancaaaaaaaaaaaaaaaaaaaaaaaaaaaaaaaaaaaaaaaaaaaaaaaaaaaaaaaaaaaa

SEQ ID NO: 79115 - DNA, 1205 bp, Oryza sativa
  Clone ID: PAT_MRT4530_78856C.1
gcacgaggcaaaagtctcatccccaaatccccaattcttccccgacctctcgctcgcggaggaggagcgagaatccccgaaccctaggcccgatctcccgcacccgccgcgggcgatggacggaggcggagaccccgttgacgagttcctcatcggcggcggcggcgaggacggcgacctcggcgtcttctgcgacggtgtgccgacgctgccctgcgatggaggacttgggattgatgatgtcagtggagatacttgttgccttgaccaatctgttttagggaaaagaggtagagatgaatcatcatcatctggtccaaagtccaaagcttgccgtgagaaaattcggagggatagactgaatgacaggttccttgagttatcttccgttatcaatcctgacaagcaagctaagttggataaagcaaatatcttgagtgatgcagctcgtctgttggcagaactcagaggcgaggcagaaaagcttaaagaatctaatgagaagctacgagaaacaatcaaggaccttaaggtggagaagaatgaactccgtgatgagaaagttactctgaaggcagagaaggagaggctggaacagcaagttaaagcattgagtgttgctcctacaggatttgttcctcatctccctcatccagctgcattccatcccgctgcattccctccatttataccaccttatcaagctctgggcaacaaaaatgctcctacgcccgcagcattccaagggatggcaatgtggcagtggttgcctccaactgctgtggacacaactcaagatccaaagctttggccaccaaatgcttaattaggtgcagactagctatgctgctattcatccattggcagatcaaaatgtgttcggtcttcctggagagtaaaatagtccgcgatgctgtccattacgtggtaaactgttcttttattggagttctgtttttaactcgtcctattgaggggcgatgcctgtaattaatctggatcgtaaccctcttgcctggtgaatgctccacaaactctcatgtccctcgcatgagtttgttcaagtgtggaagttgtgactgtgctattattttagcattggcttggcagtacttgttctgtttctagcaagagtttcgcatgtgagcacatgcatagcaatatagtatgttctaaattagttcattacaaaaaaaaaaaaaaaa

SEQ ID NO: 79116 - DNA, 676 bp, Oryza sativa
  Clone ID: PAT_MRT4530_78857C.1
acccaccttgcgagcctcaaatctgttgccggatttcgtcaagctttcccactctcgcaagataccgacaagaaattttcgagaagatcagacaagatggttctcgccgttgatcttctgaacccttccccggccgccgaggccaagaagcacaagctcaagacccttgtgcccgcccctcgatccttcttcatggacgtcaagtgccccggttgcttcaccatcaccaccgttttctctcacgcccagaccgttgtcatctgccagggatgcaccactgtcctctgccagcctaccggtggtaaggctcgtctgactgagggctgctctttccgaaggaagtaaacgcctcgcggcggtttatttccttgggcactcatgactcttacggttcatctcatggtggccatctcggatctgcaaaacacaacatcgacatggacggatagaacagccgacgttgcgaacattcaccaaaaaatctttgcagatagaagatggaacacccagaataggggcgtttggggtctccggatatcttgcatggcacatcatttctcttttgtttttccgttacgcgccttgtaccaaagagtcgtctggaggcaggaagggaaaaaaagcactgcatgggtgggaagctgagaaagcttcacacgagtggtcacgctggctc

SEQ ID NO: 79117 - DNA, 518 bp, Oryza sativa
  Clone ID: PAT_MRT4530_78858C.1
atgccggcggcggctcgtcgggaatgcgaaaccgaccgggagactgggagaggtgatgggccgcaactggacgggtggggaggaaagcaagacggcagtgggggggagcaaggcggcgacaacgatggtgacgcgggagcaagggaggggcgttggcggcggcgagggaagctccgcggcggtggggggagcaaggtggtggggaggagagcaaggggggtagcaaggcggcgacacggcggctgcaccaagtctgccgccctttctccccgatggccgccagcgggagaggagggaacggtgccaccactttcaccagcggccatagcgacggcttgccgacggccgcttgccgcggcaacgacgacgaccgtggatgcggcggcgccggcgctggtctcgacgtccttgctggccggcgttgctgccatggcttcagccaaggacgccgcgcccgccgccgccccgccgtcccagagttctatgccgccaccacactcgccggcgccgggctttag

SEQ ID NO: 79118 - DNA, 392 bp, Oryza sativa
  Clone ID: PAT_MRT4530_78859C.1
ctcgaaccaacaaaacacaacaaataatatgagcgcttatatatactgaaacttaatttcatccataaatacatactactccaacaaacacatccattctaacataaatacattatcacacacatacaaattacattatctcaaatcatatttacacccacaataaataccatctttttcataatcttcctctattcacatcaaacctaaaataataaatgccatgaacaaccactataatccttacatacctaactaactcatctccattgtttaaattctacttatataaatgagccccgcaatcatttcctatataacacaactatttttatccacaatcatttaaattaaacttccatctactaaaactcttttttctttttttttaa

SEQ ID NO: 79119 - DNA, 183 bp, Oryza sativa
  Clone ID: PAT_MRT4530_7885C.1
atgcaggccgaccgcgtccaccgctcgcgctcggctcggcatgggcgcctcatcgtctccgccaaccgccgcgtcgtggcttcgccgggatccatctgggtcgccgccgacttggaaagcatccacatgttaagtcattgttgcagcactcaatgtgtagtcctcccgttttttcaagtatag

SEQ ID NO: 79120 - DNA, 217 bp, Oryza sativa
  Clone ID: PAT_MRT4530_78860C.1
caacatattcatcacaaattcatctctatacttgacaccttcaaaaaagagatctacacaaccaccgaattcccaacacatcctcaagcacaacaactcaggcacacatataacaattatatctgctcgacaaatcaccgacactaccctatttcatacatacaccactgcattttttacatccaaaaactctatcacaagaccaaccccccacatc

SEQ ID NO: 79121 - DNA, 1401 bp, Oryza sativa
  Clone ID: PAT_MRT4530_78861C.1
atggcgtccgcgtccgacccagcagaagtagagctccatgggcagcgcgagccccacgcctcgagctcctccaccgatgcttcgatccccgcgccgacctccgccgccgccgccgccgccgatgtccctccgcctccgtcgtcgtcgtcgtctccgccgccgccgcctccctcgtccgtcgagggccgcaccaagcagcccggaggcggaggccgcggggccgacgccgcgtcgagcacctccgccgcggcggcggtcgagcagaaggggaagaagaagatatcggcctcggatgatcgggagcaggcggaaggggatgaggaggagaggaaatctgattcccagaagaagaagctagccgggaggaggaggaggaggagattaaatcttgctgcgtatcaaggcgacgccaagaaaccatctgatgatgtcaacctggccaggaggcccgggaagctaccttgggatgatcccagagtttggaaaccgcatgtgacgcccgtttccacggtaaagaagtcactcgggattagcatccttgtctatatcagcaacaagtttttacgtagaaaaggaagtccagctgggttctccaatctaaaatacaagcagcaacctcttgtgcaacatcagaaaattcccctggcttctgcccctgaacattatgggctgcgatcaggtttgcggcgaattatgtctgcgaatttgctgatacttctcaacgagtattcagattttaggccggagcaagttcttgacatggtgggcacagatgaggaaaatcgcctccttgctgctgttggagcaattgatcatcgtcaatgggcctctggattttctcagagccacaaactgtttgtaaggtttaacatgcacggttattgcattactgactctcaggtatttgagaagctgatacagaacgtgatgagatggaagaggagacagaagggtgtagcatcagctgacagccgtaggcagaaacttctcgagttcttcagcagttacagcaagtcggatggcattttggctttcctcaaatatgcagcagctaactggatatgctcgcacagagaggagtatgaaccgaacatagctgggcttggaggtggctacaccctggaagcttggtgcgaaatctatcttcttcagcctcgtgagcaaactgaccatattcagatgacggccgtggcagccgcgcttggggtgcctctccgagtggagaacctgcataatggaccagctcaagatatctacactgccgatggcgttaacattcctcgcgtcaccttgctgtacacaggcgtccactatgatatcctttacccacgccatccttctggtgggagtgggagtaagagctcgacacaacgggctggttgctttcgtcccttctggtag

SEQ ID NO: 79122 - DNA, 292 bp, Oryza sativa
  unsure (1)..(292): unsure at all n locations
  Clone ID: PAT_MRT4530_78862C.1
gaacagnnaaaaacaaancaattgaagaggaaangnngngagacnagaggaanaaaaccacacaccccgcctaagaatgcacaacggcatgacccctgttttacccaacaaagatgatctaattagccaccaaaaacatgattttgggaaagaaaaaggaaaagaaaatgctcaagaggacaagtttccagcgtttggaaatcggcctttgagcctagagcttggggtcgccggctcgttagaaatcgagcgagacggggagcatcagggcgaacacctgtctcgccggggg

SEQ ID NO: 79123 - DNA, 1004 bp, Oryza sativa
  Clone ID: PAT_MRT4530_78863C.1
cgggctgcaggaattcggcacccggccgggagcctttttaatcccaaagaacaggcacatccgagcgggaagtgcatcagcagcgagttccagccatggcagcagacaagggagtgaaggtgttcggcatgtgggcgagccccatggcgatccgtgtggagtgggcgctccggctcaagggcgtcgactacgagtacgtcgacgaggacctcgccaacaagagcgaggcgctgctccggcacaacccggtgaccaagaaggtgcccgtgctggtccacgacggcaagcctctcgccgagtccaccgtcatcgtcgagtacatcgacgaggcctggaagcacggctaccccatcatgccctccgaccccttcgaccgtgctcaggcgaggttctgggccaggttcgctgaagagaagtgcaacgctgctctgtacccgatcttcatgacgaccggagaggagcagagaaagctggtgcacgaggcccagcagtgcctgaagacgctggagacggccctggaggggaagaagttcttcggcggcgacgccttcggctaccttgacatcgtcaccgggtggttcgcctactggctgccggtcatcgaggaggcctgcggcgtcgaagtcgtcaccgacgaggcgctgcccctgatgaaggcctggttcgaccgggtcctcgccgtcgacgccgtgaaggcggtcctgccgccgagggacaagctcgtcgcgctcaacaaggctcgccgtgagcagatcctctcggcgtagagagcacggtcacttcagctccccagctagtacgtttcatctccatggtccatggttaaacaataagttcgtcacaagcacattgtgcagaagtagtagatgctcgaagcatgatccgtcttagagagacaaacttaatgctctatgatatgttatccagtgtacaatattgcctacttaattatttcctcaagaggaaaaatacagtacagtttaaaaaaaaaaaaaaaaaaaaaa

SEQ ID NO: 79124 - DNA, 1723 bp, Oryza sativa
  Clone ID: PAT_MRT4530_78864C.1
caatgctaaaaagtcttataacctgaaatggaggaagtacaaaacagcaaatagggaagggcttatatagtttaactaattttgtagaaaaaagtattaaaatggcaccacatgaagcattatatggaagaaaatgtaggtcactagtgtgttggtatgaaactggtgaaaataaattggtaggacctgaatttgttagaacaaaacaaagcactattgatataatcagagaaagactaaaaattgctcaaagtcgacagaagagctatgctgacgagcgaaggcgagaattggagtttaatgttggtgaattagtatatctgaaggtttcaccaaatcgtatgacaaaaagatttggaatacaaggaaaattaagtcctagatatattggacctttcaagattattggtagaaaaggagctgtggcttattagttgaaactgccagcaacactatctacagttcacaatatttttcatgtgtctcaacttcgtaaatgtctaaaagaacctgaagagaaaattaagcaggatcaagtgtagctgaaatctgatttgtcctatgatgagaggccaagtaaaattttagcagaagattggaaacaacttcgtaatagaactatcaaattctgtaagaatttcactgtgtactgtgatgcatctaaaacaggattaggttgtgtattgatgcaaaaccagaaagtaattgcttatgcttcaagacagcttcgacctcatgaagtgaattatcctactcatgatttggaattagtagctgtggtatttgctctcaagatatggcgacattatttatatggagcaaaatgtgaactgtacacagatcataaaagtttgaaatatatttttactcaaaaggatctgaatatgagacaacgacggtggttagaacttataaaggattatgatctagagattaattatcatcctgggaaagcaaatgttgtagctgatgctttaagtcgtaaagcacaagttacacagattgtaagagaggaaaacatgcctaaagaaaattttgctagtttaaaccggataaatgttgaggtaattcaaggtccagctacaacagtaataaacaatatgatactggaatgtgaattgagtagtcagattcaagataaacaacaagatgatgcatatattcgagaagaaattcaaagaattaaagctggaaaattttctgaattcaaacttgatgataaggaactgttatggtacaagggtagaatctgtgtgcctaatgttccaaagattaaggaattaattcttagagaagctcatcaaaccaatacactatgcatcctggaagtcctaagatgtatatggatttaaaggaaagattttggtggagaaatatgaagagagaaattgcaaaatttgtatctgaatgtgatgtgtgcaggagggttaaagcagagcatcaaaacccggcaggattattacaaccattacctattcctgagtggaagtgggaacaaattggtattgattttatcacgggtttaccgagaacaaagaagcataatgatgccatatgggtaattgctgatagacttaccaaatcagcacatttcataccaataccaaccctcatcactagcccacactcacaggattcgcggaagtccttaagcccgcaggataaagccattaagaaagaactactaaaccagcctgtcccattccaggtcatatggtcgaca

SEQ ID NO: 79125 - DNA, 755 bp, Oryza sativa
  unsure (1)..(755): unsure at all n locations
  Clone ID: PAT_MRT4530_78865C.1
acgagtcgcagtaaaacagcagtgcggactcggagacagtacggggaaaacgcacatcgagcggtggagagtggagtggagtcgaatgcagcgcgagtnagtccaaaacgactcgtctcgtaacaccgaagcgaccnanagcgcctactgccgcctactgcgcctgcgctgccgccgcgcaagcccaagcgcaacgcatccgcctctgcctatcctctcctccacttgctggtcgctgccattgcctgcgcctccactccacttctcgcggctcgagaggctgacggcggggcgcctcgaatttcgccctctccgacgagcggaggcggaggagggagcccaggaagaggatgcgaaagagtcaaggagagggggagaagaggggggaacggctgtttcagcttctgcggcactttcgcgcgtctagacccttgagctgattgttcacggaatcaccatgggtggaaatcatcgccatgggtggtaggactggctgggtgtcgacgatcttctcgcttcacgcccactaatcgagtgaattgagggaagaagaaaaagaagaagaagccgagaagacgacggcaacggcgacgaggcagaacctcagggatgcggcgaccgtggcgcagctgacggcgctcgacgcggagcggctcatctccatgatcgtgaaggcgctgttctacggcgcggctgcacaagcgcaactgccgcccgtgcgcgcaacatctgaagactatccgcggcctgctgga

SEQ ID NO: 79126 - DNA, 249 bp, Oryza sativa
  Clone ID: PAT_MRT4530_78866C.1
acagcacatagatttacgcagaacggcttgagcaaacttcgccagcaggggacgagaaacataggatcctagtctgctgattcatacaccccaggctggaaggatacaagagccacagccagaagtcccatgcttagcctatggagtgagagttaccgagcaaacctataccagaatgcaatcctctgaccattctggactgacaatgatcataggtatggctataggattaaagggcaagctggagag

SEQ ID NO: 79127 - DNA, 1317 bp, Oryza sativa
  Clone ID: PAT_MRT4530_78868C.1
atggatacgccgccgccgatgcaatctgacgcggcggcgccggccgccgtcgtcgactactccaacctcacgacggacctggtcatcgacatccacggccgcctcgcgttcgtcgaccgcctcgccgtcggcgcggtcttcggcgccgcgggacacgcggtgaagccggaggcgccatggctggtcctccccggcgacacccccgagacgagccgtctctactccgtcgccgacaggcgcgtcgccgccacgcgcgccccggacccggcgatgcgcggctgctgcgtcgtcggctcctccggcgggtgggtggtcaccgccgacacgagggcgcggctgcacatggcgaacccggtcaccggcgagcagcacgagctcccggcgatcacgacgtgccccttcttctacgtcaccaacccgacgtggccgctcttccacgtcaacatcctgcaggaccagctcatccgcgtccgccacggcggcggcgagaaggtcccggcggcgaggctgccgctgtgcacgctcgtcgccgaccagatgcgcgggtgggtgtaccgcaaggtggtcctctccacctcgccgcggccgggcgcgtacgccgccatgctcctcctcgacgtcgaccgccaccggggcaacccggcgttcgcgacgtccgacgacccggcgtggcgggttgccctgtcgccggacggcgtcgaggacgccatccaccaccgcggcaagttctactccatcacctactccggcgtcgtcgaggagtgggaccgccgcggcgtcgacggcgtgtttaccagcagggcggtgtcgcggaagctgccggccatcaccgacggcggcggcggccaccaccaccgcaggtacctcgtggcggcgccggggggcggcgagctgatggtggtgacgaaatccttcaaggtggtggagatcggggagcgctacatggacagcgagaggcgggtgtgcttcacggtgcaggtgctcgacgacggcgacgagggggggaggtggaggagggcggcgagcatcgggcaggcggcggtgttcgtcggagcgagcagcaactcggtgtgcgtgtcgacgaaggcgcacccggagctcaggccggactgcgtctacttcgccgccgacgagctggtcaagggccccttctgcagggacgaggaccgcgggttccacagctaccacagctgcgacgacaagaagagggtcgtcggcgtttacagcctcaaggacggcggccgggcggaggggttgccggagctcggggaccacgccacctggccgccgccggcgtggttcacgccattgatttaa

SEQ ID NO: 79128 - DNA, 163 bp, Oryza sativa
  Clone ID: PAT_MRT4530_78869C.1
tatgaacgtcttgaaatgctgctgcgtcaggagatggacgagattgtcctctatgtctttctcggactgcagctgctcaggcgtgacaagcggtttacggagttcaaacttgtatgccacttccgccatcgggattggtgcgcctccaatcaactgatccaca

SEQ ID NO: 79129 - DNA, 2328 bp, Oryza sativa
  Clone ID: PAT_MRT4530_7886C.1
atgctcctcgtcggcgtcctcctgctgctcttcttcaacctacatctccccacggccgccattgacaccctcacgctaggccagtctctgctgtggaaccagacgctggtctccaatggcggcaacttcgagctcggcctcttctcgccgggaaagtccaacaagcactaccttggcatctggtacaagaagatctccaagaagacggttgtttgggttgccaaccgtgagcgcccgattcttgagccgtcgagctgccacctcgagctgagcgtccacggcgatctgcggctgttctcgacggcgccgtcgaacaccttgctgtggtcgtcgaacgcgtccgcgtcttcctcgccgtcgcccccgcgcaccaccgtcgccacgctccaggacgacggcaacctcgtggtgaacagcaacgcgacgcggtcgcggtcgcgatcgccgtcgtcgactacgacgacgcacgtggcgtggcagagctttgatcacccgaccgacacatggctccccggagccaggctcggctacgacaggggccgcggcgtccacagcttcctcacgtcgtggacggactccgagaacccggcgcccggcgcgttctccatggtgatcgacgcgcgcgggctggccaagttcgacctcctcgccggcggcgagcaccggtactggacgaccggcctctgggacggcgagatcttcgcgaacgtgccggagatgcggtccggctacttcaccggcgtcccctacgcgccgatcctgttttggtcgttgccccacgacgcgtgcgacgggtacagctcgtgcgggccctttggagtctgcagcaacgccaccaacccggagtgccggtgccccgccggcttcgagccgcggtcgtcggaggagtggaggctggagaacgccgccggaggctgcgcgccggccggagctgggaacgacaaggcgtgcgcgcacacctgcctggtcgactgctcctgcacggcctacgttcacgacggagcgaagtgcctcgtgtggaacggcgagctcgtcaacatgaaagcctacgcggctaatgagaatggccaaggcgatcctggcctcgccggagcggtgcttcacctccgtgtcgcccactcggaggttccggcgtcgtcgacggagcactcgtggaagaaatcgatggtaatccttggaagcgtcgttgcggcggtggtgctgctcttggcgagcctcgtcaccgtggtggcggtggcggcggtgttgcggatgcggcgtaggaggggcaaggtgacggcggtgcaggggtcgctgctgctgctcgactaccatgccgtgaagaccgcgacgagggacttctcggagaagctcgggagcgggagcttcggcacggtgttcaaaggcgcgctgccggacgggacgcccgtggccgtcaagaagctcgacggtctccggcaaggcgagaagcaattcagaacggaggtggtgacgctcggcatgatccagcacgtcaacctcgtccgactccgtggcttctgctgcgagggaaacaagagggcgctcgtgtacgactacatggccaatggctcgctggactcgcacctgttcgtcatgagcggctccagctccggccccgactccaagcaggtgaccctgacttggagccaacggtacaacgtcgcggttggtgtggcacggggcttggcttacctgcacgagaagtgcagggagtgcatcatacactgcgacgtcaagccggagaacatcctcctcgatcaggagatggcggcgaggctcgcggacttcggcatggccaagctcgtcggccgcgacttcagcagcgtcctgaccaccatgcggggcacggtgggatacctcgcgccggagtggctagccggcacgccggtcaccgcaaaagccgacgtgtacagcttcgggctcctgctcttcgagctcgtctcgggccggcggaacagcaccgcgccgtcgtcgtcgtcggagggcggccctgggatttacttcccggttcatgccgtggtcaagctaaacgaaggcgacgtggccgggctggtcgacgagagggtggccaaggatgccgacccgaaggaggttgagagactctgcaaggtcgcgggctggtgcattcaagacgaggaaggcgaccggccgaccatggggctcgtcgtgcagcagctcgaaggcatcgccaacgtaatgttgccgccgatcccttctcggcttcatatcctggcgattgagaacgaatgggtcagaggtgttccagaggatgagcgctgctcaaagagcggtagtaaaccagaaacagaagcaatagaagaaatgtag

SEQ ID NO: 79130 - DNA, 402 bp, Oryza sativa
  Clone ID: PAT_MRT4530_78870C.1
atggactggcccacggaatcactcccgtcactcctcgagtccggcggcagcggcgccggcgctggcgacggccacggcgaggcgtatcggtattggggagcggcggctagagagaaggtggtggcgagatgcggcttggccacctactcggcgtccgccaccgtggcggtcatgcccaagaacaaggcctagggaagcaactgcggcgaccggcagtgccgcggcggcggcagcgagccgtatcggggacgccacggcttgagaggcggtggcggtgagatggtgaggttggccggctgctccccacccgccatcgtggcggacattccagtataggtacggcaaaccattgatttttcttcttgttttctccgactctgagaatagtttttcgtgcgccat

SEQ ID NO: 79131 - DNA, 2250 bp, Oryza sativa
  Clone ID: PAT_MRT4530_78871C.1
atggcgcgcgcagtgcacgaccgcctcccgttcctagccacgcccccgccggcgccggcgaggggcaggaacccgccgctcgctgagatgctccgcctcgtcggcgctgccaccgtcgactccgacgccgccgccgccgccgcggatgaggaggccaacgcgctgtcgttgccactgccgcgcggtggtgttactcctcctccgcctggcgggcggaccatccagttcaggctggcgttcaccagcctcacctacagcgtccgcgcggcgcggcgggcgaggcccggcggcggcgatggcggcggcgggtttcgcctgcctctgcagaaccggtgcgaccgcgtcaccgcggcggcgcccgacgcgcactcgtcccgcgcgagggtgctgctggacggcatcaccggggaggcgagggagggcgagatcctggcggtgatgggggccagtggctccggcaagtccacgctcatcgacgcgctcgccaaccgcatctcccgcgacgcgctcaagggctccgtcacgctcaacggcgagccgctcaccggcaacgtcatcaagtccatctccgcctacgtcatgcaggacgatctgctgttccccatgctcaccgtcgccgagacgctctccttcgccgccgagttccgcctcccgcgcgcgctgcccgccgccaagaagcgcacgcgcgtgctggagctcatagaacagctcggcctccgcgcggcggcggacaccatcatcggcgacgagggccaccgtggagtctcgggaggcgagcgccggagggtctccatcggcaccgacatcatccatgaccccatcctcctgttcctcgacgagcccacgtcggggctcgactccacctcggcgttcatggtcgtgcaggtgctccgcaacatcgccgagagcggcagcattgtcatcacttccatccaccagccgagccagcgcatcctcggccttcttgaccgcctcatcctcctctccggtggacgcaccgtcttcagtggacctccctccgccatcccggcctacttcgccgagttcgggtacccggtgcccgacgacgagaaccgcgccgagttcgcgctcgacctgatccgcgagttcgagtcgttgccggcgggaaccggacagctcgtcagcttcaacaagacgtggcaggtcatgcacgcggcgaggcacaacccaaacgatgatccgtgggcgccaaccatgtcgctgaaggaggccatcagcgcgagcatctcgcgcgggaagctggtgtccggctcggacgtggccggcgaggcggcgtcgatgcacacctacgcgaacccgttctgggtggagatgaaggtgctgacgaagcggtcggcgatcaacacgcggcgcatgccggagctgttcctcatcaggctcggcgccgtggtgatcaccggcgcgatcctcgccaccgtgttctacaagctcgaccagtcgcccaagggcgcgcaggagcggctcggcttcttcgccttcgccatgtccaccatgttctacacctgcgccgacgcgctcccggtgttcctgcacgagcgctacatcttcctccgggagaccgcctacggcgcgtaccgccgcacctcctacgtgctctccaacgccatcgtctccttcccgccgctcgtcgtgctctccctcgccttcgccttcaccacattcttcgccgtcggcctcgccggcggcgtgtccgggttcgccttctacaccctcgccatcctcgcctccttctgggccggcagcgggttcgtcacgttcctctccggcgtcataccgcacgtcatgatcggctacaccgtcgtcgtcgccatcctcgcctacttcctcctcttcagcggcttcttcatcaaccgggacaggataccggactactggatatggttccactacctctcactcgtcaagtacccgttcgagggcgtgctccagaacgagttcggccgcggcggcgagtgctacgtccgtggcacgcagatgttcgacaactcgccgctggccgtgctgccggacacggtgaagacgagggtgctggcgtccatcggcacggcgctcggcgtcaagatcggccccaacacctgcgtgatgaccgggcacaacgtgctccgggaggcggcggtgacgcagctcggcaagtgggagtgcctcctcgtcacggcggcgtggggcttcttcttccggctgctcttctacttcagcctcgtgctcggcagcaagaacaagaggaggtga

SEQ ID NO: 79132 - DNA, 514 bp, Oryza sativa
  Clone ID: PAT_MRT4530_78872C.1
atccccgggctgcaggcgttgagcatgggtggcagcacagatgcgttggtagcgacaatggagattttgtatgataggccgttgtccgatacggttggactgctgtcattccagtagttcgcgaggaggtaaggtgggctgtatgacttaccatcaggaacaaaggattcaccattgtagtatatgtggaactctcgcagctgctcctgctggaagtcagtgaagtgtaagccaagcaagtgggcaggagccgcagcccagctggctggagccaaccacaagaaattcaggacagtagagttggatgatgtcgtggcggccgtcttcaggactgcagctggcacctcatatacatcatcagggtagcgcctgaccatgcttgttgtggaaatctttatccactcagatgtattctgtgatggccaccacaaacggtcatagggatcatctggatacctggtggcagaaattacacaatgtttatgtagacatagaatacattattgggtgtgca

SEQ ID NO: 79133 - DNA, 621 bp, Oryza sativa
  Clone ID: PAT_MRT4530_78873C.1
ggctgggccgttgcttgtatgagcccctgagcctggacgcaccccgggccgagacgtgaggacagccgggggaccggtgaggaaaccgtagcgccggcggcgtagccccggactgctcgttgcggaaggcgaggaagcggacaccggcgagggccctccgtcgaccttcatggcagctggacgcgtgtcgtccccattccctctccctaggctggctgcctggctggggttgcgtccgtcgcctgagcagctcaggcttatagcgggggcgctcgggggagaccggagagtcgccgcgacggcgactgcgacggcgacgccggtctgacgccgcagttgaagcctggaggcaggcagatgaacctgctgctaggaagttggaagacgcggtgtatctggaccgagacaactccaagaaatactcctatcctactcgatcatagtacacgtcactcgggcacttgcagacttgtttgaccagagttgtcaaactgccgacacatcgtatctgtttttcggaggcgcatgaagcgtccgattttagcagcagttgatcgaaattgtttcaccgggtacattgtcaaatgtcaaccaatcagcttatggaaaaaaaaaaaaaaa

SEQ ID NO: 79134 - DNA, 210 bp, Oryza sativa
  Clone ID: PAT_MRT4530_78874C.1
atggattcatgcggccgcgtcatggccgacgaggacttcgtcgaggagaggaggttctgggcatgggagaatcaccgtggatttcttgttgatgttggtgcgagcgtggagtacgaggaagacgacgactacgactacgacggcgaccaccaagaaatggattgggataatttgttcccgtattacctggattcgttcatgggtctctga

SEQ ID NO: 79135 - DNA, 735 bp, Oryza sativa
  Clone ID: PAT_MRT4530_78875C.1
atgagtaatacgctgcttcgtgtgcacccttccgagctcaagatcccctatgagtacaagaggaagaggtcttgctgcatgcagctgacgaacaagaccaaccagtacgtggcgttcaaggtgaaaacgacgaacccaaggaagtactctgtgcggcacgcctgcggtatactgccgccccggagctcgtgcgatatcacagttacaatgcaggctcccgttgaaatgctatccgattaccactgcaaggacaagttcctcgtgcagagcgtggcggttggatatggggcgaccatgagagactttgtccctgaattgtttactaaagcgccaggcagggtgatcgaggagttcaagctgcgggtggtgtatgttgctgctaatcctccctctccagtgcctgaggaggaagaggaagaggaagaggatgcatcccctcagtcagaggtcatgagccatggagtgaaaatgacatcagtgtttgatgctgtaactgtatccacactcaccgataggtcagcagacaaagtttcatctgctgagggtgtctctgtagaatcaatgctggttgcagagagagaatatccagtagaagaaaatcagaagcttcagcaacagatggaactacttagggcagcaagatcatctcaacagggcttctcagcaatgtttgtgctgctagttttcatgtcatctgtctgcattgggcacttcatgaagcagatcaaggtttag

SEQ ID NO: 79136 - DNA, 688 bp, Oryza sativa
  Clone ID: PAT_MRT4530_78876C.1
ccggaatccgcgtcgaccacgcgtccgcttcctctgccttggcgaattccaagttcaggcatcccggcgttgcaagatgcaatcggacgcggtggcgcggagccccaggcaaacggtgagagtcggaggccggcgccccacggccgatccctcccgcggctcatcggaggcgtacggcttcgtgggatccatcgccgcggtggccgccgccgccgcctacctcgcgtgggcttacctgccggagccgtggctgcgtttcctcggtgtcacctactaccccgccaggcattgggcactggccatgccgtcgctgctgctggaagcggcggcgcaggggatggtgctctacatggcctccaactttctgctcgctcctgctccgactttgcttggccactatctccgatgaatttgcccgggagcctgcggcgtgtggtactgcaacaggggaggagaaacccatcgaggacatatcagatattagcattgacaagataaacaatctcatgtttggcaatgcatcatcaagctgatgcatttactacttctgatgaagctctcaactgatcaccagttgaccacaaacatgttttttgctttctcttggtgtgttgatggctcactcgtttgcaagctagcattgtgctattcacttatgattaacatggttatatgggttcttttaatg

SEQ ID NO: 79137 - DNA, 2600 bp, Oryza sativa
  Clone ID: PAT_MRT4530_78877C.1
atggcgtcgctgtcagagagcgaggggacaaatagggggagcatgtgggagctggatcagaaccttgatcagcccatggatgaggaggcaagcaggctgaagaatatgtacagagaaaagggcatgaaaaaactggatgtttatactgttctaattgaagtaactgagctgaagttttcgtcgcttttgctactgcggcttgcatttcagagcctgggggtggtctttggtgacttgggtacatcaccattgtatgtgttctataatgcctttcctcatggagtagacgatgaagaggatgttattggtgctctttccttgatcatttacacccttaccctcattcctcttctgaagtatgtttttgttgtcttgcgggcaaatgacaatggtcaagcttctttcccctctcaataccacattccgcataaggtgccgcgttcgccgtagcacctcccggcacagtagttgcgaagccgggcccctacctcgcctgcttattccatactcaggccaggctgcgtacatcattgccaacaaggaccatgtagctgatgccttttatcgctcaattccgatggaatccttacccctgctatatcagttctttctgcatcaggtggaataaaagttcaaaatccgaatatgagtactgatgttgttgtaattgtttccgtgatcatcttaattggattatttagcatgcaacactatggtacagacaaagttggatggctctttgcacctatagtgctcctctggttcattctaattggaagtgtcggagcactgaacatacacaaatataaaggctctgtgctaaaagcatacaatccagtctatatataccggtatttccagcgacgaaattctgatagctgggcctctcttggaggaatcatgctaagcatcacaggaactgaagcactatttgctgatctatgccattttcctgtatttgccattcagattgcattcaccttgattgtattcccatgccttctactggcatacacagggcaggctgcttatatcattgcccacaaggaccatgttgctgatgctttttatcgctccattccagattccatatactggccagcatttgtcatagcaactgcagcagcaatagttgcaagccaggccaccatatctgcgacttactcgataataaagcaagctcttgcactaggctgctttccccgtgtaaagatagtgcacacctcgaagaaattccttgggcagatctacatccctgacatcaattgggtccttctaattctttgcattgctgtgactgctggattcaagaaccaaagtcagataggaaatgcatatggaactgcggtggttatagttatgctagtcacaacatttctgatggtaccaataatgttgctggtgtggaagagtcactggattctagttgtcacctttattgtgctttcgttgatggtggaaatcccctacttctcggcctgcttattgaagattgatcaaggtggttgggtcccacttgtcattgccacagccttcttcatcatcatgtatgtgtggcatttttgcacagtgaagcggtatgaatttgagatgcacagcaaggtctcaatggcctggatccttggcctcggtccgagcctcggtctggtcagggttccaggtataggctttgtgtacactgaactggcaagcggtgtccctcacatcttctcccacttcatcaccaacctccctgcaatccactcggttgtcgtcttcgtctgtgtgaagtaccttccagtgtacaccgtcccgatggatgagcggttcctcgtgaggaggatcgggccaaagaacttccacattttccgctgtgttgcgaggtacgggtacaaagacctccacaagaaagatgaggactttgagaagatgctcttcaactgcctcttgtccttcctgcgactcgagagcatgatggagggctattccgattctgatgacttcagtgtgccggagcagaggacggagggatccatcagcaatgcatttctggctgagaaaaccaacaacaacacaatgtgctccaatggtgaactgagctactcatcacaggactccattgtgccagtgcagtcacctctgagggggaacagcctactgaggtattcaagccaggccagccacactgtcagtgatgaactggagttcctgaaccggtgtaaggatgccggtgtcgtccacatcctcgggaacaccatcgtcctcgcgaggagggattcggggatcatcaagaagatcgcggtaaattacatgtatgccttcatgaggaagatctgcagggagaacagtgtgatcttcaatgttccccatgagagcttgcttaatgttggccaaatatattatatatgatacgcattttccggcttaatttgtgtaggagtagggctccatggaagagggagggaggcagctgtacatgttttttagggagaagcacgctgtaaattattaataaacagtcatttttcatggggggtgtaattagtgagttgtaaatgcatatgccaaatgaatggatcagatcgaagcatgagagatagctgaaggctactattttctag

SEQ ID NO: 79138 - DNA, 3176 bp, Oryza sativa
  Clone ID: PAT_MRT4530_78878C.1
cccgcgctgccggtggcggccgaggcctccgtcccggccacactcccacccccacgccgccctcgccgccgcccccgccgccgccgccgcccccgctctccccgcaagcgcctcgccgccccctccgccctcgccgaccccgcccgtccccaagagtcggaaccagcttcaggaggaatgggaaggatgggttgccaaagtggaagcagctgcacgagtgaagagagaccatacacggatggagctcatgagacggggaggcccgtgacgatgaggaagagtacgacaccacaggaagttgagattcgaatatattgggctcatcgcagtatcagtccatgaaatggagaatggtttccaaatatggtctttcagtgcagcctttacaaggtgtcaaggaccacttctttcagggcggactcgctgctgaccctgaaaaggaagacgagattgcgaagaagagaagtacagcaagaagtacgagcaagaggatcaggatgccttcaaccagctgagcgagcaggaacgcaagaggcggaagcagcttcaggaggaatgggaaggatgggttgccaagtggaagcagctgcacgaggaagagagaccatacaggatggagctcagagacggggaggccagtgacgatgaggaagagtacgacaccaaggaagttgagattgaagaggaggtagacgtccaagaagaagttccattcgagctggatcaggagtgaaaagcttatgctagcatctgctgagatctttttctgttgttgcctgtcttaagttaatttctgccccctttgcataataggctttagagatcaagaacacaatttcttgatctttctggtttctactggttgattgtacactttgtccttggattttacggaccaatgtattcgaagatgaaaatttgcggttggcatactaattataatgtatgaatgtacaaaaaaagaaattaagccatacactcctggagagaacttgcaaaaatggctggctgatgagaaggcccgggaccaatttgttatccgtgctggtactttcactgaagtttactggaatgatgcaaggcagaagatgcctgaacttgtgttccaaaagcagtactggacagacagttttattcagtggtcccctcttggaacatacttggcaacagtgcataggcagggctcccaggtgtggggtggcgacgataagtttgagcgtctaatgcgatttgctcatgcacaggtgaaactgattgacttctcccctggtgagaaatatttggtcacatatagtagccacgagcccagcaaccctagagacactcatagggttgttcttaatatctttgatgtgaggactggcaaagtgatgcgcgactttaaaggaagtgctgatgaattcagtgccagtggaaatatcagtgtttctggtgtttcatggcctattttcagatggggtggtggaaaagacgataaatattttgcaaggcttgggaagaatgttatatctgtctatgagactgaaacattctcccttcttgataagaaatctctgaaggttgagaatgttgtcgacttctgctggtctccaactgatccaatcatagccctttttgtccctgagttgggtggaggaaaccagcctgcaagggtgagccttgtgcaaattcctggcaaagaggagctgcggcagaaaaaccttttcagtgtcagtgattgcaagatgtactggcagaacagtggagaatatcttgctgtccaggttgatagatacacaaaaaccaagaagagtacttacactggatttgagctttttagaattaaggaaagggacatacccattgaggttcttgaattggacaacaagaacgataagatcattgcctttgcatgggagcccaaaggtcaccgctttgctgttattcatggtgatggccctaagcctgatataagcttctactccatgaaaacatccaacaacatcagtcgtgtgtccaagctcaccactctcaagggcaagcaggctaatgcattgttctggtctcctggtggaagattcattgttttcgctggtctgaagggctttaatgggcagctggagttttacaatgttgatgagcttgagacgatggcaacgggtgaacatttcatggctactgacattatgtgggatcctactggaagatatcttgcatctgcagttacctcagtccatgaaatggagaatggtttccaaatatggtctttcagtggcaagcaactttacaaggtgtcaaaggaccacttctttcagttcctgtggcgtccgagaccaccgtcgctgctgacccctgaaaaggaagacgagattgcgaagaacctgaggaagtacagcaagaagtacgagcaagaggatcaggatgccttcaaccagctgagcgagcaggaacgcaagaggcggaagcagcttcaggaggaatgggaaggatgggttgccaagtggaagcagctgcacgaggaagagagaccatacaggatggagctcagagacggggaggccagtgacgatgaggaagagtacgacaccaaggaagttgagattgaagaggagatcatcagacggttttcaaatccgtcttcctgccgtctcggtatcttcctctgccttggcgaattccaagttcaggcatcccggcgttgcaagatgcaatcggacgcggtggcgcggagccccaggcaaacggtgagagtcggaggccggcgccccacggccgatccctcccgcggctcatcggaggcgtacggcttcgtgggatccatcgccgcggtggccgccgccgccgcctacctcgcgtgggcttacctgccggagccgtggctgcgtttcctcggtgtcacctactaccccgccaggcattgggcactggccatgccgtcgctgctgctggaagcggcggcgcaggggatggtgctctacatggcctccaactttctgctcgctcctgctccgactttgcttggccactatctccgtggtacatgttcagatattttttgccttttgccagatgaatttgcccgggagcctgcggcgtgtggtactgcaacaggggaggagaaacccatcgaggacatatcagatattagcattgacaagataaacaatctcatgtttggcaatgcatcatcaagctga

SEQ ID NO: 79139 - DNA, 406 bp, Oryza sativa
  unsure (1)..(406): unsure at all n locations
  Clone ID: PAT_MRT4530_78879C.1
gttttaaagaaaaaaaagagtataaaaggtgagtacttgagagtatcttccccttccctgcgcgtaaaagataatctcccgtctcgtctcctccgctacttgcgccatcctcggctgaacaggggagaggcgccgatctccatctggcgagcatagcatggcatgggaggagatcctgggtttcagcggagtccgcatttcccccctaggttgctatctatctgcgaagttctggcggggcggcctgagcactgagatagtatcatcattgcaaatgattgcaggcggtgcgttcggtggaaaccgnggcgtgaggcctgtgcctcccgatcagggagtgttcccnctggatcgcttgcacgattgtgatttggatatgatcgatcatcntgcgtgccttcatcaa

SEQ ID NO: 79140 - DNA, 2822 bp, Oryza sativa
  Clone ID: PAT_MRT4530_7887C.1
tcgtgtggttgccactcggcactcgccaccatgctcctcgtcggcgtcctcctgctgctcttcttcaacctacatctccccacggccgccattgacaccctcacgctaggccagtctctgctgtggaaccagacgctggtctccaatggcggcaacttcgagctcggcctcttctcgccgggaaagtccaacaagcactaccttggcatctggtacaagaagatctccaagaagacggttgtttgggttgccaaccgtgagcgcccgattcttgagccgtcgagctgccacctcgagctgagcgtccacggcgatctgcggctgttctcgacggcgccgtcgaacaccttgctgtggtcgtcgaacgcgtccgcgtcttcctcgccgtcgcccccgcgcaccaccgtcgccacgctccaggacgacggcaacctcgtggtgaacagcaacgcgacgcggtcgcggtcgcgatcgccgtcgtcgactacgacgacgcacgtggcgtggcagagctttgatcacccgaccgacacatggctccccggagccaggctcggctacgacaggggccgcggcgtccacagcttcctcacgtcgtggacggactccgagaacccggcgcccggcgcgttctccatggtgatcgacgcgcgcgggctggccaagttcgacctcctcgccggcggcgagcaccggtactggacgaccggcctctgggacggcgagatcttcgcgaacgtgccggagatgcggtccggctacttcaccggcgtcccctacgcgccgaacgccagcgtcaacttcttcagctaccgcgaccggctgccgggcgccgtcggcaacttcatgctggacgtgaacgggcagatgcggcggcggcagtggagcgagacggcggggaagtggatcctcttctgctcgttgccccacgacgcgtgcgacgtgtacggctcgtgcgggccctttggagtctgcagcaacgccaccaacccggagtgccggtgccccgccggcttcgagccgcggtcgtcggaggagtggaggctggagaacgccgccggaggctgcgtgaggcggcaccctctcgagtgtcacggagacgggttcctggcgctgccgtacaccgtgcggctcccgaatggctccgtggaggcgccggccggagctgggaacgacaaggcgtgcgcgcacacctgcctggtcgactgctcctgcacggcctacgttcacgacggagcgaagtgcctcgtgtggaacggcgagctcgtcaacatgaaagcctacgcggctaatgagaatggccaaggcgatcctggcctcgccggagcggtgcttcacctccgtgtcgcccactcggaggttccggcgtcgtcgacggagcactcgtggaagaaatcgatggtaatccttggaagcgtcgttgcggcggtggtgctgctcttggcgagcctcgtcaccgtggtggcggtggcggcggtgttgcggatgcggcgtaggaggggcaaggtgacggcggtgcaggggtcgctgctgctgctcgactaccatgccgtgaagaccgcgacgagggacttctcggagaagctcgggagcgggagcttcggcacggtgttcaaaggcgcgctgccggacgggacgcccgtggccgtcaagaagctcgacggtctccggcaaggcgagaagcaattcagaacggaggtggtgacgctcggcatgatccagcacgtcaacctcgtccgactccgtggcttctgctgcgagggaaacaagagggcgctcgtgtacgactacatggccaatggctcgctggactcgcacctgttcgtcatgagcggctccagctccggccccgactccaagcaggtgaccctgacttggagccaacggtacaacgtcgcggttggtgtggcacggggcttggcttacctgcacgagaagtgcagggagtgcatcatacactgcgacgtcaagccggagaacatcctcctcgatcaggagatggcggcgaggctcgcggacttcggcatggccaagctcgtcggccgcgacttcagcagcgtcctgaccaccatgcggggcacggtgggatacctcgcgccggagtggctagccggcacgccggtcaccgcaaaagccgacgtgtacagcttcgggctcctgctcttcgagctcgtctcgggccggcggaacagcaccgcgccgtcgtcgtcgtcggagggcggccctgggatttacttcccggttcatgccgtggtcaagctaaacgaaggcgacgtggccgggctggtcgacgagagggtggccaaggatgccgacccgaaggaggttgagagactctgcaaggtcgcgggctggtgcattcaagacgaggaaggcgaccggccgaccatggggctcgtcgtgcagcagctcgaaggcatcgccaacgtaatgttgccgccgatcccttctcggcttcatatcctggcgattgagaacgaatgggtcagaggtgttccagaggatgagcgctgctcaaagagcggtagtaaaccagaaacagaagcaatagaagaaatgtagaactgaaaagaatctgggagcaccctacagctgaagtgaagatgcagcgtcagatatgaaaatgtagttgtaatgtcagcatagttgatatttcccgtgtggatgtatagccagtactgtactgcaactgttctgtaaattccttaaattccggaaacaggatcagacaagtaccttctctcgtttaaaaaaaaaaaaaaaaaaaaaaaaaaaaaaaaaaaaaaaaaaaaaaaaaaactgagactagttctctctctccc

SEQ ID NO: 79141 - DNA, 183 bp, Oryza sativa
  Clone ID: PAT_MRT4530_78880C.1
atgggggaggcctcgaggtggccggtgaaaggtggggaggatgaaaggcttgaggtgaagaagggaaagaatgggggaggggatctcaattgcttttgcagagcgaggatggcatgggcaggagtcactggggtgaggccggcatcagaggcgtcagggagaggatgtcatggcaccggctag

SEQ ID NO: 79142 - DNA, 404 bp, Oryza sativa
  Clone ID: PAT_MRT4530_78881C.1
gggcggttggtttgtgtgggctgctcccctccctgtttctttatcttcaggtctttgtgtcttgaatttattctcgggcgccggtcacgcagaggagcccgagggcgggccccaccatacggagaggggcaaaccagggccccccgggcccgctggggggaaaaaaaaacccgggggtccccgcgcaccgggcggccattcccccagcaaaggaaatggggggaaggggggccacacaccggggggcgggcacggggccggggaaaagaccctggaaaaagggccccccccaccacgggggctgcccgccaagaggggcgggccccgccgggacccccccggggggcgccgggcccccccccgggcccgggcccgggcacctcccctccccccccccggggggg

SEQ ID NO: 79143 - DNA, 2107 bp, Oryza sativa
  Clone ID: PAT_MRT4530_78882C.1
gcacgagccagacccggtgcagggttgcagcgctttgcataggaatgtctcgccttcctcctcctcctcctcttcttcttgcagctcatcgaaagccacatagtataatattcgccacctaaaagcccaccacatccatccatcttgcttgccacacacccaacactccacacaagtcagctcagtgaccgccatggctgctgctgcctgagctgagcgaggagtactatattgcagcgtccagaccagtccaggtctgcttgctcggcagagtgcttgttgcgccaaacaatgaggcaaccacagagcagaaagctcctgcagctgcaggctctttctctgctgctcttcatcatcgccctgcacagccgcctccatggctgctcgggccaaggtgaggcggcggacggctcggcgtccacggcggcggctccaatggaggagaaggagaagagggctctctacgcggccatcgagggattcgtcggcaagggctggaatggctccgccctctatcctgacccctgcggctggtctcccattcagggagtgtcatgtgatctgttcaatgggctgtggtacccaacagtgatgagcattggcccagttcttgacaactcactgcggtgctctgctgatgccaagttcagtccccagctgttcgacctcaagcgcctcaagaccctctccttctacagctgcttcccggcgaccaacccgactcccattccggccaccagctgggacaagctcgccggcagcctggagacgctcgagttccgcaccaaccctggcctgacggggcccataccggcgtcgctcggccgcctgtcgagcctccagtcgctggtgttcgtcgagaacaacctcaccggtgccgtgcccgccgagctcgggtctctggtgcggctgcgtcggctcgtcctgtccgggaacgggctgtccgggcagatcccggcgtcacttggtaatgggcatttcgccgagcagctgctgatcatggacgtcagcaacaactctctaaccggctctctgccttcgtcgctaggtggcctcaagggactcctcaagatggacctcagcaacaacctgctgcagggtagcttgccgccggagctcgccgggctcgggagcctgacattgcttgacctcaggaacaacagcttcaccggcggtttgccgtccttcttgcaaggcatggcgtcgctgcaggacctgctcctgtcgaacaacccgctgggaggcagcctggggcagctcgggtgggagaggctgcgcggcctcgcgacgctggacctgtccaacctcggcctcgtcggagccataccggaatccatggcggcactgaccaggctgaggttcttggcgctcgaccacaaccggctcaccggcgacgtgccggccaggctcgccgagctgcccaacatcggcgcgctgtacctgaacgggaacaacctgacggggacgctgcagttctcgccggcgttctaccagaggatggggaggaggttcgcgtcgtgggacaacccgggcttgtgctacagcaatgccgcggtggacgcggcgcacgcgccgccgggggtgacggtgtgcaaggtggccggcggcgtgggggacgggaggaagccggaggcgagctccagcctcatggccacctcgtctgcttccaacctcatcaatggcttctgcttcttcttgtggatggtggccacgtctctcttgtagccaaagacagacaccaactttcagaatcttcagatagatggaacaacatgaaatgaagaaactgattctctcttagtttagcttggctagtgactagtagtgctgttcttacttttggctctcttttttgggtgtttttctgatgatggaaaaggaagaaatcctggtggtcacagtaaacactagtctgaaactgtgtagtgacgagtactagcttggttgttttttttgggtgtaattagcatgtttctcatgtgatgtttaattacgggaagtggataatggatataaggtaaactgctctccttgtctgaaaaaaaaaaaaaaaaaaaaacgacccgcggccccgcgctccctccctgtgccgaattcctgcagcccg

SEQ ID NO: 79144 - DNA, 435 bp, Oryza sativa
  Clone ID: PAT_MRT4530_78883C.1
atggtcaccggtgaggaggacttgtttgtttctggtaccagtatcgaagggaaaaagaagctgcagctgttggatgatgatggacggataggattggagctaattccaccctctgcattagcttctccaatgcagaggatctggatccctacgagaacacctctgatcgatacggattggtacaaagtagtagtgtgcagcctgggcttgatcaccaagccaagtggtaattcggtggacagcactgcatgcacacttacgtctggagccagttcgtccaaatcaccggtcgtgctacccggtatagctcattttggtgccagcaatgcaggctttgacattgagctgaccataagagacttggagttcttgcacacttccagacatcctctagatgcagagattacatgtccacgtgataacagggccacctaa

SEQ ID NO: 79145 - DNA, 310 bp, Oryza sativa
  Clone ID: PAT_MRT4530_78884C.1
gcccagggcgcagctcaggcactgcaggatccagtgctgccagcaagctgcaaggacagtgagccagcagagtgcacagcttgcagccagccaatccagccaggatgttgaggagctacgaggagagcatgccagatggcacactgggagcaaggctaggtcagtcagtgcagtcagtcaggagtactacggcaggcgaggggtcagtcagtcaggagcaggggtacttacaggcgaggggtcagtcggaggagggctactacaggcgagcaagcatactagcagccggggtatgtaccctgcgtgtagc

SEQ ID NO: 79146 - DNA, 777 bp, Oryza sativa
  Clone ID: PAT_MRT4530_78885C.1
atgcggccgttctccctcccacatcagacgccgtcgatccgggcgaagaacgtccgagaggaaggggatggcgccgacaagtgggccccacccgtcggtgactcaggggcttcggacaaccgtggaccgaggcacgggctagtgcaccacgtggcgcacatgtggcgccggcggggtgccgacatggcggcgacatccggcggtggcgcggatgcggcgcacggcgatggcgacccggccggacggccacctgtggcggcgacgcatagcaagcaggcccgggaggcggctggggaaggagagaaagagggagagggaggggagttctcaccaagggcgacgacgatgagacgaacggggaagcggccgacggcggcacaggaggcggcgaaccgcgtcccagtgatgaccggcgaaagaggggcggccgacggcgctcagggcctattgaaggaggagaaggggttaggagggtgtgagggggtcgggaatggtgaggaaaggcggccggaggcgatgggggtgacggagctcaccatcgagcgagggagacggaactccagcgggatcccggtgaagaggagtggatgcagaggagcggtgaggcgcggcggtgctgggggtggccacggcgcagcttgggatggccgagagcggcggcaaacggcgaccagaggcggcgaatgtggcggcgacctctggttcgcggtggaggtggtgatccggtggcggattgttgaaatggaggaaagaccggcgtgcagcgaggtgtggtga

SEQ ID NO: 79147 - DNA, 462 bp, Oryza sativa
  Clone ID: PAT_MRT4530_78886C.1
atggcgtggcggcgcggggctcgggcgcgatgcgggggcgacggcgatagcgcgcgcggaggggaggggctcgagggcgacggcaacacccggcagcggccacgcgaggacgacggcgacgcggcagcggcgcgatgggacggcgcgcggcgcacggggcgtgagggcgagggcgacgtgatggcgcggcagcgatgggacggcgggggcgacggcgacggatgttacaccgagtcaggccgggccgtgcttggaccgggccaaaatggcgtaccttgggccgagcctcaggccatttggccaggcatacctcctatcctacgtcttatggaaatatgtgaatacgctccatttcaagttcagttattgaaaggtggcctgaagaagctacaacctggattacttctcagttcctgttcaattcaatgcatcacaaagactgagggagaaaacgtttactga

SEQ ID NO: 79148 - DNA, 603 bp, Oryza sativa
  Clone ID: PAT_MRT4530_78887C.1
atgactatatcacgcagcaagtcacctgcggccaccaacctctcggggcacgcttccacgacgcagcccggtgcatcttcacgtctgtgcagctgtatgagcgccgtggatgctgcttccggtggcaacagacacactctgaggaacactggaaagaggttctacgtgagagctggcgagggtggcaagatcacctggatgattaagcagaagacggacagcttagatggcgagaggaagggagcatcaaggaacctcaaaagctggatggcaagcaatgatttatcgtgtgatggcactgtgcatgtcaaagaagggttcatcagggaaggggacactgctagtgtgattggagtcctgaagaagcaccacgcctacgacatcgtcgacgcgccgtccggcgtggtaaccaccggctgccagttcacgagatattaccatatactatccaacacagatgttagaataggtgttgaatatactagttctattttggttatagttagacttggggttgtaataggtgatggtcgcctgacgtgctcttactctacatgtgactttgttgacaaagagatggcaccgagtgatatccgaagctga

SEQ ID NO: 79149 - DNA, 1047 bp, Oryza sativa
  Clone ID: PAT_MRT4530_78888C.1
tggagaattgtttctaaacctaatgatttagtctcctctattctcaaaaccaaatatttcaacaatgcttccttttggaaagctccttttaatgtttcccagtcaactctctggtcttccatttctaaaatccgaaacttgtggggtcaaaacaaaaattatgactttgataaaatttctcaagtctttgctaaggaggctacaaattctatatcccatgtaagagtaattcatcaggatacagaagataagctttgttggattcacacttcttctgctgagtgtaatactaaaagtgcttacaaagaagttttcaagtctttccattataatcatcatcaaatttgaaaagctatgaatgatcataattttaaagcaaaaaattgggagccttttcaggtttgtaatgcaaccatctccatggtgcaaagttataatagtgttcatcaaacacaacatgattcttcggaggtaacacaaactgaacaacatctccttatgttaacttgattatcccttcaggtactgtactctttgttatgttgatgcttcttggaaaattaatatatcagattttggcatttttatacatgatcctggttcacacgcagtaaccttaataaaagcacgttcgaagagctttacttctcctcttgttgatcttgcagcatttgtttcaggttacaaaattttgcttggctttacagttacagcatacatttttcctgtcagacaataaaactttagtctcaaccttacagcagcaagatttcattgctcaaccaagacaattggtctttgagatcattactctttgaattgcatgctttatctgcaggtaaacaaatcgcaatcagatggattccaagggaggccaataaacatgctgacataaagcaagaacctcttctcctaataactttcttgtcataatagttttcttgtcatgctttgcctgctattttgcaagttgcccaaccttaggcaacctttgtaatctccttgtggagaagttaacatcattcatgtactgtgcttttaagcatt

SEQ ID NO: 79150 - DNA, 1452 bp, Oryza sativa
  Clone ID: PAT_MRT4530_78889C.1
gcacaggcctcgtgccgaattcggcacgagggttgatcacgacatcacgttgcgagctaaaggggcacgcgcctcttcctctgcttcgtcttcttcctctcgctgctgcttacgattcctcttctgctgcttcttcttcttcttgaattcttgatcgtgttgggatcggcgatgcacaagattgggagtgggatgtacgtgtccgggccggcgccggacagggggaaggagcggcggcagctgtcgtcggggtcggtggcgacgccgccgtacaccggcggggacgtgtcgaggtcgggggagctggggcggatgttcgacatcggcggcgcgggggtgtcgccggcgtcgtcgcggcggagctcggggccgctgccgaggcccctgccgttgctgccgtcgccggcgtccggcccgctgtcgcagctctcgcactcggggctgctcgtcgggccgtcgccgccgccgccgccgccgcagacgcagcagtcgccggcggggtcgtggaggaagtcgagccgaaggcgggaggaggccgcggcggcgccggaggcggcgcgcgggcgggcgaggctgggcgtgtcggtcgcgtgctacgtggcggcgagcgtggccgccacggcggggctcggcgccggggcgttcttcctcgtggcgtggcaccggtgggaggtgctctcggcggcgggcggcgcggtggccgccgtcgcggcggcgttcgcgtggaacgtgcgccggcgcgacgccgaggcggagaggttcttccggcggctgcccgacacggtgttcgaccagagcgacatgcccatcggcgagctcgtcaagatcaccgggcaagtcacctgcggccaccaacctctcggggcacgcttccacgacgcagcccggtgcatcttcacgtctgtgcagctgtatgagcgccgtggatgctgcttccggtggcaacagacacactctgagacacggacggcgaatttctacatctctgacaggaacactggaaagaggttctacgtgagagctggcgagggtggcaagatcacctggatgattaagcagaagacggacagcttagatggcgagaggaagggagcatcaaggaacctcaaaagctggatggcaagcaatgatttatcgtgtgatggcactgtgcatgtcaaagaagggttcatcagggaaggggacactgctagtgtgattggagtcctgaagaagcaccacgcctacgacatcgtcgacgcgccgtccggcgtggtaaccaccggctgccagttcacgagatattaccatatactatccaacacagatgttagaataggtgttgaatatactagttctattttggttatagttagacttggggttgtaataggtgatggtcgcctgacgtgctcttactctacatgtgactttgttgacaaagagatggcaccgagtgatatccgaagctga

SEQ ID NO: 79151 - DNA, 1965 bp, Oryza sativa
  Clone ID: PAT_MRT4530_7888C.1
atgcccggctcccgagaaatgtcaatcattagtggaggtatgtggtccgacggcaacgacttcgccgagctgctgtgggagaacggccaggcggtggtgcacgggaggaagaagcacccgcagccggccttcccgccgttcggcttcttcggtggcaccggcggtggcggcggcgggagcagtattagggcccaggagcggcagccttgcggcatcgatgcgtccgccaaggcggggggcggctgcagcgccgaggtcatcgctccgtcggtgcacggctgcggtgctgggttcggcgccaccatgcgcgacaacggtgatctcgacaccgttcggaggatccattaccccacctttgtcgatgaagacgccgtcgcccctccggctcccgcggtgtcggacgaacacatcatctccatgggaacggggcagtgcgttccggcagtggtggtagcaacagcgatgcagccctagcaagcctcaccgccggcccacttcccccatggcgccatcggtttcgggtacgggatgggtgtcatcgccatgagcaggaatcccgcccttcagatgccacccgtcccgggggctcccaccacccgagccgagccgcagccgcagccacagctcgccgcaggcaagctgggcacaagcaccatgccaatgtttggggttcctgtgcaaacaattccttcgtcagcgtctagtgtaccaccatttgcatctttggctggtcttcctgtgaggccgagcggggtccctcaagtatcaggcgccatggctaacatgagtgcaagaccagcaacaggggttagcgaatcaacagcagcaatgtctgaacaaggaagctatacagggagcaaatccaggtgattcacaaatgcagatcatcatgcaggcgcgtacacagaattcgctcatatggtcccgggcgtaaaccagaaccactagatgttcagtgactggccaggccgagccaagcctgtccacaaaaccgaggcgaggaaggcacctgaggccacggtcgcgacatcgtcggtgtgctccggcaacggagctgggagtgacgagctgtggcgccagcagaagcggaagtgccaggcccaggcagagtgctcagctagccaagacgatgatcttgacgatgaacctggagtattgagaaaatctggaaccaggagcacgaaacgcagccgcacagctgaggttcacaatttatcagaaaggaggagaagggacaggatcaatgaaaagatgcgcgctctgcaagaactcattcccaactgcaacaaggcatgctatgttttgcagattgataaagcctcgatgctggatgaagctatagagtacctcaaaacccttcagcttcaagtacagatgatgtccatgggaactgggctgtgcattcctccaatgctattaccaacagccatgcagcacttgcaaattccaccgatggctcatttccctcatctcggcatgggattggggtacgggatgggcgtcttcgacatgagcaacactggagcacttcagatgccacccatgcctggtgctcactttccctgcccaatgatcccaggtgcgtcaccacaaggtcttgggatccctggcacaagcaccatgccaatgtttggggttcctgggcaaacaattccttcgtcagcgtctagtgtaccaccatttgcatctttggctggtcttcctgttaggccaagcggggtccctcaagtatcaggcgccatggctaacatggtgcaagaccagcaacaaggcatagcgaatcaacagcagcaatgtctgaacaaggaagctatacagggagcaaatccaggtgattcacaaatgcagatcatcatgcagaatgttcctgtcctaaaaagatcaatggctgaggaatttcatatggtagaagatgctaccaggttacaagctgtaattcttgacttccagtgcagtttcctatga

SEQ ID NO: 79152 - DNA, 1128 bp, Oryza sativa
  Clone ID: PAT_MRT4530_78890C.1
atggaaatcgagttcacctaccaagtgaagtgggagatgagcgaggatggatctccagcaacatacttctccttcttcatggtattacccttcatggaaagcagcacggcgctacaaatggagtcggagcccatcgtcggctgcgacggcgacggctgcgcctccggcgccggcacctggccgctccaccacttccgccgcctcgacggcgtccactgccgcctctgctcgtcgtgcctcctgctcgagtaccgctccttctactgctgctgctgcttcctcctcctcggcccggagccgcccgcccacttcgacgacggcgaccccatcctcgcgccgccggtccccgtcgccacctgcaggctctgcaacgaggccgtcgctcaccgctactgcctccagtccgacgacgacaccttcgtctgcgccgcctgcgtcgcggccgcgcacggctggcgcttctcgtacacgcctacggcgccgccgccggcggcgctggcggccaccaccaccggcggcgtcgtcagcgacgccccgctcgacatacgcgcgacgcggatcatgctcttggcctcgcggatctcgctggccgtcctgaggaaggcggccgccgcggcgcgcgcgacggcggagcgcctgttcgtggaagccaaggccgagaaagcgcgcgcgtaccgcgctctcgccgtggccctgggcgtcgacgcggaggtgccgtctgcaaaccatggcgccgacgagccggagcccctcccgatgctgcaggcgccgccgccgccggaggacatggcgccggagagcagcagcaccgcgacgaacatgggcgccttaccgccgtccgagaacgtggcgccgccggaaagcgacgcgtcgagcgtggccatggcgctggcgatggcgccgccgtccgagaacctgccatcggaaggcaacctggtggccatggccatgggcctggacctcaacgctccgccgccatccccggccgcagacaccatcggcgtgggcgacgtcgcagagatgacaatggctgccgaggccagcagctcgtcgccgccactgccaccgccaccgccgccgcagccgcggcggcggccactgcagctgtttccggacgacgacatgtaa

SEQ ID NO: 79153 - DNA, 164 bp, Oryza sativa
  Clone ID: PAT_MRT4530_78891C.1
cccacgcgtccgtggaggaacctgcgaagataacaatcggtgaggcgctggaggcggcggctctggcggcaggagggacgccggtggaactcagcgacgcggctggccattcatgcggtcgaagcaaaagccaccggcacggacacctacatgccccaaagatt

SEQ ID NO: 79154 - DNA, 387 bp, Oryza sativa
  Clone ID: PAT_MRT4530_78892C.1
atggccgctaggcaattgccacaatcacttatacaaatgaacttagttaagggatttgtggttgcacttgcaatggtgagcgtgtcaatgggacataatgctgacaagaagcaggttgtcacaattggcatggacgtcttggactgccctgtctgctttgaacccttcaagcctccgattttccagtgttctgtggggcatttcatctgctcctcttgctgcaacaagctgaataagtgccctgggtgctcaagaacctcctttgaacactgcttgggcatggagcgcattgtcgaatccgcagtggttccttgcacctacgccgagcatggatgcaccaacaagatgtcacgccctgaactagccctgaacagaactagcccgtga

SEQ ID NO: 79155 - DNA, 832 bp, Oryza sativa
  unsure (1)..(832): unsure at all n locations
  Clone ID: PAT_MRT4530_78893C.1
ttttttttttttttttttttttttaatgctaaaacaccaccaccaacttgtcatattaaagccatgtccataaatttgctctgctctttcgtcttgtctttccaactacaattctactatttcatgacttcgcttgaccaaagggaaaaggctaattacaaatgcaatatttttttttttttttttcagactaaattctcattcgcccttgttattggagttgttgattgtcttaacatagcacaaacaccagtcacgtgatatatgtatctaattggataccactggatgacatcaactcaaatatgagtagttagggttcaggatcagagcaaaatgttgaaaacccccctcactaaagcatcttgatctataaggctatacaagaatctcatctatcaacaaaagctttgtagcagaacaccagcgttgtcttgacaagtttcactggctgaaacccaatctgaatccgtagagaagatcagcaagctcgaagcatctgcatttatcaagtgcagtgagcggcattattagctgcaggcagtgctcaccacaattatgttgacaaagaatgtgttcagtataccgcagaagcatgatttctgttttgcatcgtggtcacaacagcatcaagaaaaagcctttgcagcgtcacctcggcttctgcggcctctgcagcccttgctgcttcttcagcttcagcaatggctgcttctgcctcgggcaactgccctagcagcaaaggatggctgcctcttccttactcangctttttnacttatccagttcagcatccacttggcggcttactcagctggtctaaacattatga

SEQ ID NO: 79156 - DNA, 3439 bp, Oryza sativa
  Clone ID: PAT_MRT4530_78894C.1
ttttttttttttttttttttagcttaacaaattgcacgattctctcttaatctgattaccacaatgagtgcaactgtgcgaatcaccatggttaacaattgagaatgaattcagaagagcggcctcccggctctgtttctttgtgtcgcctcctctggagttctggtacgcggaccgtcatttcactcgtcaatagtgttttttatcagaggaaaaacgttacagcatagcaaatactatgcatgaaagaagtaccacatatcggagaggatgttgccctcgtgtgtgaagtatcggcctgtacctgtatactagcatactcaatactcttttcaaagaaaaaaaaaaacaccaacacgcggcagctgaactctcctaaccctgtgctttatctgattattcttttgttcttatgactgcatctgatctccgagacaggactacctatcacgacatccagttccgggccaaattactgtgttttctctgcgacgcgtgttactgctatgaactctttaaggcaaagcaggtcagccggtcatgaagaaatggatgtcagctaggcactccattttgatggataacttttctctgactcggctgcgttgggtaatacatcagaaatggtcgcctgtggcttatggattggttgctgccttgaactcaacctcattctcaagaacagtgagttggccattacgccgacagaactaaaacccattagagctccagctatcgacggggtcagcaccgtacctgtaactggcagcaatgccccagcagcgatgggtagtccaacaatgttgtacagaaaagcccaccaaagattttgcttcactgtcctcatggtctctttactcaactctaaagcatcaacaagctgagataatctattgcccataagcacaactgaagacacatcactagccgcaccaacacctccacccatagcaatgccaacatcagctgaagctagtgctgcagcatcattgatgccatcaccgaccatggcaactagcttgtgctctttttgaagttcagatatgaaactcttcttctcatgtggtttaacttcagcaatgaccttgtctgcctggataccaacaagtgaagctacattcatagcagcacttttcttgtccccagacaacatatacacactaatcccttgcttagataggatatcaataatttgatgagaatcttctctcagcttatcctcaaaacaaataagtccagctagagtaccatccacagctacatatgcaacagactgaccaaaattttctccatcagcaaatggattgtgaagaactccatgcctcctgatccaatcaagtgttccaactgaaacctgtttctcgccaatggtcgccacagcaccagacccaggttcttccatgaaggatccatcttttgcctgcagatagaggcaattggcagcctgagcagcttccatgatggcttttccaagcgggtgggttgtatttgattctacacctgctgccaaactcagaatctcaccagtccattcattgttacaggaatcctttgtattttcatctccctctctgtgagaagctattactttagtcactacaggtttcccaattgttaaagttccagtcttgtcaaacacaatggcatcaacttctgagaatttctctaaaatatccccaccacgcaaaaggagtcctcttgttgcacctaatgaagtcccgaccagcacagcagtgggtgtggcgagcccaagggcacatgggcaagcaattaccagaacgctacaagaaagttgcaatgccaaagccattgcacttccatgctggatagcagcaggtacaagttgtgaaccaaaaatactccagaatgtataagtagcagcagaaagagccataactccatatgtaaagttcccagcaaccttgtcagctaatcgttgaactggggcctccctcgtctgtgcttcttccactaaacggagtatgtcagacatggcagtctcaccaccaggtcttctaacttcaacagtgattttaccatttaagttaatgcttcctgctgatacttctgtccctgctatctttgttacaggcataggttcacctgtcaaacttgattcatcaactgtactccgtccagatttgacaacaccgtctgctggaacacgatccccaggcagcactacaatatagtctccaacagaaagggtatcgcatgggacctcagtaaatgatgattgctcaggatcattgtccaccattaggcgtgcttttgatggaagaatattgagcaatccagtcatatcactagtagcttttagcttcgccctctgctcaaggttcttcccaagaagaacaaaagctactaacataaccggctcctcaaaaaatgtcttccaccccagctttggaacgaaggctgcaattgagctgactgcaaaggatgaaagagcacccaaaccgaccaatgtattcatattgggagaccccttgaatagactatttaatccgtcaagaattaatcttcgaccaggaccaataaatgtaaatattgagagagacaaatgaaacccagtggaatgcagcaggtgcatcaatggtgcattaactccaaagaggtgagaaatgtgcccaagcaggcaaacagcacataatgcccaagatacagcaagttctcgaccactttgtttcagttgttgaagtttttcatccatctttctttcaaaaaccgtctgtgaacttgcttttgaagagtctcgaaggttggatttgtaaccacatgttgtcaactggttggcaagcttctcacccaactgcagcttccagtttttcgcatcttcatcttctggcaccgcccacacgactgccatctcagtggcaagattaacatttgcagaccgcacttggggctcactctccaaaatgcgcttgacacttgctgcacatccaccacacgacatccccccaacatcaaggattatgacgtcagcctcctgcccggaggcttcctccgccaccgccgttccctgcgaagctcgcgggcgcttccacccgccgccgcctccccctccaccgcccccatcaccgcctcccccgcctccaccgccgcgcggtggaccgttcgacgccgccgagaggctcgcgaaccatcggcgcgcctccgcgcgcggggccgggccacggagcgcgaggcgcgcgagcgagaggagcaggagatcgccgggtacggcgaggcgccgcgccgctgacgccgaggcggaggaggccgcgaagggagtgcggcggggcgggggcggcgccggagggaggcacccgcacgcgccgctgccgcggccgcgggagaggaggaagtggtgcggggaggcgaggagggagggcttggagcgggaggaggaggagatggccttggagagagcgaggaggggcgcggcggggtccat

SEQ ID NO: 79157 - DNA, 935 bp, Oryza sativa
  Clone ID: PAT_MRT4530_78895C.1
acttttgtggccccttgctatgcactgaacaaaattgagatagacacaaagttacccatttttggagatcagaaatgggtcatatggatttgctctttcaacattccaatggccccagggaagactcgttctatagtttgtagtgctcggaactttttccagtttagcatgccaggaaaagcatggtggcagcttgtccctcgatggtatgagcattggacttcaaatttggtctatgatggtgatatgatagttctgcaagggcaagagaagattttcttgtctgcatcgaaggagtcttctgcagatattaatcagcagtacacaaagatcatgtttacacccacgcaggctgaccgttttgttttggcattccgggcgtggctaaggaaatttggtaacagccaacctgactggtttggaaatcctagccaagaagtgttgccttccactgtcctttcaaagcgtgagatgctagatagatatgagcagcacacactgaaatgctcatcttgcaaaggggcatacaacgccttccagactctgcaaaaggtcttcatgggagcgacagtggcgttctgtgcaactgctgggattcctgcggatgttcagttcagattattgcttgccgctgctgctttggttagtgccgctgtagcgtacgcattttatacgctccagaagaattttgtatttgtagattacgtgcatgctgagattgattaaacaagcatgacatctgatctgagatctggtgaagcgacatcacacgatcatttgtgcaacgtaagctagggaatatagattgtcggtgggtatagtctaatgttgcattgtaggccataggtttgtaatttgtattagctcttcggagatgatgtaccaaagttgaaatgaaaaatgtaattttgctccaaaaaaaaaaaaaaaaaaaa

SEQ ID NO: 79158 - DNA, 1188 bp, Oryza sativa
  Clone ID: PAT_MRT4530_78896C.1
gagccaaacatagccgatcgagtttgacacgaacttatgtacacaacatggtcacgtactcacatcacatacatacatacagacatactactatcagcatgtacacaatacacaacccgacgcgtggtggacaggttacacgagcgtggagcaggcggacgtgtcggggtcgaagagcgccgggaggaggtatttccggccgtgcgcgccgtgcgcgttgtagctggcgccggtggccttgtccaccagcagcgcgccggcgtagcccgggtacgcgcccttgccgtacacgcccgtgcacgccgtcgcggcctccagcgccgcgccgcgctccccctggtagaacccgtcgccgaacgggttggtcaccgcgccggccaccatgctggccacgttgatcaccatcccgtccatgcccacgtcgccgctgggtggcaccagcggcgccgcctggggaccgtacaccggctggtggaacggccacgcgcactgccccgggcactgcgtcgccgagttgcccacccacgcgtacgccgcgccggcgcgcgacaccggcccgtgcgtgccgcaccggctcatgcagaacccctccaccgccacgtcctgcgccgtcagcaccagcgcgacgccgcccttccccggcctcgccctcgccgccagcgtgggcagctgggacagcttcaggctcttccccagcgagcacccttcgtcggagacctgcccggacagcaccacccgcgcgttcttggcccggccgccgccgccgccgccgtgcgcgcccccgttcttgccgacggccaccgccttggagaggtacagccggtgaatactaccccaccactgcgacaccgacggcgccggcgccgcctgcagcggcgcggcgagcgagaggacgaagtcggtgacgacggccttctgcgccggcgtgaaccggccgtaccagaggatcgacacggggatgtcgccgctcagcacggcgccattgtggtacgtgagctggttcggctggggcttgaccaaagacatcagcttcctatccgccatcgccgacacagccaagcctgcgacgacgagcatcattgcaagcaacaagctctgcttcttcgccatcccggcaagaagagctcagattaatctaggagaagactgtgtatgtgcgtgcctcgtgccgattcctgcagcccgggg

SEQ ID NO: 79159 - DNA, 559 bp, Oryza sativa
  Clone ID: PAT_MRT4530_78897C.1
cccgggctgcaggaatcggcacgaggctattcggtgttctcgttgcaaagcatacataaatcctttcatgagatatgttgatcaagggaggcgctttatctgtaatttatgtggatttagcaatgatactcctagggagtacatatgcaacttagggcctgatggtaggcgccgtgatgctgatgacagacctgagctatgcagaggaactgttgaatttgtcgcttccaaggaatttctggttcgcgacccgatgcctgctgtatatttctttcttattgatgtctccatgaatgctatacaaacaggtgcaactgctgcagcttgcagtgcgatttcccaggctatttcagatctgccggaaggtcctcgaacaatggttggaattgccacatttgattccgctattcacttttacagccttaagcgtgctcagcagcagcctttgatgctcatcgttcctgatgtgcaagatgtatatacacctctacaaaaggatctgattcttccagtttctgagtgccgtgagaatctggagcagctgctggaaagcatccct

SEQ ID NO: 79160 - DNA, 648 bp, Oryza sativa
  Clone ID: PAT_MRT4530_78898C.1
atggcgttaagcaggagaacgcgccattgcctggtattactacttgtctccttggcattgctcccactgggcatggctacggatcccattggcggctactgctcggagtcggggacgagcgatgctgaaattaacggcaagacgaggcggcgcagcatcaactccgtcgtctccgacctcgtcgccaaggcggcctccaacggtggctttgccacgtcctccgccggcaagggcaacaacgtcttctacggcctcgcgcagtgccgcggcgacgtctccgccagcgactgcaaggcatgcctcgtcgaagccgccaattacaccctctccttctgccactatgcatcggactccaggatgtggtatgactactgcttcatgcggtacaagaacgccaacttcattggacaggtggacacgagggtggacgccagctgcacgcgggatctagcaccgctggcatgtgcccaatgcctgtcgacggcagtgtccgacttcggcgacatctgcaacgccgcggagggatgtcagatcgaatacagcacctgttgggtgcgctacgagatttaccccttctattttccgctcaagactgacgggcgagccaccactgacatgacgaagtacaccaaggtcgttgtgcactga

SEQ ID NO: 79161 - DNA, 595 bp, Oryza sativa
  Clone ID: PAT_MRT4530_78899C.1
tgggactccccaggacgtcgaggtacctatggggactcttttttttttttttttcgtaggggcgatgatgttgctgcaagtggaatcacaggccaacacctcccttcatgcattaacggttaaaggccccagcacaacctcaggaggctcgtggcagcaactgtagaagaggtccaggttacagggcatgataccgcctgggtacaagctcccaccgtgttcagcggacgagcagcggggggacgctgctcccatccaccccacgctgcccttgcccggaagcctcgctcgccgtacacaccactgccagcgcctctcaagtgcggtggctgcctgtcagccgtgccgctggcagcagcatcagcaggtgccctttactggccggccacctgggactctgccttggcacgcagagcacgcagcttcttcttagcctcgtagaaggcagcagacttggacttgcgcttggcctccagctcggaaacagtctcctggtggcgccagccaaccgccgcggacaggtctcccagcttgcagtacttgtggccgtgctgcaggcggagcacgcgcaacgcatcggggatcaccagacgct

SEQ ID NO: 79162 - DNA, 1389 bp, Oryza sativa
  Clone ID: PAT_MRT4530_7889C.1
atggctctctcggccgagacgggcaaagttgtccagtggcggcgctgggcgttcgccaacctgggctcggtgctgtccaacttcggctcgctgtggctcctcctggcgccgctgctcgccgcctacgcgccgcggcggctgttcaagacctacttcaacctcttcctccgccggcacgcccggcgcctcctcgccgtcgtcgacccctacgtcaccgtcgacgtctccgagccgggcggcgccagcgcgcactactcccggtacggccgcgtcaccgacagcggcgacagcacctacgaggaggtgaaggcgtacctgagcgacgggtgcgcgggggaggcgcgcgagctccgcgccgagggcgcgtccgagggcgacggcgtcgtgatcagcatgcgcgacgggcaggacgtcgccgacgagttccggggcgccgcgctgtggtggacccggtacgattacaaagcatggagctacatcgacttcgaccacccgacgacgttcgacacgttggccatggacacggccaggaagagggagatcatcgacgacctcgacgcgttccggagcgacagggacttctaccggcgcgccggcaagccgtggaagcggggctacctgctgcacggcccgccgggcaccggcaagtccaccatgatcgccgccatggccaactacctcgactacgacatctacgacgtcgagctcaccgtggtgaaggacaacaacgacctccgcaggctgctgatcgagacgaccagcaagtccatcatcgtcatcgaggacatcgactgctccctcgacctcaccggcgaccgcgccgccacgcagcggcgggggcgccagaacgacagggacgacggcagcaggcgccatgaccgtgacggcagcatggtgaccctgtccggcctgctcaacttcatcgacgggctctggtcggcgtgcggcggcgagcggatcgtcgtgttcacgacgaaccacgtcgacaagctcgacgcggcgctgatccggcggggcaggatggacatgcgcatcgagatgtcgtactgcggaatcgaggcgttcaagaccctcgccaagaactacctggacgtcgacgaccaccggctgttcggccccgtcggcgagatcctcggcagggagagcatcacgccggccgacgtcgccgagtgcctcatgacggccaagcgcgccggctccgatgacgagtcctcccgcctcgagatcgtgatcgacgagctgaagcagacggcagaggcgaatgcgaaggcgaaggctgaggcagaggcgaaggcgaaggccgaggcagaggaagaagcgaaggcggcagaaatggatcgtgacaacactcgggaagaacaaaatggacgaaagtctcccaaaatttga

SEQ ID NO: 79163 - DNA, 1515 bp, Oryza sativa
  Clone ID: PAT_MRT4530_788C.1
atggccgacgacagcgcctccccgtcgccgtcctcggcctcgccgctccagcaccaccgcgaagccctcaagtcgtcagtgcgcaacacggcagctagccggaggcgggaacaagctattgcgattgggaaggaaagacgggaagccttgatccgtgcaaagcgtgtgtgtcgagctccaatttctggcagtgatgaagctgaaatggaagagggtgatatggtggtcgatgaggagaaagcatgtcttgaggcaaagactgctcatgctgttgaagaattgaaatctgctttgtcaatccaggggaaaggcgttcagaagaagaagatagaggcgcttcgtgatttgagacgcttgttgtcacagcctgaagtacctctagttgatactgcaattaaagctggagcagtccctcttttagtgcaatatctatcctttggatcatcagatgagcagttgctagaggcagcttggtgccttacaaacatagcagctggggaaccagaagaaacaaaatccttgctgcctgctctaccattgcttattgctcaccttggtgaaaagagctccacacttgttgccgagcaatgtgcatgggccattggtaatgttgctggtgaaggagcagagctgagaagcacattacttgcacaaggtgctttgcggcctcttacccgtttaatgttctccagtaaaggttctacagcaagaactgctgcttgggctatgtcaaatctcatcaaggggcctgatccaaaggctgcaaatgagcttattaccattgatggcgtgctaaatgcaattatagcgagcttggaaaaggaggacgaagagttagcaactgaggtggcatgggttgtggtctatctttcagcactttcagacagaggtattagcttaatagtgcttcgtggtttgggaaatcttattgccgctgatgactacatggttgattcagtcctaactgttggacacaatatcattgatcaagcattgtcaggtcttataaaatgtttgaagagtgataacagggttctcagaaaggagtcatcatgggcattgtcaaatatagcagcaggcagttttgagcacaagaaactgatttttgccagtgaggccacgcctgtgctgatacgccttgtcaccagcatgcaatttgatattcgcagggaagcagcatacaccctaggaaatctgtgtgttgtccctactggaaattgcgaactcccaaagataatcgtggaacatctagtcgctatcgtagatggtggagcccttccaggatttatacacttggtcaggtctgctgatgtagataccgcagggcttggtcttcagttcctagaactggtgatgagggggtatcccaataagcaaggcccaaagcttgtggaaatggaggacggcattgaggccatggagaggtttcaattccacgagaacgagcagatgaggaacatggccaatggtttggtcgacgaatacttcggtgaggattatggcctcgacgagtga

SEQ ID NO: 79164 - DNA, 369 bp, Oryza sativa
  Clone ID: PAT_MRT4530_78900C.1
ggtgctccgctcctcctcccttcgcccctacggctctcggcggtgatcctcagggcatcggcgcctttccatcgcctgcggctggccccgcggagcgcgggtagggcgctcggcagctcgctcgacgccgttgcgccgaccggtggtgccggctcgtcctcggcgccggcggcttgggctcccgcgcaccctccttggtcggcacaacggcagaaaacgaagctacagagatacgttggttggtatcttggtgaattcagggtttattgctgattaggagaaattccttgttgaatatgtcagagactcacgagaaagataagcaatttgagaaagaaggagaagaaggggaagaggaagagtatgtct

SEQ ID NO: 79165 - DNA, 185 bp, Oryza sativa
  Clone ID: PAT_MRT4530_78901C.1
ccttgtctctcttgcagatgttctcagacgacgtgcgatcgaagttgctcgatgatgcagataaatacaaagagcttgtttttaacacacggtgcatggcactctattttgaaggtttaggtctcaatatactcaggaatgataaaatggatcaatcggctgagttggttaaggtagccaggatt

SEQ ID NO: 79166 - DNA, 2432 bp, Oryza sativa
  Clone ID: PAT_MRT4530_78902C.1
ggggctgtcttgtgggtacagttgggcacctctgatcaaagtaaaacctgtcaaaacttggcctgattggtacaaaagggtattggctagtaaacaaacccactgagaagaattagggatttcacaatgcttagcccttactctagctaacatggattaggatgagccaatgatctcagctgctacttatttctggtccaataccttgaatgcattcttgttcaatcaaggaccgatgacctcatctgctaatcatgatcactggcttggacatcacctcatctgctaatccaatcagcatgaataccaagaacaaatttaccttaagaactagatccatcggaggttggtcaggtttcattgcccttaatatggggactggccctgtttctgctaaagagcttacaacttttctaatcatgtggctggaaaaatttctgttctgtgggccaagctatggtccaaccaccaactagcagcatatagccgaaactcttgtggataagagacgatttccccttgggaaatatttgctagggtatttgtaccaaactctaaatgctgcatcggctaggatagctgtcgattctgttgttggtgctggtggcccctggtggcttttacatgtttggctaaatccccataccatcaaagtatcacacatatcagacttagccgaagcagatttcccagctctagaaccaactgaagatgatgaaggaaatgaaatcacaactcgccgatgcatgtcttttgggaaagcagcctctacctatagtgaatgagattaatcggctgaattcttctccaattggttcggcaacttctatgatggatttccaagggattctaggatttggtttgcctatgaacactccaacaactttgaacatctagccgatttcagattcgatgagatcaactctgaaaaatatgataaatccagagaagtctttactatggctatttctccttgcatcctttctgtcggcatacatcaaggcaggaatatccaagtatcctatgagttataccatccaataagtgctgcaagacaacttgtaatgggccaactgccgatcggattattgtttgcagacaagatccagactagaggagagattacttcagcccttatgatggacagacttctaaatatcccagggccccctctaggcagcattgaagacattcaacttgccctagtcagaagtgcaaccttcgaccgatggtggattgagtggagaaaacatctctttcatcaatcggcttccatgtacctgaccaacatccatccagaatagattcctcaaaccatagaatcttcgcctccacatgtcagtcaaagtggaatagatatcagatatgctgcaggacttttgcctaacagcggcagattcgctccttcaatcatcggctataatgctcccaagacgtctacactgctccacggacaatctcgcgagccaattccttctgaagctggcaagaggaagaggactaaatcatcggctgttgttccatcattcacaaagaagaaatacaaaaagcaaaaggctgcagctgctgatgatctgcccaatatcgaccctgatgtggagaagtttttaaacgatgaagaaatagaagaggctgttgatgatgcagctgctgatatcagtgaggcaagagaacaaatgccaccagccgatagtcatgctcctcaaagaactccaccgactccaacacacccagctcgtcatctgaaggtatctttgcagaaaaaactggctaccaagaagaaaccaccaactccgccaccattgcctcctcgttctccaactcctcctcgtcatgaatcaagcgagcatactccatcggctgtgggcagccaccatatcgaagaagaggcagcaccagctcctgctatccctgttttagccgatatgttctcctttgacataaaacaattctttgatcaggaagaagaaatcaccagcctgcccttagctcttttaattgatgatgtcaaaacaacactctctgacgatcaagctagaatcatttcccctgctgtatatcttgaccatcatcggttcaagctggaaaaagcaagacaaaggattgtcgataggcgtgaacgaaaagaacttgaagccacaattcaagctaatcggcaaaccatcaataaagacaaatcgaagcttgataagatgaccgtcgattccatacaaatctacattgatcggctgaagtctcgtagagcagaactcttagctgagctaggaaagaagccgagatcaaagttaaggaattccatcaagcatctgtcagatctgagcaaatccttaaaagtgatccctggaaccgatgctaccgatgcccaagccatagacgatatagaacaaattaggcaatgggccatatcggctattaacaagcttgtatcaagt

SEQ ID NO: 79167 - DNA, 774 bp, Oryza sativa
  Clone ID: PAT_MRT4530_78903C.1
atggagcggcccgcagtagcggtggctagaggcgcgctcgcggtgtcggcgcgcgccggctgctggagcgcgtcggagttgacctcgatgacggcgtggagaagcgcgttgaggcgggtgatcttgccctggggacgagcgaccagggctgaggcactgccgcaccggcgacgtcgcctgggctgcaagggattgtgccgtcggccgcggcgggccccgccatccgctgtggagaagctgcgaaggctggagagattgggtcgccccaacaccaactaccccatcacctccttaactccaggaggaacccacaattcatcagtcatcacccgagcaaccgaggtttatgcttcccatctactgcaatctggtattctcaactactcagatctcggtgatgagaaaggggacggctcgtcgcagcccccatggtggcaggtggcaggggagaaaggggagttttcatcggtggagcgacatcgatctcgtcaggtgaaccgtgagcgatgtcgagggactatagacgccggcggcaacggaggaagggggagaaggagtaaagtgctcagccgcacacgctggctctccccagaactggccatctatctagcctgtctcacccatccctttcttcatggtatttgcaggatgcaagatcgagacacatctgattgctggagagtcgagaccaggggcggatctacggtgttcctaccagtgtcagctgacaccgacgcccttttgcaaatcctacacgatgctatttgtttttag

SEQ ID NO: 79168 - DNA, 666 bp, Oryza sativa
  Clone ID: PAT_MRT4530_78904C.1
atggaagactgcggcgtgatgatgaaggggttctgctggaatatccttcaggggatcctcggcgccctcacggcgctggtgctcatgtcagcgttgctctactatccctacaagtggtccttcgacgacggcaagtccgcggagttcagcgtcgccgtcgccggcgtcagcgggctcgacccggaccgcgacctcgggcggcccacgctggaccccacgttcgacctcaccgtccgcatcaaggagccgcgcaggtacagcgtggcgtgcgtcgagcgcggcacgacggcggccgtgtcctaccgcggcgtccagctggcgagcgggcccgcgccggagctctgcgggaggaacgagaacaccacggaggcgaggtccgtgatggcgtggggccacgcgaacgccgtcccagagttcgcgcgggagcgcctcgccgaggagctccgccgcggggacgcggcggtggacgtgaccctgacgacgccggcgaggtactgcaggtcgtgcatgcagacggtgatcgagtgcaagcatcgcgtgggcagcggggagttctcgccgcggtgcggcgtgacgacggatttcccgacctttcccgacagcccagacgtgccgtatccgctgtatcaggtattgcagccagggaggaggctcctcaggtggtag

SEQ ID NO: 79169 - DNA, 662 bp, Oryza sativa
  Clone ID: PAT_MRT4530_78905C.1
ggcccccgctccccacgcccccccccctccccccccctcctctcctcactcccctcctcctcctcgtccgcgacccaccacccaaagatctcgccctcctctcgaaaatctcccactctcctggccctccggggattcgcgcgcgcgctgcttcgctcgatttggtttctggctggattggatccggggaggaggaggtggggttcggtttcgtgccgccattttccccaatttgggtgctgcgcgcgtccgttttcttggctgttcttgggtgggtgaggtggggcggtcggatcttgccgggatgggcgagctttgggcgggatttgatcggctcggagcgtagggcgcggcgggcattggccatttttcctcttttgcccgatttttgatttttgtttctcttgggttcttgggagaggctcgcgcggctgcgtccctggaagaaatcttgtgcccatttcgtcgtgctttgtggtgtccctccaagatcgctagatccaattctctgggagcattttcgtttcttcccctcgattcgagagactgtcactatcaatcgctgtcatctcatctcccaactttttttcttaccctcgcggaaatctaatcctctttttttttttcaatttcgatttagttgctgttcgtcctccaccaag

SEQ ID NO: 79170 - DNA, 384 bp, Oryza sativa
  Clone ID: PAT_MRT4530_78906C.1
ctaattttcaagatttctattcggactcctcaacacatatctttactcgtgcaatgagtactcgatgacaagaagctacagttctcgactctatgttcagttgccttctaactaaccaaagagtcgggggctacacaaatacaagactctcaaaattcaacaagctgaagaaatcaattaatcagccaacgagtcaactccaggagtcgttatcttcatctttgcttcgaagcagatattctacttcagcaactccaattatttcactagcaattttggtttctggacgctgccataatctactccaaatttctcaaagtatcaagttcaagatttaatctacatgttcgagagtttggagttatcagccaatcagcttggttt

SEQ ID NO: 79171 - DNA, 221 bp, Oryza sativa
  unsure (1)..(221): unsure at all n locations
  Clone ID: PAT_MRT4530_78907C.1
catcagcaaagccaccaacgaataacaacaatggatgtcctcctcctgccgccgttgccggcgccggagacgacggcgccggcggggagggactggtgggagctgccggcggacgagctgctggtggtgaattgataagcggccaagtcatgcagcatcagtgttggcaacagttcaggctggggggggggcaatctcactatcanaccattattancgtt

SEQ ID NO: 79172 - DNA, 651 bp, Oryza sativa
  Clone ID: PAT_MRT4530_78908C.1
atggcgcaacttggagatctgaaaacaaggccagtggagggcgtcgtcttcatctcgacgtcacacatcattgatggggagctacgcgaaatggaaagtacagttgttgtcacctgggcgatgcgcgccccgccgtcggtcacggcaaaggacgtcgagtgtgctattgcctatgagttcggtctatgcatcagcgagctgacggtgtcgctgcacttcccggaggctttcctcctcaagtacaagcaccgccgccattgcgaggagacggtgaagcagggcttcgctaaaggccacgggatcgaggtccacttcatccaatgttgtagcttgaaaaatgccaccggctcggccctcatgtacagagtcaagctctgtctcgacggcgtgccgatgcacctgtgggcactggacattaacattcaagagagtaattggatacgggacattgacattctccgaatcacaacggtggaacatatccaacaatttgtgcatttatggtcaatgatcagaagaatgaaccagctgaatgatgaacaagacggcgtatggttgaacctaacagcaaacaggcaatacttggcaagatcggcctacagactccaattcctcggggcggcgagatccgctttcaatcaattgatctag

SEQ ID NO: 79173 - DNA, 1092 bp, Oryza sativa
  Clone ID: PAT_MRT4530_78909C.1
atgccaagtttcacatcttcaacagatttgtctattcgctttgcaaccacagaatcctcttcgtacgatagccacagcttctctgatgaacccgatatcggcacctggattcagagggcagacttgcagatgctccaactgtttgggaaagaattggtggcattgattgatcgaagcattcaagaaatcaaccgcgagcacggccaagctcgaggagcatctgaaatgcgtcgcctgctgaagctagctgtcgtgattaccatgctgccaacctcgcctgatctgttgcctgtcatactgcgtctgtacgcgacgctcgggactttcccgatcgaccagctaaacggcatcaccaaagagctcaggaagtgtgtaaggaagatcttgcgacgggtatgttcactatctcaaactcaaagtggcctgtaccatgtagcgcagagaggtggcgttcacaagatcactctgtacgtgatgaactacgtcaagtttttgtgggaacatgacagcgtgatcaacaatattattgcttatcaagctgatggggagagcgagaacggtgaggaatggacgcaggtggattcctttgtgcagcacttcatcggacgcctcgacgccttgctcgagaggatggcgaggcatgaatcgatgatggggctggaatgcatttccttgctgaacaatgcccatttcatattgaaccggcttcgcaagctagaggtgaagtctgcactgcagcaggattggattctcaggtacgagaaccaggtcaagcaccagatcacaagataccttgagctctcatggctacccgtcatgtcttgcttggatgctcatacaccgacgcaagcactgttcccttgctttcatctacccctgacgactaggttttacgagatgctggagagcacttgtgcagagcaacagaactggagaattgaggatccgaaacttcggaacaatgtgaggaaagctgtttcatcccatgtcgtccaatgttatcaggcacacttgcagaagaagggtatgaagctccataagtatatcccccaggaaattgagaataagctgatggagttattcgaagggtag

SEQ ID NO: 79174 - DNA, 207 bp, Oryza sativa
  Clone ID: PAT_MRT4530_7890C.1
accaagatattcttcaacttaaaggccttcccattcttgaaggcaaacccgaacccggggttgaggaacctaacggtgggcaagttggccgccgcaaagcccgggccgtggcacttcaagaggtggagccccttgtcaacgtggttgaagccgttccggccaactcgaaccaacgggtcccgggggctgaaccgcccggggccgggg

SEQ ID NO: 79175 - DNA, 292 bp, Oryza sativa
  Clone ID: PAT_MRT4530_78910C.1
gatgcctgcggtcactctgaggatcgccaaggtggtggggcagcccgtcactctccatggtgccgggagaacattcgcaggggtccatgcagcggcccaggtggcccattttgacgacccagtgggacagattcctccccaccgctggagtaaaattcttaatggtcatttgccccaagacataatagttagggggtcagcggcggtggatagccattggcacgcccgcttttctgctctgtggcgacggtatcgttacagcatctatacagatccccgggtaccgagctcg

SEQ ID NO: 79176 - DNA, 505 bp, Oryza sativa
  Clone ID: PAT_MRT4530_78911C.1
tctcctttctgaatctttgatatttttctatgtggaacatggatgccaagtttcacatcttcaacagatttgtctattcgctttgcaaccacagaatcctcttcgtacgatagccacagcttctctgatgaacccggtaatgtctcccactaaatacaacttctggaggacatccctgaagatgcacacgatccaacagatatcggcacctggattcagagggcagacttgcagatgctccaactgtttgggaaagaattggtggcattgattgatcgaagcattcaagaaatcaaccgcgagcacggccaagctcgaggagcatctgaaatgcgtcgcctgctgaagctagctgtcgtgattaccatgctgccaacctcgcctgatctgttgcctgtcatactgcgtctgtacgcgacgctcgggactttcccgatcgaccagctaaacggcatcaccaaagagctcatgaagtgtgtcaggaagatcttgcgacgggtatgtt

SEQ ID NO: 79177 - DNA, 568 bp, Oryza sativa
  unsure (1)..(568): unsure at all n locations
  Clone ID: PAT_MRT4530_78912C.1
gcttgtattcggatattgtttcttggttgatgcatgtgtagtggtcttgatgcctcaggagagtgttgccggtgatggatcgggagtcaacttgggagaagatgacgtccggacgatcatgatatcatgcgggatacttaggctaaagatcaatgcacgtggttggtgaagatttcatatggtatacgatggagatattgtgtgtgtataggatgcggaatcgaatttggaacgagtcccaatttggtacnataggagtttctaaagtttgttttctgtacaggaaggtttcctagggaattaggatttcctgtgcaagtttggttcatggctataggacttactgtacaagtttggttcatggctttaggctgcctacctcggatataaatagagagggagggtgtggcctcccggtatcgctttagagagagttgagttgagagaattgttagggtttcgattttagtcgagattttcatgaggattgatgttgttgcactctgtaaacacagagagaagtaataaagtcgcatctattttgagagatcaaaaaaaaaaaaaaaaa

SEQ ID NO: 79178 - DNA, 1565 bp, Oryza sativa
  Clone ID: PAT_MRT4530_78913C.1
ggaatcggcacgaggcacgcatcttctcccccccgcccttctcctccctcgcctcgctcacccatcacctcgctcgcagccgagctgatccggccgcgggacgggggaggtggaggcccagcgtggctacgccgcagccccccttccctcgctccctcgctgggagctaaaccctagccgctgccgccgacgccgcgagcgcgtttgctgggggtctacttgatcgcgattccagccaagagtaactaggatagttttcatgggctgcgaaaaccaatctctaggtctaatatcaacctggctgggctttcctgattggtcaggggagtgtgcacgactcaagtgtcctcagaatagtttgtggaaggcaactacttggagctgctttcatgggaaacattgttaacactgtaaacaagttctcgggcaacaatgctgatggtgttcccttccggaggtgctcttacttgccaaatagtacttgtgacgagaatggtagttcagtgaccagaaaatctgcttctgctacaaatggcagtattaatggacatggtaccttgtataaggatgtgggtaatgaggaaatgcacttggctacagacagtacttctaaaccagggtgtcgtggtgatactaatcactgtactaacaaagaaagagaaactcggaatgtaattgtccacaccgactcaagacaaaatggggatgctactaattctgacaatgctgttttaatttgcaatcagacggctggtcatatgtcctatggtttggatggggaaagtaatagaagttctggaagcttagcggctgtggtttctgaagttcttgttagtaaagcaccacttgaaaagagatgtcgtactaaccttcaggaaactggagatttggaaaatactccaaatgcacatgtgagcaaaaggtcgagactgcacagggtttctcctgcaaacagtctgtttgatcgtgaggcttgtgatgacttaattgatagtgctcataatttagattgtagtcgcactcctaatgcttcagtgcatgatgaaacggtaccaaatgaagataaaacaccttgtacttctttagatgtgagaggttgtgaaggtacccctagagcttccttgaagagacgagtgaacaagaaaagaactaaacgggaagcatcatatccaacgacaccactaaatggaaataccggagctttagttgtgattgaacctcccctgactcgtactaaggctaagggtaaggctttatctcttgctacacctgaatctctcaagagaagcactagatcaggtcgactgatagttccacggttggatccaggaagccagaagattatatatgacatgctttattcacaggacggttctatccttgccataaccaacttagagtcaccccggcttcaagttgagaaactatccttcgtgtacccatatttcgtgcaatgtcatgctgggtttaccttaagtgaaaaccgctactgtcggttcatcgaaaagcaggtgaaaacagctcctgttggtttatcgaaattgatgacttcccaaccagaataa

SEQ ID NO: 79179 - DNA, 162 bp, Oryza sativa
  Clone ID: PAT_MRT4530_78914C.1
atgcccaaagacgtcgccgttgctgtccaagaattgggccggctttcgcctagcacctgccaatgcccctcttgccgctacctcaccgactcccaggcaatgtcaacacgtggcctctacagcaacaatgcccctccgtcggctggactccaagcgacctaa

SEQ ID NO: 79180 - DNA, 585 bp, Oryza sativa
  Clone ID: PAT_MRT4530_78915C.1
atggtcaagaaagacaaaggggtggtcgatcacaatgacggcggtgaggcggagtcagagtcgggcatagtggtgcccccgcacaagtgcagcaacttctcattagctgtgatgttgacggcgcggcaggtgtgcccggtggtggagggccacgatgctgctggatctgcctccctcaccgagctcgggcctccagagttggtgcgcagaggtgacgacgatgaaccttcgaaattcccatggaatcaatccagcagcaaagggtgggggggcagcaaggacaacgtcaatctcccttcctcctttctcctccatctcctcgagccttatagagctcccgcttcgccgtcgagctcctcatcgcctgtagcggcaccactacaaaaaaatatatcctgcattcaaccctcagtgcgccccgagttgttcgccattgccgcgttgtcactaaccggtcgccaccgccgtcgccaccaccaacttccgaccgcagtgctgcacacctgcctcaccgtcggcctaactcgtacccggctcgccactcacgaggagaaagagggccgtggtggtggtggtgaccggtga

SEQ ID NO: 79181 - DNA, 1949 bp, Oryza sativa
  Clone ID: PAT_MRT4530_78916C.1
cgacagcaactgcatcacccaccttcctctcctctcctcccctccaactcccgatccccaaatctctcgcccccacccatggatcaccaccaccaccacctgccgccgccgccgccgcggtcgccgatggagaactccgcgtcctccaagccgcccaccccggcgtccaccccgtcgtcgcgcctcgccgccgcgccgtcctcccgcgtctcctccgcggcgccgcacccctccccgtcctcctccgcgcccacgccggcctcgcggacggtctacagcgaccgcttcatccccagccgcgccggatccaacctcgcgctcttcgacctcgccccgtcgccgtcccaccacgacgccgccgccgccgccgcctcccccggcgcgccgcccccctccggatctaccccggcctcgtcgccctactgcgcgctcctccgcgccgcgctcttcggccccaccacgcccgaccgggtggcgtcgtcggcgtccgcgtgctcctcctcctcctccgccggggcgtcgcccgtgggctcacccgccaccggcaacatattcaggttcaaggcggaggtgccccggaatgctaagcgcgcccttttctccgacggggacgacgagggcgtgctcttccccggggtgttcacgacgaggggcactggccccaggaagatccctaggtcaccttataaggtgctggatgctcccgcattgcaggatgacttctacctgaaccttgtggattggtcttcgcataatatccttgcagttggattggggaattgtgtctacttatggaatgcatgcagcagcaaggtcaccaagctatgtgatttgggggtggatgacaatgtctgttcagtgggttgggcacagcgtggcactcaccttgctgtagggacaaaccaaggcaaagttcaggtatgggatgccactcgttgtaagagaataagaaccatggaaagccatcggatgcgagtaggtgctcttgcatggaattcatcattgctttcgtcaggcagtcgtgacaagagcatccttcaccatgatatccgtgcccaggatgattatattagtagacttgctgggcataaatcggaggtctgtgggctcaagtggtcttatgataaccgtcagcttgcatctggtggtaatgacaacagactttatgtatggaatcaacactcggcgcacccggtactgaagtatactgagcatacagcagctgtcaaagctattgcgtggtcacctcatcttcatgggctgcttgcatctggtggaggaactgcagatagatgcatacgattttggaataccaccacgaatatgcacttaaattgcgtcgacacaggcagtcaggtctgtaatcttgtatggtcaaagaatgttaatgagcttgttagcactcatggatattctcaaaatcagataattgtttggcgatacccaacaatgtcaaagctcgccacattgacaggccatacatatagggtattatatttagccatctccccagatggacagactatagtaactggcgctggtgatgaaacgcttcggttttggaacgtgtttccatctcccaagtcccagagttctgacagcctaagtagcatcggggccacatcatttgttaggagctacatccgtcaacttggagctggagctcttatgtataccatgctagggcttaacaacattggccaactcatgatgctcattgcatccaagttggaatatgctaaggaagctggagaatttctggtgcaatgtcctattccagctggtgttgtttcttgcactgttgcacttctctgatagttctggtagactaggctcagaatcgagccagtcttgctactatgcgtctatgccaacgcggcaactttgtactgatctatgtcaactgttcatgcaagatttatgacgccaatgtaaaaaaaaaaaaaaaa

SEQ ID NO: 79182 - DNA, 192 bp, Oryza sativa
  unsure (1)..(192): unsure at all n locations
  Clone ID: PAT_MRT4530_78917C.1
ttctnataggatgcttacttcaatgtctgtgttgntgatgtnctagctccanttcaantcngtggcgatgntgtgctcgatngagtcctatacaactgtcacgggataaatgtcnttgcttgcnttatcgtgntcaccgntcacaataaacgccttctcgntgnttganacgtctggttttgnctggtntcn

SEQ ID NO: 79183 - DNA, 431 bp, Oryza sativa
  unsure (1)..(431): unsure at all n locations
  Clone ID: PAT_MRT4530_78918C.1
gattctacagtgttgtgggtaaataaaaaacctctatacaaaatgataaataatatgaactaaaataaaaggtatcaggagccgaaatataaaattaaagtaactcctagaaccactcgtactatggagaacttagattttaggcccttttccttaggcggggtggaatgtaagacactctatgccgtgtctctgctcgtctgaagctgtgcatccagtgtcagagctacgagctccacaactcaagcaccatagaatcacgtcttcaatgtgtcgcgaggggatggcaacgagcctcacagcgcacgcgtctctgtgttttttttttacctgcgcagttaaatcatgataccaataatgcgtctccctgtttgggaacgagaagctcagagcaaggacacttattttgttgacacgtatgngaatatcct

SEQ ID NO: 79184 - DNA, 1764 bp, Oryza sativa
  Clone ID: PAT_MRT4530_78919C.1
atggaggacaacaagctgatactggctctaggcctatcagtgctgttcgtcctcctctccaagctggtatcatctgccatgaaaccaaggctcaaccttcccccggggccatggacgctgccgctgatcggcagcctccaccacctcgtgatgaagagcccccagatccaccgctcgctgcgcgcgctgtcggagaagcacggccccatcatgcagctgtggatgggcgaggtccccgcggtgatcgtgtcgtcgccggcggtggcggaggaggtcctgaagcaccaggacctcaggttcgccgaccgccacctcaccgccaccatcgaggaggtctccttcggcggccgcgacgtcaccttcgcgccctacagcgagcggtggcgccacctccgcaagatctgcatgcaggagctgctcaccgccgcccgggtgaggtcgttccagggcgtccgagagcgcgaggtggcgcggctcgtgcgtgagctggccgccgacgcgggcgcgggcggcgacgctggcgtgaacctcaacgagaggatcagcaagctcgccaacgacatcgtgatggtgagctccgtcggcggccggtgcagccaccgcgacgagttcctggacgcgctcgaggtcgccaagaagcagatcacgtggctcagcgtcgccgacctgttcccgtcgtccaagctcgcgcggatggtggcggtggcgccacgcaagggcctcgccagccgcaagaggatggagctcgtcataagacggatcatccaagaacggaaggaccagctgatggacgacagcgccgccggcgccggcgaggctgcggcggggaaagactgcttcctcgacgtcctgcttcggctgcagaaggaaggtggcacgccggtcccagttaccgacgaaatcatagtcgtgcttctgtttgacatgtttacaggggctagcgagacatccccaacagtattgatttggatcttggctgaactcatgcggtgtccaagagtaatggcgaaggcacaagctgaggtacgacaagctgctgttgggaagactaggatcacagagaatgatattgttgggctgagctacctcaagatggtgatcaaggaggccttgcgactccattccccggctcccttgctgaaccctcgtaaatgtcgtgagacaacccaagtcatgggctatgatataccaaaaggcacatctgtgtttgtgaatatgtgggcgatatgtagggaccctaattactgggaggatcccgaagagtttaagccagagaggtttgaaaataattgtgtagattttaagggtaataactttgaattccttccatttggctccggacgtagaatttgtccgggtataaaccttgggctagccaacttggagctagcattagctagtcttctctaccattttgactggaagctacccaatggaatgttgcccaaggaccttgatatgcaggagacccccggaatagttgcagctaaactaactactctaaatatgtgccctgttactcagattgctccaagcagcgcagaagatgcatcataagagataatacgtcctccaagacagcacatatagtagtttaactacatagaaaatcaggtgttgtgaaaaaaaagggtttatatatatgtaccctatgtattctcaagttgctttgccaggcagactggcctatttgtgtagctattctcgttacatggtatatgtgatgtcatttgaaaagtgtaatgctattgttaccactcccat

SEQ ID NO: 79185 - DNA, 1584 bp, Oryza sativa
  Clone ID: PAT_MRT4530_7891C.1
atggctctctcggccgagacgggcaaagttgtccagtggcggcgctgggcgttcgccaacctgggctcggtgctgtccaacttcggctcgctgtggctcctcctggcgccgctgctcgccgcctacgcgccgcggcggctgttcaagacctacttcaacctcttcctccgccggcacgcccggcgcctcctcgccgtcgtcgacccctacgtcaccgtcgacgtctccgagccgggcggcgccagcgcgcactactcccggtacggccgcgtcaccgacagcggcgacagcacctacgaggaggtgaaggcgtacctgagcgacgggtgcgcgggggaggcgcgcgagctccgcgccgagggcgcgtccgagggcgacggcgtcgtgatcagcatgcgcgacgggcaggacgtcgccgacgagttccggggcgccgcgctgtggtggacgtcagtggtgcgggaggacgcgcaggggcagcagagggcgcacacccggcggtgccagcgcctcacgttccaccaccgcgaccgccgcctcgtcgtcgacgagtacctgccgcacgtccgccggaagggccgcgagatcctcttcagcaaccgccgccgacgcctctacaccaacaacaaatccggcgactccttccggtacgattacaaagcatggagctacatcgacttcgaccacccgacgacgttcgacacgttggccatggacacggccaggaagagggagatcatcgacgacctcgacgcgttccggagcgacagggacttctaccggcgcgccggcaagccgtggaagcggggctacctgctgcacggcccgccgggcaccggcaagtccaccatgatcgccgccatggccaactacctcgactacgacatctacgacgtcgagctcaccgtggtgaaggacaacaacgacctccgcaggctgctgatcgagacgaccagcaagtccatcatcgtcatcgaggacatcgactgctccctcgacctcaccggcgaccgcgccgccacgcagcggcgggggcgccagaacgacagggacgacggcagcaggcgccatgaccgtgacggcagcatggtgaccctgtccggcctgctcaacttcatcgacgggctctggtcggcgtgcggcggcgagcggatcgtcgtgttcacgacgaaccacgtcgacaagctcgacgcggcgctgatccggcggggcaggatggacatgcgcatcgagatgtcgtactgcggaatcgaggcgttcaagaccctcgccaagaactacctcgacgtcgacgaccaccggctgttcggccccgtcggcgagatcctcggcagggagagcatcacgccggccgacgtcgccgagtgcctcatgacggccaagcgcgccggctccgatgacgagtcctcccgcctcgagatcgtgatcgacgagctgaagcagacggcagaggcgaatgcgaaggcgaaggctgaggcagaggcgaaggcgaaggccgaggcagaggaagaagcgaaggcggcagaaatggatcgtgacaacactcgggaagaacaaaatggacgaaagtctcccaaaatttga

SEQ ID NO: 79186 - DNA, 548 bp, Oryza sativa
  unsure (1)..(548): unsure at all n locations
  Clone ID: PAT_MRT4530_78920C.1
aattgtaatacgactcactatagggcgaattggagctcaaaaagctcattcatgcaactcaagagcagtctgcattctgcaatctgcattgcacagaacagaaccaacaccatggatccagcatttttttctcatttcctacactggtaggtagagctccttatggtttatggactatacaacaacagcaatttctttttctgccatatgccacacgcagtttctcaccctcaccccctaaactctaaaatttcaactgaaatctccttctccttatggcgatttgcgcaacccgaaaaagggaccataattcttcagagattcaggtgaattatatcatgctctgagcttggcgaagaggttgccgaaggagaagaagctggtcctggacagggcgccggaagcaggctgccccggcgacttgccgttggcggcngcggctgangangangatgatggggangaaggcncttcttgacgttgacatgacgtttgcgactggacccgagcctccatgtctctttcacggtcgccgagcttccgaataa

SEQ ID NO: 79187 - DNA, 2225 bp, Oryza sativa
  Clone ID: PAT_MRT4530_78921C.1
attaaccaagtacagaagaatgaagttcgtgaaaacatgtgatgagcttggtaaaaccatgtgtgtcccaattttcaaacaaaagccccgtttaatgggaattttgttcgacgacgggcggaaccccccaaaagtccaaactttctccacagtctgcaccacgtgaagttgccgttccgtcgttgcccccaccaaccaccaccgcacatactccctccgtctcaaaaaaaaaaaaaaacctagtttccgtgtccatcgtttaaccgtcctgtcttatttgaaaaatttgtgaaaaaatttaaaaagataagtcacgcataaagtattaattatgttttatcatctaacagcaatgaaaatactaattataaaaaaatttcatataagacggatagtcaaacgttggccacaaaaacatagggtttgtcttttttttttttgatggagcgagtacagcaccagtacaacgcatgcatcatgcatgtcaaatgtgccgtcgccgagatggccacgactccatatcaatcaaagaaaaagaatcaatatgagaattgactccactaatgaatgtataattatttttgttagtgagcaaagaaagaatactacatcaatcaaggtgaacaaatgtgaagagccttcctgccagcttctcggcaccaagccgccaggtgttgtcgctttcgatttctttaagataatgcagcatgtaggttcttaacacgcccatgattcacaaattctatcgacgttgtacccgaaagtgcggtaactttgttcgtgcccatgctgaaaacgtttttgagcagggagcaaagctctgatgccaccaagctctgaagatcgtgaaagcatgccatgtatgcagctatgcttccttgccttctaatgttctcaagtaaagagtcagaactaagatgctatcccagcctcaggtggaaagcagctttccatactccatcaacaagatggggatgtcatccatccgtaactcggaagcatttttcaaatggaagaagcggtgaacttccttctcatagaaagacgtgaatgaattttccaaatagcggcgaagaatgaggcgttgataatccctcagtaaagggcctagctcctggagctgtattgagttggctggaatacttgtccaatgatcacgaagtgcctgaatgcatgcatgctggtcaccggtagggggtgattcaccaaaaagcatagatgataattcaattagttctttatcattgatctcgtcaacaaaacttgctgaagcttctaaagaaagtgaaatgcccaatcgttttgccaagtcaatcattggagattccccagcttgtgattcctgtgatgcggaatgttgagcaccaccagtcacattactaggtttgctgtctgaatcaacattaggaaccaagtctcgtttcgcaataggatcaccttcttcagtgacaccctttaaagcccataaatcacccattatgggcccagctccacccctgccaccaaatacaagcaacctcttctcgatcattgtggcagaatgtccgcatcttggaggtggcactgatccagtaactgataattctgtccactcaagtgacattgtgtccatgatgtatacatccgacaaccattttttgccatcccaaccgccatacataacaatttttctgtttcctatggctgaagcagcagcaaactctcgaggtgatggtagatcaccaaagccggttaactctgaccattgccatatgtcagtatcgagcatccaaaagtcacctaatctcttgccgcctgatcggccgccaaagatgaacatgttgcagtcaatgacgatagctacgtgaaaggcccttggactggggcctgcctgtccatccgagccactcccattgcattcaggtgtgtaccaaatcctattctcaacgtcgtagacggcgatgtcggagaggaagcgcttgtcggcgaatccgccgaagacgaccaccttggacttgccgatgctcaccgccgtgtgcccgctccgaggggcggggatttggcctccgaagtcggaggagtcggccctcgcccagtgcatctgcttcggctgcagctgcggcgtcattgctctctctcagactctcaatccacgcctccacggtagctcagctcttgatcgcctcgcctcgccacggcggtgaccagcagcacggcggcggaaggaaatttggggatacctcaac

SEQ ID NO: 79188 - DNA, 253 bp, Oryza sativa
  Clone ID: PAT_MRT4530_78922C.1
cccaaatgttcacgatgggggttcgtgtcatacccggtgcataaatatatatagccggagcttccatatctttaattggcatatgcctcacccaacaacatatagtcgcagcacataccactcttacatcaagccagggggagatcaggtgaaacaaaaacaaaagcacagctcggccggctaaatcaaaagacgatgaacacactgggaacacaccaaacacggtgggagacatcatctggtcagaggtgaa

SEQ ID NO: 79189 - DNA, 1499 bp, Oryza sativa
  Clone ID: PAT_MRT4530_78923C.1
atgcaggccacggggagcggttcttgggtcgcgcaggcgtccgtgctcggctgcggcgggggcggaggaggggtggtggtggtgcggcggccgtcgtgggatggcggtgcggcggtcggtggtagggcgaaggggttcggggtggtgcggtgctgcgtgcaggagaagaagccgcgggtgaggaagaccaaggaggagaggcgggagatggtcgagtccttcgtcaacactgattaccgggtttcaaatgatgggaaattcccttcagtcaatctcacgcataaggaagtcggagggtcatattacatagttcgtgaaatcgtgagagatatcatccaagagaacagggttctgggccctggcggcttgaatgccacggcactgagttttgaagactgccctgattctgtggagtcacctgttacgcatgaactgggccaagacagtgtcgagatattagatatgtctgatgacaaccaagctggcatggatactgtgacagacatgagcacccagcaactactggggtcatctaatctattggatgctggtattctgaatggtgcactccaaaatgggaacatagcagatatggcatgcttagagacaaacagcgagaaacaagatgaagttccatgtgcgcaatcagcagaaattgaccccagtagttctgaaaagctacctccttccttctctcatgcccctgattcagaaagtgaatttgagatggacagtcgggtggttgctcatgagacaaccagcagtctcactaatggagttatttcctcaggacccagtgctgttattacaaatgagtcgcttttacaagatcatgatgacacaactgataatgctgttgatgaagctgttctttgcttacagactaatggaagttctcaagcaaatgagaccattttgcaggaacatgagacacgacctgaaagtgtcatgagcaatgatgttcaaaccattgacagtcagtccaattctagagtggatactttcaactcaaatacaagtgaagacacaaccaagtctattgaagtgtctgaagtacagaggttgcatcctgatgaggaagaaaaggcagaaaatcttgtttctcatgcagaactggatacaaaggtgttctcacacgttgaaggcaagaatggcatggtggaggaagataacagtgaactcaagcaatctatatctatcataacaatggaagagcatgatagcaagcctgaacatggagacagcaccacaactgccatcagcaggcatgcactttgccttctaactttgcgttgcatgcttactgtttataattttcttcatgcgtcgcaaaacaccacagcatatttgtgcatgtgttactacttaatgatgttagcaacaggcaactgacttctcttatatatgaaagtatgaagcagtagtatccacggtgtcgcctctgtgtgaggatgtgccggcctcgcggccttccggcccggcggcctgggatgccctca

SEQ ID NO: 79190 - DNA, 2319 bp, Oryza sativa
  Clone ID: PAT_MRT4530_78924C.1
atgccgctcaagttttgggatgaagccttcctagcagcttgttacctcataaatcgtctccctagcaaagttatacagtttgatacaccccttgaacgattgtttaagcaagttccggattataaatcccttccaacttttggctgtgcttgttggccaaaccttcgcccctacaattcccataaactccagtttcggtctaagcaatgtgtgttccttggctttagtaatcttcacaaagggtttaaatgcttagatgtctctaccggtagggtgtatgtctctcgtgatgccacctttgacgagcaagtctttccctttgcaaatcttcatcctaatgccggtgcccgccttagagctgaaatctctttgcttccctctaaccttacaaatagtacttttgatcaagggggagaggaacaacatgatcaaaaaatgtttaatattcatgtatcaaatgctactgatgaagtttgtgtagatgcagcaacagatacaggatgtgatgatggaattactggagaaaatgggaatgaaaacgctggagaaaatactgatgctggtgcacttgatcgggtgcacatagcatcggagaatcgggcgggagaatccctcttggatcccgctcctgatgcgacatcaagccagggggagcaggcggtctcctcgggatcggcgagccagggggagcaggcgtcctcgccgcagcgttctcccgcgcgctcgtctgctgggaaccaatcaccagctgccgcgtcaaccccagtcgtcagcgcacgcatgcacgctatcaatgtgccgacgggatcaagtgcgccgacagctcatgcacagccatctgtgtcctctgaggtaatgagaccaaagaccaagttgcagagtgggattagaaaggagaaaatttatactgatgctttaggaaataaaaactggaaagaggcaatggacaatgaatatcatgctctcatgaaaaataaaacctggcacttagttttccctaagagaggattaaatgtgatagattgtaagtgggtgtacaaagttaaaagaaaggcagatggcagtcttgatagatataaggctagacttgtagcaaaaggattcaaacaaagatatggcatagactatgaagatacctttagtcctgtagtaaaagctgccactatcagaactatattgtctatagctgtctctagaggttggactctacgacagttagatgtgcaaaatgccttccttcatggagttctagaggaagaagtctacatgagacaaccaccaagatatgaacaaggtaactatgtgtgtaagttggataaggctttgtatggtttgaaacaggctcctagagcatggtactctaggctaagcacaaaattgcatgatctaggtttcaagtcatctaagtctgacacgtctttattcttctataacaaaggagatgttacaatgttcatgctggtatatgtagatgatattatagtagctagttcttcgagtactgctactgatgttttgcttaagaatcttaaccaagagtttgcattaaaagatctaggtgagttacattactttctaggcattgaagtaaggacagtggatgatggtatagttttgacacaagaaaagtatgctaaggatgtgttaaagagagtaaacatgagtgattgcaaagctgtaaacactcctttatctacttcagaaaagttaagtgctcatgaaggtacacctcttggaccagttgatagtacaaggtacagaagtcttgttggtgctttgcaatatctgactttgactaggccagatctatcttattcagtgaacaaagtatgtcagtatttgcatgctctaacaacagatcattgggctgctaccaagaggattctgagatatctcaagcatacaattaaacttggtttgaagatcagacccaatcttatgtcatggagtgcgcgaaagcaagccactgtatccagatctagtacagaagcagaatataaggctttggctaatgccacagctgaaattatgtggatacatgctttacttcatgagctaggagttcaggtgcctagagcagctaaggtatggtgtgataatattggtgcaaaatatttatcagctaatcatgtgtttcatgctcgcacaaaacacattgaagtagattatcattttgttcgagagcgtgttgcacggaagttgttgcaggttgagtatatatccaccaaggatcaagttgcagatgggtttaccaagacactaactgttaaactgctggatagattgagggggagtgttagagataactttcatacatga

SEQ ID NO: 79191 - DNA, 453 bp, Oryza sativa
  Clone ID: PAT_MRT4530_78925C.1
atgtcgagcacggcaagggcggcggcggcgcccgtccatctcgcctccgtggaacgtgctgactggcaatcggtattccgaccggggtcagatggggaagatgacggggtcagatggggaagaagacgagatgccgcggcggcggcggccggcgaccgctcgccattcaaccccgtcatggttttgaggtgcccgggcttcaacatcatgcactcggtgaacgcgtgggaggaggccggcggcgaggagctgtgctggtggcgccatccatctccatcaccgcgctcccggcgctcccttgatgacctccccgccaacgcgcatcctcacgtcgtccgtcgcgcgctcccgcacctccgcgacctcctccgctccctcgaccacttccccacgggtgtcgccgtcttcctctccgacctcctcagccacaggcgctcgccgttgccgcggtga

SEQ ID NO: 79192 - DNA, 513 bp, Oryza sativa
  Clone ID: PAT_MRT4530_78926C.1
atggccccgatgagcgccgcctccagccaacccgcctccgctgcaaccccgacgagcaccgccgaccgtcttggcgccgcctccagccaggctccgccgcggcccggacgggtgccgccatccgcctcggcgccgcctccagccgagctccgccacggccccaacaggtgccgccgtccgccttggcgccgcctccagccagcccgcctccgccacggccccgacaagcaccacctccagctgggctccgccgtggcctcgccactagcccttgtcgccgagccaccgaacgtctccagcgaatcggccgcttccatttttgttaagatatttggacggcagataatggggaggcaagccgtggatgacatggacaggggcgatgaccggcatccagtaggagaaggaggaaatggcaaagcgaggaggtggtgtcgttgtggcggtggcgggagggagatgagggaggtggcggtgctacaacagctaatcggtgaggtgcaggagctctag

SEQ ID NO: 79193 - DNA, 1670 bp, Oryza sativa
  Clone ID: PAT_MRT4530_78927C.1
atgaagatcgcaaagaggcaaacttggtgtagctataagttgattagatttctaatctgtctgctcgagtttaagtctttgactcatgtggatgctcagatttataactatttagtgacggacaatgataaggttaaaactttatctttgctagtcaacaaatcccaagaggtcaaacgagctagcaagccacgagtgtttcattcaatcttagacaatgtgttgttgatcaacattagttacgaaacattcgccaagccgcagcgcggatgcagtaaatccccatcaccaccaatacctgccgttggctcgttccatatgggtctatgcaagcacgttgccagctggacttcgaggagcaatagaagaggtggcgaaataaatagagcagtgcgtggtagtggacactacgacctcgacgacggttgttacagtggaagaagacaaaaaaaaagagaaagaaaagaaaggaacaatgagcgaaaaggagaaggaaaaaagctaaactgtagcaggaagggtgtgaatttattttttctgccatggttagctgtgaagggggccaaacgcaaaacatttgccaacgtggaggccataaatgtggggaaaaagtacaccgaaggtccctcaatttgttatcgggatataaaaacgtcctcgaaccgcaaaactagatatacggtgtcccttaactatacaaaaccggtcacccgaggtccttcggtagtttcgaccccggttttagtctacgtggcggctgagtcaacgtgggacccacggactctcagcaggccgacggtcgaccgacaggtgcggaggaggccggtggggcgagtcgggagaggaggtccggttgcctgcgatggccggtgctgtggcggctgctccgaccgagggtgcaaaggaagaaggcggtgcttttgcgagctcaccggcatggactctggcggcggtgaggtgagcgaggatacgtggggtggtgagggcagagccgcgggtggagaggcaatggaggcggcgggcggcggtcaacgtcgacatctggaggtggaggcgcgtcgtgccgctcctggatctcgaccaccatgccaagcacctcctcgcgagccatatggattgcatgctgcaagagtgatggtgtccagggacgtgcacctctccgcctcctccttcgtgcggctctacctcccgccgcccgctgccggagacaagagactccccgtggtggtctacttccatggcggggggttcgtgatcgggtcggctgcgtcgcccggatatcgccgctgcctcaacgaccttgccgccgcctgccctgccgtcaccgtctccgttgctaccgcctcaccctggagcacccgctcccggccgcgtacgaggactccaccgcagcactcgcctgggtgctctccgtcgccgacccgtggctcgctgcgcacggccccctctcccgtgtcttcctcgcgggcgacagcgccagcgacaacatctaccatcaccttgtcatgtgccacggcctgaccagccaacacctctcgtgccgcctaaagggcatcgtgatgatccacccgtggttctggggcaaggagcccatcggcggcaaggcggcgacatggggagcagaaggggctatgggagttcgtgtgccccgacgcggcggacggcgcgga

SEQ ID NO: 79194 - DNA, 1865 bp, Oryza sativa
  Clone ID: PAT_MRT4530_78928C.1
ggctggactgcaaagagtttaatcaaacaccattcatacaatcatactacagctaatcacagtttttgaatattctactacctaaagctggcaaaaaggcgggctacatcacaggattgcattggatcatactaatgccatggcaattgacgaagctcggctaaaatcaacttatgctgataacgggcttcggtttctcatcgtccttgctctctgtggtgacagccgggggcctgcgttggtgctgcacaacagctagctgatcagaaaagagcaattccttcaagcagtggagttgcttcctctctttctccatcagcagctccttctgctcgaaacgacgtattttatcctggatttccttcatctgaacacccactatgtcagataaagactgctctatagccttccgttccttttcaagttgtacttgtgcgttggcagacgcctctttgagcaaatcattggctgaaagaccatttgtgcaagaagattcttcttccttgctgatgttgatagaagaatcagtctcgctggcacttatatcaacctgggactgtgcagaaatagctgcttgccctgcagctacagcaacatctgaaccaacaatggctgacaagaacgcaacctgggccatgattggattgctagcatcagccagtggcgtgaggcgtagtcgttttgagatatgtgatccagattcttcattgagatcacaatcattcccaaactgaattttgtcctccttgggtcccatgaactgttccccaaaaggtaatcgggtgaatctagcaatgcagtccttttctgatcgactaccaacatgatgagaaacctttttccagtcttccccataatgcaggacggcctcaagaaggtgaagagtttctttatctgtccaatctgattttgcgtcctcagtaatttcaattcgcttgaagtctgccgaagtaagacctggccggtaattggcacggacatagcatctagcacagaggcttatatctgccttctcacaagagaaataagcaagcccgcacacggtgcggcacccggtgcaaagcttactgggcattgttgccccaatcggcaaagaggactgcgataacgctgcctcctctttcttatctctcccctgcttcgctcccgacggcgaagctccatagtttatcagcccccattcctcaaggaagtcgaacacgcgacgcacggagccgacatctccgacgagcccacgcctggcctcggtgagcgtcagccgccgccccggccgcgcccggaacctcctcacgagggtgtcacggtagtacttgtaagcctccgggcccctggacccggacgccgccgccgcctccccttcgaagaactccggcatgaggcggcgctcggtctcgtggatggagtcgtaggagaaccacgctgaatagctcgggatggtgatggtgcagggcgactcctcggccgcggcggcggcggcggcggcggcaggggcgggggcggcggcggaggcggctgaggaagccgaggtggatggcggcggaggggcctccgtcttgacggtgcctgccgtcgaggggggctgggagaacggcgcccccgaggacggcggctgcggcggagcgagaggcatggagttcgccgtcgccgtagtcgccgccgccgccgcctcggccgccggcgctggcatcgacggcgtggccatgagagctcgagacagccgcgtctcgtgttcgtcttgggcttcacccgcagtggagcctatcaagccgcggcccaccaagaggattgggcccaaccgaccaacgcggcagagagcgggagggcggtttcgtggtctcggtttagtaccacctcgccgattctga

SEQ ID NO: 79195 - DNA, 473 bp, Oryza sativa
  Clone ID: PAT_MRT4530_78929C.1
aaaaaaaaaaaaaaaaaaccggccctaattttatttttttttattaccattatcaaaaaaataaaaaagcagctttaaaaaatgattttttttgtttgtattaacaaaaattgttaattaattaagcaaaggcctaattaattaattaatcactaatgaaataattaatttaatccatgccaccaccaaaaattaggcaggcaaaaaaacccgccttttttttaaattttaaccggccgtaatccgtaagcgcgtttgcaattccggaaattgttgggggtttaaaccccggtgccggttgtttgaaaataattccggaaaaccggttgtttttttttttaaaaaacccgggaaaaaaaaattttaaggggttgaaccggtatttaattggaacggggggaaatttccggaaaaacggtttaaaaaatttccccgggggtttttttcggaaattaattcggcccccggggggg

SEQ ID NO: 79196 - DNA, 338 bp, Oryza sativa
  Clone ID: PAT_MRT4530_7892C.1
gctgcgcctgctgcggcgccccgccataactcccgggacctacgcatgctaccatcagccactccaagacgctagctgcattgtggggagatagagaggcagccatggctctttcaccactaacaaaggcggtgacgggggcgcctgcttgcaatgcaccctggatgctggcggcgttaccgtcagcagccgttcctgacgatctggctgacagaagagaaactgctgaacgcactgctgaagatcgtgttccacgagatcagcgccgacgacgcctacgcctccatcgacctgcacatcctggagcagcctttcgacaacatgtgcgacgtcagcta

SEQ ID NO: 79197 - DNA, 465 bp, Oryza sativa
  Clone ID: PAT_MRT4530_78930C.1
gccaactcaagcaaggggggcaggacggagggggcggacggcacggcggccaggacagcgtcgccccatccaccgttgcactgtagagtcgccgacgccccccgccaacgacagcacggctccatgtcgggcgacgccttgcgcgccgcttgcgtgcaccggtgcacgcatcgacctcgcgagccgtctccgccgccatccatgccgcctccaatcgcgctgcgccacagcgccggccgcttcggccagatccggcttggaccaggccagatacggcgacggcagctgtggatccgtcgccgttttgctcagagagctcgccgccaccactccccgccgccggtgttcaccgcctcccccgcgccaagaggagatgctaccgcaggagaaggccccgccgccaccctcctagctcaccggcaggctttccggcggcggctggtgggggaaggggggcggcactag

SEQ ID NO: 79198 - DNA, 188 bp, Oryza sativa
  Clone ID: PAT_MRT4530_78931C.1
aacgtgtgggggggtccctttccaccgtatagtctttttttttctgccaagacccaccaaacgctttgtttttccacatgggaacggaaaaaggggtctctccacccggtctcccagaacaacggaacggatccctgtccttctagggggaaaccccggaggtggttcctagttcctgcccgcgggcg

SEQ ID NO: 79199 - DNA, 381 bp, Oryza sativa
  Clone ID: PAT_MRT4530_78932C.1
atgtcggtttggaaaccgaccttgggcgtcatcactccatgctcggtgcgtgtgggaggaggcgacggagggtctgcggcgagggctagggatgacgccggccgacggcgcatcgtggactcgggaagaaggacgaggccagccgccaccgcgcgcgtcaagctgctggggaggaaggtcgaggccggccgtcgcgtcgggctgcggaggaggaggaacaccggccgccgccgcgtcgagctggatgagggaggaggtcgtggccgccgcatcgggtggctgggagcccaggaggagaggaggtcgaggcctgcggccctgtgcccgcgagcgcgatttggtatgcgggagcaggagacggacgccgaactgccgcagtga

SEQ ID NO: 79200 - DNA, 246 bp, Oryza sativa
  Clone ID: PAT_MRT4530_78933C.1
atgggccggtggccgagcagatggctggggtggcgcagtctgcctctagctaacctcttccatctactcatggaccaggaccaggactcactccgcccagctgacaaagctgtctacaagactacaagttcctcttgctgtgttgaatatggagtacttgaattacgcatgatgaccggccggaacccacaatttctttctgcggtgagtgttgctgcacaatggtatagctactcctacgcttga

SEQ ID NO: 79201 - DNA, 379 bp, Oryza sativa
  Clone ID: PAT_MRT4530_78934C.1
ctacgaagtcccactgcctgctgcgcctgcgaccgccgcagccttcttcgtttgaatgagtgacaatagttaaaatcgagctcgccgctcatgagatgcagcgaggtactgtgctcgctcgccgtactgatcctacacagactatgagatacggatcacatgtgaaaagatcgccaccctgatgaaggcgggcaacatcaagggagaggcctactgtaccggcactattcgccaagatcctggagaacctaactggacaggtatctatcctaatgcagcagatatggagatggatgctgtacatgtgatgaagatgctgcccaccaccaagaaggcatactctcgtgctattcgcaggtgctacactgaaaaggatgca

SEQ ID NO: 79202 - DNA, 285 bp, Oryza sativa
  Clone ID: PAT_MRT4530_78935C.1
atggggaaagatgttgccccgttgcatttcacggtgatggtgatggggaaaattctccaccgcggaggcggggctcgcaggctgggtacgctcagcccagatcatatcgcggcctctactggctttagcccttggccaccggacaccggccggcatcccggcgcggcgggcgcgtgcgagtgtgcgacgcatctcgtcgcggtagcggcaagctgcacggcggaaggcccggcgtacgttctgggggagggagtttccgtacctgcgcccgcagcgtacgcctga

SEQ ID NO: 79203 - DNA, 461 bp, Oryza sativa
  Clone ID: PAT_MRT4530_78936C.1
gtacgagacctaccatttcggtgttttactcgatagggtccataaaacttgggcccaagcatggtgggtgaaggtgttctggtgttgcgaccccaatcgcaccacgtgggtgggagtttgagcctcacccaatcacctcggggaatactacacatacctccgataattattatggtagctcttcattttcttctgagggggagcaactaatatgcaatcagaccttatttgcaagcttgcaagcgagtcttttgggacattagatgatgatctaactgtctacatgacccgtggtttgttacggggttctctataaatctaccctagctggtggtggaagggtttaagtgttaaatgggatgcatggcaggatcatactctaccgtaccaggaacctctcttttccatgaaccctgactgaatatgatttgttgccaggtgaggctgtcccatccttttcc

SEQ ID NO: 79204 - DNA, 1165 bp, Oryza sativa
  Clone ID: PAT_MRT4530_78937C.1
ctataaaaaccaagccaagttgatcaagccgagctttatcctctccctcctaccacttctccttttcttcgtccccctcccgtctgccactcgccaaatctccccattcctcctctgccgcaacgccacctcccctgccatcgtgctacacctcttccgctcttcctccacctcacctctgccgcctccccgttgtggccgcactccacctccttcctctcctgcatctgtcttcctcacacgtcgccctcttcctgagcctcctccaccatgagcaggagcaacatcgtccaggctcatcgatggagctcggcatggagatggagaagaaggacgcagtcacctcggccatgccggtgcaggtggcgcaggccgggcagcatttgccatcgttcctagcatcatccaggcttaccgattgcctctcttccaccgtcacttcacctctcttccaccactgcctcaccttcacggcctctccgctcacttccgccacctccacacaaccatgagcaggagcaacgccgacaagcttcggtagtgatgagctcaagggcgaccaaagccgccacgagctcaggggagttgacaatgagcaggagcagcgacgatgatgacgaaggtcactgccattggtctccctctccccttctccatggtggccaatggccgatagttcgtcgtcctccatgacgaaccagctacgagagacacaggtggagacgccgcgctcgcagccgccggggaggcggcggaggatctcgaagaggcactccactgctgttgcactcaaatcatcatcatcatcaacaacaacaacaacaacaacaacaacaacaacaacaacaaggagaagatttaagtaaaaaaaaacaacaagaagaagaaacctcaccgaggtggccggtgggtgggcatggaggaggcggtacctggcgttcagatctgcgcatccccggcctcgtggaggtcggatctggcggctagcgcggtcggtggcggagctaagggaggcgttggtggcattggtggccgggaggcggggggaggcgcttacctctgacgggccgtccggctccctggccgatagcgccgcaccgcagttatccacctcctccggccggccgccggccagtcgaccagtcgagtcggaggcggagtgcat

SEQ ID NO: 79205 - DNA, 279 bp, Oryza sativa
  Clone ID: PAT_MRT4530_78938C.1
cccgccgccgccgcgtttcttccatggccacgcaacggcctctcgccgtcctcctcctcctcctgctcgccgcctgcgcgctgccgctcgctcgatcccgcacggcgccaagaacggacgtgggtggaggaggtggcgcggcggcggacgacacgatacacgagctcctgcggacgcacgggctgacaggggggctgctgccgcgaggggtggagacgtacagcctccacaaggccaacgggctgctgaaggcgcggatgacggcaccgagctacacca

SEQ ID NO: 79206 - DNA, 1417 bp, Oryza sativa
  unsure (1)..(1417): unsure at all n locations
  Clone ID: PAT_MRT4530_78939C.1
ccggccaaaaaaaaaaaaaaaagcgaaaaaaaaaaaaaaaaaaaaaaaaaaaaaaaaaaaaaaaaaaaaaaaaaaaagcgcccgcctcgctccagtcgcttctccaccggagctgctttagggcgacggcgagatcgattcgacgggaagccagccatgggaggggggtccatccgcgcggcggcgaaggccgccatgatcgggggctaccgctccgcctcggccgtgcgccgcgccgtcctcccggcctccccggcgccccagacagccccatcggcggcgggcgagggccgcaaggcggcgtccacctacgcggcgatcgacgactgggtcatcccggaccgcgaggtgttcggccccgtgcccacccacgaggaggccatggccgccaccctcgacctcaaggagtccttccagtttgctaagtctgctcaattggagcctctcccctctggtgaccttgatgtccctacaaaggtgggtcaggagggtcttgttcactcagaaacacctcaggatcttgttcattcagaaacacagggtcttgttgatttaggagcatcccaggatcttgttcattcggaaacatctcagggtcttgttcattcggaatcatctcagggtcttattcattcaaaaacttctgagcatgaggataaccatgaaatttcacttgtttcctctggagcccctggacgcgttgtgcaagcgttcacaatgctacaggatagccctgaagcacaggaagttgttgcctcacttgcttctgatcagaatgtttggaacgctgtaatgaggaatgaaaaggttatgaagttttacaagacctatgcgacgaagcttaacgaagatgaggtcgaaggcagtgagtcagactccgtgcagaacagcagtgagttgggcagcgctggagaagcgttcatgtgctacgtggagaaaatgaaggcactggtgtctgagatgatgacgaacctttcaagcattatgcaagatctagttgcaacctcggacgagggccagagcaaggggaagctgaagactatgatcctggactccaagaaagattttgcaaatgctccatcagccttcgtcctcttggctattgcttcgatcatggtagttttacttaagcgcgcgtaggccatttgcccagtcataatgataaaataataaggtaggattctttggtgttcaggacattcgggttcttttttnttggtcagatttttttttcttctcagttcaacaagtagttgactgtacgaatgaatcctcgtaatcgtgttcacctgatacattgagagacatcgcgagagcttgaagtctttggtattgtaaagttttcactctccttataatataaagccagcttttgctggatctttcaggaaaaaaaaaaaaaaaaaaaaaaaaaaaa

SEQ ID NO: 79207 - DNA, 4248 bp, Oryza sativa
  Clone ID: PAT_MRT4530_7893C.1
atggcgacgcaaccgccctcctcctccgccgccgccgacctctacgagacggcctcgcagcccgacccgcccgcctcggccgccggcgacgcctacaccttcctcgagttcaacacccagggcgacgacttcgactagccggacttcccggagctctagcagccggcccgatccgcgccccccacgtcggcccctgcggtgcctggctccgcgggctcgacgtcgccgtcgtcctcggcgtggccgcccctgcctctcccgccgccggacgcctctcaggatcccgatctcgcgccgcgttatgccccctatgcccctgccgcctcggcctcggtgcagcgaccgatgtcagctgtgccgagtgcgcccgaagctgggaacagcagctttggatcctgtggagacgagctgtggcccgattggcggccaccttccacccctgaagagttctcaggaggctatgggaagcaagacgtcaccttctaaccttgctggtacggagtggcccataacaccgcgtgctggtagaggtgtaatgtgccgtactgctgacatggctccccacactgtctcacgtgtatggcagacaaaatggagcttatagtggtacgatgtcaatacttcaggattggctggcgccgtgaagtctaaggtgcagccgctatcgcctgcatccatggtaccacgaaaacgcttgcagattggctttgtataggggtatagatggggggtggccagccctttcagatctctcgcacatggccattatatttatctgaacattatgtatgctttctttatagtttttgatatttaggttcacagaaatgatgtttggtgatcttgcctgaaagaacgaatgctagagcttgtagtcattgatggagatcgcgtgattttcttttttggatcagctgtcattttatggagctggctggatgctggtaaacccgtgatgggttttctgcgtggttgattccacaaccgtgagagcaaatgttctgtcacatgttttgataatactatatttggcctgtgttctgctgcaattataaagcatgagtctgattatgacaagatgatgaaagagtcacagagcaaggacagcttgaccgtgcggtgggatattggactgaacaagatccttggagtcaagcctttcaggctacaggtacaatataggatgcacccttgtctttcagacttcccgtccaactgcttctatgaaggcacactgcaaaatggagtaactgtaaacgagagacagacacctgggattgattttccttggcctgttccaaatcggcctatgttcttctacgtgcagatgggacaagaagagatcagtgccagtgggacatcatacctcaatagaactgaagctgcaaatgttgaaaagattgtaactacatttttaaggagtggtgttgtaccaagccagattggagttatcacaccttatgaaggacaaagggcatatattgtgaattatatgtcaaggaatggctctcttcgccaacaactatacaaagaaattgaggtagcaagtgttgattccttccagggaagagaaaaagattacataatcctgtcttgtgttagaagcaatgagcaccagggtattgggtttcttaatgatccacgcaggttaaatgtcgcattaactcgtgctcggtacggtatagttattcttgggaaccctaaagttctaagcaagcagccactctggaatagtttattgacacattataaggagcatgagtgtttggtagaaggacctttgaacaacttaaagcagagtatggtgcaatttcaaaagccaaaaaagatctacaatgatcgacgactcttcctgggtggcggtcaaggtgttatgcaaggagctagttttggtgctggaggcacaaacccagtggcagataagataagtggtagggggaaagggcatttcctttggtccatttgggcccttgtatgggggctggagaccctcgtttagcaaacttccgattccgtcaagttcttattgatgaatctacacaggcaacagagcctgaatgtctcattccattggtgcttggtgtaaagcaggttgttcttgttggagatcattgtcaactgggcccagtcatcatgtgcaaaaaggcagctcgtgcaggattagcacaatcgctctttgaacggcttgttatccttggagtcaagcctttcaggctacaggtacaatataggatgcacccttgtctttcagacttcccgtccaactgcttctatgaaggcacactgcaaaatggagtaactgtaaacgagagacagacacctgggattgatttttccttggcctgttccaaatcggcctatgttcttctacgtgcagatgggacaagaagagatcagtgccagtgggacatcatacctcaatagaactgaagctgcaaatgttgaaaagattgtaactacatttttaaggagtggtgttgtaccaagccagattggagttatcacaccttatgaaggacaaagggcatatattgtgaattatatgtcaaggaatggctctcttcgccaacaactatacaaagaaattgaggtagcaagtgttgattccttccagggaagagaaaaagattacataatcctgtcttgtgttagaagcaatgagcaccagggtattgggtttcttaatgatccacgcaggttaaatgtcgcattaactcgtgctcggtacggtatagttattcttgggaaccctaaagttctaagcaagcagccactctggaatagtttattgacacattataaggagcatgagtgtttggtagaaggacctttgaacaacttaaagcagagtatggtgcaatttcaaaagccaaaaaagatctacaatgatcgacgactcttcctgggtggcggtcaaggtgttatgcaaggagctagttttggtgctgcaggcacaaacccagtggcagataagagaagtgggcattcctttgttccatttggcccaccaaatggggctcataaacctggtgtgcacccatctggctatcctttacctcgtatgcctttccctccatttgctggggctcattctcaaccctatgctattccaacccggggatcattgcacggaccgattggagctgttccacctgtgcctcaacctggaaacagaaactttggacctcgtggaaatactggtggccctattggtgggcaccttgctcaccaacagagttctcagcaagctatgggaggcatggggtcagcttttaactttcctggcctggagaatccgagcagtcagccttctggtggaggtccaatgtcccagactggattgatgacacagatgcctgtccaaggtctcagtcaaacattccgcgatgggttttccattggtgggatgtctcaggacttctttggagatgatttcaagagccaaggatctcatgtggcatacaacattgctgatttttccactcaggcttctcaaggaggctatggtgttgactactctcaaggaccccaatctggatatcctgggaattatttgaaccaaaatgcacacccagggtattcccatatgggtgcagcaaatgacattgtctctcaggatcacatggcccatggttcacatggaatgtttacacaagcgggatacaatgactcttcacaagatgagtcatcacagatgcattttggaatggctggtcctggtcttcagtctcagaaacgatggtgcatagacatcagttgcaagtattgggcacaagcatatgttggagcactacatggatatttattgaggcaagctttgtacaagatggctatggctgtcgaccattgaccattgctgaggagcacaaggattgcaacacatctctttcttgtcatggtagttcacagtggggcttgacaacaagaggtggcaacttgtgcactgagagatgctgacgacgctacccacatcgcttcacctgtatagaagacaaaatggagcttatagtggtacgatgtcaatacttcaggattggctggcgccgtgaagtctaaggtgcagccgctatcgcctgcctccatggtaccacgaaaacgcttgcagattggctttgtataggggtatagatggggggtggccagccctttcagaactctcgcacatggccattatatttatctgaacattatgtatgctttctttatagtttttgatatttaggttcacagaaatgatgtttggtgatc

SEQ ID NO: 79208 - DNA, 1224 bp, Oryza sativa
  Clone ID: PAT_MRT4530_78940C.1
atgggcgctgctgctgctgctggcttcttcttcgtcctgctgttcctctctgttcaaggtggtgctgttggctacacgagaagcgattttcctcgggatttcgtctttggagccgccacctcggcatatcagtatgacggcgctgctgcagaggatggcaggagccctactatctgggacacgttcgcacatgaagggaaaacgaaagacaaaggtacaggcgatgttgctgcagatgggtaccacaagtacaagggtgatgtcaagctcatggctgaaactggcctagaggcttacaagttttccatctcctggtcaaggcttatcccaaatgggaggggagctgtcaaccaagaagggctaaagtactacaataatgttattgatgagctagcaaaacgaggaattcaaccccatatcatgctttgccatctagatctcccacaagctctggaagacgagtacgatggatggctaagccctagaattgtggagtttggggacagggttttgcattggactactttggctgaacctaatatcgctgcacttggaggttacgacacaggagtattatctccaggacattgctctgatccttttggattgaccgaatgtacagtggggaactccaccgtggaaccatatataacagctcataatatgatactaacacatgcggctgttgttagactgtacagagaaaaatatcaagctctacaaaaggggattgttggtataaacatgttttccttatggagttatccattaacaaactccattgcggatttgcaagcagctcaaagatacaaggatttctcgtacggatggatactgcacccattggtatttggagattacccacaagtaatgaagaaaactatcgattctcgtcttccatccttcagccaagtccaaactgaactaatcaagggtgctatagatttcattggaataaaccactactattcagcctacgtgaactatcgccctttggtagaaggtgttcgagactacgttgctgatcgatcaatgggtagttttaccatcattgagaagatactttataaaacggatccaccaacggagaagtatgaacctacggagtatccaaatgatccaaaaggattgcaactagcgttggagtacctgagagagtcctatggggatttcccattttacatcgaggagaatgtgttcgacatgttggtgaagatgaagtag

SEQ ID NO: 79209 - DNA, 258 bp, Oryza sativa
  Clone ID: PAT_MRT4530_78941C.1
ggcctgtctctgatatttttggttcacatacgtcgggaatattaattgggccgtttatattatgtgctgcccattgtgtgcaatgcacgaaagggaacttgtgttgtctaatgtgtgctgcctgatgtgccactgccatgctgagatctgaagaaagaactcaatggcaatgaaattctactagtatagaaaaaagaggaatagatacaaggtctcaaaccttgttatagaatttttccttcaaaaaaaaaaaaaaaa

SEQ ID NO: 79210 - DNA, 273 bp, Oryza sativa
  Clone ID: PAT_MRT4530_78942C.1
atggagatgatggtgcatgcttgcatgatgagctctttagttgtaataattgctggatacaaggcaatatggcaaacagatgttattccatctcatatcatatggatccggcctaccttctatcttagtcgatatgcaggccatatgggtatctggtatccaactatctatactctgcaagccaagacacaacaatcatatgccaccgcaagtcgatatgtcgttgagtcagagatcaagcctcaagatccatcgagccggtgcacccactga

SEQ ID NO: 79211 - DNA, 150 bp, Oryza sativa
  Clone ID: PAT_MRT4530_78943C.1
atggcggcggcctcaacggagatgggatcaatggcgacgacaggatcaacggcgctcgcccgctggtcctgcacaggtgacagccacgcccatcctgctcctcctcgtcagctcgtcgcggggacgcagcccaccggcgtggcggcgtga

SEQ ID NO: 79212 - DNA, 342 bp, Oryza sativa
  Clone ID: PAT_MRT4530_78944C.1
atgacgggttgctcaaaggggagccatgagctaaagaggtgctgcaaggcgacgccgtcggaggagaaggaggctaagaggatgaaggagactcagacgatggtgccggaggaacaggtggagcatctgctatcgttcgtgaccatggagccgattcctcttccggtggtctctgcagactctgacggcaatcccaactcgttgcgcaacaggatggaccgactcctcatcagggccattaaccgtgtcaacaccaattctcaagtcatccgccagatgcaggccaacgcccgcgaggacctccggacaaagggctacgtccacgccttggtcgccgattaa

SEQ ID NO: 79213 - DNA, 552 bp, Oryza sativa
  Clone ID: PAT_MRT4530_78945C.1
atggcgctgaacctgtacgcggagtacggcgacatggcggaggcgcggggcctcctccgcggcggcctgatgcagcgcgacgccgactacggcagcatctaccggggctggatcgccatggaggccgaccacgccggcaacgtcgacttcgccagggcgctcttcgccgactggcgcgcgctgtgcggggacgacgacggcggcttctggtgccgctacatcgcgttcgaggcgcgccacggcggcgcccgccgcgcgcgcgacgtggccgaggcggccgtgccggcgtgccccggcgagcccgcggtgcacgccaagtgcgccaggctggagctcctgctcggccacgagggccgcgcgttcgccgtgctcgcccgcgccctcgccgccttcggctcggacgccgccgcgcaggagtggctggtggaccaggtgcgcgtctaccgcgacgcgctgcggcggcgcaccctcgccggccgcctccgctcctgctgccgtgccgtcatgccgtctcgtcgcccgcgtggatacgagaggctccagaccgtatga

SEQ ID NO: 79214 - DNA, 345 bp, Oryza sativa
  Clone ID: PAT_MRT4530_78946C.1
atgttctcaaattatggtgaaggcagtggtggcggcggccctaggggtgcaacccaggatgacggcgacgaggagcaggcagaggtcgacaccggtgacggcaacgggggcggcagccctaggggcaacggtggcccggaacagcgacaacctaagcactggtgcaagaccctcggcaaggaacaggtggaggtcgaccccatcggcagcactaggtatggcagtgggctgagttcggaaggcagaagaacatctctggtgacaacggcaacgtactatgggcgtggaggcctaggatccggcaaagtggaggtcgatcccatcggctcgtgtccggtgaactag

SEQ ID NO: 79215 - DNA, 3315 bp, Oryza sativa
  Clone ID: PAT_MRT4530_78947C.1
atggagtatagatatgatattatggggagacctcgaggccgcggcggaggaggaggaggagggagggggaggttcggcggcggcggggggtcccgcttctccgccgcccgcgatgacccgccgccgcggcgctcctcctccgggtggggggtggcaccgccgtcgcggcacctgtgggtgggcagcctctccccgggcgtcgccgcggccgacctctcggagctcttcctccggtgcggcgacgtcgagggcatctcccgtgaccccggccggagcttcgcgttcgtgacgttcgcgcgggaggaggacgccgtggcggcggtgcgggagctgcaggggatccacctccgcggggcgcccattaggatcgagttttccaagggggataaaggttcaagtagctctatggatgacagatactcacaacatgctgatcaaagacgttttactgaacgaggaaggaatcagcaatcaagtcctgaaaaatcaactgataaatccaaaagaagcaggccagcagaacctagtgaagtattatggataggttttcctgttggtctgaaggtagatgaggcaactctctgggaagccttttcaccttttggtgaggttgtcaagataactacattcccagggcgtacttatgcatttgtccagtacactactattgcagcggcatgcagggcgaaggaaacactgcagggaaatattttcaataaccctcgagttagcatttgcttttctcggagtgacagtgtttcagcagaatttggaaaaggttccttagatgccccatattccccccatttaaactctagtgttagacctatattcagggagcaagattttgaagattttcctagggctaggccttttgatagtcctccaagagatatgtacatgccatctccacattatggccctaagagactttctagagatcatgatgatgtgggtttcagcagggataattatttgcgatatggacctggagtagagcctgatcctagatctaattttgaaccttttaggatacaagggctcggtccagaaagaaggatgtctgaggacccatatgaacagcataggcgtagccctgctggtgatgcaccatggcacaacattccattcgagcgatctcagggagccttaccattagaggattctcggtatgctagggaagatccatacccattttcaaagaagttgaggactggtgaagcacatgactctgaacttcctgaataccctttctctgaatttgatcgagggaaggttggctctgcctacccaaggaggcccttctatggtgtgccagatgatgacatacaccccagaggctatcaacttgctcctatgcatggtagaaatcatgttgatcctttaaggaatccaactccacttgtagataggcatataccagggcatgcacaggacagcttttctaggcatgtagaagtggaaagatcaactcctgaataccatgaaccccttctcaaggaagaatggaaatgggatggtacaatagcaaagggaggcacaccaatttgccgagcgcgatgcttccctgttgggaaggttcttaacttcatgctgcccgaatttttggattgcactgctaggacaagcctggagatgctctctaagcactattaccaagctgccagcagctgggtggtgttttttgttccagaaaatgatgctgacatggcagcctataatgaattcatgaattaccttggtgataagcagcgtgcagcagtttgtaaacttggagaaaggagcagcttatttcttgttccaccctcagacttctctgaacaagtactgagggttccaggtaaagtcagcatatctggagtcattctgaagtttgagcagtcagatccagaagtttcctcgccaactcgcaaaccagaaacatttgtgagtcatttgaaccatgatgttcgtgctcatgaggatctagatgcattgagaagaatcaacccaccagatatcaggccacttcctcagggttcagattatctcgggttgtcgcctggaagctataatccagcaagtgcacatttggttccgccttacaagtttggaaatgctccttcatatctagaatctgaattagctcatcaaaagcatccacctgactcccacagggagatagcacatgacaagcagcagcaacacccagatgtattgccctcaagatggtcagataacatttacaatccaagtccaggttctggaaatttgaattatttggctgagagtgcgatcccacatacatcaactgataggacaccagaggcatactcatttgctcctcaaggagtaccaaaagtgagtacatcagggtatgcaccagttgcagatgaggcatcaaacatgtcctaccctcccatgcaacctgcatcacagcaggtagttagacctcaacaacctccatctctcccattatcgcttccaccagagcaacttgcacaattggccactcttcttgcacaacaaaaccaaccaggaaaagagcctgtggacagcttaaacaaagaatcaggattcatacggaatccacatggacattcttcaatgatgccacacagctcaggttctatccctgtccaaaactcattgccacctgctccgccatctgcatcacagttacaggttcatgcgccaccagttcaaggttcagtgccaccaaatccatccattatgcatacaccgaatgctcctatgccttctcacaacactttgcctttaccccctatgcatccttcgggaaatccagctcattcttccatgcctttgagatcgttcgtccctcctcttcctgaaggccctccaccccttaggcagcacacatcaagtgctctacaagcgcaacctgcacttccctctggaccacagactagccagcaaccgtctgctcaggaagaccatcacggagaccctcaaaagcgccttcaagcaacattgcaattggcagcaaccctacttcagcagatacagcaacaatctaaacctggtggccagaagtagatgcgaggttaaggaaatttgcagcctgcaaggatcatatggtgatattttctccttattactgaagagcctgagagtctgaaactgctggtgggcacccatacctataccggatgttttgttaacataggttctgctatgaattagcattgcagtttaattttgaaagcttactcctaggtggcaaccacctccgttgtcttgtctgtataagattgcaccgttcatcttttctctctgtttttgtgttaatcaatgcatagacccatgaatacc

SEQ ID NO: 79216 - DNA, 554 bp, Oryza sativa
  Clone ID: PAT_MRT4530_78948C.1
catttatatttatgcaatattgtacagtactctacgagtagcagcctgatagtatgtgatatcgtgatccatataaataaaatactctgatatgtcatttatttttcataaattagcacgtgatacaaatggtttctcacattattcatcattttgtaaacatgtctgttgttcataattgtagctaatgcataactaaccattgtttctaataacacttattagctttatttagctctacctctggtagcaagttacccttttcatcattatttctttgtcttctaggcaatctatagatcattctaggacattgtttcctttcaatgaaaaatgcagggatcattgctccagttaaaggtggagtaggacttaaaactaccataactttcaaagagaaccctatctaaacacacccctaacatctgagtcagtcagctttctgggaccagtcctatcttgtaatgtggttgccagcttcctgacctattgctactttcattttgccaggccctgcttcgtacaacctgtaaatggcaaactaattagtaatg

SEQ ID NO: 79217 - DNA, 571 bp, Oryza sativa
  Clone ID: PAT_MRT4530_78949C.1
gaccggccggaattctgtttgatccacgcggcgatcccttagttatctgcatctcttgtctagtgatgacaaatccatcatatgctttccaccttcaaaatctgtactttgcgtgctgctgatcaactaaaaaaggaatcttgcgcatctttgatacttcactatgttattctcattaggtagaaggcacaaatccagtcgtgtatgtgctgaatgttagggatacttcactaagaacatacttaattgtgaactttgataagtgggatgttaagtttgtcaattttaggcttttcctgaacattagatatcaagttatctaatgtgtgtgggaataggaaatattttccactggtagttgcacactgagatgtttcctattatattctaccttgcattttcatggcatatccttggtgatttcttgctgatgtcgtgcacgtcaggagttccaagtaggtatttacattgttctacctgctagtaagttttttacaatctgacaaatctcatggtgctaattgacttgagggttattggccaagccctggacaggtcacaaatatgtatg

SEQ ID NO: 79218 - DNA, 544 bp, Oryza sativa
  Clone ID: PAT_MRT4530_7894C.1
gtttaacatgatgtccatctagtataacaggactcgtattttttttctataattgatgctaagatttatatatcttctcttatcttttgttttagttagtcaacattttagccttacaagcatagtttgtcgtatcctttttggaaaataaacggcctatacttttctgttgatatctgaggaggtgtatggcctgcgtcaaatttattcacctgtggtacaaaggttttagctagaatctcgtgggttggctatgaatgatatgtgcaagaatatataattgttccagacataaattaaatattgcctgtctcttgtactctttatatatacatctttatgccatctttattcctttttttttcctcttggtctcaggtgtatttcacttactcttttggatagcatggcttatatcggaactacctctatgctaacattgtctaggtctcattagctagattaacttaactgttttcacttagtggtgttagtctgtaaagaaaatgaatacccagtcttagttgagtcttttgtacaaaaa

SEQ ID NO: 79219 - DNA, 1723 bp, Oryza sativa
  Clone ID: PAT_MRT4530_78950C.1
ctactctacggcgaacaccccatagatgatggctgagcagctatttacatgaagaaccgatactccgaaagccatggcacaaagcactttgacgcctcggtgcctttgccttcgacctcgccgtcgcacatccagaacaaatccttgagctggctcgataaggtactgtagaaatgttgtctcacagcagaattgatctgggtaaaacttggcaaaccaaagcatgttgcaatttttttttttttttcctttttctcttgttacaaaaagctactctacggcgaacaccccattgatgatggcagagcagctatgtacacgaagaaccggtgccccgaaagccatggcaaaaaccacgttcacgccgcggcgccgttgccttcgacctcgccgtcgcacttccagaccacgtccttgagctgggtcgacagggttctgtagaacttttggaactccagagtgtccccctttgccttcttgagctcaaccacatgtaaggatggagctacttggaaaacctcagttgcaacattgagattgccttttctacctgctttcaggttctccatacgcatcttgtaatttttcttttgaatatcaaatccaagtggctttgcagcttcttcaatcttggtgataatttcttttggaggacattgtgatgtgaatcttgtctctcttttatactccttttttgcctcgaacaaattgtccagattcagtgcctgattcagtgaaatgagttcaaacgcgttcatagaggtaggctgatcttcagtttcttcttggtcatgacgttcttcgctagagtccaaaaccagcatcgacatctaaaaaaatattcacatatttctcgataaaaagcaatcatgttgtcaaccctatatggtcaaaagcccgctagcagaatatgaaggattaccccactagaccaaatatctgcagctgccccattgtagtctgcgtcctaactccagtcttcacttgctcggttaaagcactcaaaccaaagtcagatactttcaggtttccagaagcatcaagcagcaaattttctaacttcaagtctctgtggtacacacccctactgtggcagtagtcaactgcattgataagttgttgaaagtattttcgtgcttcctcctccttcaaccttccattagttgcaatgatttcaaagagctctcctccagtaacatattccagaacaatgaaaattcttgctttacttcccatgacctcgaacagccgaacaacattaggatgctttactaacttcatagtacaaatttcacgcctaatctgttcaaccaatctgtgcttctgaaccttctccttgtcaaggattttgatagcaactggttcgtcattttcagtgttcttcgcaaaccggacctttgcaaaggttccttctccaatggtgcgcccgagctcatacttccctacacggcgcttcacctttggagataatgcagccctcttagccctatacatcttccaacaaatgaaggttcctaggaaccttcaagttattcaagtaccttcaactcagagaccagccggagcagcagctggacagcagattcagttctctcaagaacaggaggaaactgagccaggtatgctctgctgatgatgatgcagcctccagtggatcaaccttctccttggcttgtgttccttgctaccggactcgccgagtgacccgcggcccgggggatcc

SEQ ID NO: 79220 - DNA, 1260 bp, Oryza sativa
  Clone ID: PAT_MRT4530_78951C.1
gagttgtctcatatagcagaggtcttctgtgaactcgagctcctcgaggttgttgaaccttggcgatgtcagccagccttcgaccatggcggggcgctcgtggatctgctgcgcggggatgcagaagcggcgtacgggccccgcatgagcgaggagtactgggtgaggaggacggccagcgccgccccgttggcgccgggggcgagatcgctggcgtcgaggttgagcggcgtggtgcgtagacagggcgccaccgtttggagagggttctggtcccagaggcggcgacggcttgcgtggaggtgctgcttcatccggggccgggtcgtcgcccttcgtgggcccccttcccctcttcctggagggcatcggcggcggcggccgcggcggcggaatcggcggatctgcgggctgcatctcctctccaagggcggcgtccggaacacgcggtgtctgtgtcggtggcggcggcgacgggggagcgggcgcaggccggtgtgcctgtcaacggcggcgaggaaaacagtggaggaaatggcgtcatcgttggttgcggcaggcgatcctgcggtggtggaccatctgggcgtggaggccaggcaaggtagcggcggcgacggcggtggtgtggaggaggatctagtgatggcggcggcggtagagaaggccggtgcaaaggtgggtggctgcggcaaaggaggaggaggctcatcggctcgctcactctgccggccatctccctctagttctggtgatggcatcgacgatggaaatggccagcgcagaggccggacctggtggcagtggcggaggaggaggaggtggtgatggcggcgacagtgaagatggttgacgcgtaggccgggcggggtggtggccggccggtggtgggcggttcgggcttaggaggcagcggcggcgccctccctccaccaggaggcggagaaaagggatatggtggcaacctggcgcaggaaagaaggtggtggcggcgcggcgacggcagcagcgacggatcctcggacgatggtgggagtgtaggagccggtggtgccctccctccgccagatttggagggagggcaggcagcgggaagagagtctgccttgggcggatccagcggtggtagcggcgtcggcttctcccgcagcggatctggcagacggtgatggtgagcagcggtggagtcggccttctgtccttccgcttcagtcttgttggtgaagaaaccatctttcgtcggtcggccgatttccacaa

SEQ ID NO: 79221 - DNA, 462 bp, Oryza sativa
  Clone ID: PAT_MRT4530_78952C.1
atgtccaagtggtacatcgcacaaacacatgtatgtcttgtgacaatagaggatccagatattcctgaaatagccaacgtggacacgctgtaccctatgcagtcagcgccagttacccacctgacgggcgatattgtggaggaactatattctgacacaacctcactgtgggagaagctgcgtgacaatatagctgggtccctcgaggagatgatgtctgctctagaccgaatgcgacagaaatgcaaacgtattatgcgggggcatagtacaggcatgcatcagaagtccaccgtcccacaggacacaggtttgcggaccccctaccggaacaaccgtctacctcttctaggccttccacatcggcaagaccctcagcttccacacgtcctggacgtcggcaaggcctgtggcaccgtctacgataaaccgatcggacaatgcaggtgtaccttaagttaa

SEQ ID NO: 79222 - DNA, 723 bp, Oryza sativa
  Clone ID: PAT_MRT4530_78953C.1
atggctcgcaataggatcatcctcaagaaggtcgctaaggattccactcggcgcctcacattcaagaagcggcgcaggggcttgatcaagaaggccggagagctggcctcgttgtgtggtattggcgtgtgtgtggtggtgtatggagagggcgaggtgaagccagaggtttggccttctgcccccgaggcacgagcaatcctctcccgcttcaactcggcgccgaacattgataggttcaagagggtgacgaaccaggagcagtacctccgaaagcgcatcgccaaggctcgggagcgcacgagcaaggcggacgatgtcaaccgtgagcgtgatgctaccatcatgctttatgaggccgccaccgataagcgcccagtggcagacctcaatgtccaggagctcaccaacctcggattggtgatcaatgagcgcatcaaccacctgaaggaacgcattgagcgccttggaggtgcggccctcatggcgccaccgccatcgacgcaaccgacggaggcatcatcatccttgccaccgctagtgccatacgccaatggtgctggcatggaagggaacaagaggatgaaggtgagcacgcatcagaaaggctggttcattaacatgagcaccatgacaggtgacgcagggacctctgccgacgttgaaggcaatactggtgttggcaccagcgctaggggtgacatgatgcatctttccaactag

SEQ ID NO: 79223 - DNA, 1385 bp, Oryza sativa
  Clone ID: PAT_MRT4530_78954C.1
cggactcgtgggcggacgcgtgggccgccacgccaccgtccgccggcaacgcccccgccgccggccggcggccggcgccatccccatccatggcgtccaggacagcagggcgggagcgggacccgtgtgaggatgaggaggtacgagtgtacagcgattctcgtgggtatttcgcctccggggggcgcgatgttgatgtcgggccgttcccaacctccgatgaactctacgccgcactcgaccaccactatcacctccggtcgaagccctgtgatccagccccgctgccgacacagtgtgagggccttttgagaggtgcatctgagcctgaatctgcacaggcactgcaggaaccagatgttttgtccgtgggggagcttcttggcgctatagcattgaaagaaccaattatttccagtccctcttcctccccacaggcagtaccagaagacaacattgacgctgtaccatcagggtgctgcctttcctcatcccctgggtcagtcatttgggttcacaaacctcctgaaggccgccgcgggtcataccacattcgaatggatcgtagtgggctgttccacacgtatcctgatatgggtggtccatttctcagcttaaatgaagctcaagacgctttcactagccatcttaacatcctatatcctccattaaagtttgaggagcgggatggggagtctattgtggacatgatgggtcttgcatacgagctcaaagatgtcattcactttcaaccaattatggagagctgtacgtggtttgaccatttaaatttcacggcattgaccaaaggagataatgaattggattatcaaattcatctgttctttgctgaattgatgtgtttggtaggacaaaaggattatattgtcacttgttgctgtgcacttaaatctgatgacaatggtaattgctataactgcaagcttcagaatgttaatttgaagcacccaaatgatactaaccaatatgctggtggacatgagtatctttgtggaatttatgacaccgaagagatgagcgagtctgaagatgaagaaaaagaggagcagaggataagaaaactttacgaggatcttgaggaaccaggtttgcatgaaaaactttttggtgatgtagaggaaacaggtttacaggaagaactttttggttgaggtggaatgggagcgggagtacgtactcctaatgagtatagaaccatttttatgctaccgtgtctgtgttgtagtagtgcgttttcatgttatttaggaatttgtggagttttggttattatgtagtacaacctgccattttactataatactatatggtacgtgacttctgtgtctcaacagcatcagactaacgctgtccattgctcgttt

SEQ ID NO: 79224 - DNA, 360 bp, Oryza sativa
  Clone ID: PAT_MRT4530_78955C.1
atgagccctaccggcggcgcaattcgtcctcgtcggcggcggaattcctcggtgtccctcttcccgccaaagcgaacagccgccatctccctgtggtggcatggccacatgcagtcccgcatactggcggcaagccagccggcaacgcagtgccctctgccgagccggagtagaattaaacaccatgcgcactctacaagcatacgccctgatctgtgcataaaaatgcatacatgtgcagtctacagatatggcaatggtatagggagtggcggagctaggtccggcaacccgaggccggtgctcgggctgtaccgtctaccaacatacagcaatcttaagcagggtagccgcatgtag

SEQ ID NO: 79225 - DNA, 1120 bp, Oryza sativa
  Clone ID: PAT_MRT4530_78956C.1
ctagtaggctagtgctctgcctccaactcccctgatttggcagcgattgatgccgtccgccatgaagccgagctcggccggcggtggcaagtggccgcaatagccctggctggatctggagacgtcggcaacaatggcggcgccggacggcgatgccactcctccgtccgtggaggagagactgcggcggctgctgctccgggctcggttcatcgtggaggaggcagatgaacggctcatcacaaaccaagccatgctgcaacaactgaacatactaaggaaggagatgtacagagggtatttcaccctcgacatattcagatgccatggatacaaaggtgacaatactaaagatcaccaggtgagtaactctttcgcactatccaagttcaatcctgccaagcgtgttcggctgagcagggtcagtggccacagtgtacaaaagcagttgcagcaagttcttggcagccttgaagttgccattgaagatacaagtgaatttgtcattcgccaattggagagggagcacatcatgaacttcctgctcaaagagaatactcccggagctgaaaatctaggcatcctgccgatcatcggtccagagaacgttgggaagagcaccctgattgagcatgcctgtgatgatgaaagggtgcgtaaccacttctctcaaattgtgtgtttcaatgacaatgatcttgaagatgcaaacatggctctccaaattaaggcgttgaagttggtgccagtggttcccaggcattgcgctttgtatgtcgacgaggctgagtattctccatggtttgaaagcttccaggtctggacatccttcctgacaggattgatgaagaccactgcattgtcggcgtacatggagattcttaggcgggctgctcttccccgtagctttgtgatggcattaagctccgttgcttttgaaagcagccattgtaggggatcaatcgccaggataaagaggagcggtgatagcggagggtattacacccttgacagattcagataccatgcccatgaacaagacaatagcaaagataacaaggtgagtaactctttctcaaaatccaagttcaatcctgccaagcgtgttcggttcttctgg

SEQ ID NO: 79226 - DNA, 264 bp, Oryza sativa
  Clone ID: PAT_MRT4530_78957C.1
atgtgcgaggcggtggttgtggtgcccagcagcgtgcaacgaaggggtcgtggccgaccgagttacccggtgctcgtgcaacacactggtgccgtaggagccctagtcaaatatcgtgacgggattgccggcgatcaattgcaagatggcgacgtccttcggggtgccacctgcactggcatggtaccgccgtttgatgacccttcagcacttagtaaaggatcgagattagttagtgttatcgagaacgagatgatcgtgtag

SEQ ID NO: 79227 - DNA, 532 bp, Oryza sativa
  Clone ID: PAT_MRT4530_78958C.1
aaatgattcaacatttagggatatccaccatctgtctatagaagaattacaaaactatgaacatttgaggaagaagattgagggaccatctagatgacgtcagttaagccttcattctgtgctaccatagcaacctaagtttcagtgtatttgacacatgggtgccattgacgaaagcacttggctagtgatgaatgtggcaccatttttctttcccccatcccagatcttccgggctcccgttatattttgacttcaacacgagctaactgaccttatctgcccaaggcattatcatctagaatctagacagtttctggttctgctttagttagggttcaacgaattgactccaaattgccaaccgctgcatagcattcatatatagaaagtgagtatactcatgtatcatctcaactatgtatcctcctgtcctctatccttcagaggacaatactctacttttgttggcaacctttccttggtcaactagatagtctgcaccttcacccaaaaaaaaaaaaaaaaaaaa

SEQ ID NO: 79228 - DNA, 366 bp, Oryza sativa
  Clone ID: PAT_MRT4530_78959C.1
tatcgatcactcctccgcctccctcctggcggcctacctccgcgacccagcaaggaagacgaccaacaggaggagagagaagaggaggaggaggaggaaaagctctatgtctatctctctctctctctagatgagagtcctttcggccggcgcggtcaacccggacggctgcggccgccgcaatacaatcgatatcgacgctgcgctgcgctgcgctgtcccacccgtcgaagccgaatacgacggatcctacacccgttgaccgtctacgccatcggaggccgcgccgagccctggaaccccgcgccgactgctgctgcctccgccgactacgcctcctatagataccgccccggctcaccgcgg

SEQ ID NO: 79229 - DNA, 3653 bp, Oryza sativa
  Clone ID: PAT_MRT4530_7895C.1
gagatctccgccgctcgccgccgcagatccgcgcggcgtggactccggcccagatcccggcgatggctgggatggaggccttcgaggcctacttccgccgcgcggatttgaaccaggacggccgcatcagcggccaggaggccgtcgccttcttccagggcgccaacctgccgcagcaagtcctcgcccaggtatggatgcacgccgacaagaacaagaccggcttcctcggccggccggagttcttcaacgcgctgcgcctcgtcaccgtggcgcagagcgggcgtcagctcacgcccgacatagtgcagtcggcgctgtatggccctgccgctgctagaattccagctcccaagatagccggcggcgggcaagctcccccgcagatggctgcggcgggcgctcccaggccgcaggtaaatgccgcggtgtcacctgctccagggcaggctggagctccgcagccgcagatgaatgttgctggtgctccaaggcctcagggaagtggtatgatgccgggctctgctcaaattggcggttcgcagcaggtgaacgccggagccgtgccaagaccccaaggggtcaattctatgatgccggctgcaagtcagggtggtgctctgcagccaactcagtttgcaacgcagaggggaatgcaatcacagccgcctagcatggggtttaatcaacagcctcctccttcgagtactggtttcatgaggccaactcagccaggagctccagcagcatcacttcaaggccaaggacccgggattaatcaagtaccactaggaggaggcagcatgggagcacctgctggttggcgaggaggcaatgttggttccgttggaggtctcccgcaagctactccaggagcaactgctccacaacaagcaacaccgggtggatttggtcttacattgtctagtacaatgggcatggctcccggacaacaggcacaaggaacgcctccttcgtcaatgccaccacaaagcaacagtgctgtatcagctcaagattcgaaagctttggtgctgtctggaaatggctctgccagtggcttaggagcaagcaatgacatcttctctgctcttactcagcctaagtcgaatgtatccacactttcatttccgacgagcatggctcctaattcatccagttttatgtccacaccatctggctcccagaacctgtcgaatctagctcagtttggttctcaacaaggtattccgacagtgagttctggtggcagtcaacctcaacagactcatcccatcacaaagccgagtgttccagcaccaactgtatctggtgtttctgctggagtttctaattcagcttctcaatggccaaaagttactcagtctgacatccagaagtacactaaagtctttgcggatgttgatagggacagagatggcaaaataactggcgcggaagctcgcaccctgttcctcagttggagacttccaagagagattctgaagcaagtgtgggacctgtctgaccaagataatgatggcatgctttctttgagagagttttgcattgctctttatttgatggagaggcaccgagctggaactcctttgcctccagcacttcctgactctcttaaatatgatgaggtactgctgcgtgcaacaggcttgccttcaacagcatacaacggcccgtcatggcaacaaaatcaaggactgccacacaagggtcctggagcagctgggatgcctgctactggtgtgcggcaacctttgccaccacatttgcaggcacagatggatggtgctaacagaccagggcaaccaagacctcacatgcctggtatggataaccatgcagcacctcaagcaaataaagatgacggaagtggagcgaactcagctgtgcaggaggatgcccctaagaaggttgaggtggagaagcaagtcctagattccagagagaaactagaatactaccgtacaaagatgcaagatcttgttctgtacaaaagtcggtgtgacaacaggctgaatgaaatcacagaaagggcatcctctgataaacgtgaggtggaatcattagctaagaagtatgaagagaaatacaagcaagtggcagagttagcttccaaactggcagttgaagaacatgccttccgtgatgttcaggagaggaaagttgaactgcatgatgcattagttaaaatggtacaaggtggaagtgttgatggtttgcttcaggttcgagctgatcgaatccaataccaattagaggagatggagaaagcttttagtgaacggtgcaagcactttggactgcagttcaagccatctgcatcagttgagcttccttttggttgggaacctgggaagcaagagggggcaattgagtgggatgaagactgggacaaatttgaggatgaagggtttggttttgtaaaggacaatggtacaattgttgaaaacccagttgcttctgaaaatgtgaaagtgccatctctctggaatgatatggatgagagccctgttgcatcttcgaacggtcacatcaaggctgagagacattacagagctggtgatcatgcagctgagagtgacttagggtatgattttggtgaggaatctgtaaggagccccagcagtgctggaagaagtgcatctggaagtccatttgtgtcttcaaattttgcgatgcatgactcatctcccagcaaaaaggaaacctacagtgaccatggtggttctgaatccatttttggtgacaaatatgccgatgaaacctcctggaactttgatgaccaagacactgaatctgtttggggatctaatgcaatgaacaacgagtctgaccatcatggaagtgcacacaactctttctttgggtcagatgacttcggtgtaaatcctgttagggtgggctctccaagtggtgccagtacctatggaaagaagaaaagttcattctttgatgattctgttccaagttcacctgcatacacatctggattctcaccaaaattcagtgaaagccgcgatgatagctcctcatataacttaggaaggttcgattccttcagatcccaggagagcggattcttccctcaggaaagtcgtttttccaggtttgactccataaacaactccaaaggtgagaatgtaactggattcgattcaccgaaaagctcaacaaatttcggtcggtttgattcttttgatgatgccgatccatttggttcaagtggaccctttaaagcatcaggtagcaggtctccccccaaattctgatacaccagggtactatttttagtgaattcatttgtcgatacaaggctgaattcttttgaggaaactccaacgcgttgatgcagtggaacctttttgagtgggaggttggtcattcaccttgtgcgtttttcctgtccattatacggtacaaaggggacaggttttggtatatcctttgtattttgtaaagtacaccgagtttgtttttgttcatagttatcatatctctggaacggctgctgatcatctgctgtttgccatttgtttcttggtttgtaccataccaaatgttacagttggtttactaaactcccaccattttgtaagaaactgaggacgatttagcatgtttgcgatctgtatgtgtaaaatcattttgggatc

SEQ ID NO: 79230 - DNA, 694 bp, Oryza sativa
  unsure (1)..(694): unsure at all n locations
  Clone ID: PAT_MRT4530_78960C.1
aaataaattagcgggggttcaaaattttccccctttttcccttctttccccccaattaattctctccaaatcacttcccccccatttttcgccccccaacttttttttttcataatttttgcccattacccccccccaccattttattacaccccaccaaatttttttttaaaataaacccccacaaatgtttttcttcccccctaaaaaccttttaaaaatcctccccacccccccccccaaaatatataaaaagccccccccccttttggcggtccccccttttaaaaaccccccctttataatattttttnaacaccccccccccccccgtctcttttttaaacaaccaaaaaaaaaaatcttttgagggggggtgaaaaaaaactctttacacccacaaaaaaaaaaaatcttttttcccacccccttccgccaaacaaaacgcgtgcacacaaaaaaaaaaacccccccccccctcttttaaaaaaagagggcccctctttcttttccttaaaaatctcctcccatggatttatttttttttttctcaaaacatcccccccccaaaacaaaataaaaacccccccccccccctctgggggttttttttcccccaaattttttccacccacattttctccttctctttgtatccccccccctccccccccttttataacaaatttttttc

SEQ ID NO: 79231 - DNA, 222 bp, Oryza sativa
  Clone ID: PAT_MRT4530_78961C.1
atgcggctggcctggaccggattggatccaaggatggtcgaggaagaaggaaaagccgagcagacgttggacttggccgaagtcagtggatcggagaacattgcaacatgccactacaggaagtcaatggagcatgtatgcatggcatgcctacttgtgttaattcgcgtcgccggcgccggcgccggcgccggtggcggtggcggtggcggggagggttga

SEQ ID NO: 79232 - DNA, 1759 bp, Oryza sativa
  Clone ID: PAT_MRT4530_78962C.1
atggagggggaggacgaggtgagggtgaatggggctgtggaggtagcggaggtggtggcggagggggatctcgccagtgggggggaggcggcggcggcgggtggatctgatcaggcggtggtggtggtggcgatggccgcggaggggacgacggccaagaagggcggatcggggggcgcggccgcggcgagaaagcgcgaaggtggcggcggcggtggccaacggcaaggtggggaagaagcccgcgctgtcgcagagcgcgtcgttcccggcgagaggggcggctgccaagaaggcggcgacaccaaagcaggccaagacgacggacgggaaaggcgctgtgcccaatggatcggagaaggcggctgggcgagccgtggagaagaaggtgaattcagcccggacgcctgccgcaagccgctccttgcctgttaaatctggatcggtggacgcgcctccaaatgatgcttctcctgaaacccaagagtcaaacgagaacaccacaaatgctttggaacagactctgccagagaaaatggaggatgatgtgcactccaccacatcgagtaccaatactccccgagcagctgctcaacgcaagaatgctgctgctgctgctggttttagtttcaggctgcaggagcgtgctgagaagaggaaggagttctaccaaaaacttgaagagaagatccatgcaaaggagcttgaacaaacaaatttgcaggcaaaatctaaagagagccaagaggctgagatcaaattacttaggaagagcctgacatttaaagcgacacccatgccaagcttttacaaggagcaacctcctaaagttgagttgaaaaagatcccaccaacacgcgctaggtcaccaaagcttggccggcacaagccaaccaattctgctgctgctgcttctgttgatggttctgtatcatgtgagagtcctcggagcataactaatttggccaaattgaccgaaagcacagaaaataacaaacctcatgctactgccagaaagcctgctcaaagatcagtcacaaaaattccttcccaagcatctgccactgcaaagaccgagacaaaaccccttgtgacaaagcagaaaacctcaaacacaaaaccaaaagctccaagagccaaggtagagcaattgcaagacaactcggttgaaatccctcctgctgaaccttctggcccagaggggctcactgttgaacatggtgttgaggatgcaacagggccagaccgggccaccactttggttgcttcgaatgaagttccagtccaaggttgattcgattgcacatttggttatttaatcccttcttgcagtcttgtgaatagtgaggtgtgtgcttcatggaaagttgattcgctcaaagtaccgtggatttgtcatttccggagtagacatcccctttttttcagcttgtcattaagcattccattgtatattgcttgaaaatttgttcatgttaaaattttatttcttgtgtatattggagttatatgtcaatgggcaggctaggactgttgcagaacatcaatgcaacttgtgaattattttgtgttcctagttgattctccttggtccttgcccagtttccttgttcattgcgcaggctttgatcgtggcagaatattacttctgcttgttagaggaataagtcaaccggcggccggcgacggctgctgcccgtcaatgcaacttgtgaattattttgtgttataagttgattctccttggtccttgcccagt

SEQ ID NO: 79233 - DNA, 524 bp, Oryza sativa
  Clone ID: PAT_MRT4530_78963C.1
ggccgcgggttttttttttttttttttgacacacaatatatccatttattccattattcaacaaccaaatttatcccatctcacgaacacgaacacaagaattacatagtaacacacacatcaacagtagtagagaattaattctggaaatggatcatcatcgatctgatcacatctccccggttacttaagttaactaggcttagttaggcctgaggcgggcagttggagggcgggccgtgctcgaggtggaggacgcagttctggccgtccttgggcgcgcactcgcaggcgcagccgtccagcttctggtacgggtagttgtcgcaggtgatgtagcctccctggatgcacaccaccgagcacctcgcctcctccgcgccgcccatggcgctcatcaccaccaccgcagagaggaggaagacgacggcgagggagagcttcatggatgccattcttctttctctagcttcttgtctctatttgatcaatgtgctatttgtagttgtgtattgatttgatgc

SEQ ID NO: 79234 - DNA, 1013 bp, Oryza sativa
  Clone ID: PAT_MRT4530_78964C.1
caactaattagtttgtacagctacaaattgaagaaaaaccaacaaataaggaacaaagagattaacaaaggttgggcttctatatatttgcccagctgcaggtttgatccgatcctacgatcataatatctatttaatttttttttcaggaggtatatatatagacctacacgactgatccatctcaataagtaaaacttatcagaatgtttctgtatcactaaaaaaagaaaaagaaattaattgaaaaaaaattcgtttccaattttttttcttttccaaatatttttctctgatcactcggtgtcgtcggccgccgcattcaggtcaatcttgggcttcttcccgctgccgtcgccggcgccggcggaggcttcccggggcttcccggcgagcggcgggacgttgccggcgcaacgcgggcaccgggggtccgcctcggcgatgagcacgtaggtgaggcaggacgggcagccgcccgcacgcatggacgggctcgcgggcgtcgcgacggcaccgcctgagggcggcgaccggtggcgcttgccgatggaggaggaggacgaggaggtggacgccgacgacgacgacgacgtggccggggagccacgcgcggcggcggcggcggccgacctcccggccgtggcgcgctcgagcgcggagcggaccatgtcgagcgtgcagaccgcggccgacgtcgacgcggccgcggcggcggaggacggcggcggaggcaggttgaggtcttggtggccgacatggacgcactggagccgaggagtcaagaacgtcttccctgacatgagatcaagccgcctctcccacccggcgggaaccttcacctcgaggtcgaccacgtcgtcctcccctccgccgccgccgacgacgccgccgcggctgtcgccgccgcacccgccgagcagatccatcgtcacgacctcccccgccgccccgcccctcctcccggcctcccatcgcagcagcatcgccacagagctcacgtccgccgccat

SEQ ID NO: 79235 - DNA, 348 bp, Oryza sativa
  Clone ID: PAT_MRT4530_78965C.1
atgcgaaaaacacgaggcctgggagatctgcttaactccagtgcaggtccaaaatcttgccttttaggttcgtgagcgtgccagttgatttgatcctgcaatcaacaagaaataaagataaagaaaccgcagttaaatccataaatgatagccgatcggccaggactcaatccgtgtatggcaatccatatgaagcactttaactcaacccgatgacgtacaccgagtcgtattgccggaatcggctcaatcggctaaccctgtccgactcgaactctgccgatcctgatcgtagccgatttggactccagccgattcttgctttgtttctgaaacgatcttgatctt

SEQ ID NO: 79236 - DNA, 1653 bp, Oryza sativa
  Clone ID: PAT_MRT4530_78966C.1
atggccactgccacttatttctggtccaacaccatcaacacttttctattcaaccaagggccgatgaccccaactttgatcgacatcactatgatcacaggcttggatgtgacctcatcggctaacccaatgagcctgaacaccaaaaaccagtttgatttcagaaccaaaagcataggtgactggtctggttatgtagcagcatatatgggcaaaggacctgtcaccccccgagaacatgtagccttcctcctgatgtggcttgaaaagtttctgttctgtggatcaagttgcggcccaacaaccaactggcagttcttagccgaagccctagagacaaagaggcaatttcctttaggtaaaatcctcctcagctacctgtatcagatgttgaacaatgcatcggccaagatagctgtcggctcaatcatcggtgtaggtggaccatggtggttgctgcaaacttggctaaacctggtagccatgaaagctgtcaatcggccagctatgacagaagctgaattccctagattggagccgatcacagatgatgatggggaagaacgaacccaccgtaggtgcatgtcttatagagaatatgcatccacaccagccgatgctggagcaaagttatcggctgaattgctcaaggattggttttgtagcttctacgaaggcttccagaaagatgctcgggtttggttcccatatgaagattcagccaatttgaatcttccagcagatttcagatttgaggatatcaactccgaaaaatttgacaaatccagagaagtcttcttagctgctattagcccatgcattctccctgtcggcatccatcaaggaagaaacattcaaacaacagaatcttctcctccacgcaagagcaatagccgcagggacatagaatatgctccaggccttttaccaaacggtggtggactagctcctcccgtcatcggctaccatgcccccaagacatcaagtctgcttcaagggcagatgagagaaccagccgatatcggcaggaagagaaagaccaaggcatctgctatagattcatcggctctggctcccaaaaagaagaccaagaagaataagcctaagctagccgatgacctgcctgccttagatccatccatcgagcaagccttggatgaagaagatattgaagaggatgttgatcaagctgcagctgaaaaaaagaagactactgtgaagaagaaatcggcagcaacaacacttaaaccagctccaccagtaagattgtcgtatataaatcctctcacttatctgatcacagccggaagccaccatgttgaagaagaggaacaaccagccgctcctgccatcccagtcttggctgatctgttctcttttgatatcaaggattactttgatgagacagaaaaagaaaccacaagcaaggctctagccggatccggcggaggagagggcgccgccgcctcccgctgcctccccttttgtgccaccgcttgccgcctcgggcatcgctgcctcccctccagccggatccggtggaggggagggcgcagccgccggcgctgctgcctccgccgggctgtcgtcactaggccaccgccgtgcgcacgagagagaacaaggccgagggaggcgagagaagagggatag

SEQ ID NO: 79237 - DNA, 349 bp, Oryza sativa
  Clone ID: PAT_MRT4530_78967C.1
gttgatgtaaaaacacgaggcctgggagatctgcttaactccaatgcaggtccaaaatcttgccttttaggttcgtgagcgtgctagttgatttgatcctgcaatcaacaagaaataaagacaaagaaaccgtagttaatccaaaaatgatagccgatcggccaggacccaatccgagtgtggcaatccatgtgaagcacattaactcaacccaatgacatacaccgagtcgtattgtcggaatcggctgtatcggctaaccctgtccgactcgaaccctgccgatctggtcgtcgccgatttggactccagccgattcttgctctgtttccgaaacgatcttcgtctt

SEQ ID NO: 79238 - DNA, 135 bp, Oryza sativa
  Clone ID: PAT_MRT4530_78968C.1
tgtgttttaaactgctgccgcaagctcaaggataactatggacaaaatattgatcattacaacaaacatctcaaaaaacacattctatatagaccgtaaataattctgctcgtaaggacataatggcacaacaat

SEQ ID NO: 79239 - DNA, 219 bp, Oryza sativa
  Clone ID: PAT_MRT4530_78969C.1
atggacgttattcccgagaacgtccagatcaggacgctgtttgtaacggcgtccaccgttggagccgaaccaacctacgacgtcgcgagcaaattaacgggggcttctggatcagggcagagtttaacgaatggcaacgagacggacgcagttgcgaacagcgtccccttccggacgttctcaggaacagcatccacgtctggacgctctggtagatag

SEQ ID NO: 79240 - DNA, 862 bp, Oryza sativa
  Clone ID: PAT_MRT4530_7896C.1
tttttttttttttttatataaaaaaagataactttaaaacttaagtcaataagtctaagctttaacaaagaggacctaacactattcaccagaaatattccctagggggcgagagaatggaggtaaaattaagcccataaagcacaaattgtgtacaatccatcaatgtttggattagaggctagagcacaatgatggatggacatcccatccaggtttcaaagattaagcctccttgtgaacagtgcctccaacaatctcggccctggatgcaatttgcaaatctgaatgcaagtactggtctagtttattacccagataagcatcttaacacaagcactacattgtatcaagccttttgtactgatttgcttcttctccacaaaaagaagctattataggttggtacacattgttttggagaaaagaccaccctgacatgaaattgcttcaggactgaatcatcgggagaattaacagctccaagctcaccattgttaaaagtccagcaaaacagggatccctcaaactccaagcgaacaaccagttttcccttggacttcattgccacaatgtgctcgaaagacttgtccttacagaatttcccattgaacagcaaaatctcattgtcaaaaccactacagaaagcagtgaatttcacatggcgaggatcgttactgtcaatctctgtggatacttgtatgacagcttcaatactccgtgaaagatacatgtagtgtgtgtccagatagcaatggtcacttaatatccgcccactcatctccttattaaacacgccacgggcaaaaatctcgacatacgcggatagtaattgcttgtcattagatactccaccttccat

SEQ ID NO: 79241 - DNA, 227 bp, Oryza sativa
  Clone ID: PAT_MRT4530_78970C.1
gcgactcacccttcaaataattcatttcctccctatctctttctcaacaaaaatatgtaaaaatgaggggatgggtatacttgactaggagcattgtgtatactctgaagacaatcaccaactacaagtacaaatgggtgaatgttaccacaaaaagaggagggcagtggggccattctacctgttcataatctacatccccaggccagcagagaggaaccaatatt

SEQ ID NO: 79242 - DNA, 274 bp, Oryza sativa
  unsure (1)..(274): unsure at all n locations
  Clone ID: PAT_MRT4530_78971C.1
taaactccttgctattgctgcatgcancgcctcttcccattttgatgttttaggtcaaagttataggcaatatcatctgcattctcctgtcctgctacatcaacaggtgcttatcccatatttttttttcgtaaggtgtcgttatttcatatctttttagcccctttttaaaatcatcttcttnttaactnataaacaaccaattctttcaacanctctttcttntttctcatcaatcttactatcattacatttacattttncattccatatc

SEQ ID NO: 79243 - DNA, 276 bp, Oryza sativa
  Clone ID: PAT_MRT4530_78972C.1
gagatcgactaattgggagaaaatttgctacaaatttacactcagatgatacaaaaacacagggagcactacaagcgaaaaattatgcatgcgggtgtgtcatattacaaaggttttaggtccaggaatgtttatatggctggccaatcgatcgatgatcatcattagatcatcaccatgttccagaagacgtttggatccgcacttggacttatccttccctttgcactcgaatcttgaaaatcatcttgagatgaaatgggacttttcttctgc

SEQ ID NO: 79244 - DNA, 2071 bp, Oryza sativa
  Clone ID: PAT_MRT4530_78973C.1
atggcgaaatctctacttgtctcttctttgcttgcggttgttgcagcagtagttgttggagcagggccaaacccccagtactgtcctccttcctcctgtggccatcttggcaacatatcctaccctttccgtcttgcaaggcgattcacgcccgtgcgttgctactcctcgtccatggtacaacctctcatgtagcagtggcagggctgccattcagatcaacacagggacgtactacgtgagtagcatcaactatactggtgaggtcttctcggttgtggatgccaccttgcaggatgatgatacaaacggcaccagctgccctcttcctcgctctgatcaccttccttacatcgattactggcctccgtatttgggggaaagttcaaccgattcttatggttttttcgatttggccactgcttcaggcacttgggcatgctttgtgaattgttcccgagcaataacagatattatgccatggtacaggcccgttacatgtctgcttcccaacaattcatttgtttttgtctcgtttgatgactgtgccgttggagagcttcaaccttcctgtcgatatttggccatgattccctttgagagtcggcatatatcggacaactcctcacagctacagaatgcaagttacacagatatcataggattcataaggaaaggatttagtgttcggtttccatatcgtcctgaccagtaccagagtcctcgtatgagcgccagggaatgcctgaaggattcaaacaggtacttcaaggagcgtatatctcatccaagcattctgaatttaacccgtgctattttctggagcgaaacaaactccgaagtagactgcggatatgaagttgccccccaaaaagataggatttttttgggaaccatagtatcggctattgatatcatcaaatttcatttcgttttattcaggttagtgttggggtcactggtggtattcatcttccttgcccacaagtactggaaaacaaggatcacgatcgacgcagtagagaagttccttcgaatgcagcagatgattggtccgacgaggtttgcctacacagacattattgcaatcacatcccattttcgagacaagctaggccagggaggctatggctctgtatataaaggtgtactgctcccgggtaatgtccatatcgctgtcaagatgctgactggtagctccagctgcaacggagatgagttcatcagtgaggtctcaaccattggaaggattcaccatgtcaatgtggtgcgtctggtcgggttttgctctgaagaaatgaggagggcacttgtgtacgagtacatgcctcgaggctctcttgacaagtacatcttctcgtcagagaagagtttctcctgggataagctgaatgagatcgctttgggcattgcaagagggatcaactacctgcatcagggctgcgagatgcagattctgcactttgacattaaacctcacaacatccttcttgacgataactttgtcccaaaggttgctgatttcggtcttgcgaagctatacccaagggataagagcttcgtccctgtgagcgctgcacgaggaaccgtgggctacatagctcccgagatgatctctcggagcttcggtgtcatatcaagcaaatccgatgtttatagcttcggaatgctactattggagatggctggaggaagaaggaatgcagatccaaatgcagcaaactcaagtcaagcttattatccatcacgggtgtacagggagctgactcggcgagaaacaagcgagatctctgacattgctgatatgcatgaactagagaagaagctttgcattgttggattgtggtgcattcagatgaggtcatgtgatcgaccgacgatgagcgaggtgatagagatgcttgaaggtggtaccgatgaactgcaagttcctccaaggccattcttctgtgatgatgagcaattgcctggagtggagtcttacaatatgccatctgatctaactgcaatctccgaggagcatgaggatgacgatgatgatagcatatgtctgttcgaaagctaccagtaa

SEQ ID NO: 79245 - DNA, 150 bp, Oryza sativa
  Clone ID: PAT_MRT4530_78974C.1
atggaagttggcaccaccatcacatttgtctcccttggctcctcctaccgcatcagcattcctagcctcgcccgatctttgaggcgcatccatgcagctgctgttcgtcagccaattggacttcctattgtcctcgtcgacggtgactga

SEQ ID NO: 79246 - DNA, 413 bp, Oryza sativa
  Clone ID: PAT_MRT4530_78975C.1
ataattaatacattaatattttaatttaaattttcaaatgttaaatttaagtacattaaaattggatatgaggaccaaaaaaaaaaaaaaactttttctatttaaaaaaaaacaaaagcctgacacgatttggtccaaaacaaaaaaatggtggaaaaaaaagaaaatcatctgtcccaaagtacctatccacaaactgaccaatcccagggatgacaaggaaatcatcattcataccaaactcgattactgatgtcacgaacttcactctgggaaatctctagctgaccacatgcacttcttggggagctgatataagaatcacaaaaaggataagggaatcctgaacaccctatttcaagagtagaaacctaggttgaacagctgaatatcctggtcccagtttgggatcc

SEQ ID NO: 79247 - DNA, 999 bp, Oryza sativa
  Clone ID: PAT_MRT4530_78976C.1
agtccagaaagactctttattgagtagtgttacataatagtacatttcaaagtaagctcactctaggagcttacatcaaactaataaaagcaacatcaaatagtaagtagtcccacattttttttatagttttttaatgtttgacgttgcttagttcgaaattgagctaaccaacgtcaaatattaaaggatagaggtagtaattatttagagacggcgttctccatttgctctttcagtaagcagcatttgaagaacagacggaacagtaaaatcttcttgatctaatggaacatcgccatcggcgccatcctgtagcaatcttgctcgcagatgaggggattccccactacgttgtatcttcttgccaatgatgccggtatcggaccactcaggttgttgtaagacaaatctctgaatcaccaagtgcagagcgagacaaagcaaaaggaaaacaaggtgcgacaggttagctgatgcagaaggaattggaccagacagggtgttgttgttcagtctcaagtactggaggctcttgaggtggcccacagagcaggggatttcaccatggaattggttgctggagagatcaagtctcttgaggtttgccagcttgccaatctctgctgggattggcccacttatgttgttgttctgcaggagaatagtctcaagattggtcaggtcgccgatgcttggcgcgagcaggccagagagatgctggcctggagcttccagggtagtgacgagggagtccggggagcaggtgatcaaggcccagctgcagggatcgacggagttctgatcccagctcttgagcacgccatgggggtcctcgagcaggttcttgatctcgatcagagctcgcacaaatgcaagaattggagcagagacaatcgccaactggccttcggtgttgacgccataggcggagaggcgggcggtggaaggggaggaggagactaggaggaggaggaagaagaagaaaggcgcctccat

SEQ ID NO: 79248 - DNA, 1965 bp, Oryza sativa
  Clone ID: PAT_MRT4530_78977C.1
atggcgacggatgccgccgacgaggcgccgctgctcgccgaggagcccctccgccccggcgcctgcagccgcgagctcgagctgcgggagttccgcgaccgctacgtgatccgctcggtcgacggcggcggcgccttcgccgtctcccgctccaacggctccctccgccccctctccgcagaggaagcggctgcgggaagcgattgtagggtgtcgaagatttacggagtggctggcgtgatcaggttgctcgccggaagctatgtacttgtcatcacttctcaaagggacgctggttcatatcagggatcccctgtttacaatgtgaactcgatgaaattcttatgctgcaacgaggctataaagcatttaactgcacaagaaaaaagggatgaggcatatttcatgtctctcctgaaaatcgcagaaactactcatgggctttattactcttatgacagggatttgacactgaattattttctgtcttatgagttattacttcgtagcttgcagagggcatcaaagttgcctgctgggcgggtacataagccactctggaaacagttctttaagtttatatttcaggctgacccacgtttcgtttggaacaaaaatttgctagaggagtttattgaagcaaaacttgatgaatttatcatcccactggtccaaggaaatatccaaaatctcagatattttcactgcttatttttttattcttatctctacttttcactggaacaagaatgtggaggagaggtgcaaatcttgaaggagccacagctaattttgttgagacagaacagctggcagagtatgaaggttcgaggctccattccacttctctgggagcaaatagtggatttaagctacaaaccatgtctcaacataattgaacatgaggaaacgccgaaggttgtccaacgccactttcatgatctttcacaaagatatggggacacagttgttgttgatttgacagataagcaaggagatgaaggaaatttaagcaatgcatttgctgctgaaatggagaggattcctaacatcaggattagcatgtatataaaattatcattttatgctgatgttcactttatctacagatattttcttatcaactccaaaggagagatattcctggagcaaagcggcatagttagatccaattgcatagattgtctggaccgtacaaatgtaactcagattgctaatgcactgatgcatatggctctagttaagttgaatttctatgatatggagccaagtcatactttcacagtgtgggttgaacatggagatgagctaagcctggaatatgctggttcttatgcactaaagggggacctagtgaggtatggaaggcagacattacctggattgattaaagatggcatgagtgctctttcacgatattatttgaataattttcatgacggagtgagacaagatgctctagaccttatcagcggttactatacagtcagcaaaggcatctcttctccttttcaaaatggtggatttgaatctgcaacgtatcttcctgtggcttcagcaatcatagttggtgggattactgccaccacattcactcttagtcaagcagctggctctcttagactcttgtggcatcataagagaaatcaagaagctgaaaggaagttgcgctggataaacctaaggtactcttcttctgattgcaatgttaactgtttgctagagacggaaagggagaaactatttgacggatcaagcgatgttgagaaaccaagaatgaaaagcacccaagagatcctcaccaaatacaaatttggcggggatgctgctgcagctgcagctcatgcaaaagataagctcaaggaacggggcgagaaacttgctgtaaacgacttccccatcctttttttttgcatcaagttgttttctcctttcgtctatgaacagttgaacacaaagaactga

SEQ ID NO: 79249 - DNA, 513 bp, Oryza sativa
  Clone ID: PAT_MRT4530_78978C.1
atgcacaaggcagccgcccgtacgtacgtgccctctctgaccaagatataccacaccgtcctctcgcgcctgcggatcgatggccggaaggccggccggctgcgcatgtcttttcacatcaagctgctgctgctgcagcagatcagccgagccgaccaacgtaacatctcgatgccactacccatcctagctctagctgcatgtcgtactacgtgctggttgacacgacgcgtcgatcggccgaagaaggcgcgcgcgcgcatgcgacgagcagacgagaggcgccgtacgtgggggacggccgggacgacgcgtctgctggctgcgtgccatgcatccactggcctcgcggttggcgctcgcgactgcgtggccggctgcggtagcgacggccccgcccccaactcgtccgcgcgtgcgcctcgccacgcatttcatccggccctgatccttctgctacgcgcgtacgccggccgggccggcctgtcggcattcggcaactaccgccattaa

SEQ ID NO: 79250 - DNA, 1056 bp, Oryza sativa
  Clone ID: PAT_MRT4530_78979C.1
atggcaaacgatacgaacaacacctcctcctctgtcattgctactgaaaccacgagcgcgtcacatgtaatcaagattgatggatacacagtaactaaggatctgatggagaatggcgaatttgtgtcatctatcccgttcagtgttggggacttcctctggaacgtcagatactaccccaatggcaactgctcaaagaacgcagactacctgtcgttttctgtgtttcttgagtctcactgggccgaggacgtgaaggcaaagttcagcttcaaactgctggacacgaataataaaccggtgcgatcgcgcaacttcatctccaatacgcacaatttcagcagaagaggttcaaactggggctactccaggttcatcaagaaaagggatttggaacaatcggagcatctaatagacgattcatttactatcaggtgtgatcttactgtcatgaagggcttctctagcaaaggaagccactgtaagccgtctgtggaagttcctgcaggccgtctggacctgcatttgggcaacctcctgagtaataagaagatgaatggaaaagacgtcacgatctacgttggtaaggagagattcagagcacacaaatgcatactcgccgctcgttcgtctgtcttcagggcgttgttcttcggtgccatgattgcggaaacccctaggaccattgaaatcgaagatatggaagctggtgtgttcagattattgctacatttcatgtacaatgactcgctgccagagacgtggtctcaagatgcaatgatggctcagcacctgcttgtcgctgcggattggtacaatgttgggaggctgaagctgatatgcgaggagaagctagcaaagcacattgactgcaacatggtggcgaccactttggctctagctgagcagcatagctgccaaggactcaaggaagcttgcctcgaattccttgcttcaaccaaccaatcttgagaggatgatgagaactgatggttataagcatctgaaaatcagttgcccaattgttctcaatgaactcattgcgagattgctgcc

SEQ ID NO: 79251 - DNA, 144 bp, Oryza sativa
  Clone ID: PAT_MRT4530_7897C.1
tcaccagaataccgtcagccaccatcggtcgtcgatgcgctcgcctgcctccacgtcgcacggcttcagcaagaggtggccgctcgagcccgccatagcgcgcatcatcgccgaccctggtaacgacggtgaagcgaaggccat

SEQ ID NO: 79252 - DNA, 263 bp, Oryza sativa
  unsure (1)..(263): unsure at all n locations
  Clone ID: PAT_MRT4530_78980C.1
tccttacttaaattgagctgctnacatcgttactctagttagaaacaggtagccttttttggttcaggtgcacatgacccaaatggtgaacttgtggatttgagcaattttttgttcacnaaataggtcatgtggtcctgatatgtttccgatgatgatcgatcagcactgaagtttgttttttgttcttgctatccctttttgaaaatgattgaatatgtgccttgcctgccttttgaacttttgataaaaaaaaaaaaaaa

SEQ ID NO: 79253 - DNA, 204 bp, Oryza sativa
  unsure (1)..(204): unsure at all n locations
  Clone ID: PAT_MRT4530_78981C.1
ccgccgcganccaagaccaccaccgccgccgccgacgccgccaaggaaccgaagccggcggaggggacgcacacacgcacccgcaacaaggcagcccncgcaggaacgacggcgacaccgcgagaccgcagccacaaaggccggggagcaaaaccttttttttttcaccaccacagcagacaccgaangcaagggaagaggggg

SEQ ID NO: 79254 - DNA, 1092 bp, Oryza sativa
  Clone ID: PAT_MRT4530_78982C.1
atggactcgcccgccggtacagatgatccacccccgttcgcagcctccggtcattactcattacggccacgcgatcgtcgtgctccaccctcaacaaacccacgcaagcgtccgcgcatatcgatccagaatgacgttattggcgatataggtgaggcgcgggggtatgcgcggccgatggggctggcggccgtgttggatcttgctctttccccttccccttcatcggatatctggcaaaactttgccatggaatatagggcaaaatttgtagtttggcgtcttgcttttcaagtttttacagacaagtctctggcaattaactgtgatactggtgtggacgatcagcttaatctcatgataacaaagtaccaccgcaaaggggggaaaatagctgttgggaaacccgaatataaaacaatcatagaagcaaacctgggtatttcctgtctgtatgatgaatttgtgatggaggtgatgtggggtttgacgaatcttatgcatagtttagtccctgaagaaaactctcagctgagtaaggaggaccgtctccagatgagtcaaggattaaaaatgctcctgaatcgttatggatttgatgtcaaaccagggatggttaacaaacgtattcttgaggcagcatctgacttgtatgattgtgatgattgtgagaagaaaaataattggtccttgcgtcgtgctggtcggaaccttatggatatctctagcattaacagtgaggattggggcctgttgaaactttctacagctctgatgatagtatgttaccctgaagaaaagatcatagcatgcttgctgaaacattctacagatttgctgatagcatcttaccctagaagggaagttatagaatacagtcaaaagatgttttcaccagatgtgctatctaagctggtaactgatgcaccaaaatatggcatttggataaaaaagcgcacttccaagagaatccatgaagaaatggtatttttgtatcaacaaaggattgaaaagcgaaagctcttggccaccttgataggggaggctacaaaggtttatgaagctgaacaagcggaattgctgacaaactag

SEQ ID NO: 79255 - DNA, 602 bp, Oryza sativa
  Clone ID: PAT_MRT4530_78983C.1
tgctcgcgcacgccgccgtgggctgcttcgtgacgcactgcggctggaactccaccgttcgaaggcgctccagcgccggcgtgccgatggtggcggtgccgcagtggtcggaccagacgacgaacgccaggtacatcgaggacgtgtggcgcgtccggcgtgcgggttcgcggcggcggcggcggcgacggcggcgcggtggtgaggagggaggaggtggagaggaaggtgagggaggtgatggagggggagaggagcaaggagttcatgaggaacgcggcgagctggagctccaaggcgaggagcgccatgggcgaaggtggcagctcggacaggaacatcgccgagttcctgtccaagtatcggttgccgccgcatgggaccaaatgatttttcggcgcatatgttatgctttgctttctcattgtcgtttgtggtcaattaattaattgatggatcgcctcgccatgaatttggaacagtttcatagtttatgcatcgctatggttgttgagttggatgatgttgatttagggattgtctaaatttcaggtgactgaagtttttagttctcaaaaaaaaaaaaaaaaaaaaaaaaaaaa

SEQ ID NO: 79256 - DNA, 661 bp, Oryza sativa
  Clone ID: PAT_MRT4530_78984C.1
atgacgacccaaccaccaagtcgtcgccaagtctcctcctcagcaccaagcactcgccaagtcccctactccgctcccggcactcccatccccctacccctcctcgtcggcgcctctcgcgaagcaccaccgctcgtcggcgtttctcctcattacgaggcgtattccgcggccgccgtcctcgcctgcagggacggctttgtatctttcaagaagcgccgccttaacgatgggaacggcgactgctccaatggaaccgacgagccaagcacttgtagtaatctaaatgacgttatatacgatgatgatgttggaataaacagaaagggtgtgatgtaggctgttggcgatggtaagatctgaaaggataatgcagggaatgatgatcatgataggaaacataatcaagatatagaagatctcatcctaaatctaaaaggattaaaaatggctgtagtcattgagataggtcttgttatatgtacatttgcagtctgcttcgctcggcgccgtaccagaacacggaggagacattatattttgaaacgatagcctaaacttctctgtaactgtgattctgtgaagtgcactgcaatgattttaagttttaaacagctaataacatagatataaaaattttattcataaaaaaaaaaaaaaa

SEQ ID NO: 79257 - DNA, 441 bp, Oryza sativa
  Clone ID: PAT_MRT4530_78985C.1
ttcggcacgagggagaactagtttcgagtttttttttttttttttttctatcgcattgcagcagtttcaaccaaactttcaaattcagcctaaggtttgaaccggaccaagagagatatctcttactaaatttgtgtgagagttgtgtcatgtgtgaattcttggcgcatgaggatgttttcttcactccgtgctgatgcaggtggattctcagtgactgagctgtcatattaattccaaccatctaatcctctgaataggcagtaagtacggcattttttgcaccatatatacacacgaccaagtagcagtacgcagctaggaccaaacagccattcagtgctgtttttacagcctcaccagtcatgttgccagtgaccactggaatgtaatccaatccatccaggttgggaccgtggaatgtaaattttctagagcccg

SEQ ID NO: 79258 - DNA, 1509 bp, Oryza sativa
  Clone ID: PAT_MRT4530_78986C.1
gctgttggctcttcttgctttcttcttcttcttcttcttgcagacgacgagacgagatagagattatttgagactctctcacacacacacacaaagagaaagagagcagagagagagagagagagtgtgtgtgtgtcgtcaatggcgacgacgtccagatagcatagctagggtttcgtttgcaggtgggccgggggagatggccgccgattcgagcacggccatgaccttgtaccagggcgtccccttccaccagcagcagaaccagattgagatagagtccatgctctccttccaatcctcctccatccccccacctcccacacccgccaccatgcttcttgccccatcctcctcttcctccgacttccgcaactacaagttcgtcacctgttcccccgccgattggccccaccacgacctcgctatcttgaacgacggcctcctcagatatgctcatgaacccaatattatcaagtacaccaagattgccgcaatgctgcctactaggactatcagggatgtcgctttaagatgccgatggactaaagacaacatggtttcgtctaccttggcagctaatattcaaatccaaaatccaaacaatatgcctagcgattacagtgctcaagtagcacctccaggtcctgggttcaactccccacacaagcgaattacaggcctagttaaaaaaagtcactcgctggcccctcgtaaaaacgtgttaagaatcgacttatggagggtgggccctcgtgtagggggtaggtgcctcaaagcacagacggtggagaatatggatctctttctgcggacgaataataatatcagaacagttcttaaaagaatgagtgagacgcctggtatcatgggtcagatgcctcccttgccagtacctgtaaatgaaggcagcctgaatacacttctccaaatggacagaatggttggtgcctatggtataccatgaactcccatatggacgcgggactgatgtaaaagatcctgtttggaaagggggagagatgtattgcatagcatcctatcggggaagttgacagagaggagcctttgcctgatttgtactaatggcatgaagacaaccaaaggatgctagagcttagactaaccaaggtgccacgggataagtaatgttttttgaggattttctttttctttttcctttgaattgttttagctgccgtgtgtctatccttgattattggggaagaacatgccatcagtcaggcgggtatgcgggtactttcttggttgctgcaagaaagtggagtacatgctgccgctgcactttattcaatagaaagggaatgtctgtaaatattgggtcaggtgtggtggtggttggtattctaagaccgctgttaatgtaaaagaacgtctgttctctcggtacaactgattcttcatccaagggaaaaacataccactaactgatcatattatatattatggctaaaaaaaaaaacaaaaaaaaaaaaaaaaacctcgtgc

SEQ ID NO: 79259 - DNA, 156 bp, Oryza sativa
  Clone ID: PAT_MRT4530_78987C.1
atgggcccaaaatggagctccattgagaagcgagataattggtgcactcatgccccgccctctgagaccgcttgcaccggcagggcgtgtaatctcaccgtagcacccgacgagaacgctctacgtgtttgcccaccatcctgcgagaccgctact

SEQ ID NO: 79260 - DNA, 368 bp, Oryza sativa
  Clone ID: PAT_MRT4530_78988C.1
gtggggtttttaattccttgggcggttccttcttcttttttttaaaaaaaaaacgtatggagaaaggccctcatatatcaactgcacccgttggttgtgcacttttcgctaatccttggcctcaccataagcttttatcgaatcgcccttgaccagctcattcattagccccttttttagccccaccacattggcaaaaaccacattaccaacatggttcacgatcgcatccagggccaaaaactcagaagctagcttggctactgggagggctacgccttagacccacttggcggcaacgctcactctagtaatggcggcgctccttgaggaggggcttggtctgtgcggaggggtcctctaagagg

SEQ ID NO: 79261 - DNA, 308 bp, Oryza sativa
  Clone ID: PAT_MRT4530_78989C.1
agtacttaattatatatgaggatttgggaattaatgacataggtatttatatatataagggttgaatataataacattgaaggaattattatggaagaaggaacgggtgtaggagccgctaaatatgaggagtactgcaccaaggaaccgcaaaatgtgtttggggggcagtttaaaaggatgaaacagaatgacaccaatgaattgctgcagtaaaaaaaaattgtgcttgaaaatttcgaacccaaatcgtggttggagtccaaaatttaaaaagaggggggggacaaagggataggcgcccacct

SEQ ID NO: 79262 - DNA, 2459 bp, Oryza sativa
  Clone ID: PAT_MRT4530_7898C.1
gtttatattgcatatattggtcatgcacatttggcactgccacaccacttgggctaatgcagcggttgttttcttctacctcatcatcattcttatatatctaagttaccatgtcgatctgttccaaaatataagggattttgacgatatatctgatatataattaatagattctctcgctatgtgtatatatatagctaggtagctgagcaagcagctggtcatcacggatcaagaagaagattagcttagctagctaaaaagtaagtagccgtgcgaagtcgccggcggtgatcagccggcgatgacgacgtacagggtgtgctgcttcctgcggcggttcagggcggcgtcgaacgagccgtcggaggagctcggcgacgtgttccaggcgtacgccgacggcggcggcggcgtgatgggggaggaggcgctgaggcggttcctccgggaggtgcagggggaggccgccggcggcggcgacgacgagctggaggcgacggcgagggaggtgatggccttcgcggcggagcagaggctgctcaggaagggcggcgccgctgccgccggcggcgggctcaccgtcgagggcttccaccgctggctgtgcagcgacgccaacgctgcactggatcctcagaaacgggtatatcaagacatgggattgcctctgtcacactacttcatctacacggggcacaactcatacctgacggggaaccagctgagcagcgggtgcagcgaggtgcccatcgtgaaggccctccacgacggcgtccgtgtcatcgagctcgacctctggcccaacgctgccaaggacgccgtcgaggtcctccacggcaggacgctgacatcgccagtgggtctgatgaaatgccttgaggccatcagggagtacgcgttcgtcgcctccccttaccccgtcatcctcaccctcgaagatcacctcactcccgacctccaatccaaagtcgccaagatgatcaaggagacgttcggtgacatgctctacgtctctgaaactgagaacatggcggaattcccttcgccggacgagctcaaggggaagatcatcgtgtcgacgaagccgcccaaggagtacctccagaccaagaacgacgccgacgccgacgaggccggcgtctggggcgaggagatcaccgacgacaaggtggcggcgacggcgatgacgacagaagagaaatgcgcggcggcggaggaagcagtcgccgccgccgccgtcgacgaggagatgcaggaggccgagacggacaagaagacgcagcacggggtggacaacgagtacaggcgcctcatcgccatccctctgacaagaagaaagcacgacatggatcaggacctcaaggtcgatcccgacatggtgacgcgcctcagcctcggggagaaggcctacgagaaggccattgtcacccatggagctcacattatcaggtttacgcagaggaaattgctgaggatattccctcggtcgacgcgcattacgtcttcgaattataatcctttgatgggttggaggtatggagttcagatggttgcagcaaacatgcagggccatggaagaaagctgtggctgactcaggggatgttccgagcaaacggcggttgcggttacgtcaaaaagcctgatattctgatgaacaacgatccagataaactgtttgatcctacatccaaactaccagtaaagacaagactaaaggtgacggtgtacatgggagacggatggcgattcgacttccgcaagacacatttcgacaaatgctcacccccagacttctatgcaagggtgggtatagccggagtagaagcagacacgaggatggagcagacgaaggtgaagatggacacgtggattccggcatgggatcacgagttcgagttcccgttgagcgtgccggagctggcgctgctccgggtggaggtgcacgagtccgacaaccaccagaaggacgacttcggcgggcagacctgcctgccggtgtgggagctccggcgaggcatccgctccgtcaggctctgcgaccaccgcggcgagcccctccgctccgtcaagctcctcatgcgcttcgacttcacctgactactccatcttcttcttcatcatcgtcatcgtcttagtagtagtagttccatgtatgatatcatgagggatgaagcattgatcgtactttctccgtcccgaaatatagcaatgtaggattagatggaaacatcttaatactacgaatctggatatgtcctatctggttctggtttgctatgttttaggacgaatatagtacataaaattttagaagttttgttttaaaaaagaataaattttgtgcgaaacggaaggtgtgattgtacattttgtacgtacattgtttgttgttgattaataaacgtgttaataaaagagggaaggattcttttaaaaaaaaaaaaaaaaaaaaaaa

SEQ ID NO: 79263 - DNA, 3171 bp, Oryza sativa
  Clone ID: PAT_MRT4530_78990C.1
atggctgaaattgccgttctttttgtcataaaaaagataggaatagctgtggcaggagatacactaaagttagctatacccctctttgcaaaaaagaccgagttaaagaaagttgagctagtaacagcacttccagttaacatgagacaaataaaaaaggaacttgaaattatcaatgcatttcttaaagaacttggcatgaatgggtacaaaggtgaagttgtagaaacttggataaggcaagttcggaggttggcacatgatatggaagatgttgtggatgaatttatgtatgttgttggcaaaaacaaacacaagaaatcatgggcttgtgtgaagaaaattatcaagaaacctaaacctttattttcacttgatgaaatcgccactaaagcagatatgataaacacagagcttgtggagctttccaaaagactagatcgttggacccgaccattatcgagtgggatttatgttcctccaacaaattataatagcgagcaacagttgtatttgcctggatatgattattcaatcaatgacaatgagcttgtagggattgataaaaataggcaaaccttgattgaatcattgcgtttggaagattgttctcttcggatcattgctgtctggggtatgggtggccttgggaaaagcactcttgtcaatgatatctacaaaaatgaagcaatagtatccaattttaattgccatgcatggctatgtatctctcaatcatctaaaatgcatgatatttggcaaaacatgctaaaagaactttgtggagaagacaaccgaggggttgatgctgaaaatatgaacaatagagaactaagactggaactggcaaaaattttgcgtcagaagcggtacttgatcatactagatgatgtctggttggctgcagatcttttaaagattcgggaggttcttgttgataatggcctaggaagcagagtaataattacaacaagaattgaggaagtagcttcaatagctgaggatggttgtaagatccgtttagagcctctaaataaccatgatgcatggcttctattctgcaggaaggcattccccaaaactgaaaatcatatgtgccctccagaactacatcagtgtggtatggacatagtgaacaaatgtggtggtttgcctttagctcttgttacaatagggagtttactgtccctcaaaccaaggaataaaaaagaatggaggcttttctacaaccaacttatttcagaggtgcacaataatgaaaacttaaaccgggtggagaaaattctaaatctaagctacaaacacttgccaaactatttgaagaattgctttttatactgtgctatgttcccagaagactacattatccagagaaagagattaattagattgtggatagctgaaggatttattgaacagaaaggaacatgcagcttagaagatgttgctgaaggttacctaacagagcttgtccgacgaagcatgattcaagtcgtagcaaggaatagttttaataggattcagtgtcttcgaatgcatgatattttgcgagaactagccattttccaatcaaagaaagaaagtttctctacagtttatgatgacactcatggggtggtacaagtgggatcagactctcgccgcgtctctgtgctccaatgcaacagtgaaattcgatcaactgtagatccatccaggctacgtaccttcctagcatttgacactagcatggcattatcttcagcttcttatttcattttctcagaatccaagtaccttgctgtgttagaattatccggcttgcctatcgagaccattccatattcagttggggagctatttaaccttcggtatttatgcctcaatgataccaatgtgaaagaattcccaaaatctattacaaagcttctcaatttacaaacattgagtcttgaacgtacacaattgctgaattttccgagagggttttcaaatctgaaaaaattgcgtcatttacttgtttggaaattagttgatgctacatacaaaagtctgaataattgggaatctttggagccatttgagggcttgtggaacttgaaggaattgcaatctttatgtgaagttcgtgcaactagagactttgtttccaaattaggaaatctatcccagctgaggagcctttgcattacttatgtaaggagtagccactgtgcacaactgtgcaactctttatcaaagatgcaacatctcacaagattacatataagagcaatgaatgaagatgaagtgctcctgctggatgatttgatgttgccgaaccctcttgagaagctcgatttgctaggacaattgtcaaaaggaactttagaatctccttttttcactactcatggaaatgaacttctgcaattggaactatcgaggtgtcagcttacagtgaatcttgtagcatggctctctaagttgtcaaatttaacagagttacgtcttacaagggtgtacactggacaacagctaagctttcatgcaaattgcttcccaaatttgaagaaagcactcctgtgggatttgcagcaagtcaatcaaatatatatacaggagggagctttgtccagcctgcagtatctccacattgatagcctcatggaacttcgggatgtgcccaccggcattgaatttctaagatcagtcaaagaggcatattttactatgatgcattctgatttcgtaaggaaccttcgaacaggaaaggggtgtctgcggaacctgctaacctgcctggagaatccagcaccaacccacaatggcgcatgttagatacattgcttagatttcgcatgtcttccacaatgttaaccagttacaaacataacctgtttataactgaaaattactcacctgcaagtagttttgtgcgcaatcatgaattcactttgtaagtaagcataacaaatactccctccgtcccaaaatataaacatttttagctatgaatctggacaactgtgtgtccagattcgtagccaaaagttgttatatttcgggacggaggtagtacatttttattgacacgaagtgtacagataccagagttttgcatccaagatcgtgtgcatcttcatagtatgcttcatttttgtacataaattgcaggggtgtccacggatctcactggacttgctaatctgc

SEQ ID NO: 79264 - DNA, 255 bp, Oryza sativa
  Clone ID: PAT_MRT4530_78991C.1
atggattacatctcagcaagaacgatcaagcttatcatggtccaattacgcgtagtcgtgctaggaatatacaacaagaggtttacgcccgaggacatcatcactacgccaaggaagatgggttatgttgagaacgacaagggttacatcgaggaggaatcagcacatgcccaaccaacagctgtttacgccaacaagaagatggtttatgctgcaaaggctaaacttctaaggcttgtgcgacccagccagtaa

SEQ ID NO: 79265 - DNA, 234 bp, Oryza sativa
  unsure (1)..(234): unsure at all n locations
  Clone ID: PAT_MRT4530_78992C.1
cgcctaccgncctggggtgccgctcgcctgagatacccccggtgaanaanagtgagaantagcttgtcggtcancataantaccgttagaaantanttttttcgtttttctctctttttttttcttttttttactgcatnattgtagnactancgtgtaaaanaactttaggagactttgagactgagcttttnctgaagaaaaaataaancagnanaaaaaaaaaaaaaaaaa

SEQ ID NO: 79266 - DNA, 707 bp, Oryza sativa
  Clone ID: PAT_MRT4530_78993C.1
tcaaacaacgcccaccgtggggctcgaacccacgaccacaaggttaagagccttgcgctctaccgactgagctagacgggctttgctggtgccctcaacacgaagaaatcggcaacgcaacctcaacgcggcggcggaggacggcggcgggcgcgtcggacgacgccgcggaggtcggcggcggcctcggcagcggtcgacggcggaggagccgtcagcgcggcgacggcgcggagatcggcggcgggcgcgtcgggcgacggcacggagttcggcgaagagcgcgtccggcgacgccgcggaggtcggcagcgggacggcggtggtctcggcaggtgcggcggcggcctcggcaggttgtctcggcggaggggcggaggtcggcggcggcctcagcaggttgtctcggcggaggggcaaggacggcggcggcctcggccggctgtctcggcgacgccgggaaggtcggcggcaggagacggcggtggtcggcaccggcgctggatctgggagcgctgagaaaaagcgatgcgggaggagaggaaaaatcgcggatcggacgggagggagagagaatagaggggaaagcggtggggcccacgattggccaggcctttttggctggctatatttggccagtgcaaggggaactttggccagtaggatggcttggccagccggttagccagtctattgaagcacgaatt

SEQ ID NO: 79267 - DNA, 474 bp, Oryza sativa
  Clone ID: PAT_MRT4530_78994C.1
atggctaccttctcctcggccgtcttggaggccgagcagagtgaggccagagcgaaggaggttgggcggcggcggagcggcgtgagcggaggaggtcgggcgaggcgaggcgggagagggggaagcctgcgacagcaaagtgacggcggtccagcccaggcagaaaaaaactggtccccgaatcgacagcatgctaggggagcagctgcggtgtggaatccccaaatccacgaaggagagcatttaggattccacatatctggtattatggttgagagttacgagttagattcaaattcggtccacttttcagggagtcaaattgaacttattcctatggccaacgtccagcccatatacgatgatctggaactggactacggcctacttttggcccatgatatatgggctggaacaggaatatgcacatacagaaactcgggtatcttacatggaattggtgaatttggttaa

SEQ ID NO: 79268 - DNA, 596 bp, Oryza sativa
  unsure (1)..(596): unsure at all n locations
  Clone ID: PAT_MRT4530_78995C.1
cgggtcgccccgcgtccgctctgttctcgccgcgccgtcctctgtgtgtgcgcttgcgctgcgcnctggcggcctcngccgccctcgccttnntcccacccctagccctagccgccgccgccgccgcggcccccatggccccgacggtgccggccgncgtctccttcccggtctnccatgccgcctgcgcgccgctcgcgtcgctgcgccgcgcggtctccgtcttggtcgcggcgccgccggccgtcggggccggtctgccgtcgtttgtcttggtctcttgcgtcttctgcttggtgttggtctccctggccggcctcttggtgtttgttgtgtggggtgggaggtacctgttcccgctgctttccgtggcgtttgtgggcgtctggctgatcggggtgtttgggtggggctgttgggggcctgctcaggccctggtcctgtggggtggactggctggttcgaagtctggcgtggttgtttgtattggtcttcggtttggctctttcgtgttgggtgantctctttctgttggctgtacttgggagtgtggaaccttgggggttgtgggggggactgggggtggggtgggccct

SEQ ID NO: 79269 - DNA, 220 bp, Oryza sativa
  Clone ID: PAT_MRT4530_78996C.1
cgagtgggcagccaagtccgagatgtcatgcggtggagggacggacgcggtcagggcgaccggcggctggctgcggctgcctctgcctctgctcgcgtcgccactgccgccgggatcctctgcggctgcgccaccgcccacgggaaccaccaggccccgctcctccagttttgcttctctcctttgatgacttcttgttgccgactgctatacgtatacg

SEQ ID NO: 79270 - DNA, 405 bp, Oryza sativa
  Clone ID: PAT_MRT4530_78997C.1
atggcggctccggtggcctccgcctccgcctcctgcttcgcgccgcgcagcgaccatggcggcggctggtcctacggcgggacgagaggggtgccgtcgccgcggcgtggcgcggcgaggcggcttcggcgcgtcctggcgcgaagcggcggcggcggaggaggaggaggaggaggagaggggagggggatactggacccgctcgctacgcctttgcagattctgggactcgacgcctcggcctcctacaccgccgcgcagctcaaggcggccttccgcgcccgggtagtgtaccgctccctcccccccttcgccttgtttgctgcttattatgtgcaaggtgctcaattcttagtaactctcaagggtgccttatcagcttttgttgttgttgagccggagtga

SEQ ID NO: 79271 - DNA, 315 bp, Oryza sativa
  Clone ID: PAT_MRT4530_78998C.1
atggcgccctccctctgccgacgccgccccttcggcatccgccgcgctggtgcccaacctccgctggcgccgcccctccgtcccactgccgaggccactgtcatctgcaaccgaggtcgtcaggggcgtcatcatcaaggtcgtcgagggcaccgtcgtcgatgtcaaggtcgtcgggcgccatcgattgccgcctcccacctcgtccgccgtcgtcgcctcgtcaccgtaaagccagcggcggcctctagatccggcagcctccccgcgtcgccgcaccaccgcgcgccatgcgtcagccgccgtcagcaatag

SEQ ID NO: 79272 - DNA, 453 bp, Oryza sativa
  Clone ID: PAT_MRT4530_78999C.1
atgcggattggatggcttattgtcaaatttctcttgaagttccctagcaaccacaacaggaggctacagcttggatctcctccatttgccacaccttcttcctttaccgagaagaaaggtcttgattgcctcattattgctttggagttcagcgctgtatttcttggcctcatccagctctggctccgagatgcttattctcgaactgctgccagcaacaccaatgaccaggcgacaccggtgattagcactgatgcatctgtgatcgtgggggctgaggaatggaaggccggagcaatggctagcccgactgcaggcatccgactaacagactggtcagaagcaacaggggaagtcctacaaagacaagagaaagctctcagcaaaagaagacttcccgagaacaaggaaaaattaagtctacatatatacttacgtggcttacggctttga

SEQ ID NO: 79273 - DNA, 945 bp, Oryza sativa
  Clone ID: PAT_MRT4530_7899C.1
atgatggaccgcggaggggtttggatggaggggaaacgatgccgaggacggccttgccgctgcgatgccggaggtggtggaggtgtggccgaccggtgcacgggcgaggagggacgggcggccgaacaactccggcgaggcggctggagaggttcgcggcgatgtgcggcggcttccgggcgaaaccgaggggtggacgaggtggagggctacgtcaccgtgccgagggaggggacggcagcgccggctgacgcatgggcatggcgaaaagggcagccgggggagatgccgccgaggaggaaggagaagccggcgcgggcgacggtgttccggcgaagttcgggcgaggaggaggtgatgccggggatgagagcggcgtcgtggagccgaggaaggtggtggcgacgtcgaccggcgctcaggcagggagatagaggcggctggaggcggccggcgcggaggaaatggaagggcgacggcggaaacgtagctccgggggtcacctcgcgagacggagggcaggccggggtggaggaggtggcggcgacgctggaagaggcgacggcgcggccggccgcacgacggcaacgacggggcaacgacagttcgacggatttgatggtcgtcctcgtccaccaccaagcctactggtccaatctacccaacgaggatgccatggtgttgcaagatggatctacaaacacgaagcatgccaaaaccgatctaatcggatgcataggagacggctgcagccacgccgatgccttcctgccgtcctgcgtcgtgctgatggacaccaacgccgcccgcgactgcgacctccgcctcctccgctccgtctcggagtcagtcgaagagatcaatctcggcgagttttttccttttaatctccgacttcgccaggatccagatccagatatgcataaaagggattcatggctttaa

SEQ ID NO: 79274 - DNA, 1910 bp, Oryza sativa
  Clone ID: PAT_MRT4530_789C.1
caatgcacagctgcactggaactgctctttctttctcaaccaaaagataaaaggtttggtagccactgccagatggcccagatcacattagcaaatatttatctttacatcaacacgaggcacagccgacagaattcaggccagcgcacatgctgacgttaattagcatttcactagctccacacccaaaacacactaatggaaattctgctactacatccagatacatgatgatggtcaagcatttcataaaagaaaaaggaaacttgagctcaagaatcactctgatgatacccccaacatctttgctatcaatatccagataatgagggtgtctactgtttgctctatgaaaactgagctgcatcagaaaaaccaagctctccaagctagcagaaagcttgcagaaggcaaagaaccaaggccataattctctgcattctcagtcaaacagagtaattgatagtcaacatagcttgtataagattctacttgttaggcttcaaaagtcaccgtatcgtcgaatcagttaagccatggattcttcaagcaagctgcagctgtgggtctgttttcaggagtaaaatctagaattggacgaagaaaatcagctaaaccttgggcatcaggttcagtgaaattgtatctctgaacaagtagacgttctagaggccagaacttcagccttctgatcctctttaaatctccatgccgatcaaagtaatcctttgaacgagtacctgagctagcaatcttcttaggcatctttccaagggtttccatcatcagagccaagtgatcctcatcttcactacagccctggcaagtcttgggagcaaacagcacttcaccggttgcaagctcaaaggccatgcaagcaaatgaccacatatcagcagaatatgagtacccagcaccaatgatcacctcaggagctctgtactgccttgtctgaatttcaccagcaagctgctgactaccccagcaggcattcccaaaatcaacaatcttgcacttcaagctaataccatccaggcttctctccttctccatctctgctgcaactccaccaagagactccctcctcagtgaaatcttggcgacagcgcgtcttgcccgcatcttaagcatcttctcactgaaactaattactgatccgctgtactggttgctcacagttctctcaagaatcggtgtgaacccagagcgcactgggtccttcgatgggtttattgtcgatacaagaagaacattctccggcttcaaatccgtgtggatgatgccgagctctctgtgcaagtaatcaagaccgaccaacactgatcggcagatttccttgactccgctcagaccaatgcccttattccggttgtaccgtatcaaccttagcaagctatcaccgaggaactcggtgaccaggcaaacgtgatgtccgtttggaccagcatgcttgaaatggtccagcaattgcacaacattcttggaatttgtcgggtcacctttggctatcgccgacagcaactcaatctcgtggagtgccgcctgtgcgtaatccctcgcgcttttctggatcttgagcgcgacaaatctgttgaggagggtgtcgtacgcgagccagacggtggagaagttcccccagccgagcttccgctgcgcgacgaacctcccgccggcgaagcggtcgccgggcctggcggcgtggtaccctcccttccggtacccctccatcccctcgtcctcgtcctccccctccgaccccgacgagcagtagccgttccccaagaacgccatcgatcaacccaaccaaccaaccaaccaatcaatcaatcaaccgatccgccgccgtccggccgccgcaatctcctcctcctcctcctccggattctatctcactcgaaccccttctccgc

SEQ ID NO: 79275 - DNA, 969 bp, Oryza sativa
  Clone ID: PAT_MRT4530_78C.1
atgtctcaaacccaatcaaactccaaccaaactcacctacctacccccaacccatccagagctagagctatgtgcggcggcgcgatcctcgccgacctcataccgtcgccgcgctccggcggccacaccaaaaagaacaagcggcggcggatcagcgacgacgaggacttcgaggccgccttcgaggagttcgacgccggcgacgacgactccgactccgactccgagtccgaggaggtagacgagtacgacgtcgtcgtcgacgacgacgacagcgaggacggcgtggtggttcttccgccgccgccgccgccgccgccggtgattccacatgagcgccatggcgcgaggcggttccgcggcgtgaggaagcggccgtgggggaagtgggcggcggagatccgcgaccccgtgcgcggcgtgcgcgtctggctcggtaccttccccaccgccgagtccgccgcgcgcgcctacgacgccgccgcccgccgcctccgcggcgccaaggccaagcccaacttcccctccgcgccgccgccctcggctgctgctcaccgccgcaagaagcgccgcgcccacgccgccacgcgctcgccgtcgtctccgcccgccaccagcgaggtcacggcggcgtccgcgtccgcgtccagcgatgtccccgcgccggcgttcgcttccttcgtcggcgagcccgggcacggcggcgccaagtcgatgccgacgacgagccacacctcgcagccagccccgccggcgacggtggcgtccgagaacgtcgacgacccggaggtgttcgacccgtacgacgtccacggcggcctcgcctcctacttcgccggcggcgcgtacgagtccctggagagcctgttcgcgcacggcggcgacagcgccgccgtcgaccaagcggcgagcgaccactggccggcggcgctatggagcttcgcagacgacggctcgttctgcttctga

SEQ ID NO: 79276 - DNA, 456 bp, Oryza sativa
  Clone ID: PAT_MRT4530_79000C.1
atggccatcatcgtagccgccaccgcggcctctgaactcgaggagttcagatcttgtgctcacgagaggtggcagcgactgcatccaaaggggaagggggagaagaatctgtcatgtagctatgatttggctatcggtggttggatccgcccaaaaggcggttcggggtgttcagatcccaaggccggcccagcactagctgcggaggcagagaatgggtctatgatgctgtggagttgtgcccctccaaagctcgtcactatccacgccagaggagaggtcaacagctgcacaaccacggacgcttccatcaccggtccccatggtggatggccaaatctagctaccatgaactctgggaaaagcttgatcccacaatggtcggcccgagagtggagatggaggtggcagccggcactccgtggcaaaaaaatgcagcctctagtgcgtggttaa

SEQ ID NO: 79277 - DNA, 375 bp, Oryza sativa
  Clone ID: PAT_MRT4530_79001C.1
atggggtactcaccagcgcgcgaggagaagcaagctccggcggcgggattgatcggggaaacggcggacggggtagcgcacaagcttgcgaacccggcgccggcgacggcccggtgcggcgacggctctagcggtggcggagtgcggccggagctcgcggcgaacggcggatggcggggtgaccggcgcgggagcaatggagagctcgggagggcttggctgaaaaaggaaaagagagaggaaggagaagagagaaaaagccgggattcaaatttgaatcccggccatctcgcgggcccgggggtgagcgggagtggggcgtgggcccgggaaagccggggcgcgcgggggagtggacgacgtggcccggggtag

SEQ ID NO: 79278 - DNA, 471 bp, Oryza sativa
  Clone ID: PAT_MRT4530_79002C.1
acaacagaccattaaaaaattatcagcagccaggcgggcgttaatttgaggaataaaaatatcccccccaatggacaaaaggaaaaaacaaaagaacaaacaatctagggattcaaaagctaaaaaacttttggggcgattataaaggggcgaccccataaggggaaacaaagggcgggggggagggggagtcaactgggtcggaggggcccatgggggaggggctcaaatgctcatgctgaggggaaggggggggggtcgccgttggggcctgctcatggggaggggggaagaagggggttgaaaccgggctgctctggctctcctccttttcctcctctacctgccgaagaagaagttgctgccccttgtcaattcgcacctttaccttttcctcccgggggtgctcctgctcctgggggtgggggggctcaaacatggggaaaagggggggcaggtaagcgttctgca

SEQ ID NO: 79279 - DNA, 375 bp, Oryza sativa
  Clone ID: PAT_MRT4530_79003C.1
atggagttcttcccgtcaagatccaatcgccaagaaggtggaactccggggaggtggcaacgcacgttggacggggcaggagggactctggaggcggaactcctggatgtggggagcaccgacgcgccggcttggccaagcggtggtggaggagcgcacgagacgggggagcagtggagcgtgcagtgggagggggcggcgctggcgacgggcgcggggcgagggggcgacgtcggcaacagacgcggggtgttggggcggcgccggcgacgcgtgcgctgcgagggagtagtggcggtggcgctcgatttggcggtgctaggtcacgctctcctctccatatcggtatcacattccgcccgtctaggagcgtaa

SEQ ID NO: 79280 - DNA, 375 bp, Oryza sativa
  Clone ID: PAT_MRT4530_79004C.1
atgtcgacgtcctctgccacctccaccgcgaccggcacctctatagcgccggcctccaccaacgccatcgcgactatcttcatcaacccatacacgaccatctccgtcaagactcatgtcccgatctcccttgagcttcgcaaccccaacttcaacaagtggaagaccttattccgctcgatgtgtggcaagttcggtctcctcgaccacctcgactccgcacctcctgcagatcctgacacctcatgggagcaagctgatttctgcatccgcagctggctgtttggctcggtcgccgacgacaccctcgacctcgccatggagctggatcagacggctcgtgccctctggctcgccatcgccgacctctttcaa

SEQ ID NO: 79281 - DNA, 156 bp, Oryza sativa
  unsure (1)..(156): unsure at all n locations
  Clone ID: PAT_MRT4530_79005C.1
atgggtggttcatacaggcgcacagtttttcatccccatattatgcacccnccggtactaaagcagcaccatggtaatatgtttgctgcaaatggtattgggatcttatatgctgagaaagcccaatgggatattgccaaggagttatttacacag

SEQ ID NO: 79282 - DNA, 684 bp, Oryza sativa
  Clone ID: PAT_MRT4530_79006C.1
atgggatggaacggccccgtccccacccctcgacttctccacccagctccggccccgagtggagttgaggggccaaatcaacactcggccttggcccctccggcctccggggtcccacagtcgccgggaacaaaggcaggaggttcacatgcacctccctcatgccgcccgcgtgctgcccacatgccgccacgtggagacctgagggaggctcgggtgtgccatccgctcgcctatcactggctcaccgcgcctgtgcgtcaccctcgtgccgcttgcgtatcgttgcgtggagaccagagggagacaaagagaggagggctggaggggagagggcgagatggagagggtacgggagggacgcactggcgcactggcgtagtggcgacggctgaggagcggcagcgcaagatgggaggcggtgggcgacgggaggtggcggcgggtggagacggtgcagcccagcggcggcagcggcggggagaggggaggcagtggcggcatacggcgacggcaagcggcgcctcccctccactagatctggcgggaggagagacggtgggctcctgcggcccctgcgacgaagtccccacgggcggagaggcggtgggctcccgaagctggcatcgagctcccccacgacaacagcggcaggctccccatggcggcggtgcttttgagtga

SEQ ID NO: 79283 - DNA, 467 bp, Oryza sativa
  Clone ID: PAT_MRT4530_79007C.1
ctcttgcggccaagtacacgatcacgctcgatgcaatcccgctcttcgagaagcccgtgctggctgtgctccgtcaccgccagcagcatctcgccgccaccgtcgagctaccgctccacttgatgaggcgaggtggatggctggaaatggtgtgcggagtaggagtgggagtagcttgtagctacgtgtcgggaatagtagtaagtgacaatggcgagcggaggagacagtccgagaccgaaaagtgtactccggtatatggctcgtcctcctccgctacggggcgtggtggcgccaagacgaacgactcgagccacacgtggcactcccgatggagatcaaaatgtgcggccgcgcggttggcccggaccctgtcctacgtgtcacggaccagcttccccggcccacatgtcagcttgccgggccatggtccgaatcaaactcaaacccgaatccgaatcccataa

SEQ ID NO: 79284 - DNA, 292 bp, Oryza sativa
  unsure (1)..(292): unsure at all n locations
  Clone ID: PAT_MRT4530_79008C.1
tcccccgcgtccgccctctctcatccgcgcgggggggagaaaggacgaacgggcttcgcgtccctgccgttctgccttgcgngggggtggggtctctggtcttggcttggttgggatgtttttctgtttgacccctggtggggggcngactcccgttttggcctggctgtgttgttgttttggcgtgtggttgcgcgggcgatcggaggcgtggtgctttcagccgctctggtgggggctctccctgctctgcttgtccttggctccctcctgcgggcttgccgcgctgccg

SEQ ID NO: 79285 - DNA, 694 bp, Oryza sativa
  unsure (1)..(694): unsure at all n locations
  Clone ID: PAT_MRT4530_79009C.1
ctccaagaacgccgcccgcggcaagagcaagagcaagaggcagcagaggagcttcgccgacgtcgacgacttcgaggccgccttcgggcagttcgccgcgcccacgccgcggcaacacgagagccaccgccgtgccaccgccggcgacagcacccgccgccgccccgccgcgcggactgaagcgagaattctcgccgcctgctgagaccgcgctacctttcttcaccaacggcttcgtcgacctgacgaccgccgcggcgccgccaccggccatgatgatgacgagctccttcaccgacagcgtcgccacgtcggagtccggcgggagccccgccaagaaggcgaggtccgacgacgtcgactcgtccgagggcagcgtcggcggcggcagcgacacgctgggtttcaccgacgagctggagttcgacccgttcatgctgttccagctcccctactccgacggctacgagtccatcgacagcctcttcgccgccggcgacgccaacagcgcgaacaccgacatgaacgccggcgtcaacctgtggagcttcgacgacttcccaatcgacggcgcccttttctgatgtactcctccattgatgcagtttgtgcactcaattggttatcacgtcgtcgntgatgaatgttaacngangnatgatgnggtgcagctgatatcatggcttgcttgata

SEQ ID NO: 79286 - DNA, 618 bp, Oryza sativa
  Clone ID: PAT_MRT4530_7900C.1
atgacgacgtacagggtgtgctgcttcctgcggcggttcagggcggcgtcgaacgagccgtcggaggagctcggcgacgtgttccaggcgtacgccgacggcggcggcggcgtgatgggggaggaggcgctgaggcggttcctccgggaggtgcaaggggaggccgccggcggcggcgacaacaagctggaggcgacggcgagggaggtgatggccttcgcggcggagcagaggctgctcaagaagggcggcgccgcttccgccggcggcgggctcaccgtcgagggcttccaccgctggcttgtgcagcgacgccaacgctgcactggatcctcagaaacgggagaaattggtcgagtctatagaggggtcggtgcgtacaactcaatcgtgggaagtgaagaggaggtatatcaagacatgggattgcctctgtcacactacttcatctacacggggcacaactcatacctgacggggaaccagctgagcagcgggtgcagcgaggtgcccatcgtgaaggccctccacgacggcgtccgtgtcatcgagctcgacctctggcccaacgctgccaaggacgccgtcgaggtcctccacggcagtgcctatgattaa

SEQ ID NO: 79287 - DNA, 618 bp, Oryza sativa
  Clone ID: PAT_MRT4530_79010C.1
ggaatcgccgctcgccgcgccgcgcttcgccgcgctcgccgtacccctcttccaccgcctccgcacccgcccccagaagctcccctgctggcgccgcgccgcccggcccaacgacgaggattactacttgatcgatgcgccggagtccatcggggacggcttctcgttcagtggggggaagtatacggatggcccgagcaagtccgatgagtggtttgctcaagggagaatggtaaaagctcatccagtatacgggaacaaagggaaggcaaaagatcccatctttgggctcacaatgggagctgaatcacaatcttcaaatgatgttttcagaatggtatgtgtggaggctgggagcgcttcgaatggtaaggcaattgatcttcatgttggtctctctctgggatactcttatcgatcttcaaaagatgttttcaggtgcattgatctatataagtggttagcatggtgtcaggtggttttgtgtggaggctgggagttcttcgaatcctcctgttctttttattcatggattcccatctcaggcgtactcttatcgaaatgtgctacctgtagtatcagacaattatcatgccattgcttttgattggctcggtg

SEQ ID NO: 79288 - DNA, 1097 bp, Oryza sativa
  Clone ID: PAT_MRT4530_79011C.1
ggggggggggggggttttcagaattatgcaccagttatatacttccaccatatgcaagacaaattgtcaggatcccattacatgtacatttccagaaaacaagactagtcgacatgatcctggcacattcagcacaccaaactgctacctgaaggaagttagaagggagaactttttcttttgtacaaatcaattcccagtgttcgcaccaaaaacttcgtgtggttatttccttcttaactcgcatcagctacaccaacaagcatttaggtacaaatcatttacatcagtacacaagaacatgctaggtctaagcatcatgagctcgcatacagcaaccggaactactgacagcatcctccattttttgctttgttctcgtgcttctgtttcagagagttcctcttgacaactgaagaaccttcctccaagagacttggtacctcaagaatctttaacgcaagctcttcaaagcatttctccacattttctcttgttttggcactgctctcaagaaaaagacatccagattcctgggcaaaggcaagaccttcttcccttgtcaccatcctttcctcattcttgtccaccttgttcccgacaagcattttgatgcactctttatttgtcgaatgcaattctatttccttggcccatacatcagccaaatttgtgaaactttctctctttgtgacatcatacactagaatgatgccatgggcacctctgtagtaagaacttgtgattcccctaaacctttcctggccagcagtgtcccatattgttagcttcagtttcttcccattgacagtgagaaatttgattttaaagtcaacccctatggtgggagcgatttcgtcgtcgatgtgggaggcggagacgaagctgacgagcagactgctcttgccgacggccgagtccccgatgagcaggatcttgaaggagcagtcgtagctgctcgccggtgaagaggccatgcccacccggaaggaagggcgcgttgctcgccccgctcgctcgctacaggcgtggatcgaatccccgcgcccaaagcaaagcatccggacgcgaatgccggcgcctcgtgccgattcctg

SEQ ID NO: 79289 - DNA, 2394 bp, Oryza sativa
  Clone ID: PAT_MRT4530_79012C.1
ccggccgggattttatctagtacggacacttgaagaaaaaaaaaaacgacgaacacgttaaaaaaaaatcgaagaaaagaggaagaaaaaaacagcaaaaaataagtagagacgccatccgtcgtcgtcgtctcctcgatcgggttaccacggctgcgggctacggcgactagcttccttctctcgccgaagcgagacctcgcctcccccgaggaacctgtgtgcaataatttgttgttacctctggcatccataagatggaggtcctgagttggagaacggtgtgcctcttggttctctgcaccgtggcgttgctgcgcccggctgcggctatccgctttgtgattgacagggaagagtgtttctcgcataacgtggagtatgagggggatactgttcatgtatcgttcgtggtgatcaaggctgacaccccatggcattatagcgaggacggagtggatcttgtggttaaggatcctaatggtgctcaagtccgtgattctcgtgacaagactagtgataagtttgagttcatagttcagaagagaggcgtacatcgcttctgcttcaccaataaatccccataccatgaaactgtagattttgatgtgcatgttggccatttttcgtactttgatcagcatgcgaaagatgaacattttgctcctttgtttgaacaaatagcaaaattagatgaagcgctttacaacattcagttcgagcagcactggctagaggcccaaactgaccgacaagctatattgaacgaaaacatgagcaggagggctgtccacaaggctctattggagtcagcagcgctgattgcagctagcgtcattcaagtctatctattgcgccgcctctttgagcgcaagttggggacatccagggtctaaatactccaaaagtagcagctcctcctaatttacactctcgtcatcccaactaaagctgtaattccgaactgtattggttgctagatctgctgtttacatgctgtgggttgctgtcacatagacctttaattattatgattccattagatgttttcacacacttgaagaaaaaaaaacacgacgaacacgttaaaaaaaggtcgaagagaagtgggagacccaaaccgcgaacaatgtgtggaggcgccatcctcgccgagttcatcccggcgccgtcgcgcgccgcggcggcgaccaagcgggtgaccgccagccacctgtggccggccggctccaagaacgccgcccgcggcaagagcaagagcaagaggcagcagaggagcttcgccgacgtcgacgacttcgaggccgccttcgagcagttcgacgatgactccgacttcgacgacgcggaggaagaagacgaaggacacttcgtgttcgcgtccaaatctcgtgtcgtcgccgcgcgcccacgccgcggcaacacgagagccaccgccgtgccaccgccggcgacagcacccgccgccgccccgccgcgcggactgaagcgagaattctcgccgcctgctgagaccgcgctacctttcttcaccaacggcttcgtcgacctgacgaccgccgcggcgccgccaccggccatgatgatgacgagctccttcaccgacagcgtcgccacgtcggagtccggcgggagccccgccaagaaggcgaggtccgacgacgtcgactcgtccgagggcagcgtcggcggcggcagcgacacgctgggtttcaccgacgagctggagttcgacccgttcatgctgttccagctcccctactccgacggctacgagtccatcgacagcctcttcgccgccggcgacgccaacagcgcgaacaccgacatgaacgccggcgtcaacctgtggagcttcgacgacttcccaatcgacggcgcccttttctgatgtactcctccattgatgcagtttgtgcactcaattgttaatcacgtcgtcgttgatgaatgtttaaccggaggatgatggggtgcagctgatatcatggcttgcttgattaccgaattatattgcggtgtttgtgtttgtcaattagattctgaatctgtactactgccgatcttatgatcaaaactatatattaagtttatgtactcttaatttgtgggctacttttacggggtcttcgtactgctggtcaaatagtcctatgaaatcgatcatgtcggcaatatcgtcgtcaattatcgtggtcgtggttgttaatgatgtcaaataagtctatgaaaacctggtcctcttggtgtttatgtaccactgatcgatccatcatttgatctctgtcatgttgagatggatcgtgtaagaatatcataatttgctggattcagtccagtcgtaatgtattttggtttgtaccacaaaaaaaaaaaaaaaaaaaatttgcggcc

SEQ ID NO: 79290 - DNA, 426 bp, Oryza sativa
  Clone ID: PAT_MRT4530_79013C.1
atggctctccaccagggccctctgacgtggccatcttgcataagctacggcgccgacacaagaggacataagtttaaagtgagcttgcaccggttgtctgtaggttcttcatccacggcctaccaacatgacgtctctagggagaggagtgaaagaagccctcccgccaccgttgctgaaggtgccgcctcccctcctgatcccccaccatttccaccccctccccgctaccgccgccgccgccgcatcgacgcggattggatggattcgccccggccgcgcgggtggatggctggtcctcctcctcctcctctctctctctctctcagtatcaaggaagaggaagagacgtgtggaggcgtccgtctcttcggcggggcgaagcggtgcgtgtgccgtctccaccgtgctactgccgctcgctaa

SEQ ID NO: 79291 - DNA, 401 bp, Oryza sativa
  Clone ID: PAT_MRT4530_79014C.1
gtttactttgcttaatttgcttgccctcatcctcatggctgcggcggcggctgatgcttttggtgcccgcctccttctggcctcgggcgactacatctttccacaccaagaccagcacctccttcggaaatggtaccggcccccgcggcaggtcatttctggccgggccggcgccctcagcgtcggccggggacttgaggcagacgacttcctgcatccgatggaccaagcagacaccatcgctcctgaaggcagagcaacgggtaaactactggtggaagagcttcttggtaccagtcgaccggcagacattcgccaggaacacagagcttgaggtgatccactctctgaggaccacgcttgagacgctgggctgagtcttcccggagatcctgtacaat

SEQ ID NO: 79292 - DNA, 352 bp, Oryza sativa
  unsure (1)..(352): unsure at all n locations
  Clone ID: PAT_MRT4530_79015C.1
ctgtgttgggcgccctcctttttttttttttttttttattggtacatcggtgttttatcgaacaatggcctgtccgcttgtcgaaatgcaaataacatcatcgggggatatgatcatcagttgacgagaacagaggaagaaacaaaaggtnagaaantgaagcctgaacaccccgcaccggcttgcatttctagataaacaaattggaggcttggtttaatttttggatgtattgttctatcaaccgggacacgcacaaaacattattacagtggcatatgggggtgtgagaactagaagctttggatgttgaggaacttgggcacctcggcccccaggtctgtgtcccacg

SEQ ID NO: 79293 - DNA, 339 bp, Oryza sativa
  Clone ID: PAT_MRT4530_79016C.1
gtattggattctctctcgtattacagtggtatggggttcatatttatactccgagtacagacttataatagatacaattgtattattcgagctctatctctaattgataatgacggttatcccgatctagacccaaaccgagcccaagttataccatatcggctgtatcggccatcaacttcatcaaccttgatcaacccatattctatttttagccgatacgatatctagccaatgcgtagtctgactccaaatccaactcgattcaacaccaaatccgcttcgatcttcttccttcttctccgaatctaatgcaaaattccgttgttaacaccagcc

SEQ ID NO: 79294 - DNA, 3749 bp, Oryza sativa
  Clone ID: PAT_MRT4530_79017C.1
atgggtgtgccggcgttctaccggtggctggcggagaagtacccgatggtggtggtggacgtggtggaggaggaggcggtggagatcgagggcgtcaaggtgcccgtcgacacctccaagcccaaccccaacggcctcgagttcgacaacctctacctcgacatgaacgggatcattcacccctgcttccaccccgaggataggccctctccgacaacattcgctgaggttttccagtgcatgtttgattatatcgataggctatttgtcatggttcgccctcggaagcttatgtatatggccattgatggtgttgctcctcgtgccaagatgaaccagcaacgctctagacgattcagagctgcaaaagatgctgctgatgcggccgcagaagaagagaggttgcgtgaagagtttgagagggaaggcagaaaacttccaccaaaacagcaatctcaaacatgtgattctaacgttattactccaggaacagagtttatggctgttttatcgattgctttgcagtactacatccatctcaggttgaattatgatcctggatggaaacaagttaaagttattctttctgatgccaatgttcctggtgaaggggaacataaaattatgtcctacattcgcggtcaacggaatctccctggatttaacccaaatactcgccattgtttgtatggcctggatgcagacctgatcatgttagctcttgcaacacacgaagtacatttctctatactgagagaggtagtttatacacctggacagcaggacaaatgcttcttgtgtggtcaggttggacatctagcagcaaactgtgaaggaaaggttaagagaaaagctggggagtttgatgaaaaaggtgaagctattgttccaaagaaaccttaccagttcttgaatatatggaccctccgggagtacttagaatatgagttcagaatgcagaatccacctttcccgattgactttgaacgcatcgttgatgatttcatcttcatgtgtttttttgttggcaatgattttcttccacatatgccaacattagagattcgtgagggagctattaacttgctaatggctgtatacaagaaggaatttccttccatgggtggctatctaactgatgcttgcacgccggatctgaataaagttgaacactttattcaagcagttggctcctacgaggataaaatatttcagaaaagagctcgtttgcatcagcgtcaagctgaaaggataaaacgagaaaaggcccaagcaaaacgaggggatgacctggatccccatgtcagggatgatcttattgtacctgttgcacgcttccaagggtctcgccttgcatctggacctgtgccttcaccatatgaacaaaatggatctgacaaaaacaatgggggaaaaaatagtcgtgctcggaaagctgcacgggtatcatcgtcaggttcaagcattgcggctgctattgttgaagctgaaaatgaccttgaagcacaggaacgcgaaaacaaggaagatttgaagacaatgcttaaagatgcacttcgtgagaaatctgatgtttttaattctgaaaatccagaggaggacaagataaaacttggagaaccaggatggagggaaaggtactatgaagagaagtttggagcaagaacacccgggcagattgaagaaatacgcagagatgtcgttctgaaatatactgaaggtttgtgttgggtaatgcactactattatgaaggtgtctgctcgtggcaatggttttacccttaccattatgctccttttgcttcggatttgagtggtctaggtcaactcaatataacttttgaacttgggtcaccattcaaaccgtttgatcaacttatgggagttttcccagctgcgagctcccatgcactccctgtacagtatcggcaattgatgacagatgcaaattcaccaataattgatttttatccaactgattttgaagtagatatgaatgggaagaggtattcatggcaggggatagcaaaactgcccttcattgatgaagcccggttgctagctgaaattaaaaaagttgagcatactttgacgcctgaagaagcaaggagaaacagtatcatgttcaatatgctttttgtgaatggctcccatccactttcgccttatatctactccctcaacagcaaatttggacacctacctgacagagagcgaaatgaaattaaagaaaagattgatccttcttctagctgccttgttttgtgcagtggaggaatgaatggttacatctcactttgtagtggggatccgtgccctcctgtcttcaggtctcctgttgatgggttggaggatatcatggacaatcaagtgatatgtacaatctacaagcttccggattctcataagcacatcgctcgtccacctgttggtgtaatcatacccaagaagactgttgaagctactgacctgaaaccaccacctgtgctatggcatgaagacagtggtaggaggcctcatgataataacaacaggaggccttatgaaaacagcaacaggcaaaacccagctggagcaatatctggccgccaacttggggaagctgcccaccgacttgtggtgaacagcttgaatgctcggagtggcggacaatacaataccccatcgatgccatatcaaaccataatgaatggcatgccttatccaaatgggattccaccaaggatggagcagcctgctcctggctggcatgttcctggtgatctaccaaatggtcaggtaccaccagcttatgcatcatcatcaggtcattatcagaacgataggtctgggccttctcagtatggacgagataaccatggaaggtacccatatgcaagagacaaccaccatgattcaagaggaagggttccaccataccatcagagcggtggaaactcgtatcaatcacattctgctccatcagcaggtcctggacggtatgcgcaacccccaccatatgctggggggtatggtaggagctaccagcctgcaccgtatggaggtggtcagcagtggcagcagcagcagcaacaaccttatggctcctatgctgggtcagggccttatgggggtggggcacctcctgcaaggcctaattcacgaccacagcagtcgcagaaccgttacaataccttagataggaattctaacaggagacctccaccaggtcatgggcgacactaagcccaacctctgtttgttgtacctgtggttttgttgttagaaaacctgcgtactaaaatagagaacctcagcctagtaaaacagagaacctcagcttagagatatatatagagcaatttgcatagtctcgtgatcgacaagctgttatagcatcaaaggttctaagaggcatgtgttgtacaatagaattgtcagttcatcagatactggtggctgactgccgtttttcatttgtggcactcattattttagccccctaaggttgggaatatgtttaacaagttttgtatttttaagataataatgttctaggttaaatttcagttttggtggatatatgtcaaaatcttgtattcttttcttatttataatggaattgtggttttccctctaaaaaaaaaaaaaaaaaaaaaaaaaaaaaaaaaaaaaaaaacttggcccctgattaaggggggccgccatattagaggtttccatttctacttttttcttcattactaccttcttatatctcttaattatat

SEQ ID NO: 79295 - DNA, 252 bp, Oryza sativa
  unsure (1)..(252): unsure at all n locations
  Clone ID: PAT_MRT4530_79018C.1
aaagtggtgtatgctgtcaatattgaatgaaaaaatggcgtctgtggtactttgctttggatgtttttgttagtttctatgttatacagcttattaatgtgattgatgagttaatgatgactactgatgtgcatttcgtctttcatagttctcattttgggttagaagtagctatacacttatgtttgatcatttgatatgaatgttcatgtaaactatccttattnngctctctctttctctctctctctc

SEQ ID NO: 79296 - DNA, 341 bp, Oryza sativa
  Clone ID: PAT_MRT4530_79019C.1
atgtatacactacttacacgacttacagccactgtttcgaggagtcctgagtctttggctttgacccttttgtagtcctcgctcaagccaagctctgaacggctgccgaacacgcacgttgccactgtggcctagtgaaaacaatgatggcagcagcactgcgcacctctgctcctgctgggccctggatcaacagagggcccaaaagagcgtcaccccgggtcccgctgcacccctgcagtgccaggcgccctgcgggcaggctgcccaccatcagcactgctgccagcaaaggggattcaggtgacctgcctggcctcctgaatggcagcaagcccttt

SEQ ID NO: 79297 - DNA, 3066 bp, Oryza sativa
  Clone ID: PAT_MRT4530_7901C.1
atggcgagctcttcttcagcggcgacgatctccaaccctatgtttggcctccaaatctcggagaagctcaccaagcacaaccactccctctggtctgcgcagatcctcaccactcttcgtggtgcgcagttagatgggcatctctccggcacgaccgaagctccggcggccgagattgagaaagaagaaggagacaagaagatcaagatcatggtctcaaatccggcgtacaaggcgtggttcgcccaagatctacaagtgctcgggttcctcttctcctccctcacgcgggagatacttcaacaagtcgctggtgcaacaacggcggctcaggcgtggagcatgatcggcgacatgttctccaccaagtccaaggcgggttcgatcaacgtccttctcgccctcacgatgacccagaagagtcccatgaccatcagcgaatacatcgcaaagatgagatctctcgctgatgagatggcggccgcaggcgaaccgctggatgatgaagaactggtggcatacatcatcaacgggctcgactccgacttcgatgctgttgtcgaaggaataatggcaacggaaagaattgctcctccttctgtttctcatgtttattcacaggttttgagttatgaaaataggatgaaaattcgtcaagcttatgtcaccacatccgcgaacgctgcgaactgtggcgggcgcggtggacgtaacagcggaggaaaccgtggtcgcggtggctttggtcgcggtggtcgcggtggaggacgcggcaatcctgccggcaacaaccagggacgcgggcgcggcaatgacagccgccccttgtgccaagtctgccacaagcgcgggcatgttgctagcgattgttggcatcgctatgacgattcatatgtccctgatgaaaaacttggagataattatggtttcctcgaaattcatggcaaatattttttgattaaggacaaggccacgaggaggataattcttgaagatgtatgggagcctgcctccacttcattaggagcaaagaagtattatgttagttttattgatgattacagcaaatttgtttggatatatttccttaaacacaaatctgaagtgtttcaaaaattccatgagtttcaaaagcttgttgagagacagtttgatcgcaaaattcttgccatgcaaaccgattggggaggacctcctgaaatagctgctacagatgccctgggtacacttgatggggtgcctggagcgcacgaagagctgagtgaatccacccaggattcagcgccagctgctgtctcaggattgccgactgacaccccaggatcgctgagtcagggggagcaggagcgctcgcctgcgcgtacggcggtacgctctcagccatcgcaccagtccggcggcgacacgtcggcaggcagtggcgtcctctctcctgcacatggggacaacatcgtcacctctgatgtgacggcaccaggatcctctacatcagcagcgccagcgcagcagcaaattccagctgaggtaatgcgtccaaaaaccaggttacagagtggcattaggaaagaaaaagtttatactgatggaactgttagatatagttgtttcacatcctctggagaaccacagtctctgtgtgaggctctaggtgataaaaattggaaacatgcaatggatattcctcccaaaaaaggactgaatataatagattgtaagtgggtctataaaattaaaagaaaggctgatggaagtctagatagatacaaggctaggcttgtggcaaagggatttaaacaaaggtatggtatagactatgaagatacttttagtctagtagtgaaggctgctactatcagaactattttgtctatagctatctctagaggatggtccttgcgtcaattagatgttcagaatgccttcctccatggagtcttagaggaagatgtttatatgaaacagctactagggtatgaacagaaggatggctatgtgtgcaaactagacaaggctctgtatgggttaaaacaagctcctagagcatggtactctaggttaagtacaaagttacatgagttggggtttaagtcctcaaaatcagatacgtctctgttcttttacagtaagggagatatcacaatgtttatgctggtttatgtggatgacattatagtagctagctcttctcatgatgctactaatgttttgcttaagaatctgaatagagaatttgcactaaaggacctaggtgaactgcattatttcctagggatagaagtcaagaaggtaaatgatggcatagtcttaacacaggagaaatatgctaaggatgtgttaaggagggtaaatatgagtgaatgcaaagcagttaatactccattgtctatctcagaaatattaagtgctcaaggaggcactcctctggggccagaagatagtactaaatacagaagtttggttggagctctgcagtatttgactttaactagaccagatttgtccttctcagtgaacaaagtgtgtcagtatttgcatgctccaactacagaatactgggtagcagccaagaggattctgagatatttaaagcacacagttaaacttgggttaaagatcaattgggcaggatgtttggatgatcggcgatccaccggaggttttgctgtttttatagggcctaatcttgtgtcatggagtgcacgtaaacaggcaactgtgtcacgatcaagtacagaagcagaatataaagccttggctaatgctactgctaaaattatgtggatacaaacattacttcttgaacttggagttcaggtgcctagagcagccaaggtaaggtgtgataatattggtgcaaaatatttatcatctaatcctgtgtttcatactcgtacaaaacatattgaagtggattatcattttgttcgagaacgagttgcacgtaagttgttgcaagtggagtacatatctactacagatcaagttgctgatggttttaccaagacgttagctgtcagacagttagagatgtttagaaacaatctaaaccttacatgtatagattga

SEQ ID NO: 79298 - DNA, 309 bp, Oryza sativa
  unsure (1)..(309): unsure at all n locations
  Clone ID: PAT_MRT4530_79020C.1
tccactcgtccatccacgcgtntggggaatctattgaccccgagagccagggtcttatcttcaaggaaacaaatcctgtgaaagatcttggctctgctgggctatctatctatgcacaggagttccggaatgagttggtatcaccaccttgaaatgtctcttcaaatgaatcagtggaaaccaatagctgtgtccagtcagttaatattgatggctcataactgattttccgaaacagtccaagaacaaaatgaactcctatacccagcctgggagttaacatgccttcctacatgaatgctgcggaaa

SEQ ID NO: 79299 - DNA, 2341 bp, Oryza sativa
  Clone ID: PAT_MRT4530_79021C.1
ggtggtaagggagaaaattgcagatgcagatgcagatgcagtcgaggtctcgcattcgcggccgcgacccgcccccggcctcctcgggaggacgataccgccgacgatcgccctccccgcgccgccaccaccgcgctcccccctccaaccccaacccgcacagagacagacgcaccccgaccgcccccgccgacaccaccacgaggacagcctccctctccatgtccatctcccaccccgacccgacgccctactcaccgccgccgccgaccgccgctcccgcgctgacgtccttatcgaggccggccgcctcgccgcccgctacctagtcgcccagggcgtcatccccgagcaccgtctccgcgccagggaggaccccctccctgctgccaggaaccatgacgtcgacgaccccaggtcccgccggaatgccgacttcccccgcgacagaggggacgatgacaggctatcccgtagatccggctgggacaggaggagcaacagctttgacagcaggcgcaagtacaatgatgccgcctcagccgatcggagtgcccgccggagccacgactacgacgaccaaaggagaccaaccatgtcacgctcctattcacaaaacgaccgccgtgtctccagtgatagcaggctggatcgaagacggaggagcaggagcagaagcaggagcagaagcagaagcaggagcaggagcagaaccaggacaaggagctataactatggcagccggagggattcagattggcgagcatccggcgccgatttggatcattccaaggtgccagagcctggcattgtccgtgacggtgatgctgatgtgggatacggtgatgctgatgatgtgccaagagatctcaaggcacctcaccgttcagtggttgttatggagacaaaagagagtgccagccaagctgcagccaatgaagacacagcagaggtggagtcagagatcatagaggtcgatcaagctcaagatatatatggggatgacgatgacgatggtgacgatgctgttgctgccttcaattatccaagcgttgctgaaataaatgttacccaacacaagctgtccaattccaacgaggatgttgttcatccatcacagtctgatgaggaaccactgcataggcagtcccagttcagcgatgctgaggagggcatggagggtccgatctctcccagggattcatgcttggtagaaccagtggccgaggaagtcagagatggaatggaggctccgcagagtgaagttgaaactgataacgcagaccttaccaaagatgaacaagacctgccagcttggtatgggatttttgacctcaatgttgtggaatctcaagaaaactgtgaaatggttgagatttccaatgattcgcctttagataatggtcgtgactctgttcctgatcaagttggtcagatgagccaaggagcaaactgcgtcacttcaggaactcaaggtcaagatgaacatgcatttgacaaccaccagtcggaggatgaacaagtgcctctaaatcaaagaaatggtacggatgattttaacaatgaacaaggggttggaaatcagacaggtgatgaacatggacaggataatcaccagttggaggatgaccagatgcatataaatcatgtcatggatgtgcatactttagataacggccttatgaacggtgaggaaatgcttctaaagcggtgtgcagatgagcacacggatcatggacacctggtggaaactgaagaaatgcttctgaatcaggggcagagtacctctgtacaagtgttggaaaattataatatgaatggagaacaggtgcagctcaatcatgatgctgatgaacattcaggcgatgatcgcccaataaagaatgagcaaatgcttttgaatcatgttatgggtgaagaccagatgcttctagaccaggctgcagatggacaagctacgcttcacggtcagagcattggccaaatgattcctgtaatcaatctggaagatgattatgaagagcagtctgataccatagagttttcagaatccaaggatggcaacggggctgcccctgtcgggttgtggtaccccgtccccacccccggacatactgaaatctcccgctccccgtccccgtccccggcgtcggagcatgaaagactagaaggagatgaagacaccatgcagcgggggtggcggctgctgcacgcctgcatggtagtggtgacggcgacccgcgtgtgctgcttttggctgtggcgacggctgctcggccaggaggcgcgacggctgagcatggccgcggtcttacggagcctggcggcctcccgctgctga

SEQ ID NO: 79300 - DNA, 2600 bp, Oryza sativa
  Clone ID: PAT_MRT4530_79022C.1
atgcagatgcagatgcagtcgaggtctcgcattcgcggccgcgacccgcccccggcctcctcgggaggacgataccgccgacgatcgccctccccgcgccgccaccaccgcgctcccccctccaaccccaacccgcacagagacagacgcacccccgaccgcccccgccgccaccaccacgaggacagcctccctctccatgtccatctcccacccccacccgacgccctactcaccgccgccgccgaccgccgctcccgcgctgacgtccttctcgaggccggccgcctcgccgcccgctacctcgtcgcccagggcgtcatccccgagcaccgtctccgcgccagggaggaccccctccctgctgccaggaaccatgacgtcgacgaccccaggtcccgccggaatgccgacttcccccgcgacagaggggacgatgacaggctatcccgtagatccggctgggacaggaggagcaacagctttgacagcaggcgcaagtacaatgatgccgcctcagccgatcggagtgcccgccggagccacgattacgcgaccaaaggagaccaaccatgtcacgctcctattcacataacgaccgccgtgtctccagtgatagcaggctggatcgaagacggaggagcaggagcagaagcaggagcagaagcagaagcaggagcaggagcagaaccaggacaaggagctataactatggcagccggagggattcagattggcgagcatccggcgccgatttggatcattccaaggtgccagagcctggcattgtccgtgacggtgatgctgatgtgggatacggtgatgctgatgatgtgccaagagatctcaaggcacctccccgttcagtggttgttatggagacaaaagagagtgccagccaagctgcagccaatgaagacacagcagaggtggagtcagagatcatagaggtcgatcaagctcaagatatatatggggatgacgatgacgatggtgacgatgctgttgctgccttcaattatccaagcgttgctgaaataaatgttacccaacacaagctgtccaattccaacgaggatgttgttcatccatcacagtctgatgaggaaccactgcataggcagtcccagttcagcgatgctgaggagggcatggagggtccgatctctcccagggattcatgcttggtagaaccagtggccgaggaagtcagagatggaatggaggctccgcagagtgaagttgaaactgataacgcagaccttaccaaagatgaacaagacctgccagcttggtatgggatttttgacctcaatgttgtggaatctcaagaaaactgtgaaatggttgagatttccaatgattcgcctttagataatggtcgtgactctgttcctgatcaagttggtcagatgagccaaggagcaaactgcgtcacttcaggaactcaaggtcaagatgaacatgcatttgacaaccaccagtcggaggatgaacaagtgcctctaaatcaaagaaatggtacggatgattttaacaatgaacaaggggttggaaatcagacaggtgatgaacatggacaggataatcaccagttggaggatgaccagatgcatataaatcatgtcatggatgtgcatactttagataacggccttatgaacggtgaggaaatgcttctaaagcggtgtgcagatgagcacacggatcatggacacctggtggaaactgaagaaatgcttctgaatcaggggcagagtacctctgtacaagtgttggaaaattataatatgaatggagaacaggtgcagctcaatcatgatgctgatgaacattcaggcgatgatcgcccaataaagaatgagcaaatgcttttgaatcatgttatgggtgtgcatgatttggataatcatgaccagaacagtgaacaaatgcttctaaacaatggcgctggtaaacaggctgcagatagtgctcagttacaggaagaccagatgcttctagaccaggctgcagatggacaagctacgcttcacggtcagagcattggccaaatgattcctgtaatcaatctggaagatgattatgaagagcagtctgataccatagagttttcagaatccaaactaacgtcccagctgctgctgctgcttcatcagttaccctcaaccatggaaataggtggactagaaggggcgctactgttgcacagatattataatgacactttccacatttcaggaaatcccagcgatgatgagttgatggcatgttgtatgttgctttttgatgaaatactgttagctggaaagacttcatcaatggcagagcatgaaagactagaaggagatgaagacaccatgcagcggcggtggcggctgctgcacgcctgcatggtagtggtgacggcgacccgcgtgtgctgcttttggctgtggcgacggctgctcgagcgcaaaaggacagtgaagctctgtgtcaccgtgcagctcatcaggcagagatggttcatggctggctgcacggaatctagcaacagtcacttgattccgcgccgccgacctaacaagagagatggagctgttgattgcaacagcgtc

SEQ ID NO: 79301 - DNA, 227 bp, Oryza sativa
  Clone ID: PAT_MRT4530_79023C.1
aacagtggttggagatgtaaaaaacctacttccctgtttatctttctcttttcttggatgattaggcaattatgcccagttgtcctttatactattctttttttgtttggatgcttttcacatgtacctgtacaggctccacaatgtcacattatcagttgaaaaaaggacaccgctgaattcttgatagtgacatactcaaaaaaaaaaaaaaaaaaaaaaaaaaa

SEQ ID NO: 79302 - DNA, 3985 bp, Oryza sativa
  Clone ID: PAT_MRT4530_79024C.1
atggggaacatgacccgctgcgacaacaacaacaaaaaagttaaccaggagtcattcagtggctcctctccggtcgctgacgtcgtctccggccgggcggcgatggggaacatgacccgctccgaatcccccatctcccgtctcatcgtcctctccttcctcgatttcctcaactccgttgagttagctcctggggctgatcctgaagctcttgaggttgccagggaatgtatggaatcccttttcactatcaactctccaactgttgttgaaagggtacttccacgtcttctacttgaactctttagatcaatggaagctgctcaacaagaaatctctgcacccagaccggtatccaacaaaccttcttgcagtgcgagcacttcaaatatcacagaatacttggataaatgttcaccatcaattagtgaagcacgaaatgaagaggcctgcgacttagacctttcaggaatcttcaagtcaaaaggtaatgcactactgagttcaaatcaacatcttaaagctgaagaacaatacaccagtgctatggatttgggcagccatataaatatgtactgttctaacaaggctgcagactctatgagacctattatggacaagctcgcgcctgatatgagcctgcgttaaggtgcacctggctctaattgaagtccaggctagacctgacgtgcaagtcgagagtaacatgttcaaaaacttgactttggtaacagtttagtaggagtacgggtatattctcatgttctttttggtacttttgtttgccaaaccaaccatggaagctcatatcgggattgggcacgttatatctgtttattggcatcttaatttcttcctcccaaagtcaagcatcacatggacagtttcctggtcaatcaagcagtggtgttccattcacgttttttcctcctggaaattctccaactcctgagttcttcgccaatatcatcaaccgtgtgtctgatatcagtcaacaatcatctgagcattccataaatataaatttgaatgacatttttaatcatgcaaatgtcaatgggaacagtcaaggaacacctcagacagagacttcaagtaaccataccccacctccttcttttccaaccaatactgcagtccctcctcctttttcgttcacgggctctactgaaggaaatcgcccacaacaaacttcaagtggacatgaaggggagcatggccaaccaggcatgcacagggatgctggcatccaaataaacttggcaggaccagagcaggctgcagacgctatgagagctgtgatggagatgctcgcgccccatatgagccaacgtgaaggtgcacctgggtctgctagaggtgtgaaaatggtaaaagtttgtagtacatgggggtgtattttcccggttttccttgacaaagtatgcttccctcttttattaccaacggaccaggctagacctgaggaacaagacgagtgtaacagttcaattcttgactttggtaacagtttagtaggagtacgggcccatctcccacgcccacccgacgccttactcaccgccgccgccgaccgccgctcccgcgctgacgtccttctcgagaccgtccgcctcgccgcccgctacctcgtcgcccagggcgtcatccccgagcaccgtctccgcgccagggaggaccccctccctgctgccaggaaccatgacgtcgacgaccccaggtcccgccggaatgccgacttcccccgcgacagaggggacgatgacaggctatcccgtagatccggctgggacaggaggagcaacagctttgacagcaggcgcaagtacaatgatgccgcctcagccgatcggagtgcccgccggagccacgactacgacgaccaaaggagaccaaccatgtcacgctcctattcacaaaacgaccgccgtgtctccagtgatagcaggctggatcgaagacggaggagcaggagcagaagcaggagcagaagcagaagcaggagcaggagcagaaccaggacaaggagctataactatggcagccggagggattcagattggcgagcatccggcgccgatttggatcattccaaggtgccagagcctggcattgtccgtgacggtgatgctgatgtgggatacggtgatgctgatgatgtgccaagagatctcaaggcacctccccgttcagtggttgttatggagacaaaagagagtgccagccaagctgcagccaatgaagacacagcagaggtggagtcagagatcatagaggtcgatcaagctcaagatatatatggggatgacgatgacgatggtgacgatgctgttgctgccttcaattatccaagcgttgctgaaataaatgttacccaacacaagctgtccaattccaacgaggatgttgttcatccatcacagtctgatgaggaaccactgcataggcagtcccagttcagcgatgctgaggagggcatggagggtccgatctctcccagggattcatgcttggtagaaccagtggccgaggaagtcagagatggaatggaggctccgcagagtgaagttgaaactgataacgcagaccttaccaaagatgaacaagacctgccagcttggtatgggatttttgacctcaatgttgtggaatctcaagaaaactgtgaaatggttgagatttccaatgattcgcctttagataatggtcgtgactctgttcctgatcaagttggtcagatgagccaaggagcaaactgcgtcacttcaggaactcaaggtcaagatgaacatgcatttgacaaccaccagtcggaggatgaacaagtgcctctaaatcaaagaaatggtacggatgattttaacaatgaacaaggggttggaaatcagacaggtgatgaacatggacaggataatcaccagttggaggatgaccagatgcatataaatcatgtcatggatgtgcatactttagataacggccttatgaacggtgaggaaatgcttctaaagcggtgtgcagatgagcacacggatcatggacacctggtggaaactgaagaaatgcttctgaatcaggggcagagtacctctgtacaagtgttggaaaattataatatgaatggagaacaggtgcagctcaatcatgatgctgatgaacattcaggcgatgatcgcccaataaagaatgagcaaatgcttttgaatcatgttatgggtgtgcatgatttggataatcatgaccagaacagtgaacaaatgcttctaaacaatggcgctggtaaacaggctgcagatagtgctcagttacaggaagaccagatgcttctagaccaggctgcagatggacaagctacgcttcacggtcagagcattggccaaatgattcctgtaatcaatctggaagatgattatgaagagcagtctgataccatagagttttcagaatccaaaagtgacaccttacataaacttactgaaaatgttctaccagaacatatctgttctcaagggcaacaaacttcgagtattcctgaccatcctcagactaacgtcccagctgctgctgctgcttcatcagttaccctcaaccatggaaataggtggactagaaggggcgctactgttgcacaggaaatcccagcgatgatgagttgatggcatgttgtatgttgctttttgatgaaatactgttagaggtaatcatcttgtattgtgggactgccatcctctgagcttgggaaatctttgtgaaccatgatgttcgtgttctcagctcctacgcttgagcttactgatatcctgaaccatgggaagctggcatgctgaagttggttgatcggtcatttgcttgtttgtatgttgtggtgtagtaagtagtaacaaattttgatccccagaggtcacaaattccatgctggtctagcgatgtgttagtagctgggtagctctaattttactgcgaacaatatgaatcatgttcgtct

SEQ ID NO: 79303 - DNA, 392 bp, Oryza sativa
  Clone ID: PAT_MRT4530_79025C.1
cggcacgagggagagagagagacaaaagcaaaccctcgcctcgcctcgcctcgcctctctcagccatcgtcttccaccgccgccgccgccaccgaacgaacgcgccgaccgaccgcgcgaagatctgggcagctgggacgagacatagggagtataacggagtaactgaagaaggagacaaacgccggatttaactccacggaacgggagcacattgctgctgctaccattcaagcttggactccggtctcctcctcctcctagggtagggtggtaagggagaaaattgcagatgcagatgcagatgcagtcgaggtctcgcattcgcggccgcgacccgcccccggcctcctcgggaggacgataccgccgacgatcgccctccccgcgcc

SEQ ID NO: 79304 - DNA, 1480 bp, Oryza sativa
  Clone ID: PAT_MRT4530_79026C.1
ttttttttttttttttctgaaatttatactacaattaataacttcacatatttctcacattttctcttctcatacatcctgcagcattggtacacagtgtcggttacattgcagaagccagacattacaggggacggcccaacctacagataactctattttatttttcaaatttattctccactaatctacatacataaaataattcatgtctctggtagtttgcaagctagcagtacttgtaaaccacattattgaaagggactaccgctgctttaaataataccgtcatggtctatacatatgacatgtgcatagatgtatggttttgaatagaaccctgatgaaccctgaagggcgttagagtcttgattttgctggtgagcccatcacaatcatcactttaccaacggccttcctgtctctcagggctgcgaaagcgagatgtgcctcagggagcctgtaagtgtgggaaatctggatttttatcaacccctttgaaagccatgaaaagagttcattgagggagtcaatgagtacaggtggccgatgagtgaagtagcttccccagtacaaaccatgaattgtccaattcttaacaagagcgatgtttgctcgaataattggtacatctccactggcaaatccaattatcagaatatgtgcaccccaattgagaagttttaggctatcttgtgttaatttgcctccaacaggatcatataagacatcaacacctttgaggcctttggcttttaaaaaagatttggcactttccataatactttccttgcttgagtcaattacatggtcagctcctatagtcttgagatactgcaatttctcagttcccctagcaactgcaataacaacagcaccacaaacttttcctatttgtacagcagatgccccgacaccaccagcagcacccagaacaagtagcacctggccagcctttagttcagctctgtgtacaagggccaaatgcgatgtaccaaatgcaacaggcaatgctccagcagcaacaaggtcacatccatcaggcaccgaaaatagctgcttctcgtcggcgacgatgagatccgcgaaggagccgacggcggcgaggccgcagacgcggtccccggggcggaacctccgcacggcggggccgacggcgtcgacgaaccccgcgtagtcggagcccgggacgaacggtagcgcggggcgctcctggtacttgccctgtacctgcaggtaggtggcgaagttgaggctggtggccgccacgcgcacccgcacggacgtcggcgacgcgagcgccggcgccgggtggtccccggtgaccggcgcgaacggggaggcctcgccgccgggggccagcgtggggtccccgagccgccgcaccacgagcgcgtccattttttctagccggcgtcgcggcgacggcggcgggcaggtgcttttgcctcgtcccggagtcctccggcccgattcagag

SEQ ID NO: 79305 - DNA, 3286 bp, Oryza sativa
  unsure (1)..(3286): unsure at all n locations
  Clone ID: PAT_MRT4530_79027C.1
atgccgcccaagaggaagcgcggtggcgggaggccgcgcaaggccccggaggacgccgccgccaaggaaaacggtgagaagacaaacaaggaggaggaaacgcaggcttctcctgaggagaatggcgcagggcagactcaggcctcgagaaccgcaagaaagcgcaggaagggtcctgttgctgatccctcttcgactgaacttccacccaggaagctcagggacaggcggaacgttccagcggtagactacaaggagaataagcacacaaaaaagatggatggaacttcaaccatgtgccatcagtgccaaaggaaggacagtggaagagttgtgaggtgccggaatggtgctgaaaaaaacaggaggcacagatattgtgtcaagtgcatcaaacgctggtacccgcatctaacagaggacgattttgagaactgctgtccagtttgtcacaataactgcaattgtaagacttgtctgcggacaaatgtaataaataagggtgacaaggagtttgccgatggtaagaacaaaattaaatactctctgcgtattgcacgctttttgctcccttggttgaaacaacttcaccaagagcagatgctagagaaaagtgttgaggccacaattaaagggatcgatgtaactgacttggaggttcctcaagctcagtttaataatgatgagcggatttactgtgataactgcagaacatccattgttgacttccacagaagttgtaaaagtggtcactatgatctctgcctcagctgctgccaggagttgcgtcaaggtcttactactggtactgttgtcacttgtgacacagctgttgatgtacctgaaatagaaggcaaggaaggtttgcaagagggaagtagtcatagcagtgctgtaggtcaaggggcttctgatcaacagaatgacaggttgataggtagtgcagctccttcagaggattgcactcctagtttgatatggagggcaaaaagcaacggaagcataccatgcccacctaatgcaggtggttgcggggattgtcttctcgaacttaggtgtttgtttaaggagaactttatttctgatttactggataaagtcaattcagtggtcaataaggaaacagagcaggagttgggaggctctagatgttcctgcttcactgaatccggtgaagtgaacaatgaaacatcacggaaatcagcttgcagagaggactccaatgataactacatatattgtccaactgctagagaagttcaaagtggagctttagatcattttcagcagcattggttgaatggtcagccagtcattgttcgtgacgtgcttgagctaacttctggactgagctgggagccaatggttatgtggcgggccttacgggaaaagagagacaagaaagagcatgaacggctctcagttatagctcttgattgtctgacatggtttgagtttatgtaccaccaggatgtgttggtggtgccagtttcatatctggggttcaacagcaccattgaaactactttatatttcaaactggttgatataaatattcacatgttttttgaggggtattcccgtggagctgttggttcggaggatttgcctgtgctacttaagcttaaagattggccacaacatagttcctttgaggagcgcctgccgcggcatggtgctgagttcatgtctgcactaccatttcgtgagtatacagatccaaaatctggtccccttaatctggcagtgaagcttccaaaacatgttaaaaagccagatcttggtccaaagacatacattgcttatggtgtcgcccaagagttgggaataggtgattctgttacgaagatccattgcgacatgtctgatgcggttaatattctcatgcatactgatgaggtagaactcaaagctgaaaggattacagcaatagagaaaaagaaagagagcttacgtaaagatggcaagaatcttcatgttctgcgaccagaccatgacgatgatacatcaatagctctcagtgaatcaactgaagtgccaagatctcgaggacttgaaaatggctcaagcattaagcagccagcaccaaatgttgctgtaatggaccagggaggtgttcatacagatatggtagctgatgaagctgagggaaacttgagtctgtctaatgggcaatcacccaatcaaagtgatgcacataatatggatattactttctccaagggggaaacagaccattctatctgcacaattaatgggggagaggagatgggcaatggctttgggagggaagataaatgtaaatcttctcatggtgtaggatcatctgaatcttctgattgtcaaagacgcagtaggcgacgtgatgcttgctcttccagtgcaacaggggaaataaacgaaaccagcatggagactaacaaatttaccatatctattgagcccaaagatgatcacccatttgttgagggaaatcagacagagggtggtgcattgtgggatatcttccgacgtgaagatgtcagcaaattgcatgattatctgatgaagcatgcagaagagtttagacattataattatgaaacagtcaaacaggtttctcatcctattcacgatcaatgcttttatctaacaaatgagcacaagagaaagctcaaggaagaacatggaattgagccttggacatttgaacagaaacttggtgaggctgtgtttatcccagcaggatgtccccaccaagtcagaaatttgaagtcatgtataaaggttgcacttgactttgtttctccggaaaatgtgcaagagtgcatcaggctgacagaagaatttcgcttgcttccgaagggtcatagggtgaatgaagataaactagaggttaagaagatagctctatatgcacttgatcaagccattgacgatatcacaggcaaaagttgcaatgaaaggacaaaggatgaaggggaagaggaggcgtctgccccaagtgttagttaacctgcagaggaaaatcaccaaaattagcctgcacaaggcncatgtgctggagtccaatatgcatgatttctgcggaggcatggtttgtagtttagaaaacggttcttctcgtgatagnggtgatggctagtggatttttttgcagcagggtttgtgggagctggntatcattntagctctgtaccatcatatacggagacgatagctntaactcaggacggnntgattttgntacttcatattgagttgtatgggagtttacccttgatttgatagcagagatgaagggggg

SEQ ID NO: 79306 - DNA, 1443 bp, Oryza sativa
  Clone ID: PAT_MRT4530_79028C.1
atgctcctctctgacacgcagcagcagcaggatgcgaggaagcccggcgcggtccggcgcccgccagccgcccctccggacacgcgagtcacgcacgtcttgtgcggccacgggcagcaggcggcagcccttggcggcggtggcgacggctcggcggtgagtgtctccctgggcgagaaggaggagatcgtggaggcggcagtggaccaggtgaaggtgctggaggacacggtggccgtgctggagcctggctggaggcgtagtggcgtacctggaggtgcagccgtgcaggttggcggcaccgccgccgccgccgaggtgtccgtgtcgtaccgggaggcggggagagagaaggaagataggagggagatgctccgcattggagacgacgacggccggagcgatgctctggaacgcgagctcaaggagaagctgaggttgcgcggcgatgcctcaccggcgaaatgcaccaggcaggagcagcggtggcggtctgatcatggcatcgtcgacgcccgcgagaggttcgtgcaggcgtacggccgcctcagggacgatctcgtcggcgacgactcgtgcgagctcaccgacgaagccaggcgctggcttgctcagatgatcgactacaatgtacctggaggtgaggaggcatcttctaaagcattgcaaacttctctggggcagatgcttgatcttattagcacacatactggagcagatgatcttgcaaaatacagtattgaaggctaccgtcgcattgttaagtacaagacagcgtactactccttttaccttcctgtggccaatgctttgctcttatctggcgcaaaacttgaagacttcagtggtctaaaggatatacttattgaaatgggcatatattttcagatacaggatgactacttggactgttttgctgaccctaacaccataggcaaggctcttggtcatgctgacaacaatcaaatagaagtactacataggaactatggcaagaaggattcaagttctgtttccgaagtaaagaggacttacgcggcgcttgatttgaaagatatcttctccgagttcgaacgtcgatgctacaaccacctggtcacctctatcgaagctcagaaggatcatgcagcacgggagatcctgatatcatttctgaagaaaattcatcaaaggaagaagtatttacagacagaatctgatcagcagatcatacctttgccagctttctcgttcactgggataggagatggccagccgcagccgaagcccaaaagcgccatggattctctcttcgagcacatccgccgctccgcccttgcgtcgcatagcacccggaagtacagcaccgtagcaagccaaagccagcagtgtgtttttgttgaatggcgattttatcaagtgatgagacgcaccatcgcattcgacggtgtacctggaatgtag

SEQ ID NO: 79307 - DNA, 1499 bp, Oryza sativa
  Clone ID: PAT_MRT4530_79029C.1
ttgagttagctcctggggctgatcctgaagctcttgaggttgccagggaatgtctggaatccattttcagtatcaactcttcatctgttgttgaaagggtacatccaggacttctacttgaactctttagctctatggaagctgctcaacaagataactctgcacccggcccgagtgaaggccaaaatgaagataccttcgacttagatcattcaggagatgaactgtttgcaaaattctatacctcgcttgatgaaatcaatttctttaaaacatcatctgctggagctgaagatcctggccagctttcaaaagcaacacaattcttcgatgatgcattgctggggatgcggaagtcaggaaggaaaagggcaagcttaggagaccttgcagaattcttcaagtcaaaaggtaatgaatccatgaggtcaaaacaacatcttaaagctgtagaactgtacacctgtgctattgcgttgagccgaaataatgctatttactattgtaacagggctgctgcatatacccttcttaatatgttcaatgaagctgttgaggattgcctgaagtcaattgaaattgaccctaactacagtaaagcatacagccgacttggatctgcttattttgctttgggaaaataccacgatgctttgtacaagggatatttgaaagcctccgagcttgatcctagtaatgaaaatgtctggcagaatatcgaggttaccaaaaagaagctggctgaacagcgaggtccaccagaagaacagaatacatacgcaccccaaagtcaagcatcacatggacagtttcctggtcaatcaagcagtggtgttccattcacgttttttcctcctggaaattctccaactcctgagttcttcgccaatatcatcaaccgtgtgtctgatatcagtcaacaatcatctgagcattccataaatataaatttgaatgacatttttaatcatgcaaatgtcaatgggaacagtcaaggaacacctcagacagagacttcaagtaaccataccccacctccttcttttccaaccaatactgcagtccctcctcctttttcgttcacgggctctactgaaggaaatcgcccacaacaaacttcaagtggacatgaaggggagcatggccaaccaggcatgcacagggatgctggcatccaaataaacttggcaggaccagagcaggctgcagacgctatgagagctgtgatggagatgctcgcgccccatatgagccaacgtgaaggtgcacctgggtctgctagaggtgtgaaaatggtaaaagtttgtagtacatgggggtgtattttcccggttttccttgacaaagtatgcttccctcttttattaccaacggaccaggctagacctgaggaacaagacgagtgtaacagttcaattcttgactttggtaacagtttagtaggagtacgggtacacaagctgaggccagcagaagaaagggtgtacagtacagagtga

SEQ ID NO: 79308 - DNA, 848 bp, Oryza sativa
  Clone ID: PAT_MRT4530_7902C.1
atgacgtcaccaccggcggcggcggctcggcggctcggacgcgcatgctcgccggcgaacggcggcacttcggcacgaacggaggacaccaacgggtagagcgcgacgcggcgaactcaccggtgaccaaaggagcggcggaagaccaacggacggcgacggcgacgaggttgaaacggcggagaagatcgggtcgacggcggcgacggtgctccggcggtcttcggcggcgacgaagaggcggacgaggacggcggcgacttggcgaccacgacggcagtcttcccgagcgacgacgatgaccggaacggcggcggcgcacggctggagcaacggcggcgacggcggctcgatgctactcggcgctaaggtgctacggacgacgagaggcgaaggcgagggcggcggcgggtagagaagagctcgggggtccttttaaaggggctaggaggcggcggcaaaggctcacggcggccggcgacgcgaaggaaaggtcgggctcggagagagaaaagccgatccgattcgacctcgaatcaaacactttccaagccgatttagccgatgtttccaaaagggaaaaggtagaggagatcccgaggatcatttcccctctatcaattcggccggaaacggaaaggatcgacggaattggaaagcggcggcggcgcgactcagctagggttcggccgggcgacggcggctcgggaaagacgaacctgacaggtggaccccacctgtcagcgagcgagggcgcgcgcgcgcggcggcggactgggccggcttgggccgaggagagagagaagggttttgggccgactttcggcccaaagccaaaagaagacttt

SEQ ID NO: 79309 - DNA, 451 bp, Oryza sativa
  unsure (1)..(451): unsure at all n locations
  Clone ID: PAT_MRT4530_79030C.1
cttccatttctttccttctccgcagatattccccaagaatctcctcctcctcctcggattcccctctctctctctcctacagagtagtagcttgtgcttgctttgctccgattctctctcttccctgtctctcctagctgcaatataccactagcagcagggcgcccagttgcgcgatcgatcgatcgagctccgtggtgccaagaacgccctgtacggcgcgccggtatgtgcgtggaggagtcggagggcgcggagaggctggattttggggagcccgccgccgccgccgccgacgccgggaagagcaagagcaagagccccgacgaactcccctcgcctcgggttcgtttgatttcccttcatggcgtgaaggaaggaaggacgatgatgatgagattgggaaggaaggaaggaaggaaggaaggaaagcanagcatgcccttctggg

SEQ ID NO: 79310 - DNA, 553 bp, Oryza sativa
  unsure (1)..(553): unsure at all n locations
  Clone ID: PAT_MRT4530_79031C.1
gtcgcattgttatttacaagacagcgtactactcctttgaccttcctgtggccaatgctttgctcttatctggcgcaaaacttgaagacttcagtggtctaaaggatatacttattgaaatgggcatatattttcagatacaggatgactacttggactgttttgctgaccctaacaccataggcaagattggaactgacatcgaagatcataagtgttcctggttaatagtacaggctcttggtcatgctgacaacaatcaaatagaagtactacataggaactatggcaagaaggattcaagttctgtttccgaagtaaagaggacttacgcggcgcttgatttgaaagatatcttctccgagttcgaacgtcgatgctacaaccacctggtcacctctatcgaagctcagaaggatcatgcagcacgggagatcctgaaatcatttctgaagaaaattcatcaaaggaagaagtggtaataagttataacaattatgacctgtatgagcctattggtacatttaaaaatgatcngaatctatcttcccat

SEQ ID NO: 79311 - DNA, 1384 bp, Oryza sativa
  Clone ID: PAT_MRT4530_79032C.1
atgctcctctctgacacgcagcagcagcaggatgcgaggaagcccggcgcggtccggcgcccgccagccgcccctccggacacgcgagtcacgcacgtcttgtgcggccacgggcagcaggcggcagcccttggcggcggtggcgacggctcggcggtgagtgtctccctgggcgagaagattgccgccatgaagacaaacatagaacacatgccaaacatgacagtgatagggaatgtctcgtcatcgtcgtcgccttcttcctctggcttcttggccaacggcggcgatggccgggaggagatcgtggaggcggcagtggaccaggtgaaggtgctggaggacacggtggccgtgctggagcctggctggaggcgtagtggcgtacctggaggtgcagccgtgcaggttggcggcaccgccgccgccgccgaggtgtccgtgtcgtaccgggaggcggggagagagaaggaagataggagggagatgctccgcattggagacgacgacggccggagcgatgctctggaacgcgagctcaaggagaagctgaggttgcgcggcgatgcctcaccggcgaaatgcaccaggcaggagcagcggtggcggtctgatcatggcatcgtcgacgcccgcgagaggttcgtgcaggcgtacggccgcctcagggacgatctcgtcggcgacgactcgtgcgagctcaccgacgaagccaggcgctggcttgctcagatgatcgactacaatgtacctggaggtgaggaggcatcttctaaagcattgcaaacttctctggggcagatgcttgatcttattagcacacatactggagcagatgatcttgcaaaatacagtattgaaggctaccgtcgcattgttaagtacaagacagcgtactactccttttaccttcctgtggccaatgctttgctcttatctggcgcaaaacttgaagacttcagtggtctaaaggatatacttattgaaatgggcatatattttcagatacaggatgactacttggactgttttgctgaccctaacaccataggcaaggctcttggtcatgctgacaacaatcaaatagaagtactacataggaactatggcaagaaggattcaagttctgtttccgaagtaaagaggacttacgcggcgcttgatttgaaagatatcttctccgagttcgaacgtcgatgctacaaccacctggtcacctctatcgaagctcagaaggatcatgcagcacgggagatcctgatatcatttctgaagaaaattcatcaaaggaagaagtagttaataagttataacaattatgacctgtatgagcttatggtaacatttaaaaatgatcgaaatctatctccccataagttataat

SEQ ID NO: 79312 - DNA, 438 bp, Oryza sativa
  Clone ID: PAT_MRT4530_79033C.1
cacgacacaagttcaagaaccagaaccaagcctttggggttcgcccaagagggttggccggaagcgccgaattcaagccccaacaatgcttggggaaggccaattcttaccaagggaagcatctggcagcacacacacagaatgttcagggacaacacccacaattgtcccgaagggttgtttcacagccaggctatgtcctggaagaaggggacattggagcagcgccggcaggcgagcctcccggcgttccccaaacgtggacaatccccaacggcggaggtggtgtcatgctactggctggcgagatctggctactagctaggctactgtagctagctgtgcatgtatgtggtgtggttactaaaataattagtgttttcctttttttggacccactatgtgtgccgaataaatgatgaaaaaaaaaaaaaaaaa

SEQ ID NO: 79313 - DNA, 376 bp, Oryza sativa
  Clone ID: PAT_MRT4530_79034C.1
tttttcgagctcatggactcaggtatccatccgggcatcatagcgaacgatgaccttagaaggaaaggctaccagatggttctggagcagaccatgagggctatgaagaccatccagggcagcgattgagaagtactactagcgaaagaccatgaatatactgaccaactagaacgggctagtggaggtgtgcgatttgggacttgagcgagtgtgattcaaggaggccggtttaacaatataccggacggattatattgaaaccaggcgggaccggggaatttagttatgggtgtaagaggaggagagagagactcctgtgaacgatatttggaggattgggtgcatagatgttgaagttatcactgggagacca

SEQ ID NO: 79314 - DNA, 999 bp, Oryza sativa
  Clone ID: PAT_MRT4530_79035C.1
ggcgaaacctaggctaggctagtcctctcccggaggcctggagaagctacccgccggcggcgcgcccctccaccctcgccgtcgcccatggccctccttctgcgcgtggccaagaaaagccgggcgaccgcggcgatggctctcgtcggcggccgcggggtcgccagctcggccgtggacagcgcggcgggtcgtgcgctggccaccctcgaccacgtccccaaggtcatcaagttcgccgccctccctccggcggccgtcgatcgtcaagacgcaggcgccaagccgggggtggagaaggcgcgccgggacgtgcggcggtggcgcgcgaccagatcctggctccgtcaggcaagctcaagctcggcgccggtggcggtgggttgccctactcgtcgtcggccatctccagcggcggcggcggagaagtgcagccttcccgcgtcgccgccgacaactgcaggtgtggctcgccgcacctatgggacaaggggcgggtggccgtgccaggcgccgccggaggcgttgaaggagatggaggacgccttccgcgcgcagatgaagataacagaggatgcaatcaaagcgcacacagccgagtgtctgtcgagcaagaagctgctcaaggccccccgacctctgtaccaagtcttccttgtctgtgtttttgttctggctgcagtctccattctggtgattggattctttgactacgcgctcacagttggggagatgactgtggtcaacttcctcaatggaaaagagttcaaggctgtcaaaaccgacttcatggatgaagccgaagccacacttctcgatctcgcccaacaggagagggttcgagaggtgaggaaccggtacgtgcaggaggcatggaccgaatcaatgggctgcctgatcagggccctcaccctcaagtcctaccgggactcctggttccgcacaaaggaggaggactccaacaacagcaccacggttgctactccaagcgccaagtag

SEQ ID NO: 79315 - DNA, 1855 bp, Oryza sativa
  Clone ID: PAT_MRT4530_79036C.1
gcacgactcctcttctccgacgaaaccccaatccccaactccgacgcttcctccgccccggcgatcgccgccacccgaatccccccgcgaccgcctccgattgattcgatccggtgatcttgtgttgttgccacatgattgttgtctctaaatgattctatgggggccccgaatgaagtgacatcgtactcttccctctccaaaatcgatagcaacaaccagggaggtcatctatctagtctagttccagcaaacatttacccagcgcaggattatctctatgaaccgtccctggagccagatttcccatcggagtacgattctagagaagatccatttgttccaacacgagctagttcaaatatcaatttgaagactgtcctaactgggctggctgctattgtttcgggcacaaataagaaccaggataatacactgcagcagcaaagtttcagcacggatgtctcatttctaggatttgacaaggatggtgatgttaatgtacatccatctgtatgcgttcctagtgcgccaccactacttgaaacaaatgctttacaatacagtgcatacagggaggtgctacaggcagatcctccagaatggttaccagatagctctaccagtgtgtgcctgcaatgcagtttgcctttcacagctctgactcgtggaaggcaccattgccggttctgtggaggtattttctgtaaagattgttccaagggaagatgcttgatgcccatgaagttcaggcagcgtgatcctcagagagtgtgtgatgcttgctacgataggctcgatccacttcagggaatattgatcaattacaatagcaatgccatgcagccagcaaaacatgatgttatggattggacaagcacaagaagctggttgaacttgcctgttggtttatcaatggagtatgagatatacaaggcaacaaatacactaaatagatattgccaggttgctagattaaaccctgagaagtccatcccatcatctattctaaagggagctaaggggcttgctgtgataacagttgccaaggcgggtgcagttcttacatacaaagttggcactggccttgtagttgcccgaagatcagatggatcatggtctgccccatcagcaattgcatctgttggcctgggatggggagttcagtttggtggcgaactgacagattttataattgtacttcatgatcgtaaggctgtcaaggcattcagcagtcgcatgcatctttctcttggggcaggattaagtgcagcagcaggaccaattggcagggcctttgaagcagatgttagggccagtgaaaaaggttctgggctctgctacacttacagctgtagcaaaggtgcctttgttggggtctcattggaaggaaatgtcgtgacaaccagatcagagaccaatctacgcttctatggcgatgcttacttgaccacaactgatatcctgtttgggaaggtggagaaacccagagccgcccagcccctgtactcagctctagatgatctattctctaaaatggtttactagttctacgtgttcatgccaaaaaaaaaaaggaaaaaaagaaaaggaaaagctctccattactcattgatgtacacaatatgtatataaagataaaggtaggaaaatgtacagcttttaagtcctgttcggatgggtcgatttgggttaaaatcccttgcacgacttataggttcaaatgtgaaaaaggtcccaaagtattttataattcaagtacccaaatctgaacagacccattggattgtgttcccctgataatctctcggtacacatgtaaatattatcatgatatttcaaaaaaaaaaaaaaa

SEQ ID NO: 79316 - DNA, 213 bp, Oryza sativa
  Clone ID: PAT_MRT4530_79037C.1
agccatacctttttttactaattagaatgtggcaggcgaatacatttacatgcaccttgcgatataaaggcaaactaactatagtaaacatgccgcaagaccgaggacacgtacaagtattggcgcgataacgactataaggacatagaccaagaaaattaaacagagcagagagccacgacgagcggggggcggagagagagatggggagag

SEQ ID NO: 79317 - DNA, 1458 bp, Oryza sativa
  Clone ID: PAT_MRT4530_79038C.1
ctcttctcgccggcgtcccctccacctccatcgcgctcgctcgccgcccgatcccatcacctccgccccgctgccccgcacctagagatgccgtcgtcgtcgtcggcggcggcggcggcgtgcgggcccccggagttcacgccggggtggaagacggtgtcgacgtgcgccccggacgtcgtcggcgagggcgtccacgtgttcgacatcttcgggtacagcgaccacaaggggatgggcgcccacgagcccatcaggtcgggggccttctccgtcgccggcctcgactgggtcgcctgcctctacgccgacggctacggcgtcgccggcatcgacgacgtctccgcctacctcaggctcctcggcgacgcgcccaccccgcgcgtgtgggtctcctgcgaggtcaagctcgtcgaccagcgcaccggggtggcctccacgccgcagcccttcctcaggtacgccctggcgttcggcgacaagtgcaaggccctccactgtatgatgatccccaggggccagatcgaggtggagccctacctcgtggatgatcgcctcaccatggagttccatgtcgtcgtcaggagagacccccgggtgtcgaggaccgcccggttcccgcgcatcttggtgccgccgcccgacatcaagcggcagtttgccaacctgctgcagagcaaggagggcgcagatgtcaccttcgatgtcgcgggggagccgttctccgtgcacaagctcgtgctcgcgatgcggtcgccagtgttcaaggcggagctctgcgggctgctgagggagccgggaacacagcctattaccatcgttgatatgcagcccgccgtcttcagggccctgctgcaattcatctataccgatcagttccccgtgacgcgcggtttcgagagacgcgacaattgtgaaatgatccggcacctgctcgttgctgcggacagatacgccgtggataggctaaagctgctatgccaaggtatcctttgcaagaatcttaatgttcacaatgtcgcgactacgctggcactggctgatcagcatcaatgcgacaagctgaaggatgcttgcatcgaatttatgtcatgttcaaagaagatgaagggtgtagtggcgagcaaagggtatgaggatctccaaagaatggcaccttctgtcttggcggatgccgtggcgcagatgtcgaagctcaacaaaatgtcaaggggtagtgttccacaagatgagtctaagagctgttagtttaatttataagggatatggatattctttcttctcttcctaaatcaggtatcgtagtcagtttactctacattttgggagcacctttctggtggttatctgtttatatgatatagttaggtttattttatctctttgcaagctttgtttccattaactgacatataacctgttgtccttccacaaaatttattttgtgtgctcttgatc

SEQ ID NO: 79318 - DNA, 589 bp, Oryza sativa
  unsure (1)..(589): unsure at all n locations
  Clone ID: PAT_MRT4530_79039C.1
ggggcgagttcatcacnccgggcttgctcttcctctacatcgccggctggatcggctgggtcggcaggagctacctcatcgccatcagcggcgagaagaagccggccatgagggagatcatcatcgacgtcgagctcgccgtcaagctcctcccgagggggttcatctggcccgcccacgcctaccgtgagctcatcaccggcaacctcgtcgtcgacgacgctgacatcggctactgatcaccacatggatgcttggctactcaagccccagttgatttggcagtggaggaagagggctcgtgcatggtgatttgtgtggtttgggtgtagaagctgataggatcatggaggaatggaagatctgttgtacttaagaaaaactaagtcttgtataccgtacctctctcttgtgtgtatttaccatcttaagattcttgagaacaattccttcgtgcaattctcgtgctgttgtcgctgcagctgcagagagattttcaatcgtatgtactccagcataaagtagatagaaactcatctgaccggggcttctttatacataacatgttgtgttcttgggagccagtcct

SEQ ID NO: 79319 - DNA, 711 bp, Oryza sativa
  Clone ID: PAT_MRT4530_7903C.1
ttatctctctcttttcttatccccttcggctgcggcggtgacgggcgggatgatgggtgctggagctgtggcggcggcgagcgggcgagggctggagcggtggcaacggcgggcaggttgcaaattcaaccgtgcggcatcttggatgacgatgatgatgctggcaagtagcaacaatctcacagtgaacaacgcaagctgattaatgcagttctccactccaatgatccaatccaaacaaactacgaccgagtgtggtggcggcgcgccgccgccggccgccacgcagagatggcgcaaagcggcctcttgtgccagcagaagaaaaaggcatggccgtacgaccccaccggctccatgccgtccgctttcatccgcgccgcccactgccgcgcccgctcgtgccgctccaccagctccaccccctcgcacgccaccacgccacgaatctcctccccgagcagcacgcgctcctctcttggtgcttgtgctcccctcgtttgcaggatgacccaggtgcggcgccggctccggcggattacccgctcccccgccctcgagtgcggccaaccccgagttcccgacatggtccatggctcgcgcaggcgggattttggggagccaaggaagaggaggggaatcggccgacgccccgctctggccctcgccagctcgccgccgccgccactccagtacacgtcgctgccatag

SEQ ID NO: 79320 - DNA, 1160 bp, Oryza sativa
  Clone ID: PAT_MRT4530_79040C.1
ggaggaagaggtgggcgcccggccgggacacacgcgcgaacccactccgatcgcaaatactctctctcgccgatagcagcagcagcagcaatggccgccctcgccgccgcatccaccgccttcgccgccaagccgcgcctggcgcgcgcgccgtcgtccccggccgcgcggttctccgtgtcgtgctccgcgtcgggcaacaacggcggcgccggcgagatggcgcagtcgctggcggcgtcggccaagacgttctccgcggcgctggcgctgtcctcggtgctgctctcctcggcggcgacgtcgccgccccccgccgccgccgacatcgccgggctgacgccgtgcaaggagtccaaggcgttcgcgaagcgggagaagcagtccatcaagaagctccagtcgtcgctcaagaagtacgcgccggactccgcgccggcgctcgccatcaacgccaccatcgagaagacgaagcgccgcttcgagaactacggcaagttcggcctgctctgcggcgccgacggcctcccgcacctcatcgtcagcggcgaccagcggcactggggcgagttcatcaccccgggcttgctcttcctctacatcgccggctggatcggctgggtcggcaggagctacctcatcgccatcagcggcgagaagaagccggccatgagggagatcatcatcgacgtcgagctcgccgtcaagctcctcccgagggggttcatctggcccgtcgccgcctaccgtgagctcatcaccggcaacctcgtcgtcgacgacgctgacatcggctactgatcaccacatggatgcttggctactcaagccccaggtgagttgatttggcagtggaggaagagggctcgtgcatggtgatttgtgtggtttgggtgtagaagctgataggatcatggaggaatggaagatctgttgtacttaagaaaaactaagtcttgtataccgtacctctctcttgtgtgtatttaccatcttaagattcttgagaacaattccttcgtgcaaaaaaaaaaaaaaaaaaaaagaaactgcagagagattttcaatcgtatgtactccagcatatcgtagatagaaactcatctgaccgggacaaactagattaattgaattgaattaggcgtagtgcatcaatatca

SEQ ID NO: 79321 - DNA, 120 bp, Oryza sativa
  Clone ID: PAT_MRT4530_79041C.1
atggcgattaggtggctggtggccggtggaggtgatgggggccggcggagtttgcttgttggaaagccgcaggacacggggaacaacagtgtggatgtcggcctggtcgacggcaagtga

SEQ ID NO: 79322 - DNA, 431 bp, Oryza sativa
  Clone ID: PAT_MRT4530_79042C.1
ccagcgagcgagaggagaggggggaaaccatgcccgcgttctccagggctcgaggcgccgtcctccgcgtcctcgatggcttgaagcgccgtcctccggcgagcggggcggcggatactatgagcccagtcaggaagatccagatgcttgaagaggagcttcgtccgtccgggggagaaatctcacgaattctccaacgcgcgcgcgcccacttggaaagacaagaggagaaatttgatcctagctcacagacgccggagttgttccgtaatggtgcaggttggcaattaaacaccttctttctatgccttttctcatcaatcattgccaactacaagtacaataaggcgcaggcacacagctgttctggcatccctcgtcatatgcaaatacaagctgcaagatatgctttgtcatttggaatagactga

SEQ ID NO: 79323 - DNA, 423 bp, Oryza sativa
  Clone ID: PAT_MRT4530_79043C.1
atgagctccttcttgcatatgtttgttggtgatgatagcaatgatgtaggagatgagatggacgtcctcgatggtgaagagcagtgcctcacagttgtgagtacggtgatcaagttggtgattggggcagagggctacagtcacttgggacggcctgacacacaatggcatctgagggatgagctgttagatggagacggcagggacacagaacgaaagaattcgcatcccaacactacaggaatcgtgactttcgcggaggctggggcgaggtgcggtgagctcgatggtggtcaaccatgggtggcggcgttaggggaaggagatgtagatgccagccattccaaacacaatgggatgtgtggacatgctgtcgttagggcggccgaggagattagtggccatgccggaggagcatggtaa

SEQ ID NO: 79324 - DNA, 159 bp, Oryza sativa
  unsure (1)..(159): unsure at all n locations
  Clone ID: PAT_MRT4530_79044C.1
ttataacatcagcaaccaattcctaccgaagcgagcatctataaatccagcaggtggttcaacaancctagctaggaagcatggccccttcacacttgatgctgatcctcctggaggcatatctgttcctcgcccgccccgaacacccgtatgaccatt

SEQ ID NO: 79325 - DNA, 1869 bp, Oryza sativa
  Clone ID: PAT_MRT4530_79045C.1
gcacgaggcgaaaccctaggttgcttcgcttcctcctcctcctccgctccaatggcggacgtgctcctcccggagctccgctctcctcctcctccgccgccgccgccgccaccgacaaatgatgatcgcgcgcgggcggtggacctgccatcgccgactccggagtgtgacgatcgctcgccgcgtcgtgagctggggcgctcgccggaggatcacggcgtgccgctccctcccccgccaccgctcggctcctcgcgccccgagcgcctcgccagcgatcgtccggaggagggcgcctccgccgccgcgcagccgtgtggcggaaggagtgagagccccacggcgagattcggattcgagcacgagcgaggcagggaaaggagcatgaacacttcgcgtcgcgctccagattgcctggattctggatgtgatgccccctataatggtcaaagtaacacccggaggaaaggattgatgacatacaaacagtttacccaaaaacttgaagatgatgtttcaccgggtgaagctgagagcaggtaccaagaatacaagacatcatacattacttctcagaaacaggattattttgatcaccataagaatgaagatcgtttgaaagacatgtaccacccaacaaacttattatctgttattgaaaggcggaatgaactttgcaaggctgcagcgaagaatttgattcttgatttgcggagtggaactttggaccttggtcctggaatgactgctggtacagcaagtaaatcaggaaatgacagtgatggaatccctgcagatgatgaagattatcacaacaagagaagaaggcatcacagaggtcccctggaagaaactgaactagtttcagttgctcctaaagctcacccagtcagttcgcattatcgacgaattcaaactgacatacatcaaactctagccttagtgaagaagcttgatgaagagaagggtattgtgggaaacatcctgacaactggtgatcacacaaagtcaaatggtgacaaatcatatgctggatctacagggcctttagttattgtccggggcttatcaactgttaagggccttgatggttttgagctcctagacactctccttacttatttgtggcatgtccatggtattgattactatgggatgtctgagagtacaaatgcaaaaggtcttcgtcatgtgagagctgatacgaagaatgccaacatggacaaaagcagcgctgctgattgggagaagaaactggattatttctggcaagagagactgacaaacggcaaggatcctctagttgcattgactgccaaggataaaattgatgcatcagctgataaagttctagaatcttatgtcacaaaggttaaggatgataactacggatggacatacggctgtggagccaaaggatgtataaaagttttccatgctcctgactttgttctcaaacatctgaacctcaagcatcctgatttggtctccaaattgacttcaagagtccaagaggatatctatttccaaaattatatgaatgatccaaatgctccaggtggcacaccagttatgcagcaacaatcaccagagcagcaaggacctacaccttctgaactaacgcctggtgcttttggcgggcagggttccttcgttgaaatgcccactccaccagtactaatacctgtgcctggtgctggtccattgggtccatttgttcctgcacctccagaggtagtcatgcagatgatgcgaccagtgatgcccatgtatccgcctcgtccgcctaaccctcgtcgtctgcgaagctacaaagatcttgacgctcctgatgatgaagtcactctcgtggactacagaagtttgtag

SEQ ID NO: 79326 - DNA, 437 bp, Oryza sativa
  unsure (1)..(437): unsure at all n locations
  Clone ID: PAT_MRT4530_79046C.1
atttatcctcattctgtggaaggttactggaggaaactgaggatgagctttctgagtggataaaaacgagctccgcagaatcaggaaatgtcagcagagcactttgtgaagatattagcaaacactgtcagtctacaagtgctaccatcgagatcgacgacgaactataacaccaaagcattctggtgccatctttatctcacaaagcaaagcaggcgaagacctggaaagcgtagaggaacaaactcaaatagtttctgatttcatatgttgtatcactgcaattcatgtccttaaaatgggagaattgcaattcgttccatatagtgtctgtctatctggactaatctgttgagaacattcgaacatgagacaaattttgcatactaaaattacggttgaaagcaaaaaaaaacaaaaaanacaaaaataaaaaa

SEQ ID NO: 79327 - DNA, 1216 bp, Oryza sativa
  Clone ID: PAT_MRT4530_79047C.1
gcacgaggcctcgtgccgaattcggcacgaggacccaacaaaagcagggcacacgcatacacatcgcaagccgcccaaaccctacacaatcttcgaatccccaccgaatcgcgcgagagagaaatccaaggcgaggacgaggaggaggagaaggaagcttcgagaatgttccggaaccagtacgacaccgacgtgacgacgtggagcccggcggggcggctgttccaggtggagtacgccatggaggccgtgaagcagggctccgcctgcgtcggcctccgctcccgcacccacgccgtcctcgccgccgcgaacaaggccgcctccgagctctcctcccaccagcggaaggtcttccgcgtcgcagaccacgccggggtcgcgctcgccggcctcaccgccgacggccgcgtcctctcccgattcctccgctccgagtgcatcaaccacgccttcgtctacgacgcgcccctccccgtctccaggctcgcgctccgccttgccgacaaggcgcaggtttgcacacagcgatcatggaagaggccatatggtgttggcctccttgttgctggattagatgagtctggagcccatctatactataactgccccagcggcaactattttgagtaccaggcatttgctattggctctcgctctcaagccgccaagactttccttgagcgcagattcgagggctacaacgactacaccccagagcaacttatcaaagatgccctctccgccataaaggagacgctgcaaggtgagaagctaaccagctccaactgcaccgttgctattgttggcagaaaggacgatggcaccgttgagccatttgagatgatcgacgtgaagaggatccaagaaataatcgattccatggaggctgccgaggaggcaccagcggcagaggctgagtcgagctcgatgcaggaggaggacaagggcacggacgccgcgcccatggacatctaggcccaagatacatcttatctcctcccttacaccgtgtctgagtttccaaaagactactgttttagaaagctgtgactgttgtgtaccctttcttcagtactacaactttgcgacggtctctttgatcaacatcgattgtgttttggaccgattatttacatgtgatgcggacagaaaatctctttggtttcggggaaaaaaaaaaaaaaaaaaaaaaaaaaaaaaaaaaaaaccaaaa

SEQ ID NO: 79328 - DNA, 1834 bp, Oryza sativa
  Clone ID: PAT_MRT4530_79048C.1
agacaacactcagacgaggttattaagaatgaattgagtgcatccaatctgcttacaaggccgtctgaacttccaggaggagtgcaatccaataataagccagtacaatccccaaataacattgctgcattgacaggggactgaatgatgaaaattctagatcatgagaaacatgacctgctggtgaatggaaatggggtatccccagttcgaaaaatgccatattggtgacgcaccatatgctgttacgatctgcccatgttaaggtgatacagtgatgacctccacatcctgcatgctagaattcctgacagaatactggaatgtccatccgtggcatgccccagcatgcactcctttcttgttaattgcaaatacagcaccaacaaagtccgggtacttgcgggcaattcttaatatagcatccatggcagcatcccgaggctccatccctcgtcgcatgctctctactacctgataacacggaaggaagcgcatcataatatcaccatcaccagttgctccacatgcaccaacttcatcatcagcatatgcagaagatcctggtattggtccatcacctacccttcctggaattttgaatgtagcaccattggtcgatgtgccagccgctatgcgacccatcttgtcaatcacagccatagagattgtatcatggttgtggcgattaacgatttttagacgggagttcattggctccagtaaattattaggttcaaataatccttgacaaatgtccccctgagtccgctctagcacacgtttggcagaggccttagactcccctgatggtacatcaatagcattgtacgggccacagctaccagcaggaacaacatttttccagaagttaggttgacaatggttctgtctccaaattgtccattttccgatagactccggtgagctcagatcagctggccccacaagtcccattgaaatcgcaaaggatgttgccttctctccaacaagaagagtatgttcagtatggtccataaccaactttgccgctctgattccatcctttacatatctcatggcagcgacagctccgatttccattgtggtcccatccatgatgagagcatctaatgtagtttcaccattctcatctgggcttccacctgggccaactgtgccatcacagcggagcacctcgcaggcggagcagccggcgacgacggcatccacggccgaacaacctgcgccgccactggctgacaccacctcccaggccgccctgaccgcctcccggaaaggccaggtgctcaccaccaccggaaaaatccctcccccttcctccgcgcctccgccgtcatcagccaccgccctagcggcggcggagatggaggaaggcggcggcggggaggaggcggagaggtggccgtggtgggcgggggcgagcgcggcgcaggtggcggcgggcgtggcgtggttccggcggggcaggggcggcgcggcgttcgcgatgccgttcaaggcgttcgccatcgccaccctcttcgtcggcgccggcgccaccgccgtcaccgccggagttctcgcggcgggcgtcggatcggtggacgagatgaagggcgtgggcgcgagcatccggaggtggatgggagctcctccacgacgccgagtggagggaggaggagacccatgaccagcacaacgctagtgcgtgttcaattgtatcgatagatcccaggcattgtatgtgctctagaaatcctcagttttttgcttcacatcgtctaaggcccaaatgtgaaatgttcgtctgtttgaactggaattggaaaagaaaaaagcaataatcgcctcg

SEQ ID NO: 79329 - DNA, 282 bp, Oryza sativa
  Clone ID: PAT_MRT4530_79049C.1
atgggcgctggcgggaacaacgagttgacaacgatgctcaccagtgccatcctccaccgcgacgaaacaacaccgcgaattgaggaggccaccctaacgagaaccgagaccgacaggattgtcgaagtcatcatgacaatgaccgtcgagaatggcgagatcgggacgacaatggtcgaggtcaacgacgagataacgatgatcgacgacggcgggaatcacgctctccagcctcccgtcgagaccgccaacaaggacgccgatccaggagccgcgctctag

SEQ ID NO: 79330 - DNA, 211 bp, Oryza sativa
  Clone ID: PAT_MRT4530_7904C.1
gggctacgggttcaataatttgttctcattgttcattggtctatatactacagtcctatcattgagctttgtaaaagataggctggactacatgaaattgagtgctacagcctactggcttgttacaaacttagacaaagtttccagtccattacctgggctgaaggagcttgtcatggaaaatggaacatttgtcagaactctcacatag

SEQ ID NO: 79331 - DNA, 306 bp, Oryza sativa
  Clone ID: PAT_MRT4530_79050C.1
acgaaacaaatgccaaattgaatatctgtgtgtcaagtggtattcagtactaccagttttctgtattgagtaatgactggcaaagataaaaggttgcctcagatcattacatgtctttgcttgacggaaagacaagcaaaagctaattcaaagcatcacctcttctgtttaagaaaggcagtcacgtcttatgcaagtcattcattcaagcaaatactaatgaatttgttacaccacgctttggggtgttgtacaaagtcgtcacggcagaatatgcagacaaaactgaacattgatacgaactgc

SEQ ID NO: 79332 - DNA, 1368 bp, Oryza sativa
  Clone ID: PAT_MRT4530_79051C.1
atggacggcgaccatgccggcgcctggtcggacttgccggccgacgtcctgatcacaattctcgaggcgcttgacatcgtcgacctcgtccgcgccggcgccgtgtgccagtggtggaacacctcgtcagcgtacgtccgcggcctccaccacctcctctcccgcccttgtacgccctgcctactctacaccaccgccgccgccgctggcgccgacgccgacgccgacgaccccaacgtggccaccctctacagcctcaccgaccaccggtcctacaccgtcacgctcccggggccccacgtccaccgccggtggctcggcgcctcccacggctggctcgccaccgccgacgacgatgcggcgctccacctcgtcaaccccgtcaccggccagcagatcagcaacctgccgccggtcaccaccgtcgagccggtgcggcggctgctcgacgacggcggcgccgtcgtccctggcatgtacgtggtgtacccgtacgactggacgctgcgggtggagccgctggtcaacgcgcccatgacgttgacggcgcgcgagctctcggagtacctctacctccgcgtcttcctctcgtcggacccttcgtccgacatcgtcggcggcggctgcgtcgtcgtgctcctccaccgccccgacggccagatgtccttcgcgaggctgggcgacacgcactggacgtggatacgcacgccgacggggaacgagctgtacgtcgacgtcggcttcagcgccgacggccggatgctctacgggatacgccgcgacggcgccatccacgagttcgacctcggcggcgagccggccctggagaggacgaccatactccccgctcaggatggcatgatgaggcacaccaactacctcgtcgacgcgccgtggctcggcggcggcgacggcggatgctggctcatggtgtgcaggcgcatgggtgcagcgaacctccaagcctacgcggcatggctggcggaccggagcttgccctacgacggggtgtggaacacgcactcgatcaaggtgtaccgggtggatcccgcggcggggacggcggcggagatcaaccacgtcggcggccgccacgccctgttcttgggatgcaacagctcgttcggcctcgccatggcggattgtccagccgggatcctgccggaccacgtctactacacggacaacgaggagcagtacgcgctcgacacgccagagtgcgcgagggacatcggcgtttaccgcatgggagatgggagctttcatcgggtcaagcctccttcgccgtggttggattggccgctgcccgcttggattatacccagctttggctgcctaggctatagtaacaggtttctagctaactag

SEQ ID NO: 79333 - DNA, 788 bp, Oryza sativa
  Clone ID: PAT_MRT4530_79052C.1
cacacgagtacttgatgtaaagctctcagaatcctctttccatcggatcaacctcattgtcaaattccatctgagtcatcggcaattgcagaaacaagcgcgcgtgtcggctagaccgtccgtctgcttgtattcgaaaccccgaaaccccaacttatcatttgtattcaattcctcttggcaatatcagattgcttttatcttgttcttgcttgtttcttcgatttgcttgcaggaatagggttgatctgcactggcaagatcaacaacccacggagaggtgtatcgatcgctaaggcgcaacgcaacatcttttacggttgtagtcagatcgtcaacgtttctcccaaatcgtagttatctgaactcaccgaaagatcgggccaaactgtagccttgagtgctaagaggacctcagggttcatctcatcaggtggtatcagagctttcttgctcagcgtctagttcgtttaaagtttcgagttctggtcacgttttgtaccacagtcgtcgcccccctccccccttgtcggaatcagttcgctgccacggttctatttttgtagtttttagaagtttttgtcggttagttttggagtcgcatcaaggttttgctcgagtttgtggtttgtatgtgaagcgagttgattcggccgcgcttgtgacctgagcgagaggacgaatcagttttggaaaaaaaaaaaggcgcaacaaaaaaaaagaaaagaaaacgaaaggaaaaaaagagagaggaaggaagaagaaaaaaaaggaaaaaaagagctctt

SEQ ID NO: 79334 - DNA, 270 bp, Oryza sativa
  Clone ID: PAT_MRT4530_79053C.1
atgaaggccatccacgcagcactgctcatcctggccatcgtcctcgtcgcttcatcatcatcaccaccaggtggcgtgacggcgcagctggaaacctgcacggaggtgatcaaccgggaatacccgacgtgcgacagcggcttgtgcgtggcgaactgccagcggcagtacaggggcggcattggccagtgcgtcggcaacaagtgcaagtgcgactactcctgcgccttcctgccgccgccgccgccaccggcgacggcgagaaactaa

SEQ ID NO: 79335 - DNA, 873 bp, Oryza sativa
  Clone ID: PAT_MRT4530_79054C.1
atggcgagagcgttccgcgcggcctcgccgctgccgctgccgtcctccagctccagggcggccgcggcgagcggtggcaccggcggaggcggaggcgggaacttcccgtggctgagcaggaagcggctgggcgccaagccgccgtcgccgcagcggcgaggtggacaggagagggagggaggtggagatgaggcggcggggatggggacgacgacgagggccgcgcggttctccgcgacgtcgtccgcggagcctgctgaggtgcagtcgtcgtcgtcgtcgaggaagcgcgcggacgcgctggcgaggctgcgggcggcgttcctggcggcgatcacgcaccggcggcggcggcggcagctggggtcgagcctgacgggcaccatcttcgggcggcgccgcggccgcgttcacgtcgcgctgcagacggacacccgctcgccgccggtgctgctggtggagatggccgcctactccaccggcgcgctcgtcagggagatgtcctccggcctcgtccgcctcgcgctcgagtgcgagaagcaaccaatcaacccaggcgagaagcggcgggcgctgctggaggagccgacgtggcgggcctactgcaacggccgaaagtgcggcttcgcggtgcgcagggagtgcggcgccgacgagtggagggttcttggcgccgtcgagccggtgtccgtcggcgccggcgttctccccgacgacgccgccgccgccgccgccgccgaggagggcgacctgatgtacatgcgcgcgaggttcgagcgggtggtcgggtcgagggactcggaggcgttctacatgatgaaccctgacggcagcggcggcccggagctcagcatctacctgctcagagtctga

SEQ ID NO: 79336 - DNA, 1119 bp, Oryza sativa
  Clone ID: PAT_MRT4530_79055C.1
atggcctacgacatcgaggattgcatcgacctcttcgtgcatcacctcggctccctcaccgggaaagccggggtcatcaagaagatggcatggagaatcaaggggctacagttgtcgcatcggatcagcgggcggatacaagagctgaaggctcgtgtcatggacgagagcgatcggtacagaaggtacgacacgatgaacatctccagcatgagctctgaagcacatctgcacagagatgcctccggttctagaactagatcagttgatcctcgattgtccgctctctacacggaggcggagagacttgttggaatcgatggaccaaaggataagatcatcaaatggctaatggatacgcaaggaggcatctcacaacggctcagaacaatggcgatcgttgggtgtggaggtttgggcaagaccacacttgcaaaccaagtttaccttgaagttaaaaatcagtttgattgcagcgcttttgtgaccgtgtcgcaaaatcctgacgtgaagcatgttctggcaaaattcctctctgatgtttccggggccattggtggtgcattggctgatgaacatcacttaatcaacaagctaagagaatacctccaggataaaagatcaaatgaagaaaattttgttactatggttggtgcttcagatctcacatctactccaactggcaagattcgtcgcctatcattccataaaaacagtgaaggaagtgtcacaatgccaacatacctgctcagatcccatgtccggtcattgacgacatttttgcacgctggacaggtgcctcctcttctgggtttttatggatctatggcaaagctcgagtaccttcatatcctgatcagtgcatttcaagtgaagtcttgggatggcagctttgattttgggattcagcatctctactgcctcaccaaggagcgggagcgtggtcggagccccgagctccgccgcccagatacgaggaggagccccgccgccgcagcctccgggcctgcagtggggaaggcgacgcgacggggcgtgagctgccgctgccccggcggccaagagcatctcgcaactgaagtggcgcgcgcgcgtgaaccgctcgtctctgaagtctaa

SEQ ID NO: 79337 - DNA, 2580 bp, Oryza sativa
  Clone ID: PAT_MRT4530_79056C.1
atggcctacgacatcgaggattgcatcgacctcttcgtgcatcacctcggctccctcaccgggaaagccggggtcatcaagaagatggcatggagaatcaaggggctacagttgtcgcatcggatcagcgggcggatacaagagctgaaggctcgtgtcatggacgagagcgatcggtacagaaggtacgacacgatgaacatctccagcatgagctctgaagcacatctgcacagagatgcctccggttctagaactagatcagttgatcctcgattgtccgctctctacacggaggcggagagacttgttggaatcgatggaccaaaggataagatcatcaaatggctaatggatacgcaaggaggcatctcacaacggctcagaacaatggcgatcgttgggtgtggaggtttgggcaagaccacacttgcaaaccaagtttaccttgaagttaaaaatcagtttgattgcagcgcttttgtgaccgtgtcgcaaaatcctgacgtgaagcatgttctggcaaaattcctctctgatgtttccggggccattggtggtgcattggctgatgaacatcacttaatcaacaagctaagagaatacctccaggataaaagatattttcttgtcattgatgatatatgggatgcacaaacttggagaataattgagtgtgcattggtcaagaacagtcaaggtagcagaatagtcaccacaacacgtataaatgaaatagctaaatcttgctgctgctcttatggtgatcaagtatatgaaatgaaagctctttgtgctactgactccaaaagattgtttttcagaagaattttcaattctgatgaaaggtgccctcctcaattgagggaagctgccaataacatattgagaaagtgcggtggcttaccattggctattatttctatatcaagtttgctggctaccaaaccaaaatcattagaccagtgggataaggtgaaaagtcgaattaattatacacaagaaaacagtccagatattgaaacaatggcatgggttttatctctcagctactttgatcttcctcatcatctaaagacatgtttaatgtatttgagtatatttccagaagattatgtgataaagaaagagcgtctaataggtagatggattgctgaaggattcattcatgcaaaacaaggggaaagcctatatgagataggagagaattatttcaatgagctcatcaataggagcttgctccagccagtagacatagaggatgatggtcaggtgcatgcttgccgagtgcacgataccatccttgatttcgtcgtgtccagatcaaatgaagaaaattttgttactatggttggtgcttcagatctcacatctactccaactggcaagattcgtcgcctatcattccataaaaacagtgaaggaagtgtcacaatgccaacatacctgctcagatcccatgtccggtcattgacgacatttttgcacgctggacaggtgcctcctcttctgggtttttatggtctgcgtgtgttggaccttgaaaattgtagtggattgaaaaaccatgatcttaaaagtataggaagactaattcagttgaggtatctgaacatcaaagggacagatataagtgatctgccatgtcagatacgggaacttcaatatctggagacattagacatcagatcaactcatgtgaaagaattgccttcagcaattgttcagcttcaacggttggcgcatctgcttgttgattgccatgttaaactacctgatggaattggaaatatgcaagcattggaagagctaacaggtttctctgttttcatgtatccttcaacatttctgcaagagataggaaagatctccagtctaagggtgttgagggtagtttggaactacgtcgactttcaaggaaatgcagaaacttacagggaaaatctggccatttctctcaccaagctaggcacatgctaccttgagtctctttctcttgatatccatggacatgacgaggaagacgatttctcactacatttgtggacccttgctccttgtagactccggaaattatacattggtcgatggcatcccatttccaggataccaaactggactgaatcccttgcaaaccttcagtacttgcatatatatgtcaaaagaattaaccaagaagatctgaggatgcttggaagcataccttctctcctcactctatacctattctccgatgaggcccctaaagagaagctcaccatcagtagccaaggattccaatctctaacattctttaagattcactgctatcatatgggattggtttttgaggcaggatctatggcaaagctcgagtaccttcatatcctgatcagtgcatttcaagtgaagtcttgggatggcagctttgattttgggattcagcatctctactgcctcaccaaggtgtatgcctatattaactgttatggcttgaccgctgaggaggctgaagctgcagtgaatgccattatgatttctgttgacacgatccctaattgtcccaagctgcagattgataggcgatatgcacccttgtga

SEQ ID NO: 79338 - DNA, 462 bp, Oryza sativa
  Clone ID: PAT_MRT4530_79057C.1
gcgccatcatcactgttcatccactccatctctctctctctctctctctctccatcgatccctgcaggttcttgctgctgctgctgctgccttgcttgctgtcaagcatggcttgaccacctgagagcgaggagagcatagcgtagtacttggctagctgctgttcaattcctcatggatgattggaggatcgctagctaggtcgcccggatccacggacacctctcctcgtctcgtgctcgtgcatgccaagatcgatcgatcccagctgctgctgcgagtggagcagtggaggaggagatcggctgctacctgacctagatcgggaagcagattcatccggttgcattacggcggcgaggcgagggcgaggatggatcgtcaccatcaccaccaccaccaccatcaccatcacatgatgtcgggcggcgggcaagacccggcggcgggggacggcggcgc

SEQ ID NO: 79339 - DNA, 1544 bp, Oryza sativa
  unsure (1)..(1544): unsure at all n locations
  Clone ID: PAT_MRT4530_79058C.1
cccacgcgtccggcggtcgccgacgacctcgccaccgaccccgccgccggacgcgaggaagagacggggggagccccggaggcaggagcggcgggaggggatggcgatgcagacggggttcgccacctccaaggtcctcatcctcgtcggcgcagggttgacgagctcgatcgtgctgcggaatggccggctatctgacgtgttggcggagcttcaggagcttatgaaaggtgtaaaccaaggagaaggttcgagtgcctatgacatcgcccttcttcaatctcagattcgaaatttagcacaagaagttagagatttgactatatcaaggcctattaccatattgagtggcaactccgactctggaggcagtttatcctcctacatactgcctgcagctgcagttggagcaatgggttactgctatatgtggtggaagggattgtccttatcggatgtcatgtttgttaccaaacgcaacatgaccaaagctgttgagagtatgtcgaagcaattggatcaagtgtcttcagctttagctgcaacaaaaaggcatctaagtcagcgcctggaaaatttagatgggaaaatggatgagcaagtggaggtctccaaaattattagaaacgaggtgaatgatgtcaaagatgatctgtctcaaattggatttgatattgcagcaatccaacagatggttgctggattggaagggaagatcgagttgcttgataataaacaggatgcaactaatgctggtgtatggtacctctgccaaatagctggaggtctaaaagatggaataaatgccaagttttttcaggaagctaatgaaaaactcaagctcacagagttggctcagtctgaaagaaaggcagtgaaggggcttgaatctgttctggagagcagaaaggaacaaaaggcaatcgactccaaacaaaataccaccgcgataattgacgccgaaaagcccgtgaaaacggtcgatgggcctgtgaaaagcggcgcggtgcacaggtgtagcagaatctcatttcggaaggaaggcctcgctttgtgatcaaagcaaagcgatcgtaaccagcccgctctcgcgatgtacattgtctgcctgattgttttgttcgattaaaaaaaatataaaataaaacctgtacctggagttattttgagtaggcaggttgatgcactattctgattcaaaagtgtatgtggttcaatccacgtacgctctttttcttggattttgattcatgtgatctcatttatttttatttggtgtgaatgtttgtacacagttggttcgaaacattccttgtgccattgtgagagttcccttcggcctgcatgcccttgtcccaagggcggccgcccttttttttttttctgagagatactactacctggatgcacatttggattgtctgagattgtttcaaatatgtcgtgcttgcttgcacaaatctttgagagttttggtactcttcccttttttttgtgttttgtgttctacgtgagtgtatcaancgggantcagtttattgaac

SEQ ID NO: 79340 - DNA, 1639 bp, Oryza sativa
  Clone ID: PAT_MRT4530_79059C.1
atggacgcccgccgcaggcccgcggcgacggcggcggcggcggcggcggcacccgctgatgcgcagccgcgggcgaggccggctgctgcggtggcggcggcggaggccgcggatgctgagctggtgctccgggcgccgaacctgcgcgtggtcgccgcggcgatggtggccttcctcgcgcccttctcgtaccttgcgttcgtgcactacccgctggacgcggcgctgcggcgatccatcctcatctgcggggccatgagcttcggcggcttcgtcgtcgtgctccgcctcgtccccgtcgccgcacgctacctcctccgtcgcgggatgtgggggaaggacatcaacaagcgcggcttgcccatgggcgagatcagagtgcctgaggcacttggcattgttgttgggattgtctacttggtcattgctattctatttcaacatttcaacttcacagcagactctatgtggcttgttgaatacaacgcggcactagcatcagtctgctttatggtgcttcttggatttattgatgatgttcttgatgttccatggagagtgaaacttctactacccacaattgcagcacttcctttgctgatggcatatgctggtggtacttccgtcagcattccaaagcctctaacatcttatgttggagtagctgttctggagctaggttctctgtacaagctctttatgctcctattagcagtcttttgtacaaattcgatcaatatacatgctggcctgaatggtcttgaagttgggcagacagttattatatctgctgcggttttgatacataatgtaatgcgcataggatcttctacggacattgaagcgcaacaagcccatgcattctcgatttatcttgtcctgcctttcttgaccacttcattagctttgctcgcatttaactggtatccttcatctgttttcgttggtgatacctacacctatttttctggaatggcattggctgtggtgggaattttgggtcatttcagcgagacattattgctcttctttttacctgaggttcttaactttctgtgctcagtcccacagctgtttaagtttgttccctgcccaaggcacaggttgccaaggtttgatccccacacaggactgttgacgggtaccaaagatggtaacttggtaaacatattccttaggatatttggaagatgcacagagaggaccctttgcataaggctgctcatatttcaggcgttgtcatgcctattctgcttttggctgaggtacatgattactggatggtacaaatgatcacctggacaggatgcccggcaatcaaaatctgttattacctgacagctgttctctctcggcaatatttgtagactagcagtaaacaaccaacctaaatcttccaaataggagtagctgatgcaagaacaccttacttactgtccacaattttttaaattttctcatgacttagcatttgcatctagtttgtgtcaagccttcggggttttggagttcgtaccttttttttttgtacaaaacaactacatgagatctgaggtgtggccttatgaggttgctacgatagagttcctgaagcttttgatcgaaacaagacttgtatttttgcaaaaaaaaaaaaaaa

SEQ ID NO: 79341 - DNA, 279 bp, Oryza sativa
  Clone ID: PAT_MRT4530_7905C.1
atgccgaaggtggtggaggtgcggccgaccggtgcacgggcgaggagggacgggcggccgaacaactccggggtggacgaggtggagggctacgtcaccgtgccgagggaggggacggcagcgccggctgacggacgggcatggcgaaaggggctgccggaggagatgccgacgaggaggaaggagaagccggcgcgggcgacggcgttccggcgaaaatcgggcgacgccgtggcctggctgggaaagaggacggcgctccggtgccgggagaggtga

SEQ ID NO: 79342 - DNA, 528 bp, Oryza sativa
  Clone ID: PAT_MRT4530_79060C.1
atttgactatatcaaggcctattaccatattgagtggcaactccgactctggaggcagtttatcctcctacatactgcctgcagctgcagttggagcaatgggttactgctatatgtggtggaagggattgtccttatcggatgtcatgtttgttaccaaacgcaacatgaccaaagctgttgagagtatgtcgaagcaattggatcaagtgtcttcagctttagctgcaacaaaaaggcatctaagtcagcgcctggaaaatttagatgggaaaatggatgagcaagtggaggtctccaaaattattagaaacgaggtgaatgatgtcaaagatgatctgtctcaaattggatttgatattgcagcaatccaacagatggttgctggattggaagggaagatcgagttgcttgataataaacaggatgcaactaatgctggtgtatggtacctctgccaaatagctggaggtctaaaagatggaataaatgccaaagtttttcaggaagctaatgaaaaactcaagc

SEQ ID NO: 79343 - DNA, 649 bp, Oryza sativa
  Clone ID: PAT_MRT4530_79061C.1
catttataaaggttcaggattgcatgcaaggtctaaggatgccttatcttggatagttcgcttttcttttggctcatactgctcattgtgctgtaatgatccttctatgctctccattccacaggaagctaatgaaaaactcaagctcacagagttggctcagtctgaaagaaaggcagtgaaggtaatacacaattaatatgcagatgtttgtcctccattcaggtaatttcggtttctttatgccaatccatatctgtgttgtgcacattttaggggcttgaatctgttctggagagcagaaaggaacaaaaggcaatcgactccaaacaaaataccaccgcgataattgacgccgaaaagcccgtgaaaacggtcgatgggcctgtgaaaagcggcgcggtgcacaggtgtagcagaatctcatttcggaaggaaggcctcgctttgtgatcaaagcaaagcgatcgtaaccagcccgctctcgcgatgtacattgtctgcctgattgttttgttcgattaaaaaaaatataaaataaaacctgtacctggagttattttgagtaggcaggttgatgcactattctgattcaaaagtgtatgtggttcaatccacgtacgctctttttcttgggaaaaaaacaaaa

SEQ ID NO: 79344 - DNA, 216 bp, Oryza sativa
  Clone ID: PAT_MRT4530_79062C.1
aaaaagatgttactagtttgtgaaaagagaacgtaacgctttttggcctttactacacgataattgtccagtaaagtaaacatcattatcatatcaaggggaaggccatcagtcatacaatacacacacacttaaaaaaggggctgtaccacccatgtatgattttgcacccctgctttgcttttgcttgccctgggaaaacttgccgctactggt

SEQ ID NO: 79345 - DNA, 177 bp, Oryza sativa
  Clone ID: PAT_MRT4530_79063C.1
atgcaaaagaggatccccttgtcgcaatcccccaaacgcatgggcgccactgcttccattccatcggctcttgaccacctctcgatctccattgccgaccgctcatccgagctgctgcttgccacatggcagctgctacatgtgacaggtccagaaggaaacactgcttgctgctag

SEQ ID NO: 79346 - DNA, 552 bp, Oryza sativa
  unsure (1)..(552): unsure at all n locations
  Clone ID: PAT_MRT4530_79064C.1
tggacctgatccggcgcgccaagatcttccactacggctccatctccctcatcaccgagccgtgccgtccgcccacgtcgccgccatgcgcgccgccaagtcggccggcatcctctgctcctacgaccccaacgtccgcctcccgctctggccgtccgaggacgccgcccgcgccggcatcctctccatctggaaggaggccgacttcatcaaggtgagcgacgacgaggtcgccttcctcacccagggcgacgccaacgacgagaagaacgtgctctcgccgtcgcgcaggagctcatcagcaaggcagccaactagagctcctcggtttcgtcgtcgatcgccgccattgggggcctcggaattttaggtcgatttaatttagttgctgcttcgttttagacaaggaagaggaggggcttgggtgtgttcatgtctgtcttttgtgtgctaagttagttgcttccgtgtgagaacttttggcgtttatttttactattattattaataagaagctcttggatttgcggtggataaaaaaaaantnnaaaa

SEQ ID NO: 79347 - DNA, 1797 bp, Oryza sativa
  Clone ID: PAT_MRT4530_79065C.1
atgcccccgccgtggccgccggccgcgccgccgccggcctgcgcgcgctcgctcgctgacctcctcgtcgcgctctccgccgcccgcgcgctccccaaggggcagcagctccacgggcatctcctcaaggcaggccacctccccgccaccgcctcctcccacgcgcccatcgcccaccacctcctcaccttctacgcccgctgcgcgctccccggcgactccctctgcgccttcctcgacctccccgcgccgccatccccggccgcgtggtcctccctcatatcctccttctcacagaacggcctccccgccgccgcgttcgacgccttccgccgcatgctcgcggccggcgtccccgccaccgaccgcaacattccctccgccgccaaggcggtcgcagccgcggaagactcctcgcgcccgcctcttgccccgcacgcgctccatggactctccgccaagacaccgttcgccggcgacgtgtttgtcgggtcgtcggtgcttgacatgtatgccaagtgcgggcaccttgccgacgcccgccggctattcgatgaaatgccgaagcggaatgtcgtctcctggtctgctctcatatgtgggtacgctgatgctgggatgcattccgcggcgatggagatcttccgcttagcacttgaggaggcagtgccggttaatgacttcacagtttcgtgcattcttcgcgtgtgtgctgcagcaacactctttgagcttggtgctcaggtgcacgcccgatctataaagacagctctaaatgcatcaccgtttgtgggtagctcgcttgtttctctttactcaaaatgtggccttgtggagtgtgcataccaggtgtttggtgaagcacctgagagaaaccttggaatttggaatgcggggctcaatgcatctgctcagcatggtcatactactgcagcatttcaacggtttatggatatgcaaaatgctggatttcgtcccaactccatcacgttcctgtctttgatcactgcttgtagccatgctggtcttgttgatgagggaaagagatatttttccctcatgaaagagtacagaattgagccgcaggctgagcattatgctgcaatggttgacctacttggccgtgtaggacgtataagtgaagcactaggccttattgagtcaatgcccatggagccacctgagtatgtctggggtgcactccttatggcatgtcgcatgtttaaggatgctgacgctgcagcaattgctgcaaagaggttgtttgagacagggtcacgaagctctggtgcacatatgctcttgtcaagcacgtatgcagctgcaggaaggcatatggatgcagcacttgcgaggaaagcaatgcgtgatgcaggtgtacgtaaagagactggactaagctggctggaagctgcaggggaggtacatacctttgtgtcaaattgcaggagacatccaagaagcaacgaaatttacaatgtgctggagaaagttggtgagaagatggaggcagctggttatgtagcagatacaagtgcagtggttaaggatgtggacaaggatgagaagcaggcaacaatgaggtatcatagtgaaaggctagcaataggtttggggcttctgattgttccagaaggtgtaccaatacgagttatgaagaacctacgagtttgtgatgattgccacaatgcagttaagtatctcagtaagtgtacaggaaggattgtaattctcagggataaccgtcggtttcaccggtttgaggatggggtatgctcttgtggggatttctggtga

SEQ ID NO: 79348 - DNA, 444 bp, Oryza sativa
  Clone ID: PAT_MRT4530_79067C.1
atggcagcaacactcggcggtgacgctgcaaccacgcgggggcggcgtgactcgtggcgaggcgctcatgtttcctcttccggcggtgccaagtccgggagtggcagcgcaacctcgacctcgccgctgggactggcgatggcgccgtcgccattgtcgccctcaacggtggcgaagacgacggcgacacaacacgacttgggtgtccggttctcaggcgcgatttccaggcgatgcgacacggtttccgcagttggtggcgcaaattctggcgacaattggagcaaagccaggcggcgtgcgtgcggctcgagtcgcgagcgcgatgggtgggcgtggcactcgtgcgtcgctatggcgcagatcacgccgggtccgcgcgctggttcgcgaagctcgcggctcgatcacggctgcatcgctcctggtggcgtggcctcgtga

SEQ ID NO: 79349 - DNA, 582 bp, Oryza sativa
  Clone ID: PAT_MRT4530_79069C.1
ggccgcttttttttttttttttttatttggctctgaaacatgtttcaattcaaatcccagttgcaaacatcatttgcttcacaatttcatgattcaggtaaacactagaaaaactaaacagcgaactgaacaaggtggattccacggctttccatcaaactttttttcttgaccgcaagacttgtgggcacggccagacgacatgggagagatggcggagggaggcaagatcgatcagccgccgaagccgtagagggtgcggccctggcgcttgagcgcgtagacgacgtccatggcggtgacggtcttgcggcgggtctcctcgtagatcagcccggagatgcgcttcacgccgcccctccttgccagcctccggatcgccggcttggtgatcccctggatgttgtcgcggagcaccctccggtgacgcttggcgccgcccttgccgagccccttgcctcccttgccgcgccccgacatggccgccgacgacgacgattccggtggctcgacgcacgagagagagagaaaagcgagtggaattggagaagaggttggtggtgattggggagtcccggccgg

SEQ ID NO: 79350 - DNA, 4140 bp, Oryza sativa
  Clone ID: PAT_MRT4530_7906C.1
atgccgcgctacaagcctgagtacttgtttggtgttgagggatttgtccaggagttgcgtacgatgtcttttgtcataggatttgggactgcccctttttatgcccagattcctcatgatcgtcacgaagagaagtgccgagtcaaagtcaccttgaacagtaatagtgaagatattccctcagtgatgttcgaagctggaggaagaaactacatccatgcatgtcaggaggtggcaaggatcgccataggagagctccgcgatcgctacagtgatcagttggccgacactgagtatcgctaccatcctcgtcaaccacagggaagtgaccgtggcagctaccttgagactgaaggaattgagaatgatgctaccacaaggcatttggttgagatgctgtgggctatggatgaaacccgtgcagagagtgtgttagcagctcaagatcgtgaagatcagaatcgtggtaagatttgcaagctagaaggcaaagtggatcgtttggagaaggaactagccgcattgaagggagaagcaccaccgctgaaggccagggttcgtcttaccgcaaggaagagagctctatttgtccctcgctatcaattggcgccaaaggtccgtgtggtggagaaagaagttaccccagccctagcggatcctccggtcatcatcataagtgatgatgaagaagaagaatccaagcgcaaccattccaagattgagtgggtagctactcaagatgatgaagacgagccgaacgagccttcaatcgacctccgatgctcggaagaactagagtgccatatggtgaatactcgcagcaacgggaatggccccaacaaccccaataacaacaacaacgaagggaacccaacacttgcccaagttcttgctcagcagactcagttaatgaacatgatgatgcagcaacttcagaaccagcagaaccagggaaataaccatgcacctccccagaacaagttagcagaatttcttcgtgtgaggccgcctactttctctagcaccactaatcctgttgaagctggtgattggctgcatgccatagaaaagaagttggatttgcttcagtgcaccgatcaggagatggtctcatttgcatcacatcagttgcatggccctgcctctgaatggtgggatcacttccgcctgaacaggaatattgctgaacctatcacttggcttgaattcaccgctgctttccggaagacgcatattccctcgggagtagtgtctctcaagaagaaggaattcaggtcgctcacccagggatctcgctctgtcactgagtatctgcacgagttcaatcgtctggcccgttatgctccggaagatgtgcgcaatgatgaagagcgccaggagaagttcttggaaggacttaatgatgagctttcttacccactcatgactagagattatcctgatttccagaagttagtagataaggctattcgccaggaggacaagtacaaccgcatggagcaaaagaaacgtcggattgctcaattcaagacacaacaggggaataatcagaggccgcgtcttactttaggaccccagtctatgccacagggagacccaggacattacgctgacaagtgtccgaagccccgacgcgtgaaggttgtccctgcccagagcaactctatcgcaccagcgccaaaggctcgtgtcaatcatgtcgctgctgcagaagctcaagatgctccagatgtgattttgggtacgtttcttgttaactcagttcctgcaacagtgctttttgattctggtgctacacattcattcttatctatgagttttgcgggaaatcatgggatggaaatagaagatcttagacgtcatttgatggttagtaccccaagtaatcaagcactctctttgaaacgtagcccctctgtcagaatagaaattcaaggagtatcatttctggccaatcttatcctgttagaatccaaagaccttgatgtcatcctagggatggactggttagccagacataaaggtgtgatagactgtgccaacagaaaagtaactctcaccagcaatgatggtcgagttgtaactgttcatgcattgtcttcggagtctttaaggtcaagactgaaccaaataactttggaagagattcctgtagtccgggagtatcccgatgtgttcccagacgatttacctggtatgccgcctaaaagggatatagagttcagaatagatttggtatcaggaacaactccgatccataagagaccttatagaatggcagccaatgagttggcagaagtcaagaggcaagtagacgatttgcttcagaaaggatacatcagaccgagttcatctccgtggggagctccgcttaaaggtgccactgttttctccaagatagatcttcgatcagggtatcatcagttgagaatcaaacaggaagatatacctaagacagcttttaccactaggtatgggttgtttgaatgtactgttatgtcttttggacttaccaatgcccccgctttcttcatgaatttgatgaataaggtatttatggaatacctagacaagttcgtggtggtctttattgatgacattcttatctactcccgaaccaaagaagagcatgaagaacatcttcgccttgcactagagaagctacgagaacatcaactgtttgctaagtttagcaagtgtgaattttggttgtcggaagtgaagttccttggtcacgtcatctcagcaggaggagttgccgtcgatcctagtaatgtggaattcgtaaccaattggaagcaaccaaagacagtttcggagattcgcagtttcttaggcctcgcaggttgtgttttgatgcaagatgggaaggtggttgcctatgcatctcgtcagttacgtccgcatgagaagaactaccctactcatgatcttgagttagctgcagtggttcatgcgttgaagatttggcgtcattatctttttggtacttgtacagaggtctataccgatcacaagagtttaaagtatatctttactcagccggatctgaacatgagacaacggagatggttggaattaattaaggattatgacatgggaattcattatcacccgggaaaagctaatgttgtagcagacgctcttagcaggaaaggctattgcaatgttacggaaggacgacagttgccattgcagttatgcaaggaatttgaaagattgaatttgggaattgtcagtagaggtttcgttgcagccttagaagcgaagcccactctaattgatcaagttagagaagcccaaattaatgatcctgatattcaagaaatcaagaagaatatgagaagaggaaaagctatcagtttcttggaggatgagcaaagaactgtatggttgggtaagagaatctgtatccccgacaacaaagatttaaaagatgcaattctaaaagaagctcatgatactttatactctattcaccctggtagtaccaaaatgtaccaggatctcaaggaaagattttggtgggcaagtatgaagcgtgaaatcgcagaatacgtagcagtatgtgatgtttgtcagcgagtcaaggcagaacatcagaaacccgccggtttgttgcagcctttgaagattcctgaatggaaatgggaagaaatcggtatggattttatcactggtttacccagaacgtcatcggaccatgactctatttgggtgatagtcgacagacttaccaaagtggcacatttcattccagtaaaaacaacctattccggaagtcggttggcggaattgtatatggcaaggattgtgtgtttgcatggcgtccctaagaaaatagtgtctgatcgaggcagtcaatttacctcaaatttttggaagaagcttcaggaagagatgggttctaagctgaactttagtactgcttatcatccgcagacagatggacaaactgaaagggtgaatcaaattttggaagatatgttgagagcttgtgctttagacttcggtggaagttgggataagaatctaccttatgcagaattttcatacaacaacagttatcaagctagtcttcagatggctccttacgaagcactgtatggtcgtaaatcattcaagaaagattgcgagtag

SEQ ID NO: 79351 - DNA, 213 bp, Oryza sativa
  Clone ID: PAT_MRT4530_79071C.1
ataaattccagcaccatggccctgtgactatgaccgatatgttgtcaacgaccttcgtcctacccaatccggacggaacgtatcaaacattaccgagaaaggtgatcaataaaccaacggattgtattatctggtccagcaggctcggagatttatcaaggaaacatcgataaaggcaccttgcaaaacatatcggggctaggctacttgctg

SEQ ID NO: 79352 - DNA, 272 bp, Oryza sativa
  unsure (1)..(272): unsure at all n locations
  Clone ID: PAT_MRT4530_79073C.1
tgatccaagaagtttgcgagtttnatctttgatgagctgcatcatcgatctgatctgcaaaggtggtgaaaaaaaaaggcaaaattctgtcgaatgctgcagctgaagaagtagctttctgttcatgcttttttttttaaatgtgaagcactagtagactagtagtagtgttttcaattatcctttttctttctgcgagtatttagtgttattatccgaaatagaggttgaaataaagagcatctgtacattatgcaaaaaaaaaaaaaaaa

SEQ ID NO: 79353 - DNA, 132 bp, Oryza sativa
  Clone ID: PAT_MRT4530_79074C.1
atgggccagtccattttatttgagaagcgagatggcggtccggcgaagtggcatgtgcgggtgaaggtgattccgtcgtgcgtctccaacatcgtcggctgggtggcgctgcttagggcggtgccaagttga

SEQ ID NO: 79354 - DNA, 220 bp, Oryza sativa
  Clone ID: PAT_MRT4530_79075C.1
tcatcggctacggatcatgacaaggcagagaggatcatggacgacatggaagcatataccataacgtgtattgattcatatactattccatactataacatgatatggtagatgaactaattgcacataatcacaatgctgatgcacatccacactgacaacctaaacacaatgctaacgccacacacactgacaactctaaatctagctaacataacat

SEQ ID NO: 79355 - DNA, 402 bp, Oryza sativa
  Clone ID: PAT_MRT4530_79076C.1
gcacacaaagtctttaatttgatgataagtacggcgtaataattagttaagctgataagcacgcagcgagcaccttgtccacaaactttaatctctgctcgtatcaaacaatcaaatcctgcgtgctgctgctgcttacccggcgaatctgctcctcaattttgatcacaagatctgatctgattcatgtcactgtccatgctccctttgattcttcttcttcttcttcttgcagaaatcagcagcaagctaagctgtccatggctcccaatggagaagcttcctcagcggtggtggccgccgtggcgccgttcttggcgacgttcatcggcaaccaccacctcgggcacggcggcgacggccatggccacaaggagatggagctgctggcgacaacgaccg

SEQ ID NO: 79356 - DNA, 772 bp, Oryza sativa
  unsure (1)..(772): unsure at all n locations
  Clone ID: PAT_MRT4530_79078C.1
attgtagtttctgtcgtactttggcatacaaatatatgtttgatatacggtcggcttgggcgatccaggggcggcggcggcggagagcttcctgaggatgtgtctcatggcgtcggcctggaagagcgccgggtgcgtcctcccgaagccgttgaagcgcctgcacacgcccatgtgcgccgccagcgccgcctcccgctcgccgcccttcttcttcctggcctcctccgccaccgcctccgcgcacagcccgcacacccaccgccccgagaaccgccgccgcaccgccccggcgtacgccgccgtgcactcctccgacatgccgcagcactcgcactccgcctcctccaccacctgctgctgctcctccgccgggatgctctcgccgccgccgccgccgccgccgccggtcgtcgtcgccagcagctccatctccttgtggccatggccgtcgccgccgtgcccgaggtggtggttgccgatgaacgtcgccaagaacggcgccacggcggccaccaccgccgacgaagcttctccattgggagccatggacagcttagcttgctgctgatttctgtgtgtgttgcttagcttaattactagcttagtagctatacaccctactagctactacgccatgggagctaatttatagagctgtgtagcagaagaagaagaagaagaatcaaagggagcatggacagtgacatgaatcagatcagatcttgtgatcaaaattgaggagcagattncgccgggtaagcagcagcag

SEQ ID NO: 79357 - DNA, 5200 bp, Oryza sativa
  Clone ID: PAT_MRT4530_7907C.1
taattttaaataataaattccaatataaaattccgacgttcccggagagtccgattttgcaggagaagaatttgaagagttccaaggccagcaaggtaactgctggtttggaatggtatattcctggtttggagatagaactatgcagccgggattggttgttcagaatggttgggcctatgcaacaggatgccgcgctacaagcctaagtacttgtttggtactgagggatttgtccaggagttgcgtacgatgtccttcctcataggatttgggactgcccctttgtatgcccagattcctcatgatcgtgatgaagagaagtgccgtgtcaaagtcaccttgaacagtaatcatgaagatatcccatcggtgatgtttgaggctggagggggaagctacattcatgcttgccaggaggtggcaaggatcgctataggaaagctacgcgaaagctacaatgatcggttggccgacaccgagtatcgctaccatcctcgtcaaccccaaggaagcgaccgtggcagctaccttgaaccggcagggattgagaataatgctaccacaaggcatttggttgagatgctgtgggccatggatgagacccgtgctgacattgtgatagcagctcaagatcgtgaagaccggaatcgcggaaagatttgcaagctggaggacaaggtggatcgtttggagaaggagccagccgcattgaagggagaagcaccactgcaaggaagagagctctattcgttcctcgctaccagttggcgccaaagatggtgcttactcgcagcaatgggaatggacccaaccccaacaacaacaacaacaatggagagaatcccacgcttgccccagtcctggctcaacaggcacagcttatgatgaatctgatgatgcagcaactccagaaccagcagaaccagggaaacaatcatgcacctccccagaataagctggcagaatttcttcgtgtgaggccgcctactttctctagcaccaccaatcctgttgaagctggtgattggctcacgccatagagaagaagttggacctgcttcagtgcacagatcaagagaaggtctcttttgcttcacaccagctgcatggccctgcctctgagtggtgggatcacttccgtctcaacaggactactgctgaacctatcacttggcttgaattcactgctgcttttcggaagacgcacataccatcaggagtggtgtctctcaagaagaaggagttcaggtcgctcactcagggatctcgcactgtcactgagtatctgcatgaatttaatcgcctggctcgttatgctccggaagatgtgcgcactgatgaagagcgccaagagaagttcctggaaggactgaatgatgagctttcttacccattgatgactggggattatcatgatttccagaagttggtggataaggctattcgccaggaggacaagtacaaccgcatggagcagaagaaacgcaggattgctcatttcaaagcttagcaggggagtagtcagaggctgcgtcttgccttgggacctcagtcagtgccacagggaggttcttcgtctattgttcgtccgcagcgtcagttcttcaacaacaatgctggcaacaacaaccgcaaccaagctccacgccctgttgcagctccgacacagaatcagccagccaagagggagcaaggcagcaagcccggagtgtgctttaactgtggtgacccaggacattacgctgataagtgtccgaagccccgccgcacgaaggttgtccctgccaagaacaactcctccgcaccagcgacaaaggctcgtgtcaaccatgttgctgctgcagaagctcaaggtgacccagatgtgattttgggtacgttccttgttaactcagttcctgcaacagtgcttttcgattctggtgctacacattcatttttatctatgagttttgcgggaaatcatgggatggaggtagaagatcttagacgtcctttgatggttagtactccgagtaaccaagcactctcatcacaacgtagcccctctgtcagaatagagattcaaggtgtaccatttctggccaaccttattctgttagaatccaaagaccttgatgtcatcctagggatggactggttagccagatataaaggtgtgatagactgtgccaatagaaaagtaactctcaccagcaatgacggtcaagttgtaactgttcatgcactgccttctgagactttaaggtcaagtctaaaccaaataactttggaagagattcctatagtacgggagtacccagatgtgttccttgatgatttacctggtatgccgcccaagagagatatagaattcagaatagatctggtaccaggaacaactccgatccataagagaccttatagaatggcagccaatgaattagcagaagtcaagaggcaggtagatgatttgcttcaaaaaggatacattagaccaagttcgtctccatggggagctccagttatttttgtggataagaaagaccatacccagaggatgtgtgtggactatcgagcactgaatgatgtgactatcaagaataagtacccgctgcccagaattgatgatttgtctgatcagcttaaaggtgccaccgttttctccaagatcgatcttcgatcaggatatcaccagttgaggatcaaagaggaagatatacctaagacggcttttaccactcggtatgggttgtttgaatgtacagtcatgtcttttggacttaccaatgcccccgctttcttcatgaacttgatgaataaggtgtttatggaatacctagacaagttcgtggtagtctttattgatgacattctcatttactcccgaaccaaagaagagcatgaggaacatcttcgtcttgcactagagaagctacgagaacatcaattgtatgccaagtttagcaaatgtgaattttgattgtctgaagtgaagttccttggtcacgtcatctcagccggaggagttgccgttgatcctagtaatgtggaatccgtaaccaactagaaacaaccgaaaacagtttcagagattcgcagtttcctgggtcttgcaggctattacatgaggtttatagagaatttctccaagattgctaagcccatgacacgactgcttcagaaagatgtgaagtacaagtggtcagaagaatgtgagcagagttttcaagagttgaaaagtcgcttaatatcagcacccattttgattctgcttgatccaaagaagggtttccaagtgtattgtgatgcatccaagcttgggttaggttgtgttctgatgcaagatgggaaggtggttgcctatgcatctcgccagttacgtccgcataagaagaactaccctactcatgaccttgagttagctgcagtggttcatgcgttgaagatttggcgtcattatctttttggtactcgtacggaggtgtatacggatcacaaaagtttgaagtatatctttacccagccggatctgaacatgagacagcggagatggctggaactgattaaggattatgacctgggaattcattatcacccaggaaaggctaatgttgtagcagatgctctcagcaggaaaggctattgcaatgctacggaaggatgacagttgccattggagttatgtaaggaatttgaaagattaaatttgggaattgtcagtagaggtttcgttgcagccttagaagcgaagcccactctcatcgatcaagttagagaagcccaaattaatgatcctgatattcatgagatcaagaagaatatgagaagaggaaaagctatcggtttcttggaagatgagcaaggaactgtatggttgggtgagaggatctgtgtcccagacaacaaagatttgaaagatgcaattctgaaggaagctcatgacacgttgtactccattcaccctggtagtactaagatgtaccaggatctcaaggagagattttggtgggcaagtatgaagcgagagatagcagagtatgtaacagtatgtgatgtttgtcagcgagtcaaggcagaacatcagaaactcgcaggtttgttgcaacctctgaagataccagaatagaagtgggaggaaatcggtatggatttcatcactggtctacccagaacgtcatcaggccatgactctatctaggtgatagtcgacagacttaccaaagtggctcatttcatcccagtgaggacaacatattccggaagtagcttggcggaattgtatatggcaagaattgtgtgtctgcacggtgtgcctaagaagatagtatcagatcgaggtagccagtttacttcaaagttttggaagaagcttcaagaagagatgggttccaagctgaactttagtactgcttatcatccgcggacagatgaacaaaccgaaaggataaatcagattttggaagacatgttgagagcttgtgctttagacttcggtggaagttgggataagaatctgctttacgcggaattctcatacaacaacagttatcaagctagtcttcaaatgcctccttatgaagcactgtatggtcggaagtgccgcacaccacttttgtgggatcaaacgggagaacgtcaggttttcgggactgatatcctaagggaagcagaagagaaggtaaagatcattcaagaaagattgcgagtggctcagtctcgtcataagagttatgccgacaatcgccgtagagatctaagttttgaagaaggagatcatgtgtaccttcgtgtctcgcctcttcgaggggttcatcgttttcacaccaaaggaaaattcgcaccgcgtttcgtgggaccttataagattgtcagtagaagaggtgaggtagcttatcagttggagttacctcaatccttggcaggtgtccataatgtgttccatgtgtcacagttgaaaaagtgtttaagggtacccactgaagaagctaatcctgaacagatagaattccaagaggatctgacgtatgttgagaaaccaatctgtatcttggagacagatgagagaagaaccaggaatcgagttatccatttttgtatggtccaatggagtaatcactcggaagaagaagctacttgggaacgagaagatgaattaaagtcagctcatccgcatctgttcaccagttcttccgaatctcgaggacgagattccgtt

SEQ ID NO: 79358 - DNA, 1229 bp, Oryza sativa
  Clone ID: PAT_MRT4530_79081C.1
atggggctctgggactcgctcctcaactggctccgaaggtctccccccgcctcgctctctcccttcttcttttttccgcttcgtgcatctcagttcagtcccttctgtggggacgagatcgtccatgtgtttcgggttgagcgggaggtagggtttggtagggattggtttggatcgggctcccctgtgcggcggcgggatgatggggcggggctgtggagtggagtggtttgtgtggcatgtgcggttagatccaggattggtaaagcttgtcaaaatcggatcgttgttgctcttctcgctccctcctcttccccccaaatcgcggattccctcgacgagagagatccgggcgcggctggcggcgacggtcaccaccaccaccaccccgacggcggcgaacggcatggggctctgggactcgctcctcaactggctccgaagcttgtttttcaagcaggagatggagctctccctggttggcctgcagaatgctgggaaaacatcactagttaatgctgttgctacaggtggctacagcgaagacatgattccaactgtaggatttaatatgcgaaaagtcacaaaggggaatgttacgattaaactttgggatcttggagggcaacggagattccggaccatgtgggagcgctattgccgtggagtttctgcaatcctatatgtggtggatgctgctgaccgggatagcattccgatagctaaaagtgaattgcatgacctgctgacaaaacaatctttagctgggattcctttactagtccttggcaacaaaattgacaagtcagaagctgtttcaaagcaagcgttggttgatcaactaggcctggaattgataaaggaccgggaagtttgctgctacatgatctcttgcaaggactctgtaaacatagatgttgtcattgattggcttatcaagcactccagaacagcaaagtagggttgtgtatgtctatcacttgatgcgtgctgatatgaattcagtttgtttatctccagttttatggtccaaaagttaaaaagtgactaccttgtaatctatggtttctcgttggtgtcactgtcctacagtatggtgtcaaatacttgagcatcaaatcctgtatttcatgtaaattccttgaatattttattattctttattaaagacctggttttacgttggtttttaaaacaaaaggaaatgcataatgaaatccttttgaagt

SEQ ID NO: 79359 - DNA, 201 bp, Oryza sativa
  Clone ID: PAT_MRT4530_79082C.1
atggggccatgggccatgggctcatcactcatcacgcggtgcggggtgtggaagggcgacccggtcggtccgaccgacctgggcgtcgcgtcgcggtcaaagccgtggggcggggcggatcggattgatccgaagatgaaggagatggacgagcattacctgatctcagtggaggagaagagaagatggaagacatgctga

SEQ ID NO: 79360 - DNA, 375 bp, Oryza sativa
  Clone ID: PAT_MRT4530_79085C.1
gtacctgtaaacgcggggaaggaggctgagggcaagaatgtaatcaagcaggctgacaatgccttggtagagaagagcaatgtccatttcgtagacacagagacttacgtacagtacattgtcaagttggataacaagttcgatagcaacctaatgaagaaaatactgagcgtcattgaagtattcgagctttgcaagaagaaagaacaaacgtaccagaaaattacaacaaatatgctcgagcaaatgcaaggccgagaaaaatgttgtatgacccttgggagttgggaagaatataatgttgacctcgacatggagacagatgatgaagaagacggtgataacgattcagatggaggaaataatgaaaactaa

SEQ ID NO: 79361 - DNA, 105 bp, Oryza sativa
  Clone ID: PAT_MRT4530_79086C.1
atggcgaaggcgagggagcagtgcaccgccgggatgttggacgacgcagcaccgtcgtgctccgattctcgccgagccagtgccggtggtatcgccatctactga

SEQ ID NO: 79362 - DNA, 482 bp, Oryza sativa
  Clone ID: PAT_MRT4530_79087C.1
ttgctgcgccttgtcgatgccggagaggtcggcgtcatcgggcgactcccccggcaggtagaccacccgcgtggcgggcgaaaccgcctgtttgatgccttgcagaatactgatcgattcttcggcgcgcccatctcctgaccaggggccgagggtggagagtttgtcgtcggcaagcgcgcctaccaccaggagttttgccaggtccttgtgcaagggcaacaaggccccgtcgtttttcaacaacaccatggatttctgggcggcctccctggccagggcgcgtgttgagggggtcagcagactggatttttcacgatctgcattgctgtaacgataaggatcctcgaacaacccaagccgttgcttggcctccagtacacggcgtacggcatcgtccagggcacgttgcgggatttggccgctgcgcaccatggccggtaactcctgggcgtagagaccgctgaccatatcgatatcca

SEQ ID NO: 79363 - DNA, 655 bp, Oryza sativa
  Clone ID: PAT_MRT4530_79088C.1
atggcgaagcgcacacacgcttgttgcgttctcgccgtggggagcgacacgatgacgagtggggccgtcctgtcagtccccggggttttaggggacggcggcgacggcgggatgcgcgcgcggaggggaggcggatccacggcggcgccagcttgtggaggtaggggcggtgtccacggatccgcaccggcgctagcttgtggaggtagggggcggcggcgggatgcgcgtggaggggacatgcgccagtgctcgcttgtgaagggaaagagcggtagcggtgggaagctgagagggatccgcgccgaaaatggcacccttgcccctccccaggctgccaaggcccccaccgccgtcgatgatgatggcctcgccgccagccccgccgatgtccctggcctctgttagtgatatgcccgacgcaggcgccgggatggccccgtccagcagcgagctcatgctcgcactcgcgcccaccgcggccgggaagagtgccgctggcgccatctccgcctccgccagcttcgtcgccgtcgccgccatgaacttgcttggtatcacgcgcctccgcatgcgatacctcgccggcagtgacgcggagcgccgccacaactacttcgagcaggaccacactgacggcaccttcccctgctag

SEQ ID NO: 79364 - DNA, 434 bp, Oryza sativa
  Clone ID: PAT_MRT4530_79089C.1
ttgttttttgattttttttgttttttatttttttttttaaacctgaccgggataactggtaaaccaataagaaaacgatgaaaaacaatgcaatacctgcaggggctgaggagtcggatggcggaggagtacaaggagaccggggcgcggccattctacacggggacgggggagaaagcccaggagagcacgggggaagccctcatctcgtcgggggagagcgagaccttccttcaaaaggggatccaggaacaagggggcggccaggggctcgacaccatttccgagatccaggagcggcaccaccccccgaaggaaatcgagcgcggcctggtcgaccttccaccaggggtcccctcacatggggggcctcgtcgagggccagggcccccatcttaaccacattgagaggcacgtcgggcgcgccaacttct

SEQ ID NO: 79365 - DNA, 713 bp, Oryza sativa
  Clone ID: PAT_MRT4530_7908C.1
atggtacttaaggaccggtttgcgagatgccctggaagaacttatcgtacttaccacaaacctgacgcatccaggtaagggtgagcgtgatggagttcggatgggccccgcgacggcttatgcggctttcggattcacctaggcacgagaggggactgcccgctgccttgcgaggagtgggggtaaaacctgaggtgtggtgtacttggttagagggggttatgcgaagggtcctatcacggcctctttccgttatgtcgtgttcaggtgggtggttgggcctgttgcaacgtggtatagcgttggacagtggatggttaatattgattaattattacaactgttttactgctttcaactactgtctataaatgctcgctttatacaaatgatccgctctagctatcctttggttatatcctgcatcataccccctatttcggtatgacttgctgagtacagtgggtagtactcagtcttgctctattttccccaaatccccagagtttgagtatgcgtcagatggtggcttttccgaggagtaggcttcgtccgtgccgtcgaggatgcctgtggagtggtgttcccgctgcagtccaagtcaaggcttagcgctcgataagattaataggatactcatatctataagtgacgaggactctctctctcgttcataaatgctacttcctccgtttaacaatgtaagtcattct

SEQ ID NO: 79366 - DNA, 381 bp, Oryza sativa
  Clone ID: PAT_MRT4530_79090C.1
gtctacaccaacacatattaaccatgaggatcacatgtcatgttgcaggaccaccagccgaataacaaagcagactacaggtcatgaagaagctgatagaaaagcctgaacaagcactgctcacggttgtactgccggacacactggaaactcacaaaatggatgggtggcacacatacgaatcgacagttttgctatgacaattgcaaatatatactagttatttcactatacgaagacgatcgctgcacattcggacgtgacaaattgacgagtctagtgatcgtctctggagttccgctgcaatgcatctctattgactacagctgtgctgagctcgatggttgaaacgatgagcgacctgtatcactgaagaggagc

SEQ ID NO: 79367 - DNA, 679 bp, Oryza sativa
  unsure (1)..(679): unsure at all n locations
  Clone ID: PAT_MRT4530_79091C.1
tacagcgncagaaggggccaagagggcaagaggagancttgttgcaaagcnccctattgaacaggttccacttttgcaggaagagataataagcatatgccgtagcatgggaaaggctgttattgtggcaacaaatatgctggaaagcatgattgttcacccaacaccaaccagagccgaggtatccgatattgcaattgctgttcgagaaggttctgatgcaataatgctttctggggaaactgctcacggaaagttcccgctaaaagccgtgaaagtaatgcataccgtagcattacggacagaagccaccatacccggtggtcagatgccaccaaatattggtcaagtattcaagaaccacatgagtgagatgtttgcttaccatgcaaccatgatgtctaataccctcggaacctcaactgttgtcttcactagatcaggcttcatggctatccttttgagccactatcgaccttcaggcaccatatttgcttttacagatcaaaagaggatacaacagaggttggctttgtatcaaggagtctgtcctatttacatggaattctctgaagatgctgaagagactctcacaagggccttggatttgctgcagaagcaaggaatggtgaaatcaggagaagaagtagcacttagacaaagtggcaggcaacccata

SEQ ID NO: 79368 - DNA, 154 bp, Oryza sativa
  Clone ID: PAT_MRT4530_79092C.1
ggtagagatcaatgagaggccggtgaagaaggctatgctcgatttctccagcctttcagtctccgatccatcctctgctcctaataaagtttccgtgcttacagcttcagaggaaccacgggttaagaaacttttggtacagcacattgagaca

SEQ ID NO: 79369 - DNA, 200 bp, Oryza sativa
  Clone ID: PAT_MRT4530_79093C.1
gagaagagctcgcaagcttctcaaagctggtttcatcctagaagttctccacctagagtggctagccaatccagtcatggtgcgcaaggccaacgggaagtggaggatgtgtgtcgatttaaccgatcttaacaaggcatgtccgaaggatcacttccctcttccgaattcggtccaactctctttatctcttcgcgcgg

SEQ ID NO: 79370 - DNA, 1103 bp, Oryza sativa
  Clone ID: PAT_MRT4530_79094C.1
tcaaacttccgtttttggttgtcgacatcgttgttgcgtcacggatgcttgcggtgaggaaagtgatgaggtatatggttttctgactgcatatgcccattggtaattgtgacattgatacgccattgctgggttgccacaaaccaacaggcccgattgcccactgggtgcgaggtttatatacatattttggggatcaatttcattaaatagattgatgtagaagcgcaacccatctggactgacatcccatctaataccaatgctttctgcatttagaagatgctccttcgctaaagcaggtgcaatcccaagtgtaaatgcagcatcgctggggcttattcccttctgaagggcatcctccttttgtgcaagtgatgagattctcgcaaatacctcatcatcactatgcgtcttggtctggatcaccttcactccactgtcaaatttcctgagcatgactgggacgtcaaatttctcccaaagggaacaggcttgcagaagatcctctggtgagatcaactctgtccctcttgcacggttgtagagacaatagacatcaactagtgccatcataccacctgctttctctagtggtgttctaatatagtcagccaactggcgtgacagctgctggtggtacagagcaccagcggtttctttcgtcacaggggacacgattccaacactcaatagccaatcctgcatgtcttgcttagatcccatctcttcatcattggaattggattgggctgatgagttcgtcaatagcttttgcctcattttctccgctaactccatcatttccttagctttgctcatgagggcgttgagatcctggaaggcggcctgccgattctgccccgcgctctcccacgcctcctgctccatccgcaggatcccggacaccccaaccacgggcatcctgatggcgagatcctcctccgcgggggccccctgcgccgccgaggagccgcccgcgggggcagccgccacggcggcgaccacctcccacgccctcgcgcggacggcctcgagcagcctcccgtagaacacgtcggcctcccccttgctgacgacgacggcgacgacctccgatcgcg

SEQ ID NO: 79371 - DNA, 2100 bp, Oryza sativa
  Clone ID: PAT_MRT4530_79095C.1
cacgagggttcaatccctgatccatccgaagtgccgaagtccacctgctcccctgcggtcgcgaaactctactcagattggggcaatccattgctcctgtatagcttcttgatctgctccagctgcttccgtccccgggacgaggcccccccccccccccctctccatggaagaggcagcagaagataggcgattgcaggtgcgagaagagggtggtgatcaagaaccgctccttcttcttcctcaggatgctaatctttacaccggagatggatctgttgatatcaaagggcgccctgcattaaagcatgccactggaaattggcgtgcatgttttttcatcctaggggatgaatgctgtgagagactggcctattatggtattgcaaagaacctagttacttatctgaaaacaaatcttcatcaaggcaaccttgaagctgcaagaaatgttacaacttggcaggggacatgctacctaacacccctcattggtgccctcctagcagattcttactggggaaagtactggactattgctgctttctcagcaatttattttattggtctggttgctttgacgctgtcagcatcagttccagctctgcagccgcctaaatgttcaggatctatttgtccagaagcaagcttactccagtatggtgtatttttctctggcctctatatgatagccctcgggactggaggcatcaaaccttgtgtatcatcctttggagctgatcaatttgatgacagtgatccagcagacagagtaaagaagggctccttcttcaattggttttacttctgtataaatatcggtgcatttgtatcaggcaccgttatagtttggatacaagataactcaggttgggggataggatttgccattcctactatatttatggcattagcgattgcaagtttctttgttgcctcaaatatgtacagatttcagaaacctggtggaagccctcttacaagagtgtgtcaggttgttgttgcagcattccgtaagtggcacactgaagtgccacatgatacatctcttttatatgaggttgatggccagacttcagcgattgagggaagccggaagctggagcacacaagtgaacttgaattctttgacaaggctgccatcatctcatctgatgatgccaagagtgactcctttacaaatccgtggaggctatgcactgtcacccaggtggaagaactgaaaattctaatcagaatgtttcccatttgggccactactattatattcaacgcggtgtatgctcacaactcttctatgttcatagagcagggaatggttcttgacaagcgagttggatctttcattgtccctcctgcatccctctcaacttttgatgtcatcagtgtcatcatctggattccgttttatggccgtgtgcttgtgccaatagctagaaagttcactggaagggagaagggtttctctgagttacagcggattggaatcggattagccctctccatccttgcaatgctatctgcagctcttgttgagttgaggcgtttagggatcgccagatctgaaggtcttattcatgaggatgttgctgttccgatgagcattctttggcaaataccgcagtatttcttggttggcgctgctgaggtctttgctgccataggtcaggttgagttcttctacaatgaagcccctgatgccatgaggagtttgtgtagtgcatttgcgcttgtaacagtctcactggggagctatttaagctcaatcatattaaccttggtgtcatattttacaactcaaggaggggatcctggatggatcccagataacctgaatgaaggccacctagatcggttcttttcattgattgctgggatcaactttgtgaatttactggttttcactggttgtgcaatgagatacagatacaagaaagcatgatgactgtactcatggtaaggtcagtttgtgttagtaataacagattttacattcatcgaatccaatgcattgcacagactagaccatgtaagttaagatgccttagctaaacgctctcatgaatttgctttgtagttcaaaaaaaaaaaaaaaaaaaa

SEQ ID NO: 79372 - DNA, 330 bp, Oryza sativa
  unsure (1)..(330): unsure at all n locations
  Clone ID: PAT_MRT4530_79096C.1
gcagcagcaaggagctagagagcaaaggggagagaccccggggaagagagagcagcagctagggcgcaagtgcaaatcttcgtaagccctgactgggagccatcaccctcgnggtggagagcagcncacattacantgcaaggctaagaccaggcaaggagggaatccgncgaccagcagcgctgaatctcgcgggagagctggaggacgacgaccctngctgactacaacatcagaggagtcaccctncacctcgtctcaggtccgtggcggtatatcgagcgtcgttcaggcgttgccgaagacaccaggcaagtgtctgccgaaatg

SEQ ID NO: 79373 - DNA, 624 bp, Oryza sativa
  Clone ID: PAT_MRT4530_79097C.1
atggctgcacgggtcgaagctagagggtttattttcggtcctcccatagcgctcgctattggtgcaaaatttatcccactaagaaaacctaacaaacttccaggtgaggtgatgtcaaaggagtacgagctggagtatggcgccgactgcttggaaatgcacgtcggcgcggtacagcccggcgagcgagcactcgtcgtcgacgacctcgtcgccaccggcggcacgctctgtgccgccatcgtcttgcttgagcgtgctggtgcagaagtggtggagtgtgcatgtgtgattgagctcccggaactgaaggccacagaaagtgtggcaagccacacttgtctaacattacctaaaataggttgtctcaaattaaaaggaaaatatgagtatcaccagtctccaaatggatcgctgaatgtcgcattttcagctttaattgtccacaatgtcactgtcacgtcatcgcgagaaatgtccagggtcttccggctagctccacaaggtggtgggctagacgacccgggttcagggttcactctatcggttcaggggtttatatcagagggtcgtgagaggctcaatgggaagccactgtacgttctggtggagtctcactcctag

SEQ ID NO: 79374 - DNA, 498 bp, Oryza sativa
  Clone ID: PAT_MRT4530_79098C.1
gggggccctcacccaaaaacccacccaaaaatattcagtggaaggcaaagcgacaaattccagggattatttacgggaggagggggcaatttgaagggaccaattttttaaccttttttttaaaaaaaattgggggggcaagggcaaaaaaaatttttaaaaaaaaaacgggccgggaaaaaaaaaaacaaaacgattttgggaacaaaaaaacacaaagggttaacggccctgggcttttttaaaaacttaaaaacaatttttttgcaaaggggaaaggggtttttaaaaaccagcctttgccggacccatccaacagggaagtcatgtccacagcccaggggcccaaaataatccccaaaaaaaaacttttccgggaaaaaacagaagggctttttttccacagatgcttccaacccccaagaaaaaaatttccttggcttaaggaactttgaaactttttcctcacgggggccggggctaaaattgcctattttt

SEQ ID NO: 79375 - DNA, 1139 bp, Oryza sativa
  Clone ID: PAT_MRT4530_79099C.1
acataagtttccattgccgctactaaactctcagtatcacgatcgccgtagtatgattcatgatcatggtgaccctggttttccttaagatcactccctttacggaaaatgcgaatggatggataaccttgtatatggtgcctcctacacaagtcaatttcttcagtgcagtcaaccttggcaagaatgattctgccatccatttcaggatcatatctctccctcattatttttgcagtcttctcccacgaaggtttcaatcgattgctccagtaacaccagggggcataaaaattaacaaccaaaacaggatactggtgtgaatagctatcaaaattgcgagaggacaagggaactgaaccatcatcatggttttcttcaacatcatctccatgtttgctgaccgtaggaataggtcctgggtggaactcggatccagtaggcactaaattccgatcaattgaatatttgcgaacagttttcgttatgttcaatctgtttgttcccagaacatcactgacatcaactgatgcaaattcgcatgaaagtgcaggaaagcttaagttaaaatctatccgtaagaactccccatctgaactcctatcaacaatcacagatgtgctagtattgactgctaagtaattactcagttccattccaaacaaaaacaccatagctagtgctgctacaatggacaatccagccccagatagtgatgcctcggtcaaatccctaggaattttcctgtagaagtcgacggacttgagcttactggaggagatcatggctgccggcggccgggccctcctccccgccggtgacgaggtgggggtggggggaagagatcggggcggcgcgtggagagatctggaaggaaggagagggaaagggaggaggagagaggcgagatctctgtggggggtggaaagggaggaggaagaagaggctgtccgcctcgcgtcgacgctgctacggtgcagggtcgcgagagatttgccggttgtaactgcaactgcaattgctgcccgcgtcggtgttcttttgttttcttttctttttttttcttttttttttgattggaatagggccgtaacaaacgggtccatccgcggacgcgtgggtcgacccgggaattccgg

SEQ ID NO: 79376 - DNA, 1185 bp, Oryza sativa
  Clone ID: PAT_MRT4530_7909C.1
atgctgaacctgaatcaaatacaacctcaagtgcagttggaggcagtccaagcactcaccccacaagtcagcatgccgccagcatcccgaaggacccatgatgacgtgccacctgttgacccaaaagaagcaagtaacatttgctttacgtgtgatgagcaagtgcactatgcaagggagcgtcctcagcagaaaagaaaaacaccaatgggaaccgaagatgaagtccgtaagatgatcattaccagcacagaatggcctccaccaggaatgacaagacgtcagagaagaaataccttccgaggtgcaccacagttgacagagcatcttttagctaatggaggtagagtatctgatagtgcagattcagatcaagtctcgtcagatgatgaagatgaaatggaacgtaaggcatgctctcgttgtggagaaatcggtcatgtcgccagctcgtgtgccactatatgcgttcattgcgaggaaggccatccacccgacagattgtcaattcagttttctgccgacgaagaagatggccaaccaacccgccagttccaacggagagaagcatcaaggcaacaccaatcctcgccaagattacagtttcagcctaactccagtgtcaggacagaggaatcaaatgagaaaagaaaatgccgagtccgggaagatatctgttgcttcaattgtcaaggaatgggtcatttcgccgacaagtgcccaaaaccgagaaacatagctgccggcatgtcagtccacgcaaccccctgcaatcagaagcttgctcctcaacgaattgtcatccatgcatccagaagcagtcctatagcccgcgttgcaacagctccaattccaatgaatgcactaccacaaggtgtcaatgctcaatttcagccccagccaccagctgacaagacagaggtcagtatctgtgttgtacctttggaagttccaatacagcagctgagaaatcaagtacaagatgaagaacccgagtgtaagaaagttattgtttgttacaactgcagtgaagaagggcattactccaaaaactgtccccaaccaaggcaaaatcggcctccacattttcgccaatttacaggaagcaaccatgccaatcaccaagtagtcagtggagcaaatgcagtacctgttaagcctagtgctagtcagaagcaaccataa

SEQ ID NO: 79377 - DNA, 1945 bp, Oryza sativa
  Clone ID: PAT_MRT4530_790C.1
gtggatccccgggctgcaggaatcggcacgaggcactttcgccaaacctcgcggccgtcgagctccgccgccggagaaaaagatggccgacgacagcgcctccccgtcgccgtcctcggcctcgccgctccagcaccaccgcgaagccctcaagtcgtcagtgcgcaacacggcagctagccggaggcgggaacaagctattgcgattgggaaggaaagacgggaagccttgatccgtgcaaagcgtgtgtgtcgagctccaatttctggcagtgatgaagctgaaatggaagagggtgatatggtggtcgatgaggagaaagcatgtcttgaggcaaagactgctcatgctgttgaagaattgaaatctgctttgtcaatccaggggaaaggcgttcagaagaagaagatagaggcgcttcgtgatttgagacgcttgttgtcacagcctgaagtacctctagttgatactgcaattaaagctggagcagtccctcttttagtgcaatatctatcctttggatcatcagatgagcagttgctagaggcagcttggtgccttacaaacatagcagctggggaaccagaagaaacaaaatccttgctgcctgctctaccattgcttattgctcaccttggtgaaaagagctccacacttgttgccgagcaatgtgcatgggccattggtaatgttgctggtgaaggagcagagctgagaagcacattacttgcacaaggtgctttgcggcctcttacccgtttaatgttctccaataaaggttctacagcaagaactgctgcttgggctatgtcaaatctcatcaaggggcctgatccaaaggctgcaaatgagcttattaccattgatggcgtgctaaatgcaattatagcgagcttggaaaaggaggacgaagagttagcaactgaggtggcatgggttgtggtctatctttcagcactttcagacagaggtattagcttaatagtaagaagttctgtgcctcagctgctgataggacgactgttctcatctgagaacttgcagttgctgatcccagtgcttcgtggtttgggaaatcttattgccgctgatgactacatggttgattcagtcctaactgttggaaacaatatcattgatcaagcattgtcaggtcttataaaatgtttgaagagtgataacagggttctcagaaaggagtcatcatgggcattgtcaaatatagcagcaggcagttttgagcacaagaaactgatttttgccagtgaggccacgcctgtgctgatacgccttgtcaccagcgcgcaatttgatattcgcagggaagcagcatacaccctaggaaatctgtgtgttgtccctactggaaattgcgaactcccaaagataatcgtggaacatctagtcgctatcgtagatggtggagcccttccaggatttatacacttggtcaggtctgctgatgtagataccgcagggcttggtcttcagttcctagaactggtgatgagggggtatcccaataagcaaggcccaaagcttgtggaaatggaggacggcattgaggccatggagaggtttcaattccacgagaacgagcagatgaggaacatggccaatggtttggtcgacgaatacttcggtgaggattatggcctcgacgagtgactcaactaattaccattcgtacatcaggttaaattgtaatggcagcagctgttcatgtgttcgtactgtaaaaatgcattctcagtttctaacagcactggaactttagaatgagaaaatcatttgcttgttaaaaaaaaacttactgccacttgttgacgtaatttggaaagaaaaaaaaggttgcattagcatcttgttatgtataattagattgtaacacaatgctagacatatttgctggttacagtagcagaacactttactttctttgca

SEQ ID NO: 79378 - DNA, 1800 bp, Oryza sativa
  Clone ID: PAT_MRT4530_79100C.1
aacgagtaatgacaggtgccatcacaacagtaaacagagtaacacaacacaagtctggacgaattaacgtagggtatagttaacaaggatccactgtcttattgttcttacgaagtcgtttagcaaaacagtgaggtccctacctactattactatatatcatgaccccaacttctcctcctctgccaacccactaccctctttcacatcttgatatattaagaattcctaccctggtataacaaaataatgactaaaactagtgcaaccactaagcttgaggctgcttctgaagaataatcttgttgttcaaatgttcttcccaagctcgaccttcttaaccagccgcaaggtgttgtggaagatggaatccagtattccagcaaccgtgaaaactcctccaatgatagcacaaacatttgtgatgaaatgggagaaggattttggaagttcagttaccaagacctgcatgggagaaggttcaaaatggaatttcacaacaggaacatagaagctgtgcaccaagctgctgtgcgctgtgtattcatactcctcaaccagtttcaattcctttgatgatctcagtgtaacaagctcagttttcacaatttgcaggtaatgctcaatagtaacgttggcattgacatcaccatgcttaacaatgtaggattgaccagctaatctatcatggtggccaccaacatagggagttagtcttttcagttcattaaacatctttgccgatagccttttgccaaaagagaactgtgttacatagtgggaaacatttatctgggatggatcaaaggagtgggaaccagatcgagctgagattacaacactcccagggaccttttttacccgcacaaaaccttctattctgcatccactggtcaatggagcagggcgttttgcaggatcaacagtcttattggatttgtcctccaaagctagaacatgggcatcttttgggatgtttgcaacataagtttccattgccgctactaaactctcagtatcacgatcgccgtagtatgattcatgatcatggtgaccctggttttccttaagatcactccctttacggaaaatgcgaatggatggataaccttgtatatggtgcctcctacacaagtcaatttcttcagtgcagtcaaccttggcaagaatgattctgccatccatttcaggatcatatctctccctcattatttttgcagtcttctcccacgaaggtttcaatcgattgctccagtaacaccagggggcataaaaattaacaaccaaaacaggatactggtgtgaatagctatcaaaattgcgagaggacaagggaactgaaccatcatcatggttttcttcaacatcatctccatgtttgctgaccgtaggaataggtcctgggtggaactcggatccagtaggcactaaattccgatcaattgaatatttgcgaacagttttcgttatgttcaatctgtttgttcccagaacatcactgacatcaactgatgcaaattcgcatgaaagtgcaggaaagctgtaaatcacagaaccagatcgtgagcatctacttaagttaaaatctatccgtaagaactccccatctgaactcctatcaacaatcacagatgtgctagtattgactgctaagtaattactcagttccattccaaacaaaaacaccatagctagtgctgctacaatggacaatccagccccagatagtgatgcctcggtcaaatccctaggaattttcctgtagaagtcgacggacttgagcttactggaggagatcat

SEQ ID NO: 79379 - DNA, 435 bp, Oryza sativa
  Clone ID: PAT_MRT4530_79101C.1
atggaacacattgtggatagtcttgccacgtatgcagctttcctcggagagtctgttatccgccctatcgggaaaacaactaaggaaaatgagagatctgggagtgagggggggggagccgccgccgccgtcctcaccgccgtggccggaagccgcgccaccttgcctcctcgccgatgtcgccctccgccgccaccgcctgccgccgccgctgcgctccccgcagccccctccggccagatctgggagggacgggctgggagccgccggccgccgcgctccccccgcccccctccggccagatctgggagggaggggccgggccgcgctgccctcctccgtcgccctcctcggctgcgccgcctcgcctcgccgctgcagccctccgccatcaccgcccgccgccaccgccgcctccggccggcggccgggtag

SEQ ID NO: 79380 - DNA, 144 bp, Oryza sativa
  Clone ID: PAT_MRT4530_79102C.1
atggcggcaacaacagcacaaagagcaacgacaactgacgattgccgaccctggtggaaggactgctcctcagcggcaaagagatgtggcctttggcactgctactgcttgatacctgtggatcacatgatcccaccaacattg

SEQ ID NO: 79381 - DNA, 288 bp, Oryza sativa
  Clone ID: PAT_MRT4530_79103C.1
atggcggtggtgacgggaagagatggcagagccatcgtcgccagcggccacggcggtggcagtggcgagaggatggaggcaccggacctggccaatgacgtcgccataaacgggaggagattcggagggatggaggtcaaagtgatgacggtgatgggccgttggccgagccggacgccgctgccgcatgtgtctccccccatcagaggctacgcagcagggcctagcatctcagtgaagcgggatactttcgccataggccgtgaaggccccacggtgcacacatga

SEQ ID NO: 79382 - DNA, 993 bp, Oryza sativa
  Clone ID: PAT_MRT4530_79104C.1
atgcggtggctttgccgggttgcccccggcgacaagcatggaactttcggccgacgaggcaacgagaacgatgggctgccgctgcgttttatgttaggccgaaagaaaaccaccaggggttcgcgattgagcatgctcttctcctcgcttttctctaccgagtcatcagcaacgcgtgattctctcctcagcggcaggcaccttccccacaacggcgcctcggcggcggcgccatcctcaaggcgatggagacctctccacggtggtggcaccctcctctcgggcaacgccactctcatggtctcaccacgaatgcgcctcatcagtggcaccctcatcacgatggttgtggcaacctatccacaacacggtgccctccccttggccctgcgtccccacaaggtcagggttgctagatctaattgccacaagctcgaggtcagtgagatcgaagcgatacgttggatttgcgatgattttgaggctcaatttctgaatattgatcttggttcgaagcaatcaactcgtcttgatgaatcgagtcgggcccgatgcttttttagtcatgaactccccatagatgccgattcccaatccggctgcgatgagtcccctcatcgtaccgtcttcgtgttaccggttggagagtccgatatctatgtgagattcccaacatctattaggcatcacatggatgggagctacaactattacgacaagcctgaagtggtaggagcagtcagtgcttcacaatttgttcaatttgctggaagttttgatagagttgcaatgcatccgaaactgtgtgattttgataggagaaccgataattttcgtagcacacaaaccgataattttgataggactgtcctgttcatttccattggtgaaaagcagaggaggcatactgaaaggccccaagaggccaagaacaaggaccaaggtctctgctcttcaagtggtccaagagagcatcaaaacctggaacactag

SEQ ID NO: 79383 - DNA, 228 bp, Oryza sativa
  Clone ID: PAT_MRT4530_79105C.1
atggtgatgttggagaaggagaaggtgaaggtgcagtcccagggcaaggttgtaaaggaaacccacatagaaaagcattccccaagaaggaattggctgggaatctttgcaaggaaggtgggaatggagagaaggaatggatcctacttcaggagggagatcaacagtgatgcgattggacctaaggctcaatacctccagggcatcaagcttgccaagcgtgtctga

SEQ ID NO: 79384 - DNA, 2493 bp, Oryza sativa
  unsure (1)..(2493): unsure at all n locations
  Clone ID: PAT_MRT4530_79106C.1
cgcaaggaaaactcaattcattaatcacactggaaaaaaaggcatgtcaaattacagaacactgaacatcaccctatgaaaaatcagaagagctactgatttaactggaatggaacaatggtaatgaccaacagatcactactgtgagaattaaatcccaaaaaaaattatctaaagaagatcagaaatcagcagaaaaacctcactaaagcaagcggctatcaactttgctgaagctctctataagccagtaactatgcagcctagctagcagctacctttgctaaacaatggcgctcatggcgctgcagattcatccttctgcttctcctccggtggtgttcttgacccggagtaggaattccggatctcaacgatcctcctgatcacctcgtccatttttggccgttgatcagggggggcggcaacacatgccattgcaacctggagcatctgaaccatctcatcctcaatgttgggatgccttaacaagtcgacgtcaaaaacctccgcggtccattcttcccggaccacagactgcacccaccttggcaagtgctcaatggagtcctctcgtccaggagatctcagaggcgcttttcctgtcagcatttcgaggaccaacacaccgaagctgtagacatcagacttctgggttggctttttagtctcgaggacttctggtgcacgatatccgacaaggcgtgctggagctggtggaatggtcataagctgtgccagcccaaactcagagacacagccgtcgaggttctgtgacagaaggatgtttgatgacttgaggttgccatggatgaacttcccgcctccctcagcatgaagatgagcaattccacgagccacaccaagagatatctttaccctcgtctcccaatccaatggagcttttccagtagctttattcccatgcaaaacaacagcaaggctaccagatgggatatagtcatacaccagtagcttctcatccttggagtaatagtaggcacgcaatgggacaacattctggtgctggccaaccctgccaactatctccatctgctgttcaaaatccttcttccccacgaccacctccttcaatctcttgaccacaactgtggtgccatcctcaagaacagctttataagtagttccgtaactcccttttccaaggacttcagctgaagctctcagcaaatcctctaggtcaaaattatatgaacagccctcaaagaaaaccaatttattcctctcagcttcctgaacaccactgctgtactcctccttaggattttctccccttccaccagcaacagtttttccttttgacgaagaagctgtagtaggttctgtgcttttctttctcttgaaaatacatatcaagagtaaaacaatcaagattagcaacaatacccctcctgcggcagcaagtgcaattataacaccagttctgatccttttccagaagcccttcttggccttgccgggtgatggtgatgttggagaaggagaaggtgaaggtgcagtcccagggcaaggttgtaaaggaaacccacatagaaaagcattccccaagaaggaattggctgggaatctttgcaaggaaggtggtattggcccactgaggttattgttgctcaaattcaaatgcctcaattttgggagttggaggtcagggatgggtccagaaagagagttattctggagaagcaatgcagtaagttgagtgagattttgcactctcaatgggatttctccatcaaaagtgttgtatgacagatctagaaatgttaaagtggaagtaagggaagtcggtatgatcccggataggttattatgctgaagatatagggaatggagagaaggaatggatcctacttcaggagggagatcaacagtgatgcgattggacctaaggctcaatacctccagggcatcaagcttgccaagcgtgtctgagggtagcgggccaaagagccctactgctggtaggcgtagtgtttgcacgcggctattgtctggtgtgcaagtcaccccaacccatgaagtgcagactggggctgcagagctccagttgagcttcctgccatgtggcagtgaggcagcaaatgcaagaagagcctgcttgtcggagttcagatcagcactcttggcaggaggaatgcatgcaaagaggagagaaacaaccagaaaagctgtaagtatatgatcttgcatttgttgaaaacaaactggtccaacactagaaaccaatctttcccatcagctcttcactcctctttcgccagcaaaannaaatccggtaacccccccctcctcctcccctccaccaccattcgcctcaagaatcaaagatccagccttccggccgccgaaatcccgccgcgcgggggaggtcaggtcaccgatctgcttccgaacacgccggcatttcgtcccccgcgaccccggcggcggcgcggggagagcgcgccgggccgcctcgtcgcggacgcgtgg

SEQ ID NO: 79385 - DNA, 333 bp, Oryza sativa
  Clone ID: PAT_MRT4530_79107C.1
ttttttttttttttttccgttagaacacgccctaactgatatatcgtctcatataaaaccaggtacatacacagagagctgatttacaaaatttgtcgtcttttttttctttacaaacagcaaccactggactatatataaatagataacattattaccttaacacgaaactgacatatacaccaagatggccgaagagaaatgcgagctcgaaaaagctagaagaacatgctggagctagaagaagatgctgaactggctggtgagtgagtccttgaggttggagaagagcccaaccagggagtactgccggagcttggaccacttgatacc

SEQ ID NO: 79386 - DNA, 2704 bp, Oryza sativa
  Clone ID: PAT_MRT4530_79108C.1
atgatatatagcaggtccttcaacctttttgattatttcaacttttcaagtaccaacactcttacagtacaataaatatgctagattactatcaatctctagggacgtttcatattgatcaaaataacaagttattcttcctgtgtattagtgtatatgctatactactatacaatctatgttacatattgaagttctgattctccaaaagaaaacgtcatacgaatctccatgcatgttctgtggtatggtcaggattaggaatgctgatttctcatcccctcctttttttgcttgtgcatttcctcactcagcactgagaacaacatcttctatgcgataattagttactgagtacttactcagatttccaagaacatcaccatcagtctagatctcgtacgtcattcctacccgcaacagtctattatggggaacacatgtgatcttctctggttgcctgaagttcttcctaatgaaattgtagacataatcaaatattattatcttacgataaatggcttttggctctgccaccacattagtttctcaaattagttggactgtgcattaccccatctctttgagaactaactatattttgtcactgaatcaagttcttggttccgtcatgtattggtctgaagtgtttctgtatgacatctgagcttgaacctcaaagggaggatccgtttcatctcccatttctttttttgattgtgcttttagtgaatgactactttggatatagacggattcctggtggttgatttgcttctagtttttaatatctacgcgcacataatctgcaggatctatctcttacttattgtatccatagcgcaccacacatcggaataccctgtattcttttggctccacatatcggaagagaaaccgttcctttgtttctatcttgctgatcggtaagtactttatggagataatcacaagtactgaatgaatggaaggtactttttccaccaaatgaggaagtatgggtgggatgccttgcacaagttcagagtatagaaaacctattcctggcagcctggcaagattttgctttactgccaactctgccacataattgtttgatactttgttccggagctcatatttgtaccgatgaacgtgaacataatgccatgtggccattataaacatcaaaatggctgaaaaaaactagtggcaagtatccaccttgagtaaacttgtagaatgctgaagataagtatatgagctctgcaccaccaaatattactggaaagagtgcaatccacaaaagacttgtcttccatatcatgaccatcactagagtgactagtagtgttgttataaacatcacaaagacaacagcaataccgtatgcattgccgatcttgtctgtagtttggaaaatagctgtaacagctacacataaaaccatcaatacataattgatctctggaatgtacacttgcccatgaaacttcgttgaggtgtggatcacacgaactcgtggaaaacaacctagaatttgggactgagcaatgattgcgaatgcaccagatatcatagcctggcttgcaattatggcagctgcgactggaattgatttgtagaatgtatctgcaacgtgttctggatagatgcgaagatatgcagcttgtccaatgtatgccagtagtactgaaggaaggagaactacagaaaagccaatctgaatggctctcacattgaagtgaccaaggtcagcaaacattgcttctgtccctgtaatgcataatataacacctccaagggaaatccagccttgcttcccatttctttcaaaatagtccacaatgtatttgggattgaatgcttttagaacaccagtatcatgtttgaacagattataaactccagtaccagcaataaagataaaccatgtcaagattatagggccaaatgagtaaccaactttgtccgtgccaaaacgctgaacaaggaagaggacaatcagaatagcaattgcgatgccagcaatttgtccttgagtcagggactttgctgattccttgatccccccaacagcgctaagcactgaaatacatggagttagtacgccgtcaccaatcaccatagatgttgccagaattgttactaggaaaagtatgatcttaaaatttggactgttttccatcttttccttaatccaatgagcccgcttgacgcgatttgagggggactctaacttgtagtgtgagaccattgcatcttctgcctgctgattgggtatcaagctaatcctagcataccgagatatcaaggaataaagtgcaaatgttccaccatcgccattgtcatttgctcttaaaacaatgaagcagtattttattaatgggaggagaaccacagtgtagataatcagagacataacaccaaggatgtcattggtgtccttgatcccgttggtaaaggtgctggagaacacatagaggggagaagtccccatgtccccataaaccacgcctatgctctggaaggccaagtgtagtgtggtcgcccatccaaccttggctgtatggctttggccacctggaatctttccagcttccatgtgcagtgaatcaaatctctgcaaccttgttgttgtttgcagcgtcttctccgattcaaatgcagcgtttggacccctttcagcgcctccattgctgcttgtgtgcagaggctcggtcat

SEQ ID NO: 79387 - DNA, 193 bp, Oryza sativa
  Clone ID: PAT_MRT4530_79109C.1
aggagcaaccaaaatattttcctttatttcatttgctggaagcacttattattcttttattaccagttaccgacagagaacatcattcttagataaatccaggcctcttttcaaattaagcctttccctctcagcaaaagagagaggaattaaaggcctcaacaacctcgcgcaaaaacttttaacaagaatg

SEQ ID NO: 79388 - DNA, 225 bp, Oryza sativa
  Clone ID: PAT_MRT4530_7910C.1
gtattggatagaatgggggaatggttttgccgttgaaataagggcgcctaacgccatagtgtaattggcggcccatttgaaatcgcccggcgccaataacgcccccccccttgttgccttgtgcgccacataatgccacagccttgcgccacatgtgttggccataaccttgggaagggaaaaacccacaaaccccataatgtttccttgcccaaaaaccaattc

SEQ ID NO: 79389 - DNA, 363 bp, Oryza sativa
  Clone ID: PAT_MRT4530_79110C.1
attcctgcagccccacgttaatcaaagcctgaaatgctactgcatgattctctcttgcttctacaaggtgtttttggcttggctgcctctgaacccaacccattcgttctcaagtttctctgcatttgttttctactgtacaatgtttgatgctttgcctagctgcagatcagccttctcgagtataggctttacgaatcgattcttccgtaccacaaggagccatgaacaatccatccaatgtattgttcatcccggtgcaacacaagatatatcgggctatcggccaatggatcgccatggaagtatggaactctcataaacccaagccaatcatttggagatagatactgccatggctgg

SEQ ID NO: 79390 - DNA, 418 bp, Oryza sativa
  Clone ID: PAT_MRT4530_79111C.1
gggaaaaccgttaaaaatttttttggggcaaaccagttggggctttaaacagttttacggggggcctgaaaggagcccatttgggggtttttttaattttttttttatcccttttggggccctggacagggaacctttttttcccccaggggggggcggtttccccagggaaaacccaaaaaattgttccgggggtttttgggccaagggtaagggggggaaaatccccttggggggtaaaaaaaaccgcaaatccccttttaaattaaaaaaaggggggtggggggttcccgcccaaccccctttgtttcccccctttccccgtttttggccccccttggggattgatgggcttgggggggggttaaacccggccggggcccgggggggaaaagggggggttccctttttggggggg

SEQ ID NO: 79391 - DNA, 1728 bp, Oryza sativa
  Clone ID: PAT_MRT4530_79112C.1
atggatactgtggtgggttcatcatccaagccatgcgggccgctgacggattaccgcattccggattacatcctgaggccggatgcgcagcgggtgcttcttgatcatgcgcccccgtgccccgtgctggtgttcatcaattctggatctggtggtcagctcgggagcagcctgatcaaaacctaccgtgaacttctcggtgaaacacgggtactcgatggctctgatgaggctccccatacagggttccgccgtttgaacgtcaacctgaagacgcccaggaggggtggggacattctggccgttcaaatcaggcgcaccctcgcaacaattgttgcagctgccaatggtaaggcaagcttgctgcttggagtagtctgtgatcacaagatttcgaactttcctgcaattgctacttttcctctggcaaccggaagcaaccttccattttcttttggatggtgaaagtagaattcttgtactgaccgagagtcagtaaaatcattccttgggctagtgaggcatgcaaaagagatgaaaattgatagctggcatatcatgttgaggatgcgagctacaaaggaaggtccatgtgatccaatcgcccccttagagttgcctcattcattacatgcatttcaccgtgtgtcaagtagtgattccctcaatatggaaggttaccacacattccgtggaggattttggaattactttagtatgggtatggatgcagaaatttcttacggatttcattctgaaaggaagaaaaatccagagaaattcaaaaaccagctgacaaatcagattctgaattactcgaatattgctcaacttgcaagtgtgaaaatcatgaaaagagccggtagccactggcaagaacttaacattcaccacagcattcgatcaatcgtctgtctcaacctgcctagtttctctggaggtctgaatccttggggcacacctggcacaaggaaagtagaagagagggagctgacggcaccttttgtcgatgatagacttattgaggttgttggattccgtgatgcctggcacggacttgtcttgctggccccaaatggacatggtacccgccttgcgcaggcccaaaggatccgtttcgagttccacaaaggcgcagcagagcacaccttcatgaggatcgatggggagccatggaagcagcccctcccaaaagatgacgacaccgttgttgtggagatctcccaccttggtcaggtcaccatgcttgccaacgagccctgcaagtcgaagagcgtccatgacgaccaatcctcccacgcacaacacagcggccatggcaacaacgacgacgacaaggacagcatggaggacgaagatgagtgggaggatggcaggaggaagtttggtgccgcagatacattcaagatccctgacgaggttgacattgctcacctcagctgaactcagaattggtatcttttctaggttgcattcttgatgttcataatcttcttcagtaaagtgatttttgtcttcgattccttcaacattataagagtggaatttagtaattcgttcactgcaaaatttggaatgtatagaccataggtttggaacatctatagtagaacccaagttggtaacatttctgatttcttgtttattgttcagcagaaatttgtgttattttgggaagaaaataaagttattaaactgtttatatttctttttgtttaaagaggcaca

SEQ ID NO: 79392 - DNA, 126 bp, Oryza sativa
  Clone ID: PAT_MRT4530_79113C.1
atggacctcgtctctcttcgccacgatgaaggctgcaatggccacgtcggcctggggatgacgacggtgataaataaaatgggcgaggacgaggacggaatggccgccattgccaccatcatgtga

SEQ ID NO: 79393 - DNA, 296 bp, Oryza sativa
  Clone ID: PAT_MRT4530_79114C.1
cccacgcgtccgcccacgcgttcggcgccggtgaaattctcggcgacattctcgaggccatgaacaaaaccggccctacggtaacaaacctatctgaattcgaatttcgacgtgaactttaaaaattcgatgtaaattcacaccctgttcatgcatgttggtgtggtgaacgcgtgcgcaggagaatggcaagaacgagagcttcgaagacctgtagaggcagttcgaggagctgtttctccggtcgtcggcgccggcgccgtcgacgtttgtgtttttccggtcggcggtacttg

SEQ ID NO: 79394 - DNA, 864 bp, Oryza sativa
  unsure (1)..(864): unsure at all n locations
  Clone ID: PAT_MRT4530_79115C.1
ttttatctttgcttctaattttgtacctttgtggttaaatgctcaacattcaggcttggagcaatttgtcgatgaggcaaaatcagtgagagtcatgagaagcctccagaaatcaggattactgcaacctgcaggaatcgcaacttccttatcaaacacagggcaacaatgggattttccaaacggatgggccccgttgcagcatctgatagtcgagggattgttgaggtctggttcaggagaggcaagggaacttgctgaggacattgccacgaggtgggtgagaacaaactatgatgcctataaggctaccggcgcgtcgcatgagaagtacgatgtggtgacctgtggaaaatctggaggtgggggtgaatacaaaccccagactggttttggttggtccaacggtgtgatattatcattcttggatgaatttggatggcctcaggacaagaagatagactgctagtcatcatgatgaatgttaaaccccatcttcgcagatgcagaatgtggctaggctaggcaggtgtttttgtgtgcaactgtatatacacggctgtgcattacacgcaaagttgaagaggcattctgcaattctgctgtagtttttatctgacaaacatttgcattcagatttcagagcatcacccgcaactgtgtttttttttctttttttgtaacttgccctttgctgtaactcgtatcaaagctcaaagcaagaagaatcttcatgtatctgatatgttgtacatttgtatctgaattctgaaactatcaaacaacatatctagttgatttattannnnnnnnnnnnnnnnnnnnnnnnnnnnnnnnnnnnnnnnnnnnnnnnnnnnnnnnnnn

SEQ ID NO: 79395 - DNA, 281 bp, Oryza sativa
  Clone ID: PAT_MRT4530_79116C.1
cctacggctcctctggctaccggatctaagccccagcccgcctaatgggcttcccgcccccaggcccaggaggagaacccctaccggttccgctattgatctgggtaccggggttgaagaagggagccacaagaaaaggagaggttccggttccgcttccggtccaaggcccaaggtgaggggaggtattggtcccggggccaatgccggaggaaaacccaagaaaaaaggttagggggggggttctgtttttgattatggcaaaaaggcccagaataaaa

SEQ ID NO: 79396 - DNA, 1853 bp, Oryza sativa
  Clone ID: PAT_MRT4530_79117C.1
atgaccgtgggcacggctgttcgaacagaacccgggttggctccaaccgaccccgccccggcgttccccaactattgagagcacggataccgaagtaccacaagggtggagcgacaagaaatcaaggaaaaggatttaactaaaccctttctgaaaaagaaagaaggaggggcagatttcagactttctcaggcgcttgggcgcggcccaaaggattttagcggctcggccgagccattgggccggcgcggccacgaggaggcggcccaacagaaggggcgcgggcgagagaggccaaccgggtggacggcggtccaccacgcagggtcccgggatggggcccacatgtcggcggcttggctcacggtgggggaggcgcatgcgggtagcggcgctagggttcggtggggttggtttggggttggtgcaccgggtggacggagaggaggtgggcccacgtgctgccgcacgccttgtcgtggaccgcgagcacggaagggaaaacggagggaggggccgaccggatcggcgtgaccgggtcaagccgacgtggctgccacgttggcaagcgggaggaagacgaaggctgtgcccgagatggacggcggacggcggcgacattcaccggagcaaggcgcgacctcaacggaaaaaggaagcacaccgggaggagggatgggacgagaggaagcgattcaacggctcggatgcgacggaggaggtccgacggcggcggattgcggcggcgaccgtcggcggcggaaaaagaggggaatcgccggtggtcaacgagggttcgattagaggcggcgggagcatctccggggctcgggggagctcattcctggggtcggatgggacggaggagtcccgagtgaggccggcgacgagcggcggctccccggaacgggcggcaatcgcgacgagaccatgccgggcggcggcggggcttggggcttcgtctacgcgcgttcgggagggctaccgagctaccgcgcgagccaaaagagggagagggcgagcgagaagggagaacggagagagacactaccgagtcgagacgggccctgtgatgggcgaccgacggcgcggggcgagctctccggactcgggccggggaaggggaaggagagggtgcccgtagtcccgcgtcacgtgtcgtcgcacacaccagcttcaccagcacgtgcgacggcggagggaggcgaggtcggcgagcggcagagatggtccggcggcaatggcgcggtggaggttgggcaaggaaacgaggaggaaagggaggggctcgagttgggttttataggcggtggtgatgtcggtttggggaggaaaccgacctaggcggtcaaggagaggagctggcggtcacgggcggtgtcgggcaaagtggaaaaaggagggggaaaagggagcgcggttccttcccgatttgagcgagcagagggaggaggaaaacgcgcgtgagggagagagaggcgctgcctccgcgtcttggacgcgagcgcacggaggtggggcgagcggcagggcggcatgggcggctgcgcggcgcaggcggccagggttgacgcggcggcgaccgggcggtcggccacgcgcgagcgcgcgcgtgcgaacgcgagggcgcggccggatttcgaacggcggcggcggcaaagcggccccggggagagagagagagagagagagagagagagagagagagagagaatcgagcgagagaggaaggagacggcgacgctctctcctgctcctgaacacgcgcgacacacgtgcgagagagagacggaccgagagggagagatggaccggaaagagaaaaacggcccagttgaccaagagggaggcaa

SEQ ID NO: 79397 - DNA, 3426 bp, Oryza sativa
  Clone ID: PAT_MRT4530_79118C.1
atggctggctgcatggttccaccatgctccattgcctccagaatttggggagcatgcacggttggatgggtcattggtggtgtaagagcaggtggttacgctgcgatgaaatgtacatccatcgaccgtggctttgtgtacgaggtgttgcttgcaatcggacgtgtgccggaggtgggatgggaggcgatgatggtggtggtgacgccgcgggacgcgggccggccgacggcgaggacggagagcgcgcaggtcgccgacggcgcgtgccagtggcccgccccggtctacgaggccaccaagctcccttcctccggcaaggacaagatctaccagttcctcgtctacgacacgggctcgaccaaggcggcgctgctcggggaggcgacgctgaacctgtccgagtacgccgacgcgttcaagccgtggatcgtcacgctgccgctcagcggcagccccggcgcgcagctgcacgtgaccatccagcgggtggtgggtggtggtggcggcggcggcggtgggtgcggtgacgacgccagtgagaacggcggcgacgtgtcgccggtggtggcgaggacgccgccgaggaagacgctgcagagccagctgagccggtgcgaggacgaggaggcggagaaggcgagggcggcggcggcggcggcggatgcgatgagccctatgcaagacggattggtgataaacaaacctcctgggatgaggttttcagcgagaagaaacatgcgtgggcctgtcgatcaccttcacaattccaacagctttgatgccatttcggtgtcgggttcagatgggagctcagggagatttacccccaaaaacaatgcaagtatgcacagcacatttcttcaggagggcaccaataccctctcacccctgaggaacacattgaccagctccggtgactggtcgggaagctcagctcctgatgctagcaccgacgggtcaaccagcaactccggtgaggcggggttgagggaggcagaggatgatgtggagaagctaagaagtgagatagccactttgacgcggaaattggatgtctccgatatggagttgcaaacactgagaaagcaaattgtgaaggagagtcgacgagggcaagatctttccaaggaagtgggtagcttgagggatgagagggatgctctcagaagagaatgtgaagcactcagagggatgaaaaagactatccatgatgcaaacggatctggtaaaagactatcaagcggggaagacccgtggtcgcagattgaagagctaaagcaagaactgggccatgagaagaatctaaatggagatctgcatttacaattgcagaaaatgcaggaatccaactctgagctacttctggctgtgaaggatcttgatgagatgctggagcagaagaacaaggagatatcacttttgcatgaagaaacactggaggatccccaggaggctgaatatgagctagcattgtcaaatgtgcataatgctggacacaaaatagacatatctgaaacaagttcagttcaagagaaagaagatgagctgatgctggatgcattggcaaagacaaccgatggcatcgctacctctgaacttcaaaataaaattgttgagctgagcaatgaaatcgagttgtataagaaggaccgtgaagacctcgagatgcaaatggagcaacttgcacttgactatgagatcctgaagcaagagaaccatgacatctcttctaggctggagcaaacacagttgagggagcagctaaggatgcagtacgagtgttcagcacatttgtctataataagcgatcttgaagccaatgttgagagcctggagaatgaactccaggaacaatccaaaagattagaggctgacatacaagaggtaatgcgtgcaaaggttgaacaagagcaaagggccataaaggccgaggagtccctgaggaaagcaagatggaacaatgccactactgctgaacgactccaggaggaattcaagatgttgtcttcacaagtttcctctgctttcagcgcaaatgaacagttgcttatgcaagctagaaaagaggctgcagagctacagttacagaagggccagttggaagaattactacagaaggcacaagaagatcttggatcaatccaagaacaacaccgagtgaaggttcaacagttactgaccttagtggatttcaagtcaaaggagacagacaggctggtaatggagcttaaaagcaagagtgatgagttccagaatcagaagagatgcaacgaagcaaagttaagtgttctctcagaagaaatagatcaactcaaagctaagattgagaatctgtcaaatgaacgagacaatctcttcgaagagaatgagcagaaggacaaggaattagctgcaaattgtcaaaaggatatgttcttgcaggatagagatgctgagatagctttgctcaacaaagaacttgcttcaatcaaggaccaagtgcagacatatttagaggagataaacactttaaaaagttcaaagaatgaaaaggaggagatgatcgagaagctgcaatcagagattagatcgttgaaattcgagtatgacaacctgaaaattttgatgtccactaacgactctgagaaacacaaccttgcttcccaagtgctgaagcttcggagagcccttgaaagcagggaggatgtgaaacaaaatggtgtcaaatcagatgaggacaaccaccatgctacttctaagcgcatcaagcatgacgacggcaccaccgggagctgtaacgtgctgccaagcaccaacagacacaatgcaaatggtgactgcaatgggcatgacaggagggatgcagctcatgatcagtcggtaaaggagctggaaatcctgaaggagaggaacactgcactggaggaagagctcaaagaactgcacgggcggtactcggagataagcctgaaattcgcggaagtcgaaggcgagaggcagcagctggtgatgacggtgcgcgccctgaagaactccctgaggtgatcttgatctatgctcctcacacacgttgtagtacaaaagatttagatgataccccggagggttttgtataggcaggcagctggatgagctgtatgaaatgaggacaatatctaggtgctctgcagaggccacaggtacccaggttagcagggtgtggtcagtcacaatacacagcattgtagatctccccccacaataatatttctttcttcttcttcttcctcttcctcttccattggtgtgtgtaactgtaacatgaattagcttctcatctagagtgttgtgttgtataattcctgatgcttggcttttgttgtgaagaaagaaaagtgagataagaaaatatggtgtgaccagttctacctccagctcaagccctaggccccaaaattctggtgg

SEQ ID NO: 79398 - DNA, 394 bp, Oryza sativa
  Clone ID: PAT_MRT4530_79119C.1
aagcttaaaattgaacccctccaacctaaaggggaattaagccttgcggcccgcctcttgtgtcttttgtgttgtttggtgagcttggaaatggaccagagctctgctacgaataccagcacagcattcgcatcatcagtgcatatcagcgttcagaagaaagaaaatagtttgataacataataagctagctagtacctagcaagcagcttagatcgaaacacaacgaaagtgtattataagtctggtaaatatacctagccatggattagtgcttaacaagtgtttgacaggtaacgtgaagtacttagcaaaagcaggcaaaggtgaactagactagcctagcgcgagtgcagaccctcgtcccaattaagcctcgggccaaattccctat

SEQ ID NO: 79399 - DNA, 859 bp, Oryza sativa
  Clone ID: PAT_MRT4530_7911C.1
atgacgtcagcaatgacgtcaccgacggcggcggcggctcgggcggcgcacgctcgccggcgaacggcggcgcgaggacgaaaacggaaagcaccaggacgaagcgggcggcacggcgaactcaccggcgaccaaaacgacggcggaagatcaacggacggcgacggcgacgaggaagaagcggcgaagctcttcgggtcgacgacggcgatgacgctccggcggtcttcggcggcggcgaaggggcggacgaggacggcgacgcgacggcgaacacgacggcggccttcccgagcgacggcgacggctggaacgacggcggcgcacggctggagtggcggcggcggcggcgaagctagggctcacggcgctagcgcgattccgacgacgagaggcgaaggcgagggtggcggcgggtagagaagagctcggggaaacttttaaaggggctcggaggcgaaggcgaagggccactgcggccggcgatgaggaaggaaggttcgggaaaaacgaatccgagacgaactcgaatccctcgatttccaaaccgatttagccgatgattccaaaggagaaaaggtagaggagatcccggagagtgtttcccctctatcaattcggccggaaacggaaaggggcggccggatttggaaggaaacggcggcggcggctcggcggcggtgcgctagggtttcggcccgaggaagacgacgggcctgacaggtgggacccacctgtcagcgaccgaacgcgcgcgcgcggcgcggacggctgcgaactgggccggactgggccgagggaaagagagagaggaagcggttttgggccgactttcagcccaaagccaaaagaggacttt

SEQ ID NO: 79400 - DNA, 687 bp, Oryza sativa
  Clone ID: PAT_MRT4530_79120C.1
gcaccctgctcgcccatcaagcctgcggagtcgtcggcgtcggctgcggcggcggcggccatgctccggaccaactccgactccttccacgtcgcccacaaggtccccggcggcgacacgccgtacgtgcgcgccaagcgcgtccagctggtggacaaggatccggagaaggcgatcgcgctgttctgggcggcgatcaacgccggcgaccgggtggacagcgcgctcaaggacagggccatcgtgatgaagcagcagaaccgcgcggaggaggccatcgaggccatcaagtcgctgcgaagccgctgctccgaccaggcgcaggagtccctcgacaacatcctcctcgacctctacaagagatgcgggcggctggacgaccagatctcgctgctcaagcacaagctgcagctcatccaccagggccacgccttcaacggcaagcgcaccaagacggcgcgttcgcagggccgcaagttccaggtcaccctgagagcacgaagcaaccagacttcttggaaatctggggtgggcgctgatgcagaaggagaactacacggaggcggagggggcgtaccggagggcgctgctgatcgggccggacaacaacaagatgtgcaacctggggatctgcctgatgaagcaggggcgcgtgctggaggccaaggacgtgctcaagcaggtgcg

SEQ ID NO: 79401 - DNA, 458 bp, Oryza sativa
  Clone ID: PAT_MRT4530_79121C.1
ccgggccatgtgccaagccgaattccaagccgtgggatgtaccctcgacgatggatggacagcgtgttagtggacatgaatcccaagattcaaagatgcctaatgagaacgttagtaaaggagtacaagaatgaagatcgcagaatggtgacacagtgtcttgcaaaaaatggcatagaatgtaggccctaatagaatggtgataccaaattagcaggcgtcctccctttctaagaaaagagaggaggatatagtatagcatacaaagtactcctataggcttaagcgctgtaggtgattttgggaagctgtaatcactggaggtctgacgtgatgagcgctgacggtcctgtgcgtgcaaggtcataggttctcgccgcgaagtataaaaaagagctaccagattcgagaaatagaaacgggggctactccgttcatattctgtacggcgaatttca

SEQ ID NO: 79402 - DNA, 1654 bp, Oryza sativa
  Clone ID: PAT_MRT4530_79122C.1
atggagaagctgaagagcgagctatggatgacagcggtggccacctgcatgtcgctcttgttgtacctcaccatcctgagacggcgccacgcgagcggcggcagatcactagcattgccgccggggccaacgccactcccgctcatcggcaacctactctgccttggcggcatcttccaccaaaccctcgcgaaactggcgcgcgtccatggccctgtcatgacgctgaagctaggcctcaccacggccgtggtcgtgtcgtcggccgaggccgcgagggaggcctacacgaagcacgaccagcggctcgccgcgcggccggtcccggacgccttccgcgcgaacggcttctccgagcggtccatcgtgttctcgccgagctccgatccgcagtggaagaacctgcggggcatccacgcgacgcacatcttctcccctagagccctcgcggcgctgcgcggcatccgcgagcgcaaggtgcgggatatcgtcggctacatccgcacggtcgccggggaggagatgtgtgtccgcgaggtcgtgcacaacggcgtgctcaacctcatatccacctccttcttctccatggacatggctgacgtgcgctcggagtcggcgcgcgggctacgcgggctgatagaggacatcatcgcaaccgtcgcgggccccaacgtgtccgactttttccctttcctccggcagctcgacctgcagggcttgcgtcgacaaacgggcagccatcttggcatcgttttcgggttgttggacgacataatcgatcgccgcatggccgaaacccgtgaccaccctgacaagcagcggcacggcgacttcctggacgcgctcatcagcctcgcctccgccggcaagatcccacgctaccacatcacgtaccttctgttcgacgtctttgcggctggcgccgacacgatgacgaccaccgtggagtgggcgatggccgagctgcttcgcaatccccgcgtgatggccaaggtgcgggcggaggtgacggacgcgctcggcggcagggagagcttcgacgagggcgacgcggcgagcctcacgtacctccagtgcgtgttcaaggaggcgatgcggctgcaccccgtgggctcgatactggtccctcacctggcggtgcaggacggcgtcgagatcggtggctacgccgtgcccaagggcaccacggtgatcttcaacgcgtgggcgatcatgcgcgacccggcggcgtgggagagccccgaccaattcctaccggagcgcttcttgcacaaggaggagtcctcatcacctccgctggaattgcgagggaaagactacgagtacatcccgttcgggtccggcaggaggttgtgccccggcctgccactggcagagcgcgccgtgcccttcatactggcgtccctgctgcacgcgttcgagtggcggcttccggacggcatgtcgcctgatgacatggacatgactgagaagtttgccactgctaacgtgcttgctacccctttgaaggctgtgccagtcgcgtcacacactagttagatatattcactccgtcccaaaatataacaacatttaaccctcaggatttatcccaaaatataataagaaataatccatgaaatgctattgacagcaaaaaaaaaaaaaaaaaaaa

SEQ ID NO: 79403 - DNA, 278 bp, Oryza sativa
  Clone ID: PAT_MRT4530_79123C.1
atccccgggctgcaggcccccatcacgccgctcgctcactactcgcgccgccgccgcgccgcttccgccgccgctccgctccagtcgctgtcggcttcccgcctcctcgccggcgagccgtgcctcgacgctctccctctgtttctccgccggccagcagcatgccgtgcttctgctcccactagctcccgccaccgccgcccctactgagcccggtgagaccgtgaggctggtggtgttgcaccagtccggcagttcgccccctcctcctcccaatc

SEQ ID NO: 79404 - DNA, 626 bp, Oryza sativa
  Clone ID: PAT_MRT4530_79124C.1
cgggatagacaagaacgggtacctcagcttcttcgccgccatgcgccgcgacagcgtgaccgtgcacccgcaaaggcgccagctactacaactgcgtccccggcgcgccgcccagcccgtacaaccgcagctgcgagcacatcacccgctgccacggctgatcgatcacaccatcgcccctcctcctcctccgccgccgccgccgccgccgctgccggtgccggcgccggcgatgatgattcgctttgtttctttgacgacgacgacgatgtgcacgcatatgcatatgcgtgctagcgttttgtcgatggatcgatcgatcaccaggttaattaaataaaaatgacatgaaataaggtgtgtgtgtgtttgttctcgtgttgttgccgtgccactgcgttctcttattattatccatgtctactgtctcattgtattagctactactgttgtccatttgtttcttttgattaattaatttgctgctaatgatgcagctattgtatttgggatttttgtccctgtaaggttttgtttgtttaatcccttctacaagaggatcgagggggatttggacaggacttaaaaaaaaaaaaaaaaaaaaaaaaaaaaaaaaaaaaaaaaaa

SEQ ID NO: 79405 - DNA, 543 bp, Oryza sativa
  Clone ID: PAT_MRT4530_79125C.1
atggcggcatcccggcgcacgacgcacgacatggcgatgcacggtggcaccaagctctcggggagcttggcagcggcgcaatggcgactggtccggcagggatacggcggcgatgaggtcaagaagtggctcaacgtcggcactgagtgctgcttgaggaaggccatcaccgacgtccacgccttcgccatggacatcgtccgtgcccggcgccagagctcgtccgtgcaagacagagacgacgtcctgtcgaggttcgtggcgagtgacgagcacaatgacgaggtccttcgtgacatcgtcctcagcttcctcatcgccggccgcgagacgacgtcatcggggctgagctggttcttttggctcttgtcgtctcagccggacgtcatggcgtgcatcaccaacgaggtccgcgcgcttatagacactgctagaatcattgcaaaacatgcttcaatctcttttagttttatgctaaacaaagctttgaagatgtaccattggtgttcagctgcactgcacattggtgacaccagcagttaa

SEQ ID NO: 79406 - DNA, 281 bp, Oryza sativa
  Clone ID: PAT_MRT4530_79126C.1
gcatcccagtctatgccgctggagtatctttctggcgctctcgaacactactttagagcggatatttagagctcagcttatgaacagcgaacggtaatcggaaatgcggctaggcacatctacgcccaacttactacccaactgctccatatttgcattctaacctcatgatctccaccccatgctgccagtttgacaaaaaatagtggtcctgaccatcaaccacttgtgaacacatgcgtgatcagatctttaggatcttgttgatattgatggctaac

SEQ ID NO: 79407 - DNA, 451 bp, Oryza sativa
  Clone ID: PAT_MRT4530_79127C.1
ttttggtgttttttatatttttgtttttttttttttttttttttttttgggaaaaacaaacattaggtactccaaaaagggccaaggttcccaggacctcatttgaaattttgaatagacgcatttgcttcaattagtaaaccaatataaccactgatttcctttggcacaaaacaagggggagcttcaatttatggcccgatttttggtgaaaatttttttacataaacccaacttaacacataccctttttccgaatggtgttaattccaacccacgaaaatttcaaattttttcaccgacccataacaaccgaggcattaaaacttactttttcactttgcaacggcactagggcccaatggggcccgagcatctcgaccctgagagtggtcaacccgttggtagccaaaattaccacctcgtgatgaaccacctttaccaacgcctt

SEQ ID NO: 79408 - DNA, 334 bp, Oryza sativa
  unsure (1)..(334): unsure at all n locations
  Clone ID: PAT_MRT4530_79128C.1
ctcctctcctcctcccttctcgcggaggccgccgcaaccaaaaaaaaaaaagtctaaccctagatccaggccccgcgtctccggcgatctcccggccatggcgactcgccgggccctctcctccctcgtccgcgccgcctccaggctccgcggggcctcgcccgccccgcgcccgcgcgggccgctccaccgaccgtcgccatcggggtacctcttcaaccgcgccgccgcgtacgccacggccgccgcggcgaaggaggcggcgcctcccgcgcccgcgacggggaagggcacgggtggagggaagantaccgacgagnnnaccggcgncggc

SEQ ID NO: 79409 - DNA, 2298 bp, Oryza sativa
  Clone ID: PAT_MRT4530_79129C.1
ttacagcgtgataccgatgtcactagtgttgccactacttgccccctgagtgaggaaataatcttgacacaacttgttcaacgggaccagttctttcactatctcaccgaagttcattcgctggctagcgttatctctgcagcatgctagaccaatttttgcaactggcacaatgaacatatttatcgtctcttggccgccgccactgttagcaataatagctgcgtcgactattggagatagcttgtccggataggtcatctcgacgtattttggaagacttgtagtcccatcgtatattgcgtcagttggttctttcccggtcagcatttggagaaccaacactccgtagctgtatacaccacctctagctgatatctcggctcccatcccatactctggtgcaaggtaaccaattgagcctctaactccattcgaaatgctttcgcccaaactttgccttgatgcatcaacactcattatcttagctaatccaaagtcactgacatgtgcaaccatatcctcatcgagaaggatattgcttggtttgatgtcacaatgaacaattggtggctcaatgtgattgtgaagatattctagagcttgtgcaacatccaggataatgtttaacctctgtatcaagcttagcgtcccaaccttattgcctgttttcaaccatgtgtccaagcttctgttggaaataaattctagcacaattgctttaaattcgttaccattatagtctaagctgtcacacaccgtgacaaccttaacaagtttccgatgttgtatcctcctcaaggcatcgcactcagcaaaaaagccctgtgtttgtcccttttggcgaagatcaagtactttcatggccaccgtagctgaattcacaccagaagttaaattccctttatatacatatccgaaacttccacggccgattaagttttccgaggacaaggaatctgttgcagcatataactcaacatatgatatcctaggatatttctttatgagaagcgatgtgatatgctcttcatgatcaatatcttttgggattgttcgttggtccttaatgaaatagaaagtcactagacatgcaaatatggtaaatcctccaacaacacaaatgatcaatataagctgcacttggtgctttgaatgactattatgagcaagagatgatgggcattctgccaactctagtacagttaatttgcgaaacctccctatccctgcaggtatggtcccaaatatttggtttcctccaagtccaatccatatgagctcttgcgagaggttgacaagtgtattcgggataaatccagaaagcctattgaattgaagatctagtgtcactagttcactacagttggtcaaggatgtgaggaaatccctgtcatttggtgtcttagcttcaagaatattattacctaggtttaatcttgtgattgtgccggagctccagatgttcggtggtattcgtccttgaaatttatttccatggagttgaagatattctagtttggaaatatttgacaaagagtctggtatcgggccttcaaattggttatagattgtgctcaagaaaactaagttaggcaacttggggccaatatccatcggcaaaaagcctgatagcatgttcaggccgatgtacataatttcaagggatgtaatattaaacagctctgggggaaacacaccttgtagcttatttcctaacaagctcaaagctaaaaggtttgttagcccagctatatttgatgggacatatccatggaagacattaccagcaacgtttaaatctgtcaaattagtcatattgccaatccaaggaggaattcgcccattgacatagttatcagcgatgctaagcatagtcagtgctgtcaagttgcccaatgaagctgggacattacctgagattttgttgttacggacgttcagcacagcgagctttggcaggttgccgatggaccatgggatctggccagacagggagttgacactcaagttgatggcacgcagtgcgacgcagctgccaaggtcatgggggatctcaccttgtaacctgttgtttgacagatcaagggcttggagataggtgaggttgctgagctgcggagagatggcaccgacaaggccaagatctcgcatgcgcaaggcagtgacgcggccggggtgggcatggctgctgcatgttacacccttccaatggcagaaaccaaacatggtctcattggagctccaagaagacatggctcccgatgggtcctcagtggcaagagatttgaaggatag

SEQ ID NO: 79410 - DNA, 1719 bp, Oryza sativa
  Clone ID: PAT_MRT4530_7912C.1
gtggcccggctgggcagcggcgggttccggtgctggggatccggccgggactagtcgtcgtcctcttgcgttggaggtgggaccgaagcgaagggaaagtggaacagcgctcgcgggttgcgcttgcgccggcgaagaagcgcggcggacgccagataaagccctccctccattgacatcaacatgggtgacaatctgatggataaggtcaatgccttgggtgagcggctcaaggtaagtggggcagaagttagccggaagatgtcagctggtgtcagtaacatgagtttcaagatgaaagaattcttccaaggccagaacatggcggacaagatagtcgatgaggccacgctggagaccatggatgctcctgattgggccaccaatcttgagatatgtgatatggttaacactggaaatgtcaacagcattgagctgatccgtgccatcaagagacgcatcatgttgaagaatccacgagtgcaatatcttgctcttgtcctccttgagaccgttgtgaaaaactgcgagaaggctttctctgagattgctgctgagcgggtccttgatgagatggtaaaactgatcgatgatccacagactgtagtcaacaacagaaacaaggcacttatgcttattgaagcatggggagagtcaggagatgagctccgctaccttccggtgtatgaagagacttacaagagcttaagatcaaggggaattcgctttcctgggcgtgatgatgagagtctggcaccaatatttactcctccccgttcagcaccttcagctgaaccatattctgctgcagcacaggaagggtatcaagaaattccagatgaaagttttgcgccagtccacgttgttcctgctgtgcaagtcaatgaagcttttgaggtggctcgtaatagcgttgaacttctttccacggtgctttcttcttctccacaaaaagaggctctcaaggatgacctgactaccaccctggttcagcaatgccaacagtgtcagcgcaccatccagagaatcattgagacggctggtgacaacgaggctcagctctttgaggcattgagtgtccacgatgaacttgagaaggttctctccaagtataaagaactcaaggaacctgttgttgcagagcctgaggcagagccagccatgattccagtcaccgtggagccagagaactccccccgcactaaagatggcactgtagggaagcgagcaggttctggtgctgatgagttgcttcaggatcttgacgacatgatatttggcaagaagggcggcacctcatctcagcaggacaggaaggaacaaaaggacgatttcatcagtttctgaccaccagatccagatacagcagggccgcagggagacacttgatatggatttgtgtgatatgcccatcttgcttgaatgtatcccagggattttgtttggtttaatgtcttgggcatgactagtttcttgctgtacaggaatagatagatgtagcagtcccccttactgtgtcaagccagtcagattttggctcatgactactatcagtgtcagaggtttcattacttgctgtacgctcggtgaagggtttgatgctgagtttttttatggtacattctactgctagtatatactaccagtatatttgatctgacggtgtaaatttatctgatttccctcctaattatactgcagtataaattgaatagggta

SEQ ID NO: 79411 - DNA, 450 bp, Oryza sativa
  Clone ID: PAT_MRT4530_79130C.1
atggcaaaagagccaagaatggttttatacttgtatgcacaatgcaattggaaggagaagattgcagccactctttgcaatcttgttggagatggtctagggatcttgacatcatgggatatgtcatggttgctgctggtcctgcttggcttatgcaatgcaggtagcattcaatttagcctcaggcatgcaaaccacaagcatgcaccgtacatgaaactgatgagcggatacagactacaaaaggggccatggatgtgctgttctgctgtagatttggtccctcgaagggaaatgcacaacatggttgtcgcatctagtcatttactacttcatataagaattaaaggtgtgaaacacactttgaagcaaaatgtagacccatttcatggttctgcattaatattttgcatgtggttttggctttgcaagccatctctgattacataa

SEQ ID NO: 79412 - DNA, 453 bp, Oryza sativa
  Clone ID: PAT_MRT4530_79131C.1
atgggagcgggcaccaccaccacaaccaccacagagctaaccgcggcgcgccaccccgccgccaacgtcgtctccggcggctcatcgggctgcctgccgtcctcgtggccttctctgtccggcgccggcggcacgggcaggcggcgcggctccgccgtggtccggagcctgcagctcgtggtgcgcgacgtcagccccgccgcggggtggtgcggccaccgcgcgtggcggcggctgctccggcgcctggcgcaggagacgaggtgcatctgcagctcgtcgtccccgtcgggcgccgcctcctccaggcccatcacgttcggctacgacgccgccagctacgccaagaacttcgacgacggccgccgccccgccgcgcactacgccgcgctcgcgcccgcgcccgccgccggcgccgccaatgccgccgcccatgagccggccggccgctga

SEQ ID NO: 79413 - DNA, 291 bp, Oryza sativa
  unsure (1)..(291): unsure at all n locations
  Clone ID: PAT_MRT4530_79132C.1
aaggaaggctttttagnaagggccctgggaatcaaancaagggactgggcccggtgatgnttttttcaagggagacaaaaaagcatgnggtcccaaatgntttngcttttgaactcacacccccttcncnccaatttccaactttgtgntttaaacagggccccatgttcancccaaaacagcagaaacttttgcatcatntcgttcaaataaaaagcataccnaatttcttcccnnnnnnnnannaanaaaaaaanaaaaaaaaaaaaaaaaaaaaaaaaaaaaaaaaaa

SEQ ID NO: 79414 - DNA, 533 bp, Oryza sativa
  Clone ID: PAT_MRT4530_79133C.1
agtcaaaaagctagctctgaatctcctagctacgcctagccaggtgatgctgcaaccactagcttattgcaatttacttgtcggcacgaattagtttgctactacatcacacaatttacaacccatctgactgacaatcgttctggggagcccaggaattacaaaacacaccaatgcccccttcttcttctcccactagtgtccatgtgagccattccaaatttgacctaccggagcagtcctcccagatcttcctactccaaagtggaggtagagataaccctggcaccaactctatcgagctgagcaacagtagctgttgctttgagattgccggcattggcgaatgcctccaccatcctccggccaacctcctcgcccttctcctccccgtcaatgacagccacagcagttggccctgctccactgatggtgcagcccaatgccccagcttccaacgccgcggccttgaccgcagccatgccaggaatcagcggcgccctggttggctccacgatgccgtcggaggacat

SEQ ID NO: 79415 - DNA, 147 bp, Oryza sativa
  Clone ID: PAT_MRT4530_79134C.1
atggcgattgaggtcgccatagacgttgccgccgccaccgcactcaccaccatctaccatctccacgccaccagccgcttggacatatgcaccagcacaccagcacagtgcacaattatggccaacactgaggaattgagcaagtaa

SEQ ID NO: 79416 - DNA, 3278 bp, Oryza sativa
  Clone ID: PAT_MRT4530_79135C.1
tgtttttctcccccacctccacctcctccgctgccgaggcgagatctcgccgccgccgccattccccaatccgccccaaaacccccaccccccaaaccctccgatcgatccgagggaggagccaatcccgcgctcgaattcgttcgccccgaatcagccgctggatgcgtcgagctcgaggcggcggaattcaaatctgagctcgccgttggcgcggatccgacggggatggcgacggcggtgtcgaagtcggcggctaagccgcaccccaggtcgcccaccaccgcgcagccgccgaacaacggctccgcggcgggggcggcggcggggggcgggggcggtggagtgggtatggggcccgcgggggcgacgccgtcgaagaacgcggcgatggcggagctcaagtcgagggtgctcggggcgctcgcgaagctctccgacagggacacgcaccacatcgccgtcgaggacctcgaccgcatcatccgctcgctgccgtcgcccgacgccgtgcccatgctggtgcacgcgctggcgtcggactcgccgggcctcgcgtcccccgcgcggcgggagtcgctgcgcctcctcgccacgctctgcgcggcgcaccccgacgccgccgcgccctacctgcagaaggtgatggcgcacctcgcgcggaggctcaaggacaccaactcggactcctccgtgcgcgacgcgtgccgcgatgccgccggccagctctcggaggtgtacctccgacccctggcggcctcggctgccgctgaagcgggcaatgcgactgtcacactgttcgtgaagccactgtttgaggcgatgggggagcagagcaaggcagtgcagggtggggcggcggcctgcctggcaaagacggtggagggcgcggggcctggacctggcgtggtagggatgtttgggaagattggtccgagggtttgcaaattgcttggtggacagggagtacaggctaaaggggcacttctcaccatcatcgggagcttgtctcaggttggagcaatcagtcctcagaatatgcctcaaacattgcaaagcattcgtgactgtctcgagaacagtgattgggctactagaaaagctgcagctgatacattgtgtgtcctggccacatattcaggccgattgataggtgatggaacagctccaacaatagctgctcttgaagcttgtcgcttcgataaggtaaaacctgtcagagatagcatggctgatgcagtgcagctatggaaaaaaatggcaggagatgattcgaacgatggtaaaaataaggaatcagctgataatgaagggaaaatggattcacctaataacaatgacaaagtgaagggcagtagcatggctgaaaaagcagcagttctcttaaagaaaagacctacattaaccgatagggaattgaaccctgaattttttcaaaagctcgagacaagaatcacagatgaattagctgttgaggtggttgtaccccgcaaaactttacaatctcatttacaaagtgaagaggaaccagaagatgcagatggcgatcctgttggtccagctaacagcaatggatcagcagatgatgaagcaaatttgactcaactgcgttctagctctaattttcaaaatattcgagatagatgggctggccagagaggaagtagaaacaaagatgcaaaggttagggcatctgatgttgaagataggaatgaatctagtgcaaaagattctgcttcagcagcaatgaatgttcctggagaagggccttccttaaataataaaacaaactggttggcgatacagaggcagttgtcccacttggatagacagcagactagtctaatgaacatgctgcaggatttcatgggaggatctcatgacagtatggttactttagagaaccgagtgcgtggtcttgagagagttgttgaggaaatggccagggatatatcactatcatcaggcaggagaggtggtggccccatgctgggctttgattcatctcctggtagatcatctatgaaatacaatggttttcatgaatattctaattcaaaatttgggagggatcgtgatggacgggtgggatttgcagaaaggtacttttctggagatggtatgtcttctggtgtaagaagctctgaaccatgggactcgtatgcttattctggatcaagaagtggtatgaatgccaggagagggttggactctgtttcatctgataacagggtgcctagaaatgaacgaagcaatgatcaagcaggacctaggcgaggatgggacaaaggacagggtccatttaggtttggggagggtccttctgctcgaagtgcatggcgagcctccaaagatgaagcgacactggaagctattagggttgctggtgaagataatggaacttctagggcagctgcgagagttgctatccgtgaattggatggggaaactttgaatgatgataatcaaggggatgaaagaggaccaatttgggagtcttggactcgtgcaatggatgcgatacatgttggtgatatggattcggcttatgctgaggttctttcaactggggatgctgaattacttgtaaaattaatggagcaaactggaccagtagttgatcaactttcacatgttggtgatatggatgcgccttatgctgaggttctttcaactggggatgctgaattacttgtaaaatcattgagctaacttgagcaggtattcactgacattctaatgaaactaacaaacgaagtcctacatgctgttggacaatttcttgtggaagaaagcttctatgatatagctttgagctggcttcagcagttgactgatctggtaatggacaacggatccggttatcttggaatccccctagatgcgaagaacgacctcttactgggattacacgaagctactgccattgagttgcctgatgattgggagggggcgacgccggttcagataatgaagcagctagcttcatcatggcggattgatctgcagcagcttatcagttagggccatcggttgttgacatgagttaatttcatttgttcatttctgcctattttttctctatatatcttgctattagggctataagtattaggtttgacagaacctttgagtggaactgtgttgacatggattggtgttgtacggggaaatatgatgttgatattgtttacctcataacctgtgttggctttcctatttataatttggaggatctcaatttttacattttttactggctcaaaaaaaaaaaaaaa

SEQ ID NO: 79417 - DNA, 1271 bp, Oryza sativa
  Clone ID: PAT_MRT4530_79136C.1
gcacgagggacccctggaggtccatgagctacgtgctgcgcgacgtcgtcgtggtgctcggcctcgccgccgccgccgcgcgcgtcgacagctggctcgtctggccgctctactgggccgcgcagggcaccatgttctgggcgctcttcgtgctgggtcacgactgtggccatgggagcttctcaagcaacgccaagttgaacagcgtggttggacacatactccactcctccatccttgtcccataccacggctggaggattagccacaggacgcaccaccagaaccacggtcatgtcgagaaagacgagtcctggcaaccgctgtctgagaggctgtacaatagcctggactatatgacgaagaaattgaggttcaccatgccgtttcccatgctggcattcccattatacttgtttgcaaggagtccagggaaaaaaggttcacacttcaacccaagcagtgatctgttccaaccaaatgagaagaaggatgtgataacatcaactgcatcctggctggcaatggttgggattcttgctggtctgacctttgtgatggggcccctcaaaatgttaaagctctatgctgttccatacgtgatatttgttatgtggcttgattttgtcacatatttgcaccatcatggccatgaggacaagcttccttggtaccgtggaaaggagtggagctatctgcgcggaggattgacaacacttgatcgggactacgggtggatcaacaacgtacaccatgacattggaacccatgtcattcatcatcttttcccacaaatcccacattaccatcttgttgaggcgactgaggcagcaaaaccagtgctgggaaaatactacaaagagccagagaaatcagctcccctcccattccacttacttgtcggccattgggccatgggaatccttttgtctttgtcggtgaaacttccccctttatcctccagatttgaagcgtatcatccacactcagacgaggatgcagacatgaagtatgacgttgatagaatgattaagcctctgatgaatgcatttgtttggtgcatgcacatgcgagacacatctatcgtgggcatagatggtgctgacaacaggacactccagcatgtacggtcgtctggcgacggtgctgagtccgtgattccgttgatccatgcacttctagcgtatttcattcatttagctttattcagaatgcagcaacccgatactttgctagtgattgacgacgcttctttatcaatcattgactaa

SEQ ID NO: 79418 - DNA, 473 bp, Oryza sativa
  Clone ID: PAT_MRT4530_79137C.1
ttccgtccgttcccttcgctagccccggcgccatgggcgtgccacccacccctccgccgggggccgccgccgccgccgtcgacgcacggccgacgtgctcggcgcagaaccaagcagacggcgagccaaacttttcttgcccttttgctcttgcagagtggagcagaggacacttgcatcttgacgaattttctcaagtcgatgggttgctgtggcagcagcactgtagacgccgaggagcacctggactacagtggcggaaatgtgactttggtaactgatcaaaagaattgggacaatacaatggaagaagtagctgagcatggcaaaacagttgtgctaaaattcagtgcaatttggtgcactccgtgtaggaatgctgcccctctattcgctgaactttcactgaagtatcctgacattggtttcgtgtccgtggatgtagacgaaatgccggagctggtgacgcaata

SEQ ID NO: 79419 - DNA, 207 bp, Oryza sativa
  Clone ID: PAT_MRT4530_79138C.1
atgaagacctatcctcgtctcctccgctgtggccaccaccgccttgtgccgacaactgcacagttcactacactggtcaaggtcacctgtgacgggcccaaaccctcatctttgacggcttcgcgcatggtcagtgatcagtggtcactggtgagtccagtcacctttgacgggtggccggccatcacaggtgacacccacctctga

SEQ ID NO: 79420 - DNA, 1885 bp, Oryza sativa
  unsure (1)..(1885): unsure at all n locations
  Clone ID: PAT_MRT4530_79139C.1
gcacgagtcatcacctcctccgcgttctcttagccaccgcattaccgttgctctttctctcccatgcagatgcgggcgagttgggcgtgtgctacgggagggacgcggacaatctgatggacccgcaatccgtggtgagccttctcagggcgaacggcatcacgatggtgaggatcttcgacgccgacccggcggtgctgagggcgctggcgaacaccggcatcaaggtgatggtggcgctacccaacaccgatctgggctccgccggctgggatccgagctacgcacagaggtgggtggagagcagcgtggtgccctactacccggccacgctgatcaacggcgtggccgtggggaacgaggtgttncgatcaggcgcctcaacctgacccagcagctggtgccggccatgaggaacgtgcacgcggcgctgccgaggctgggccccgccgtgcccatgggggtgtccaccccgatcacgttcagctcagtcgaggtgtcattcccgccgtccgcaggcgctttccgggatgacatcgcgcagtcggtgatgagccccatgatcgacttcttgcagcagactgactcgtactttatggtaaatctctacccattctttgcatatgcggatccttctaccggaatctccctcgagtacgccacgttccgtcccaatgctggtgtgttcgatccggtgagcggcgtcacatattacagtctctttgatgccgagctagatgcagtttactatgcaataaacaaggtttctggtagtaacgagagggcctcgttagcccaagcaggaggacgggtgcccatcagagtttcagaatcaggccacccctctggtggtagaatccgctcaggggtcacagaagccaatgctgatggggactcggtggcaactaaagctaacgctcaagcatacaacaatggccttgccaagcgagtcttgttcggggcctccaatatggaggatgtttctgcgtacatattcgctttgttcaacgagaacaagaagggtgggccatctatagagagcaacttcggcctgttctatccggatgggacgaaggtgtacgatgttgactttcatggtggtggtacatgtcccacaaaggagagctggtgtgtggcaaatgcagctattgggaatgcacggctacagggagcactggactgggcgtgtagtaacggcgcggactgcagtgctatccaacagggaaaagtgtgctatgagccaaacaccatggttgcacatgcatcttatgcattcaatgactactaccagcgtaatggcaaggcaagtagcgcgtgcaactttgccggtgctgcttacatcgtctacaagccatcaccaagcatctgtgacccgaacccgagttggtgcgtggcgaacgcagaggtcggggacatgcggttacaggcagcactagactatgcatgcagtagctgcgcagactgcagtgccatccagcctggtggacggtgctttgatcctaacaccaaggtggcgcatgcgacctatgcattcaatgactattaccagactgccggcagggcaagtggctcgtgtgactttggtggtgctgcttccatcgtcaaccaggcaccgaatggttcaatgaagttgacaaacaatggtgacaattgcgccactgggaaaggggggattaggaatggggagggggaagggttatctggggtatatgatctgactggacacacagcagcccgatatgaatgcatcgcagtgcttgtcttcggaattgctcttcaagtgattggtcaattagttgttcgggaaacctgtcgtgccagctgcattaatgaatcggccaacgcgaaccccttgcggccgcccgggccgtcgaccaattctcat

SEQ ID NO: 79421 - DNA, 1067 bp, Oryza sativa
  Clone ID: PAT_MRT4530_7913C.1
atgaatagagtatccactagttggggttttgtttattctagggtgaacaagggggaggggcgagtggaccgggtccacgggagtggggcccacgcggcagctgcacccgagggcgcaggcggctaacggccgggccccacgcggcagccactcggcgcgcccgagggcggccatgccggtacggtaggcgggaggcggcacccccgcgccctgatggtcaccgccggcgaccaccggcgtggcggagcggcggccgagagaaggaagggaagggggaaaggaggcggcggtccacggctcaccccggggcgacggcggcgacggaggaggcggacggagcggagggaggcggcggcgcggctcgggtcgacggggacgcggcgctccggcggtcggcgaccgaaacggaggggtgcacgagattggcgaggatgcggtgaagccgaaggaggcggcgccaaggtgggaggcggtccggggcgacgacggcggcggaccggagctcggcggcgacggcggagagagtgagcgacgtccctagctcgaatccggcgaggatgaagggcggcgagaggcggaaacggacggaggaggtgcggggagggtttaaatagggttggaagggggagagagcggccggaggggaaggaaaccggcgcgggaggtcggccgccatcaatggcgccggcgagatttgcgggggcaaatccgcccgtttgaacgcaagagagagaggggaaaatggggtgaaagggagaggggatcacgaggagtgatttcccccactttattgcacgcggggacggcgggatgcggcggatttggcggcggcggcggcgcttggcgcgggcggggcggcgggagcggcgggaggaaggggatgacgggtgggccccacccatcagcgagggtggcgggcgggcccgcccgtcagcggcgcgcgcgcggggaggggctgagtgggccgcagggagaggagagagagagatgggggaagagagatgggccgggccggccgaagggagggaagggggacttttagggtttttctttttataaaacttttt

SEQ ID NO: 79422 - DNA, 489 bp, Oryza sativa
  Clone ID: PAT_MRT4530_79140C.1
aaaaaaaaacccccctttattaaagtttaacataaaagggccaaccagaatttgcctgccggccaaccattgggggcccacccccccccaataataaaccaatcacacacagtccccccgcaaaaaaaaaccacccatacctttaacgtaccccggaacccacccacgggttcgggccaagctaaagggaaaagggttctgggaataaaaatgcccccaatgttgttggcccacggccccaaaagggggtgggccagtttttcaaggggcccgggccccggtacccccaattgtgggacccaaaaccccaaaaaagccagctgggccaaccgcccgtttttgatctcctggagctggaccccccaaaactggacggggcccttgaaaaacccgagggggtcaaaggccccgccgggtaacttttttttttgggggcccttctccagggggccctgggcctcggaaaaggcaatggcaaaaaactcaatg

SEQ ID NO: 79423 - DNA, 694 bp, Oryza sativa
  Clone ID: PAT_MRT4530_79141C.1
gggaaacaacaccttctctttctgatgctgggaccctcctgaaaagaagcgccttgaggcgatccttcccttgcgccctttacgtgttcccgaaacctgatgtgcttaggacctgtactgcgcgacgctgctcataagaagaacatagccaagagagtcagctgactgagcgccgggaatcgatacgacgaaagaggatgctgccgacgctcaagaggccttgtcttggttatctactgaggctttggatataatgatgaactggatggaccgagcactgcaaggagtaaatgctgcgaagaaaaccttgatctggttgtgaagcatgactagattggatcttgctatcgacatgctgatcctggccttcatccttgcgccagcttgggttcatcgttgggagatgtcctgagtgcatagatcggctgtaactagcttgcgctttgcagatcatcgacgggtatctatattgcgtgcttccactatataacacctgctgaaattctacatgggaaggaaggggtttgaatcctatggatctgctgctttcttcgtacactgttcgttcttattctctttgccgggccgaggctatttatctggagcatcaagccatcggattcttgcatttcgagagcgtgaaggagtcgacttcatattgaggcatcactgttattcagattcagataacttg

SEQ ID NO: 79424 - DNA, 214 bp, Oryza sativa
  Clone ID: PAT_MRT4530_79142C.1
tgtccacctgatctgcatggagatcgccagcgttgccggttttaagagggcgtgtcctcgtgacatagcgagtgtgcgtgtgcgcaagcgcccgcggcaagatgttggacgcgtgcagcctgttggcgtgcgcccgatgctgctgcgtgggaggcggcgagacggagagcggtgcacgcatgttggacgagccagacatgcgcgggtgcagctg

SEQ ID NO: 79425 - DNA, 432 bp, Oryza sativa
  Clone ID: PAT_MRT4530_79143C.1
cttcactgttctatatgcatatgtgtgggtaaaggttcatgacagtctggggtcagattcttaaactacatcatggaaatggaaacctatgtatcgattagactgactgtgtttttctattaatggggataaactgggcagctcatgttctcaatgtaagagtatatgccctcataaaattttggggaagatatgcttcagcttatttatcagagctttcttgtcggtaattgacctggtaagtttattctacttgcgtcaagtggttcaatggttgtagtgccctttcgtataattttcctccgtttaattgcctgtaaaatttccggctttggtcttacttaacctggacgtgcacaaattttcggtttttttcgggtccgggattaccttggaactttgcgcaactttttttttcaggcttgcaatttt

SEQ ID NO: 79426 - DNA, 669 bp, Oryza sativa
  Clone ID: PAT_MRT4530_79144C.1
atgacccacttttaccaactaacttgtgttgggaacaaaaggcatacagatggatatgtggaaggagtaaccaggtttctagaatttgcttttgctaattcatcaaaggggaactcaatattatgcccttgcaaaaactgtggtaatagttattggacagaacgtactactgttcgggagcacttgatttgtgatggtttcatgcaattgtacagaacatggttgtttcatggaaaagaaagtacttttatgcatgacgatggggatcacagggtagaactagagaagtcaaatgaagaggatgatatttctggttttcttcaagatctagcatgtgggttggatgagatgggagatttagaagagaacaatgaggggcagcgtaatgttgatattggggatttttacaagttggtagatgatgctgggcaggagctatgtccagggtgtaaagacttctcaaagcttcgcttcattgttagattactccatatcaaatttcttggtggatggagtgataaaagttttgatttgcatctagatctacttaagtatgcttttccggcaaggacatcacttcctaaaaattaccatgaagctaaaaagttagtaaaatgcttaggacttggatatgttagtattcatgcttgcgaacatgattgcatctga

SEQ ID NO: 79427 - DNA, 146 bp, Oryza sativa
  Clone ID: PAT_MRT4530_79145C.1
aacaacatatggagaattccagcatcgcaacggatagggctatttattgggttcaggggatcaatggacctaatcctcagaaagtttcatggcccaggatcagctaaaattatacaactttggaactgccaatctttactttggca

SEQ ID NO: 79428 - DNA, 127 bp, Oryza sativa
  Clone ID: PAT_MRT4530_79146C.1
attagagtgtggtcctaactccggccctgaggcgggtactcgcttcgcgcgcgcgtgcatcatgctgcagagggcagagcccctctgccccgtggacgagacaaacacaaggatgcaaaaacgttga

SEQ ID NO: 79429 - DNA, 531 bp, Oryza sativa
  Clone ID: PAT_MRT4530_79147C.1
gtttcatttctacctcgagacgacgactcctcctcttcctcctccgtcctgggcgtatcctacgcttggagctcgaccgatccgctcggcgaccggcatagatcatcccgatcaataaccgcaatgagatctgctagtacgctcttccctgagggagtgctgtatgcccataacgactacaactctgcttgaagcacccgcagatcggtgtgccgaacctgcaagagatcaggctcctgcagagcttcatgcccctgtgcagcactgccgggagaccttctcctggaagcactactactgtgacctcatcatcgatggcattgactacctgcgcaactaccttaacctgacatctgacagtgtgcctgccacgctccaaaatcctgccaggccacctgaccgcccgtttgcctctgctccacctggcgaccgcccacggggcccgcctcgctctgaaggggacagggcgaggtcccctcgacagagaagcgtaccgcggaggacctcgtggtcatcctggcgtcttggtcg

SEQ ID NO: 79430 - DNA, 163 bp, Oryza sativa
  Clone ID: PAT_MRT4530_79148C.1
ggataatgggcattgatcccctttcaaatttatgaccatagccaactgattccttcaaaaacaaatttttgaccacgccacctcctttaaaaaaaatgatctgcgggagttccaatcagggtcttaggataataatggaattttaagaagctgccccgggcca

SEQ ID NO: 79431 - DNA, 1799 bp, Oryza sativa
  Clone ID: PAT_MRT4530_79149C.1
acatatgcatattatctcatataccaactagctatcaattaacaattggatccatatcactgaatgtaatatatatatgtgtagctagcacccaacaccaaaatctattattgatcataccctagaacgtaatcgccggcgccgcccgaaccgtagtcgcaagacgacgacgtccacgtcgagaacttctcgtcggcgccgatgatggcgctgccgtccgggcactgcagctccggcaacgacgaagggatgatcccgccttgcgctccgccgatcgactcgcacttgaagaggaagtcgtatagctcgtcgtggagaccgtagccggcgacgaacccaccaccacccgccattgacgacgacgaggtcatctctacaccggcgactcccggcatgtagttcgaaccggtcgccgccgcagggtcgaggtgctcggcggcttggaacgcctccgacgtggtggcggcggcggcggcggcggtggcgagggtatggccgccgacgaccaaatgatgggggtgttgcacggtggcgacgacggcgtccgtcggctgcacggccgggagcggtctgctcggcagcagcgcctcgagcttcggccactgcggcggcgcgacgccgacgccgccgccgttgctgctggtggtggtgcagccgaacgcgctgttgtagaggccttggaggcgcatgtggagctggatccgctcgagggccgacgagcttagggcttgatgcggcggcgccgccgccgccgcggtgccgacgccaccgcacatggcggcggcggcgctgcctgctagaccgcagtggtcttggtttgcgcgggcgcggcgcgacggcgcgcgcttgccgaggagcttcttcttcagcttggtgttccagtagttcttgatgtcgttgtccgttctccccggcagctgcgccgcgatgatcgaccacctgctaccgatgctaatgtagaggctacaaatgatgtgctcctcttcttctgtgaaatcaccatgcttaatgtttggccgcaggtagttgagccatctgagcctgcaactcttgccacatctcttcagcccgatcttctgcggcagcgcgatccagttgccgccggtgccgttctcctcgatgtaggccttgagcttggcgtcctcctccggcgaccacggccctttcttcacgctcgccttgtcgcagcacggcgccctccccatcactaactccttcgaattcttgatttcttgctgctcagctcgatcgtcgtcgccgtcgccgtcgtcgtctatctcagcagaagagagatctagaaccgatggatcgctagtgcctgacgacggcgacgatgtgtagctagctgctgcggctggtggtggtggtggtggtatggtgatggcgtgtttggcagcagcggtgagcgggtgcatctggggttgtggccgggctggctttatagtaggtttagtagatggatagaggtgtgtgtcctctgaaactgatcttttatcagtatacatccctgctgagctcccccgtatcccctcggttgccttgtcatcgtcaccaccatcccctaagctgaggagcaccgccgcgaccgccgccgttgacagccaccgccgccagccatggccgccgtcatttgcgtcgtcaccagccatggctgccgtcatttggaggcctatgtcaccatgcaacccctgccggattgggccggccgtgcgacctccagactggcggcgtggatttgaccggtcatcgtcgaggtcgtcgttgccgaggtcgtcatcgcgagccgccgccgccgccat

SEQ ID NO: 79432 - DNA, 963 bp, Oryza sativa
  Clone ID: PAT_MRT4530_7914C.1
atggattacactgaggacgacggcgtcgtcgtcgagggagccgagccacctcgctcggtcgccgccgcgcacgacgaggacgacaaccaggaggacgactgcgtcgtcgtcgagggagctgagccgcctcgcctggccgtcccctcacccggtgttcgacgaggtcccctagccctaaccctgccccgctgccgccccgagccccgtgccgcccctgccgcgccgcgccaatgtcgccgcgccgtcgccatcgccgctgccgcctgtcgcgtcatcccgagccccgtgccgccgcctcgcgccccgcgcccgtgccgtcgcgcgtcgctcgccgccatcccgtcgcgccttcccatcgccgctgctgccgcccgccgtcgcgtcgccgctgccgagccgtcgccgtcgctgcgccgcgcaccgccgctgtcacgtgcgtcgtgtcgccgtcgtctcgagccccgcgccgccctgtcgccatcgccgcgcgccgcgagccgtcgccgtcgtgctgccgcaccttcgagccccgagccccgtgctgccgtgcgccgtcctatcgccgtcgcgccgtcctatcgccgtcgcgtcgccgcccacatcgccgtcgccgtcgtcggtcgcatcgtctcgagcccctcccctccgcgcgcgctgtcgtcgtcgcccccgcgtcgcgtcccgtgccgcgccgcctcgctccccgtgcccctgccgcgccgcgcgcgtcgctgtcacccgtcgccgtcaacctcgccgcgtcgcgccgtgccgttgccatggcccgtcgctgccgccgcgtgccgctcgcctgtcgccgtcccgcccgtcctgtcgcgccgagccccgtgccgagccccgcgccacgccgccgcgtcgccgcgcgtcaccgtcgcctcgcgccccgcgcgccgcgccgtcccatcgccattagggccggccacccctccccgcgccctataa

SEQ ID NO: 79433 - DNA, 2148 bp, Oryza sativa
  Clone ID: PAT_MRT4530_79150C.1
ctacagggtgtgacagaggacgaccggccgcagacatagaagcgtcaagcgcggcggcgacgcaatgatagccggcggaggcgaggtgaacagtcccgcgatggcacatggcgaggatgcacgttccggcagcgagcctggctccagcgctgacgggggcggggtggctggcatcggggtcatctcttggggaagcagcgccccggggagcagcgccggcagaatcttgtcggccgcagcgtcgctggccagatcttccaagcggcgaggcggggacgctgcgagaggtgccggtgacatgggctgtggtaggagagtgtcatcgcctggggtgcgagctgcagcgacagccagctcaaggcgcatcagcgcctcctcaatttgctggcaggttgtcagtgtgtcgaccgctggcgtggccggcaaggcctccctgatgcggccaaagacgcgcgcaacaggcaccggcttccatgccgtgctgccgaaccaggcttcagtcccagtaaaagaccggatggccaggtcctctgtcgccgtcggaggtggcgcagtcatggccttatcagcgacaagcgtgaggcgaagcagctgatcaccagttaaagtcggagggctcgccgggatttcctcggtgtgaagctcctgctggcgggaaggcagagagatctctgccaggtgtggctcagggtggacagggtcggtgacgttgtccacgtcagttgcaccagcgtgatgacgccggccgccatggcgactgtgccctcccctgtcgcactggcgcggggagcgtgtgcgttcacggcggtaatcttgatcaatcgcacgttgttcgccgcggccacgcccgaagtctcgtccccgttcgtcccgatcgtcgtcatctcgatccctgctccgccagttttgattagccctggggtggtcgttgttgtgcccccggcggcctcttctcccgccgcgggcacggtcgtcatggtcggccggggcgtcacgatcatcatcgccgcggccgtcttcttcttcatcttggtcttgctcgatgcacgccgcgcatccgcggcgagaccgatcacgcacccgcgcacgaccgccgtgatgtgcgccgtcgtcacccctgtttccccgctctccgcgctcagggcgacgcgatccacggagctcgtcctcccgatcgtggtcgcccaggcggtcgtgaacagagcgcggcggctgtaggtggtgtgggaagtcctcgaagactcgcccgggtgcctgctcgccatccaacacctccagggtccacagcggcaagcgccgcttcgtcggctggaaggagccttgcgcctctaggtcgatgatcgccgccgtgtagtcatggatttcctccaaatggaaaagcaccggatgacgcactccccgctgccagtactccggcggattttccgccacgagcaggggggccagctgctggtccttcgcgcggttggtgaagccaagccacatccgcttcgggatggtactggggttcgccgtccacgcccacagatcgatggagcgagtgttgccagactccatcgggtggacgaggtcggtctcgatctgttccaaggcacaggtgtgcccaatgaggcgctcggcgatgtccgctgcccaggcgtgcatagggacgccatcaaggcagagccacacacggaacatcaacgcgacgccgagagcgctttgcaggctgcgccacttgatgaagtggatttcaatcccgcgacgcttgacgtagcccttcgcaatggcttcctcgcaatggcggcgatgttggaacttgatgaggaaagcttggggatggtggagcgagacagccacatcaccgcggcaaagcttgaactcgtccaagaacgcctgctcgacgtcttgcggccccgtcgacggaggcgcgcgcgcggcccaggaaacagccgcggtctcattccactcgcgcagctcctcatcaatggcgtacgaggtggggatgaagatggtgtcttcctccgggcgcgtggccgggtcgccgagctacgtcatcctggttgcccgcgttcttggcgggggcggcggaagctggagtggaaaggccgggcgattgctcgtctgcagctcgcgcacgcgatgacggggaggcggactcttgcgtag

SEQ ID NO: 79434 - DNA, 611 bp, Oryza sativa
  unsure (1)..(611): unsure at all n locations
  Clone ID: PAT_MRT4530_79151C.1
tccaaccancatgcggtancaattcaccctanagtgagtcntattacaatncactgggncnncctnttacaacctcgtgantgggaaaaacntgncgttacccaacntagncgccttgaacacatcncctttcnccagctggcgttaatnncnaaaagncnacagccaatcccctncccaaaagtngcccccctgantggcgaatggcaaattgtaagcgtnaatatatngtaaaaatncncgttaaattttggttaaatcanctcattttttaaccaataggccnaaatcggcaaattcccttatatttccaaanantaaaccnaaantgggttnaatntttntccnttttggaaccaaaattccnctattaaaaaacntgnnatccaccttcggtggcnaanaaacatctntcaaggcgaagggccggatattnanccancattttnttcnantttctngggggtntaagtgctgttaannnactaantccgaaccnaacaacgggcagtcaatcttccagttcttcttggctgcattgtcntaatcgggaattcccttnggcgctttacacactaaaatgaaggtttgatcccttgtttnaagcattc

SEQ ID NO: 79435 - DNA, 457 bp, Oryza sativa
  Clone ID: PAT_MRT4530_79152C.1
ataggatcaaaacatcactattacctcaactttttaaggaaggaataaagtagcaatacttgcaccccaaaattcagcttatcgacaatattttagaaaagccatttgctttgccgccttggttgccaagcttaccagaccatctaacacatagaacacgagatcactataaaccaaacggcacccaacgaataaaatccagggtcttcccacgctttcagaaacccgttggttacaccctgttattaacgaccggtccctgaatgcgctccaactacacctatagggagccgtctcacagcttggcaaaatcatggacataattggttcctgggtgaaagagttctcaggtcactattccgcacatatttccagcccgaagcattaagggttaatcccggggcgccttatgagggaggcaaatctcattatttgcggtgggctaaatggccgcttt

SEQ ID NO: 79436 - DNA, 396 bp, Oryza sativa
  Clone ID: PAT_MRT4530_79153C.1
atgcccactgcggagcctaccctaggcagctccctcccgctatcctccatcgacaacaacgacaagatcgtcgccgtctgcatcttcgttgacttcatccaggtattcccctccgtctccgccgaagccgtcgaggaccaggccgcatcggtcgtccaccactaccctgtcgtcagccgcatcatgaagccgatcatcagggagcctgagatcgacagcaccagcgaaggggtgtggttcatcgaggccgaggcaaactacacttcctacgtggactccgtgctcaccgccgatggcactgtcgagatttagggcgagcgcctccccttctcttctccaaccccctctccacttccccctccccttgtcccgcctcgacctcactagccgccgcat

SEQ ID NO: 79437 - DNA, 924 bp, Oryza sativa
  Clone ID: PAT_MRT4530_79154C.1
atggccggcggcgatggcgtgacggtggtggggcgggcggagatcgacacgcgggcgccgttcaggtcagtgaaggaggccgtcgtcctcttcggcgagaaggtactcgccggcgagctccacgccggagccgggcggcggctactcgccacatccgaccagctgcagcagaatcgtgctaccacaacaccgccggcaagatggccaacagttagtcaagtcaaacaaatcgccggcgcggtggcagcggcggcgggggcgacacgccacgcgccggcgatggcaacggcggagctagaggaggcgaagcaggagctggagaaggagcggtcggagaagaagaagatggccggctgcatcctctccctgcaggaggagctcagcaacgccatgagcgagctcaacaagctcaaggcacgagacaacgaagacgacgacggcggcggcgaggcggccgccaaggtgatcgacctgcaggtggaggatctcaagttcgtcgagatcgacgacgacaagccacagccgcgccgacagtcgccgtcgacgacggtgacggcggcggcggcggcggcggggagcgcgtcccccggcgaattccagaagaggaggtacgtgacgttcgccgacccgccgaccgtagcatcagcggcgtaccgcgcgccgccattgccggacgtggtggtgatggagccgcatcaccatcgtcccgccgcgccgccgctgtaccgcgaggtgaggttccagaggcagatgtcggccgggcacgaggcggtgaaggtggcggcggcggcggagcaggaggcgaggaagaagaagaagaagccgctgatcccgctggttggcgcgctcttcatgaggaagaagaagagcagcagcagaagctgccatgacgactcggcgctcaactcgcgcaccgccttttga

SEQ ID NO: 79438 - DNA, 1430 bp, Oryza sativa
  Clone ID: PAT_MRT4530_79155C.1
cgtcgtgaaccggagcgccgccgtcgtcgcaacaaagccccaggatttacagaaaataatggagttttaaaattccaagggcgtatatgtgtttcagataaaaaggaaatcaaggataaaatattagaagaagcacatgattctttattttctatccaccctgggagtacaaaaatgtatcaggatttgaagaaaatattttggtggtctaatatgaagaaagaaattgcagaatatgtcaatttatgtgaagtatgtcaaaaggtaaaagcagatcattaaagaccagtaggattaatgcaacctttgcccctgcctgaatgaaaatgggatgaaattggaatggattttattataggtctaccaaagactaaaggaggttatgatgctatatgggttatagttgacagattaactaaggtagcatatttcttgccagttaagcaaacatatgatggaaacaagcttgctgagttgtacctcacaaggattgttatattgcatggagtacaaaaagaattgtctctgatagaggaacccaatttacatcaagattttggaggagttttcatgaagctatgggtacaaagttgggattcagctcagcatatcatccacaaactggggacagactgagagttaatcaaatacttgaagacatgctgagagtatgtgttttggtttatggcctagtttgggaaatttgtttgccattcgcccaattttcttacaataatagttatcagtcaagtcttgggatggcaccatttgaagtcttgggatggcaccatttgaagctttatatggtagaaaatgtaggacaccacttaattggactaaaacaggagaaggacagttgattggtccacaaattgcacatgatgctgaagcacatgttaggattattcgagaaaaactcaaaacaacacagaatcgacaaaagaattacaacaataatcaaagaagagacttaagttttgaagttggagattttgtttatttaaaggttatgccacttaaaggagttcaaagatttcaaatgaaaggaaaattagcacctcgatatattggaccttatagaattgtgcaaagaagaggtgaagtatcatatcagttgcaactaccagcagaattaaccggaattcatcctgtttttcatgtctcacagctcaagaaatgcttaagaaaaccaacagaacaagtacctctggatgacattgctttacagacggacataacatatgaagaagaacctgagaaaatattggaggtcactgaaaggaggttaagaaatagaggaattgaattttgcaaagtacagtggaaaaatcactcagaagatgaggcaacctaggaaagaaagtctgagctggaaaagaaatatccgcacctatttgctaactggtaaatctcgaggacgagattccttt

SEQ ID NO: 79439 - DNA, 2026 bp, Oryza sativa
  Clone ID: PAT_MRT4530_79156C.1
atgggccaagcccatattgtctctctctctccttgctctattgtgcttctctccctcctgactgtcggcggcggtggcggtgttgagctcggctacgagggcggtggcggcggcggtgtggagctgctgcgagggctatggctgcggcatcggcatggagctgcggcgagggcggcggcgtggagcggctgcgagcgcggcggctgcggcggcagcgtggagctgttgcgagggcggcagcgctaccaaggttgcggaggcagtcgccagcggaagcctttgcgtgcagtcaccgacgaggagagcagcaacggcggtggagcttgctgccccgcgcagaagggcggacctcgccggagccacacgcgtccccaagcctcatcgcctccgccgaactctatgtccccaagcagctctagctccaccggcgagctcgattttatggagaagatagagctcctggaggcggcaggagagacggaccttgagctcaggctcgccggcggtttttgcgttagcttgatagacatcaacagaatcagaatgaacaagttagtgaaggtaggatcccgtcctcgtcaaattgcttggggaatgtcaagaatatgctgtgagcagtctcctggtacttccagcaagagatatgagaggtatcaaagacaaccacagaatgttgatctcccagaattgctcccaaagaagaaaaagaagccatttcctgttccaattaagaagatgttgcaagcttctcgacaagataaaaggcttgcgcgaatgcgaatagagaagcctcttgagcccccaaagaatggtttgcttgttccagagcttattcctgtagcttatgaggtccttgataactggaaggtgctcatcagaggtctctctcaactgttgaatgttggtacagtttatggttgcagaaaatgcccccaagtccatgttggtccagttggccaccagatccaagattgctatggaacaggaagccaacgtcggaatagccatcactcttgggtcagaggatccgtcaacgatgttctcatcccgattgaatcttatcatcaatttgacccatttgggtggagagtcaagcatgaaaccaggtttgactatgacaggattccagccatcgttgagctatgcattcaagctggtgttgagttgccacaatacccctcaaggcgacgaactgctcctgtccggatgataggcaagaaagtgatcgaccgtggtgggtttgttgacgggcctaagccacaccgttcagaagactgcatatctctgcttgctgaacttgacacattcagcaaccagcaaggccagtcatcgacgccatcaaatgtggaagagctcgcggagaaaacactgaaagcatacttaaatgtccagcgaggtgttgcacggttgatgaggaaatacacagtaaaaacatgcgggtattgctctgaggttcacgttggtccatggggccacaatgtgaagctctgtggggctttcaagcaccagtggagggacggcaagcatggatggcaggatgcagtggtggacgatgtcatcccgccaaattatgtgtggcatgtccgtgaccccactggccctcctctcagatcctctctaaggagtttctacggcaaagctccagccgtggttgagttgtgcgtgcaggcaggagctgaaatacctgaagagtaccggccgatgatgagagctgatgtcgtcatcccagactcagaagaagctaggttggctgcatgactacattttggtgccgttgcacctcttagctgtcagagtccacatagaaccaaagggtgataatataatggttactgaccatataataagtgataatcatttgggaaaatcccaggtacctgacggtccgacagtaggaagtgcagctgtagccattgaggaggtattgtttagagctcagtcttgctcagcctgtggcactatgatgtctgtaaaacgatgtggtgcctgtgataatgtaaagagattccgccaatatcggtgtcgc

SEQ ID NO: 79440 - DNA, 1130 bp, Oryza sativa
  Clone ID: PAT_MRT4530_79157C.1
cttgcttcatcttcatctttcccacctccatcaccggccggcaccaaaccagcacaggtcgctgtctctctccgaaatatcatttcgttttttaatcatcttttcctcctcttcgctaatcaccatgatttgcctccgagccgccttccccttgacctcctccttctcctcctctccgccgcctcgccctcaagccctcctcctcccgcgccgccgccgccgccgccatgtcgtccgccccaccgccatcgccgcgccggtcgagcacatcgtgctcatcaaggtccgcccggaggcggcggcgtcgggcgccgccgcggcgatggtgtcatcgctgcaggcgctgtccagggtggtgcccgggctgtcgtacatccacgtcggccccgtgctccgcctccggtcgccggcggcggaggcgctgggtccgacccacgtcctccactcccgctacgccaccaagcccgacctggcggcgtacgcggcgcacccggcgcacgtcgccgccgtgcaggggcacgtcctccccaacgcgctcgactccaccgccatcgactgggtcaacgccgcgctcgcgccgtccccggtcaccccgggctccgccgtgcggctctccctggcgaagttgaaggagggtgtggaggcgcaccagctcgtggagaagctcgccgcggcgacggcggcggcggggcgaggcgaagggcgccagggtgagcttcggggagaacttctcccccgcgcgggctaaggggtaccagttcgggatggtggcggtgttcgacagcgtggaggagctcgacgcggtggagggggacgggaaggtgcaggaggccaaggcggcggtgaggccactgctcgacgaggtgctcgtgctggacttcgtcgtcggacctgccgccgtggaggctccggcgccggccaacctctgagaggtttgccttcggtttggaaactcttagttgccttgttcaatcgatcgagaataatgcaatccttgtgattgggtgtgctgctgctgctgtggcgtgtgattggcaatggcaattgattttggaatgaataagaattgtacctgactaaaaaaaaaaaagggcgccgctcgcgcccacgcgtccggttctagatcgcga

SEQ ID NO: 79441 - DNA, 1229 bp, Oryza sativa
  unsure (1)..(1229): unsure at all n locations
  Clone ID: PAT_MRT4530_79158C.1
cacgacctttgtaaaacgacggccattgangcgcgcgtaataccgactcactattagggcgaattggttaccggcccccccctcgaggtcgacccacgcgtccgccggcccagcacagccgatggtacgagagcatggctagctagccgagctacttagctactacatccatgatccatccatccccaacaaacggagcaagactgcaagggagagggagagagagggaagcttgcaggctgcagctaactagctaggcaaggagagagaggagatagatcaagaagagattttgagaccgagagagagctagagagagatcgatggggcgagggaaagtagagctgaagcggatcgagaacaagataagccggcaggtgacgttcgcgaagaggaggaacgggctgctgaagaaggcgtacgagctgtccgtgctctgcgacgccgaggtcgccctcatcatcttctccacccgcggccgcctcttcgagttctccacctcctcctgtatgtacaagacactggagcgataccgcagttgcaactacaaccttaactcatgtgaagcatctgctgcactggaaactgaactaagcaattaccaagagtacttaaagttaaagacaagagttgagttcctacaaacaactcagagaaatcttcttggcgaggacttggttccacttagcttgaaggagctcgagcaacttgagaaccagatcgagatatccctcatgaatatcaggtcatcaaagaatcaacagttgcttgatcaagtatttgagctcaaacgtaaggaacaacaacttcaagatgctaataaagacttaaaaaggaagatacaagaaactagtggagaaaatatgcttcatatatcttgccaagatgtagggcccagtggccatgctagtgaagctaaccaagagtttctccatcatgcaatttgtgacccttccctgcatatagggtatcaagcttacatggatcacctcaaccaatgaatgaattgcttatcacattaatggacatctcctatgttggatgtggtgtttgacgtaatgctctcttttacatgcgggttttaccttaagtgtgtgtgctaaatttagtgcgtttgtttatgctcttttgaactgaacaaaggaatgatcccggtttgattgatgaatgctgcaagaacataatctatatgttagtctgaattcagtatgtaatgaagatgttttgtt

SEQ ID NO: 79442 - DNA, 713 bp, Oryza sativa
  Clone ID: PAT_MRT4530_79159C.1
ggtttgatttggagcagcggatgacgtacgggacgtccgcggctgcatgcgggaacagcgcgagaatcggccgcttttttttctccttctcgtggcagtggcggagatcgggacgggacccaagggcaagcggcgacgcgcactatgggtggcgcggaggcggagcaaaatgcgtgtcggttggatgggtcgcgggcgggatggcaacgtgacgggacgcgccacacgcaccccgcctcgtcgccgcggtgttttgctgggaattgcagcgctaaatcctctgctcggatgggtgggtggatgcggcgtttcacggaaccatcgtttcgtttatttgcctaaataaacaaagtggtatatttacaaacgaaaaataatttatgaataaaactttcatatacttgttcttagcgacttaaaatcaaaagctaaaactttaaaagcctcttaaaatcagctttaaatttaaaatttaaaatttggttgtaaacgaaatggtgaggcctcagccggcgccggcttggcgtacggacgcactgccaacaacatggagcatctttctttgggttgtggaaaggaaaaaagggtggcgatttttttgaaggggaattgtaggcgaagtacgaaccgaattcactatatcttcttttatggagtagtacacgatgatgataatgataaaacgatagagatttcgttctctggcttatgct

SEQ ID NO: 79443 - DNA, 996 bp, Oryza sativa
  Clone ID: PAT_MRT4530_7915C.1
atgggccggggacgcagccggaagccgcgcaacttcgccacgttccgcctctgcccgcgccccggcgccgccgacgcctccgaccgcgtcttcttccgcgtcgacaacaacccctactacgtcccgggcttcgccgacgacgacgttctcggcggcgccgccgccgcggcggtgggagagggagatgatgacgcgccttcctcctccgcctccggcgagacgggccccctccccgaccacgtccgccgcgagatcctggagctcggcctgcccgacgacggctacgactacctcgcccacctccgcgagatccgcccctcgatctcctccaccggcggcggcggcgcctccgccgccttcctccccgtccgccgccacgcccgcgcgcacttcggcccccctgtggacgtcaaggcctacgacgcgagccgcgttcggatcggctcctccggtaaggagaccaccacggcgacggcggcggcggtggaggtggaggtgacgcggatcgagaatgccatcgatcctgatgtcgccaggttgctcgaggagagcggtgagccggcgctggccggatcggagtcggagtcggagtcggaggacgacgatctggaggaggatttcgtcctcgtcgcaaatcaggacgacgatgattttgttctcgttgaaattgaaaatcagtttgaggaggaagaggaaaacattgctgcggctgatgattcagaggaggacggtttgaagaatgagcctgtgctatcgaagaacaggcggaaagttatgacgcagccatgccaatactgttcttcggttcatgagaaggatgatgatgcagtattgcagcagtggcattgtacgctgatgctgattagtgaagtcgtcattgcggttttcaggctttcagatgcagatgttgtgtgtgctgctttctcacctgctgctgctccctttatccatggtagatggggaaatggagataatttaactatttgtcacttttag

SEQ ID NO: 79444 - DNA, 336 bp, Oryza sativa
  Clone ID: PAT_MRT4530_79160C.1
ctagcctgcttcttgatcgctaataaaggtttcatcggggttttagccaatgagttatctggacgttgcatcggcttacaaggattgcatacaattggttcctacaggattatattattgttatattacattatcatcagccgattgtctttatttacatcaagtgtcagattttacatcaaacatatggccgatagctcaaaatcctatcactatcgactggatcaaattgactggcacgtccgcacctcatcaacctttggacctgcactggagctaagcagatctctcagaccgttgtggattttccgtcaaaagccgcgcgctagctcaatc

SEQ ID NO: 79445 - DNA, 794 bp, Oryza sativa
  unsure (1)..(794): unsure at all n locations
  Clone ID: PAT_MRT4530_79161C.1
ccacgcgtccgctcggtgaagcgcaggttttcgatgtctccgaagaggctccggataaagtgttgcaccgtttgaatgtcaaccttgagaagctcaagatggatggagacattcttgctgttcaaatttggagaactctcagaataattgttgcaggtggcgatggtacggcaagctggctgcttggggtagtcagtgatctcaagctttcacaccctcctccaattgctactgtgcctctgggaaccggaaacaaccttccattttcatttggatggggaaagaagaatccttgtactgaccaagagtcagtaaaatcattccttgggctagtgaggcatgcaaaagagatgaaaattgatagctggcatatcatgttgaggatgcgagctacaaaggaaggtccatgtgatccaatcgcccccttagagttgcctcattcattacatgcatttcaccgtgtgtcaagtagtgattccctcaatatggaaggttaccacacattccgtggaggattttggaattactttagtatgggtatggatgcagaaatttcttacggatttcattctgaaaggaagaaaaatccagagaaattcaaaaaccagctgacaaatcagggtacatatgctaaggttggacttaaacaggatggttntgtgcttctttaagtcatccatcttcaaggaatattgctcaacttgcaagtgtgaaaatcatgaaaagagccggtagccactggcaagaactaacattcaccacagcattcgatcaatcgtctgtctcacctgcct

SEQ ID NO: 79446 - DNA, 477 bp, Oryza sativa
  Clone ID: PAT_MRT4530_79162C.1
ttacgttgtcgacatccgctcgccgtacaaccacatccgcgtttctgacgtctcccgtgccagccaccccctcactagcggcgcctcctcctccttgacacccccggtaacatccactcctccttccctcgatgcagctaccccatcacacctcgatgtcttcgccaccctccctccactcccgtgatctccgcttcccatgatttcttcggcctcacggggctcgaagaggaccacgctgcccacctcttcatccatgtcagggacgcgctcgaggtcgaggcagtggaagcggtgcccggcgacgcgctggtggacctgttcgctgatgggagcatgctcccatagctccaagaagcagacacatggatgcagatagacgtgatggtggtggccggtgggagggtcatggtgaattgtgggctgcggcaagccatgcgcggaggcggaagaggaggggcgggacggcgaggccat

SEQ ID NO: 79447 - DNA, 816 bp, Oryza sativa
  Clone ID: PAT_MRT4530_79163C.1
aaaaaccatggattaccggcgaaacatggcgcttacgttgtcgacatccgctcgccgtacaaccacatccgcgtttctgacgtctcccgtgccagccaccccctcactagcggcgcctcctcctccttgacacccccggtaacatccactcctccttccctcgatgcagctaccccatcacacctcgatgtcttcgccaccctccctccactcccttcctatggccgccgcacctcatccctcgtcgtcctcggcttcggggcggcaaactcccccttttcctggacctcttagtccatgactgggagatcgaccgcaccgtgatctccgcttcccatgatttcttcggcctcacggggctcgaagaggaccacgctgcccacctcttcatccatgtcagggacgcgctcgaggtcgaggcagtggaagcggtgcccggcgacgcgctggtggacctgttcgctgatgggagcatgctcccatagctccaagaagcagacacatggatgcagatagacgtgatggtggtggccggtgggagggtcatggtgaattgtgggctgcggcaagccatgcgcggaggcggaagaggaggggcgggacggcgaggccatcatggaacaactactctcttcgtctcaaaatgtcttaaaatataagaagttttggttagatgagacacatcctaatactaaaaatataatactataaaaatatagccaactatattcgtaatattaggatgtgtcccatctaaccagctagattcgtattgggcctgttcggctgcccgttaaggcggctgggctgcaggct

SEQ ID NO: 79448 - DNA, 1926 bp, Oryza sativa
  Clone ID: PAT_MRT4530_79164C.1
atgaagttggtggaggacgccacccctcccgcggcgggggcggtgcttctcgccggggcgcagtcgaggcacgcgatattcagggacgagctcgtgaggagggctatatacgccgccgaggcggctcaccgcggccagatgcgcgcgagcggtgacccttacctgcagcactgcgtggagacggcggcgctgctcgcggagctcggcgccggccccgccgtcgtcgccgcagggctgctgcacgacacggtcgacgacgcaggcctcggctatggctcactctccgtccaatttggcgctggtgtcgccgaccttgtgaagggggtttcaaatctaagtcatttgagcaaactggctcgtagaaatgatacagccagcagagtagatgaagctgacaaattgcgtacggttttccttgcaatggaggatgcgagagcagttctcatcaaacttgctgacagactacacaacatgaggacgttggattctttgcctaaggtcaaacaacagtgctttgcccaggaaacgctggagatatttgctccgttggcaaatcagcttgggatcttgaattggaaggaacagcttgaaaatctgtgcttcaagtatctttaccctgagctatatgaggaactgtcatccaaccttctcgagttctacaaccaagatatgattgcagctgcaataaggcgactggaacaagcccttcaagtgaggggactatgctatcatactatatcagggaggaacaagagcatgtacagtatctacagcaagatggcaaggaagaaactggacatggatgaaatctatgatatacatggggtgcgtgttatactcgataacaaagctgattgtttcaccactttagagattgtccatcacttgtggcctagaattcctggcaaattcaaagactacatcaacagccccaaacccaatgggtatcaatccctgcacacggttgttctcagtgaagaaacactgccattggagatccaaattcgtacgagggacatgcatttacaggcagaatttggaattgctgcacattggagatacaaggaagctgttcgaaattgttgttcatctgttcctgaaatggtggaatgggttagatgggttgttacatggcagtgcgaaactctgcacatagatcacccttcctctcttacacatggagctccaccaagggcaatatgcagttgttcttctcagtctgatgactgtcctttttcgtattcaaaacgatgtgaccacagtggaccaatcctagtaatattactggagaatgaaaagatgtcagtgcaagaattccctcaaaattcaactgtactggacctactgaagaggacttctagctatgacatgcagttgaggttaagactgaactgccatgtcgtgcacaacttgaaccaagagcttaaaatgggtgacgtggtcgaactgatccctttggctcaatgcaatcctggagctggaggttatgcgagggagttccaccaaatgtatgaccaccggctcacagtttcgcagtcgtgacaactctaggataccaaaaactatgtacatatatatacatgacagattgacagcccatcaagatcgtcggaagtttaggtttccctttactgacaaatagaagcactactcgggaatcatctgaaaaagatcaaggaatcgtttccctgtgccaaatgcgcgcgcgtgtgtgacatatcttttacatttgtgtttgtttatatgttaactaaagaggagtagagtgtcaatacgtgaaacatttctggagttttagtccaagaaatgatccctgtttgggacagtgtatcattgtaagcttctatggctgtgcaatgtgtgacgtttcttcaactgaaatatatgaaaatatatgggtttcctgcctgcaaaaaaaaaaaaaaa

SEQ ID NO: 79449 - DNA, 1661 bp, Oryza sativa
  Clone ID: PAT_MRT4530_79165C.1
agcatgtgcaaggaaagaaaccacagtgttacactccataacaatatattaaatgttatcgtctctcgacaatgcagttttgtcatgattcatatctccatacattcatgcagcaatcgacagaatggatgagggatagggccgacaaattgaaagaggatgtatgcacactatttacacccactaaggacatcttaaggaggatgtacttagtagatgaaatagtgcatctaggaatcgatcacctctttgaaaaagagattgaaactgcattaaaagacatacatgaaaccgaattcactagctctaaccttcacgaggttgctctacggtttcgtttgcttagggagcgtgggttttgggtatctccagatatattcaacaaattcaaaggagatgatggtaatttcttaaatgaatttgctgaagacccaaggagcctactatctttatacaacgcagcccacctcttcatacatggtgagccagaactcgaggaagctatttcttttgcaaggaaccatctcgaatcaatgagttcgcatagtgttttgaaggcccctttagctgatcaagtgaagcggcatcttcgcttgccactgccaaggactcacaagagagtggagatgctacattatatgtttgagtatgaccaagagaatgagcacaatccggttcttcttgaactagcaaagttggatttcaacctactgcagcaggttcacttgaaagagctcaaggaaatttctaggtggtggaaagatgttttggcatatatgggtctagaccatatccgagaccgtgtgatcgagtgctacacctggtcctatgctgtataccacgagaaagacttggcacttgcacgaatgatctttgctaagctagtcgcgctaacttccgtattggatgacacatacgatgtccatgcgtatacctccatcgaagagtgccggatgctaaacgtagccattcaaggatgggatgacagcgctgccttgcttgtaccagagtacctgagaaagttttatgaaataatcttgaggacctttagggagtttgaggatcaaataccaagaaatcagaggtaccttgctgctttctccaaggcagagttccaaaagctgaccagtaattacctggaagcagcggaatggtaccaccggaatcacaagccgagcttcaacgatcaggtggctctgggaaccgcaaccacaggcacaagatcgcttgctgccggcctaatgcttggcatgggtgatgctgcaacaacaaaacaagcattccagtgggctgttactagcactgacgccatcatctcctgtggaaaaattgggcgtttaatgaatgacatttctggattcaagcttgggtcgcagaacaaagctgacatggcatgcgcagtcgaggcctacatcgaggagcacaaggtcacagccgacgtcgccatcgccaggataaacgaggtgttggaggacgaatggaaaacaaccaaccaggctcgcgtcgaccaccgggctgttcttcctgtggtgcagcgtatgatcaacatcacgctgggcatccagttgttctacggcaacgactgtgatgctttcacgttcggcaaacagcttcaggaggttcttgaggatctctatgtcaagcccatgtccttattatag

SEQ ID NO: 79450 - DNA, 209 bp, Oryza sativa
  unsure (1)..(209): unsure at all n locations
  Clone ID: PAT_MRT4530_79166C.1
gttgggtnntttcccattnngcattttttggggtttttaatgcacaaagtgcaggaagggcccattaaaaacagaaaaaaaaatttttttttttcaaaacacccaattttaaaatggaaaaggacctactccttaaacagcttaattttattacccctaaaaccatccattctttcctttaaagtccttaccctttatcacattaaaac

SEQ ID NO: 79451 - DNA, 1897 bp, Oryza sativa
  Clone ID: PAT_MRT4530_79167C.1
atggcgctcgccaccaactccgccgctgtttccggtggcgctgcggccgcggcgtcgtcggcgccccagccgcggctcgccgccacgttcctcccgatgaggaggcgaaccgtctcggcggtccacgcggccgacccggcgaagagcaacgggcccgtgcaggccgcggcgaaggcctcgtccccgtcgacggtggcggcgccggagaagaagccggtggggttggggaagtggacggtggatagctggaaggcgaagaaggcgctgcagctgcccgagtacccgagccaggaggagctcgactccgtgctcaagacgatcgagacgttcccgcccgtggtgttcgccggggaggcgcgccacctcgaggagcgcctcgccgacgccgccatgggccgcgccttcgtcctccagggcggcgactgcgccgagagcttcaaggagttcaacgccaacaacatccgtgacaccttccgcatcctgctccagatgggcgccgtcctcatgttcggcggccagatgcccgtcgtcaaggtcgggaggatggctggccagttcgccaagccgaggtctgattcgttcgaggagagggacggggttaagctgccgagttacaggggagacaacatcaatggcgacaccttcgacgagaagagccgcgtgccggacccgcagcggatgatccgcgcgtacgcgcagtcggtggcaacgctcaacctgctccgcgccttcgccacgggagggtacgccgccatgcagcgcgtcacgcagtggaacctcgatttcatggatcacagcgaacaaggagacaggtaccgtgaattggcacaccgggtggatgaggcacttggcttcatgactgcagcagggctaacagtcgaccatccgataatgacaacaactgacttctggacatcccatgagtgcctcctcttaccatatgagcagtctcttacacgtgaggattccaccagtggcctcttctatgactgctcagcccacatgctatgggttggtgagcgcactcgccagctcgatggagctcatgttgaatttctccgtggtgttgccaaccctcttggcataaaggtgagtgacaaaatgaacccccgtgacttggtgaagctcattgagattttgaacccatcaaacaagcctggaaggataaccataattacaagaatgggggcagagaacatgagggtgaaattgcctcatcttatccgtgctgtccgcaactctggacagattgtcacatggattactgatcccatgcatggaaacaccatcaaggctccatgtggtctgaagactcgtccattcgattccattctggctgaagtacgtgcgttcttcgatgtccatgatcaagaaggtagccacccaggaggtatccacctggaaatgactgggcagaacgtgactgaatgcatcggtggatcaaggaccgtcaccttcgatgacctgagcgaccgctaccacacccactgtgacccaaggctgaacgcgtcgcaatccctggagctcgccttcatcatcgccgagagactgaggcggaggaggatgcggtccggggtcaacagcaacctgccattgcccccattggctttctaaactgctgaaacgggggaagggaaaagaaactgggaggagggggtagaatagtttcaactcgccggcggtgatatctgcatgtgttctgtcaaatgtttgtatggtggttgttgagtgttcttggcactataggcagttgtcgaggatatggtagcatatatactcgccgtgttgtaataagttttttgatggatgtgttctgatgaatttttaagggggcctcagctctgtgctgtttggccttggggacaggagaaaataaagctagatggtttgcttggtt

SEQ ID NO: 79452 - DNA, 1894 bp, Oryza sativa
  Clone ID: PAT_MRT4530_79168C.1
tcatgtaaattacattggcactttttttttgcttgtccaacaaatggctagaaggctggacagtaagaaagaagcccatgttatgcttaaacttgatatttcgatggcttttgattcggtcgactgatcctttcttcttgaagttttgtgccatttgggttttgggagacgatggtgtaatttgctttgccttttgctgtcaacctcctccacaagagttttggtcaatggagagcccggcaaggaaattgctcattgtagaggcctccggcaaggtgaccccttgtctgctatgctttttatcttggttatggacgtgctgaattcagttgcagtgcatgcggatcatggaaatctactggaacctcttgctgtcccgcagacagcacaccgggtttctctgtatgcggatgatgtggtcatgttcttgcgtcctacaagcggggacctatctcttatcaagcagattttggagttttttggtcaaatttttggtctaaggaccaatatgacaaagagctcatgcactcctattcactgcttggaagatgatctggaagtgatatataatgagttgttttgtgaagtaaacaatttcccttgttcttatctcggacttccacttacaatccgaaaaccaagacagatttgttgccctctgtggacaaagtggcagataatttaccgagttggaaagcctctttaatgaacaaggcaggtcggcttataacagttagggtggtcctctcggctattcctatttatgcaatgatggcgttggatcttcctaagtgggtggtcaaggctatagataaaaggtgccacggcttcctatggaagggaagagaaatactaatggaggaaattgcttgatatcttgggatcgtgtgtcagcctttgtcctatggaggccttggtatccttaaccttgaaaagatggaatgggcactacgcatgagatggtgatggcttcaaaaaactgattttgccaggccttgggccggtttgtctattcatgtgcctcagaatgtccattctcttttcaatgtggctatcaaaattgtggttggaaatggagaaaataccatgttttggagtgataggtggctgcaaggtaaaacagtagcagagctggcccctaatctctttgccttgatctccaagatgggtggctgacatagtggcgcgggctttggaaaacaaaagatgggtggctgacatacatgggggactatctgttcaggtcctttatgagcacttgaccatttggtctttggttgatgaggtggttctgctacaagatgtacaagaccagcatgtttggtgatggcatgtacacttgtaaatctacctatgaagcttatttcctgggatcgatcaagtttgctccttggaaacgcatttggaagagttgggctcctctttgctgtaagttcttcctctggttggccgtcaataatagatgttggacagccgacaggcttgcgaagcacggactgcagcaccccgcggcctgtcccctttgtgataaagtgaagaatccatccaacacattttgatctcttgtgtcttttcccgccaagtgtggacagttctgttcttgaagctagggatctctggtatagtgcctcaaccttcaaccgatcgttttttttgaggtggtggagccaatctacaaaataccggccaaaggacgtgtggaaagggctcaactccttggttatcttagtggcttgggagatttggaagcatcgcaatgactgttttcaatggcactagtcctaatgttgagacggtcttgcgggtggttgagaatgagggtaacctttggtgtttagcgggggcgtctgccctccaaaagtttcttagtggttcggcaaacctaggcacctaa

SEQ ID NO: 79453 - DNA, 1994 bp, Oryza sativa
  Clone ID: PAT_MRT4530_79169C.1
atggcaaaccgtctggcgcctttgctccctggtatggtttctgtgaaccaaagcgcttttgttaagcgtagaagcatacatgacaattttttgcttgtccaacaaatggctagaaggctgtacagtaagaaagaagcccatgttatgcttaaacttgatatttcgaaggcttttgattcggtcgactggtcctttcttcttgaagttttgtgccatttgggttttgggagacgatggtgtaatttgctttgccttttgctgtcaacctcctccacaagagttttggtgaatggagagcccggcaaggatattgctctttgtagaggcctccggcaaggtgaccccttgtctcctttgctttttatcttggttatggacgtgctgaactcagttgtagtgcatgcggatcatggaaatctactagaacctcttgctgtcccgcagacagcacaccgggtttctctgtatgcggatgatgtggtcatgttcttgcgtcctacaagcggggacctatctcttatcaagcagattttggaggtttttggtcaaatttctggactaagaaccaatatgacaaagagctcatgcactcctattcactgcttggaagatgatctagaagtgatttctaatgagttgtcttgtgaagtgaagaatttcccttgctcttatctcggacttcctcttacagtccgaaaaccaaccaagacagatttgttgccccttgtggacaaagtggcagataatttaccgggttggaaagcctctttaatgaacaaggcaggtcggcttataacagttagggtggtcctcttggctattcctatttatgcaatgatttcgttggatcttcctaagtgggtggtcaaggctatagataaaaggcgccgcggcttcttatggaagggaagagaaaatactaatggaggaaattgcttgatatcttgggaccgtgtgtgtcggcctttgtcctatggaggccttggtatccttaaccttgaaaagatgggatgggcactacgcatgagatggttatggcttcaaaaaactgattttgctaggccttgggccagtttgtctattcatgtgcctcagaatgtccattctcttttcaatgtggctgtcaaaactgtggttggaaatggagaaaataccatgttttggagtgataggtggctgcaaggtaaaacagtagcagagctggcccctaatctctttgcctcgatctccaagagggcaaggaagcaatgtactgtggcgcaggctttggaaaacagaagatgggtggctgacatacatgggggactatctgttcaggtcctttatgagtacttgaccatttggtctttggtagacacaggtggttctgctacaagatgtacaagaccagcatgtttggaagctaaccgccgatgggatgtatacttgtaaatctacctatgaaacttatttcctgggatcgatcaagtttgctccttgcaaatgcatttggaagagttgggctcctcttcgctataagttcttcctctggttggccgtcaataatagatgttggacagccgacaggcttgcaaagcgcggactgcagcaccccgcggcctatcccctttgtgatcaaagtgaataatccatccaacacattttgatctcttgtgtcttttcccgctaagtgtggacagctctgttcttgaagctagggatctctggtatagtgcctcaaccttcaaccatcgttttttgaggtagtggagccaatctacaaaatatcggccaaaggatgtgcgaaaaggactcaactccttgattatcttagtggcttgggagatttggaagcattgcaataactatgttttcaatggcactagtcctaatgttgtgacgatcttgcaggtggtagagaatgagggtaatctttggtgtttagcggggggcgtctgccctccaaaagtttcttagtagttcgacaaacctatgcacctaattggccggggttg

SEQ ID NO: 79454 - DNA, 1266 bp, Oryza sativa
  Clone ID: PAT_MRT4530_7916C.1
atgctctgcggcgtcgagatcctctgctccgtcgtcgccgtcgtcgcgcgcgtgctcggcagggcgctcatgacaatctgctcgcccaagttctccaccgccgggctcatcggctcgccgacgacggcgtggggcggcggcggagccaagaagaaggtgcacatggagagcgagaagcagcagctgccgccgccgccgtcgccgccggcgctggtgctcccggcgttcaagaggaattgcaccgaccaggagcagagggcgccggcgacgtcgacaaaggcggcgagggggaggccgccgaggctggtcattccggctgcggcgccggtggcggtggcgcgcggcggcgtggacccgttcggcgggagggagacggacgtggcgacggagacggaggtgaagggggaggggttctgcctggcgagcaggagaggggtcaggcatgcaatggaggatggatatggggtgatcactcgtcacaagattgaaggaggctcccaattggcgttctacggtgtgtacgacgggcatggcggccgggccgccgtggacttcgtcgccgacaagctcggcaagaatgtcgtcaccgccgccgccgcggcgacgacgatgagccgacatcaagcagctggctcatcatcgccgtcgcagcaacgtcgagaagaagaggacgatgtcacggcggcgatcagggctgcgtacctgaccacggacagcgagttcctgagccagggtgtacgcggcggcgcgtgcgcggcgacggcgctggtgaaggacggtgagctctacgtgtccaacgtcggcgactgccgcgccgtcctcggcagccgcggcggcgtggccaccgccctcacctccgaccatacccccggccgcgaggacgagcgcctccgcatcgagagcacgggcgggtacgtgagctgcggcggcagcggggtgtggcgcgtgcaggacagcctcgccgtgtcgcgcgcgttcggcgacgccggcgtgaagcagtgggtgacgtgcgagccggagacggcgcgcgtcagcctcgccgccgacggcgactgccgcttcctcgtcctcgcctccgacggcctctggtgcaaggtgtccaaccaggaggcggtcgacgccgtcgccgccgccgccgccgccgccgccggcgtggccggcagcacggacccgtgcaaggagctggccgccatggcgaggagcagagggagccgggatgacatcaccgtcatggtcgtcgacctgcaaccattcttgccggtatag

SEQ ID NO: 79455 - DNA, 1308 bp, Oryza sativa
  Clone ID: PAT_MRT4530_79170C.1
atgatgatgaaggggaagggcggcgcggtggacaggcggtcctccgcgcggtggaggatgctgctgctctgcgcattctgcttcggcctcggcatgctcttcacggatcgtttttggacggcacctgataccagtaaccacatcatgtctcaacgccggaggcaggatagggagttgcaactcatatcagaggattgcaatacaaagaggaagcatggagaagacaaggacataatgggtgaggtaaccaagacccacgaagccatacaattgttggataagtccatctccacgctgcagatggaacttgcagctaagcgtagcacgctggaacttctccgtgctggtggctcaccagtaacctcagaaactagccaaccaaggaagaaggcatttgttgtaattggagtaaacaccgcattcagcagccgcaagcgccgtgattcagtgcgagagacatggatgcctcaaggtgcaaagctgcagcaactagaagatcaaaagggaattgttatccgcttcactatagggcatagtgctacatccaacagtatattggacaaagctatagattcagaggatgctcagcatcgtgactttcttagactagaccatgtagaagggtatcatgaactctcagctaagacaaagattttcttctctacagcagttggtatttgggatgctgacttttatgtgaaggttgatgatgatgtgcatgtgaacttaggaatgcttgccactacccttgctcggcataaatcaaaaccaagaacgtatattggatgcatgaagtcaggcccagttctcgctgacaagaatgtgaagtaccatgaacctgagtactggaaatttggggaggaagggaacaaatacttccgtcatgctactgggcagatatacgcgatttcaaaagacctcgcgacctacatttcaatcaaccagcctatcttacacaaatttgcgaacgaagatgtatcacttggttcatggtttattggtttagaagtgaatcatatcgatgaaagaaacatgtgctgcgggactccaccagattgcgagtggaaaggacaagctggcaatgtctgtgtggcgtctttcgattggagctgcagcggcatatgcaagtcggtcgagaggatcaaggaagtacatgctcgatgcggtcatttgacatgtgggccatgtgtcagtgagcagtggaggatagggatggcaatcgggcgcgacgggcacgggtagcacggtaggctcgcatggtgacctttgcacaggcgaatgctccctcgtaggctcaacgaggctgat

SEQ ID NO: 79456 - DNA, 1950 bp, Oryza sativa
  Clone ID: PAT_MRT4530_79171C.1
atggtgttgggtgtcaaggtgtggaggacttgtgggctacgcattatgccagacatggagcaccagagtgagggcaggttttttgcatggcatatacaaattgaggttgatcatatgcttagtgaacgtttgatgcaattcattgatgtggatttgcatggcgtgaaggcacgtgaaaaatttgtatcagtacggaaagggactagagcagaagtagtgacaggacttgaggaggatctacacaatgccaagtcagctttcgaacgatgccgctttaacctaggatatgaactactgagtcaaatggaaccattcattcaccaggttctaacatatgcacagcaatcaaaagaaatggctatcaatgaacaagataaacttgcaaagagaattcaagaatataggactcaagaggaaattgcgaacttgagaatggctagtaatgtggacacatctaccagtggtgatggtatccatgttgttggtcttcaatcctataaaaagattgaagccctaatgcagtcaactgccaatggcgaggttcaaataatcaaacaaggttatctctttaagcgttctgaaaattcacgagaatggaagagaaggttctttgttctcgacagtcacgggactcttttctactacgggaataaaggacaatcgcaaggagcggcatcacagcaaacagctggtgaagggactggtgtttttagtcgtttcagattcttgaaccaaaaggctccaactcagggtgacaatgcactttcgtgccacaaaattgatctaagaacttcaacaattaagattgatgcagaagaaaatgacctaagattttgcttcagagtaatctctcccatgaaagcatacactttacaggcagaatctggtgctgaccaaaaggattggattgagaaagttactggagttattgcatcactgcttaatttaccattcccaagacaggtgtcgtatggaaatctagaggcggaacatcatggttctgcaaattctgttgattctctctctcttgaggagaacaaaagtccagagggacatgatgatatattcaatcatctcaggaatattcctggaaatgacagttgtgcagaatgtcgttcaccggatcctgattgggcatctctaaatttaggaattcttatttgtatagagtgttctggggctcacaggaatcttggagtccatatttcgaaggttcgatccttgcgattagatgtcaaggtatgggagccagtgataatggacttgttccatgaacttggaaatgactacactaattccatttgggaagctatgcttccgaaagaagatcaaggaataaacgagtttaatgatgctattcttttcattgaaaagcctaaacctactgatgctttttcaataaaggaaaggtacatacagacaaagtatgtcgacaagcttcttattgccaaagataccaatcaaattaccattgatatattggaggctgtaaggacgaatgatgtgagggcagcatatcgcattcttgtgttggctgatgtgagccctaacatgatatatgatgagttaaacaatgatgttcatcatgatccttcagtaacagatgggaagttatttgatccagcatcttgtgatgtaaaggatgattctgggaaaccagaaggttgtctacaaggctgttccctgttgcacattgcttgccaatatggccattctataatggcagagcttctgcttctttttggtgcggatattaataagcaagacttccatggacggacaccgttgcaccattgtgtccgaaggaaaaatgatgcacttaccaagcatctgctaaagaggggtgcaagaacaaccattaaagatggtggagggttgactgctttagagagaagaatggaacttggagcaataactgatgaagatttgttcattttatttgtaaggtga

SEQ ID NO: 79457 - DNA, 411 bp, Oryza sativa
  Clone ID: PAT_MRT4530_79172C.1
ttgatccttttgtgcgccgccctttttttttttgttgttttttttttttttttgtttttttttttttttttttttttttttaaaaaaaaaagcgagagttttattcctttggggttaaacaagaacgccccacaagctcggttaaaacaacccaaaaaacagggcataaacctacaggattgaccccaaaaaaaaaaaccttgcgaagaaaaaaccgaacggggatcaaaaacccccagggggctcaactttgaccgaagaaatttataatgaaacaaagggcgaatcccccaaacaagggggggcccccagacttcaaagctgccacaaattaatccacaacaccggaaagggggtccgacaataaccatgaaaatcgaagagcaccaaagatttcccccattaacacaa

SEQ ID NO: 79458 - DNA, 3664 bp, Oryza sativa
  Clone ID: PAT_MRT4530_79173C.1
atggcggccttcaccaagctcgaggactcccccatgttccgcaagcaggtcaattctatggaacagctaagcgatgaactgaaacaacggtgttcaaatcttcataaaggatgcaaaagattcatgggatcacttgatgaaggatacgcgggagatctaacatttgccgatgctctagaagcatttggtgctggtcaagatgatcctgttagtgttgccattggagggcctgtaatgtccaagttcactactgcttttagggagcttggaacatacaaggaactccttcgttctcaggttgatcatatgcttagtgaacgtttgatgcaattcattgatgtggatttgcatggcgtgaaggattgtcgtcagcgtttggatagggctacagtggggtatgatcaggcacgtgaaaaatttgtatcagtacggaaagggactagagcagaagtagtgacaggacttgaggaggatctacacaatgccaagtcagctttcgaacgatgccgctttaacctagtgcacgcactttcaaatattgaagcaaagaagaagtatgagttcttggaatcaataagtgcagtgatggatgcccatttgagatatttcaagcagggatatgaactactgagtcaaatggaaccattcattcaccaggttctaacatatgcacagcaatcaaaagaaatggctatcaatgaacaagataaacttgcaaagagaattcaagaatataggactcaagaggaaattgcgaacttgagaatggctagtaatgtggacacatctaccagtggtgatggtatccatgttgttggtcttcaatcctataaaaagattgaagccctaatgcagtcaactgccaatggcgagataatcaaacaaggttatctctttaagcgttctgaaaattcacgagaatggaagagaaggttctttgttctcgacagtcacgggactcttttctactacgggaataaaggacaatcgggaagcaaggagcggcatcacagcaaacagctggtgaagggactggtgtttttagtcgtttcagattcttgaaccaaaaggctccaactcagggtgacaatgcactttcgtgccacaaaattgatctaagaacttcaacaattaagattgatgcagaagaaaatgacctaagattttgcttcagagtaatctctcccatgaaagcatacactttacaggcagaatctggtgctgaccaaaaggattggattgagaaagttactggagttattgcatcactgcttaatttaccattcccaagacagtcccaggtgtcgtatggaaatctagaggcggaacatcatggttctgcaaattctgttgcttctccccgtaatgccttgacccaattcaatcggggttttgaagaccgactactaagatggcaaagatcagacttgttgcaaacatagcagtgaccaactatgtttgggtacttgtatggtccctcaattccttcaaccagcgctcaacattctcaaaggttgagtgccggttgacatcatagacaagcaacgctccaacagcacctcggtaatatgcactagtaatagcacggtatcgctcctggccggcgctgtcccaaatctgggccttgacgaccttgccgtcgacctggagggagcgggtggcgaactcgacgccgatggtggacttggactcgaggctgaactcgttgcgggtgaagcgggagaggaggttggacttgccgacgccggagtcgccgatgaggaccaccttgaagaggtagtcgtagtcgtaccattgatatattggaggctgtaaggacgaatgatgtgagggcagcatatcgcattcttgtgttggctgatgtgagccctaacatgatatatgatgagttaaacaatgatgttcatcatgatccttcagtaacagatgggaagttatttgatccagcatcttgtgatgtaaaggatgattctgggaaaccagaaggttgtctacaaggctgttccctgttgcacattgcttgccaatatggccactctataaaggcaaaggcgctgcctctgcgagctgatggcatcgataagcaaggcgttgacgaagcgggcggcgtcggcggcggcgtgggcggccgagatgaggtactggaacggcaacggcaacggcaacgggcaggagccgcgattaaagatggtgaagggttgacaggtttataatgacgaatgcacattggaggaagaactgatgacactacgttcactttattggtagggtcaaatacggcagattcgggtgtgtgcccgtcctccctcctcgacgcgcaggcgcggtggcagcgccttttcatcgcccagcccgacgacttctacttccacgccctccagccgaagttccgccgctcgcgaccttacgacacgttttttttttttttttaaaacatatttctacttgattcaacagttcaagcatggctgcaatggattcacatgaaaaccaacaccatgccccagttgccgcggagaccatacaacaataggaagatctaaactgatctggccaaacctttcagttatagcaataaactctctacgtaacatagaagttgctaatactactaacaatttctcagtcgctggaacggcgataacacaagctcacacaggtcccaaaaaaaatacagcaagagcttagcccgagcagcagccgcccttcttcaccgccgaaacatcatcctttatattgatcttctcacccttgccaggaccagaacctgcatcatcacctgcttcgactgacctcttagctcacgatgccggtagatctgggtcaagacctctgcaaatgcattctcaacgttcgcaggtggactcgtagcgcagaggtctccatggaaatcagagcgattcctctctccgcgaatgccttcccccttcatcggctttgaaccccgctaccaagattggcgcaagatcagacgttgttgccagaacctagcattggacgaactactgtttagggtgcctgtatggtccctcaattcctttcaagccgagctgcttctaacattactccaaagggtttgcagtgccgggtgacagttcatagacaaggcaacgctgccgaacagccaacctcggttaatatgcactaggtaatagcatcgggtatccgctcctaggccgggcggtgttcccaaatctgggccttgacgaccttgccatcgacctggaggcagcgggtgccgaactcgacgccgatggtggacttggacttgaggctgaactcgttgcgggtgcaccgtgaggggaggttggacttaccgacgccggaggcgccgatgaggacgaccttgaagaggtagtcgtactcgggatgcgccgtggttgtctttgcccccgcagcgagcgtgggtgtggctgactcgaacgcgcgggtggacgttgactaccgccaggactcggtagggctcgaactggaggggcgactggtcctgccgacgccggaggcggcgatgagaaccaccgtgaacagggagtcggaccgctccgccgcgcgacgggtccgcgcgatcggtgcccatccgctcctccgttccctctggcgtcctccggggaccgcctccgagatcttcctccttgccgatggagtggcggagaagaagacagaa

SEQ ID NO: 79459 - DNA, 479 bp, Oryza sativa
  Clone ID: PAT_MRT4530_79174C.1
cgtgcactttatctggtcagaggaggcgtaggccgcggctgcggtggcggcgacgaacggaggggatggcttgcggtggagggcggtgtcgaagaggctgtcgacgctacggatccgtttcctcgatggagacaccgagccggcctcctacgatgactactggtggttcccagagttgaccgccgccgtcgccgccgtcgacatcatgttgttgacctgtacctgcagctcggagtacttggccaccaccgcccgaagcatctaggacagcttcttgttatcctcgctcgctcgacggagctccgcctccagcgcctgaacctggatcgatggacacaagatcgaacaactaattaatgaaaacttgtttcaatactccgaatcaaaagctcatcgatgtagtctgagccgacaatctctacactcacctagagacccttctcgaaggacaagaagttttcctcaacgagaacctgaat

SEQ ID NO: 79460 - DNA, 559 bp, Oryza sativa
  Clone ID: PAT_MRT4530_79175C.1
aaaatcaaccagcagtgtatatatgtgtagttgcatagaacttgaagtcaggctaccaagatttatccagagcagagacacgaccaagtccagagcaaacttcaataaccagcaaatatatatgtagcgtacgagtgtctcatgcatgtatccaagaccaacccgattaatttatcaacagcagttaattgatataaaaaaaccagtttttcagatgataactttttttctaggtgggtaggcctcttatagctaaatggctccctacgaaaatgacaactgtgggacgactgagaaaatagatttttgcacgtagatctattaagaggtccgcctgcaaaagggttaagcatcttaaaaacgccacttacgcccagccaaaaatcgttaagttcctctccatcacctctccggctctcccttcccaactctccctcccctcacctctcccgcccacctctccttccttatccccggtgcagatccggccagagggagatggcgacgcaccccggcacggttcgcctcccctccctcgcagatccggctgaagggggga

SEQ ID NO: 79461 - DNA, 1379 bp, Oryza sativa
  Clone ID: PAT_MRT4530_79176C.1
ccggccgggaaaaaagatcaatcatcctatagttgctcccctatttcagcatctcaatttaagaaaggtgtgaaggcatgccgatcccggaaaaggacggggtggaggacaatcaagaggatgatacattttcaaggttgcaattgcttgcacaacaacgacatgccatggagaagttctggaggatgagccaggaacagatcgaagaatccgcaggcaacgaagagcttatactgccgatttcccgtgtcaagaatatcatccatgcaaaggagggtggtatgatgttatctgctgataccccagcttttgtaacaaaactttgtgaacttttcgtccaggagctcatccttcgtgcttgggtgtgcgccaactcacacaatcgtgaaatcatacttggcacagatattgctgaggcaatcaccaccacagaatcctatcactttcttgctaatgtagtccatggccaccaggcgctaggaagcaacataccagagataggggtttctgcttggaagcgccataagctagatgaaatgacctcactctgccatcctccccaagcagtgcaggtcacagatttagctaaccatccacccaatattcctgtttgtcctcctataggtcaatcgggtactcagcacacaacatctacacatgttttgatgatgcaaggagaatctattcacaaggcaagtaaagaaaaatccccactgaaggaagtgatggtgccgaccaacaaggtgggcatgaccaacagctcttatggagttcctaatggtggtggtgctactagtagtaaagttgttattgatagcccgaaaggcgaaacagcacaagttttctcttcccagcatgcatgtccttccctagaagataactatgttattcccattcctgctggacatggtgatagttttcgtactcttgatgaggccaatataccccagctacatcaggagcagaaaaactttatttcacaagatgctattgttggtgaaaacattccgctgaatgagtctttggaaaagagcaagcataaggatgaggacttactttttcctgacaaagatcttcctgagtgatctacaagacagaagatgaatgttcatgacaatactaggaatacaaataagcaacgaactgaagaaggatgcatcctggttaatccatcgaccatgtcttagtagagttttcttctgtgtttctgtgttgaagctttatgatttaccttatactttagtcaagatgaataagaaataagtatgtgtttccgtgtgaggcggtaatatgtagtaccttgtatttccatccatcttcgtatggacaataataataagacctctgtttgcttcatgataaaaaaaaaaaaaaaaaaa

SEQ ID NO: 79462 - DNA, 152 bp, Oryza sativa
  Clone ID: PAT_MRT4530_79177C.1
gcacgaggctgtttatctgatccaaagaaagctgatttgcttgtgactcctctcctactttgtttgtttgttttgttctgcggttatcatctccttatccgatctttcaagtccaagatcgaggtgttgattctcaaagttagatgagcaaa

SEQ ID NO: 79463 - DNA, 1388 bp, Oryza sativa
  Clone ID: PAT_MRT4530_79178C.1
gcgccgagccgcagggctgcggccgaaagcgactcgtcacagctcaaacaagtcaagagcgaatagttcttgctgatctgttgtttgattactttagttctcgagaggctttagctgaatccatcgatcgatcatggaggatgagaggaacacggagagccaccagggtggcgaggctgcagagcaggtggaggtgaaggacaggggcctcttcgacaacctccttggcaggaagaaggacgatcagccggaggagaagaagcatgaggaggagcttgtcaccggcatggagaaggtctccgtggaagagccaaagaaggaggagcaccacgccgagggcgagaagaaggagagcctcctctccaagctgcaccgatccagctccagctccagctccgtcgagtgatgaggaagaggaggtgatcgatgacaacggcgaggtggtcaagaggaagaagaagaaggggctcaaggagaagatcaaggagaagctgcccggccacaaggaccatgccggtgagcatgctcctccgcccgcggcgacgggcttccccgcgccggctccgcctgcatccgtggtgacggccgcgcccacgccagctcctgctcccgtggtgactcacggcgatcaccaccacgacaccgccgtccccgtggagaagatcgagggtgatcacgccaagacggaggcgaccctgccacgtgcacccgaggaggagaagaagggcttcctcgacaagatcaaggagaagctgcccggcggccacaagaagccggaagacgcaactgctgtgccgccgccggccgcctcaccggctgctcctgccactactccggcgccagcacacccaccgccggctacagaggaagtgagcagcccggatgggaaggagaagaagggtatactgggcaagatcatggagaaactgcccggttaccacaagggctccggcgaggaagacaagaccgccgccgccgccaccggcgagcacaagagcagcgcttaattggggcgtgtgtgagaccaggccatggttggaatttggaagtgtttggcgtgtgttagtttggtgctttttctgcactgcagctttgttaagttcgtgtcaagattggtcaaggcctggtcagcgaagcccgatcagtgatcgaagtttgtgtttcgtgtggggtacgggcttcagtttgctatagtcaagtactagatgttgagtttgtttaattattattggcactcttgtattggttttgggctgggcattctgccttggtattaatgatttctgcccagaatatattgttgccttgtacagttgtactgtactactctacaggggtaaactgcattaaaatcccaaggggggcctcctcctgccgaattcctgcag

SEQ ID NO: 79464 - DNA, 113 bp, Oryza sativa
  Clone ID: PAT_MRT4530_79179C.1
cgctctccggactctccgcgtgcgcaccgcgcctgacgacgacgatcatggactcatggtcatggagccgcagccaggccccgtttggaccatttctcgtcgcgagcaagtag

SEQ ID NO: 79465 - DNA, 137 bp, Oryza sativa
  unsure (1)..(137): unsure at all n locations
  Clone ID: PAT_MRT4530_7917C.1
ccacgcggcgggacgctgagcggactcatgggcctanacaaggacgggtctattttcaaccttctgactacttcacgggcgggggaggtaagtgctgagcgggtccttccgttctacactgatgatttatctatgca

SEQ ID NO: 79466 - DNA, 337 bp, Oryza sativa
  Clone ID: PAT_MRT4530_79180C.1
catcaccacatttgcagcatatagctgcggtctttcgaggtgtacagtgagtcacagtgagaaaattcacgattgatcgaaggtagcacatctatgctatttattttagctagtcatggtgtccaaggctttgctcgtgttggctatcagtctcgctggtgcctttttcgttaactgcgcccagtagctttagccctacgccgacctctgcaacgacgaccccaacgccggctacggtagtagcggctacggctactcgtcttattagggacaaatcccagcgcattatggacctaacccgtcgcaacagggaccaaacccggtacagttgggacag

SEQ ID NO: 79467 - DNA, 277 bp, Oryza sativa
  Clone ID: PAT_MRT4530_79181C.1
ctctcagctcagattccggctcgagctgccatggcggcggcagttactggcggtggcggcggcggcttcaggcggtggctgcgcgaggggtggagccagcggcggctcccctccttcctcccagatccggtggaggcggaggtgaagggtggaggcggcgcggagggtggatgccacattaacaattccattcctaatagacgccgacacgaggctagctagtagataacatgttacagatcggtgagaccacactatatggtagctgattgatcta

SEQ ID NO: 79468 - DNA, 135 bp, Oryza sativa
  Clone ID: PAT_MRT4530_79182C.1
atggccagttgggggctccggttttggaaggtggtttctgctctttcccctcctgaggttcttagtaattttcaaggcaacgcactggctccggttttgggcacagctacaaagctgaactacgctcttttctga

SEQ ID NO: 79469 - DNA, 110 bp, Oryza sativa
  Clone ID: PAT_MRT4530_79183C.1
gtgaggtgaccgctgtcacaaagaccactaacagggggcccaaggagcagcgcacgggcattttagtacatatcaccacacacccagttctttgaagggcagactacatc

SEQ ID NO: 79470 - DNA, 1170 bp, Oryza sativa
  Clone ID: PAT_MRT4530_79185C.1
atggagttagagctggtgtatctgtatccggtgaccttggtgccggcagtcgtcggccggttcagcatccttgcctcgccgttgctgaaggaattcgaggaacacaacctgcaattcaccagcataatcccgctcttcttcttctactcctacatcagcaagttcctctccgacctgcagggtcagccactgcctctagtcaagctctatgcccgggcgctgcaccggtttaccagctgcagcagcagcaaaagccgtgctagcttgaggatctacatggacactgccgtcgtcgtggtgctgtcctacctgtctctgctcaagatcaacctgagctacatctggctcgccgtcttccccaccctcacgctcgccttcatcgccgctctgttcaacgaggagctccgcggtgacaggagagccgccgttgctgaggaagacgatgcaggaggaggaaagatcactcgctcgagctcaaggcgatgctttgcggtgtcccagtttcttctcttcctcggctccacgctgggggcgctggcgctaatggcggcgcggctgtcgcagctcgccggagcagcaccgggcttagcgccggcgtcggaacttctccgcagggccacgctcgtggtgatgctggtgacggcgcacgctgcggccgccgagctgctgggcgaggccacgatagcgctgctctgcctgccggagctcgcgccggcgctcttctggttcacccttcacctcgacggtgaaagctcgccggccgccaccatcgacggcatcaaatcgcacaggaatgtgctgtccgttctcgctgccgcagccgtcgccagtgttgcgtacctcgcggccgccatgggtgagcgtggcctgtccgtgagcaccatcacgatggtgtcttgcggcgtctcagggcttctggtccgctgcgctgtggtcgtgctcggtcagtggccggggcaagctgagacggccggtagtactgctgcctctttgatggaagttgtcctagtgctcaagttttgggggaacactttgctggcagtggcagctatgctgctgctgcttgcgttgctgactgctttccggttatgccttcaagaaccaatgttcgcgacagttgctaaatgtttcagcgactacattgacaaggtcccccaaatgatagtttag

SEQ ID NO: 79471 - DNA, 1309 bp, Oryza sativa
  Clone ID: PAT_MRT4530_79186C.1
ctatatgctcgcatgcctcgtccgaatctgtaacctgtacagcgtcctgtttttttttttgacaggcgaaggtatgccatctcaagctcttgaattgatttatgttttacaaagctgaccgtctcagattatgctcccggaggccggaattacatttataacatacacaataagggtagcaggtatataaagcattgcagtaggtagagtgaggacagaaataaatatctccacttgacgtcgaataagcgtagagcaatcaagtgttgaggttctggaacagctcaggcagatgggcgttcgtgagcttggtccggcgtgtgatctcacgctgcttcttcttaggcttagccttgggctgcaccccattgatctgtgctgcagcccgccgtttagctgtgttggtcatgggcttgatgccattcttctggagctccttctcgatatccaccatgtcccgcggtaactccatctcccggaagagctgcttcaggtcatcgtcgaccttgatctttgcctttgggtcgttaggatacacaatgtcctcctgggaatccatgttcgataacagccaaacttcacctgctgccttcagtgcctgcaaatcttccattacagttgggtacgcatccttgacttccaccacagcaagaccctccggatactttcttaccaaaacaagtagttgatcttttcccttcaaatcatgcttggacttgtaagagaaacgtctcccatcataatgtactttaggattgttcctcagactgtcaaagacagacttattcccatggatatcaacataagttgtttcatttatttgctccgcagtaaaagcttgtcttgtcttgtacagcaattcaatgacaagtttgatctgtgctccaataggagatttcctaactgaattgatgtgttgtagcctttctgtatcatttgaaaacttaataggttgtagtggccttgctggagcggatggagcattaaccggttgggccctgtgctttggttttgaggtcgatgcagctatgctggccaaagatgattggcacctctcttgctgctgcttaaatttggagaggctatccttgagatccatcggatcagctgcgctttccggttggtacgggtacggcggcgggcgggcggaggcgtcggaggaggaggggatgggggtagaggagaggagcgcggcgatcggatcggggattgtcaccggaggcttcgccccgccggcgagcacggggtgggtggaggcggcgggaggggggagagcgccgccgcggtcgctgctcggcctctctctcgc

SEQ ID NO: 79472 - DNA, 1258 bp, Oryza sativa
  Clone ID: PAT_MRT4530_79188C.1
atggctcgtcgcattcgggtccgtgtccctggctgggaggatgcgcatcatggaggtgggactcaccgtgcggcagcgacggcggtgacaagcgcgccacgatgcagacccaccgtggataccgaccgacggctcgcgggcgctgctccctttacctcccttcaccgtggcgacggggcggaggtggctgaggcgtacggaggtgcctcagaggtggaggcggctcctccgctctcgggagcggcggcggctgaaggggcaggcaccgcccgcccttcgcatcgggcaatctggaggtggaggtggcttccctgccctcgggagcggtggcggctgagggggcaggcgtcgtacgccgccgcgctcgagatccctgggcagagggagatgggggacggatcgtggaggtcaggagcactgtcggtgccgacggcccggatttgccggtgctcaccattaacgccagcaccacgcggagcggaagacgcggcccgaccaccgccttgctcgcaccatcgtctccgtctctccagtgacgctctacctgagccaccactttgactacggcggcggcggcgatagcaaggacgccacggcgggcgagcggcggcgccccccagccgtagtctgctcggcactgctcgtgcttgccgctgcattgctgctcccagcgcaccatgcgatggccgaggacgtcgtctcgagcagagacaacacggccagggcgccgtcatcttcgccgtccgctgctacggccacggcgccggcaccgtcgccctacaccgacacggccatggcgccggccccgtcgtcctccaacgacacggccgtagagccggtggccccgccgccgctgccgttcatcatcgtggagggcgtggtctactgcaaaacgtgcaagtcgaggggctacagcagcgacatggacgcgtcacctctcccaggcgcgacggcgcagctggtgtgctacgggaagaaggtggtgaacgtgacggggacggtgacggacgcgaacggctacttcctggtgatgttctacgacctgcgcaacttcaacccgcgcacctgcaaggtgttcctgggctcgtcgccgacgtcgctgtgcgacaagcccgtctacccgccaaacaagtggatcggcctctcgctcctcaaggagaccaggaccgtcccgcccgtcggcctgcaggccatctactgccccaccagcgtcctcttctacggccccgccaacgccggccagtgcccctccggctaa

SEQ ID NO: 79473 - DNA, 174 bp, Oryza sativa
  Clone ID: PAT_MRT4530_79189C.1
atgggttcaagagatggattctccgacaacctctggctttgtcgcagattctacaactactcgattactcgagaacggttggacaactactcaattactcgagaacggttggacaactactcaattactcgaaaacagttggtggagttcgacaaagattatggaatgaagtga

SEQ ID NO: 79474 - DNA, 237 bp, Oryza sativa
  Clone ID: PAT_MRT4530_7918C.1
gtgttattgtggtatccatgtctgggagtgggaagattttggtgacgcgaattttgctgcctgcagattgcagtgcgatgctccacctgttggatgttgctggatgcactccaatgcttaatatgtgggtgtgcccccccaggaatgaggattcccatccaatggtggatcccacgaccccaccacaggggaaagggaaaagaacccttaatttactataaaaaaaaaaataaaaaa

SEQ ID NO: 79475 - DNA, 660 bp, Oryza sativa
  Clone ID: PAT_MRT4530_79190C.1
atgcccatgcactgcaggcaagcagcagtagcggatgagatggaagcgcgcagccatcgaattcggatcgatcagctggtggtcgtcgcgcgcgcgcgcttcccaatttcccacggcgcggcgcgtactattacctgcccagctgcctgcgtttcacgtcctgtcaacctgtaccgcgggaaaagttgttgcctgccctacctcgatcgaccgagacatcttacatactcttgcagaggaaagacatcgatcgatcgatcgatcgaccaaccaacactgttcactactccatccacccatcccccgggcacggcccatgccacaaaacgtctcgacgacctctcccatccaattgcagcagcagtagtcaagacatactacgtgcagatgagacggatgcacgcacattgcgtcgtgacaagctgcatgcaggctgctcctagatggatggatcgatggagtacgctgctgcgctgggccctcattgtcatgtcactcctgctgactttctgtcgccccgggcctctctctcgtctcgtctcgtctcccgcgcgccgttacaacgacgacgcgcgcaatcgctgcatttccacgacccgatacaacgccgcaatgcccggcttttccacgacctctcgcgcgagagaggcagacgacaac

SEQ ID NO: 79476 - DNA, 316 bp, Oryza sativa
  Clone ID: PAT_MRT4530_79191C.1
aaacaaactcttttttattatagttaatgcatgtttttgaacacaggcccggggggcttaatatatcccattttttatttacttaagcccatgggggtcccataggtaaccatagttccgacacacttttgagtcctcaagaagggggacaccccgggtccttattatgcatgggtatgggaggggagctatatgatctgtattggttcggccggttagtaggaggcaatgatagggggagggtttggggggcaaggacacttttttgaaacgtatggggcatacggggggatgccacatagacccccgggggttc

SEQ ID NO: 79477 - DNA, 249 bp, Oryza sativa
  Clone ID: PAT_MRT4530_79192C.1
atggccggcggcgggcagcagccgtcgacggagaggaaggagacgtcgtcggcgttcggcggcgggtgctgcggcggcggcttccagatgccgctgcactacccgcggtacaagaaggcggactacgaggcgatgccggagtggcgcgtggactgcctcctccgggagtacggcctccccgtcgacggcggcgtggaggagaagcggaggttcgccatgggcgccttcctctggcccgaccagtactga

SEQ ID NO: 79478 - DNA, 2980 bp, Oryza sativa
  Clone ID: PAT_MRT4530_79193C.1
cccacgcgtccgcttgaaagtcgacgactgtagcccagctccagaacgaagtcaatttggggcttttcagttcctctctccaaatcggtccaatgtctcttcccccagccgcaatcccctctcgctcaaccatggatatgggaagatatctattgccctctcattaatggatgtcaataacataaggggatctcatcaagtactattaaacaataaggacagaacaggatgatatttactggctatgcaactttctccatctaaattcatggtggattcattcagctaactaagcatgacagcatcagtagtttcctcagttttgcagaggcttggtgaccttgtcatccaagaagctacctttttaagtgatgttcctcgacaagtatcatccatgaaagcagaactgagccagatgcaatgcttcttaaatgttgtggatgccaaatgtttggaaggaaacagcatgatgaaaaatctggccagtaatattcaagacgtggcataccgggtggaagaggttattgacaatgctcatttcatttttaggaggagaaagacttctgtatcaaaatatactcacatctttggtgattccattgacctccgtgagggtggcaaaaacatacaagttataagaaaggaaattagtgagatttttgagcggtacaacagatacaacgcagttaattctagcacttcaacggaagcacagcccatttttagggaggatgaggatttctatgcacaaaggcttgtgccgccgggtttggatcaaggaatggatatagttggattcgatcatgaaattgcacaaattaagagttacttgcttgaccaaaataacatgaatctaactgttatatcgattgttggtcaggcaggggctgggaagtccacacttgcaaaactagcttatagttcagtcataactgaaggttattttcacaaatatggttgggtatccatttctccaaaatattctgcccttgaagtattaagagatctcgtgcgacagataaggggcactgggaagataagcgagcgaaagagcatgcatttaaatttctatggtgagacagaggtttcaaaacttatttttgattttctgaaggaagagcgctaccttattgttttggatgacatctggacaacagatacctgggacaagatcaaatcagtatttcctgacaaaggaaatggaagtagaataattctgactacccgtgatatggaagttggacaacatcctaaaactaaagtgcaaattcatacccctgacctattagacgaagacaagagctgggaacttttccagaagaaggcatttccacatgatgtgcaattcacagaacttgaggtggtggggaaaaaactctccaagaaatgcaatggcttgccacttgctctagtggttttaggttgcttcctttcacgaaaccacaatattcatacatgggagaaaatggttgctagtgtagactgggaaatcatgaaaaaggagggcgatgttggacgtatattagctctaagttatcacaatatgtcaaataaccttaaagcttgcttcctttatactgcatcctttcccgaggactaccctatcacagttcatgttcttaaaaagatgtggattgctgagggatttgtcccaaatataagaggatatacacaagaagaagttgcctacagatatgtagaagagctggcacagagatgtatgatccaaattgaagaaagaagtaaaaacattgggtggataaagaaaataaaagttcatgatgtgttgcgtgagtggggaattggacaagccaggaaggaaggtttcttgaaagtttgctcaagcggcacagatgtggagacttattatgcagatgaacagaggtgttaccgtgtagcatttcatggttactttgataatgaagtgggaaaatcagttctgaatctccgttctgtgctggccttcaaccctgatggcaaacgtctgttttctttcaatgggttgcatttgttgagggtgcttcatttttgcagttccttaaagacatgtaccttgcctgaagaaataaacaaattggtacatctgagatacctgggtttggaaggtagtactgttttcatgttcccttcttatatgaaaggtcttagaaacttgcaaattcttgaagcaagtacagctactgtcaaggcacttccaagttccctctggagcatcgcagcactaaagcatgttcatgtctaccaagtactgcattggaaagcccaggagattagaacgaaacgaagcttgcagactctttatgtattttccataatgcagtgtgatgctctgacgtggaaaagaacaatcaggtctctgcaaaaaatgagccaacatgtttcctggtgcttagggatagcctctactaaacgcgtgaaggaaaaagagacccaagaacatgaagaatacaatttagatataagggtagatgccttagaatccaaagttgatggtttagaattgtctggatgttttaaagagcgtcacgttctgaatgatgtgcttccacatcataatctattcccaaactttctattgcagctcaagatatcttgtcccaatatactaaatgatgatccaatgccaattctggagagacttccacgtcttgaagtgcttgaaattgttaactcatcatacacaggaaagagaataacatgttcttccgagggattccttgcattacgcagtttggtacttatggatattggtttggaggagtggaatttgcagcagggatccatggcgtttctcgctgttttgactctcaagtgtaccatgctgaggagcatctcaaatgtacttcaccagctggatgatttggtagagcttcgcttgatttgcatgcctcagctctctgttgatgatcatgagccagctagggggaggggatgccgtgtcatgatttcagttgacgaggaacaaacttctgatacttga

SEQ ID NO: 79479 - DNA, 434 bp, Oryza sativa
  Clone ID: PAT_MRT4530_79194C.1
gggtcttaaaaagggggggggcccacaaccgggggcccccaatcaacctttggggattggcgcaaggcacaagactcccttgcggcccaaagccttttccaaaaaaaagggctcttaagaccggccccatgaaaacgcccagaaaaaagggaaaaggggttggggcccccggggggccggggattcccccttgggggggaacccccactattttgggggcgggggccaccccgggaaccggggccccgccccggaaggcggaaccggttcccgggggggggggggatttaccgatgggggggaaaagggaaaaacggggcacccgggggaaaaggggccccccgggaaaaaccggaccccacccgggggggaaccaaaaatgggaacgcggggggggccaaaggaggggcggggcgccccaataaggggggggg

SEQ ID NO: 79480 - DNA, 399 bp, Oryza sativa
  Clone ID: PAT_MRT4530_79195C.1
gagctgtggagtggcattttcctcgctccaccgcgctagtacattttcgtggagcgattcaccccgttccgctccaagttttggtgaatctggaccgtttggcacaactccagctctaggtaagttggagttgggagctggagctgtgccaaacggggcctatttctttatttgagatgtagtggcttctttgtgtaaattagccggatgacgaacccgacttaagtgaggggtgccagacggtattaagccgatctaggtatctcggtgaacggttgaatatacaccactttgtgtatgggtctgactgcaacatttatttacatattaccttatgtgtataacaggggtcaagctatgtatgtcctgtgcaaccgtatatttaaatatatgcggctg

SEQ ID NO: 79481 - DNA, 506 bp, Oryza sativa
  Clone ID: PAT_MRT4530_79196C.1
aaaaaccccgtgccaaacccttgggcaaaccctttttttaccccgtaattttcgaaccggttctttaagggataaaattttttttttttaaaagttatttaaaaatttggggaaaaatagggaataattttttcctttgaaaaaattttttcccttaaaaattccaaaaaaaaaaccccccgtaatataaaagttaaaacctctgtgtccttaataaagggcctatcccaaattaatttttttccctaaaatccccctttttaaagaggaaaaacttttgtccccttttttataaaaaaaacgcacacccccgggaaaagggtgttttttttttttcccccaagatgttttttttttttaaaagagaaacgggtaaacattttttttctttaaacaccttctccttaaaaaatttttacaaaggccccaccttttttttcccccaaaaaggaaaaaattttttttattttgaaaaaacggatttaaaaaattaagttttttttatt

SEQ ID NO: 79482 - DNA, 1455 bp, Oryza sativa
  Clone ID: PAT_MRT4530_79197C.1
atggccatggcggccgccgtccaccgcttccttggcgtatttcccgccccgtcgacgcccacgcctccgcctcgacaactatcgcctcgcccccatcacattcctccttccctcgtccgatgttgttcctcgtcccccgtatgcgccgccacagttgcagttgcacaaccccaagagttcgtcgtcgtcaccttctataagttcgtctccatcgacgacccccgcgccgaggtgtccaggcacctccacttcctccagggccgcgacatacatggccgcatttacatgaacgagcagggaatcaatgcccagtgcttccaccaacatggagtactacggtatttaccatgtcttttatcattatatgacaacttgactgagactggtgacatgtacagtggtccacataaagatgcggtagcatatgcagactggcttagaaaagaccatcgatttcgtgatctacttgtccaaacttcaccatcgttatgtggccatgcttttcctcgcttgaaactgcggtacaaaccatcgcttgttcagttggaaggaggttgttcacatcttcctttggtggaccctagcatgcgtgctacaccattgactccatcagagtggagggaaagacttgaagctagaaaatgccttgatgtgtcatcgagtgaagcagctggagatagctctggaaggaggcttttgctcctcgatgtcaggaatgattatgaatgggatattggacattttcaaggagctcagcgacctaatgtggactgcttcaggagcacatcctttgggctctcagagtcagagcaggagatggattcttcagatcctctaaatggtatagacaaagaaaatacagatatattaatgtactgcactggtggcataagatgtgatgtgtattcaacaattcttaggaagaagggcttccggaacctgtatacattgaagggaggagtgtccaattatctgaaggaggaggggtctgcaggatgggtggggaatttgttcgtgtttgatggacggctctccctgccaccggcaacgtacaagcctggagcaggtgatgatgatgatgaggaggaggaggaggggagaaacagaagcagttcagagctggggagatgctatgcatgtgggtcagaggtggttgagttgaggcaccggaactgcgcaaacatcgactgcaaccggctttacctgtgctgcgggcgatgcgtggaggagctgagaggatgctgcgggacacgtctacacggcgaccacttcatcccaagtgtaaaccctccttttcagcttctaaaaatagcaaaagaagcactttgcatggatgtaccccgactgaccgataccattggaaataagggtatgaaaacagtatggaaattttgcgtgttcgtatctcaaccatcattagctgatgagatggtttatgaaaggttcgctggataa

SEQ ID NO: 79483 - DNA, 2353 bp, Oryza sativa
  Clone ID: PAT_MRT4530_79198C.1
atgcctccggcgtacacggccgcggagcccgtgtcccaccaccaccatctcgtcgtcgtcgacccgtcgacggtttactcccctccgctgcccgccctgccgccgccaccaccgcaacaaccgcagtcggcgctcgtgctctccggcggcaaggaggatctcggcgcgttggccatgctggaggacagcgtgaagcggctcaagtcgcccaaggcgtcgccgggggcgatgctgccgaagccgcaggccgacgcggcgctcgccctgctcgccgaatggtttctcgagtcgtcgggcggcgtgtcgctgtcggccgtggcgaacccgaaactccggtccttcctccgccacgtcggcctgccggagctgcagcggacagacctggcgggggctcggctggatgcgcggttcgccgaggcccgcgccgacgccaccgcgcgcgtccgcgacgcgctctttttccagctcgcggcggacgggtggcgggagcaggtggtaactctgtgtgtcaacctcccaaatggaacatccgtgttccaccgcggcgtgccggtccccgccccggcgccctcggactacgccgaggaggtgttgctggacgcggtggcgtccgtgtccgcgtctggctcctccaacgacctgcaccattgcgcgggcatcgtggctgaccgcttcaagtcaaaggcccttcgtgatctggagaacaagcaccattggatggtgaacctgtcctgccaaatccatggcttcacccggctggttcgggacttcgcgcgggagctccctctgttccgctccgctgcggctaaatccgccaagctggccgcctacttcaatgccaagccgacggtgcggtccctgctgcacaagcaccaaatccaggagctcgggcatgcgtcgcttctccgtgtggcgcatgtgccattcaatagcagcggcagcgactaccgtgcggccttcgagatgctggaggacgtgttgacctctgctcgcccgctccagctcgccgtcttggaagagtcctataagctggtctgcatcgacgattcggccgccagggagatggcggacatgttgcaggatgggtcattctggagtgaggttgaggccgtgcatctgctcgtgaagctgatcatggacatggtgaaagagatggagactgacaggcctctggttggccaatgcctgcctctctgggaggacctacgtggcaaggttagggattggtgcgataaattcaacactgatgagggcgctgccctgaatgtggtggagaaaaggttcaggaagaactaccatccagcctggtcagcggctttcatattggatcctctctacctaatcaaggatgccagtgggcgctacctcccgcccttcaagttcttgactcctgatcaagagaaggatgtggacatgctcatcaccaggatggtgtcgcgggaggaggcgcacattgcggtcatggagctcatgaaatggcggacggaagggctggacccgttgtatgcgcaggcggtgcaggtccggcagcctgacccgtccaccgggaagatgaaggtcgcaaacaagcagagcagccgccttgtctgggagacgtgcctgagcgagctcaagtccctcgggaaggtggctgtacggctcatcttcctccatgccactgctagggggttcaggtgctcaccctccatgctgcgttggctctctgctcctggcagtttagccggtggcattgatcgtgcgcaccggctagtgttcgttgctgcaaattccaagctagagaggagggatttctcaagtgatgaagacaaggatgctgagttactcactgaaggggacgatgatgtgctaaacgagcctggcagtttggagcgctcctcagtgtaacacccttatttaattgttcgtttctttttctctattagccttttttagaagttaatccctaggaatttgctagaatttccaccccctacctatttttttgcctcctagaaatttcttcctcgtgcccatgctgttaattcttacttcctcactctagattttggtggggtggggagtggggcatgagatggagatatgcatcctttgttcatcaagtttggttaagaatgactgtctcttgccatatatgattccatggggccattgaacttgcagagattaatggaagtctttctgtcaatatgttcatagtcggtggtacaccgaaagcgggaagaatgtgtaaccatttttttttgtgaaaattaataatattgatatgcaattgaatgcaaaaaaaaaaaaaaaaaaactcggggctagttctctctctctctctctccctcgtgccgaattcctgcagcccggg

SEQ ID NO: 79484 - DNA, 356 bp, Oryza sativa
  unsure (1)..(356): unsure at all n locations
  Clone ID: PAT_MRT4530_79199C.1
gcacaatgccatcttgacactgactatgaccaattaagcatgcgatgcggatgcatcgcattgaattgaattgaattaattaactaagttgccggcttaaggataataataatgctggcgattgatttgcaggttgcctgagctgatctgcctgacatggcatggctttggcttgaatgtgaggatgctgatgcnatctaatctatcccgccggcctgttttaattccatanatcatttggtttgcacgtacccatctatgatctatatatacangcatgtcgactattgttgtcgtacgatattatattatatatagatgtaatacatatgtngaaaataaaaaaaaaaaaaaaa

SEQ ID NO: 79485 - DNA, 559 bp, Oryza sativa
  Clone ID: PAT_MRT4530_7919C.1
ttactgcactgcatatttatcttctctcgaaacaccacaggcagaagacacaggaaaccataagtattttatatagaggacacaatgccgaagtggttgaactgaatgtgccttgcatctgcagctaccatcttctgccgacaccaagtcccctatcacattctctccatcatcatcgtcatcatcttgcaggaacaatggtgaagtggccaagagggaagcagaggcaatactgtctttactgtgagttactacagtgtgggggtttggcactttgatcatggagcaagttacagtgcggtactctaaagtaccatatgggggcatgggcctgcacaagtacttccgtttgcgtgcaaagtccctctgagatatagagaacttggaagtacgcctccatgcgtccctcattgctttgcctaccatattcccttctttctttaccatcggaagcatggcatcaactgatttctagagtgacaaatgacagggtagtctgcaaaaatcaatcactgaataagtaccaaaacagtaggatttaatttcagtaaaagaaata

SEQ ID NO: 79486 - DNA, 1542 bp, Oryza sativa
  Clone ID: PAT_MRT4530_791C.1
gtccacaccaccacacactccccttcccttccttctccggtctcctccctctctcgtcgtcgtcgtcgtcgccgtcgccggctcgccgcgttctcctccgccgccgctgctgagccgggatggccgcgcgtagcccctacttcgtccccgagagcgaggggatccgggccggggagtcgccggccgcggcgctccgcaggatcctcgcgtcgccgggggcgcaccaggccccctgctgcttcgacgcgctcggcgcccgcctcatccagcgcgcggggttcccgatctgcttcatgggcggtttctgtgtttctgccgcacgacttggattgccagatgctggtctcatctcatatggagaaatggtagatcaagggcgtctgatcactgaagctgtatcactcccagttatcggcgatggtgataatggctatggaaatgctatgagcattaagagaaccgtaaaagggtatattaatgctggttttgctggaatcatgctcgaagatcaggtggcaccaaaagcatgtggacatactgaaggaaggaaagttatctcaagggaggatgctatcatgcacataaaagctgccgtagatgctaggaaagagagtggttctgacattgttatcattgcaaggtcagactctcgtcaagctatctctattgatgaagcgctatggagggtacaggcttttgccgatgctggagcagatgttctattcattgatgctcttgcttcaatagaagagatgaaagcattttgtgcggtttcacctaaagttccaaagatggcaaacatgctagaaggtggtggtaaaactcccatattgagccctgctgaacttcaggagattggttttagcctcgtagtctacccattgtccctgattggggtatcaatgctcgcaatggaggatgctctgattgcgataaaaagtactggtgcaccccgacctggtagcttgccatcttttcaggagatcaaggatactctagggtttaaccgatattacaaagaagaaaagcaatatgcaacagtccagcaagcccagccattatccacaaatattgtacttcgattaaagatcacagaaaaaagtggaacgcagaagataaatgaagggatacctgctggaatcctagagaagatatcaaaagctattccaggcttggctggtgtcaatttgacggaaatacttcagggtgcagatcagtcccagaaaggaaaattgctgcttgatcgtgaggatgcaactggcgacaggatccaggtgtccatcgagtgatcaatgcctacatacattgcctagaagcatggatggccagtaatgtagggcaaatcgccttcaatattgaagcaaacgattttccaagttgtaatggtagccgtttagcgtagtaccttgaagtgttacttctgcgagttgggttttcctctttgcgttgccttgtggtgttaataatcctggattcctgtgttgattcaaataaaagaaacctatcatcaggggctttagaaaaaaaaaaaaaaaaaaaaaa

SEQ ID NO: 79487 - DNA, 870 bp, Oryza sativa
  Clone ID: PAT_MRT4530_79200C.1
atgcggcgagagggggagaagaagggcggtgtcttcagtgctatttcgggcaaggacggggaagaagcagacgggaagctcaccgacgggagggaacgacgtcggcggcgatggttcgatgatgagaaggacgggaagccggcgggaagggcggccgggctccgcggaggatggtgttcgcgacggcgaacgcgactcgacggggcagcactgcgtcagccgagtggtggcgcctggcggcgaactttacgccgaggcgagcgcgccggggaggagatggaggcatgcggggatggaaggactgggtggcggcgtggcgttcttggtcgtggcggggcagccggcgacgaggaggcgacgacacttcatttccaggagcacgggaccaaatggatagataggggggcgcgggggttgggcttttataggaagatggtgctcggctggcgctcaaaggcggtgcggcggtttcgtgggcggcgtgaaatggcggatggcgcggatgcattgggcggtggatcgggcggtggggcagcaaggtgcagatgcggcgtcagcggctctgcctccgagcacaagcggccaaggagtggaggcggggcgccgttgcccggaagggaaaaagagaagggagcggtggaaaggagggctcgccccttccgtttttgggaggagagggggcgggagcacgagctgtgcctcgcggctttggacgcacgcggcgtggggcgcagggcccgagaggatgatgccggcgacgactgcaaaaaggacggggactgtttggaggcgagcacggacacgcggtggttgtcggagcaggcgacgaccgagggtggcgatgtgtcacacccagaaattcccgaatag

SEQ ID NO: 79488 - DNA, 922 bp, Oryza sativa
  Clone ID: PAT_MRT4530_79201C.1
atgacacatagacgttgcttcgaagcgttagataggacattgcgttacctactttctgaggaggaacctgcaaatgctattagaccatttggtggaaaagtggtagttcttggtggagatttccgccagatcttaccagttatacaaaaaggttcaaaaacaacaataattgatgcttcgataacaaactcaatactttggccccatattactcttctcagtctaaaaacaaacatgcggttgcttcgaaacgaccttatgcaaatagataaggacgaacttgataggtttgccaaatgggtgctagatataagcaatggaacagttccaacgacagtgaaaaacaacgaatctgagccatcatgggttcagattcctgatgacttgctgataaagacagatggaaaagaaaaggagtactttagctgtgacacaatctgtaattcatgtgagcacatacaggattacgatttgctttatcctactgaatttctcaactctataaatgtgaacaactttccaaaccataggcttgtgcttaaaaagggtgtcaccgttatgctactgagaaatcttaatcaatcaatgggactttgcaacggcactaggttattagttgatgtgttaggacagtgggttcttcagtgcactgtattgactggatctaagattggtgaaacggttttcataccaaggatagcacttaacactactagctcaaagtggccatttatcttgcaaagaagacagttccccatacgtgtttgctatgcaatgacaataaacaagagccagggccaaactttgtcgcacgttggggtttacctgaagaaacctgtattcacacatggccagttatatgttgctgtgtcaagagccacttcacgcaaagggctcaaaattctaattgaggatgatgatg

SEQ ID NO: 79489 - DNA, 6996 bp, Oryza sativa
  Clone ID: PAT_MRT4530_79202C.1
atggaggggcagcgtcggctcggcgacgaggagggccgctgctggcggcagatgagcggcggtggcggctgcggcttggtgatgaggaagtccaccggcggtggcgtcggctcggcacgaggaagaccaccggcgacggcggttgcggaggggcggcgtcggcgtcggctcggcagtggcggcggaggtagttgccgaggggcggcggaggccaccactcctctctccgcccaccggctccgctgctccgggcttactaactcggttgaactcaagccgcttgtcctcttcaagttcacaactccacagatttgccaccgatctcaccgtccagcacgagggtcagtgccggcgtcgctctccatcgccaagtccattgtgcattttgtgagcacccaggaccgtcttcgcttatgtcgctcagcgtcgtcagatacattggtggataggcaggggcgatctgccattttgtttcactggtatggcagcagcgacggcaacgacatgagcttggtgggggttaccatgaagctgagcaatgaggatggtgccaaagccaggaggcgacctcctgacagtatgccatccctcggtgtgtcttccatcggtgtgtcctctgtgtcgctgttgaacgctgtggctagccattgccagctgccgttggtttcatacctgtgggaaatggggagtgatggtgttcttcttgctggagtggagcttgtgcttgtgagcggggaacattcaggccagagagggtgtcgcttcttttggtgtgttgcattcgagccgtacgagacagcacacgaacctgctgctagggaggctgtcaggttccttcagtccatttatggatttgttgttcatgactacaatttcagatatatgatgtcatcccgttttgtgtcaccccaatctgcgcgccgggtacagagggctcaagagagccgagaacgccgccatttcgcgataggtcaagctgacatcgttttcccagcggttgttagaggctacctcaaaacacctgtcttgggtgttactgagcagccttctgctgctcaaactaccgaagagccactagcaagtggtacagagagtgttattggggttgaacagcccacaccagctatagcacctcagcctaatgttcctatcgtgagcagaaaaaggacgttgctcgatgtgccatctaaggtggcctctgttaatagggagagacgccgtgtcaagagaacggccggcgaaaatccttcttttgttcgtggcgtacttaacgtgcatgactcactatttgctgcagcactgcaccctgaccgttcatactatggtggcccttctcacgagtgtccatactgtggtgttgtcttttggtaccaagagagggtcaaaaagagctccacgttatcgaaacgtaagattgtttacaatctttgttgcaagggaggcaagattgaacttcccgaactgagaattcctcctccgttcttagctaagttgctccgatatgatggtgatgctaggtctaagcgatttcttagacaaatccgctcatacaatactctcttttcatttacatccctaggagctgatgtcgacaaatcaataaatacaggttcagcgccttgtgttttcaagataaatggggttgtccaccaccgtataggaagcttgcttcctcgccgtggggctccactgaaatttgcgcagctatatatatacgacactgataatgaaacaaagaataggcttaatatgtttgagagagaacgatcagatgatagtggtcctgacaaagacattgtagataacctaggtgcaatgcttgatgataataacgagctggtcaaagcttttcgatatgcaaaagagagattagatggatatggtgatgaggagatcactcttaggctcatgggctgtaatgtgaaggatgaagtgcagtacaatctgccttcaagtggtgagatagctgcgattgttgttggggattgctcaaaaaaaacatatacctatgatgtattagtgaaatctactgacaatcgattgcgtcaggtctcagctctacatccctcatatatggcgctgcaatatccattgcttttcccatatggagaaaggggctaccaccttggcatcaagtatactgatttccctagcttgctacctactgcacgatgttacgtgacgatgctagaatactacaggtataggatgcactacagacttaacaaacccaatccatacacatgttgtggaaggctaagcgactccttagttgtagatgcttactccactgttgaatcatcgaggctacagtttatagctgatcaccaaccagacctacgtactgagtgtgtgcaaggcattgatgttgcaattgaccatggtctttccactggagattctgttggacaaaagtatgttcttccaacgagcttcactggtggcaaaagatatatggtgcagaactatcaagatgcgatggcgatttgccatgtattaggtgcacctgacctatttgtgacattcacgtgcaattcgaagtggcaagaaatttatgatgcccttatttatgaacctggccaagtgccaagtgataggtctgatatgatagtgcgagtttttaatatgaaagttaacgagtttatagctgatatcagagagggcaacacgtttggtcctgtccttgcagttctttacactgtggagttccaaaaacgtgggcttcctcatatccattgcattgtgtggttagcagctcaaaatgctgattttagtgcagcggttgtggacggcttcatctcagcagaattacctgatgtatttgctgatcctttgggttatgcgttagtcgaggagttcatgatacatggcccgtgcggtgtagacaataaaacttgcccatgtatgaaaaaagtcaaaggtgcatgtagctatgctgatgtccgaactttcaatggtgtgacatattctacatttaaagaagtgtgcgaagctagagggctccttgacagtgataatgaatggcatttgctttttgacgaggctattttgagtgcaaattcataccagcataggcagctttttgtcactattgttatgttttgttcagtaaccaatttattagcactgcttcttaagaaccttgctgatgtgtttgcaaagagtggtggttccatagctgactacgatcttccacaaacaaacaacgtcccagaccatgtagttggcaatagaatccttgatgaagaactgaatgttgactgtgatgctttagcctcccatgcaaatgcattgatcccaaaactgaacagagtggcttctttgttgctcccacgaggacgaacagcacactcgaggtttaagataccaattgaaatcagtgaaaccagcatatgtagcattcgaagaggcaccatgcttgctgacgtaattcaaaagacatcattgattatatgggacgaagcgccaatgacacatagacgttgcttcgaagcgttagataggacattgcgttacctactttctgaggaggaacctgcaaatgctattagaccatttggtggaaaagtggtagttcttggtggagatttccgccagatcttaccagttatacaaaaaggttcaaaaacaacaataattgatgcttcgataacaaactcaatactttggccccatattactcttctcagtctaaaaacaaacatgcggttgcttcgaaacgaccttatgcaaatagataaggacgaacttgataggtttgccaaatgggtgctagatataagcaatggaacagttccaacgacagtgaaaaacaacgaatctgagccatcatgggttcagattcctgatgacttgctgataaagacagatggtgagaaaatacctgcattaattaatgaagtctttcctgatctattgaataaccacaggaatcctgaatacctttcatgtcgtgccattgtgtgtcctaacaatgctactgtcgacgacattaatagctatgttgttaacatgataccaggaaaagaaaaggagtactttagctgtgacacaatctgtaaatcatgtgagcacatacaggattacgatttgctttatcctactgaatttctcaactctataaatgtgaacaactttccaaaccataggcttgtgcttaaaaagggtgtcaccgttatgctactgagaaatcttaatcaatcaatgggactttgcaacggcactaggttattagttgatgtgttaggacagtgggttcttcagtgcactgtattgactggatctaagattggtgaaacggttttcataccaaggatagcacttaacactactagctcaaagtggccatttatcttgcaaagaagacagttccccatacgtgtttgctatgcaatgacaataaacaagagccagggccaaactttgtcgcacgttggggtttacctgaagaaacctgtattcacacatggccagttatatgttgctgtgtcaagagccacttcacgcaaagggctcaaaattctaattgaggatgatgatggtaattgttcctcggaaactaggaatgtggtgtatcatgagatacttcaggcaatagagatggatcattgcattatctctaagcttgagcctggtcttggcaatccgcgcatttgtgtgcgtctttcgcgtatgtggaacttcaatgaccctaaggatgatacttctcttcttcatgtagcacttgtattggttgatgagacggaaggcagcattgcagctcagatattcccactagatgataaactctttaagcccctgttgtcggaaggaaagatttactacctgacacactatattgtgaggaattgtagcagatcctacaagccagtgagcaactctcttgctattgcattcacaagatggactgttgttgaggagtatgtgaatgcacccaccagctttccattctacacctactccctgaaatctttcaaccagctcagtgcgcttcttgacagcaaagattcattcaccgatactatcggagtcatcattgaggtttcatctattacttttgttcgatcacgtacaagggatggcgacagcctaaagcgcaatgtgttcatccgcatgcaaacaatgccactattcgtgtttcgctttggggagaccgcgctactgagtttcctgcagaagtggtcggtcttctctaggggtcagtcagaacaacaaattgtgatatttgtcggcacgttggtgaaaggattcaaaagggaaatctacctctcaggaaattctgcttgcaagtggtacatcaatattaaatgcgatgaagtccgaagcttaagagatagcctggcaactcaaaaggaaccagttaggtggcttgacttaccctgggctgatgccgtgcgatctgctgctgagataaaatcaatcatcgagatcaaggacctaaacccattcgtgcataagatgcaggaggactgcaaggccatatggaaaaacatatcgctgtggaggtggagattgcccagcaactgtgccagcatcaccaagaggataataggcaaatcagtagagaatttactggatcagcacccggccgatgaagcatatattcctaaacagatcactgatttgctagaaaaacagttcacctggaatgttagtatgactgatacaactatatcaattgggagcatttccttccaagttaacaacattattggaaatggttcacaacctcccctactgcttcagtcaccatcatcatctcaggcggtgtcttcagtccctctcttgactatgtcaccaagtgcttctgaaggaatgtctattgcccagcaaagcttgactgctacaacttctcttggcttcaatagccctcctgtgacacctatgcaaggcaaagcagtagatcaggaatgctcatcaaagacaccaactgggattcctgtgcgatcagaggatgaggatgatgacaatgcgacacttgccacgctgaaatgtcctagcccagccacaaagcatagcgcttccaaggcaccaaggaagaggttagatttagatatcacctttcatttatatgccacatacttttgttttgtcagtgtgtttgtctccttcatgcataaacctgctacttatgtaagatactttcatgtagatttagcgatgtcatatggaaccaacagaccacttagaggcaccaagtttagcaaattaaaaccactatctcagctacttgcagatatcatttatcacaatgcagttgttgtcactgtcctaggagctggcacacccacaaagactaaagtggtagctatggtgtctacaatatccaagttagaaccaggcgacatagcacttcttccattcaaacataggatgtatctagctttgttcatggataaagatgagcaggaacaagcagccgaaagattaatcgaacaaaaaacttacacgtttcagacaactcgattagcgtttgatcctttcaagcctaacatgcacagtgtaaagaacccattgagacaaagagttatcattgctctggaaggtatacccccagaaacatggaatgatgaggcaacacctgaactattggacaatagttgtatggtagaagaaatctatgagcagtatcatatacaagatgtctcaatttttaggcttgcagcttggacaacagatgttaatctgataccaaagattatggactggaacattgaaacaaaaggtcctcaacatacaagcaaggttgattgggaccgtgaggctgcaactgctactgtcttagtgcatattgaaaagctatttgactactctgatgatggtagtggcagtgatacagatggagagatgctgagacactatgaggaaacaaactccaggccgggttcctatcatcatgaattttcagtggacaccaagagtagcggactcaaatcaagggccttccgaagcagcatccacatctgcaccacgacgccgtctacctcaagagcttag

SEQ ID NO: 79490 - DNA, 279 bp, Oryza sativa
  Clone ID: PAT_MRT4530_79203C.1
atgagcgccgacactccacgttgccttgacgtcaacccggacgcgccctttacctgcggtaactaccaccgcagcagcggctgcccccacgcgccagccatccgcaccgcacaccaaccaatctctctcattggcaactgcttctgcttcctcttccatggccaccgccacattcccacctcacctcacctcatcattgattactgcgtcaaggtggcccgtgaacagtgggcccatggggagtcatctgttgacaatataatgggggtagctacctag

SEQ ID NO: 79491 - DNA, 111 bp, Oryza sativa
  Clone ID: PAT_MRT4530_79204C.1
tccacacgttcgcccactcgttcagaagaattaagcatgttcacgccgatagctggttgcaagctctggccaagaacgctgcgctagaggggctgattgatctgatcccag

SEQ ID NO: 79492 - DNA, 834 bp, Oryza sativa
  Clone ID: PAT_MRT4530_79205C.1
atggaagtagacgaaactaatgataccgacgagatcatagtcgatgtattcgacgagatctcccggcgacttggcttcgcgtactccgacttcggaaactatggtgggtgtgttggagatgagattcgatgccttgcacccctcctcgggggtcccttttataccgcggatcatcttgatccccaagtaagactcggagacatcggatcttacctcaacaagtcttcatccgacgcggccagcctgaagaacctttacacagaaggagctctccctcccaatcaaaccatggtgagagaacaaggagatcttcttgctgatgtcgtgacgcagcgggtgagggatgtgctaatcagccccgcctcaaccgccgatgagctacccaccccccttcgtgacaagccagcggccgacaaggcggctgttatcaacgacaatagggatgagatcttgattctctatcttactcaggatacgggcagtctttctcctcatccgaagaggaggataataaagaaagccgctgacaagacggtctcagcgatctctacgcagagtggggatgaggtcgcgaccagcgcgattcccgccgcagcttctcctcgcgcgggtgctgcgcctgtcatcgccgagtccgccccatccgccgccgtgcccgtggctgcgccgccgcctcccactccgatggggccattaacctggtcacaaaagatgaccgagagccgccgctgtcgacgagagatactcgctgaccggatgagtagagtattggggtacgttggaacgagggtttacgtagtacatcaagcagacaaaagacaaggattatactag

SEQ ID NO: 79493 - DNA, 648 bp, Oryza sativa
  Clone ID: PAT_MRT4530_79206C.1
tgtggaggaactcacaggacagtatggaaagcctgaggcaaaccagggtgagtgctgctggcaggactggtgagggagttgagggaaaatgatgcaggaggctgcatggaaggggttctcccaaccctccgagggactctggactttatcctggggacatggaaactcagagactctggattttatcctgtggacatggaaactcagttgaagaatttaagcaggagaatggcctgaccttagttacttctttcaacaattgttctggctgctatgtggagaatgggttgtaggactggagggtaataagggtggatatgcagaatgtgctcacctacctgaaattattagagaccaggaagaattggcccatactggactgattggcaccactctcactgtgatattttttgacctgccctcctctctttttatcactaaagggacggtattcagttgtgcttctgcacacacacacaaacacacactcacacactgagggaaagatccacaccatttttgcttatgtatcctccattgcttagcatagttcccagtgtaaaaggtgctgagtgaatgtttgccaaattgatgaatgaatgaagaaatgtatcattccttattagactcccttttgaaagaattttc

SEQ ID NO: 79494 - DNA, 861 bp, Oryza sativa
  Clone ID: PAT_MRT4530_79207C.1
atggcgctcggcaccggccccgcccacgccgtctacttcttcacgttcccactcacccaccacctcgccgtcgacctttccgaccctgtctccctcgcctgcgcgctcgccggggtcgaggccgtctgcccatcttccacatggtccccacctcggccaacgcgcgacgggtcctccttcctgtccctgcactgccttgccgtggagagcacgaggcggagcatagcggcgaggcggcgagaggcgaggcagaaggaagacgaggcggcgggaggcgaggcagagggtctcggtgacggcggcgacggaagcggggtcggggaggttgaagaggagataggggatggaggggggaagcaggaggaggtcgtcgtggtcagcggcgaggtgggcgacaaccgtgtggaaggcgggtggagcacggcggcggcgaggaggaggaggaagagcagcgggtggagcacggcggcgaggcggcgggaggcgaggcagaggggctcggcgacagcggcgatgaaagcggaggaggtcgtcgtggtcagcggcgagcgggcgccggcgagcggcgaggccgggccggatctcgccgccgcccaccgcttgacctccctccgtggcgctgcctccagagaccattcgagcattccttgtggtagtagccatccctgggaagctgagggtgagggtgctctctacgaagaggtggtagatgaaggcaagctgccactcacgccgctgaagattgtccgtcatgaggcaggccccttgcattgctatgaacatgaagaatttgcatcaagacagggccatggacttccatattatctttccgaggcgacatttcgtcttggcggcgcatag

SEQ ID NO: 79495 - DNA, 163 bp, Oryza sativa
  Clone ID: PAT_MRT4530_79208C.1
ctatagagcggtcgacctacgcgttcgtggacacgtgggcggacacttgacgctatgatggccacaaccgacttgtggcgcacgagttcatgccatatggctggaagcagaatgatctgctcaaaagaggggccgatccttcactgtgtacattacagactat

SEQ ID NO: 79496 - DNA, 354 bp, Oryza sativa
  Clone ID: PAT_MRT4530_79209C.1
atggcgggactacacgtctaccaaactgaccctgaagtctggaaaacgtgcctcttgttgggcggccataggtttgtgtggacaggagccgttgcattgcatggacggtggataagtgatgactacacgttcgtgccttcacagggtgaagcttccgcctccctcaaggagaaggttgcggaggaggtcactgctgtttcctccgtccctgctgccgcgggaggcagcgggatcaagaggataccctgggcctgggcgagcggcactgccagatatcggcagaaattcagctgctctgaggacccatcattctcatcttgtcggacttttcttcttcgcgggataatggaatga

SEQ ID NO: 79497 - DNA, 1140 bp, Oryza sativa
  Clone ID: PAT_MRT4530_7920C.1
atgcacatcacgcacaccacaagaggacatgaagcttcacctgaaaatctctctatttattcatcacaaaaccatcaacctggccagcacacagcaacttgctttacattgctgcaaattaacatgggcctcgtgcacgcactcctccccttcgcagcagcagcagcattgctgctcctcgccgcgccgccgccggcgacggccgacgacccgggcctcgccgtctactggggccgccacaaggaggagggctcactgagagaggcctgcgacaccggccgctacaccaccgtcatcatcaccttctacaacgccttcggccacggccgctactccctcgacatctccggccacccgctcgccgccgtcggcgccgacatcaagcactgccagtccaggggcatcaccgtgctcctctcaatcggcggccagggcggcgcctactccctccccaccaacgcctccgccgccgacgtcgccgacaacctctggaacgcctacctcggcggccaccgcgccggggtggcgcgccccttcggcgacgacgcggcggtggacggcatcgacttcttcatcgaccagggcggcgccgaccactacgacgacctcgcccggcggctcgacggctacaacaagtactaccggggcagggtcggcgtgctcttgacggcgacgacgaggtgctcgtacccggaccaccggctggagaaggcgctggcgacgggggtgttcgcgcgcatccatgtgaggatgttcggtgacgagcagtgcaccatgtcgccgaggtactcgtgggagaagtgggcggcggcgttccccggcagcaaggtgtacatcgggctggtggcgtcgccggagcaggacagcgcgtggatgtttcagaaggatctctactacgagatgctgcagttcgtcaggtcgctgcccaactatggtggcttggccatctatgacaggtacttcgacaagaaggccaactacactggtgagggttaattagctagtgatcatcgtctttgctgtctgaagtgaagactagatttttaccattatgtaaaagatctgaataaagacacctcttttttctgtaacattgtgattttgatgtacttcaataatggacgaataaaatgaggtctc

SEQ ID NO: 79498 - DNA, 2171 bp, Oryza sativa
  Clone ID: PAT_MRT4530_79210C.1
cggacgcgtagacggacgcgtgggcggacgcgtggtcggactcgtgggcggacgcgtgggcggtgcggctcggagatagttgcaaacctttctccgggctgcacgcataagacttcacactacatacattcagaagtgctttctttcgcttcgagcctcttcctctcttttctctcgtctcttccatccacattcttctctctctctcgattgcttcgcactgggaatggcgatagaccatgcgtcccctttctcgctgaagaacagaggcgacatgggaggaagggggtatgaggaggaagaggtggagaaccagcggtggccgccgtggctgaagccgctgctgtcgacgagcttcttcgtgcaatgcaggatccacgccgacgcgcacaagagcgagtgcaacatgtactgcctcgactgcatgaacggcgcgctctgctccctctgcctctcccaccaccgcgaccaccacgccatccagatacggaggtcgtcgtaccacgacgtgatccgggtgtcggagatacagaaggtgctggacatcaccggcgtgcagacgtacatcatcaacagcgcccgcgtggtgttcctcaacgagcgcccccagccgaggcccggcaagggcgtcaccaacacctgcgaggtctgcgagcgcagcctcctcgactccttccgcttctgctccctcggatgcaagattgtgggtacgtccggtggataccgcccaaggaagaagcacggcgggtgcggcggcggcggcggcggcggcgacggtggcaagaagaagaagaagagggcggcgctcaaggacgcgcggtacgagtccgaggactcgtgcacgagcaccagcggcggcagcagcgacaagagcagcgtcgtgcagagcttcacgccgttgaccccgccgccgacctccgccagctaccgcaccggcaacaagcgccgcaagggcgtcccgcaccggtcccccttcggcagcctcatcgtcgagttctagggagtctcgacgcgtccgcgcctgatcaacatagtgtactgtacacatgacatagccaaacacaataaccgtgtgccccggaatggcggcgagcccggcgcttcccttcccggaggccggccggcgtaatgccggagaagggcaagagcagtaagccacgtcacatacatattatagcttgtttgttacttttcagcttcggtttttagttacagttcagttactcctagttagtacccagtcaagtccaagcactgctgggtgcttacgactcggtaacggcaactaagttttgcaaccgtgtaaaaatatagtagcagtagtagtaacctccatattgtagatgtacaaagctgtggtggggtaggagacagtcacacagtgggatattcatatgtgcattatattacccatgtaataaaaaaaaaagagttgctctgtgcttactggatgaggaggccggtgcaaatgcaatgtgggacagttacttcatagttacagttactgtgctagtaacaacggtttgggtttgggttctctcttgtggaagaggagaggaggtagtagttactccctgtcataactactaagttttgctgaaaccttataggtctttattactcttttagttactctgtgtttgatatggtagatgtacatatatgtatatcacagatggtggggggaatggtagtaggagatggtgctcccggtgttcatattcgtgcttgcctgtaataaagatgagaatgctgctcctaaaagccttcaaaatcagtcaaaaaaaaccttgaaaaattctctcactagttctccccgcgtcccgtcttcctgcaccccggcgctccttcatatattatgtctttatatgcattgtttcttttctgtttcttatatgtttttgcatctttttttttatgtttttgttttttaatatgttgtattcccctctcttcttccactccataatcatttctctttaccttaatttttgtatcttttttacttttatattattctgttttttccatttcttccactttcatcatcactgttatttttactgtagtgtttcttttgtgtatgtttgtacgtcgagcaatctactatttacgcgacttttttctatattttctaataggtacagccatagatccgtttattggtgtgg

SEQ ID NO: 79499 - DNA, 256 bp, Oryza sativa
  Clone ID: PAT_MRT4530_79211C.1
tcgtccactctctgctgacggatcctcgggctcgtgcgaatcttactgcatccccagcccctcacctgcacgaaagaggaagcatccccgccgccgcaggtccagagacgaggaagaacaggagcccctggcggagcatgatcaaggaggcacagcgacttctcagcgagccagatcaaggaaacacagcgtcttcggagggagacaacatcggctattagaacgtcattgatcctaggacagcaacagctacttt

SEQ ID NO: 79500 - DNA, 350 bp, Oryza sativa
  Clone ID: PAT_MRT4530_79212C.1
aatggcactgaatcatttgtatttcctcatcctttatattcatccctcccagagagacggttccatggaagatttcttgcccttatcaggcaagcacagcacacccccccgggggcaggggaattggtttgaacaagacgctaaccaacatccagagctaaaacaaacctgggggtcaaaggaactcccgaaaaaaaaaacccaggggaaaggccccatttttttgtggtccccaacgcctccgtgtcaccaccacgttttgcggattttttttcaccctgttttattcgctcaggcgtccactatcccgccgacggcctttgaccccaggatcagccccgggtgcgcct

SEQ ID NO: 79501 - DNA, 2055 bp, Oryza sativa
  Clone ID: PAT_MRT4530_79213C.1
atgtcctttctgccactgatcctcttcttcttccttggccttaacctagcatccatcaccaacggtgacgacaaccaccagttcgtctacaatggcttcactagtgctaataacctctcccttgacggcgtcgccatggtgactcctgatggcctcgtcgagctcaccaacgatggaatccgggtgaaaggccatgctttctacccgtctcctctgcacttccgcgagactcctaatggcacggtgcaatctttctctgtctccttcgtgttcggcatcgtccctaccttctctgacctgaacagtggccatggcatcaccttcgtcattgcaccaagcaagaatttctcagatgctatcgcggcacaatactttgggctcttcaatagtgagaccaatggcaatgatagaggccacatctttgcaattgagctcgacaccgttaagaacacagagtttggggacatgaatgataatcatgttgggatcgatatcaataatctcacctctttgcaatcctaccctgctggatactatgaagagagtggaaggttcaaaaacctgacccttgcatccatggaggctatacaagtgtgggttgattatgacagagaagctactcggatcaacgtgaccatggctcctcttgccatggccaaacctgtgaggccattgttgtctgcgacctacaacctctcaggattgctcatggagcgttcatacatcggcttctcttcctcgacaggcgcaactagtgcacgacactaccttcttggctggagcttcagcatgaatggaggaactgcgctggccatcgacattgccaagctgccaaagctacctcgtgttggtcctaagtctgatccatccaatctgttgcaaatcatattgccagtggcaaccgcagcattcctcgtggctgtgggtgctactgtttttctccttgtgcgaaggcgtatgaggtacactgagttgcgagaagattgggagatcgattttgggccacaccggttcgcatataaggatttgttccatgccacggaagggttccagaacaagaatttgctaggcacaggaggtgctgggagggtatacaaggggatgcttctagggtccaaacaagagatcgcagtgaaaaagataccacaaaattcgaaggaaagcatgaaacagtttgtagcggagattgttagcataggctgccttgaccaccgcaatcttgttcacctcctcggttattcccgacgtaaaggtgaattgattttagtgtacgagtatatgtcaaatggaagcttggaaaagtacttgtatggtcaagatggtaggtgcactttggattggggtcaaaggtttcacatcatcaaaggaatcgcgtctgggctgctttacctccatgaagaatgggagaaagtagtgattcatcgagatgtgaagccaagcaacatactcctcgacaacaagatgaatgcaaagataggtgactttggcctctcaaggttgcacgatcatggagccaatccacaaactacacacgttgttggcaccatagggtacttagctccagaaatagcattgaccggcaaggtgactccactcgccgacgtattttccttcggcatattagccctagagattacatgtgggcagaaacctatgaagcaaaatgcacaaggcatccaacaaacgttggttggttgggtgctagaatgttggaaaaaaggatcagttgttgatgcagttgatgccaacctccaagctgactatgataatgctgaagcaggaggtctgaaggagacaagatttgagagtcaaggcggcggcggagagtgcgaggcggcggcggcggcgaggcgaggcggcggcggaggcagaggcggcgggggaggcagcgagcacggggaggcgagcggcggcgggagctcgcgctgctcgcggaggaggcgaggcggcggcggcggaagaggcgagcagcggcagggtgcggcggcggcgaggcgaggcggcggcccacgaaagatggggaggggagaggcgcggcggtcggcgtcgcagccg

SEQ ID NO: 79502 - DNA, 678 bp, Oryza sativa
  Clone ID: PAT_MRT4530_79214C.1
ccggggatcgccgatgacccgacaacccatcaacaatgacagagtgtgccccaacctgtttccatgcgactggggggagaaggccatcgagttactctggtccatcggccagccctagaccaacaatggcaacgtctgcaaacattatccgaccagaactatcaacaacggcaaaaggcgatcgcctatttgatgactccaggcatttttgagcggggccgggatggggtttccacctgtcgtccctatccttgggagtggaaactaacccacaatcaaggttcctttatctccatgccgacggatcgggctgtggccattagcccacgcattcgggatcgtcagcgcaatccaggtcatagtatccctgccccccaggtgtttgccgccccaccaggcactgtttattacctgaaccaaccccagggtttatttgccgaccaagataatgctcccaaacatttacaacaaaccagaaaagtaggttattcccatttgctttgggttaacttgcaggaggttaataggtgaattaccaaagcttattaagtcgtttatttggcgatggaagtggcaatattaggactgtggggattaacagccaatcgtctctcactgggaatgatagtcaaatccatatcttccatgggaatagcgcccaggaaagcgtgatcctct

SEQ ID NO: 79503 - DNA, 236 bp, Oryza sativa
  Clone ID: PAT_MRT4530_79215C.1
aggaccggtacaagtaggattatcaacggacccgagggagagaccaacaaaacagggccggaacaaggacggagaccagttcagagaaaaaagggatgaattaaaaaataagcagaacatgggaggcggaggaataaagggaaaaacggaagcggcctaaaaatcgaaaaaacaaacaaggcttaaggatcaatcaataacaatggggtgagcaagaaatcagccaagccaaatga

SEQ ID NO: 79504 - DNA, 318 bp, Oryza sativa
  unsure (1)..(318): unsure at all n locations
  Clone ID: PAT_MRT4530_79216C.1
tgnctgactgaagcttggtccaacgccatgtatctggttaaaagacgttgctaacctcaccgcggctcgccaaataatcacatgaggtggctgttcatatctggcatatgctaattgcgaaactcgccggttccctatggctgcctgtgtgccttagaaataatggcgaatgtttgccctatcatgaaaagatgcagcattcttctgatagcctttctcctcgcaaacgcatccagggagtcttcttgagagcagcggtggacagcccgaggcgaacggtccaacagatctccccgatgacagagggcgaggccacta

SEQ ID NO: 79505 - DNA, 642 bp, Oryza sativa
  Clone ID: PAT_MRT4530_79217C.1
atgaccatcgccggcataggaacagcagcagcaacaggccttcgacttccctggctacagcacgagcagcagcaacatcacttggcgcagcagagccgcctcgacaagctgaggcctgagggtgcagcagggcttcgacccgccggccggcctgccgccatgtacgaccacgcagaggcgacggccgggcatggatcgtgcgcgttcccggagatgttaaacttcccatcgcagcgtccaacggggccctccgccaccgagctgctcgccagccagatgaacgccaactaccggttcgggttccggcaggcggcgggaggggtcgccggattggctggcggcgaaggcgccagtcggctatccacaaagcatcggacgggcggcgttgaggtggtggccgcgcggttccaggtcaagcggcgctggagtcggcgcgcgagggccggtgacgggcggcgccgaggtggcagccgcgcggtccctggtcgagtggcgcgggggtcggcgcgcgagggctggcgacgggcggcgccgaggtggcggccacgtggtccctggtcgagcgtgagagtggatatggctcaacgcgataatcatgttgatacacgaagagtattacatataggcgccaaccttccatag

SEQ ID NO: 79506 - DNA, 500 bp, Oryza sativa
  Clone ID: PAT_MRT4530_79218C.1
ggttgcaaagcaatattgcaattttactgatttctttatgtatgtatatatcgcaacgcaagcaaacgagaatgtccaagcaaagcagtcacatgtttccatgtaaccctgaagcccttcctattcaccccgcaaacgtgatggaaatactcaaaccgcgaagaaagtcaaaaagtcaattgccatcctcaaacagatcagcagattcccggagagtcgtccatcatgcctataaagatcgaggcgggtggtttgtgcgagttatattgaaccaacgcagcagcagcggagcttgtgtcgttggcgtgcgcgagaggatgtcttcaactggagcgttgatagtcgaggtgtgtcatgggaagacgcttagtggctgcagcaagagcaggacttgcagtcggcgcagttggcgcaagaagtgcaggagcagtcacccatgtttgcggtttgttggttgtctgaaagacgaagagatatgtttgagtgtgttgcctcgtgcc

SEQ ID NO: 79507 - DNA, 908 bp, Oryza sativa
  Clone ID: PAT_MRT4530_79219C.1
tcatggtggacggcggcgcggggatgggaagatggcgacggcacggggacgggaggtgtgcggggtcggcgacggcgaacttcttcgcgccgccctgggaggaacgaggcggaggcccagccgccgccggtgaggaacgaggccggaggcggaggcggcggagaggaagaccggcgtcgtgtggtggcgagcacgaaaggggcggcgagcgcggaaggacctgtccgcgagcgtggacacgcaccagcgcagcgggggaagggaggcggaggaggtgatcgccgagtacctcgacgctgcccgtcgccggccctcgcgcgccgaccgcaagcgccgctcgacctgcgcccgcgcggccgccacctcgacgccgcccgtcgccagccctcgcgcgccgacccccgcgccgctcgaccagggaccgcgcggccgccacctaggcgccacccgtcaccggccctcgcgcgccgacccccgcgccgcttgacctggaaccgcgcggccgccacctcaacgccgctcgtccgatgctttgtggatagccgactggcgccttcgccgccggccaatccggcgacccctcccgccgcctgccggaacccgaaccggtagttggcgttcatctggctggcgagcagctcggtggcggagggccccgttggacgcggcgatgggaagtttaacatctccgagaacgcgcacgatccatgcccggccggcgcctctgcgtggtcgtacatggcggcaggccggccggcgggtcgaagccctgctgcaccctcaggcctcagcttgtcgaggcggctctgctgcgccaagtgatgttgctgctgctcgtgctgtttggtcttagctgagctcatcaccacaagaaaccggatggcaagctgccggcggcgagcgcccat

SEQ ID NO: 79508 - DNA, 258 bp, Oryza sativa
  Clone ID: PAT_MRT4530_7921C.1
gttggcgacgttgattgcttttggtgggcacagaggtttgggtagcacttgtccagtgtaagtgttagaagctgctgtaccagagcataaggattgataccccttgaaaccggtacttaggggacacactgcgagtagataccgcacagtgtgaccggacacagccaatgagcggacccaacactgatagcttcgtgggtgacaacaaagaggctggcttgtgccccctggaaccgctggatgatcatagctttggag

SEQ ID NO: 79509 - DNA, 740 bp, Oryza sativa
  Clone ID: PAT_MRT4530_79220C.1
tttttttttttttttacagattacagaacagaaatatctcagattgtggaaatgaaggtcacagtctcactcgttgcagagaaacatcaacatgtgtctgaaactctgaatcataactgtattatagattgccaagataacatctcatctcacagaaattagctcacatagaaagcaaggaatctgtcatatttcttagccaagaaccacatgaacagacaagaaggcacacacacggaagacgactgaaggcagcggcggcggggggatcagatggtcttggccagcgcggcggcggaggcggcggagaggtccgcgaggagaggctcgttggcggcggcgccggcggcggtgggctcgtcggggtcgtagttggggtcgagggcgcggtccatggcgcggcggccggagtcgaggcagggcttgcaggccatctcgatggtgatccagcccagcaccaccgccgcgatggctatcaccgccgtcaccaccgcccccatccgatctcctcgccgccggcgacagctggcttcttctccgtctccggcgaggggaaagcgtgggcggatctggaggtggttgccggcccaagtaatggacaagctgatggtcgcggcaatttttcgttggttgggttgctcgagtcgagtgctccaggtgtcgggggacgttggtgtggggccgacgtcataaatagtgtccatccgaacttcaaacttaaaccagttgatctgctgcat

SEQ ID NO: 79510 - DNA, 1287 bp, Oryza sativa
  Clone ID: PAT_MRT4530_79221C.1
atgaagaacactcaattggatcatgacaggcactctatggaagaatattcaatctctgatattgagttatcttcggaaatcagtggccagtatcaggaccccagccagcagattggacagtggtatggcatacccagtccaaaccaggatgagcatcatggtcatacggggcaccacattcgtcattttcttcagctaggatgggattatctacatcttacttacaagcaggaggcagctaatttaggttcgtcacagaatggtcattttccatatcggtggcgccgggcatcgcagtatcatgaagctggcattgaatttaggaggagagcatatagcgagtccaatcgccattctctcctggatataaagctcagagatgctgtcttggaaattccatttttgcttgtggatgaaagcaccagctttctttttaggaactttgtagcgctggagcaaacatgtccaaaagtaggaaacgatgttactgcctatgttattttcatggctaagcttatgaacatgcctgatgatgtagcactgttggctagaaaggggatcattgcccaccatttgcgcactgacagagatgtatcgcagctctttacgaagctgacgaaaggtgtggtatttgatttctatgggaattattacctcatgcccctgtctttagccttggaggcacattaccagaatcgtctgcacaggtggattgcatggttgaagcacaaccatcttagtaacccttggctggccgtggcagggttggctggtgttatcgtgcttttctgcactgttgcacagactgtccttactgtcttgtcttatgttgatcccaggcggtggctcggggcgtccttctcggcgacggcgcccgggcaaagagttggccgaagcggcgacgacgccggacggagcggtgacggcgctgggcggagcggtgacggcgctaggcggagcagcagcagggcgaccggatctagcccggggcagttccccttccccaccatcgccggcgcagctcccctttcccgaccgccgcgacagctctccctgcttccacctctcctcgtgggggcggaagctgtggatgacggcggcgcagcggcggcgaggcgccgagcagagcggcagtggaacggtggtggcgccgagctgcggatctcggtcgccctctcctccctcatgtcttcgggagactcaggcctcagcatgagagattggtggctcgatgcgagtatcccgttccggatcagctaccagaaatccttcgacgcactttgctga

SEQ ID NO: 79511 - DNA, 370 bp, Oryza sativa
  Clone ID: PAT_MRT4530_79222C.1
atgagggaggagagggcgaccgagatccgcagctcggcgccaccaccgttccactgccgctctgctcggcgcctcgccgccgctgcgccgccgtcatccacagcttccgcccccacgaggagaggtggaagcagggagagctgtcgcggcggtcgggaaaggggagctgcgccggcgatggtggggaaggggaactgccccgggctagatccggtcgccctgctgctgctccgcctagcgccgtcaccgctccgcccagcgccgtcaccgctccgtccggcgtcgtcgccgcttcggccaactctttgcccgggcgccgtcgccgagaaggacgccccgagccaccgccttccagatccacctcgacgcg

SEQ ID NO: 79512 - DNA, 990 bp, Oryza sativa
  Clone ID: PAT_MRT4530_79223C.1
gttgttgatattgtcgtcagtcttacacgatgattattgcacctgttgcaacagttctgtcgtaacagtccagtcggctgaaagaaaattcagtgaaaaacgatggttgatcgatcatgctgggtaattgttttcagcatcaacatgaaagaaacaagaacatatcgagctgttgtataaatttacttacaagagcgagcatcatccagagggccatcctagagacggacgacgacggtgtaggggagggatctggtggcagcgttgttcaagaccactggatccacctccacggatgtaaaggacaggggcggtggcggtggacgagatgggtccagtagcagcggttttggaatttattcacgaagtggttttggagatgattggattcacaggtgatcacagggttcattatttcatgtgaccggtctgaccggcgcagcccgcggtctgaccggccgacactgtgtcggtttcggtttcgggttgtttatttggatatccgagtttattttatgattatgacttctagatggatactatacagttcttcgatttgtgtttaccgggtttcgacggtctaaccggcgatctaccggcggtcagaccggcggcatacgggtggtcagaccagcggcggcaacaggcgcggcaagcagcttcggcggtcagacctgagattcaacaccggtcagaccgacggcatccactcggtcagaccggcagatcaatctcggtcagaccgacttccgtcgatttcgaggagataggcgtcgggcggggaggaaaagaggcggcggcgagcagggagggcggcggccggccggccgaagagcaagggcggcggccggagggcagggacgaagcgccgctcgatccccactgctgcgcgcgtgtgagaagcaagaggcgcatgggcccttctcgaaaccccctccccccactagacagccatctcactggcggcgggtgcggttgcagtgtcggagg

SEQ ID NO: 79513 - DNA, 2019 bp, Oryza sativa
  Clone ID: PAT_MRT4530_79224C.1
atgactgaaatggaagacggtatatctgatgttgagatagaggagctgggtaactcaatgaaggataaactgaaaaaatacatgtcattggatactgtgcatgctgatggatctgagttctgcttgattccaagaatccatgagcatatccgtatgatagacagagattcttatgaaccactaattttgtcgattggcccatatcacaatgggtcttcagcactttctttcatggagagaaaaaaatggaactgcttggactatatccttaagttaagctgtcaaaaaggtctgaaagattacttgaccatcataaacagactagaaaaacgagcaaggtcatgctattctggagatattaaaatgaataagagaaagttcttgcagactctcttgcttgatggatgctttgtacttgtctctctaagtcaatacaatgaatttttgtggcctgattccctcagatatataccttctccttcgaatgacaaaacatttgagggagctttgagttttggggatcatcagaaagtaactgggagaaatgaaagtcaacaagtaaacaaggggaagcagagtgcgatgaagaacactcaattggatcatgacaggcactctatggaagaatattcaatctctgatattgagttatcttcggaaatcagtggccagtatcaggaccccagccagcagattggacagtggtatggcatgtttgttccacatgacttgctcctgttagagaaccaaatttcactttttgtaattcagggaatacacgagatagttgtttcaaaacttgcaagtaaattgacaactactactgcactaagaaggagtattgttcaatgcattgaacagtttgtaccatgttatccaaaagcaataagagaatccaatcgtccaaaagattttgatcatttgttacacttatgtcatatgtacgtcagacccagtccaaaccaggatgagcatcatggtcatacggggcaccacattcgtcattttcttcagctaggatgggattatctacatcttacttacaagcaggaggcagctaatttaggttcgtcacagaatggtcattttccatatcggtggcgccgggcatcgcagtatcatgaagctggcattgaatttaggaggagagcatatagcgagtccaatcgccattctctcctggatataaagctcagagatgctgtcttggaaattccatttttgcttgtggatgaaagcaccagctttctttttaggaactttgtagcgctggagcaaacatgtccaaaagtaggaaacgatgttactgcctatgttattttcatggctaagcttatgaacatgcctgatgatgtagcactgttggctagaaaggggatcattgcccaccatttgcgcactgacagagatgtatcgcagctctttacgaagctgacgaaaggtgtggtatttgatttctatgggaattattacctcatgcccctgtctttagccttggaggcacattaccagaatcgtctgcacaggtggattgcatggttgaagcacaaccatcttagtaacccttggctggccgtggcagggttggctggtgttatcgtgcttttctgcactgttgcacagactgtccttactgtcttgtcttatgttgatcccaggaaacatgaatgcactttcaagagtgcaactactctacaatgtgaccatgtgatctatgatgcttcggttcctatcctgggagtcagtctcttctatcgttgtttcatcaatctattcagttccttcttgattccacaaggggcttttgacaaggaagggtatcctgagctgcttcactttcatgcattcaatttagtgaatccatttggtgcctatagccagagaactttccagactgggttactgcactcgtccacgatggggctcaacatcctgatatgccctctgataactggtgctatgcaggttttgatttcccatatttcaaacagggcctattatgacatgttgggaaattag

SEQ ID NO: 79514 - DNA, 567 bp, Oryza sativa
  Clone ID: PAT_MRT4530_79225C.1
atgacgacgacaacgctcccactccctcaccgttgtcctcctcctccacgcctcagtggcccaacaacgataacagggaacggcggcggtgacaccattccgactcgggagagcgcaacggtgagggagtgggagcgggagcgggatctcgccgatgacagaagagggaacgagccggcgctgggatcccagtggtggatggcaacggcggcgacgatggaaacagaggtcagatgcaaggcggatgcggtggaggcagtggtgaggggcgaggaggtggctgatgggggagcgacaataaaggcggaagtggatggtgaggacgatggagaaggcaatgagggcgaagaagaggagcgccgtgcacgggcacaagagcaccatcgtcggaccgagttcctgtggcggggagcaagtacgactctctctcctgcccgcccgtgccgcctcccgtcggcggagatgacccccacagtgccgacgacgtgggggctgccggttgagcactttggcaatgagtggaaggccgtggcatcattccatgaaacaatgacaaccatgaactga

SEQ ID NO: 79515 - DNA, 214 bp, Oryza sativa
  Clone ID: PAT_MRT4530_79226C.1
gtggtgaagatcctgcggctcgggatgagggggatcgagaggcagatgaacgctgtcaagcacggcttacaggtacaggtttggaacgaggctgtcttcaagagccaggagctcgtcgcgcttggcaccaacgtgggggatgacgccggagagcgggaccaaaacgtgcatatacacacaatgccatgctcatacgaccacatgaatcgtgcta

SEQ ID NO: 79516 - DNA, 660 bp, Oryza sativa
  Clone ID: PAT_MRT4530_79227C.1
atggggtggccggtcataacagcctcggctcggtcagaccgccatcggctcggtctgactgactatggctccgtcggctctgtatcggccatcccgagcagcatcatctcagcctccaggaggccgaaagctaccttggctgggagaggtgatggcggcggcggtgagaagtccagcctcgcgcggcccgtcttgtggaggttcaggaaggagccgtcctcctaccacagcctcggccgccggcgctgcgacctcaacgacctgcccccaatggcggccctcgccctgcgcttcgggttggcgatgaggaagtccctcgagccctcggccccgcctccgccggagtgcgccccgctccaggtactccaccgtcaccacgcgctccaccaccacctgcggcttgacggcgggcagagcagcggggggcgagcgcagcagcggagcgacggcggcggtagcgggacgcatgaggcggggtcggaggcgaagtacggcgcgaccggcgaggtcgaggcggggctcggatgcatcttcggcgaggacttcgaggacctgatgccggtgatgactgttgggaatcaaagcaactcacgcgaacacagtggacacaaatcacacttacgcgtgaagagcacaagaaagaagaacacagaacactga

SEQ ID NO: 79517 - DNA, 497 bp, Oryza sativa
  unsure (1)..(497): unsure at all n locations
  Clone ID: PAT_MRT4530_79228C.1
ctttaatcaactgacgtgatggagaattgtatcattccgtggatcaaaataggcctatcttgttctatgccactgccaaaagagcgaccggaaatgggacaagtttctaccatgattcttgaaatcaagaacgcagcctcacacaggcatgtttgattaagctgagacatggcgggtcctgtttcatttgtagcagaagagtgatttaatagtccttgaggaagtaccgaaatgtacgatattttctagtgtaaaatttggtacctctcggtacctctagtactacttaaaaattttgattacctctcaaggactataaaatttctcatagaagaatacaccaatataacatcacgtggatatttctttatgaatgcagaatggttagtgacattattggaagatttggtggtagcgcttgcatccctactcttgaatgttgaaaccttttatggttcatgctgtgtgacttattncttcatcggctaatatctatg

SEQ ID NO: 79518 - DNA, 1098 bp, Oryza sativa
  Clone ID: PAT_MRT4530_79229C.1
atggcgggtgcccggcccccgtggccggtggtgctggcggcggcggtcgtgctggccgtggcggcgccggtgcaggcggcgccgcaggtgccgtgctacttcgtgttcggggactcgctggtggacaacggcaacaacaacgatatcgtgtcgctggcccgcgccaactacccgccctacggcatcgacttcgccggcggcgccgccaccggccgcttcagcaacggcctcaccaccgtcgacgtcatctctaagcttctggggttcgaggacttcatcccgccgttcgccggcgcgagcagcgaccagctgctgaccggcgtgaacttcgcgtcggcggcggcggggatccgggaggagaccgggcagcagctgggggcgcggatcagcttcagcgggcaggtgcagaactaccagtcggcggtgcagcagctggtgagcatcctcggcgacgaggacacggcggcggcgcacctgagccagtgcatcttcaccgtcgggatgggcagcaacgactacctcaacaactacttcatgccggcgttctacaacaccggcagccagtacacgccggagcagtacgccgacgacctcgccgcccggtacgcgcagctcctccgcgccatgtacagcaacggcgccaggaaggtggcgctcgtcggcgtcggccaggtcgggtgcagccccaacgagctcgcccagcagagcgccaatggcgtcacctgcgtcgagcggatcaacagcgccatcaggatcttcaaccagaagctcgtcggcctcgtcgaccagttcaacaccctccccggcgcacacttcacctacatcaacatctacggcatcttcgacgacatcctcggtgcacccggatcccacggtttgaaggtgacgaaccaggggtgctgtggggtggggaggaacaacggtcaggtgacgtgcctgccgttccagacgccgtgcgccaacaggcacgagtacgccttctgggacgcgttccacccgacggaggcggccaacgtactcgtcggccagaggacgtacagcgcgcggctgcagtccgacgtgcacccggtggatctccgcactctcgcgagcctctaa

SEQ ID NO: 79519 - DNA, 792 bp, Oryza sativa
  Clone ID: PAT_MRT4530_7922C.1
ctcctcgctcctctgtactgtatccgaggtccccttccgccgccgccggatcctaccatccgccgtggccagctccatacgctgcggccggcgctcctcctcctcactccggattactgccgccacgcatcctcctctctccggattactgccgccgcatcctcgccggagccgcttcttctccgtccgccgccggagcaggtcccattccgccgccgttggatcccctgccacttttgtcgccgtcgtcaacatcctctctgcccgagcccgaagcctcagatctacgctcatgccgccgccgtcattgtgtgactccctgccatggaattgtggccacgccacctcggcgctgttgtccataccctctccgcctgagcccgaagcccgggatacacgacctgaggtcagcgtgcacttctgcctctcttgctgcggcctctgtccagtgcccgatgccaggtacccagcagccagcaacctgcggccggtatctttgcaccgtgcgactgattttgtacaactattggaaatctttacttttggttttggtttggtccggcatgattcaagatgtatgtttctgctctcattcttgtgtttatgtgttttggtgcagttgcaggccaacttgcacttgatgcaacgattcgattttggctgcgcccggttgacgttcccattgactttgaaggaatacccattataagtaatgggtccgacaaatgtctgaatgtcattcacccgaatcacatcgatcgcacaagaacataaacatgtttgcttcggcat

SEQ ID NO: 79520 - DNA, 496 bp, Oryza sativa
  Clone ID: PAT_MRT4530_79230C.1
aacagaggcaatactatgtttgccgaaaagctagcctaacctcacgatccgccactagccgagacaaaccactgagaccctcattaagaagcacggactacttactttccccggttgacatcggaggccattacaacattaccacacaacatatgtagattcattaacataacttaaatatgggaaatactaaactgacttacattgtgaaacatgaagagatacctccaactacacagcccaccaagcctgcactgataagagtgacatccaaggccctgcacctgaaactctgattaaccaataaagagggacctgcctagcctgacacacgtacctgtggagtagccgccaaacccgacaaccgctagcaggtatacgccctccatcaagacgatggcgacgaatgctgtgctatctaggacactctacttgagctacaaccatgtgtccaacacccatgccatgaagactattgccatcataatcatcggcc

SEQ ID NO: 79521 - DNA, 315 bp, Oryza sativa
  Clone ID: PAT_MRT4530_79231C.1
aattcaaaaaaacattgaagtttattattttttcaccacacatttgcttccaaacaaaaggaaaacacttttttttttagtaaccacaccaaatacatgcccagttggttacagtagcctagtttggacccaaatttcgccagccagtagcaaacaccacctccgccgttggggatgtccacgttgaaaaacgccgggaggtttgccgccgcgcgcttaaagtccctttttcgggagccggggaacaccttggacatggggggcccaacattgggggcgccaagcttcttgtggacccttgggcgaacccttggg

SEQ ID NO: 79522 - DNA, 447 bp, Oryza sativa
  Clone ID: PAT_MRT4530_79232C.1
attaatggcatgggccttctttttaaaaccctaagccctttttttggtgggtttattaaccccattcttccacctttgcattattccttagggggccctcctacctttccaagggggaaaaccttccagggtccccttccgaaaattttttggccgcccattcagagagaccaaaccaggacaggggaccccctccagccttccaattttttacagccacttgggggcgtgttactcactcccgattcaagggtctggggttttcttttcgttggttccccaaccaggtccaacaccagcacctggttcgcccgttgcgcttacccccgcaggcagttgcaggcctaattttccggggctttcaacagttttcaactcggccaggtaggcaggcggccaaacattcagatcactggaaaccattctcgctggaagaaagaaccgccg

SEQ ID NO: 79523 - DNA, 773 bp, Oryza sativa
  Clone ID: PAT_MRT4530_79233C.1
atggatggagctcacgcaatgtctgagctcgagccactcagcaccagtagcgtgtgcgtcccctctagttcccagctagccgggttttggcccacaagtggaactgcaggctcaactcgcatagattgccgtcttcaacctcctgaaaacagtctttccatgtaccataagggagctgatactcccaatcctatccggggctgccgtcttcaacctagatcgacacgcatacacgctagggttgcgcacaccgttccgcatgcaaaaccatcgtttctgttctccctctatgtaagactgcaacgcagcggtgtggcagccggcgagagagccacggttggagcaaagcgaggcggcagacgggcaaccgaggcagcggcgtccgcggccttccccaccgtgagcggccacggcggctccctccactacttccgatgggtggatccggcggtggcggcggcggcagcggtggcggcggcggcagcggtggcggcggccaagagcggatccgacggcagtcggtggtggtggcgtcggtgacggccgccgcctctcttctgccttcggtggcggtggtggcgtcgggtggatccggcggcagcggtggcggcggcgagtggatccggaggcggtggcggcggctgagggcgatccaacggcagtcggcgacggccgctggtggatacggcggcggccgagggcagatccggtcgccttttttttcgcccgagtttgtttctttttcatggaatcggacattgggatcaagttca

SEQ ID NO: 79524 - DNA, 646 bp, Oryza sativa
  unsure (1)..(646): unsure at all n locations
  Clone ID: PAT_MRT4530_79234C.1
tcaccctgtgtcactctctcgttctttctctcccagccgtcgtttctgttctccctctctgtaagactgcaacgcagcggtgtggcagccggcgggagagccacggttggagcaaagcgaggcggaagacgggcgaccgaggcaggtgggcggggagcgaagcgacgacttcctcccctcccacacgcatcccgtcatctcccttgatcccctcttgcgtggatcctcccctcttgcgcggatcctccaccagtgactggatcttgtcctctctctggccgctagcggcggccgcggccttccccaccgtgagcagccacggcggctccctccactacttccgatgggtggatccggcngtggcggtggcggcggccganggcggatccggcggcagtcggtggtggtggcgtcggtgacggccgcggcctctcttctgccttcggtggcggtggtggcgttgggtggatccggcggcagcggtggcagcggcgagtggatccggcggcgatggcggcagccgaaggcgattcggcagcagtcggtggtggtggcgtcagtgatggccgtaggtggatcccgcggcggtggccgcgccgaaggtggatccggtcgccttttttttcgcccgattttgttctttttc

SEQ ID NO: 79525 - DNA, 493 bp, Oryza sativa
  unsure (1)..(493): unsure at all n locations
  Clone ID: PAT_MRT4530_79235C.1
aggaaatttaggctccaggggtgagtgcgagcgcggcgaccgaggatctatctgggatgagccacctcgggccccgggccgcttcgtgatcggcggcgggcggcggcggagggacgcgatgaggacggcgcatcagcagcagcagaagcagcagggcggggtggtgcgcgtggacgatgtgtggcccgcntccagcttccgcgagctcaacaacgccttcctccaggtcggtcgcggtgccggcgaaatgcgccgtgtactgaactaaatcttgtgtgtgcttcagtcgggtcgtcggagtccgggttaatggaacaggaaaggccgtggccggccggtggctctgttggcgacggccggcgttcgtcggcgccgttctctccaatgggcgccggagatgctccagngattcgagctgccttcaatgagttcatggcttgatgctatctgtttcgggttttccatccccatgttgtatatgcgagatgtttag

SEQ ID NO: 79526 - DNA, 414 bp, Oryza sativa
  Clone ID: PAT_MRT4530_79236C.1
atggctgactatccctctagacaccgtggtgagaacatggatggcttcatggcagagcttggctgcatgacaattgtggtgggtttccctatgacccagagtacacgaagctacgtcccctcagtggcaagctcccgcatcaggataagggagttgcatgaccacgaccttcgtagcactgcttaccgctacaaccctcgccgtggcagttctgctgacgccagcaccttcaagtcagtgtctgaggagaacgacaccacctttggacgcatgtgctctgggagaaagagtttggacaagatgcacgctgatcttcacaaggcttcaaaggttctcaacgacaagaaactcgtgaagatagctagcttggaggacgagatatcccatctcaagaaagagaatgccatgctctag

SEQ ID NO: 79527 - DNA, 1677 bp, Oryza sativa
  Clone ID: PAT_MRT4530_79237C.1
atggcggatgaaattaaaaggaggagagaagaggacgatgatatgatgctttttgtttttcctgcgatgtatatgctgtgcggtatgacaaatagtgagaaaatacctagacatatctcaagactatccggtaaagagcggcttcaagaaatccttgaaggacatgtaatggattgtaaagttgcattccgcatggagcctcatgttttcaagacaatagcgaattatcttagagaggaaaagttgttaaaggatagtagaggcttgaggattgaggagaagcttgggatatttatgttcatgctcgctcacaatgcaagctttcaagatctacagtatgaattcaagcatagtgggtctacacttcatcggcatattaagtctattttcaagataatcccagctctcacctatagatttctcaagcttcctcatgccgaccaaacgcattggaagattagaacaaatcctcgcttctttccttacttcaagaattgcataggggctattgatggcactcacattcctataactatagatggagagaaggcagctccttataggaacagaaaagggactttgagccaaaatgtgatagttgcttgtgatttcgacctaaatttcacttttatctcatgtggttgggaggggtctgcaaccgatgctagggtccttagatcagcaatgaatagtggctttcaagtcccaaatgttatgatgtttggaagactatctccgaaagcaagcctattgcagcagcaacaaaggcatctacaaaagaaggcatcaccaaagagctgtagcatacagaagaagaaggtttctccaaaagctcaacaatcaagagcttcatggaacccgggaccagaaaaggctttagttgatttacttcatgagcacaataacccacattaccggtgccaaaacgggtggacaagtgaagcatggaacaaggtcgtcaaagaatttcgtgacagacatccctatgtcaccatgaataagcaacagatccaagataaggagaaggagttaaaacgagattataggttgcttaaggaggcaaggaaacagagtggagcttcttgggataatcaacggtgcatgattgttgccgatgatgctgtttgggcaaacataattacatcaaatgagaaagtaaggaagttcagcaaaaacaaatcttttcctctctttgaatccttgggtgaactttatgatggccaaactgctgagggcaacatgaatttcacttctattgagccattccaacatgctactctcacacaagtgaatgaatatcttgagagaagtgactcttttcctgatgtaaattgggttgctgatgatgatgagaccactgaagttcaagatgaagataatgcagtggagcatgaaaatcagggaagccatattactatcacctcaagagctaatggagaaaagaatatgagaaaaagacaatctgaggaggaggaagcaaagaagagggaggaggcaagcaaggttgatgattgctcaataaggaactgcatcactgttgtggaatcgatggaggagctctcaaatgaagaaaaggtcaaatcttttggagtattcaaggacgcgcagaatagggagatcttcatgagtgcagggcctatgactcgtcttatatggttaagaacgatgctggtttag

SEQ ID NO: 79528 - DNA, 2067 bp, Oryza sativa
  Clone ID: PAT_MRT4530_79238C.1
atggcggatgaaattaaaaggaggagagaagaggacgatgatatgatgctttttgtttttcctgcgatgtatatgctgtgcgttgcattccgcatggagcctcatgttttcaagacaatagcgaattatcttagagaggaaaagttgttaaaggatagtagaggcttgaggattgaggagaaacttgggatatttatgttcatgctcgctcacaatgcaagctttcaagatctacagtatgaattcaagcatagtgggtctacacttcatcgacatattaagtctattttcaagataatcctagctctcacctatagatttctcaagcttcctcatgccgaccaaacgcattggaagattagaacaaatcctcgcttctttccttacttcaagaattgcataggggctattgatggcactcacattcctataactatagatggagagaaggcagctcattataggaacagaaaagggactttgagccaaaatgtgatggttgcttgtgatttcgacctaaatttcacttttatctcatgtggttgggaggggtctgcaactgatgctagggtccttagatcagcaatgaatagtggctttcaagtcccaaatggtaaattttttctagtagatggtggttatgccaatacaccacagttcattacttcttatcgtggtgttcggtaccatctaaaggagtttggacgtggtcatcgtcgacctagagactacaaggagttattcaatcatcgccatgccattctgagaaaccatgtagagagagctctaggggttctaaagaagcgatttcccatcctgaaagtaggcactttccatcggataaagaaccaagtgcggattccagcagctgctgcggtgttccacaacatgatccggttgcttaatggtgatgagggctggttggacaaccaacctgataatatagaacctactaattttgtcgatctaccagaaggtgacagtgaataccgaaatgatgtgccatctcttagcaatcaaatgatcagtgggaataatattagagatatgattgctaagaagatgtgggaagattatgttcttatgatgtttggaagactatctccgatagcaagcctattgcagcagcaacaaaggcatctacaaaagaaggcatcaccaaagagctgtagcatacagaagaagaaggtttctccaaaagctcaacaatcaagagcttcatggaacccgggactagaaaaggctatagttgatttacttcatgagcacaataacccacattaccggtgccaaaacgggtggacaagtgaagcatggaacaaggtcgtcaaagaatttcgtgacagacatccctatgtcaccatgaataagcaacagatccaagataaggagaaggagttaaaacgagattatagattgcttaaggaggcaaggaaacagagtggagcttcttgggataatcaacggtgcatgattgttgctgatgatgctgtttgggcaaacgtaattacgtcaaatgagaaagtaaggaagttcagcaaaaacaaatcttttcctctctttgaatccttgggtgaactttatgatggccaaactgctgagggcaacatgaatttcacttctattgagccattccaacatgctactctcacacaagtgaatgaatatcttgagagaagtgactcttttcctgatgtaaattgggttgctgatgatgatgagaccactgaagttcaagatgaagataatgcagtggagcatgaaaatcagggaagccacattactatcacctcaagagctaatggagaaaagaatatgagaaaaagacaatctgaggaggaggaagcaaagaagagggaggaggaagcaaagaagagggaggaggcaagcaaggctgatgattgctcaataaggaactgcatcactgttgtggaatcgatggaggagctctcaaatgaagaaaaggtcaaatcttttggagtattcaaggacgcgcagaatagggagatcttcatgagtgcagggcctatgactcgtcttatatggttaagaacgatgctggtttag

SEQ ID NO: 79529 - DNA, 442 bp, Oryza sativa
  Clone ID: PAT_MRT4530_79239C.1
gccggcaggagagccacggttgggagagacccgaggcaggtgggcggggagggaatcgatgacttcttcccctcccacacgcatcccgtcgtctcccctgctcccctcttgcacggatcctccaccggtgactggatcccgtcctctctctggccgctagcggcggccgtggccttccccaccgtgagcggccacggcagctccctccactacttccgatgggtggatccggcggtggcggtggcggcggcggtggcggtggccaagggcggatccggcggcagtcggtggtggtggcatcggtgacggccaccgcctctcttctgccttcggtggcggtagtggcgtccggtggatccggcggcagcggtggcagtggtggcagcgcaagtggatcccgcggcagtggcggccgccgagggcgatccggcggcagtcggcg

SEQ ID NO: 79530 - DNA, 392 bp, Oryza sativa
  unsure (1)..(392): unsure at all n locations
  Clone ID: PAT_MRT4530_7923C.1
aaaatgngcgacgaaagatgataaatggtgtggtgaccacatatgatggggattaactatgatgacacncaatgacaatgaccacgttgcttgatgaaagcggggangaggcacaatggggactttgggactggtgggatggatgaattgctgtgaaatgctgtgtgtgtgattgattgatgtgtgcctggttgaagttgttgatggatgtaaaaaaaatgtggtgtttgcttgtgctgtgctgcctgtggtgtggtttggttgggtgtgtgggtntgtggtgctggtggttgcttggaggttgagttgggcgcctgatgctgtcaggcttggattcctttcagaaatgaatagtgcaggggttggtgtgcatctaaaaaaaaaaaaaaaaa

SEQ ID NO: 79531 - DNA, 328 bp, Oryza sativa
  Clone ID: PAT_MRT4530_79240C.1
tccgatctagagctagctagcttcgatcagtatctggaggatgatgacagaagttgcacgctgatgccctactactgatcatgttctccttccttattttgccgtcaccctcaggtatacacacacatatgtatatgtatagtgcccacacatattttcgtacactgtatagctctccctctcagctcatcgaccaactatataatttaatggaatttaatctgtgatggatggcaggatgactgcacattaactaccatgcagaccgcacgggcaactgcccgctgctccgcagcatagtcccgcagtcacaacactcaccactgct

SEQ ID NO: 79532 - DNA, 1372 bp, Oryza sativa
  Clone ID: PAT_MRT4530_79241C.1
ccactacgcactagtagtagcactctggtattctcccatggcgactgcgaccgaggaggttgccgctgcggctgctgccgccggcaaggcgccgccgccgccgccgccagcggtggtagaggaggtgaaggaggcggtggaggcaccgaagccggaggaggcgccgaaggctgaggagggggaggagaagaaggcggagggtgagaaggagaaggagaaggctaataatgagaggaaaccgagggcgaggaagccccgatcggctgtgccacaccacccgccctacttcgagatgatcatcatgtgctttgtgcagcttcacatgcatctttggcctcctttaccaagtcctccagttgtttttgtgccataggaataagttgacgggcttcaaccatctcgctgtaggcattcatgaaagatctcttacggatcttcccttcatacttatgtgcatccttcactaacttcgacagctcatcttgtgtaaacatcgcttcctcagctgtagatctttctgtggggtaacatatgatcttaatacccgtagcaagtttcatcaaatcccagtctaaacatttaatgccagaccgtttctcaatgtattcaccagtccagcgcaagtgcttggagtttttcacatcacagtattcgcaatcaagcaagaagcatgccagcttaataatagagtcagtaaccatctctggtttgacatccaaaccatagcggttaaggagcatgtacaatccttggctcattgggaggtagtcgtccttgctcaacttcattttttcttggggtactaaaacatgcatcagattcttcaggccccacatcaccttccatcgcaatatcatcaaacatgcagggcacactcaagcttctttcaatgatttcttatatattcgggttttccaacggccattttctgcccagggtgatgccacttcatgatcatctcagcaaggtcgcaactgacaccagtatcatgattaatggcactggacttgtccttgatttctcgaaattccttcagccaaatgaatttggataccctatagtccacgccaaagtttgcccagatttcctgcagggcatttggttgaatgagtctgtccccactcataccgaacattgcgaagccagagggcgtctcaaacagaactaagactattagacaatggtacgtattgtgatctacaccggcgattgaccccgccgtcgccgtacgagtagcactgcatcctcgcttactcgaggtcgaggtcgaggtcgaggtcgaggtcgatctctttcctgtcatggtgtggcagattgcgaccgaaggaagacgtctcaacgttggcttcctaataccggcaacagacgccgc

SEQ ID NO: 79533 - DNA, 356 bp, Oryza sativa
  Clone ID: PAT_MRT4530_79242C.1
aagactgcaacgcagcggtgtggcagccggcgagagagccacggttggagcaaagcgaggcggcagacgggcaaccgaggcaggtgggcggggagggaaccgacgacttcttcccctcccacacgcatcccgtcatctcccctgctcccctcttgcgcggatcctccaccgatgactggatcccgtcctctctctggtcgctagcggcgtccgcggccttccccaccgtgagcggccacggcggctccctacactacttccgatgggtggatccggcggtggcggctgcggcagccgtggcggcggctgcagcggtggctgcggccaagagcggatccgacggcagtcggtggtgg

SEQ ID NO: 79534 - DNA, 264 bp, Oryza sativa
  unsure (1)..(264): unsure at all n locations
  Clone ID: PAT_MRT4530_79243C.1
gtgggcggcggcgccgccgtcctcaggccagcggacgccgcgtgcggtcgagctgccttgccatggcaaggccgtagccttgctgatagcgaacggaggagaacgaccaggctgtatgcccgcatggtgttcgaaggggtcgggagcgatggctcggcgtcggnggcggtggctgctgccgacgcggctgctgaacgtctgcctagccgcgctctgccgaggagggagcctcgccgccgcggaatccgtactcgtcgacgccat

SEQ ID NO: 79535 - DNA, 3955 bp, Oryza sativa
  Clone ID: PAT_MRT4530_79244C.1
atcaagagtagataacgctggtcgaattactagtgagttcccattgtcgataattaaacagagaaaaacacacgaatgcaacgctttggtccaggatggcagcttcaggcagcctcaccatccagtgtccaggataggatttcaaaaccagttctcccttaaggaaatgtgatattcttggcgactgagttcttctctcatgcgactgtgttcttctctcatgctactgactggcttattgcgttcatgtgctttgttcagcttcacatgcatctttggcctcctttaccaagtcctccagttgtttttgtgccataggaataagttgacgggcttcaaccatctcgctgtaggcattcatgaaagatctcttacggatcttcccttcatacttatgtgcatccttcactaacttcgacagctcatcttgtgtaaacatcgcttcctcagctgtagatctttctgtggggtaacatatgatcttaatacccgtagcaagtttcatcaaatcccagtctaaacatttaatgccagaccgtttctcaatgtattcaccagtccagcgcaagtgcttggagtttttcacatcacagtattcgcaatcaagcaagaagcatgccagcttaataatagagtcagtaaccatctctggtttgacatccaaaccatagcggttaaggagcatgtacaatccttggctcattgggaggtagtcgtccttgctcaacttcattttttcttggggtactaaaacatgcatcagattcttcaggccccacatcacttccatcacaatttcatcaaacatgcagggcacactcaagcttctttcaatgatttctttatattcgggttttccaacggccattttctgcccagggtgatgccacttcatgatcatctcagcaaggtcgcaactgacaccagtatcatgattaatggcactggacttgtccttatttctcgaaattccttcagccaaatgaacttatagtgcacgccaaagtttgcccagatttcctgcagggcatttggttacatgatgaacagggtgttcacagtatgcgagatcgacaacaaacggttttccttccgacgtgggagggatcaagagagggttggtggctcacctacaccggcgattgaccccgccgtcgccgtacgagtagcactgcatcctcgcttactcgaggtcgaggtcgaggtcgaggtcgaggtcgatctctttcctgtcatggagcagcatatctccagccgctgccgctctccatcccgccctcggacgccgacgatctccatccagcttcagccgccgccggtctccatcccgtcctcagccgccgccggtctccatcccgcttcagccgccgccggtctccatcccgcttcagccgtcgccgccgctctccttcccgctctccatcccagccagtcgccggcgctcgccatctctccttcctcgcttcggattcaccggttgcgggagagggcaaggtcgagggcaacagccccggacaccaagaagcaggagaggcacaggcgtgtggggttggcaaaagtaaagctgaaggagttgatattactcaagcagcaacaaaggcatccacaaaagaaggcatcaccaaagagctgtagcatacagaagaagaaggcttctccaaaagctcaacaatcaagagcttcatggaacccgggactagaaaaggctttagttgatttacttcatgagcacaataacccacattaccggtgccaaaacgggtggacaagtgaagcatggaacaaggtcgtcaaagaatttcgtgacagacatccctatgtcgccatgaataagcaacagatccaagataaggagaaggagttaaaacgagattataggttgcttaaggaggcaaggaaacagagtggagcttcttgggataatcaacggtgcatgattgttgccgatgatgctgtttgggcaaacataattacgtcaaatgagaaagtaaggaagttcagcaaaaacaaatcctttcctctctttgaatccttgggtgaactttatgatggccaaactgctgagggcaacatgaatttcacttctattgagccattccaacatgctactctcacacaagtgaatgaatatcttgagagaagtgactcttttcctgatgtaaattgggttgctgatgatgatgagaccactgaagttcaagatgaagataatgcagtggagcatgaaaatcagggaagccacattactatcacctcaagagctaatggagaaaagaatgtcaagaagaccaaatctactgagagagagagagtagaaaagacaccgaagaggaataagaggaatgatgttgttgatatgatgggaagttacttggagatgagaaaaagacaatctgaggaggaggaagcaaagaagagggaggaggaagcaaagaagagggaggaggcaagcaaggttgatgattgctcaataaggaactgcatcactgttgtggaatcgatggaggagctctcaaatgaagaaaaggtcaaatcttttggagtattcaaggacgcgcagaatagggagatcttcatgagtgcagggcctatgactcgtcttatatggttaagaacgatgctgtgctatgctgcaggcggcggcgtgagccggaccatgtgttcgccgccgtcgcgttcgcgtgcgtacgccgcctccggcggcacaggtggtggccactaccgctcccgctgcctccgtagctgcagctgcgacgagcacagccggcggcgacgccatctctacctggtgctggatgactggaaggaggggtacagcctgcacaagctcgacctcagccatgtctccggcgacggcggcgagcacgagcacaaccccatcaacccgcggcggctccccgcgccgctcctccgcctaggtttccggacgctcggctcgtcgccgcgcgtcggtgccctgggcagcaagatcgtcttcattgcgctgcgagacgaccgcgccgttggcatgccctacgttgagaaagtggaagaggtggccaccgggaacagggtctacttgatgctgcctgatcagtccgagcgctcgccgccgccgccgccgccggagtccggcagcccagacctcgccgtggccatgcgctacctcgagaaggtagagcaagtgtacgacgacgaggtggaaacagcggacgacgacggcgacgacgatgagtacatggacgcagagaagaagaagcacgtcgtcgtagcgtacagcgagaggttgacggagcggtggtcatgggggagcacctcttcgccgccgccgccgcccttcggcggcggcaggcggcgcatcacggggtacgcgttgcatccagacggccgcaccatcttcgtctccgtggcgaagagaacacccgaccacgacgacgtcggcgaccgtcccgacgaggaggtcaccttctcctacgacaccgagcgcgccgagtgggcgcgccgcggcggctggctcctgccgttcgacggccaggcccactacgacgccgagctggacgcgtgggtcggggcgatcggctccagggccggccctcggctcgtcgcctgcgacgtcgtcccggcggccgcagccggagatcgccgcccggcgccgccgccaccaaggtggacgttctgcgagcagccgctgacgttcctcggtgcggagagccatcagagcctgggcgatcccaagctcctccccatggggggcggcgcgttctgcgtcgtcgtcgagagcgcgccgcgcggcgccgactcggtcggcgacggcgacaagctcctgctccgcgtcgccgtgttccgcgacaagtacggcaagaacggcgagctgttcatgacgacggcggcgggcgggcgcggatcgtgccagacgcacacctacgtgcggtctcgctatctcgtggatttccatgcgccagcgttctggatgtga

SEQ ID NO: 79536 - DNA, 1187 bp, Oryza sativa
  Clone ID: PAT_MRT4530_79245C.1
atggatagagctcacgcaatgtctgagctcgagccactcagcaccagtagcgtgtgcgtgccctctagttcccagctagccgggttttggcccacaagtggaactgcaggctcaactcgcatagattgccaataagagtgctgatactcccaatcctatccgaggctgccgtcttcaacctagatcgacgcgcatacacgctaaggttgcgcacaccgttccgcatgcaaaaccgtcgtttctgttctccctctctgtaagactgcaacgcagcggtgtggcagccggcgggagagccacggttgggagagacccgaggcaggtgggcggggagggaatcgatgacttcttcccctcccacacgcatcccgtcgtctcccctgcggcggccgcggccttccccaccgtgagcagccacggcggctccctccactacttccgatgggtggatccggcggtggcggtagcggcggcggtggcggcggccaagggcggatccggcggcagtcggtggtggtggcgtcggtgacggccacggcctctcttctgccttcggtggcggtggtggcgtcgggtggatccggcggcagcggtggcagccggcgagtggatccggcggcgatggcggcagccgagggcgatccggcggcagtcggcgatggccgcgggtggatccggcggcggtcgagggtggatccggtcgccttttttttcgcccgagtttgtttctttttcgtggaatcagacattaggatcaagttcatgagctctactcggattaaaattgctcttttatgttgttttttgttggctcattgtgtggttcatttgggatcgggttggggggtttttttttgagggaatcggactcggctcctatgagggacgacggacgcaacggacggtttttttttgaacaaaaatcatgggtgaaaatgaggtgacgaatccgaaaatacgaatcttttaattagttaagatgaggacatttggatttatacattggggtgatgttatccctaatctctatctctatctcttctattattataaaaactgaagatgtttttgccggtactttggggcgtcatagttgtatgactttttttttaggaatcggacgcttttccaaaaaaaaaaaaaaaattaagtcgattttaataagttcgttcggttttggaaatact

SEQ ID NO: 79537 - DNA, 295 bp, Oryza sativa
  Clone ID: PAT_MRT4530_79246C.1
aaaaaggggccacaaaagggccttaggtaaaaaaaaatttttccggttcatttctggaacccctcccgaatttttaacattataccccctacattgcatgcagggaacatgtgccgcttccaagagaccgacaaaaccttattcctcccaatgacaagttacccggatttattcattggggggtcaagggtttcaacaagaatgcccaggtctaaatccttatccccaaactttttgatgaaagggtgattcaagagtttttaaaaatacatccccttcgaaagaaccttttttt

SEQ ID NO: 79538 - DNA, 618 bp, Oryza sativa
  unsure (1)..(618): unsure at all n locations
  Clone ID: PAT_MRT4530_79247C.1
ngtaggtgacatctttgtacaagttgtgtccaaaaagcagctgggtacccgtccggnatttcccggggatatcgtcgacccacgcggtccgggatattcctncgtganttgtgcactgtcgagaagnttctcatatgcttccgaccatttgttggttttcgtgaggtgagacttggtaagcaaagaacgcaagacatcctggtggggatgcccattctactgctgttttgttgattttgaaactgctagtcaagctgctattgctatggatgctttgcaaggctacaaattcgatgaacatgatcgcaattcaccccatttacggctccagtttgctcgttttactggccccaggggaggttcaggacctggtggtggtcgtgttaggcgttaagttgttcgtccttttatcaggcatgatcacatcgaatgttcaagtgaaatgatgatagttcgttggtcgctctagatatattactccatagtgctaggattggtaaccttctgttgttccaagttccaactttggtgccttggctttgtgagatgctttctgacattaactagttattaaacatcaaagctgaaaacaattcgtggcaaaaaaaaaaaaaaaaa

SEQ ID NO: 79539 - DNA, 471 bp, Oryza sativa
  Clone ID: PAT_MRT4530_79248C.1
cagctcttattcgaattactattaggaaaggtggtacccctggaaggtccggtcccgaatttccggggccaaccaacccttccgccattaattttttgggcttggaaaaaaagggtccaccccttaacccattgggcccttggtgaagtttccgggcaatgcccaccattttgttgtttcttcttgttgagggaaccaaaactgttgggccttccaaaataccggccttaaccaggagaaggccttccgtctttgttttttccaggaaaaagttggttaagttgcctggtccttcaatggaggtggttaaaaagggggggtccatggcttttgccaattaaattggcaccaagcttaacttatttggaataacacttggttttaacctaaaaattgcccccaaggttcttattaagtttaggaaggagggaaaaactgccctggccgggtaattggtttgttggaagcttt

SEQ ID NO: 79540 - DNA, 208 bp, Oryza sativa
  Clone ID: PAT_MRT4530_79249C.1
tttctcctctccttgcgcggcttgctatattctggtgatcatgggaggctccagcatgcaagaagagaggctgcggtggagttgtcggaggaggagctagcgagcctgtgcttgctgatccgtgcttagctgaagaagcagttcgagcgagcggcctacatggggaggacaagagtcgagctcaagcgcatccagaacaagatcaaca

SEQ ID NO: 79541 - DNA, 731 bp, Oryza sativa
  Clone ID: PAT_MRT4530_7924C.1
aagacatcgaaatcacctagtcaacaccatggtcattagataaaactcataaaggccgcccctttttttttttttttttcgcatcagtgcaaacacactagaggaattcataattcaaatggtatacgtatgcctgggggaaaaagctagctgggttgaaagttccatgaagggtgtgaacattagtttttgatttgatctacaaaatatgacatggtacaaaagcctagtgccgcctcgctttagactcgctcttcgcgagaatcattccagagagcttatcaacctcgtagagaaatccagcagaaaacaggaagcatgttgtgatgcaaacacgatggacagtgccggcaacaataagtgcagtaagttccgcgacaacaactgcaccccatccagttttaactccattagcttcctgatagttgccaataaacgtgagaaggaagaggaagaggagggagctgacgaatccgccggcgatggtcatgagctccgacgaggcgaacctcccccggtacatctcgagcagcgacagcgtcaccgcgaacagcagcagcgacagcgccatcgacctcccccccgtgctcgccatcttggatcggtggaccctggggagatctgaggggagcgggaggggtcaagggcagtagggttttgcgcctcacgaaggtgatgaatttgccccgcgacgcgatgcgcccgcgagatctacccgccgaggtgaaggc

SEQ ID NO: 79542 - DNA, 864 bp, Oryza sativa
  Clone ID: PAT_MRT4530_79250C.1
agctacaagcagcttgctcttgctgttgagatttggcttcagagagcatctttcccatccttaagaaggtaccatgaggtaccaatccgccgtctcatcgcaggtattcccccgcggccgacgtaccctcgacgccaccgcggccgcgcgtcgaacacgcgtctgccgccgtcgaggacgccgcggcagacgtccaacccgcatcccgtcgtcaatagcggcgcatcccgtcgtcgcatacagcggcagcctccaccccggcgcatccatcccgccgtcgcaagaactcgttgtctcatccagccatccgcaggcgcatcgactcatccacgacgacgccaggcgcatcaaaatcgccgcctccaccctgccgcatccaccgtcgcatccagccggaatactcgggcgtcgcttcctgctgttgtggtctctgttgttcctgcatcgtccgacgctctttacacttggaccttgaagaaggacgggagcaggcacacataccttgaagatccacggcggcgacccggattgccgtgcccccgctcgccaccgttcgggggctgcatggtcaacggcgagctagaccctgagacgccgcgcacggacgcgcgcagccgcagcactggacggcgacgcctgggctggagggaacgagtgaagactgaagactgcctatctccctcccgcttttggtcaccgagatcccgacgaaacgccgccacaaccatcgccgagctcccgacgaacggccaatgcaaccatcttcgagctcgccgatgtagcatagaaacctccgagctcaccgtcgctagggctgtcaacgagccgagctcgagcgagcttacctacctaagctcaagctcg

SEQ ID NO: 79543 - DNA, 449 bp, Oryza sativa
  Clone ID: PAT_MRT4530_79251C.1
aaaaaagataatttgtcatgatataaaagattggttttacatcctctgatctaccaaaagctcctacaagggctcatagcagagcaccaaaatgacttcacaaaaaccaacttgactggaacacaagtgctggtgcgcatctcctaccgtctatattgaacatgagaccaggctgcaaggtggccttccccagatggacattcaaaaagccttccagctgaagacgttctgggctgccttcggtgcctctccgcaagctcaagccccagcctaggtcgtcctccggtgtttctgacaatgtgagcgcccatctcactaaccttgggttcgccttcttgacctcaatccaggccccaactcttgagtcctcatcgatcttcagatcgaaatcaacacatcctccagcaggtggtttgctcttcctagatattaaaccgggtccatgcaag

SEQ ID NO: 79544 - DNA, 582 bp, Oryza sativa
  Clone ID: PAT_MRT4530_79252C.1
atggacgaacttggcgtcgacagtgttccggcgcccaaaagggctcgggaggtggcagccaaggaggaacatgcaaccgcaaacgggagtggcggcgaggccgggcggtactccggcgaggagcaatggcctggcagagggttggaggcacgggagccggcgagggcgcggatccaacgagcttcgggcagggaggcagagaggccggcgaggaggttgacgtcgcggtgccggggaaggaaccgacaacgtctgacggcgaacgagcatggcggcaggggttgccggagctcgggtggcgcggtggagacagggaggcagctaggaatttgggaggtggcaaaatggagcgaggggagggaggaggctccgttttataggtcggggagggagagccggccacaggaaggggcggattggcggcggcttcaatggaggaggaaggaaggaaggagcgagagaggaacggtcggccagaggaggaagacgaccggcggctgggccgggaggcgaggcggcccaggcgcggagggagggaggcagtgcaggtgggctggggacgagaggcgggatgggccatga

SEQ ID NO: 79545 - DNA, 177 bp, Oryza sativa
  Clone ID: PAT_MRT4530_79253C.1
atgcgtctcatgctttgcagtgcgaccctcagtgtcccagacgttggcggcgtcggcgtcgccgacacccaccgcaaggaccaaagtggatttgaagtgggtttgaatggttcggagaatggattggcccggaacctcctggtgatgaacaccggaacttccgggcaggatgagtag

SEQ ID NO: 79546 - DNA, 1461 bp, Oryza sativa
  Clone ID: PAT_MRT4530_79254C.1
atgggctcaaactcgcgcctgcacgccgtgctcatcccgtacccggcgcagggccacgtcacgcccctcctgcacctcgccaaggtgctccactccagggggttccacgtcaccttcgtcaactccgagtacaaccaccaccgcctcctccgttcccgcggcaccggcgcgctggccggcctcgacgacttccggttcgagaccatcccggacggcctgccgccgccgtccgaatccgacaacgacgacgtcacgcaggacatccccacggtctgcacgtccttcctcacgcacggccccgcggcgttcggggccctcctggcgcggctcaacagcgagcccgggacgccgccggtgagctgcgttataccggacggcgtgatgagcttcgcacagagagtggccagcgacatgggcatccttgccccggcgttctggaccaccagcgcctgcggcttcatgggatatctccactacgccgagctcatcgacagaggctacgtgccactcaaagatgagagctacctgaccaacggatacctcgacaccgtgctcgactgggtgccggggatgccaggcatccggctgcgcgacatgcccagcttcatccgcacgaccgaccgggacgagttcatgctcaacttcgacagcggcgaggcgcagaacgcgcgccacgcgcagggcctcatcctcaacacgttcgacgcggtggagcacgacgtcgtcgacgcgctgcgccgcatcttcccgcgcgtgtacacagtcggcccgctcctgacgttcgcgggggccgcagcggcgcggcgccccgaggtgggcgcgatcggcggcaacctctggaaggaggacgcgagctgccttcggtggctggacgcccagcagcccggctcggtcgtgtacgtcaacttcggtagcatcaccgtcatgtcgccggctcatctcgccgagttcgcgtgggggttggcgcgctgcggccggccattcctgtgggtcatcaggcccgacctcgtcgccagcgagaaggccatgctgccggaagagttcgtcagcgagaccaaagagagagggatctttctgagctggtgcccgcaagagcaagtcctggagcatccggcgaccggcctgttcttgacgcattccggctggaactcgacgctggagagcataagcgccggcgtgccgatgatctgctggccgttcttcgccgagcagatgaccaactgccgctacgcttgcaccaagtgggacattggactggaaattgacaccgacgtgaagagggaggaggtggcacggctcgtgcaagaggccatggatggagagaaaagcaaggatatgagagcgaaagcaatggcgtggaaggagaaagccgtggcggcaacggaggaaggaggcacttcgagcgccggaatagatcgtttggttgaatttctgcttgcaagaggtgatcacgcaagctga

SEQ ID NO: 79547 - DNA, 271 bp, Oryza sativa
  unsure (1)..(271): unsure at all n locations
  Clone ID: PAT_MRT4530_79255C.1
ttcccacaaccntagccnnccanagaancnccanaacattatctacgtatggtcttntacganttcntgccatancagtgtgtccgcagaataacgntntctncccccgtgtgagattatacattgaantataangtacttggnngctttcatccncaggagtttttttnttaaagtgtgaccgggttcatttattggatancgcatgaatattancngggcnngatgtgtttttcaaaaaaaaaaaaaannaaanaatnaaaanantttt

SEQ ID NO: 79548 - DNA, 549 bp, Oryza sativa
  Clone ID: PAT_MRT4530_79256C.1
atgccgtcgtcgtcatcgccggcggcggcggcggcgggggagggatcaggcaggaagaaggcggcggggcgccggctggccggcgtgatgctgctgctccggctggcgtcgctgtgcttcgcggtggccgcggccgcgttcgccgcgacggacggcgctgcgctccgggccgcgccgttcaggttcctgctcgctgcgaacgccatcgtggcggtttactcggcgttcgaggtcgccgcggcggcgtgggaggtggccggcggcgccacgctccttcccgaggccatgcagctctggttcgacttcggccacgaccaagggttcgggtacatggcgctggcggctgcggcggcggcggcgcgggaggcggcgacgtgcggatcacacggcggcggcacggcgtgcgtgcagggggacatcgcggtggggctcgggttcgcggggttcgcggcggtggcggcggcggcggcggcgtcggggtaccgcctcgcctgcttcctcgccaccggctcgcgctcgccggcctcaccgtcctcctccccctactga

SEQ ID NO: 79549 - DNA, 195 bp, Oryza sativa
  Clone ID: PAT_MRT4530_79257C.1
atggggatcatatctttagcaacaaccggtccacagtacaagtgcgtgcatgcagacagccgaggcatttggaaccttactgccgctgcggcgatcgatcggcgctgctgctgcggctttgctggctccggagtccggacggaccgccggttcggcccagaaaccacaagttgggtccatgctcttttgccgctg

SEQ ID NO: 79550 - DNA, 558 bp, Oryza sativa
  Clone ID: PAT_MRT4530_79258C.1
atggcggcatgccggagcgcgtgcgaggcgttcggggaggaggagtactgctgcagcggcgcgtacgcgacgccggtgacgtgccgccggccgacggcgtactcgaccatcttcaagtcagcgtgcccgcgcgcctacagctacgcctacaacgacggcatgagcaccttcacctgcaacgccgccgcctacaccatcaccttctgcctccctcccactaggtcgaacacctccggtgtcactccactgatcagctcgccggccaatggccagaacggcggcggggagcacttgggcgtggggggcagcgggaggagagccggcgggcggcaagcgagcatggtagcgggcggcgggtggcggttgtgggccgaaacctctcagcagaggcagccgctcctcctccctgtcccgtgggcgccgtcgccaacataccatgggcgccgtcgcatcgagttggagccgccgtcgccgctgcttcgccaagccagaggcgccatcgccgtgccgtgctcctcctcctccacctccgcccgcagctttgcgtcactaccctga

SEQ ID NO: 79551 - DNA, 528 bp, Oryza sativa
  Clone ID: PAT_MRT4530_79259C.1
atggcgacggcggcgcaagtcgcggcgcagcgcggcggctcgaaggcggcggcgcggcggcacgacgacggcggcgcgtggggaagggggagagggagaggaggaaagatgaaggggatgtgcggcgatggcgacgggcgggcagcgcggcgtgacacggggctcggtgcgacgacgacggcgatgcgacgacgatgcggcgcggcagcagcgcggggcgcgaggcggcgacgcgacgggcgggcggcgcgcgggcgcggggcacgaggcggcgacgcgacggcgacaggacgacggcgcggcgacgggacgggcgacagcggcgacggcggcgcgaggcgcgaggcgatgagacgcacgcgcggcgacggaacggcgacggcgacggcgcacgcggcggcacggggcgcaaggcggcgcggcagcgacggcgacggcgcgcggcggcacggggcgcaaggcgacgacgcgacgggcgacagcggcgacgtgatggcggccaggcgcgtgcggcagaggaggggttag

SEQ ID NO: 79552 - DNA, 232 bp, Oryza sativa
  Clone ID: PAT_MRT4530_7925C.1
gttatatgaagaccaaccagagataaaagcacgggaactgaggagggaaaaaggcgccggaggcctaccgatcatagacacaagcggcacaaaagcaaggggcaacagcaacagcagagatggccaatatctccgaactgcccccaacatatacaaagattacaggacaaccacggccaaggattcccctaccgcggcccagcaacacccttcaggagcaacaacaaaggcc

SEQ ID NO: 79553 - DNA, 405 bp, Oryza sativa
  Clone ID: PAT_MRT4530_79260C.1
atggactccccagcgacccccacggagttctcgccgcttctcagtctggtgccccgtaatgaatcatgctatacaaaagaggacgacgacgcgaactcaccggtgcaaagaacaacgacgaacgacgacaaacgaaggccggcgacgaggtccgacggcagctcggctcgggtcaacaacgacgacggcgctccggcggtattcggcggctgcgaaggggcggccggggttcctctcctccgtgcgcacccgacggcggcgacggacggcaacagcgacggctaccgcggcggcgcgacgtggctggacggtcgccggcaacggcggcggctagggcaacgtggcggcggcgctacgggcgacgagggggcttgggacttggggcaaacggaagaggacgactag

SEQ ID NO: 79554 - DNA, 366 bp, Oryza sativa
  Clone ID: PAT_MRT4530_79261C.1
atgggccgtctggcgatcgccggcctgatgggccggaaaggcttcctcggccctcgcgagggcgaacttgtcaaggcgaagtcatcctccttcggcagacggtcttcgccttgcacccttcgcctgagacgcctcggacctggcgctactcttcgccttgcgcagttcttgctccatagccttcgccatgggtttcggcaggacctcaacaaggaggttgtcgtggacggcgatgataatcacctccatcagaacgcaacccgggactctcatcctcggcatcatactcatgatgttcaggtggtggacgtcgaccctgtctgtcatgtgcttgacgtggcggtggcagacgatcgactagcatag

SEQ ID NO: 79555 - DNA, 491 bp, Oryza sativa
  unsure (1)..(491): unsure at all n locations
  Clone ID: PAT_MRT4530_79262C.1
cgaaactatggcgaacgcggggctgcgcgcgtaccgggaggtgctgcggctggtgcggcggctgccggcggacgcgcggccgtactacgccaagtacgcccgcgagaacttcgtcaactaccgcgacctctccgctgacgacgacctcgccgccctcctccgccgcgcctacgcccactcctcctgggtcctctccaagtactcgatcgacgcggatgctgcggcggggcggctcaaggaggtgtgcggcgccgagggcggagcgtgagcacgcgtgcgcgcgaggtgttcgacgaaatgcttcgccgcgtcatgccagcgtcagttagctctaccccgttgtttttacttgccttgctagcggttggcgggcatttggacttcttgttttttgcaacagtttagttgatagttgataaaaatgtgtggggaataagttgaatactctgcttctgcacancgtattttaatttgaaaaaaaaaaaaaaaaa

SEQ ID NO: 79556 - DNA, 322 bp, Oryza sativa
  Clone ID: PAT_MRT4530_79263C.1
ctcctccatatcttcctttagataaggctatagtgtaaagcctggatgcaattccacacctttcactgacccatttcttcacagatgcagatgtaggcccaaaaaaacacaagggatgccagggagagcagctgtcaaaaaaagggcagccaaggaaaagataactagtaaaggtagagatagagagggagggaggcaaaatagaacacatgagcagttgtaagctacttcacttcggcactaattgctcttgtgcacactagaggttccggttccctcaaagggccatatgcttgacttcttcgccacccttgggggcacc

SEQ ID NO: 79557 - DNA, 150 bp, Oryza sativa
  Clone ID: PAT_MRT4530_79264C.1
atggagccaaaggggctgcaacaggttggtggtggccacggctcaacggccgcagcaagtggcggcgcgacgggtgctgcaccggcgcatggattattggttgatggtgtactagtgggccttttggccactattgctttagtgggctag

SEQ ID NO: 79558 - DNA, 468 bp, Oryza sativa
  Clone ID: PAT_MRT4530_79265C.1
atgccgtccacaattcgtcgctgccgcccgtcacctgcgggccgcggccatatagccgcgcaatcccccatccctatattcccgtcgcgctgcctcgccatctccagatcaccacgaccattcctccagatcagagcgaagagctgctccccatcctcggctcctccgttgggatcgagaagctatgcggtcagcctccaaccaagcaccgccagagaggacagacctggggccgaggtggggagaagaggagcgcatcgccggttggcccgtccgtcgctgccccgggctcccacctcccgctttcgtgccgactgccgctactcttccggattggcagagcccaagcaggaggcatcgacaaaggtgatgaaggtgatgaaggcttcatatgagggcaccttcttgcagcaggaattgctcaaatcaggtaaatcaatccgtggatttggttcaggtaatcgatga

SEQ ID NO: 79559 - DNA, 2203 bp, Oryza sativa
  Clone ID: PAT_MRT4530_79266C.1
catccctttctgcccctcgtcttctccccctccctggccggcctgtctagtacaaaacaatggggactcggctcttggcgctcgcgccatggctgctgctgctcctcctgcagctcgccggcgcgtcccatgtcgtccaccggagcctcgaggccgagcaggcgccgagctcggtgccggcctccattgtcagccccctgctcaggacaggataccacttccagcccccgatgaactggatcaacgatccgaacgggccactgtattacaagggatggtaccacctattctaccagtacaaccccaagggagctgtgtggggcaatatcgtgtgggctcactcggtatcacaggacctcatcaactggatagcccttgagccggcaatcaagcccgacatcccctccgaccagtacggttgttggtctggctctgccaccatccttcccgatggcacgccggcgatcctctacactgggatcgaccgccccaacatcaactaccaggtgcagaatatcgcatttcccaagaatgcgtcagacccgctccttcgtgagtgggtcaagccggcctacaacccggtggccacgccggagcctggtatgaacgcaacgcaattccgcgatccgacaacggcctggtacgccgacggtcattggcggatgctcgttggtggcctgaagggggctcgcctcggccttgcctacctctaccggagccgggacttcaagacatgggttcgggccaagcacccactccattcggcgctcactgggatgtgggagtgcccagacttctttccgttgcaagcaccaggtctccaggctggcctcgacacatctgtgccgagcagcaagtacgtgctcaagaacagcctcgatctcacccgttatgactactacacggtgggcatctacaacaaggtgacggagcggtatgtgccggacaaccctgctggcgactaccaccggctccgctatgactacggcaacttctacgcatcaaagaccttcttcgacccggtgaagcaccgccgcatcctgcttgggtgggctaacgagtccgacagcgtcacctacgacaaggcgaagggctgggccggcatccatgcgatcccaagaaaggtatggctggacccgagcgggaagcagcttctgcagtggccaatcgaggagctggagacgctgaggggcaaatcggtcagcgtctttgacaaggtggtgaagcccggggaacatttccaagtcacgggcctcggaacctaccaggctgacgtggaggtgagcttggaggtgtccgggctggagaaggcggaggcgttggacccggcgttcggcgacgacgcggagaggctgtgcggcgcgaagggcgcggacgtgaggggcggcgtggtgttcgggctgtgggtgctggcctccgccggcctggaggagaaaaccgccgtcttcttccgcgtcttcaagccggccgggcacggcgccaagcccgtcgtcctcatgtgcaccgaccctaccaagtcttctcttagcccggatctctacaagccaacttttgccgggttcgtcgacaccgacatctcgtccgggaagatctccttgagaagcttgattgaccgttcggtggttgagagcttcggcgccgggggcaagacctgcatcctgtcgagagtttacccgtcgatggcgataggtgacaaggcccatctttacgtcttcaacaatggggaggcggatattaagatttcacatctgaaagcgtgggaaatgaagaagccgcttatgaatggcgcctaattaatttgccgcggatatatatgatggcgactttaattaattgctattattaaatcatcactcgccatctgcgatataccggccagatcgtccctgacatcgatctcctgttcttggccgatgttgcacgctgcacgatatttgattgcttgttgctgaggatgattggagtttgtattcgtgtctccagatatcgaaagaccagggtaattttacactcttcttgtacaattaattgattgtatcacgagttgtttgtaaacaattgtttgtatcacgagttgtttgcaaacatttgtttgtaccacgatcgagttgtgtgacaaataaattaagatgctgattatttcatcatgttacagataataaagaggttttccgtgatttacttcaaaaaaaaaaaaaaaaaa

SEQ ID NO: 79560 - DNA, 5994 bp, Oryza sativa
  Clone ID: PAT_MRT4530_79267C.1
atggctacaggcgtcggtagtggaaggctggcacggaggcgtggctctactagcgatggcgagaatcgttttgtggtcggctgtagcaggaagccgacaaaggatgcggtgtggctagctgcagtgggtgtggagactggagactacagcagatggaggaggggggctggccagtggcagcgagcgctggtcacttgcatcgggctgaaggagctccttcctggctatggccgattacttcaggtcaccgagagctcttttggtgagatgaccgcattggtggttggggaagaggacattccagcaacgaggcttcgtgggggttgcaccttggttaatcgtgctggttctggttggatctggcctgatgcttttcgacatcgggcaggatggaggcctatcatgggacaatggaatcctaatccgaggaggagggcggatatgaagtttggtagaattacgcctgttgtcaaattctggtacaaggaagggataaaatcaaaaatatctctcgggtcacagatatctagtgcaggtttcaatctagggttcggccatctagcccttgtgcttaaggtcatggcggctgccgagggtgggggtgatcaagggactatcaatgcgatagttgcccacccgaagccttccggtgcgtcgtcgttgcccccagggagcaggttggaatctgaactccaagttgtactagttcggaatcaaagcgtggatgggattcatgatcaggcaacaggttcaagagtgctgccatcgtctggaaatcatgatggtgggttggcaagtaataacctgagcagtcaaggccctacagttttcactgaaggagaggttgtcgatgaggaggaggatgcggttgaaattgaaatcgaagagaacgaagttcagaaggccggtcaatggacgatcctagcgaggttctactcgctcaagtttcctaatcagtcggctctgtttgaggatatgagaagagcatggcgtttgcgggcggagatgagttacaagtccctaaaggataacctcttcattgtgtcttttaatgcagaaggggactataatttcgtgctgcaaggaggtccatggttgcacagaggagatgctttattggtggcggagtttaatggcttgttaaacccttccatggtgaacttggatacagtccctatttgggtcaggatctatgaccttcccctagttatgatgaacagagcaagaggtgaactctatggcagtaagatgggcaaagttcgcgaagtggatgtccaggaggatggatgcaataagcatgatttcttccgtatacgggtggatctcccagtcaatcgccccctaagaagaatgctagctattaagataaaggtgcaaggcaaagaggagattcgcagatttcaccttcgatatgaaagagtcccacacttttgtttcttctgtgggtttatcggacactcagataaagaatgcgaaaagagactgacaaatgagaatgagcctttagtattttctgctgaactccgttgttcgcccttaaaaccctttgagagaaaagtgggtaaagttaaagcagttcattctcaaggtgttcagagaaaattgtctttcaggggcccaggaagtgtgagttcttcgtcagcgggtattagacaggatgctaagagatatgaagatcaacccacaagggtggatgcttttgatggttttgatattagagaaggaaaaggtgaagactcaatagatagtcaacttgctgacctgacaaatatgctgcacgtctcggaggtgtcaagccttggacagaagaagggcaaggatttggttagtaaggaaaccagctcaataccttcaatggagatgatcccagcaattagagacctgaatgtacatcaagtttcctttggagatggctctactgaagaatttggaagcccaacaaagaggaaagctttgccgacaacaaagagctcacacattgtccagcaggctgttttggagtatggccagagaggagcagaggaaacggcaagctcaacacgggcaatgaagaggctcaagaagggagtggaggcaaacactagcgtggaagacatggaagcaaccagcccaggggctgctgaggaaccacagtggcatgttacttttgtgtatggtgaaccccgtgttgagaatagacatcgaatgtggtcgttgctgagaacaatccaccaatcttcgtccttgccctgggccgtcattggtgattttaatgaaactatgtggcagtttgaacacttctcaagaaccccacggggtgaaccccaaatgcaggatttccgtgatgtcctgcaagattgtgaattacatgatctgggatttaaaggtgtaccacacacttatgataataagagggagggatggaggaatgttaaagttaggcttgatcgagtagtggcagatgataaatggagagatatatactctaccgctcaggttgtgcatcttgtctccccatgttctgatcactgcccaattttgctgaacctggtagtgaaagatccccaccaacttcgtcagaaatgcctccattatgagattgtgtgggagagggaaccggaagctacccaggtaattgaggaagcctgggtagttgtgggagaaaaggctgatctcggagacatcaacaaagccctggcaaaggtcatgacagcgctgcgatcttggagcagagccaaagtgaaaaatgtaggaagagaactggagaaggctcggaaaaaattggcggaacttatagaatcaaacgccgacagaacggtaattcgcaatgcgacagaccatatgaacgagctgttgtacagagaggaaatgctgtggctgcagcggtccagagttaattggctaaaggatggggatcgaaatacgaaattttttcatagccgggcagtatggagagcaaagaagaataaaatctccaaactacgggatgcaaatggaactgttcacagttcgacaatgaagttggagagcatggcaactgaatattttcaggatgtgtacactgctgatacaaatcttaatcctgaaaccgttactcgtcttatccaggaaaaggttacagatatcatgaatgagaagctttgtgaggattttacggaggatgaaatttctcaggcaattttccaaattgggcccctgaaatcacctggtccagatggctttccagccaggttctatcagcgtaactggggcacaattaaagctgatataatcggtgcagttcgccgtttcttccaaactggactgatgcctaaaggggtcaatgatacggccattgttcttatccctaagaaggaacaaccagtagatttgcgagactttcggccgataagcttatgtaatgttgtctacaaagtggtatccaaatgcctggttaacagattgagaccgatcctagatgatcttgtttctgtggaacaaagtgcctttgtgcagggaagaatgataactgacaacgctctcttagcctttgaatgtttccatgctatgcaaaagaacaagaaggcaaaccacgcagcttgtgcatataaactggatctatcaaaagcctacgacagggtggattggcgtttcttggagatggcaatgaataagttgggttttgctcgccgatgggttaactggattatgaagtgtgttacctcggtgagatacatggtaaaattcaatggaaccctacttcaatcattcgctccaactagaggtttaaggcaaggagatcctctctcgcccttcctacttttgttcgtggcagatggactgtcattgctgctgaaggaaaaggtggcccagaattctttgaccccttttaaagtctacagagctgcccctggaatttcccacttactctttgctgatgataccctcttattgtttaaagcacaccaaagagaggcggaagtggtaaaagaagtgctctcatcctatgccatgggcactggacaattaattaacccagctaaatgttctatcctcatgggaggagcctcgaccccggctgtcagtgaggctatatcagaaattttacaagtggaaagagacaggtttgaagatagatatctgggatttcctaccccggagggacggatgcacaaaggacgttttcagagtctgcaagctaagatttggaaaagagtgatccaatggggtgagaaccatctctccacgggtggaaaagaagtgttgatcaaggctgtgattcaagccatcccagtatatgtgatggggatttttaaattacctgaatctgttattgatgatctaacgaaactaacaaagaacttttggtgggattccgtgaacggccagagaaaaacgcattggaaagcctgggattcgttaacgaaaccaaaaagcttgggtggccttggtttcagagactatcggcttttcaaccaggcacttctggcccggcaagcatggaggttgataacatacccagatagcctgtgtgctagagttcttaaagcaaaatatttcccccatggttccctgatagacacttcctttgggagtaactcgtccccagcatggagaagcattgagtatggcctagatttgttaaaaaagggcattatttggagagtgggtaatggaaattcaattcggatctggcgggatccatggctgccaagagatcactcaagaagaccaatcactgggaaagcaaactgcagactaaagtgggtgtctgacctaattacagaagatggatcctgggatgtgccgaaaatccatcagtatttccataatttggatgcagaggttatactgaacatctgcatttcttcaagatcggaggaagacttcattgcctggcaccctgataagaacggtatgttctcagttcgaagcgcttacagattggcagctcagttagtgaatatagaagaaagttctagctctgggacaaataatattaacaaagcatgggagatgatttggaaatgcaaggttcctcaaaaggtcaaaatctttgcttggagggtggcctccaactgcctggcgaccatggtaaataaaaagaagaggaaattggaacaatctgatatgtgccaaatctgcgacagggaaaatgaagacgatgctcatgctctctgcaggtgcattcaagctagccagctttggtcatgtatgcataaatcgggaagtgtttcagtagatataaaggcctctgttttaggaaggttttggctgtttgattgccttgaaaaaattccagaatatgaacaggccatgttcttgatgactctgtggcgcaactggtacgtgaggaatgagctaatacatggcaagtcagccccgccgacggagacgtcacagagatttatacagagctatgtcgatttactgttccagatccgacaagctcctcaggctgacctggtaaaaggaaagcatgtggtgaggactgtacctctgaaaggagggcctaaatatcgagtgcttaacaatcaccaaccatgctgggagagaccaaaagatggctggatgaaattaaatgtggatggatcctttgacgctagctccggtaaggggggtcttggaatgatcctcaggaatagcgctggtgatatcatcttcacttcttgcaaaccccttgaaagatgcaacaacccgctagaatcagagctgcgtgcctgtgttgaagggcttaagctggcgatccattggactttgcttccgattcaggtggaaacagattgtgcctcagtggtccagcttctgcagggtaccggtagagatttttctgttctagccaacatcattcatgaagcgaggcatctgctggtgggtgaaagggtgatttctattaagaaaatatgtcgtagccagaattgcattagccatcatcttgcaaatacggctagagctgattttcttgctggattttggttgggagagagttgtaatcttatctcacatttattaagcgagaactttatgagtgagtaa

SEQ ID NO: 79561 - DNA, 400 bp, Oryza sativa
  Clone ID: PAT_MRT4530_79268C.1
attcatttgaccaaatttgctttatcaaaaaaaagaaaaaaaagaaaaaaaaaaaacaggggagagtgcggtcgctatcaaagtgccatattttctatcacacacactcgcaaaaataactattctgtggggggacctatatttattacactggtcgtggtttgaccactgtggtcatgaaaatcccataggtgctcccaaatcattctcctttcatgcattccccctcaaggctggttgagataacactagatgtcccagcgattcgcccttccatacatttgacatgcctgaattggacattagactcccactgcgtcgccgaatctaatgcctgttgttgggtgacaactctcttagtgcccggttctctcgctatgatgcgtttcaccaaatgttt

SEQ ID NO: 79562 - DNA, 570 bp, Oryza sativa
  Clone ID: PAT_MRT4530_7926C.1
atggtcatgagctccgacgaggcgaacctcccccggtacatctcgagcagcgacagcgtcaccgcgaacagcagcagcgacagcgccatcgacctcccccccgtgctcgccatctgcaaccacacaccaccacacaccgccggatccaccatggtcaaaactcaagaaaccaaaatcaagaacaagaaacctcacgtcacgcacacaccgaccgagcacgaagccgcctcaccttggatcggtggaccctggggagatctgaggggagcgggaggggtcaagggcagtagggttttgcgcctcacgaaggtgatgaatttgccccgcgacgcgatgcgcccgcgagatctacccgccgaggtgaaggcgaggctgcagacgagaccaacgctgggtggaagatggtcaggtcagacggagtggaggagggcgtggcgtgggcccatgaagggcccactgtctgatcggtggggggagtgtgggcttgacgagtccatcggaaacgtccgagtggcccaggtcgaattgatgagggccatttgggaagttgggctggttcttgtaaaatga

SEQ ID NO: 79563 - DNA, 1494 bp, Oryza sativa
  Clone ID: PAT_MRT4530_79270C.1
atggaggcggtggcggaggcggtggcggcggcggtggcggccggggtggagccgttcccggcggtggacaagtgcgacgcgtcggggcgggaggcgcacgcggtggcggccgacctggaggggacgctgctccggtcgcggagcgcgttcccgtactacgcgctcgtggcgttcgagtgtggcggcgtgccgcggctggcgctgctgctgctgctggccccgctggcggcggcgctccgggcggcggtgtcggaggcggcggccggtgcgggtgctggtgttcgcggcgacggccggggcgcgggtgcgggagatcgagtccgcggcgcgcgccgtgctgccgagccgttcctcgtcgactgcctcggcgccgacgccgtcgcgggcaccgagctcgccacgtggcgcggccgcgccacgggcctcgtcgacgaccgccgcggcggcgtcctcgtcggccgccgcaaggcgcaggcgctcctcgacatgttcgccggcggcgacgtcccggacgtcggcctcggcgaccgccgctccgactacccgttcatgagcctctgcaaggaagggtacatcgtgccgcgctcgccggcggtggaggcggtgcccatggacaagctgccgcggccggtgatcttccacgacggccgcctcgcgcggcggccgactccgctggcggcgctgctcgccgtgctctggttccccgtggggttcgcgctggcgtgcgtccgcatcgcggcgggcgcgctgctgccgatgccgtgggtgtactacgcgttctgggcgctgggcgtgcgcgtcgtggtgcgcggcgcgccgccgccgcgcgcggagcgcgccgcggggcgccgcggggtgctcttcgcctgctcccaccgtacgctgctcgacccgatcttcctctcggcggcgctcggccgccccgtggccgccgtcacctactcgctgtcgcggctgtcggagttcctgtcgccgatcaggacggtgcggctgacgcgggaccgcgccgccgacgccgccatgatcggcgagctcctcgacgagggcgacctggcgatctgccccgaggggacgacgtgccgggagccgttcctgctgcggttctcggcgctgttcgcggagctcaccgacgaggtggtgccggtggcgatggagagccggatgggcatgttccacggcacgacggcgagggggtggaaggggatggaccccttctacttcttcatgaaccccagcccggcgtacgtcgtcacgttcctcggcaagctgccgccggagcacacctgcggcgccggcggcaggtccagccacgaggtggccaactacatccagaggctcatcgccgccacgctctcctacgagtgcaccagcctcaccaggaaggacaagtacagggcgctcgccggcaacgacggcgtcgtcgacaacgccaccggcaagctgccatcgccggcgacggcgacggcgaacaacagcaaggacaaagcttgctag

SEQ ID NO: 79564 - DNA, 1809 bp, Oryza sativa
  Clone ID: PAT_MRT4530_79271C.1
atggaggcggtggcggaggcggtggcggcggcggtggcggccggggtggagccgttcccggcggtggacaagtgcgacgcgtcggggcgggaggcgcacgcggtggcggccgacctggaggggacgctgctccggtcgcggagcgcgttcccgtactacgcgctcgtggcgttcgagtgtggcggcgtgccgcggctggcgctgctgctgctgctggccccgctggcggcggcgctccgggcggcggtgtcggaggcggcggcggtgcgggtgctggtgttcgcggcgacggccggggcgcgggtgcgggagatcgagtccgcggcgcgcgccgtgctgccgaggttctacgccgccgacgtgcacccgggcgcgtggcgcgtgttcgcggcgtgcgcgcgccgccgcgtcgtgctcacggccacgccccgcgtcatggcggagccgttcctcgtcgactgcctcggcgccgacgccgtcgcgggcaccgagctcgccacgtggcgcggccgcgccacgggcctcgtcgacgaccgccgcggcggcgtcctcgtcggccgccgcaaggcgcaggcgctcctcgacatgttcgccggcggcgacgtcccggacgtcggcctcggcgaccgccgctccgactacccgttcatgagcctctgcaaggaagggtacatcgtgccgcgctcgccggcggtggaggcggtgcccatggacaagctgccgcggccggtgatcttccacgacggccgcctcgcgcggcggccgactccgctggcggcgctgctcgccgtgctctggttccccgtggggttcgcgctggcgtgcgtccgcatcgcggcgggcgcgctgctgccgatgccgtgggtgtactacgcgttctgggcgctgggcgtgcgcgtcgtggtgcgcggcgcgccgccgccgcgcgcggagcgcgccgcggggcgccgcggggtgctcttcgcctgctcccaccgtacgctgctcgacccgatcttcctctcggcggcgctcggccgccccgtggccgccgtcacctactcgctgtcgcggctgtcggagttcctgtcgccgatcaggacggtgcggctgacgcgggaccgcgccgccgacgccgccatgatcggcgagctcctcgacgagggcgacctggcgatctgccccgaggggacgacgtgccgggagccgttcctgctgcggttctcggcgctgttcgcggagctcaccgacgaggtggtgccggtggcgatggagagccggatgggcatgttccacggcacgacggcgagggggtggaaggggatggaccccttctacttcttcatgaaccccagcccggcgtacgtcgtcacgttcctcggcaagctgccgccggagcacacctgcggcgccggcggcaggtccagccacgaggtggccaactacatccagaggctcatcgccgccacgctctcctacgagtgcaccagcctcaccaggaaggacaagtacagggcgctcgccggcaacgacggcgtcgtcgacaacgccaccggcaagctgccatcgccggcgacggcgacggcgaacaacagcaaggacaaagcttgctaggagaagggaaaaaaaagggggaagtggatgttctagtagtgtaaaactataatgttattaatttttacctgtgtcgatttgcatggggcggtaaatttcctctttcttttggttatttgtactgtgtatgcacttgcaatgtaccaacggggagttgaatgcaatttgcataagtaaaagcaatgggccaggacaagcactcgaggcgggggagtc

SEQ ID NO: 79565 - DNA, 291 bp, Oryza sativa
  Clone ID: PAT_MRT4530_79272C.1
ctagagcaacaagaagaagccaagaatatttgcgccatggagggtggtaattccagcaagggcgccatggagggtggtcaccgctgccgccgcccaaacgtcgacgacgatgaccagatcgaggagggagagatctgctacgactgccacgtctcgggctccgagaccgacgacgacgagcaccacagacgcgccgtgctcccttcccgcgacaatggcgatggctgcgcggagcacaaacggggccggctcgacaatgctgctaccgcgcccgcaccctctgccgggccg

SEQ ID NO: 79566 - DNA, 456 bp, Oryza sativa
  Clone ID: PAT_MRT4530_79273C.1
ctttctagctctaagtatactcatgaagttgatggtattgatacagatgccaccattaagtgaagttgatgaaaagtggtgcaccacaataagttcctgatgtagaagagggcatgaaaagatggatgaggaagagattcatattgcggttgggaagaacttcagaaaggagaaggctaacatcttatgggctgctgcaaggttcccaagggccactatagttcttgttcatgttcactggccttccaagtggatgcccttcatgggtggcaaagttctatataagtttgcagatgaaaaggagaaggagatgcatcgagccaaagaaacggatgcgatggtcaagatgttgtcacaatacaaaaacctttgtggatcaagaaaggctagggcacattacctttcacacgatgatgttcttgctggtgttgtgaatttgataaagaagcttaaaat

SEQ ID NO: 79567 - DNA, 896 bp, Oryza sativa
  unsure (1)..(896): unsure at all n locations
  Clone ID: PAT_MRT4530_79274C.1
ttatatatatatatatatatatatatatataatatataggacaccaanaaacaagataaagatnacgacataatatacatattacgatagcctaatacaantacanancatataacgaanacccaagnaacccccagcaccaccaaaaaaagatttatacacccaatancatatgnnagagccaatanaattaataatatagaataacacacataatnacatacataaacaatataagataccaattcnacatcatanaagaagcacatcagaataaacatccacaganaaccatccaaaataaaataagaaacgacccaaccaccaagaaagagaagaacagaagaaacccaacacagaaggccacccaaattctacaatatagaccaccagatacacaatcaaaancatcacacntaaatacaaagagatagccatcnccacgatagantagacanactatagcatagcatagcataatcagaaagaggcatagagacannactcgcactannacaaaaacataatatataacaccacanacacatatacaccaccaaattcacaatagaacatagaatnaaagccaccacaanagccaatataatataaaacaaaacacccatatagaaacacaccacacaagcccagagagcaccaacaaagccaagccacacaagatacaacaatataacaaatacaccataggccaacccacaaagaccacaaccacaaagaacagaagagcagagacnagacanagattatagagccaccataatacaatacattngtacataagagaagccacccacataatacaacaaaaaagcccaaattnccataagcccacacaatnataagcccccacnnantantanaataaggatacatta

SEQ ID NO: 79568 - DNA, 315 bp, Oryza sativa
  unsure (1)..(315): unsure at all n locations
  Clone ID: PAT_MRT4530_79275C.1
ccccgcgtccgcccagcgtccgccccgcgtccgtttctcctanactttatctcttattagttattttaaatttaatccagttctctttttcgctaaattgtatttttccatgggttattttttccttttttaattaatgcgggaggccgtgagagttaatacagggggtgtgttttatattactttattaaaagattgatagtgtctcttaatgtaaaatccaatcattaccttttcaaagtaatatttctatgattgtaatagtttggaaaaaataaataaaaaaaataaaaaaaaattgagaataagagatat

SEQ ID NO: 79569 - DNA, 306 bp, Oryza sativa
  Clone ID: PAT_MRT4530_79276C.1
aacacactgaaaagggggtgggatattttacaaggaagcactggtgttacaagggaatttaacaaaaaaaaggtggacatgaatacaaaaaaaggatcttattttgggaaaaattttttggatcccttttttttaggaaggggaaaccattgattttaagggggccgcagggtcctccaggttaaccacctgtttttgccccattggaggagaacaggcccccaaaaagggggaattgaaggatgggggtggccaaaaggggggagaaacccccctgggggcactgaactgaacatttccattggg

SEQ ID NO: 79570 - DNA, 350 bp, Oryza sativa
  Clone ID: PAT_MRT4530_79277C.1
cccacgcgtccgcccacgcgtccgcggacgcgtgggtcaccatgggtttttgccagttatcaaccaagaacggcgtcttcttcctgactcttggcggccatggcggcggcgagaactaccgcaccgagcagttcatagcagagctggagcagaagctcaaggaggtccgcggccatgccaggccgtcgagcaaaggcctcgtcaccaccttcgcggccggcgagggcggctcgttctgcgacgacgtcgacaacggcggcacgtctgcggcggcgacaggcgagctggctgcgtaccgcacggtcgaagcggtccgcgcgctgttcgacatgccggttccgaacggcggc

SEQ ID NO: 79571 - DNA, 198 bp, Oryza sativa
  Clone ID: PAT_MRT4530_79278C.1
atggtggagtcaactgcagcagatggaaagaaagtatggggcagggaagtcgactacggtggcgacggcaggggatcaactgcagcggcaggctggcagtacctagagttcgctccaagtgcaggctctgtggagtttgccagcgaacgagcagtttgtcatccacacagagggtatttcggtacaagagttatctga

SEQ ID NO: 79572 - DNA, 254 bp, Oryza sativa
  Clone ID: PAT_MRT4530_79279C.1
gggcaaaaaatattttccacaccaggttttaattcaaacagtttgcccctgggactttcaacccccaatttagtttatcgaacaatgttaaattaacccaactaattagacctccaaggtgacaatgttcaaaagttgctggggatacattacataaccctgggaaaatagatatttttgggctaactagagcaaaactggaagacctcttccttggggggggaacacttgcttggcacaaaaacattgttttt

SEQ ID NO: 79573 - DNA, 354 bp, Oryza sativa
  Clone ID: PAT_MRT4530_7927C.1
cctcctcctccacccgtcaccgtcgtcgtcatcaccgcgcgcgcagcgaatgccgtcgacagtaccggctcaggcgcgatctctgcttcccgcgcgcgcacagctggagacgaggtgtgttcccgcgccgatgccgttctcggactgacactcacaggcggtccttcacgggctcacgcgaacaacaatctcctcaggtcactcgtgcccgcgttcccatcccctacacgcccatgctgcatctacagaaataatcaaccagtaagctacctgctatagagctatcgatctatcatgtatatactaaatatgttaaatatgttaatacccataaatgatgtgtatgatcccaag

SEQ ID NO: 79574 - DNA, 2302 bp, Oryza sativa
  unsure (1)..(2302): unsure at all n locations
  Clone ID: PAT_MRT4530_79280C.1
agcaggtaagattataagatgtgacatgttgtaccactgtcagttttttttttttttttttttttgagaaagaacaagttcataagattatgtaatcaactatagccacccttagatgccgcaattggttccaaacaaatagaattacatataagagaccaaaaggtttgatccagaggcaggggaacaacaactgatactggacaaccccaaggctatgagatcacgatacagaacaaaattcacagcaactgtaaggatgaacaaagaataactcagtaagtggggtagtagtacccagtatttgcagtgtaagccattggcatggggttcgtgttatatgctgcaggcatcccataaggcatggctgggttgggggcgaagccattgttgtaagcccgatcgagcttggccaagcttgactggccctgcatgccatccctctggtactgctgccacatcatctgttcctgagtcaagaactgctgcttcttctccatctctgccatctgaacataggacggtggtgggaagctaagggacgccgcaaacgggtctccaccaacattctgcattgaaccatctggtgctggcagagccagcacttgtgttttctgtccagccggaggtagagcaacgctgctggcactcccagttgtcacttgtgcattgacatgctggcgcacggcaccctgatcatacataccattcagtagcaatggatccataccacctgtcattgtggccttctgcttggacagattgctcgctgtctccacaagggcaagttcccagtcagccttcccaggctcagctgcaggattctgccatgcagaagtcacctcattgccaccatttgaggggaaggcctcccatgagccattgcttccaccagctgcaggtggcccttggaagagggccagagcaagccggttaccttgctcatctgcagtcacagtttcttctctaagatccactaaatcaccctggggttgcggtgggggctctggctttacttcctcctccaccttctcaggttcaggctccttgtagtcttctggtgctggcagtgccttgatttcattcatatctggctcaggctcttcctcctttacaggttcaggctcaggctcccgaggtgggctcttgggccgctttgctcggtccctcataaattcctccaatgtctccagcaacttatcggtaacacgctgcacctctgggtactctgatgacctagcgaccccagtttccttacaccagccatagaatgcacaaagctcgtcaatctgctttgcggcgctggcatatgcctcaaatgccttcacgcactcggcatactccatgtcaaagaacctatccagcagcactgcgagcacctcacatatatcagcatagagctggaagctctctctcacaatctgatacagcgcgaccagcaccatcctgctgtgcttggcaccacctgtggggcggcaagcaaggaacctgtcgagcagctgttgcaggtggtgcatacgggcaaggacccgttctggcttcatgtctctcactggggtcggcggcttcttgtcatcagtgttgttgttgccgttcctctcacggtaatcatcataaccaccatatccatacccatttccgtttccagggggtgaggagtatgagggtgaccggcgaccatatgggtcaggtgatccccagcggtcacgcggtgacgggccatttgcactggaactggcgttggagccggagccttgcttgcgctcatggaggaagaactcaaggcgctggtcgaggtacagcgcataggtacggacgaaggcagagtggtcccatgaaccggagtgagcctcgtcgcggaagtcggagaggttgaggaggcgagtgcccctgcgcgtggcgtgcaggagctcgcggtggaaggaagggtcgccgtcggcgagaaggcggtgcacgagcatgagcgacttgagcgcgacgacgtagtcgcgggtgcgggacagcctccgggagcatcccgcgacggcggcggcgacgtgggcgcgggagccggaggtgaggtggaggatctctcggatgtgtcgctcctcggccggctcgtcgtcgtggctggtagccttgacgatgagcacgtcgagctccggcgcgatgttgctggtgaccttggccagaccgatgctggtctggtccttcaccgcccccagcgccttccggatcgtgctcgacgacatctcgccgnngcccgcgcctcctcctcctcctcctcctcctcctccncctcaccaacaaaccaccaanaacc

SEQ ID NO: 79575 - DNA, 648 bp, Oryza sativa
  Clone ID: PAT_MRT4530_79281C.1
tcaggaattccaacctcgggtgctgacaatcttagtcctccgacgattgagattggtacgatgtagtggcgacaacggccggaaccacaccaacatcctagtcacagtgtcgggctgcaccttgaacatgttcttccgtacgcgctcctgcttcggcacaacatgcctccacccgccggcaaggtgtcgctccagcctgcatgcatccatgtcgtcgctgccgctgctccgcaccatcatgcactccctcagcttgtcaatgtcccgtaccaagctgctcaatggtgtccgagttggatctcctgagccaaagttggtgcaaatgtagttgtcggagtagcttgaagtcatcttggcaaaaccttgagcaccaagttcccctccctggcgcgtcactgtcgacgggggatacccgtagaccgtattctgagggtactggggtacgttggtatgatgatccctcagggggtatgtatttgtaccgaggatcatcttggtcaccaagtagaacttggagacatcgaaccccatatgatacaatacagtccttcccttctcagagtaggatattgatacggtcccattcccgcttgtggtaggcacggtaagtcttccagggtttcccgtgaaccggtccttaattgccat

SEQ ID NO: 79576 - DNA, 275 bp, Oryza sativa
  Clone ID: PAT_MRT4530_79282C.1
gagtaaaaaattctgaattctgaaatatcacaaaagtgttgagaggaactgcaacgatcattgcatgcgtccaaataatactacaattattgtctccggatatttattgatcccttaatggcgatagatcgtgtccgtccgtccgatcagtggtagccgagcggcgcggccacctccctcagcgcgtgaccctggtaatgtatgtcggaggcgtagtggttgacgtcgcggtggtgggcctcgtcggtgcggacgaccatgacgacttccctgag

SEQ ID NO: 79577 - DNA, 210 bp, Oryza sativa
  Clone ID: PAT_MRT4530_79283C.1
acaaaaaaaaaccggggttgacagcattattttaaaaaaaaccatttttcgacgggaaccaaaccacacaccaaggtttttcggtggttacttttaaaaaacttggttggaagcagcttttatttttgaacataccaaaccttggaaaggatcaaattttttttcaaacatttttttggggggcatagggcttggatgacccattttaat

SEQ ID NO: 79578 - DNA, 1449 bp, Oryza sativa
  Clone ID: PAT_MRT4530_79284C.1
atgcttcctcacgccaccgcccatcagcccacgcccagcccgcgcccgcgcctcctccccgtcgccgccgccgccctcctcctcgcctcctcctacctcgccctcacccgcctccccgccgccgcgccgctcgccgccctcgtcgcccctgctactgcacgcgtcgacggggacagggacagggacagctgcgcggggttctaccgcggggggtcgtcggggcggcgcgcggcgtcggcgtcggtggaggagttcggggccgtgggggacggggtcacgtccaacacggcggcgttccggcgcgcggtggcggcgctggaggcgagggcgggaggcggcggcgcgaggctggaggtgccgccggggaggtgggtcacggggagctttaacctcaccagccgcttcacgctcttcctgcaccacggtgcaatcatcctcggctcccaggatccggaagaatggcctctcatagccccattgccgtcgtatgggcgtgggcgggaaagattaggaccacgccacatcagcctcatccatggagagggcctggatgatgttgttattacgggtaacaatgggaccatagatggccaaggcaggatttggtgggacctatggtggaatcgaacgttgaaccacacaagaggccatcttattgagctagtggactcaaccaacatcatgatctccaatatcactctacgcaactccccgttttggacagtgcatcccgtctactgcagaaacgtggtgataaggaacttaactgtactagctcccttgaatgctccaaacactgatggcattgatccagattcgagttcagaagtttgtattgaagactgttacattgagagtggagatgatctggttgctgtcaagagtggctgggatcagtacggcatctcggtagggaaaccaagctcaaacatcatcatccagagggtttcaggcacaactccaacatgctcaggtgtgggatttgggagcgagatgtccggtggaatatcaaatgtcatcattcgcgacctgcacgtatggaattccgcgcaagcggtgaggataaaaaccgatgtaggacgaggtggctacataaccaacatcaccatagagaatgtcaggatggagaaggtcaaggtgcctataagattcagccgaggtgcggatgatcattcagatgacaagtatgaccgaagtgcgctgccaaagatcagtgatgtgcgcatcagagacgttgtcggtgtggatttacagcgcgcaccgatgctggaggcagtgcacggtgcggtgtatgaagggatttgcttcagaaacgttagcttgacagtgataaagcgtcaggatagatggcattgcgagtctgtgtatggagaggcacatgatgttcttccagcgccatgtgaagagtttaggagaaatggctcgtcatcttggtgtggccattcttga

SEQ ID NO: 79579 - DNA, 174 bp, Oryza sativa
  Clone ID: PAT_MRT4530_79286C.1
tggcgcacatccagcggccgcgcccaggcacgtggcggcgaccgggcgacggccggtgaccgtgtgccgatctgcggccgtttttttgttgatgcgctgactacgacgatctcagcgagcatatctattccccccgccgctgcgtacacaggattcacgacggccggccggtga

SEQ ID NO: 79580 - DNA, 279 bp, Oryza sativa
  Clone ID: PAT_MRT4530_79287C.1
atggctgttcacgttgtgcttctcgccgtgccggcggcggcggcggcgggcggagggttcctgcaggcgttcttgcagtactcgttcctggtgtggccgttcaacctcgtgctgccgctggcgcgccacctgccgcgcgtctgcgtcgcgctccgcggccgcggagttcctcgccggcgagatgcggatgttcctgagcgggcggcgcagggcgagcggaggtcgcgggaggagctcgtcgcctacaccatggttgccctcgtcgggatctcctactga

SEQ ID NO: 79581 - DNA, 117 bp, Oryza sativa
  Clone ID: PAT_MRT4530_79288C.1
atgtgccactgtacggggagctctgagaaagtagaagtgctttccttcacgctgagcaatatccccctcgcgaacctccacccgcggaccaagactccaaccgaagcacagacctga

SEQ ID NO: 79582 - DNA, 857 bp, Oryza sativa
  Clone ID: PAT_MRT4530_79289C.1
cccacgcgtccgcccacgcgtccgacccactccaagccatggccctttctgtagcgcgcagagcaccaccaccacgctgatcggcatcatggccgaggcagacggccggtagctaggccacgcgcacgccacgacggcccgcacatatgtaagcgcgcggcagtggtggaaactaaactggagaggctcggagtttggagatcgagatggctgttcacgttgtgcttctcgccgtgccggcggcggcggcggcgggcggagggttcctgcaggcgttcttgcagtactcgttcctggtgtggccgttcaacctcgtgctgccgctggcgcgccacctgccgcgcgtctgcgtcgcgctccgcggcgcggcggagttcctcgccggcgagatgcggatgttcctgagcgggcggcgcagggtgcagctgccgcagctgtctggctacgggcgctcgtcgtcgttgtcgccaggcgagcggaggtcgcgggaggagctcgtcgcctacaccatggttgccctcgtcgggatctcctactgatcatggcgctctcggcattgtcgggtgatcgaatgcgtcctctccgattggtttctcggaatcactattgtcactttgtcagtggggaagtgttcatcatagataggttagctttgctgctttctttattttgatctggcacataagaaacccttctgttctgttcttgctgcatttgtcagctgcggctccaagctagctcccccatgactctggatttttttttaaaaaaaagcttgatgaaccgatgtatattgaagaactacgagaaactggagtccgcatattttgattgagtttaattagcatttggtcgcc

SEQ ID NO: 79583 - DNA, 354 bp, Oryza sativa
  Clone ID: PAT_MRT4530_7928C.1
atggagtggaggccgaggcacgacgaggcactgctaagctggcggtgcaagcggagcggcgcggcagtggctagtgcggcggctagaggcggctggagctcgccggagagcggcggcgggagggaaggcgggatcgagcccgagagaggtagaaaccggccggcgacgtggagctcgacgtgggggtggcggcggcggttcggcgccgattccgtgaggagagtgggggaagtgggggaggaggaggtggggatcaagtccacgctcccgcgagacggggtggggcgcgggaggcgcggcgtcgtggggtggaaccggcggccatggcggttgcagccggccggatggaggtag

SEQ ID NO: 79584 - DNA, 191 bp, Oryza sativa
  Clone ID: PAT_MRT4530_79290C.1
cccaccccctatgataataaccaggttcaggtgagtgatggggaggggatgccgggaaccctggtgaacctgcgcaaaaatggatgtgctgttgacaaggaagtgcaaaatatgagtgtatgacaggtcatcaggcgcaacctgtaatacaaatgtatagcattcgaccagagtcaagaccatcggaaatc

SEQ ID NO: 79585 - DNA, 830 bp, Oryza sativa
  Clone ID: PAT_MRT4530_79291C.1
gcacgaggcacgcgcgcggcgagacggccgagacctcacctaccccagccgctcccgcccccccggcagcgccaccaccctccaatccgaatcgaatccgataagccaagcaagcgcagacgccgacgcaggagctcccccaccgccatggcttgcaggtcggccgtgtgctccccctccgccctcgcgccgccgcgccaccgcctcctctccctcggctgcgcgcgcaccgccgccccctcgggcggactcccgctccgcctccgccttcgcctccgcctccgctccagccccgcgccccgcggccacggcgccgacctcgtcgtccgcgcggcggccgcagagggggccgtggagctgcaggcgaaggtgaccagcaaatgcttcttcgacgtcgaggtcggcggggagcccgcggggaggatcgtcatcgggctcttcggggaagtcgtccccaagacggtggacaacttccgcgccctgtgcactggtgataagggctacgggtacaagggttgctccttccaccgaatcatcaaggacttcatgattcagggcggggacttccagaacaacaatggtactggtggtaggagtatctatggtgaatgttttgacgatgaaaattttacattaaagcacaccggtcctggtgtactaagcatggcaaacgctggccctgacacaaatggaagccaatttttcatttgtactgtgaagttcagtcacttcaaagaactaaatcaggtgttgaaccggtataagtccttaaagcaatgagtgaagaatcttgaatcacaagaaaccagcaggtccgatattcctaagca

SEQ ID NO: 79586 - DNA, 130 bp, Oryza sativa
  Clone ID: PAT_MRT4530_79292C.1
ataatcagaaatcagtactgaaggagtttcaaaggttctggcatttgcatcacaatttagaccaaacttatcagaatagagaaggtgcttatcagcctttttacaaacattcagggtgcagatcaccccc

SEQ ID NO: 79587 - DNA, 648 bp, Oryza sativa
  Clone ID: PAT_MRT4530_79293C.1
atggtgttgggcatcggcgaggccacgcactgcaagctcgccctcctagatgcaaccaagcgtgtcgttgaggttggtggcgaccttaccattgactatgacaagactcggcggagactggcatatccgtggcatacatcttggaggagcacacgacggacatggtggctgctgtcggccatgcctgtgaccgcaagaggattgcacgcccccatcatctctaggtatgcaagcaaagtaagagtgttagagatatacatttctcttatgcttattgttggtcttgtggataagacatacccaatgatcttggattgggattggcggggtattccgaataaggaagaagaagtagagttctacaaggactactcagatcgtatccatatttgtatccctagttctacgtggataaggggcactacaggaggaagaggatatccaagccatcatgttggtgtcaaggataggcccatggctataggcaggaccaccgtggtagctttcgagacacatagaggagggaaaattctcctgacattaggagaagcttttagcataaggaatcactcagaggagtttaaaggagaccgtggtagccatgatggcttcttgctgcaattgaagaaaaaggtaatctggctgtga

SEQ ID NO: 79588 - DNA, 207 bp, Oryza sativa
  Clone ID: PAT_MRT4530_79294C.1
tccacgcgtacgaccactcgtgcgaacactctcccgctacatatcttgttcacgaaagctcgcggggttaaaacaccaggccgcaagggaagaccgaccacggtatgggcaccggactttccgtcagccctatgaccagcttctgcgcgaagaagccgttcctcgcggccgccgtgcgcatcaaatcgtgacccacaccgagggccc

SEQ ID NO: 79589 - DNA, 489 bp, Oryza sativa
  Clone ID: PAT_MRT4530_79295C.1
atggctgcctctcttcccccggcccgccggtccagccgcttccccgtcctcgcctcgacgctgccgccgtgtttcctacggggggcgttcttccggccggtcacagtgcacgtcgcgtcgaccgggacggggggcatgtcgagccatcaggtcggcggcgtcgcctcacgtgacggggagcggcatgtcgggcctctcgcggagtcgcggtttggcgcgtcggcgggcgcgggtgggggcgtggccgcgtgggcgtccgtgctgggagcttgcgtcgcgctgcgctgcgctgcgcggtctgcgggttccgtggagccgtaccgtgcgcacggccgcacggcgcgtcgcggggctcgaaacgtggcgccggtggcaggagcgcgcatcggaatcggcgagttgcctcccagctccgtgcagctgcggtgctggcactcaccaagtggacgccggccacatcgcgtgcgtcgtcacccctccaggatctga

SEQ ID NO: 79590 - DNA, 1179 bp, Oryza sativa
  unsure (1)..(1179): unsure at all n locations
  Clone ID: PAT_MRT4530_79296C.1
atgtcatcaacatcatggcaatgtggcgctcatgtctccacatgccgcatctcaattaccttcccaaagctctttgcttccccgggcggcgacggcggtgggcgcgaggtgaggggggggggagacggctcaccggcggcggcggtggcggcgacgacggcgacggcggcgcaaggcggcgacgcacggcgcggcggctccggggcgacggcgcggcggcttcgaaggtggcggcgcggcggcacgacaacggcggcgcagcggcgcgacgacagcggcgcgtggagaaggggaagagggagaagaggagggaatggagtggggtggagaaggggggattgggccggggtctttataggggagaggggaagaaagagaggggaaggagggggaggggtgaaacgacggcggcgcggcggcgcggggcgcgaggcggcgggctcgcggcgcgaggcgacgagacggcgcgcggcgcggcagcggcaatgggacgcgcgcggcgacgggacgtcgatggcgacggcgacagcggtggcgcgcggctcggggcgggatgcgatgggcggccgacacgacggcacggcgcgacagcgacgatgggacggcgcggcagcggcacagctcgaggcggcgatggaacgcgcacgcggcgacgggatggcgacggcgacagagcggcagtggtggcgcgcggcgcgaggcgggacgcgacggcgacggcgcggccgcggcgatgagatggtgacggcgacaggcggcgatggcgacggtggcgcggcggcaggcgacgatggcgacggcgcgcggcagctggcgacgatggcgacggcgcgtggtgacggtggcgacaaagagagggggaaaggggaggagctgggccgccggcgaccaccgcctcgccgcaccgacctcgcgccggcggccgtcgcatcgccgcgcgccgcgccgccctccgcgctgtgccaccctcgcgccgaccgcgaggccgccggcggncgccgccgnctctccacgcaccgcgccggcctccgcgccccgccgcgaggccgccgcctcacaggccgcaagcggccgccgccgtgccggccggcctggcctccgcgccccgccgcttcacgccggcctggcaccctcgccgcaccgctgcagtgtagagaggagaaggagaggaatagataa

SEQ ID NO: 79591 - DNA, 185 bp, Oryza sativa
  unsure (1)..(185): unsure at all n locations
  Clone ID: PAT_MRT4530_79297C.1
catccctcatatttcaccgttgtatactcnaacctaaatctaaccaacctgccattcattcacaacattcaatccatacaccacacctcacatgctaattttaattatctatacaactataccgctatttctcacctttcacttacatctatcatatcctcacctataatccttctctatcatat

SEQ ID NO: 79592 - DNA, 348 bp, Oryza sativa
  Clone ID: PAT_MRT4530_79298C.1
atgtggctcatcctgattgcactttgtgattcacttttactagtaatcctaacaggcccaactagaaagtctctcacgctgggccttgttgaccggccagttagccatgcgttctgggccaccgttgcctttcctcgtcgccaactcacctgcccggtggctcgcaacgtcactctcgccgccttgaactcgtccgtcaaggcctcccacctccacgcacggacccaacaagaattcgaacaagctcaactgaacaaagcccagtgcaacaagaattcatgcactcgcctcgtgagggctgtcaaaaatgctcaaaactcgcgagctgctcgagctcggctcgtctag

SEQ ID NO: 79593 - DNA, 399 bp, Oryza sativa
  Clone ID: PAT_MRT4530_79299C.1
tgtttttttattttggggttttttttttaaagcacaagccttccttttttttctttttttttttggaaaagtatacaagaagggctcaaattggtgttcccttgggcaaacaggccatttccgtggaaggtcatgaaagcgtggtcacagattacattctaaaagtgagtacaacacactacaggaaaatagagaaaaaaagaagaaatttccatgactagaactaattaagttgctattgcaaattctgggactggaaatatgtgctgatacaatggttggagaccctaccagcagaggtacttcaggaggacaaaacaaacgtgtcacaaatgggatgtgcaatccgcagtcaacaaagacctaggcatgacagtgttctttgatcatagggaaaaa

SEQ ID NO: 79594 - DNA, 495 bp, Oryza sativa
  Clone ID: PAT_MRT4530_7929C.1
atgcagccgtcgacctccgcgccccggtcgccctcacttgcaacacccgcccctgctgttgttgccgctgtcactgtagacgtctttgctccctggtggcgtcgtcgagccctgacgccacccgcaacagacgacgccactggcaacacagctgccgtggccggcaacgtagctgctgctggaaccgctcgcttccttgagacgctcatcgagagagccgactgccggcttgttaacgacattgtctttgtgcaggaatgcccgtttattgaaaagctatgtgccactgagcttgttcttgctttcaaatatggtgctgctctcatgaatattgataaggtcttccatctcttcatgctacgagcctacgacgcgctcccggccttcctcaagcacaacgagttcatcatcgactactaccgcagcgagtggcccatcaagcaggcgctcctcagcgccttagtcgtccacaacgagaccatcttccagacgtaa

SEQ ID NO: 79595 - DNA, 273 bp, Oryza sativa
  Clone ID: PAT_MRT4530_792C.1
tttgtggaaatttaaaatccttaattaggtaattaggactcttttgattggaggtattaacaacaatggaagcaaaagggaaataaaacggcccggttcattaaataaggtacacatatgcaggctccattttggtttctttaaatttatcggattacagaatttctgtagccttgcagatgatcacttggatattaaggactagtaattaacaataggatgcatacaaaagatggcccaacgaaccacagaaaaaatgcgtgcatcttgaca

SEQ ID NO: 79596 - DNA, 291 bp, Oryza sativa
  Clone ID: PAT_MRT4530_79300C.1
atggtgaagagcctccgaagaagcaagcagtccctccgctttggctccatgtccatcgcatgcgcagcagtgtgcacaagcgggacagaggccaacgccgccgggaaaaccagcggccccgtctccatcgtctcccccatcaacagaagggacctttgcaaaaaggagtctccgtcgacggagatacaattcgatcctgagaaatcaaattgccaccacttccaaccttcactaaatctaaagatttctaaaccggacactgccataggaagcaacgccggtggactctag

SEQ ID NO: 79597 - DNA, 463 bp, Oryza sativa
  Clone ID: PAT_MRT4530_79301C.1
ggaaaaaaaaagggaatatggggggaaaaaggcatccgaggaatttttcccctttttttccttgggggaaaccgtccttttgccaggacaccttcgtgggaaccggtaaaaaggaaaaaaaaggaaaaaaaaggcttcctaaattttttttttttgccattggcttgggttccccccggcccagggtaaaaccgggggcccgttgggtttaggggggtatttgggggggggggcaagccactgggcctccccgggggggggggccccccggcccaggggccccccctggcccttgggggcgcgtttccagtccagggcttggaccgcccggaagcaatatttggccgccccgaaaacggagcaccgccggaactggggggggggggtttccttcgggccgacccgaacgggggagcaagggcggagttcgccccccccgtctttgtccccggggggggaaggg

SEQ ID NO: 79598 - DNA, 246 bp, Oryza sativa
  Clone ID: PAT_MRT4530_79302C.1
cacttttcaactagcagatcacctagctcgatagctgcctctatcacagtatatacgctccctgcaacttgctgctgctgcaatagctagcagctgcagctagtaagcaaaactatcaaccttaagggttttttgcaagatcgatggccagacgtggcaacgacaggcaccatcttgcggctgagaggattgtggccgacgtgctggacacattcctacggagcaccaaactaacggtcacctatg

SEQ ID NO: 79599 - DNA, 705 bp, Oryza sativa
  Clone ID: PAT_MRT4530_79303C.1
gcacgaggctaaagtaaccttcaattttcttcccttccggcccctcttccccttcgattccagcgggttgtcgccggcgagggtgggaggaggggtccagccatcttcccccaatagtatagattgtcgggtagtcctgttaatcgagctagtctcgtgttctcgtgttctagagtccaccggcgttgcttcctatggcagtgtccggtttagaaatctttagatttagtgaaggttggaggtggtggcaatttgatttctcaggatcgaattgtatctccgtcgacggagactcctttttgcaaaggtcccttctgttgatgggggagacgaactttccagatctggcgtggctaggtggaggcggtcctggcagcgatggagacggggccgctggttttcccggcggcgttggcctctgtcccgcttgtgcacactgctgcccatgcgatggacatggagccaaagcggagggactgcttgcttcttctgccatgacgcgccaaatccctgttcttcctcaagctaaagaatcttccctggatgatggctcaccggaggctcttcaccatctcgccgatgataatcgagtgccggcccctgcgttgttatcgtcagcgttgcctttccgatattgctcgtgatgatcgagggcctgacaacgacagttcaagattttacagccagtccaagcaggttcagcat

SEQ ID NO: 79600 - DNA, 177 bp, Oryza sativa
  Clone ID: PAT_MRT4530_79304C.1
atggcggcgcttccccacgtccggcgacaagcagccagctgcagatgcgccatctctgctccatcggccatactctccacggcatcggcaacggcggcggtcgggcggcgccaagcttcagctcgggccagatcaacggcgccctcgccgccgggcctccatggagagcagcgctag

SEQ ID NO: 79601 - DNA, 255 bp, Oryza sativa
  Clone ID: PAT_MRT4530_79305C.1
atggctcgctctctgaactcccggctggaagaaaagaaagtctggccatgctcggtaataaccacgctctcaaggggcgaaccaaagggtcgtgatctcgtggagcgctggccgcagggagagattgagaggcgggcgctggcagggagaggaagggccgaagaggagggggcaagcgagcgcggcgttggcgcgagagggagaaacggttgcgcgactgcattgcggcgtggatggtttgctctgttaggataa

SEQ ID NO: 79602 - DNA, 599 bp, Oryza sativa
  unsure (1)..(599): unsure at all n locations
  Clone ID: PAT_MRT4530_79306C.1
nctcccgaggccggcccgggcacccctatactcgtcccaatactcaacccacacaactagcgtccatgaatgagctctctcatctactcactctcactagttcctcgaagagcctttgaacatccttctctactcctgcgcgcactctcatgcagacgcacgcgtcatcgaggacagactagatgctatgcgcctatgctgacatgcacagaacgcagacgtccatacaaacaaccatgaaaccgggccatgggctcataatgctgcagagaaggccaatgagtctaccgtgggagccatgacgcatgctaccactgatcatgtgccaggtgatgcgtccagcaatgctgtcagcagatgaggttgatggcgcaacaatatcattgccaggctatttgcaccatgatgcaggctatcatgcagaaagagcaggttgatgctggcttgtgttgacgagccccaagctcaggcccaggggccaggtgggctctcaatttgccctcccatgtgtggagtctaccctaggtactgcagcactccatgcaaagttgctacgggtcattgcgggtccttggtagagtgtaccatcatatatatat

SEQ ID NO: 79603 - DNA, 431 bp, Oryza sativa
  Clone ID: PAT_MRT4530_79307C.1
ctcgtcgaggagagagaaggagggggtttttgaggaggaggtggggatgcccccccgacgccgattcgggcgtgggggggggcgcgcgaccaggggaaccgccgcctcggctggacgcagccttggaagccgcacgtcggtagaacccccttgccagtggccggccatggcaccgaccggcggctgttcgggggcgccggatctggcgatgcaccgcgccgggcccggggatcggacagtaccagacgtggccagccgccgaccggaacgagctcgtgcgcgaacatccggtcgacgaccacatggtgctcatcggcgactggcgaccgaaggaccacggagccatggccaagatgctcgacgccggcaagagcttcggccgcccgacggggtccggcataaacgacaagtccggcaaggccgacgccgac

SEQ ID NO: 79604 - DNA, 779 bp, Oryza sativa
  Clone ID: PAT_MRT4530_79308C.1
gaaattatcattcattcttttaacttactttattatccaaagtgctttaaacacaattgtgtattttttatatttagcacaaatgtgttaaataagacgagcggccaagcaatgaaaaaaaaactcaaaatcccttatatattatgggatcgatggagtactccgtatatggcacgagggagaactagtctctttttttttttttttttttttttttttttttttttttttttggtggggttttttttttaagaaatgggcaagaaaggacgagcacccactggacgctgttatgaacatctttcaagtttcaacaagtgaacactccaagcttgctaaatcatgatctaccaaaagcgaaggcttctcatcaacaatcgtccagttatccatgagtcgccgacttgcgatattaaggcgtcccataacataacacaaagattggccatcccataacaccatcaaaggttgctactgctgtgggggcgtgcttagcctgtagtactgctcgagtacagtgggctaacataaagatcctccattcaggtcagcggccaaatcttccatggattgccagcatgccagaattcaaggattgcagcaaggaattctggagatggattggcctgcagaaatttcttgtaaatttccaacaagaaatttcatcgtcccaccgcatcatgacattcgatttccaacgaagagaaccaagcttagcagtccacgaggcgtacaaacctatcatctgtaagcttgactacgttatgcccgcatgcctt

SEQ ID NO: 79605 - DNA, 234 bp, Oryza sativa
  Clone ID: PAT_MRT4530_79309C.1
atgctgaacaggtcatatgaagacagcatgcttctgcacttccttcatgatcaagtatctgaaagtctcatacagctactgccagtgaaagagtcttcagcctattcggttcttggatgctctgcctctgccaccgaaaaatggacgtgtggtcttgtgttcctgtgggtgatgggggtggcacttcaacttcttgagcggcttgcatctctatctgtgctggttcagtccgct

SEQ ID NO: 79606 - DNA, 956 bp, Oryza sativa
  Clone ID: PAT_MRT4530_7930C.1
gcacgagggtgcaactactattgagagccacacacaactgtagcttcgccatgggagcaagctggctgctcctccatggcgcggcgctgatgatactgatggcggcggcggccgccggtgagacgacggcgacggcgtcggtcgtcgtcggcgcggccaagtgcgccggctgcggcaggaagaacatggacgccgagaccgctttcaagggacttaaggtggcgatcaagtgcaagaacggcagcagcgaggagtacgagagcaaggccgtcggcgagctcgacggcgcgggcgcgttcgccgtgccgctcgccgccgacctccgcggcgccgactgcgtcgcgcagctgcacagcgcggcgaccgacgcgccgtgccccggccaggagccatccaagatcgagccgctgtcgtcggagggcgagacgggcaccttcgtcgccgtcgccggcaagacgcacctcccgtcgtcgacgtcgtcctcgccggagtgctcgtcggtggccatctgcttcccctgccacaggcgccatcgcatgttccacaggaagcccatgccggagtaccagccgcctccctcgccggtgtacggcacgccggcgccgggatgctcatgctcccctcccagcacgccgccgggatacggccagccggcgccggaatgcccccctgccgacccgggttacggccagccagcgccggagtgccctcctcctcccacgccggcaccggaatgcggccagccggcgccggaatatcctccttccacgccggcatacggaacgccggcgccggagtgcccaccatccacgccggaatacggaacgccggcgacggcatgcccacctcccacggcgccgggatacggatcgccgtcgcctttctggccccctgtctcgccggcgtacggcacgccatcgccgactccgatctaccgtcccccggggagccactga

SEQ ID NO: 79607 - DNA, 588 bp, Oryza sativa
  unsure (1)..(588): unsure at all n locations
  Clone ID: PAT_MRT4530_79310C.1
ctcaaggacaagctctcagctgagagtggacagcaacttgggagtctcaaggaccaaaggcttgtgtttgacggtgaagagcttgaggataaccaattgattgcagatattagcaagaagggtgctgcagttatccacttgttcatccgcaggccagcaaaggttcagacacagcagggtgataaggaaactgttgttacagttgttactccccaagacaatgataacctccaaacagatgctttgaaccttgcgaaaccagctaagggtaaacctgctccagttgagccaatcattgctaatggaaaggtgaaattgtctcctgctgtgatggaaatgatctactcaacaatttctggtatagaaaacgggtaccttcccgtgatgtcaacagagggttcagggggagtctatttcatgaaggactcttcaggtgaaagcaatgttgcagtattcaagcctattgatgaggaaccaatggcaaaggataatcccaggggccttcctttgtcaactgatggtgaagggttgaaaaggggaacgcgagtaggggaangtgcattaaaggaagttgcagcatataatctt

SEQ ID NO: 79608 - DNA, 471 bp, Oryza sativa
  Clone ID: PAT_MRT4530_79311C.1
gtcttttctgttccatgcgttttctgctctgcaactgcaagcaagtccctctgctagctgcgagcctcacgtgcccattcactctctttatttattgctgattcccgatcgatcgatcgatcgatcgatcagcaggcaatagttaatcgatctcaacaactacccatcagttattcaatacaatacagccattcagacagaagcaaggtctatcgagtcagagagatcgacatctcggcgagcgagatcggcgaattgacgggtgatcatggacgccggctgcaggcggcggcgccgctgctggagaagaagggcagcaccggcaccggcgtggacgatgggtactgcattgaggggtgccccgggtgcgtcgtcgaccggcggaaggccgcgagctacggcatcccctacgggagcttcctctttgtctggattgtcacgctctgcacagtccatagattagatttctag

SEQ ID NO: 79609 - DNA, 338 bp, Oryza sativa
  Clone ID: PAT_MRT4530_79312C.1
cggacgcgtgggcggacgcgtgggcggacgcgtgggaaaaaaaaaaaaaaaaaaaaaaaattgaacaaaaaatgggagaaaaaaaaaaaaaagagataatagagaaggatgtgcttactttagatataaaggacaaacacaatcaaatatggtaagacaaatatttagcgggggggtggcttttaaagaaccaagttttacgtcccgggtctcggatggaaaaacattttttttggggcaacttaaatggactacgttgccggatgttcaaaagttgaaggacggtaaatcccctggggttcccaatttattaacgttggcaaaaaatcctcttttaa

SEQ ID NO: 79610 - DNA, 387 bp, Oryza sativa
  Clone ID: PAT_MRT4530_79313C.1
atggcaacggcaataacaaccacaaccgataccatgatggcaacggcgtggtgcattcaccaccgctgggcctcaagcatgctggatctaccgtcaccggcctcgagagtgcagatcaggcatcaagcgtgcgggtctgccggcgccgcgggcctcgggagcggtggatccgtcgccgttgggcctcatgagcatggatcatccgctgccgggcctcgagaagctctcccttgttgtcgcgaccatcctcatcgctgtgggaagctctcagccgtcctcgtcgtcaaggccatccttgctgaggcgttgcgttgctttaacttcttccccaagacgctgaccaaagacactgcagagggtacaactccaacgctgggatgccaatga

SEQ ID NO: 79611 - DNA, 1804 bp, Oryza sativa
  unsure (1)..(1804): unsure at all n locations
  Clone ID: PAT_MRT4530_79314C.1
aataatnttaanatnggggaatgccagggtctaatctttagatcaacagaacactgcatagtgtggtgggatgaatacagaggaagatctaggaccaaatggggattaaggaatactcactatcaatcaagatctagcacaccaaaattacatcaatcctgtgccatcttacactttccttcagctagaaggcatcaataccaggattaaaaacctatgcacatacctaagccagcagcagaaatggtaaagatttcttattgcatctgtacaaaaatcgcatagcaggcagcagcagcagcatcagcagcaagcaagcaaagtatagcatctgtagctcactgaagtgagtgctggaatggagagctctaatccaactgatcagtgatccaaatcttgcaagactagctgatttgatgtggatccgcagctgtgtgttcgatcgatggccgcctcattgcaggtcgtagacgttggaatcggcggcgtagcagccaagaacgcggacgaacaccgcgaatctctcgatctccttgatggcgtcgaggacgcgcgggtcgtgagaggcgccctcgcagtcgacgtagaggacgtgcgggaacgcgcggagcgtcggcgcgccgcgggcgctcgtgtcgaggatcatcacggggtggcccgccgcggcgccaccgccgccgccgccgccgtcgttgttgttgatgacctccagcttggtcaggttgatgttgcgggaggagaaggcggagaggaccttgaggaccaccatcatggagccgccccggtgggcgaccaccatgctggtcttggcgtcggcgtccatgggcagcgtcaccggcgagggcggcttggagaggagcaggaagcgggtgacgttccatgactcgtcctggaggccgtgcgcgagcacgtcgaggccgtagaggtcggcggcgcgcgggctggcgatggcggcggtgtcgagcatccggttggaccgcagcatctccacggcgccggcggtgtcctccacgggctccctgtccacgccgagccgcgccagcgcacggccgcagtgcgcgagcgccatggggtggctaatcacccggcgcacctcggcggcgcggacaccgggcatggcgaggaggcagtagtgcacgaacaggttgatctcctggaccacgacgaggtcatgcctcagcaggaggtcgtagttccgcagcgcggtgccctccatggtggactcgacgggcagtatcgcgcggtcgacggcgccgccgtcgaccgccgccagcgcgtcggcgaacgcgcggcagggcacggtgtcgcacccggggagcgccgtcttcgccgcgaactcgctgtacgcgcccggcgcgccctggaacgccaccctgagcccgaacccatcctggcccccggcgccgcccgtgctcaccgacagatggatccggtcattcccgttgatgtgctgcgccgccgccttcttcctcccgctcccgttggcccccttcttgccgtcgccgttgatctgcgccttgccgttgggggacttcttggaggagtgtccgttgacgccgttgatcttggccgccgcggcgacgaacgacggaggcggaggccgcgagtaggaggaggaggggttggtcttggggaggaggaggtgcttgtggaggtggagggaggaggaggtgtaggccatagaacggcgcgcggcggcggcggcggcggcggcggcgagaggagaggtggtgggttgggattgggtggggagagagagaggcaaggaaaatggagagttttcacagttttccccgcgtgccga

SEQ ID NO: 79612 - DNA, 218 bp, Oryza sativa
  Clone ID: PAT_MRT4530_79315C.1
aattccggcacgagggaaaaagtcacggcgtcctctattaaaaaacggagggagtatttgacaagaaaaataagcagtgatatattgaatattgttaccaccttactttttatttgttttgggtagtgatcaggtcactgcaagcaggcgcatacttaataaaatgacactgcattatgcaagatcatcagtgcatgtagtgcttcggtgtggtcaca

SEQ ID NO: 79613 - DNA, 1878 bp, Oryza sativa
  Clone ID: PAT_MRT4530_79316C.1
ttaaacatcctcatcatcagcacggtcagtggcggccaaaccgctcaggaggccaatgtccgatatggtgccgggggctacgctggagcggccagggggggtcggggcctcggggtgccacgtcatgcccctcgggcccttgcaccgcttcgccccgaggccctcgcccagccgccatttggcggggggagctagcgaggagggggcccaggctgagcatcctttattgcgtgcaacgccccaactgccccccgaaagaagagtaggtagaggcggtgcatgtggtatccccttgagatacaaaaggaggtccttgcccatcgagaagaaggacgacgctgagtagaccttcctgctccggtggcacgccacggcatccaccatctccgcgtactcgtcggggaggcgcgcgccgacggtctcctccccgagctcgcggaagaaggccaccagctccgcgtccgtcttgcgcatgctcgacagcacgcctcgccgccggaggaacgccgcgtcctgcgggcaccggacgaggccctccatcctcgccacgtgagccgtcacgcacgcgccgtgcgcccagtggaagtgcttctcgaaggcgatcatgttgtgcagcacggtggcgctgtactcgtgcacgtcgaggcaggggatggtcatcaccgccacggggctcgccgtccggccccagaaccacatgtcgaggtcgccgcagctcgccgccgcgctccggaaccacaccgccgaccggcagagctccatggagctcgggaacagccgctccgactccttcttgatcttgagaagcttccgtggcgtcgacaggatgcagtacttgctcgtcggcacgcgcgaccagtgaaagaggtgtagcacgtgctggaacggctcggtgtcgccggcggcggggctcgctcgcttcggcaagatgtcgtcgaagcagccgagcacgagctcttcgacggggcgcaggagcttgagcttgctgcacgaggcggcaagcagcttgacggcggcgaagggtacctggttctcgagcaccagcatgtccagcttgatgtcctcggcgtgctgcgacacggccatgtgaagtatgaagtactcccggctgatggacgccgcccgcgacacgcagctggccttgtcgccgtcggtgcagaccttgctgagcatcatgctgaccacgaggatgaagcagctgtcaagaagaaccatctgcaggaacttctcctcgtccccaagtatctccgcggcgacatcgtccccgacgtcgtcgtcggcgaactcatcgcggaggcggtcgctctcgtcggcgagcgccgcgacgtagtgttcgacgtcgaggccgcactggtcctgcaggtagcgcaggaacggcagcttggcgtcgtcggggaaggggagccagtggtcacgacggtggaacgggccgatggccacggcgcgcaccgcgtgcagagcgtcgacgccggcgcgccgggagcgcggccggaggatggtgccggagcgctcgccgaggtaccacagcatgggcgtccgcgcgatgaggtctctcagcacggcggtgttgacgctcgacgacgtcagcttgcgcagccactttgtctccgctgcgccgccggcgccggcgaccgcgccgcccagctccttcttgtccgcggcgccatcgatggaggccgtgccgcccaactccttcatctcccctgcgccatggacggcggcagcgacgcccaattccttcatctccactgcgccatcgacgatgcccaactccttcatctcctttgggccatcgatggcggtcgcgccacccaactccggtgagatgtcgatcaggtggtgatggttgatcgcgttaattttcgtttcctctgccat

SEQ ID NO: 79614 - DNA, 560 bp, Oryza sativa
  unsure (1)..(560): unsure at all n locations
  Clone ID: PAT_MRT4530_79317C.1
ccggccggatgcgcctacncatccggaagactcatctccaagaagtcatcagcacaggcagagccatctctatttcaagcgcgtcgtagactacgcacattagcgcctcaattagagtatactcccggtgaagctggtaaagccagtgaagctggtgatgaggccgatacaagcaacgacgttcctatatccgatactcaagtgttgaccagacgcgaaaaacgacaaaaggctactgccacacatcagctcgcgaatatgagcgccagcgatcgcaccgctttgatgcatctgtcttcatctgaacaacgatcgctcataactacaaaccataaatttgcagaaaagatcaagaaggaggaaaacaagagtcagcgaagacttgataggaagggaaacaagaacttgtatgcttattggaatactgagacaccagtgtatcagtgtggttaaagagagttgatctcataaagagttgtggaaattagcgatagaacatagttagtctattttaatctatgtctttggcttacaaaaaaaaaaaaaaaaaacccgcggcc

SEQ ID NO: 79615 - DNA, 468 bp, Oryza sativa
  Clone ID: PAT_MRT4530_79318C.1
gtgtcctgcaacaatgaagaacaataacgtcattgctatccttgctatcgctgaatgcagcagccactgatcagatggatgctgtacgtcaaaatattctgccataccacgtgcaggcgactattctgctacagaaacaggcgctgaggctatataatgcgttcgcacggtagcaccttagcattgcgccatgcccctacttgcagtcagctgcgttccaagcgagaaacagccacgtattgcagcagctgaggctggcggcgcaacaatgtcactaccagtacattaacgttgtccagaccatagcgcagcacctacacctacagcagttcggcgatctctacattgaccggaatatgggtcaggctcaagcactgaaggcttttaacttgccatctacatatggcatctaccctatgtgctatagtgcacccgtgagcattaccacccttggcggtgtcttgtact

SEQ ID NO: 79616 - DNA, 2274 bp, Oryza sativa
  Clone ID: PAT_MRT4530_79319C.1
atggagcagaacttgggaaatgtaactgcaacaaatgacatgtggaagagccatagggggacagtaatccggatcgaggcattggcattgttagccattgccctttccttcttccttattgccttatgctcctttcgtcgtaggtccaatcactggtttgtccaaaagggtgtcttggctacaaatgtgctatctctgtccctgagtacatatagcataggtctaatgcaatcttcatcagtgaagagtgaggtgtaccccatctgggctgtgtccatgttgaccctctttggttgcattgactcaatcacaacctatggtcatgactacatgggccagctctggaagattctatatcagctttgcctctactctgggtatgtgctgctgattagtatctcggccatatccagtgatgttggttacatagccatgggcatcctgtctgctatcactttcattaagggttttcataggtcattggcgcttatgctgccaagcctgcaacgagatatgatcaaaatgattgcagaggttatggcaggggaggttataagttattcaacaaaaactgattatttggatcaactaaactgtccagaccttattgggtaccactacgtggtccattggccccttgacaagagcaaggcaaaattccttccacaatcatcacctgacgacatcatcaccatagacaagatactgcaatgcaatgaagtccatttcttgagtgatgtgtgcctgtccttctccctatctcatttgttgcaacggcgtttctataggttccgttgtgcggaatcaaagcatttagtggcccgcaagtttttgttcgaaggtcttctgatgagcagggatgccgctattgattataagagggtgttcaatgtgattgaggttgagttgtcttttctctatgatatctttttcaccagtaatgcattcctccattattatgaatcaaaaagtacaaccatttggggattagcttcagtcatggggatatgttttgttggagtagcggctgctatacatggaaggatgagtacccatacacgtagtcctgatggcaccatcattgtggacaccactgcagtagaccttattattactctagtaattttgttatccctagctttgctgcaatttttgcatttgttacactgttggtcatcgaattgggccagagttgcatttgcttgtgactacataaaaaagggtaagcggctaagccgttggatgaggttaaggcgctggatattaaaaaggattgactgtgacaacagttacctttggcaaaataagcttgggcaatactcattgattgaatcaatcagcacgagagagtgcaagttattcagcacgcttgggggctttctttaccaaatatattcccggcttctagggattcttgggctgcaatacattgaacaagtgttccgggaaatgtggggcatcaaaataggagattctgttgagttgcacgatgatgtgaaggcagccattgttgattttcttataagcagcaactgtaaactacagaattggccatcctcattgaatgatgacggatggtctgggactagttttctttttcttcctgaccatgttgtcactattatgaggtttcatatcgcgacatgttattgtgaactagtaatgcacaaggagggattctctgttcaagatgaggatgttgaggagatcgtaaagaagaatcatggtgtggccaccactctatcaaaatattgcgcatacttgatggtttccgcgccacggctactccatagacacgaaataggaactaagtctgtgtacagccaagttgcacaggcggcaaggatatcactatacggagcgaaagacaaattggatgcaatgagaaggctagggaaagatgatgaaccaagtgagggagcccgcatattccaagagggtgtggcatttgggaagcaactagaaacaatgcctaagcgttgggaggtgctagcaaatttttggataaaggcattggtctatgctgcaccatccgacaatgtggaagagcacatagagcacctcgctaagggtggcgagttcatcacccacctatgggctctgttgtctcatgccggcatcctaaagtggagaggtggatcaacaaattatgatgaatcaccatataaattaagtgaatcaacaaatgatgacagtgaatcagaagatgaatatgatggaccagcaaccgatactgattcaacagatgttggaggtggctccttcgaagattag

SEQ ID NO: 79617 - DNA, 204 bp, Oryza sativa
  Clone ID: PAT_MRT4530_7931C.1
atgccgatgccaacaagctcaagcaggggagggcggtcggcggtttcgacggaacaggacctggtcgaggctctcgacggggcacacgtcgacaccgacgagggccacctaggaggtggtgttgaattgggagcggccggtgaggaggaacctccaccgccatccctgcacctctttgtcaccctcgtcgttctcgtgtgctag

SEQ ID NO: 79618 - DNA, 1539 bp, Oryza sativa
  Clone ID: PAT_MRT4530_79320C.1
gcacgaggcaagagcacaaagaaactaacaatggacatcacggtggccggcggcgccggcgacggcggcgagaggcggacgtgggtggtggaggtggagaggacgctgcacgacgcgcccgacgcggcggcggaggcgtcgcggtggcggccccactgcatctaccgcgtcccggcgtgcatcaaggacctcaagccgaaggcctaccagccgcaggtggtgtcgctcggccccttccaccacggcgaccccgggctggcccccatggaggagcacaagcgccgcgccctgcgccacctcctccgccgcgcggcgcgcccgctggccgacttcgtcgccgccgtcgaggccgtcgccgaccgcctcgaggccgcctacctcgacctcggcggcggctggcgcggcggcggcggcgacggcggcgaggcgagggagaggttcttggagatgatgatcgtggacgggtgcttccttctcgaggtgatgagggcggcggcggcggtgtcgccggcgacgccggcgccggcggctgcggggaagccgcacgcggcggcggaggaggactacgcggagaacgacccggtgttcagccgccatggcgtgctgtacatggtgccgtacatccgccgcgacatgctcatgctcgagaaccagctgccgctgctggtgctggagaggctcctgttcgtcgagaccgagagggctaatgtcgtccattcgcgagtttcgaacgaggaccacatcaaccggatggtgctgcgcttcctgtcgccgtcggcgcggacgccggcgctggggacgccgctgggtcaccacccgctggacgcgctccggcggagcatgctgcacggcgagtaccagtcgccgcgctgggggcacggcgcgggcgcccgcgcccaccaccgcgacatcatccgccccgccgcctacgccgacgacggcggcggcgacatcatccgctccgccgtggagctctacgaggccgggatccgcttccggcgcgcccgcaccgacagcctccacgacgtgcggttccgccacggcgtgctcgcgatgccgcccgtcgccgtcgacgactccaccgagtacatgctcctcaacatgatggcgttcgagcgcctccacccgggcgccggcaacgacgtcaccgcctacgtcttcttcatggacagcatcatcgactcggccaaggacgtcgcgctgctgtcgtccaaggggatcatccagaacgccgtgggcagcgacaaggcggtggcgaagctgttcaacagcatatccaaggacgtggtgctggagccggagagcgcgctcgacggcgtgcagcggcaggtgaacgcctactgccggcagccgtggaacatgtggagggcgaacctgatccacacgtacttcaggagcccctgggcgttcatgtcgctcgccgccgccatgttcctcctcgtcatgaccatcatgcagacggtctacaccgtgatgtcgttctaccagcaggcggaagggggcggcggcggcggatcggcggcgccgtctccgatgtga

SEQ ID NO: 79619 - DNA, 4212 bp, Oryza sativa
  Clone ID: PAT_MRT4530_79321C.1
atgtcggctccaacgccgcgtgtgtcgcggtcccgtgaaccgcaccagcgacgtatctcccgttcacctccacaccgtcgtggtcgccggcggcctggcgaagaccgtgaacttattccggtccagtgtgtggtgaaggaggtgggcggctcagccaactatccactgctgacgaagactaactacggagattgggctctcatgatgaaggtcatgctgcaagcgcgcggcctgtgggatgccgttgagcatggtgatgccgatttccaggcggatcgaatggcgatggaggccatactccgggcgatgccgccggagatgttagcttcactcgccgtcaagccctcggccaaggaggcgtgggacgcgatcaagacgatgcgagttggcgtcgatcgtgtccgcaagtcgaaggcgcaaatgctgcagaagcagtatgatgcgatggagttcaaggacggggagaccgtcgaggaattctcgttgcgcctcaacggactcgtcaccaacctcgccacgcttggagtccatcttgaagaaggaaaggtggttgaaaaattccttaactctgttccagatcatctctcgcagatcgctttgtccattgagacgttgcttgacctcgatgagctcacgctcgaggaggtcaccggccggctccgaaacgctgaggagaagctgcctgccaagagctctgctgccggtgggaaactgtttctcactgaggagcagtggactgcccggtggaaggagaaacaggccgcggaaagttcctctgggaaggcgaagtccggcggtggcaaccgtcgtcggcgtggtggcaagaagaaagctgaagctgctgcgcacgatggagatcgtgccgggcgcgacacgcaggaagggcgggaaccaaaccgcgacaagtgccgcaattgcggccgcacggggcactgggctaaggactgccggcagcccaagcggcctgccgaggcctaccaggccctggcggatgaggacgatgacgagccggccctcctcatggcccatgtcgtcgacgctgctcctgtgtctgcgtcgtcttcatctgcgccacctgcttcttcgccgccatcgcagcctgacaagacgatcgagctcgtcgagccaaaggtgttcgcgcaccttctcacggagaaacaaaccgacggcggcgtctggcatctcgacaccggagcaacaaaccacatgacgggcattcgcgaagttttcgctgagctcgacctgtctgtgcggggctcggtgcgattcggcgacggctccgtcgtcggaattgagggtcgtggcaagatcatttttgagtgcaggaatcaggagcaccgagcgttgacgggggtgtattacatccctaaactcaacgccaacttgataagtttgggccagctcgatgaaaatgggtgcgacgtccgtatctaccacggtgtttgcacgatacgggacccggcggcccagctgctcgcacgcgttcagcggacgcggaatcgcctgtacttgatcaagctcaccattgggcaaccggtgtgcctcgcggccaaggcgcaggagtgcgcctggctgtggcatgcgcgctacggccacctccacttcgacgctctgcgacgactggcgagccgcgacatggtgcgcggcatgcccgacatcgatcatgtcgagcagctgtgcgacagctgcgtcatatctaagcagcgacgcaccccgtttccacgccgctccatgtttcgtgctgaggatcgccttgagctggtgcatggcgatctgtgtggtcccatctcgccggcaacccctggaggcaagactcatttcctcctgcttgatgatgcgagcaggtacatgtggatcactctgctgggatgcaagagcgaggcggctgatgccatcaagcgctttcaggcgcgagccgaggcggaatccaagcagaaactgcgcatcctccgcaccgacaacggtggcgagttcacctcggtggaattcgccacctactgcgccgaacagggagtctcacgccacttctccgcgccctactcgccccaacagaatggcgtggtggagcgccgcaaccaaaccatccttgggatggctcgcagcttgttgaaagccaagaacatgccggcacgctattggggggaggctgtcacgacggcagtttttctgctcaatcgcgcgccgacaaagagcttggccaacatgacaccttatgaggcgtggcatgggaagaagccggcggtgggttacctgcgcacgttcgggtgcctggcctatgtcaaggacgtgcggcctcacctccccaagctctctgaccgcagcaagccgatggttctcatcggatacgccgacggagccaaggcgtacaaggtgttcgatccggtgtctggacgagtgcaggtctcgcgcgacgtgattttcgacgagggcgctgggtgggactgggatgcggcgggcgctgcagccgtccccggcggcggaggttgctcagacttcaccgtcgagtacctgacaacgggcacatcaccgtcggcttcgacctcggctccatcatctgcatcttcgggcgcttccgctatgggtgatctactgggcgacgcacttacgcctgggttcgcaacccgggatccggaggagggggagcttcatctccttgcggccgaggaaccagcctcgttcactgaggctgaacagcggcaggagtggaggcgggctatgctggatgaaatcgcctcaattgaggagaacaacacatggcgccttgtcgatctcccgtccggccatcgtgcaattggcctcaagtgggtcttcaagctcaagaaggatgcagaaggcagagtggcaaagcacaaggctcgcctcatcgcgaaaggctatgtgcagcaacccggcatcgactttgaggaagtgttcaccccggttgcacggctggaatctgttcggttgttgctcgctcaggccgcgcaggcaggctggacagtgcaccatatggacgtcaagtccgcgttcctcaacggtgagctagccgaggaggtctacgtcaagcagccgcccggtttcgtcaaggaaggccgtgaacaccaagtccttcggcttgacaaggcgctgtacgggctgcgccaagcgccccgtgcgtggaactccaagctcgaagccaccctgctgtctctcggcttccggcggaacgactgcgaacatgcggtctatgttcgaggtaacaccagtgcacggttgctcgttggtgtttatgtcgacgatctaatcatcacagggacaaaggaggatgagatcgttcgattcaagggcgaaatgaaggcgttgttcaagatgagtgacctcgggcttctcagtttctacctgggtatcgaggtcgagcaggtggcgggcagcatacggctgtcacaggcagcatacgcacgccgtatccttgagcgagcagggatgctgggatgcaacccgagcgccacgccaatggaacaacgcctcaagctcagcaaaaccagtgctgcggcgtcggtgaaccccacctggtaccgtggcatcgttggctgtttgcggtatctggtacatacgaggccggatatcgcgttctcggtgggctacgtgagccgcttcatggaggcgcccaccaccgagcacgaagcggcggtgaagcgcatactgcgctatatcgccggcacgacggagttcgggtgtcactaccaccagtccagcagccccgttcagttggtgggatacagtgacgcggacatggccggcgacccagacacgcgcaagagtacgaccggtgttgtcttcttcctcgggacaagcccggtcagctggcaatccgtcaagcaaaaggttgtcgcgctttcgtcttgcgaggcggagtacatcgctgcgacaacggctgcatgccaaggcgtctggctctctcagttgctaggagagatcaatcaagaagagccggacgcgttcaagcttctcattgataacaaatcagcaattgccctcagcaaaaatccggtgttccacgagaggagcaagcacatcgctacccgctaccactacattcgagaacgggtggaagatggctccgttcatgtcgagttcgtcgggactgaggggcagattgcagacattttgaccaaggcacttgggcgcacacgttttcaggagcttcgctcccgcattggcgttgccgacgtcaaattcaggtgcaagacttag

SEQ ID NO: 79620 - DNA, 4365 bp, Oryza sativa
  Clone ID: PAT_MRT4530_79322C.1
atgtcggctccaacgccgcgtgtgtcgcggtcccgtgaaccgcaccagcgacgtatctcccgttcacctccacaccgtcgtggtcgccggcggcctggcgaagaccgtgaacttattccggtccagcgtgtggtgaaggaggtgggcggctcagccaactatccactgctgacgaagactaactacggagattgggctctcatgatgaaggtcatgctgcaagcgcgcggcctgtgggatgccgttgagcatggtgacgccgatttccaggcggatcgaatggcgatggaggccatactccgggcggtgccgccggagatgttagcttcactcgccgtcaagccctcggccaaggaggcgtgggacgcgatcaagacgatgcgagttggcgtcgatcgtgtccgcaagtcgaaggcgcaaatgctgcagaagcagtatgatgcgatggagttcaaggacggggagaccgtcgaggaattctcgttgcgcctcaacggactcgtcaccaacctcgccacgcttggagtccatcttgaagaaggaaaggtggttgaaaaatcccttaactctgttccagatcatctctcgcagatcgctttgtccattgagacgttgcttgacctcgatgagctcacgctcgaggaggtcaccggccggctccgaaacgctgaggagaagctgcctgccaagagctctgctgccggtgggaaactgtttctcactgaggagcagtggactgcccggtggaaggagaaacaggccgcggaaagttcctctgggaaggcgaagtccggcggtggcaaccgtcgtcggcgtggtggcaagaagaaagctgaagctgctgcgcgcgatggagatcgtgccgggcgcgacacgcaggaagggcgggaaccaaaccgcgacaagtgccgcaattgcggccgcacggggcactgggctaaggactgccggcagcccaagcggcctgccgaggcccaccaggccctggcggatgaggacgatgacgagccggccctcctcatggcccatgtcgtcgacgctgctcctgtgtctgcgtcgtcttcatctgcgccacctgcttcttcgccgccatcgcagcctgacaagacgatcgagctcgtcgagccaaaggtgttcgcgcaccttctcacggagaaacaaaccgacggcggcgtctggcatctcgacaccggagccacaaaccacatgacgggcattcgcgaagttttcgctgagctcgacctgtctgtgcggggctcggtgcgattcggcgacggctccgtcgtcggaattgagggtcgtggcaagatcatttttgagtgcaggaatcaggagcaccgagcgttgacgggggtgtattacatccctaaactcaacgccaacttgataagtttgggccagctcgatgaaaatgggtgcgacgtccgtatctaccacggtgtttgcacgatacgggacccggcggcccagctgctcgcacgcgttcggcggacgcggaatcgcctgtacttgatcaagctcaccatcgggcaaccggtgtgcctcgcggccaaggcgcaggagtgcgcctggctgtggcatgcgcgctacggccacctccacttcgacgctctgcgacgactggcgagccgccacatggtgcgcggcatgcccgacatcgatcatgtcgagcagctgtgcgacagctgcgtcatctctaagcagcgacgcaccccgtttccacgccgctccatgtttcgtgctgaggatcgccttgagctggtgcatggcgatctgtgtggtcccatctcgccggcaacccctggaggcaagactcatttcctcctgcttgttgatgatgcgagcaggtacatgtggatcactctgctgggacgcaagagcgaggcggctgatgccatcaagcgctttcaggcgcgagccgaggcggaatccaagcagaaactgcgcatcctccgcaccgacaacggtggcgagttcacctcggtggaattcgccacctactgcgccgaacagggagtctcacgccacttctccgcgccctactcgccccaacagaatggcgtggtggagcgccgcaaccaaaccatccttgggatggctcgcagcttgttgaaagccaagaacatgccggcacgctattggggggaggctgtcacgacggcagtttttctgctcaatcgcgcgccgacaaagagcttggccaacatgacaccttatgaggcgtggcatgggaagaagccggcggtgggttacctgcgcacgttcgggtgcctggcctatgtcaaggacgtgcggcctcacctccccaagctctctgaccgcagcaagccgatggttctcatcggatacgccgacggagccaaggcgtacgaggtgttcgatccggtgtctggacgagtgcaggtctcgcgcgacgtgattttcgacgagggcgctgggtgggactgggatgcggcgggcgctgcagccgtccccggcggcggaggttgctcagacttcaccgtcgagtacctgacaacggccacatcaccgtcgccttcgacctcggcgccatcatctgcatcttcgggcgcttccgcgtcaagggcagtcacgccgtcgtccgcctcgacacccgccaccttggcgtcggcctcaacgcccgctacaccgacgttcgtctcaccgccaccaggcgtcgacgagaacctggacgcggagcaggatgattgtccactgcgttatcgcagtatgggtgatctactgggcgacgcacgttcgccggggttcgcaacccgggatccggagaagggggagcttcatctccttgcggccgaggaaccagcctcgttcactgaggctgaacagcggcaggagtggaggcgggctatgctggatgaaatcgcctcaattgaggagaacaacacatggcgccttgtcgatctcccgtccggccatcgtgcaattggcctcaagtgggtcttcaagctcaagaaggatgcagaaggcagagtggcaaagcacaaggctcgcctcgtcgcgaaaggctatgtgcagcaacccggcatcgactttgaggaagtgttcgccctggttgcacggctggaatctgttcggctgttgctcgctcaggccgcgcaggcaggctggacagtgcaccatatggacgtcaagtccgcgttcctcaacggtgagctagccgaggaggtctacgtcaagcagccgcccggtttcgtcgaggaaggccgtgaacaccaagtccttcggcttgacaaggcgctgtacgggctgcgccaagcgccccgtgcgtggaactccaagctcgacgccaccctgctgtctctcggcttccggcagaacgactgcgaacatgcggtctatgttcgaggtaacaccagtgcacggttgctcgttggtgtttatgtcgacgatctaatcatcacagggacaaaggaggatgagatcgttcgattcaagggcgaaatgaaggcgttgttcaagatgagtgacctcgggcttctcagtttctacctgggtatcgaggtcgagcaggtggcgggcagcatacggctgtcacaggcagcgtacgcacgccgtatccttgagcgagcagggatgctgggatgcaacccgagcgccacgccaatggaacaacgcctcaagctcagcaaaaccagtgctgcggcgccggtgaaccccaactggtaccgtggcatcgttggctgtttgcggtatctggtacatacgaggccggatatcgcgttctcggtgggctacgtgagccgcttcatggaggcgcccaccaccgagcacgaagcggcggtgaagcgcatactgcgctatatcgccggcacgacggagttcgggtgtcactaccaccagtccagcagccccgttcagttggtgggatacagtgatgcggacatggccggcgacccagacacgcgcaagagtacgaccggtgttgtcttcttcctcgggacaagcccggtcagctggcaatccgtcaagcaaaaggttgtcgcgctttcgtcttgcgaggcggagtacatcgctgcgacaacggctgcatgccaaggcgtctggctctctcagttgctaggagaggtcaatcaagaagagccggacgcgttcaagcttctcattgataacaaatcagcaattgccctcagcaaaaatccggtgttccacgagaggagcaagcacatcgctacccgctaccactacattcgagaacgggtgggagatggctccgttcatgtcgagttcgtcaggactgaagggcagattgcagacattttgaccaaggcacttgggcgcacacgttttcaggagcttcgctcccgcattggcgttgccgacgtcaaattcaggtgcaagacttag

SEQ ID NO: 79621 - DNA, 211 bp, Oryza sativa
  Clone ID: PAT_MRT4530_79323C.1
ggaggggaaagaccgggttttttttagacccccacacctagtctgggtaaaaacgaaaaaacacaactgccgggggggaaagcagtacatgggcggcatttgacccggggggtgactcccattttgagggggacgaggaaaaaccacaactgtttggttttgtttctcacccaaattttgaaaaaaaaaaaacacaaaaaaacgtgggggt

SEQ ID NO: 79622 - DNA, 2259 bp, Oryza sativa
  Clone ID: PAT_MRT4530_79324C.1
gcacgaggccccgtgccggttgcggcacctcgcgccgtgctctgcgtctcctacccccttaaacccctacctcctcccggcctcttctccaacctcggatccactcgaagcaagtggttttgtgtggtggagtgcgctcgtacggacgggaacctacgttgagatgagtcggtgcgttataagcggtggcgggcagaagttgcacggcgtcgtcgctccgcgaggtgatcggcagctgccgccgatcgcggcgtgagcaccagagaaagtgcccactggcgtcccctccagcagctgttccttcaagtcgtgaaatgagcgactggctggtgggcagatggcggcggggccgcagccgcagggcggcgtctcggggctcttccgcggcccgcgctcgagcccgcgtctctcccgcgtgcgggccaccgccacagttgatcctggggatattccattggagaagtttcaagctaaatattcagatgcgtgttctgccatatttctagtgttgattggttctggtctattttatgttggaatcattttggagtagttaatggcgttcttgactatcttgcaaaggaccttggaatttctgagaatgctgtgttacaaggatgggtggttagcacaaccctggctggtgcgacagcaggttcttttactggaggtgctttagctgacaaatttggacgaacacggacgttcatcctggatgcaatccctctcgctgtaggtgcattcctgagtgcaacagctcatgatgttcgcacaatgattattggccgattacttgctgggattggtattggcatatcttctgctcttgtgcccctttacatatctgaggttcttgaacatgcccaacaactgagctatttacgcttgcgcctgcagatttcacccactgaaatacgtggagcacttggttctgttaatcagctttttatctgcattggaattcttgctgctctggtagctggattacctctggcaggaaaccctgcttggtggaggacaatgttcggaatttcaattgttccatccattttgcttgctcttgggatggctgtttcacctgaaagccctcgttggctattccagcaaggaaaactttctcaggcagaaacagctattaaaaaactatatggaagagaaaaagttgctgaagttatgtatgacctaaaagctgccagccaaggttcttctgagccagatgctggctggttggatcttttcagcaaacgctattggaaagttgttagtgtgggcgcagctatgttcttgttccaacagcttgccggtataaatgctgttgtatattactctacatcggtgttccgcagtgcaggcattgcatctgatgttgcagcgagtgcccttgttggagcagccaatgtttttggtacaatgattgcatcttctctgatggacaagcaaggaaggaagagccttctgataacaagcttttctggcatggctgcctcaatgttacttctatcattgtccttcacgtggaaggctttggcaccttattcaggccctcttgctgttgctggcactgttttgtatgtgctgtcttttgctcttggagctggcccagttccagcattgctccttcctgaaatatttgcctccagaataagggctaaagctgttgcattatctctgggcatgcactgggtttcgaacttctttattggcctctacttcttgagcgtcgtcaacaaattcggaatcagcactgtgtatttgggatttgcatctgtttgcgctcttgctgttgtctacatagctggaaatgtggttgagaccaaggggcgttctctggaagagattgagcgggctctaagttcagcaagctgatctgcaactccagcaggtgactggatgggcattcaagaaaacatcctctggctttccgtccagtagatgttcattctagtcttgaaataaacgagtggctacttggcaagtgaacttcttcttcttcttcttcttcttcttgttttttttttttttttgaactggagtggcaagtaaagttggtatctgtgaattggttggagcttcgagggttgtgaattctgacatttgtcagaataaaagaagttcatactgtagcaattagatgccagtatgccaccgcttctagtgtatagaggaacttttcttccatctgttggaaataataaaagcagctcgtcgaatttacagcaaaaaaaaaaaaaaaaaaagggggggaaaaataaaaaaaaa

SEQ ID NO: 79623 - DNA, 338 bp, Oryza sativa
  unsure (1)..(338): unsure at all n locations
  Clone ID: PAT_MRT4530_79325C.1
cgttaatagaacgtttggaatttcactgaaaatttaccaggaaacaaatgatagagcaaagaaaaggagttgcaaacctgcaattcgacgaaatttcataccgaaaaccatctataacaaaacaatccctaaaatagcagctaaaaaaagaaagagtaggtgcaatttaccacctgaattacctcagctttgctcgcgcgagctctgtggccaggcggtggccggtgcgccggtgcgccggtgctcaccggcggcggcgatgagagagacaaggcggttgggnctgtccaccgccagagggaggagacgccacgtgggcggagacagtggaaatgggc

SEQ ID NO: 79624 - DNA, 270 bp, Oryza sativa
  Clone ID: PAT_MRT4530_79326C.1
atgatgtaccgcgaaaaaagcaacctcatcacagtcggggcgcgggcgccgcggctggaccacgggcgcgcgctggtggtggtggccgctggcccgctgctgcgtgagcccggcgtcgtccgcgtattggccctcgtgggtcatggcatgggcggggtacgcttcggcgggatcgtcgcgtcgcgggcgcaggctgcaggggagagcgcgtcacgacgcgaccggggcatatttgggccgctcgcgcgcgggttaagctggtcggattaa

SEQ ID NO: 79625 - DNA, 2989 bp, Oryza sativa
  Clone ID: PAT_MRT4530_79327C.1
gcgtttaaagcaggtcataactgcaactggatcggattacactggggtagagttctccaaaagattgtgtggcatgtcactgatctagtcgcttcgacgaatttctcgctagggtttcgcggatcaaggcggcggcggcggctagggtttcgaggcgggccacatggcctcgccggcggcgagagggggacgcggtgagcgcggggttcgcggagctggagcggcagcagcagctgctggcgagctgcacgaggctgtacaagcagctggaggagcacttcgcgtcgctggagcgcgggctggcggcgaggtcggactcgctccgccacaagcgccgcgcggcggagggcgcgggcctcggccgccatggactcgctccgccgccgcgaggcctccatcgatggctccgtctcccgcgcgctcgaccacctcgacgacctcgcctccgcctcgtcggtgccgtccgacgccgccgcggcggcggagggggtggccgagagcctgagggcgatgtgcgccaggatggactccgcggggttcttcgggttcgtggtcgcgcggcggaaggaggtggacgcgctgcgcgccgagatgccgcccgcgctcaagtgctgcgtggatccagccaaattcgtcatggacgcggtcgcccacgtgttccccgtggaccgccgcgaggcgaagaaccccaccgacctggcctgggcgtgcgtgctcatcctggaggcggcggtgccggcgctggccgatcctgacccggagattggggcggcaaggctactggtgccgcgtgcggcgcgcgagcgcgcgcgggggatggcgagggagtgccggcaggtcgtatccgccgatctcctcgctagggtttcgcggatcaaggcggcggcggcggctagggtctccaggcgggccactctgctccccggcgtcgtctccgcgacccccgtggcctgccccggttcccggcgatcccgcgggcgcagcggcttggggccgcgccctgctccttcctcgccgccgctcgccggttcttggatcaatatatgggttcaacttcagggccagttgatgatgatcttcttgatgccgcgaccggggtacactactccccgctccgtttggaagagcttaacatgaatggctccgtgtcaggggaggaccaaccgacgacctcgggcgtggagaatgggcaccaggagccatttgtcattggtgttgctgggggtgcatcttcaggcaaaagtactgtatgcaagatgataattgatcagctacgtgatcagcgtgtggttgttgttactcaggagtccttttattatgggttatctgatgaggaattggtccatgttcatgattataactttgatcatccagatgcatttgatacggagttactactctcttgtatggagaacttgaaacatggcaaggctgtggacattcctaattataacttcaaaacatataagagtgtagcaagcgcaagaaaggtcaatccttcagatgtaattatttcggaagggattctggttttccatgattcacgtgtccggcgcgcgagcgcccgcgggggattgcgtgggagtggaaggaggcggcggagcgcaagggcggggtggagtggaccaagccgcccgacgcgcacgccttcctgcagcacgtggcgacgttcgccgtggcggagagggaggaccgggggatttaccgcaggattgtggtcagcttctcgtggcgccgacaaatgccccgcctcgcgctcaccctcggccttgaagaagacatggctgatattatcgaggaactaattgctaaggggcagcagcttgatgctgtgaattttgcgtacgaggctggtcttcaggagaagttccccccagttcctctcttgaagtcctacctggcggactcgaagaagacttcatgcaccgtttcagataattcaagcaccagcagtggtcaatctgggagcaatgcaaacaagaaagagcaatccgtgctgagggctgttataaagtgcattgaggatcgcaaactggaagctgagtttccactggaggaccttcagaggcagcttgaagaactggagaaggccaagactgagaagaaaaaggcaacttcaagtgcgtccagcggcggtagcagtggccctgccactaagcgcatccgggcaagcaatggaggcccgatgcctcctgcgaaggcaggtcgtctcactaacaatgcttgtgtgtcttctaccccagctgccaccacctttgtccgctccccctcgcacacatcgtacgccatggcctccccctacccttacgataggccggttggtcatggcctctactgcaaccaaagcccaccggcgatcagggagccatatgtctacccagccaaggaggtaactaattttgcgccaggtttgccgtactctcccctcccataagctatccccacgcctatggcgggtacaacaatggaatgggagcttacactggaatggcacctgacagatgattatcagccttcacaccaggcttactataggatcaggaaagtcgtgtaggctttttgatgaatgacatagacaaattactgatgatgtcggcgacaacatctgcattttgagaaactcaatttgacagtcgggaattcaaatgctcatatttgtgtagtaattactagaaactgtatacaggttggatattgggtatccatcttgcttactgagttataagttaccactactactagatgcactctactctgcattgtgttaggttatctcatgcctagatcactactttgtactaccactaagaaacctggatgtaaattatgtacgctaccattgagactgtactgcattatgtaattctgttcagaaacaatgaaaaaaacacccaaaaaaataaactatcatgtaatccttcggcaccttgatggaccacttaatcaaagacaattcttagtttagcaaaaaaaaaaaaaaaagggcggc

SEQ ID NO: 79626 - DNA, 405 bp, Oryza sativa
  Clone ID: PAT_MRT4530_79328C.1
atggacaccaaaggaggtgtgagccatgagatggcgcgtgcaactgtgcaagcacacagcttttctgagagaaaaaaggggtctcgacgaaagcatacatgcgcggcggcgcgcgtgccgtacgttttcagcggcagcgcaggaaaagctcgagcaaaagccagctgccgaatgccaatcaaattgaatcaggccagtgtcaggacaagcatgcatatcgatctaccagccccaagaggccaagacaccaggaaggacacaaggtccacactgcacgccttcgaccaacccggcaatgatgcacgacgcgacgagaggctccgcactgcacgcgacgaggctccgacctacgcagcacgacgtcgcgtctctctccccaggccgcccgccctcgatcagccatag

SEQ ID NO: 79627 - DNA, 384 bp, Oryza sativa
  Clone ID: PAT_MRT4530_79329C.1
ggcactgaatcattttttttttctcaaccgttacatacatacctaccagagagacgggggcatgaagctaaattgcccgcatcacgcaagggaggcacacacacacggtggtgaggggagtgctataaacaggaggctaaacaacattcatagctaaaacagacaaagggatcaatgcaaacaacgaaaaaaaacacaggggaaggcagacaaataaatcgagtccgcggcgcctccggggaggcaccacctcccgcgaattgttgggtaccctgagccatccgatcaggcggaaaaaatctcgccgtggccctttgaaaaaaggatcagccccgggggcggaggcggcggctccaacttcctgaacgagggggttattttttt

SEQ ID NO: 79628 - DNA, 324 bp, Oryza sativa
  Clone ID: PAT_MRT4530_7932C.1
cctgcttgctttcctttttttctttttttgttttttttttttgggaaaaacagtcttacttgttttttttgcccgggcataacgaaagcttttgcccacaaaagcccaggcctggagcctaaagaaactagggtcaggtttgggcggcaaacaccttgctccctatttaacgagcaacgacagactgcttgatgattaagccaaagcggggaactccctcctcatctttggtggcgaaatcgaccaggctttgggtgttgggccttaaacatttgggggggattttgcccacttttttgtcaatccttgggacatttgttaatt

SEQ ID NO: 79629 - DNA, 392 bp, Oryza sativa
  Clone ID: PAT_MRT4530_79330C.1
atgagcgacgtattgaaatacaaagttgacgaaaaacagttacagcggagacacacgatttaacgtggaaaacccctttaatgcgaaaggtgaaaaaaccacggtcaccagtcagcaacaatcttactatttcaagagttttgggttacacgcctatggcggcttacaagagaatcaagtctctacgaaaccctagcaaagggcatatataccggcccaagcctccggcttgggccttcgctccagttagtcagaagcccggccaatatcttgaagtgaatttggaacaactccaacaaacttcagcttaagacaaattcttcttgtatgataaatcaaccactcatcttggacagcacagatagaaaaccactggtgccgacaatagtctc

SEQ ID NO: 79630 - DNA, 3190 bp, Oryza sativa
  Clone ID: PAT_MRT4530_79331C.1
atgggtgtatcaagacctccaagcacccctgcatcaaagattgagcgcacaccgatgtcgaccccaacccctggtggcagcactagggtcaaggaggagaagatttttgtcacagtgagggtgcgaccattgagcaagaaagaactggccttgaaggatcaggtggcatgggagtgcgatgataaccagacaattttgtacaagggccccccacaggatcgggctgcacccacctcttacactttcgacaaggtgtttggaccagcttcccagacagaagtggtgtatgaagagggagctaaggatgttgctatgtctgcattgacaggcattaatgccaccatttttgcctatggtcaaaccagcagtggtaagacattcaccatgagaggcgtcacagagagtgctgtaaatgatatatacaggcacatagaaaatactcctgagagggactttatcatcaagatatctgctatggaaatttacaatgagattgtgaaggatcttctacgacctgagtctaccaatcttcgcttgttagatgatcctgagaaaggaacaattgtagaaaaactggaagaagaaattgccaaggatagccaacatcttaggcatctaatcagtatttgtgaagaacaaagacaggttggggagactgcactaaatgacaccagttcacgttcccaccagatcattaggctgacagttgagagtaggctccgtgaagtgtcaggatgtgttaaatcttttgtggctaatctgaattttgttgatcttgctggaagtgaacgagctgcacaaacacatgcagttggcgcaagactgaaagaaggctgccatataaatcgcagcttactgactcttactactgtcatcagaaagctaagctcggataaaagaagtggacacataccctatcgagactcgaagttgacacgcattctccagctttctttgggtggaaatgcaagaacagccatcatctgtaccatgagtccagcgcaaacacatgtagaacaatctagaaatacgtactctattctttgcaacctgtgccaaggaggttacgaataatgcaaaagttaatatggtggtatcagataagcaattggtgaagcacctacagatggaagttgctagactcgaagctgagctgagaacccctgatcgtgcctcctcttctgagatcattataatggaaagggacaggaagattagacagcaggtggaaaaagaaatggaggaactcaagaagcaacgagacaatgcacagtcgaaacttgaagaattacagaagaagatgggtgataatcagccaggatggaatccttttgactcaccacaaaggacacggaaatgcctcacatattctggatcactacagccaagtaacaaaatgaagatacggagctcgattagacaatcagccactgctccatttatgttaaagcatgaaattcgcaagcttgagcagctacaacagcagcttgaggttgaggctaaccgagctattgaagtactgcacaaagaagtcgaatgccataaacatggcaatcaagatgcagcagaaactattgctaaactacaggctgaaatcagggggatgcaatctgtcagatctgacagagatgttgacatgatcacagatgaaggaaatggatctgatttgaaagaagaaattagtagacttcatatgcaagacaatgatattgcaaaacttgaggctaaactagaaaatgtacagaggtctattgatagattggtgatgtcacttccaaatgttggcacacaatgtaacgagactacaccaaagtccaacagagcaaagaagaagaagaggatgcttcttccactgggcgtgagcaacataaacagaccaaatctgataagagcaccatgctctcccctctcttctagtaggcctttagagccagaagttgagaatagggctccagagggtgacactgtgtctcatgaaggttcagaaagggctactcctactaagagtgaagacactggagatgtatcatcgcgtgatgaaaccccacgctataggcgatccagctcagtgaacatgaaaaagatgcagaagatgttccaaaatgctgctgaggagaatgttagaaatatccgggcttatgtcactgaactgaaggagagagttgcaaaacttcaataccaaaagcagctgcttgtctgtcaggtcttggagttggaatcgaatgaaggcaagacaaatgacatggaagaagattcagaggaaaatgcaggatctctacaggatggtcctgattcatgggacagattatttaaggagcagatgcagcacattatccaactgtgggatctctgtcatgtatcaatcatacacaggacccagttctacttattattcaggggggatagggctgatcagatatatattgaagtcgaagttagaagactgacatggttgcaacagcattttgctgaggtgggcgatgcaagtcctgcagctggtgatgactccacaatttctttagcctcaagtatcaaggcattgaggaatgagcgagaattcctcgcgagaaggatgggctcaaggctgacagaagaagagcgagagcgcctcttcatcaaatggcaggtgcccctggaggcgaagcagcggaagctccagcttgtgaacaggctctggacagaccccaatgaccaagctcacattgatgagagcgccgatatagtggccaggctggttggtttctgtgagggtggtaacatcagcaaggagatgtttgagctcaattttgcagtccctgcaagtaggaagccatggctgatgggttggcagcccatttcaaacatgatcagggagaagacacaactttggtaagcagagatatgcccatcttccttgttaagatgaggtagaaggatcatataatctcataaaaattttggtgctctggaccaaaggtgaagtggctgagcttctgggttggtcaaggccaggattgacagggggtgaattgatgcaagcatggtgccaacatgcttcagtctgtgtagaatcttctcttgaacctgtattcttctttcatcaccagtgtagagagacttggatgttctcatattctttattaagtagtgttaagaaatgattccgttccaaattttgcccccacattgatgatcaaaagttcgtcttgcc

SEQ ID NO: 79631 - DNA, 558 bp, Oryza sativa
  unsure (1)..(558): unsure at all n locations
  Clone ID: PAT_MRT4530_79332C.1
tccccctttccnacgccataangaattcggntnttttttttttttttttttttttttttttttgacatggaacatggacatctttttattccgatcggagaaacaaccattaagtgaaatctcacgttttcagggttaaaaaacaaggacaatccgcacatccacatctttacactctccaaactcactatgcacacattttcttcccggtggcattgccgcgataagagaaagtagaaacatcactgtttctaccatgtctaacaggctaactgcctattattatctactactatgtacccttgattcacagcattgaaaactgcataaaagcctgctggtttacctagcaggcccgaacctcagcaaaccggcttggggttggctcacaattgctggtaagtttcagagatccaaagagacatgatagtcttctcatgatgggcttccggctgactatcacttccaacgaaacaactcctccctgggtatccngcataattttcctatcccccaaggtcccccttcngttantnaattacgcnttccattaccnct

SEQ ID NO: 79632 - DNA, 664 bp, Oryza sativa
  Clone ID: PAT_MRT4530_79333C.1
atggtcgttgctgagctgcttcttgtggctgttgctgcatgggctcaaattgaccaaactgagacgtcccaccgggcgtaccaaaagcgtgttgacagaaaacacgtggcctgggagatctgcttaactccagtccagatcaaaatcgatgcagctcaacctgaaagcaagaactcgtcgaaacaaagtgaaagtaaaagggtggcgatgtgccaagattcctccatcacctcatgtccaccaaggggggtcaactcagcctcagtatgctcctcaattcaatcagttcgagccgatacagcagcatacacaaggggtacctcagcagagaccttgggccgatatgattgcagatgtgatgagggaacagttcgggctcaagccaaaggacactgggaacttgtatatgcatccgtatcctgagtggttcgaaagagttgcatttcctgctaggtacaaggtgccagatttctcaaaattttcagggcaagataatgtttccacttatgaacatgtcacccgattcttagctcaatgtggagaagcatcagctgttgatgccttgagagttaggttatttcctttgtctttattcggatcggcttttacttggttttcttttttgccgtacaactctgtcaatagttgggccgatttggagaag

SEQ ID NO: 79633 - DNA, 583 bp, Oryza sativa
  Clone ID: PAT_MRT4530_79334C.1
ctggattttctgatgctttgagaactattctgaaagaggagggatggcttgcgctttacagagggattggacctgggcttttgctggttactcatggagcgatacagttcacggcctatgaggaacttcgcaaagctttgatatttgccaaaagtagacagacaagaacagacaacagaagctgcgatgattccttgaattccattgattatgcggcacttggggctggttcgaaagtaactgccattctgcttacttatccttaccaggtcatccgagcacgcttgcagcaacgacctggtagtgatggcactccaaagtacaaagatagctggcatgtagtgaaagaaactgcaaggcatgaaggtgtccgtggattttacaggggcatcacatcgaatctgctcaaaaaccttccggcagcttcccttacatttgtggtgtatgaaaatgtgatcaaattattcaaagcagcaaaggagaagacataatatttccaattgttcccaggagaaacaagaaaagaatgtgcgtcatgaaatacttgaccaatcccaccttctggagttcgaagcaacattca

SEQ ID NO: 79634 - DNA, 255 bp, Oryza sativa
  Clone ID: PAT_MRT4530_79335C.1
atgtcgaggcgaagttacgggattgcccctctctcccctgggtcactgctgggtgggggtgggtgggggccccacgctcatgccccttcgtcgcgtgggcgggggcgtgggcgcgtggcagcggtggctgctggaggctggagccgtgggcatgagcagggggtcgccgaagcgctggccagcagtacagcgcgcttgctgccaagcggcagagcgaaagtgccaggtcacaatgcgagacgtgacaaaggttga

SEQ ID NO: 79635 - DNA, 1169 bp, Oryza sativa
  Clone ID: PAT_MRT4530_79336C.1
gcacgaggccgccgctcccgagcaagagcggcgcgaggaggaagtccaccgcgcgaaacgccggagatgccgccgggggcctcgccggcggcgtcggcggaggcctggacgtgggagaacgccgccgcaggagcggccgccggcttcgccaccgtcgcgaccctccacccgctcgacgtcgtccgcacccgtttccaagtgagcggcgggaggggatgctacgacttgccgccgtacaggaacactgcgcacgctgtgtacaccatcgcgcgatctgagggtctgagaggactttatgcgggattttatccagcagttcttggatcaactgtttcctgggggctatatttctttttttataacagagctaaacaaagatacttacaagggaaagatgatcagctccgtccagttcaccatcttgtctcagctgcagaagcaggtttgcctattcacaaaccctatatggctggttaaaacaagactgcaattacaaacgcctagtcatcatacttcacgatattctggattttctgatgctttgagaactattctgaaagaggagggatggcttgcgctttacagagggattggacctgggcttttgctggttactcatggagcgatacagttcacggcctatgaggaacttcgcaaagctttgatatttgccaaaagtagacagacaagaacagacaacagaagctgcgatgattccttgaattccattgattatgcggcacttggggctggttcgaaagtaactgccattctgcttacttatccttaccaggcatattctttcactcttcttattctcataaactcacccgtatatcctgattttttactgaacctaacagctgaaagtcatcgtattttgcagcaacgacctggtagtgatggcactccaaagtacaaagatagctggcatgtagtgaaagaaactgcaaggcatgaaggtgtccgtggattttacaggggcatcacatcgaatctgctcaaaaaccttccggcagcttcccttacatttgtggtgtatgaaaatgtgatcaaattattcaaagcagcaaaggagaagacataatatttccaattgttcccaggagaaacaagaaaagaatgtgcgtcatgaaatactgagcccaatcccaccttctggagttcga

SEQ ID NO: 79636 - DNA, 522 bp, Oryza sativa
  Clone ID: PAT_MRT4530_79337C.1
atggtgcctgggcaccatgatgtcctcaggtctttcttgggggtcaagatgatctacggtataaaagggaccccagggaaggttcccttctctactaccaccggctgctgtcgccaccccaccaccgtcggctgccctcgcctccaccgccatcacatcagcctcgagaaggcggatctgtcgtcgccatgcctcgggagcggcgtggggaagggggcagcggcgaaggtggctctcggcatcaacggcgcggggaagggggcagcacggagtggatccggtgcctcctcctccctccccattggcggtggcggccaagaggagggatggtggctggcggatccaccgccaccaagcctcagaattggcgtgaggaagggtgtggcggtggcggctctcggtgtcagcaacgtcagctctcggcatcagcggcgtgggggagggggcggagggagcggatccggcacctcctcctccctccccaccggtggcggtggcaaagaggagggatggcagcagtga

SEQ ID NO: 79637 - DNA, 3044 bp, Oryza sativa
  Clone ID: PAT_MRT4530_79338C.1
atggccgccggctacggcgagcagccgctgccgctggtacaggaggccaccgcccgaatcttctccggtggcgcagacgcgtcccgcaccaccgtccgattggcccacttcctcctcccccgcgcgggcgcctcccacccgcccgctctcccgcccctgcctcccagcgatttcggccccgtcctcgacgacggcctcaaggtcgagttcaagggctgggcgccggaatcccccaagctctggaggcggtgggtcgccaagctccgcccgcgccacgagcccctgtggcgtaaggttgggatcctcgacgccgtcctcgccaccacgtgccgggtgcgccgcgacgagggcgcgctgctccagctcgccgccttctggtgcggcgagaccaacaccttcgtgttcccctggggtgaggccacggtgacgctcgaggacgtcgcggtgctcggcggcctgccgctgctgggcaggcccgtgcgcgcgccgccgcaggacgcgctccgcggcgacgtggacgcgctcgaggccgtacgccgcgctctctacctcagcaagaacaagaacagcaggcccgaccgtaccgcttgggcgagacatttcctcgagcgccctccggggaaggtcaaagtcggcggcggcggcggcgacgaagcgtgcgggcgcctcgagcacggcgcgttcctggccatgtggctgtctctcttcgtgctaccggcggctccgttcgatgtggtccggacggaggtgctcccactcgccgcccggctggcgcgcggccgcggcgtggcgctcgctcctgctgccctggctagcatatacagtgatctctccgcgctcaagcgctacatcaatttggagaaaagatatcaggccttcgtcgtgtgggcacccctgcaaatcgttcagctttggctctggaagcggttccctgagcttcgccctcctgagaccacgggcaccaatcaacctgacggccatggcatacccacggaatcccagtggcaaaatgctctcaaggtgcttgaccccgtttatgtccacgcagtgttcatgtcacccaagaagtttgaatggaggccctatgggagtagcagcttcgcgctgcggccagagatgggtagccatcgtgttcacggccaagatatagcagaaagtgcagaattgttatccttcatactatgtttacgtgcttgtgagcttgtgggcatgcgctgcattgagcattaccgtccgcatcgtgttgcaaggcagctcagctttgaccaggatattcctggaactcttccccgtgttaactcaaactgggtggctgcatgggaaacatacaaaatggagcctaagaaatttgtattcattgttcccaagtacaagcccgctgttacaattgattatgtgcaatggtggaagccttacttgttgggatgtgctgctgctgttgttaaagctaggaagatgaaagaacttccacttttacttagtccaagaaaaagaaagattgatgtgcctcctgatgttagtccaaaaagggtaggaaatggtgcaaaggaaaaggcagtggaattgtcgtttgaggcaccaataggctcagtaagcacaataaacgaattatcttgtgtatcagccaccaaaatagtacaaggcaaatcttttcagcaaggtaataaggaaccaccagaccttgtcgttgcacatgacagagagaatagaagctcgctacatagtgaagtactgcaaaatctccttgttgaggatgccacaaacactggcagcaatgaagccttatgtgcagtaactatagctgatatgcactcaacagaagtgtcgtttgatgttccagttgccttagtaagcattgtagatgaattaccttgtgtgtcagcctccatagaagaacaaggcaaaccttgccagcaagataaagaggaagcacacaacctttctgtcacacatgacagggagaatagaagctcgctacatagtgaagtactgcaaaatctcgttgttgaggatgccacaaacactggcagcaatgaagccttaggtgccataactgtagctgatatgcactcagcagaagtgtcgtttgatgttccagttgacttggtaagtattgtagatgaattaccttgtgtgtcagccaccaaagaagaacaaggcaatgattgccagcaagataaagaggaagcacgagacctttctgtcacacacgacaaagagaatagaagctcagtagtttatgtgcactcaacacctgttgtggctgcaaacactggcaacaacaaagcctttggactttcacccataattgatgtgcagtcagcacctgaagacgttgtggtgatcagcgatgacgataatgaggatgaggtcggtgggatgcaccaaaaaccaccgcagttggaaacagcaccatcctccttagaagggcaaaatgcagaaagtcagataatcagtgcaagcagtaatcctcaggacagccgagtgatgaaagatgttagggtccaaagcaattgtgatcacgaaactgataatgttcgaagcaatattgttctcagaaaagaatcatttgaagtacttgctgttgatactgtccagcctggttttaatctcttggatacaccaacaggggaaacgcagacatgcgctgttacaggacagatagacaagggatacatggtggaaaaagaaattttggctggtgtggaaggtatcaaaaatgtaaatgaagacgtgtccccatcatttcaagaaataaactctcctgtggaagattgcatggtggccaatagaagaatgggctcaggaaacaactattctagtggtttggcacatgtgaatactcaattgatcaacagagtagtttgtactaggacactatactatcttagaccattttggttgtcaaaacatggtcagaacaaagatgcaagtgacaccactaccgatgaaggaactttccaaccaagacgggaagttgggacgccacaaatgattgaagaggcatttgcagctcgacaagcccaaaagttgagttgcaaaag

SEQ ID NO: 79638 - DNA, 674 bp, Oryza sativa
  unsure (1)..(674): unsure at all n locations
  Clone ID: PAT_MRT4530_79339C.1
gtattcttagagagagagagagagagagatctcgcggccgggcgagtgtgagccacgtcatcgtcgccggcggcgaggggggctccccgcattgccttctccggccggcgagcgagcgagcgagcgatggcgagaggctccacctccgtggaggtccgccgcgacggcgtcgccgtcatcaccgtctccaacccccccgtgatttttctctccctcgacgtgatagccagcttgcagagagattatggggaagctctgaggaggagtgatgtcaaggcaattgttctcactggcgccaaagggaggttttctggaggctttgatataaacgcattcgacaagaagccaaaaaatgagaagcctggatatctgtctattgattttttaacggacatagtagaagatgctccgaaaccatcagtggctgctatagatggcgttgctctaggtggcggcttagagcttgtaatggtttgtcacgctcgtgtttctacatcttcggctcaattaggattacctgaacttcaactgggcatcattcctgggttgggaggaacacaacgactgccccgccttgntggcctgccaaaagctcttgagatgttgttgatgtctaaacctctaaaaggagtgggagcacataaatttgggttagttgacgctgtagtttcagc

SEQ ID NO: 79639 - DNA, 1130 bp, Oryza sativa
  unsure (1)..(1130): unsure at all n locations
  Clone ID: PAT_MRT4530_7933C.1
atcgtcgtcgtcagccatggctccatctctcatgcccatcctcctgctcccagctaattgacccacaaacatacaatgccaacattgttgcacgataagcatgcaactccagcaaatgggtatcttcctttgccatcacctcagcaacagcgattttgcggcagattgcagcaaaatcagaacaactatcccgcccggaaatcgaacaaaccaaacaaaaataagagaaatacactagaggatgatattggcggtggtggtgaagacgatgacgacgcgctggaagcactttttaagcagttggaagaagatctcaagaatgatgatttgtctgttgaggatgatgacgatggaatttcagaagaagatatggcaagatttgagcaggagttggcagaggcaatcggggatattgctgatgctgatgaatctggagagggttcgtcattaggctctgaggcttatgggaatgatgaaaaaacggatgaaatcaaacggccagagctgaaaaactggcaacttaagaggctggctcgtgctctcaaaataggtcgccgtaaaactagtataaagaatcttgcaggggaactaggcctggataggactttggtcattgaattgctccgaaatccacctccaaaacttctattcatgtctgattctttgcctgatgaagacccttctaaacctgaaatcaaggaaatagagccctctccagtagttgataacgctgatgtcactgaaaccaagccacagacggaacttcctgttcatgtcatgtgcgcagaatggtcttcacagaaaagattaaaaaaggtgcaactggagacattagaaagagtctactcccgaaccaaacgccctacaaatacaatgatcagcagcatagttcaagtgacaagccttccacggaagaccattgttaagtggtttgaggatagaagggaacaggatggggtacctgaccatcgagttgcattcaagagatccctatctgagaccatagctagttgataattacttcaaattagcatgtatgatggtttcctctttgaactatttgcaaattctaaatttgaatttttgaagtagaagaatntctgcangcccaatatggagtatgttttata

SEQ ID NO: 79640 - DNA, 517 bp, Oryza sativa
  Clone ID: PAT_MRT4530_79340C.1
aaaaaaagcgtttttttacccctttttttttttagatcagcccaatttaaaatttttcatttcctggcccaacctttcgattggagaccccaaagggccggtttggggggccccttttccccttttttaaaaacttttccctccctccctttttgttggcggggtgtcccccttttccccccagggagtgccttttttttttgcccaaacaaaccgttttggggaaattaaaagtgttttccaagcccatttttttggttttttagaaaaaacatttttttgaaaggttttttgggggcgtttttttttggaaaaacccatttttcgtggggtttttgccctggcgggccaaaaaaaaaaacccggggaactttcctttcaactttaaaaatggccccttttggcccgttaaaataattatccccttgcccgattattcgcaaaaactttttaagttggaaggccccctttttcccccgggaaaggcaacccttcccacaggggaatcccccccccc

SEQ ID NO: 79641 - DNA, 225 bp, Oryza sativa
  Clone ID: PAT_MRT4530_79341C.1
atggcctgcttccccgtctctcctctcgtgctagggccgcacgccttccccatgatgggtggtgtcgaccacattctactttgcgccatcgctcagccgcatcgggtgctctctgcgttgctcccattcgtcgtcgccgccaccaccgtcgttgccacgctcggcaatcccgctccctggaggtatgaagccacccaagagcttggaggtgcagtgctggggtag

SEQ ID NO: 79642 - DNA, 180 bp, Oryza sativa
  Clone ID: PAT_MRT4530_79342C.1
atggcgctcaccggcgaggaggcggcagagcaggacgccgaggcaccgccgggcggcgcgcagttccacaacatcatgatgttgtggttcccattcgagtggtccagcgctgggcttgccttcgatggggccactagcaagcacaaggtcgtcaggctcttcaagaaactgagcggctag

SEQ ID NO: 79643 - DNA, 538 bp, Oryza sativa
  Clone ID: PAT_MRT4530_79343C.1
cccgggctgcaggaatcggcacgaggctcgtctcttcctcttcctcttcctcgtcgtcgtcgtcgccgagccgtcgcatggtggacgccgctgcggcctccggggacgcgtgcggccgcgtgacggagtgggagaccggcctgccggctccaggcgagatgacgccggtctcgcaccagctcgtcccgccggcgctcgccgccgccttcgggatcgacctcgcggccgtgggcgtgctcctcccctctccctccgtcgactcccctgtctcccacctcttcttccccgtcgacgaggacgacgacgaggatgaggagggggagggcgaggggggtaacgatgacgcccccgccgccgccgccgcgggcggcggcggcgggaggtgcgggaagaaggcgaggatggtgtggacgcccgagctgcaccaccggttcgtcgaggcggtggcgcacctcggcgagaagggcgccgtgcccaaggccatcgtgcgcctcatgaacgtcgacggcctcacccgcgagaacgtcgccagccacct

SEQ ID NO: 79644 - DNA, 769 bp, Oryza sativa
  Clone ID: PAT_MRT4530_79344C.1
caggccgctacccccgccggagctgacttcttctccagccgccgccggagccgaggtcgtccccttccgccgccgccgcggcgcactccaccgctgccctcgccggatccgaggtcttccccagccaccgccggagacgtggtcttcccatccgccgcggccagccgtggccggagttgacgtcgtcccgagtcgccgccggagccgagtcgtccccagccaccaccggaaccgtggtcttccccatccgccgcagccgcaagaatcgctcattcaccccacacccgcacccacggccacgctgtgctctcctccacaaccatgtcgagcccacatctgccgtcgttgacgctctttctaccagaagtccagaacacacatacatcagcatgaagatgagatgattcaggtgacagttgttgatgcggccgtgtttggtggtgttcacagttcttgaactgcaggagtaatcggtttgctaacacagacctgatctcaaggtgctatgcagcttccagtgaatgtattgtcttttccatgatctgcacatccacccgggcaactctttgcttcccaaatttgattgcttgtgttgcatatttttgccgatgcagaaatcagatgtttttaatgttgtatgtcctgacggtttggcaacaaatatatccccagtatatttttgagaactatcctcagtatctcacgggattatttcatttgcactctaaatgaagaattataaatgcaattttcaatttgatttaccttt

SEQ ID NO: 79645 - DNA, 1454 bp, Oryza sativa
  Clone ID: PAT_MRT4530_79345C.1
ctgcaggcaagcctcagcctcatccccccatttgatacgagagagaagaggagaagaaagcaaaagctccctctgcagaaaagaagcgttttttttctttcttctcgacgcaaaccaagtaaccaacccctcctcctcgcaagatcccccaaaccacgcgggaaaccagcctcaagttcgtcatccccattggcggcgccgaatcggcacaagaactccgcggagatccgtgcgggaggtttttcattctacagatgacccgggcagtaactcttgattatgggggcaaggttcagactcgtgattatggaggcaaggctcagactgagactttacggcctgggccgttacgtcctgcaaacatcatcagggctaaatttcctacctacaaaaatggtttgaatggtatagtagtcaagctggctgatggccctgaaatgccatctctcaaggagactgtcaccaaggaaactgcggatatgcttgatcatcgtcagcgtctgtcagtccgtgagcttgcaatgaagtttgagaagggtctcaatactgccactttgctgtccaatgaggttaaatggagacaagtggctttgttggagcgtgatatccttctgaagaatctaaagactgtattagagtcactgagaggccgtgtgacaggcaaaactaaggctgaacttgaggactctatatctatggttgatattcttgctgtccagctctccaaaagagaagctgagctgcttcagcaaaaggcagaagtcacagaattagcaaaatcattaaagcttgcttctgaagatgccaaaaaaatcgttgacgaagaaagggcaagtgctcatacagagattgaaagtgctaggtcttctgtgcaaagagttcaacaagcacttcaggaacatgaaaagatgtccagaacaactggaaagcaagatatggaggaactaaagaaagaagttagagaggcgcgaagaatcaaaatgcttcattaccccagcaaggcaatggatctggaaaatgagatcaaaattttgcgtaagacgttcgttgagaggtccacggattgtgttaatcttttgaaagagttggaactgcacaaaaggccagagggaaatgatatccctttgtttgatttggagggtctccaatgcttaggctcaatactacgcatagtttctcagagcagtactaccatggatttctcaaatatttcaatccagtggttccgtgtacacccaaaagaaagtaacaaagagattatttcaggtgccacaagatcagtatatgctcccgaaccacatgacgttggacggtatttggaagctgaaattaattatggtggtgaaattgctatagcaaagacagctgggccaatagaccctgacgctggattggtcgattatgtagagacactcgtaaggaaacgtgaaactgagttcaatgttgttgtgctt

SEQ ID NO: 79646 - DNA, 365 bp, Oryza sativa
  Clone ID: PAT_MRT4530_79346C.1
agttaattctctaggcagggtttttattaataagatctactctttaatacactgttttttttcttcttttatttttctattcatatttttttttttcaaaaaaacccaccctaaattactttttttaaataattaatttgccagccaaattttttacatttttccaggggcccaaaaaagaaaaaataaccctgaaaaattgtttcaccctttccacaaattaaaaatttttttttttttctccccgccttcccgaaaaacataaatctttacacccacccttgaatcaacccctatcttccttgagaggggttccgggaattttttctcaaaaaaaaacggcctcagagtcaatcccatatttg

SEQ ID NO: 79647 - DNA, 273 bp, Oryza sativa
  Clone ID: PAT_MRT4530_79347C.1
gggcactgaatcatttttatttcctcaacctttttattcattcctcccaaagagacggatccatggaagtttttttgccctcatcaggcaagcagagcacacacacacgggggcaggggaagggctataaacaagaccctaatcaacatccaaagctaaaacaaacaaggggatcaatgcaaatcccgaaaaaaaaacacaggggaaaggccacattttttttttggccccaacttcttcggggaaccaccacgttttgcgggttttttttta

SEQ ID NO: 79648 - DNA, 1014 bp, Oryza sativa
  Clone ID: PAT_MRT4530_79348C.1
attttgcccccctagccccaaagcattcgccacaacgcgacgcccaaaaaaaaaagcgaggaaaaatctccagaaaaatcctcgttacattagcctttgctttgcttgctcactctcgccacgccaagaacgcaccgtgccaccgccatggccaccttccttgggagctcgccggccttcctcgcccgccccgtcgccgccaagccgcacctctcctgcgcgcagtcgccgcgcccgcccagcgcccagccgccgccggagcagcaaccgccgacgccgacgccgacgcagcagcagtccatgcaagcccagccgcaggcgaggccgaggcgcgcgccggcggcggcggcgtccggcgcggactcgacggactgggtggcgacgtcgctgacgcggcggttcggcatcggcgccgggctcgcgtgggtcgggttcctcgccttcggcgtcgtctccgagcagctcaagacccgcttcgaggtcgcgcagcagctggccaacaccaaggacgtggagcaagagcaggaggtcgtccttcccaacggaatacggtactacgagatgcgagtaggcggcggcgacgtgccgcggccgggggacctggtggtgatcgacctgaaggggagggtgaccggcggcgaggcgttcgtggacacgttcggcgacgggaagcggccgctggcgctggtgatggggtcgaggccgtacacgaggggaatgtgcgagggggtggagtacgtgctgcggtccatgagggccggcggcaagcggcgggtggtcgtcccgccggcgctcggcttcggcgacgacggcgccgacttcggcgacgccgccgcgcaggtcccgcccggggccacgctcgagtacgtcgtggaggtcgacaaggtgtccatcgcgccggcgtgagcgtgatcgacgcgacgtgtagactccgtatacgtagctgctgcctggagacaaccccctgcagcgaaaatctctcgaaagggtttaaaacttgcacagcgatttcat

SEQ ID NO: 79649 - DNA, 314 bp, Oryza sativa
  Clone ID: PAT_MRT4530_79349C.1
atgcagctcaacccgatagcaagaactcgtcgaaataaaactaaaacaaaaaagactctatccttgtgtggcaattatcttgaagcacatcaactcaacccaatgtcgtacacgggtcgtattgctggaatcggctgtatcacttaaccagtccaactcaggctgagccgatctcagtcgtagccgatccggactccagccgatccttactctgtttctgcaacaatcctcatcttcgattccgcttcgatcccatctttatctccgatactgatattaccaaatttgcaaatctcctaggctattgtgtttgt

SEQ ID NO: 79650 - DNA, 1965 bp, Oryza sativa
  Clone ID: PAT_MRT4530_7934C.1
atggcggcgatggtgggggcgccgctcgccgtggccgcggccgccgccgcgccaggggcgcgagtgttcctggcacggccgctcctccgccgctcgccgcggggcgtcgcctgcgcccttcgccggaggccctccaagtacaagaataaaatccagaatgaggaggttgtagtagaggatgatattggcggtggtggtgaagacgatgacgacgcgctggaagcactttttaagcagttggaagaagatctcaagaatgatgatttgtctgttgaggatgatgacgatggaatttcagaagaagatatggcaagatttgagcaggagttggcagaggcaatcggggatattgctgatgctgatgaatctggagagggttcgtcattaggctctgaggcttatgggaatgatgaaaaaacggatgaaatcaaacggccagagctgaaaaactggcaacttaagaggctggctcgtgctctcaaaataggtcgccgtaaaactagtataaagaatcttgcaggggaactaggcctggataggactttggtcattgaattgctccgaaatccacctccaaaacttctattcatgtctgattctttgcctgatgaagacccttctaaacctgaaatcaaggaaatagagccctctccagtagttgataacgctgatgtcactgaaaccaagccacagacggaacttcctgttcatgtcatgtgcgcagaatggtcttcacagaaaagattaaaaaaggtgcaactggagacattagaaagagtctactcccgaaccaaacgccctacaaatacaatgatcagcagcatagttcaagtgacaagccttccacggaagaccattgttaagtggtttgaggatagaagggaacaggatggggtgacttttagtactctattagatcaaacccatgctttgccttactttaatcgaaatcgtgttgctattttcaatatggagaaatttcggagttcatcagaaggaaactatgtggaaacaggggagggaggtagcatctggggacctgcaaggctgcaacacagagatagtgagagaggagtggtggtttaacacaccgcgcggccatccgcgcccccgcggctccgccggcgctggtagggggcttcctctatttttgcagagaggagtggtggttttggtggtgcagatgatggcgtgccttgcaaagatcagcgacaacattcagaaggtccggttcgtcaggcctggtctgggacgagcggttcttgaccgaggacgcagaggcggccaaggccggcgatggcgatggcggtggcggcacggaggagccccagccggagctccggcattccaagagcgtcgggagcatcggcatgatgcgccgtgtcgctgccgacgacggcgacgacagcgagaagacgacgaagcagcagaggaagaagaagaagaagaagaagaagaagcgggacggtcagaaggaggacgacaaccgcagccagcaggtgttcaggaccaaggacatcggcccggacgtcgacccgccgtcggccagacggcccgggtgcaaacatgctccattttatccgggcccggcctctcgtagtcggcgccgtgaaacagtataaagaatcttgcaggggaactaggcctgcgacccgccgtcgccgagggtgtccggctgcatcctctgctccatcttctccggctccggctcgtcgtcgtcggcgacgtcgcgccgcgccaagccgaggaagaagtgaccatcgagttgcattcaagagatccctatctgagaccaatagctagttgaataattacttcaaattagcatgtatgatggtttcctctttgaactatttgcaaattctaaatttgaatttttgaagtagaagaatttctgcaagcccaatatggagtatgttttatattagtactcccatatcaaccaatgtgacaggtacaactctt

SEQ ID NO: 79651 - DNA, 545 bp, Oryza sativa
  Clone ID: PAT_MRT4530_79350C.1
ccgggctgcaggaattcggcacgagggcgatcaagaacagttcttgcccccagctacctgtacgtacatactcgtatgcttgcaagccaccgcggccacccaatcagataggcatctaaaggaggcacgtaaagaaggcgttgcagtgagcatcctcctgcagaggaaacttctgctaggtagtgcgtgtgtctaccccaggaacgctttcccgtcgagctggctaagaggcttttctaccatatgattgaggggtgccagctcagtaattctgcttgggtgaagagaatgatgccgctcgcacgactggagtatatcggaagcaagagtcagaagcagaacccattcttcttgtacagacaacactgctccatatctaattatcgttctccttttcctttccaaatgagaatcaactcttcgacgggcgggtaaagtgtgaagtgtcacagtaaagcaccggaaacctggttgccactgcagtatctcctctcttcaccatgggccatccttgcgtagacccaattctgttacgtttccactgc

SEQ ID NO: 79652 - DNA, 1833 bp, Oryza sativa
  Clone ID: PAT_MRT4530_79351C.1
atgtcctccgccgccggggaccacctaatccttggccctcccgtcgcgggcctccccgtcgggaatgcgtcgtcgtcagccgaagcgggctccacctccaccgcgggacatgtcgcaggcgcggaggtcgtcgagcacttgcaaagtggcgcctttggcaacccctgccttagtttcttcgccctcgtcgacagggacacgccgccccagcacctccgcgacctcctcgccgccgcctgggagcacgatgccctcaccgcgctcaagctcgtcttcaacctccgcggcgtgcgcgacaacggcaagggcgacagggagggattctacaccgccgcgctctggatgcaccaataccacccacgcacgctcgccggcaacctctccgcgttcgccgagttcggctacatcaaggacttccccgagcttctctaccgcatcatccacggcgctgatgcacgcaaggtccagccccagccccagccccagccccagcccgaccacttgctcgccgacgccgtcaacctggagacagaggatgtcgtgggggaggcgccggtgaagggcagccccagcaagaagtttctttgtggacaaaacctccgctccgatctcgagcaccacaagtccggcaagctgtccaagatcgggctcaccgccaaatgttgtccctcaccagactcgtccttcgaccaatccacattgttatgtgaggccatcgctcgcggtctctttccacgcgaatcagacgctagctacgccaacatgaaagagaagcattacatcttccttgtgcgccgccgtctccgccgcgaggttctcgtgccgctgcgtaaggacctggagctgcccgagatttatatgtccaaaaaccaatggtctgatctgccttacgagcgcgtggcctcagaggccatgaggatttacgagcacttgttcaagaagcacgatgaagggcgcttcacggcgtttctcaaagaccacaaagatagccgcgaggccgccaagcacaaggcaaagaaggcggcgccccagccaccccttctgcaagacatcattacctcgcttggcctggcatcgcatgccagcaacatcaaacgaagggaggatgctgctcagcagtggcgcactttggtcgatcatctccgtgggaagggatctctgtgcaattgtatggcggtctgcgacgtcaacaagggggggctggtcaaaagtgaaggccagaagttgttgaagatctgtgtggggcttggattcttaatctctgaactcagttcgcctccatggacgaactcggtgcatgccttcgcttcaaactatttccctcttgtgcttcctgttggcagctatcgggaaaagttgaattttattcgccagatgccttgcgaagagaggtttaacctaaagaaggtgtttgaggggataattacaagggcagtaacgagtggtgttaccccggacaatatggtgaagaccatattcatattcacagacaagttttttgagaaggcatcagtgcgtccggttgagctgattgaacatgaagattttaatccattgtcgtcgcgtccgtggcatgaagaatatcggagggtgtgcgaagaattcaagagggtaggctttcaggacgtggtacctcagatcgtactgtggaaccttaaggggccacgctctgcaggcttaaccgcaactaaggatggagtcatgacacttagtggatactcggatgagttgatgagattgtttcttgagaacaatggggtggtggagccggaagatgagatgcttgatgcaattgctggggacgagtaccagaaacttcaagtgattgattag

SEQ ID NO: 79653 - DNA, 186 bp, Oryza sativa
  Clone ID: PAT_MRT4530_79352C.1
gaagggaaggatgtggtcgctaaggccaagactggctccggaaagacctttgcttaccttctccctatgctgcatgagctattgaagttgtctgcagaagggcgtatccgaaaatctgctccaaatgttttcatccttgtcccaactcgcgagttatcccagcaggtagcttccatccccgtgtga

SEQ ID NO: 79654 - DNA, 342 bp, Oryza sativa
  Clone ID: PAT_MRT4530_79353C.1
gccggaaacactttctggcaatcggcatgatcatgagtcacaggattacaaacaaaatgttaacgaccgtttaccaatgggcttaggttttgtcgatcattattttttaaccgggtactgaaaaacaagttgacagtttgatgcacaaaacctgttgattctaaccaacatggctttcatgccgaagaaaagaacccatttataccacttaagtcgcacagaccaaaaatttggttttgaatgtaacattgctgggtgaaacgccattggtgggttaactaatgcctctttctttggccttgatggggtttaccccgacctccgtttaggaaatggggttcg

SEQ ID NO: 79655 - DNA, 987 bp, Oryza sativa
  Clone ID: PAT_MRT4530_79354C.1
atgaagcctctcatagaggaagcagtcacagccttctgcggagtatctgttcccaagagcatggcaattgcggacttgggctgctcatctggcccgaacgcactcacgctcatttcatctacggtcgatgccatccaccgttattgtatggaatgcgcgcagccaccaccagaaatgtgccttttcctcaacgatcttccatccaatgacttcaactccgttgcgaagagtctggccgaattcaagcacagccaggatgtgtcctctcatcacgtcgtcgtcgccaacatggtacctgggtcattctatgagaggcttttcacttccgactcagtgcatttcttctgctcctccatcagcttgcaatggttatcaaaggcacctgaagaacttgccaagagaaaaatcccaatgtatgatagcgacgagcgcttgaggctgttgaaccatgaaattgttgccgacgcttatgctcgacagtttagaaaggatttcacgctattcttgtccttgagggctcgagaactggttctcggaggtcgattgattttctcgctgatcggtagatgttcaagcaacccggcctccgtgtctactcaagtatggaaagtggtatctgtagccttgaatgacatggcatcgaggggtgtgattagcaaagagaagttcgacacattccacatacctatctatgcacctatggaaaatgaattaaatgggataattgaagatgagggctcatttcaaatcaacaaggcgatggcccacgatactttccttgccacaggtggagtgttggcgagtccaaacacaatagctgcaatggtaagagcggtgttcgagccagcaatagtgcagcattttgggttctcggcaggaattatggatgactttgctagtgtagtggagcgactctcgactacgagtgccgttgaagctgaattcccattagcttgcttatgtttttcgctcaccagagcacgttga

SEQ ID NO: 79656 - DNA, 343 bp, Oryza sativa
  Clone ID: PAT_MRT4530_79355C.1
ccgtaccaacccgtcctaccggtgcggccattcagccgtccgtcacatcctccccctgagcaggcggatactcaggggctgcctcccggcggtgcgtacaaacgtgcccgccatcgtaactacagtcgtcaggcgtccattcgtccgtccctgtctgtcatccagcaataagactgcatgcataccgccgacaaacagccatcctccgatagtctcccacggtcctcccgcctactgtcaacaggatacctccaggcgactacgacgtcctcattcagacgtcctgctgctttcaacctccgctgtccggcagcctagcgaccggcagccagcgtccgcctag

SEQ ID NO: 79657 - DNA, 1016 bp, Oryza sativa
  Clone ID: PAT_MRT4530_79356C.1
agactgtcagtgtgccgctcactcgcgtccctccgtctccggccagctagtggagtggagtacattcactagtggtttgcttccagttcctatccaatctctggtcttccggcaggtccccgaagaaggagcggcggcgatggcggcgcctgtgacggtgtacggtccgatgatctcgccggcggtggcgcgcgtggcggcctgcctcctggagaaggacgtgccgttccaggtcgagccggtcgacatgtccaagggcgagcacaagtccccttccttcctcaagctccagcccttcggccaggtccccgcattcaaagacagcctcaccaccgtcttcgagtcgagggctatttgccgttacatctgtgaccagtacgccgacagcggtaacaagaccctcatgggcaggaaagaagatggggcggttggccgcgctgccattgagaaatggatagaagctgaaggccagagcttcaacccaccgagcttggcaatggcattccagctcgcatttgcgccgttcatgggtagggccactgacatggccgtggttgaacaaaatgaagcgaaacttgtgaaggtgctcgatgtttacgagcagtggctgggggagaaccagtattttgcaggtgatgagttctcgctggcggacctggtgcacatgcccaacacagatcttcttgtgcgcaagaccaacaaggcagggttgttcacggagagaaagaatctggcgaggtggtgggatgaggtatcagctcgtccttcatggaagaaggttgttgagttgcagaatgtaccacggccctcatgaggcttcttgttttttcccctctgagcgtcttgtgttagttgcgttaaagattcggtcttgttcagttgtttgtatcatttgacaaaatgtgcaagctcttcctatgggtccctaatattgtgctaccatctgtaccttttagtttggataaggttgaatctattttcaggttctcaaaaaaaaaaaaaaaaaaaaaaaaaaa

SEQ ID NO: 79658 - DNA, 846 bp, Oryza sativa
  Clone ID: PAT_MRT4530_79357C.1
atggacattcaagattattatcagttaacaccagtacatgattatattagagatgctggaataataggtgggcatggaaaacctgctactgaagatgtccttgtaaacatcctccatcgtcttgcaccacgctgccttgcaatttctcgatgtgtttgcaagccttggcgcaccatcatcgatgctcgttgcctgctgcgtgtggacctccttccacacttggtgggtggcatattcatcaacttccatgacctaatcttgtctgagttcatctcccgcccctcgataggccccacgatatccggcaactttaactatttgcctcacaactccatagttagggaccactgcaatgggcttctcttgcttgatggctatgcggattacccggctacacgacagtattatgtggttaacccggccacacgacagtgggtacaattgcccccatgcccaagttcgcatccagggatgtacagtgagagcacggagtaccttgtctttgaccccggattgtcatcacagtttgagaatatcactgtctgtgaagcaatagaggagcaaaaatttgagtgggactctgacaatgataatgtcatcgatattaacaataggagtaatttgactggttatgtaacaatccttggattccatccatacaaggaggttgtgttcttgagccacacattgacccgtggactggcataccacttaaacaccagaaaggtccaagacatgggcaacattcgcccaaaatattatggaactgatatgggcatccagccatttatagaagggtcttttccatacacaccatggttgggagaatttccagaggacaattaa

SEQ ID NO: 79659 - DNA, 2186 bp, Oryza sativa
  Clone ID: PAT_MRT4530_79358C.1
agctgctgctgctgcttcttcttcttctatctgctactagtagctcgcagaaaaatactcgcctcgatcgacaagctctcgttgttaccttaccatggacatggacacctcgcaccactatccatggctcaacttctccctcgcccaccactgtgaaatggaggaggaggagaggggcgcggcggccgagctggccgcgatagccggggcggctccgccgccgaaactggaggacttcctcggcggcggctgcaacgggggatcaagcggtggcgcttgcccgccggtccagacgacggcgccgacggccgccgagctgtacgagtcggagctcaagtttctcgccgccggcttccagctgagcggcgcggctggggcggcgccgccggtgcccgcgctgttgccggcggctgctctagagcagaccgacgagacgaagcagctggccttgccgccgcaggccgcggtggcgccgccgccggagcagaagaaggcggtggactcgttcgggcagagaacgtctatctaccgcggcgtcacacggcatcggtggaccggaaggtacgaggcgcatctgtgggataacagctgccggcgtgagggccagagccgcaagggacgccaaggtggctatgataaggaggagaaagcggcgagggcgtatgatcttgccgcgttgaagtactggggtcctagcaccacaaccaactttccggttgccgagtacgaaaaggagcttgaggagatgaagcatatgacacgccaggagtttgtagcttcacttaggaggaagagcagtggattctctcgtggtgcttctatatacaggggtgttacaagcctagctagccatgtttggcctcttgcacgtaagtctcaggtcaaaaacatctactttgaccaagatctgattgttgcttgcttccttctttcaggcactgaggaggaagctgcagaagcttatggacatccgcggcgatcaagttccggtgcgcctgaatgctgtcaccaactttgagatcggccggtataacgtggagagcataatcagtagcaaccttccaatcgggagcatggccggcaaccggagcaccaaggccggcctagagctcgctccgtcgagctccgccgacgccatcgccgccaccgaagcgaaccacaccggcgtcgcgccaccgtcgacgcttgcgttcacagctcttccaatgaagtatgatcaggcagattacctgtcatacctcgcattgcagcatcaccagcaaggaaaccttcaggggctaggcttcggtctctacagctcaggtgtaaacctggatttcgcaaatgccaatggcaatggagccatgtcaaattgctacaccaatgtctcattacatgagcagcagcagcaacatcagcaccagcatcagcaggagcagcagcaagatcaacaggatgatcagtcacaaagctccaacaacagctgcggctccattccgtttgcaacacccatagctttcagtgggtcatatgaaagctccatgacagcagcaggcacctttggatactacccaaatgttgcagcctttcagacaccaatctttgggatggaatgatttggggaggtggcactttgcaggcaaaaaggatgaagagcctgatccctgatcagaggtgatgaggatcaagactgacatagttcattctcacacaacaacaacaacaacaaacataaagagcaggggaaaagagaggtaatgtagtagtagtggtatgatgataaagtatgatgcaaacatagtaggaagcagtatgcaggagagagatactgacaggtcagagacaggaggagaagactctgctaacaaaacgatgcagcgcaagcatattgttttattttactgcccttttacccttttgtagctttgttttcttgtgcttttgtcatcgctgagctttgtttgccgctcagcttcttttgagcttttctttctactgacatgattctgcaagtgccatgatagcttagcccatgtacaatggaagcagggacgtctctttgtagcttttgcttcttttcttttgttagatcgcctttggtagcggcccctgtttactcaagaagttgctctccctccacaagtatacaatgaaatgtactgcaggaactaaacaatataagtttttgtaaaaaaaaaaaaaaaaaa

SEQ ID NO: 79660 - DNA, 769 bp, Oryza sativa
  Clone ID: PAT_MRT4530_79359C.1
tttcacacgaggccggacggactcttctcttccaagatcatgtgagagcgaccatgtcaatactacctactcctctcctttctcctcctcacatcccccctctcacaatagagagagagccccagatcctccccaggtgaggactcatacatgaagggaggcaaatctacgggggccgccaagcccagagcaaagtagtctgtgaatacaaccgactaggaaaagcccgccgaaaagggcaagaatattaaggccgccaaggaccccaacaagcccaagagggctccctaaggtttcttccattttatgcaagagttccgtaaggagctcaaggagaataaccccaagaacacaactgtcgctgctgcaggaaaagaagccgttcgataggagcaaatccctgaccgaagcggacaacgctccctatgtagccaaggccaataagctcaaggccgagtacaacaaggacattgctgcctacaacaaggtctatagcaccgccaagaacgcacccgacaaggaggaagaggaggacgacgaggaggaatctgataagtccaagtcccacgttcaatgatgaggaagacgaccagggcagcgaagaggatgaagactatgattactgagccttccaccggaccagatgggacccgcaagacgctaagggcggcgcgccgtcccaaggaagctatccatcatcatcatcatcgcctactagaattatcccgcttcccttcaaatcgcgatgtttaacctttctccacccgcc

SEQ ID NO: 79661 - DNA, 1771 bp, Oryza sativa
  Clone ID: PAT_MRT4530_7935C.1
ttaagttctctttttttttatcagatcagtagctgtaacggagaagagttcgtcctcgacgccgtccgccgcgaacacctctgaactgatggtagcgcaagccgccaccgccgccgccaccaccaccgccgctgccaccaccgccgccgtgccgatgacgaatttccagctcttcgggtccatggtgccggttccggtggcgtccatggcgacggctactgctccggcagctgtggcagcagccgataatggtggccatggatcgtcgtcggcgtcacagaacgcctctggctcaggcgaaggacaaggcggcagcatgtccttgtccttgcaactgaggccgctcggctcaacgccgacggcggctgtggctgtctcggtgccacccatggctgcggcgccgatgatggctggtccagcagcagcagcgccagcgccggcgccgccgttggcgacgatggccgttgcccagaacgcctcgctcgcggcggtggcgagcgcgctggcggcgcacaggaggaaccaggccacgcaccgctccgccgcgctgcacggccacctccggcgctgcgccgaggcgctggccgcgtcgcggccggcggacgcggacgccgagctcgccagcatcgctcgcatggcgtcctcggacggcgacgccgtgcagcgcgtggccgcggcgttcgccgaggcgatggcccgggtggtgatccggccctggaggggcgtgtccgccgcgctcttcccctccgacgccggcgccgccggcgacgccctcaccgcgtgggaggccgagttcgcgcggcagagcttcctcaacctgtgcccgctgctccacctcgccgccgtcgccgtgaacgagatcatcctcgagacgacgaggaacgacaagttcatccacatcgtcgacctcggcggcatccaccacgcccactgggtggagctcctccagggcctcgccacgcgccgcgccgcggtccgcccatgcctccgcctcaccatcgtccacgagcacaagcacttcctcggccaggcggcgcaggtcctcgccgccgagtccgaccgccacggcgtgccgctcgacctccacatcgtcgagtccagcgtcgaggcgctcaagctggacgccctcggggtgaggagcgaccacgccgtggtcatcgtctccacgctccagctccaccgcctcgtcggcgccggcatcctcagcaccacggcgccgccgtcgccggcggcggcggcggcggccagcatgatcacctccccgctgccgccggcgaacatgtcgtcgaaggtggacaggctcctccgcggcttccacctgctgtcgccgagggccatcatcctgaccgagaacgaggccaaccacttcgtgccgtcgttcacggaccgcttcgcctcggcgctgccctactacgagcagctcttcgccgccatggaggaggcgggcgccgccacggtggagcggaaggcggcggagaggtacctcctcagggaggagatcaaggacgttattgcatgtgatcacgacgggccgcgctgggcgcggcacgagacgctggggaggtgggtcgtccggatgggcgccgccgggttcgcgctcgcgccggcgatcaccgtggtgacggcggcggggcgggtgagggcggtggcggcgcggcttcccggaggaggggatgagaggaggtatggggtgacggagggcggcgggtggctcatcctcaacagggaggagaagccaatgttctgcgtctctgcgtggaggaggcagtga

SEQ ID NO: 79662 - DNA, 521 bp, Oryza sativa
  unsure (1)..(521): unsure at all n locations
  Clone ID: PAT_MRT4530_79360C.1
tgggaaacttgaactttggttatttccaggtggaaacccccgaattttattttgcccaggaaaggaccagcnaggggattccntgcccctaagttgggncccctcacattgggcataatccccataacccaaactttggcttccagataaattagtgtttctatctagcatggcattgggtttattccagaattctgccagatacttacaatttcaaccacattatatccttgactcaattcctgatgtttctgtatgtccttcctactcttaagagttgaaacctgtatgaaatccgtatagtgatagcctgatggggcagaccgtcacttgccagcaagtttccaccgatctcaagaccacagacattggacagaaacttccatgtgattacagtattctgattggtcacatctcctgtaccaactattctgtctgcaaaagattgtaacctgaagaatttattcgattattttggaacaatcttctctatacaagatttgcacaaaaaaaaaaaaaaa

SEQ ID NO: 79663 - DNA, 1081 bp, Oryza sativa
  unsure (1)..(1081): unsure at all n locations
  Clone ID: PAT_MRT4530_79361C.1
ctaaagaaagagctcgagcagaacgggcggcttctcatgcaccttcttggggctactgtaccgtggcagcagcgcaggtggtggtccggtggccgcccagcaccgagctgcggcctctgcgtcgtcgtcgccgtccaccgccagctgcggcttgacacatgttgcaaggttcaccaagaacgacgtgtacacgatggggcaggcggtgccgacgacgcatgcgacggcgaagcccagccaggcgccgtcgaggagcaaccacgcgagcacgtacgccggcgaacagcaaatttggaacgtcaatgttccattcaattcaatggctagagtccattgggtgacgtagcggcggcacccctccctctctgcccccttcctccttagccacggcccaaggcggcgagcagcgccctccttctgcaggcgacgccctccccccagccggcggcgccctttcctcagcgacatcattgtcttctccggcacagtggaggcaaccccttccgttagtgcctcggcgacaacatcctccttgcggcgcacggtggggcgctcgccaagccgccacgacctcggggcagcgggtgcttgcctctgatattgcacgtgcacccattagagttggagaagaccaacctcctccttcctgggaccttgtaccctctccaagagattgctcgtgaaccaactatagttggagaagaaattttctggggagcgaaataaaggaaatgcaatgtgttgctgactttgtggggaatgggaggaagtcctgatattttttttatatgtagggtaatacttatgatcttttcaagacattcttgaaagcaagcatgggtggctttctggtatggacatgcaggaagagcacttctattcagggtgaagacatccattggagcaagcattggtgttggatgtaattgttgccattgtgacatgtcaggtcttcaacaatgcctcaatgctgttctgattgtactcttttgatcaagccgatgtgcctatttgtgttttctattttcctttgaaatggacatatgctgcttttgattaaaaaaaaaaaaaaaatnaaaaa

SEQ ID NO: 79664 - DNA, 2430 bp, Oryza sativa
  Clone ID: PAT_MRT4530_79362C.1
acttttgaccccctttctttgcttgttaccagtaaaacatcatattactgccatagtgctaataatcatattgttacagattttacaagatgcaagtatgcaacacaggcaatacacatgtattctcatagcctaattgctgatgcacaaaacataaaggcaaagctttggtgatcctcattgcaacgatcatgatttactgctgcgacgcaatcctttcatgccttggatgagaagtgtgaaccggattattttttcatctttgtttctgtattacatggaagaaaacgtagtggacaaaggtactgggaccagaaacctagttccaatagaacttcatatacaagaaaagtatgaacaaataattgatttctaaaacaaatgaaacgtatctgatatttacacaaagcactacgaaaagatctgttggatgacttcctcggcattcccaccatattgcataagcagttggatcgcgtcagcccttggcaaagcaagaaattccatgaccttgagtatggcgttttcatcacaggtaacttctgatgactcctgagggctactaccttcatctagcaccttgccactagagcatgttgtgatttgagaagatccattagcacattcatctgtaagaaccttggacatattgtgactccccgcagatggatcaacctcttttagagaatcaatcttcaaaaagtgctcaaaacggtccttgcacatctgaagcttaaaccattcgctgtgcgtgtgaagtgttgttctaattatcttcattaactgaggttcttcaataccaagcctcctgctcattgcaatctggagagaacttgcaagaacgggtaatgaaactgactttgtgagtacatcttcacagggttgaattagtgttactaaagtttccttcaaaggtttcagtaaagcttggttactggcagcaagaggccccagatgagtggatgcaaccttgagagcagctccgtgatcaccagaagctactagcttaagaaattcaacctgtttcagctgaaatagaagaatagggtttttcaagaagaaatcaggatccatgttgtttatctcttcaacaacttttgaagccattcctttgcgtgtgagatccctcatctctaaaataacttcatatttctgatcttgattacatctagaatcaggcaaaccagtatctgccatcaagtctggtttaactatcatatcatcttcatccatgtcaagagcagaacataaaatagcatgtttatttgcatccaatggggtctcacaaccataatccagatcatctacccgtcctctccatctcttccgccttcgttgccccgatgcactacttctaaccctacgtaatctcctggaccaggaatcatgatgggaagtatcactggtgctacaatttccattctgattgttagtcatttcaaaatcaatccgtgtttcagtactgtcttcctgtttatctacgaaattgacatcattactttggttattgctttgcaatccaggaaggacatgggaaccaccttcaactattcccctgtatatacagtactcgtgtataagtttatccagaagtggcagatccagcttcattcggcacaattcattcttataccaaagagttatgggcttgggttcatagaagggtaataagtgccaagagaatggctggacggcatcaacttgtaggggatgagaggagagacacgttgggaactgcttgctgctcatactaaaaagtaaactctgaaatggattccttatcaagtaccgtaatgtcattgatagaataggatcataagcttgtaaatgagttctcaatatggatgatagcaatccagcaagctcaaatcgcttctttatagaccactcatttgctacaggggatgattgatcatctttgtcatatatcaatactagcagtatatgcttgaactcctcataagcttccgggtaggcatccagcgcacagggcgccagtgccgtgcggaggcagtccagcgccgcctccctgtccgcctccgtgcccctcctcacaagctccacgaatctctgcttgtggaggtggaagaggaggcggtggtcgaggagcgcggcgggggcgtgggcccggaggagcgcgagcgcggcgtcgacgtccccctcctcgagcgcggtgcgggcgcggcggatgaggaggcgcgagcggtaggaggaggacggcgagggcgccgaggaggaggaggaggtggcggtggtggtggaggacgaggacggggaggagggcggcgacggggaggccggcgggaggaggaggcggtcggatctggcgaagtcgagcacgagggcgtcgagcgcgtcccagttcaccggcggcgacgactgcgtcggcgtcggcggcggcggcggaggaggtggaggcggcgtgtccat

SEQ ID NO: 79665 - DNA, 399 bp, Oryza sativa
  Clone ID: PAT_MRT4530_79363C.1
atggcgatggcctgcggcggcggatccggcggcgccgtcctcgggagggccagatccgccgccgtagggaggagctcggagctcagtggcgggcggcgggcacggcgacggacgacgccggcggatctgggagcggcggatccggcggcgccgtccacgggagggccggatccgctgccctacggtggagctcggtgctcggcggcggatctaggggcggcggtggcaacgacggtctcgagcggcgacggtctcggctggtggcggcggtggtctcgggcggctgccgacggcggcgacgggaatggaagcggcggctgcgacgagctctggcggatccgcaatgtcgcccactacatcgtgaactgctctgaatccgtggtaacacatgttctatga

SEQ ID NO: 79666 - DNA, 399 bp, Oryza sativa
  Clone ID: PAT_MRT4530_79364C.1
gcacgaggagagagagagagaactagtttcgagtttttttttttttttttttttaatcacagaagcggtcaatgcatttcatcacaaacatcagacaaagtttcacactgcgagaatgtttagctgtgaaattaggattagagaaatcgctggaaatgcctcccagaaatccaaaaaacgcagacgcaaagctgcaaaatcgacctaagatcatcaagcctgaattaacctaacgaaagagatcgaaccaagaaagctgtctaaattgtagttttaacccaagaaagtatcatcagtagtaaatctaatcttcttcttcttcttcttcttcttcttgctatcttcatcttcttgctaagatcagtgactggttggtataatgatgagccaaaacttgag

SEQ ID NO: 79667 - DNA, 503 bp, Oryza sativa
  unsure (1)..(503): unsure at all n locations
  Clone ID: PAT_MRT4530_79365C.1
aaccacactggcactcactatactcgcccccacaagttttccctcacagtcttgccttgttcactcctgtgccgctggcctccactagtcccagcagcctcttaggccaagagcacctgtcaatggcagagttcttcgtcgtggaagtccgaagaatgcgtagctttgataggttgcaagcacttgagccaattcggagtgtgaggtctcaagctggcacaactgagtttttcgatgtctcaatgaattgtttcaatgtaccggagtatcttgttgtccgccgagtttttgaaccttaaggccttcttctaccccattacacttaatggtgcatntcttatatatatcaattcaaggaagaagtataacaagggccgacttttccaagctgtccttgaaccttccgncagcagttccaacaatcagggcaagcccaattaccccgaaagtcaaagccaaagccataagttaaaaggatgaacatcaaaaaattcaccgtttca

SEQ ID NO: 79668 - DNA, 324 bp, Oryza sativa
  Clone ID: PAT_MRT4530_79366C.1
attcagaggaacatagcattcaaaaatgtattgaccatatgtattgacgcgcactgactaatgaatgccctccatatttacgatcccaccagagacgtacacactagattgacataagagccgagagaccagctctcgtggtcgttggtcaacctatccggctgctgccaccacctgttcgattggcgatgtcgacgtcggaatacgcggataggctctccgtcccacgctaaatgcaacctttagtgtacgcgcccaacacctatggcatggggtgcccaacatctgtggatccgaactacctgtggatgcctgcaaccatgt

SEQ ID NO: 79669 - DNA, 813 bp, Oryza sativa
  Clone ID: PAT_MRT4530_79367C.1
atggcgatgttcgcgctcgccacggagtcggcgcgggcggcagcggcggaggacaggcgcggcgcggacgggatccggcgcgccgagggaagcggcgggtggcgccggcgccgtgacgggcatgttgcccgcgcgcgttgcggcgctggagagcctgatgctggtaatttaaaagcaaaatgttggaaaataatctacaatgaaaatatgttagtaagaaagagaaaaagctgggtggccgtcagcagggccaagggatggcgctatgtggatctagaggtggaggccaagacgactatgacctcatcggtaggaggaccacatgtccgtaggaccagtggtgaagaggaaggagggacaagtgtgggaagagtgaaatctcgagacaacggtaaacgtaaaaattgggattctctaaggcctctactaaagaagtttgctagcaatggacataccgaacacctacctttcaaggtggtctcgggcatcattaggcaacttcgacaggttgctaggcaaagcggatgctgtggaagatccacgtggtcacaccaaagtcactccgtaggtcgattttggcgggcgacggtctccagggtggcggaaaaggagcaagaaggtggcgacatcatctccatccgaacggcggtgatgctgtcaacgagcttgaatagttgcctcgtctcctctttctcctctcttccgagcagcacgggcggcggtggtggagttcaaggctttggtggcatgacacttgacgagggagagcacatcctggtccaaggactttgcgtggagcttgatctcacgtga

SEQ ID NO: 79670 - DNA, 277 bp, Oryza sativa
  Clone ID: PAT_MRT4530_79368C.1
aaggagccacgggcacgagacaaaaaaatggagcctaccactgaacgaaatatgcacatatagcacgtataactataagacttctgttattgcatccactgtttttgttaacctgatcatgcaatctttagctcataacttgtggtagaaaaattgatttcatgtgtttaagagtgtgatgcgaggctgaaaacactctgtataaatggttgatactatatttttttagctgtactgacgttcctattcaaactttcaaaaaaaaaaaaaaaaaaaa

SEQ ID NO: 79671 - DNA, 572 bp, Oryza sativa
  Clone ID: PAT_MRT4530_79369C.1
gtgctgtggttgtccgggtgaattaattaatatggtggaaaaaaaaaaaaaaaaaaaaaaaagaaatagaaaaaaaaaggggaaaacaaataaaaaaaaaaaaaaaaaaaagaaaaaagggggggcgctttttttagatgataatctgtttgcgccggcctgctctctttttggttttttttttgggccccctatttcttttttctggccgggggttttcttcctgggggtctggtttacccctggctgttcctcccttttttttcttttggcccctccccctttcccccgctgtgttgctttgtcaccggcccccttttgttggaactttcctgccattgtgcatttctttttggggcatggccccccccttttttctgggccatttatcccggtggggggggttgtttcccccccccttaccttttcctttgcctgggggctttcgccccccccttccttttttttccctttcttttttggcggggggtgtcgcttttccccttgggttttttggtttgggggttccttttcggttccctttttttttttttttggggcccttttttctc

SEQ ID NO: 79672 - DNA, 959 bp, Oryza sativa
  Clone ID: PAT_MRT4530_7936C.1
atggtggccggacctcccgcgccggtttccttcctccccggccgccctctcccccttccaaccctatttaaactctccccgcgcttctcccgtccgtttccgcctctcaccacccttcctcctcgccggattcgagctcgcgccgtcgccctctccctcctccatcgccgacgacctccggccggccctcctcgctcgccgggaccgtctcccgccccggcgtcgcctcctccagcttcgccgcaccgccgccgaccccgtccactacctcgccgagctcgccgaccgccggaacaccgtcgtccccgtccacccgagccgcgccgccgccttcctccgctccggccgcctctttcgtcatcgccgtcgacccggggtgagccggggaccgccgcctcttttcccccttcccttcccctctctcggccgccgttccgctgtgcctatggccgctgtcggcgaccataggggcgcgggcgccgcctcccgccgccgcgccgacgtggccgcctccgggcgcgccgagcggctgccgcgtggggcccggccgtcagccgcccacgccctcgggtgcggctgacgcgtggggcccacggcgccggccggtgtgagcccgggtgcacccggtccaccgtggacccacctcggccacataaggaccggtcttcgggcctctgttgcaaagtactaccgtacttccacatgtctagtgggacagatgaaggctacacgagctgcggcccggtagtcgagatgtcatggcacagggctggtgtcctgctgctaggggctcagtcctgcctacctgtcccggaggttccggccataggtggggttgggtcgatgtacacctctgatcagagtaaaacctattcgaatagccgcgccctcggttatgggcaagccaagcaatgcacccaagttagtgggtcgaggccgcggcgcaacagctggcggac

SEQ ID NO: 79673 - DNA, 744 bp, Oryza sativa
  unsure (1)..(744): unsure at all n locations
  Clone ID: PAT_MRT4530_79370C.1
ttctgctctacgactccgagtccaaaccttcgacgagacgatgacgccctggacggcccaaccccaagtgactagcaggcgagcggttggcgtctgcctcctcaaccttgttgtccttgactcctcatcctcggtgtcgatagtcgatagctcaacctagacggacctggtaaaatggtaaggtgagaacatgatgtcagtaatactacttgactcttttagcattataatacttgatgtatgtctaaatattataggaaataacatatattgaagtcatataattgagtaaaagtatgccttatttattttagacatgaatttggtttaaaattttaggatcctaattttcatttcatcttatggcctcaaacccagagatggcgccgataccttatgatgtaaaacatgcttaatatcgaaatggttcatcaactaagatcgtatatgttgggtttagtcccatatcagtaattgatgatggggagcacgacttaaaaggtgggggcggtactcacccatcagactagtcttttaggttgtgtaggctcaggacttaaagttgcggctccggttggacctatggtgtagcaggcccaatgtgatttgggtggcccacggttgatgggccgggctgcgcactctgacaagttgtntcagagaccaaggttttggaatccgggaacaatctccatgggtcacatggtggagaggcccggtaacaagttttcgaggtcacatggg

SEQ ID NO: 79674 - DNA, 2166 bp, Oryza sativa
  Clone ID: PAT_MRT4530_79371C.1
atgctgtcaaccgacgatttcgtccatgccggaataatcacggccgccgtgttcgccgtgttgctggtagcgttgagcacgtacggccgtcgtttccgccacccggcgatccgcttcgtcatgttgggcgcctgcaccatcttcctcccgctcacctcctccatcatctccgtccttctgcggaggagcacggagagcaaatgcgacggcaccgccccggcgaaagggaagagcaacccagacatccagaacatgtggacgctcctcctgtggatagcgctcatcatcctcatcaagggcaacgccgacgtggcgtcggccggcgtcgccatgtccgcggccttccctgcctccggagacgtcagcatcgacggccagagggtgcggccacccttggagctactcgcgcagtacgcctggttggcctatctcatctacctgtgcatcccggtcgccgggtggctgggcattgtcaacaaggccatcttcatcgccttctgcgtgctcggcctcgccaagatggcgctcaagctggccgccttctggagcgccagcttctccttcgctcttggcaagaacgcccggctcatctccggctacatggcgcagctcgtcgaagacggcggcaaccacggtggcgtgccccgttacatagtggcgggggagaaggaggagcacgtcaaggagaatcctaagggttaccgcatcaagggcgatgcccttacgaacaagaagagcgacctcgtcacgctcgacagagtgtggcagatggcggcgccggacagcgacagcctgctggccacgcggccggagctcagggacctctgcctgtcctactccctgttcaagagcctccgccggcggctgtcgggctaccccctggccgacgcaggctcccccaatgcccttgatttcgtgctccgtggcatgggtcagggtggcggcggtggcagcgccgagcggtttttccgcgtcctcatcgacgagctctggtttgctagtgatttctactactctcccatctcgttgagctccttcagcggatggtgtgccgtgctcaaccacctcttctccgccctgatcgtcgtcggcgctgtcaccgtgggatggatctatcgcacgaagcaagtggtgattttcgacggctcgcaagcgttctactacatcgtcactgtcgtcctcctgctgtccgtcgtgttcatcgagatatgggagatcgtcgccgacgtgtgctccaactggaccaagatggccctgctcgcccactacatcaggcacgactcgccgtggcgccgattccgcttcgtccactcggcgctcgacgcggtgctgcggtggttcaggccggcgaggcggtggcgcgacaagatcgggcagaactcggtcctggagccacgccgtttccgcaagcgaaacgggtttctcgccgagaaattctacggccgcgccggcctcatggagtctgtcggggtctctttgatagtcatagaagcgatgtacaggtccttccggaacatttacggcctgcggacgaatgaactagcaagcagacgcaacagcgaatcggccagtcggcggcaacgccgacagggtgagttcgacaccgtcaccgacaagatcctcgcttggcacgttgcaactaggctcttcgagataactcacgcgcgtacttcaccggacaacaagatcgtcgcctgccatctgtcgtactactgcgcgtacctggtggcggccgtgccggagctgcttccggactgccctgcgtggacccaaaaacggtacaagaaggtggcgaccgacgtgcgcgcggtgctgggcagtcacggcatcgccggcggtagtacggcgtcggcgagcgacgcgcagctttcgcagctgggcgaccgcgacaaggtgctgcgggatggagtggcgatcgttgggcgcctggtggaggagttcgccgagggcgagggcgtggacgaggagttggcgtggcagttccttgcgaatttctggtcggagatggtgatctacgtggcgccgtcggagaacgtcaaggggcacgttgaggccatgggccgcggcggcgagttcgtcacgctcgtgtgggcgctgctcctgcacgccggcatcaccacaaggcctccggcgcaagcagtattataccgtagggaaactgtgtga

SEQ ID NO: 79675 - DNA, 340 bp, Oryza sativa
  Clone ID: PAT_MRT4530_79372C.1
atagcataccagcggagttgtctgctggagaatgagtcgaaccgatggtggcggtgtttcggatgttgaagacaggatcaagggctatacactttgtgggtgtgacacgattgctgctgggcaggctgatgcaccagaccacacatgcaacgacaccggagcccttaaccaggctttctatgctgtaaatggaaacgtatatataggaactatataattcaggccaactgaatgaacaggctgctttactgatgctgacatacctagctaattatgaacatagctactgctaggtcttgtgaagatcatcaaagcccgatgatgcttgcggcatcctttt

SEQ ID NO: 79676 - DNA, 406 bp, Oryza sativa
  Clone ID: PAT_MRT4530_79373C.1
tttttttttttttttttttttttttttttttttttttttttttctaacgcttgggcggactcttggattatacaccgaaaataccggaccggaaccggcaggcggaccaacttacccaaaaatgagtcgtattaaaaccagccctaataagggacatagctgcccccgggaaaaacgggaacccgcccacaaaaccaaacaacataccacccggaggcaaaaaatgaaaagccgggggggccaaaggaaaaagctaactcacagaaaaaaagttgcgctcacggaccgataaaagacagaaaacctgaagaaaaaagtgaaaaacgaagaggccaaaacgcggagagaagcggaaagagatgggccaccaaaaggccgttttacaccaaaaaaacgggcaacacgt

SEQ ID NO: 79677 - DNA, 146 bp, Oryza sativa
  Clone ID: PAT_MRT4530_79374C.1
gtggtacacccccctgtactaagctcaacttatgatgcatgctcgaaactacggactgaatgctaaggaaaaggagcacatcgaggcgaaagcatatagagcatttcctaagcacaggcagcttgggatggagggggacctgacca

SEQ ID NO: 79678 - DNA, 474 bp, Oryza sativa
  Clone ID: PAT_MRT4530_79375C.1
tccaagcaagcacttaaatcttatgccgttgtcttcgacgcggtgtatacaccaaaagagaccagacttctccgagaggccgcagagtgtggtccattagtagttagcggtttcgagatagtcatagatagctcaatgggtcaatttgttcatttaaagatccagtaagtggttgattgtaaattccgagcactggcgaattccttggacaatcctgacgcaatgaaggcagctgggatcacagcacacaaggctcgtttgtgagtctctggttgagttcaccgttatatttatgggtagatcgtgagagggtttcaactcaaactttgtcaaattgtattacatttttgtattggacaagtttcttttttgcccctagatggttgcatgaaagatcggtaaggaaagcttgtttggagattggttgcatcaaagaaaaaataaggaagcttgtttggagatttcatgagggta

SEQ ID NO: 79679 - DNA, 6408 bp, Oryza sativa
  Clone ID: PAT_MRT4530_79376C.1
atggaggaggaccagtcagcaattccggttgctgaaggtgccatcaagagcatcaagcttagcctatccactgaggatgagattcgtacttattctataaatgactgtcctgtcactcatcctagtcagctcggaaatcccttccttgggttacctttggagacaggaaaatgcgagtcctgtggtgcctcagaaaatggaaaatgcgaagggcatttcgggtacattgagctgcctgtgcctatatatcacccttgccatgtaacggaactgaggcagatattaaatgtggtatgtttgaaatgcctccgcgtcaagaaaggaaaggtcaaacagacagagggaaaggataacacatcagcattgtcatgctactattgtcggagaatgagtgacagactagcactgtattcagttttatgtttgttcagtaacatgtcgtcgttgaaaacagtacacaggatcaaagttatgctgtatgatggagtgttattggaacttgatcttccggcattatctttgaaagaaatcaaaacagcagatggtgcatttcgtttagagttgaaaatgcctcctaggaaattcatgacagaaggctcatggaacttccttgacaagtatggatttcaccatggtggaacctcccactgcaggaccttgctcccggaagaggctctcaatatattgaagaaaattcctgaagaaacgaagaggaaactagctgctcgtggttacattgctcaatctggatatgtgatgaaatacctccccgtgccaccaaattgtttatacattccagaatttacagatgggcagagcatcatgtcctatgacatatcaatatctctgctgaagaaggtgcttcagaaaatagagcagataaaaaagtcaagagctggatccccaaactttgaatcacatgaagttgaatcatgtgatctacagctctctattgcccagtacatacatctaaggggcactacaaggggtcctcaagacaacaccaagagatttgcaatcagtactgatccttctgcgttatcaacaaaacaatggctggagaagatgagaacattatttatcagcaaagggtcagggttttcatcacgcagtgtacttactggagatccatatattggagtagatgtgattggactgccttctgaagtggcaaaaagaatcactttcgaagagcaggtaacagacatcaaccttaacaggttgcaagagattgtggataagggattgtgtttgacctacagagatggccaggcaacctatgccatcaccgttggatccaaaggtcacactaccctgaaagtcggacagactatcagtaggagaattgttgatggggatgttgttttccttaaccgtccacccagtacccacaagcattccctccaggcatttcgcgtgtatgtccatgaagaccatacggtcaagatcaatccgctcatatgcgcaccttttgcagcggactttgacggtgattgtgtgcacatctattatccacagtcccttgctgcaaaagctgaagcactggagcttttcagtgtggagaagcagcttaccagttcgcacagtggcaaggtcaatctccagctagttagtgacagtttgcttgctctgaagcatatgtcttccagaacaatgttgagcaaagaagcagctaaccagctggcaatgcttgttacatgttctcttccagatcctgctgtgatcaagtcaaagccgtactggacaatctcgcaaatagtgcaaggtgctctgccaaaagccttaacttctcaaggggacaaacacgtagtcagggacagcactattataaaactggatcttgacaaagaatctgttcagacatcattctcagatttagtgtattccactctttctgttaagggtccaggagaagcactacaatttttgaatgtgctgcagccattattgatggaattgattcttttggatggctttagtgtaagcctccaggacttcaatgttcccaaggttctattggaagaagcacagaagaacattgaaaaacagtctcttatccttgaacaatcaagatttgcagaaaatcaggttgttgaaatgcgtgttgataataatttgaaggacatcaaacagcaaatttcagattttgttgtgaaacgctctcatcttggacttctgattgatccaaagagtgactcttcagtgtctaaagttgtccagcagcttggttttgtgggtttacaactttaccgtgaggggaagttctactcacgtcgtctggtggaggattgctactacacttttgtgaacaagcacccagctgtcagagaagaacattctccagaggcatatggtcttgtacggagttcatattttcatggccttaatccgtatgaggagctggtgcatgctatttcgacaagagaagctattgttcgctcctctagggggttgacggagcctggaacactatttaagaatctaatggcgttactgcgggatgtcgtcatatgctatgatgggacagtaagaaatgtctgcagcaagtctatcatacaacttaactacacggaggatgatgccttggacttccctagtgcaataggtcctggcgaaccagttggtgtcttggctgcgactgctatctccaaccctgcatacaaggctgtcttggatgcatctcagagtaacaatacttcatgggagcggatgaagaagttttgcaaggaaaaggctgctattgcagttcagggctgcctaaggagaattacgttagaagattgtgctactgacatctgcattgaggatggaaactgggctgcacccgctgggtttcagcaccccgtaccacccccgcaatgcaagatattgcccgtccccatccccatccccgcacacgggtcagtcaagtttccccctgtccccatccctgcaccagaacaccttaaatataacattcacgttgtcaggtaccagaagcaaataggtttagatggaacttcagaagcagccccagcacttgttggccatattcatcttgacagggcacatttagaaaggatcaacattagcactgaagatattcttcagaaatgccaagaagtttctgggaaatatgggaagaagaaaggacatctcagtaacctgtttaaaaatattacattctctacttgcgattgtttattcacacagaagctggttgatggaaagctacctaagcttccgtgtttgcaattctttgtttctgataacatgatagtatctgaatcagtggagagagcagtcagtgtgttagctgattctctatgtggagtgcttttgaatacaatcataaaaggtgatcctcgaattcaagaggctaaaattgtttgggttggatcggatgcaacatcttgggttaaaaacacacagaaggcatcaaagggtgagccagcagtagaaattattgttgaagaagaggaagctttacatattggtgatgcctggagaacaacaatggatgcctgcataccggttctgaacctcattgatatacggagatcaatcccttatggtattcaacaagtgcgagaacttcttggcatctcatgtgcttttgatcaagttgtgcagcggctttcaacaactgtaaggatggtcgctaaagatgttctcaaagatcatctggtacttgtggcaaatagcatgacatttactggaaacctgaatggatttaacaatgctggttacaaggccaccttccgttccttaaaagttcaagtacctttcacagagtccacattgattacccctatgaaatgctttgagaaggctgcagagaaatgtcattcggattcattgggatgtgttgtttcatcatgttcttggggcaagcatgctgcaagtggtactggatcatcttttcagattctgtggaatgaaagtcagctgaaaagcaataaggagtatggtgatggcctgtatgattacttggcattggtgcgtactgacgaggaaaaggcaagatacacattctttgatgatgtggactaccttgcagaagagaacgaggcagatgtgtgcttatctcctgaattggatgggaccattggtcaaccgatcttcgatgataatttggaagagcaagatgttcagaataacagctcgtgggataatggcacaacaacaaatgcaagctgggaacagaatggtagtgctggaaatgattctgataaatggggaggttggaatgatgcagctgcaggagctgacacgggagtcacaaaaccagcaaaccaagggaattcgtgttgggatgtgcctgcgacagtggaaaagagttcctctgattggggaggctggggcactgaaaaggcgaaggagaaggagaaaatatctgaagagccagctcaacatgatgcttggtctgtccagggccctaaaagggcaacagatggaggagccagctggaagaagcagtctagcactcagaatgatgggaactcctggaaagagaacaagggaagaggatcaaatggaggttcctgggagaaagataatgcgcaaaagggatcatggggcaggggcaatgatgaagctgaaaataataatgatgtgcaaaacaaatcttgggagactgtggctgcagatgctcatgcttctacagagaagtcctggggcaatgttactgcatctccatcggataatgcatggagtgctgctccggtttcccaagggaatggaagttcagatacaaagcaatctgattcttgggatggctggaagtctgctggagttgacaaagcaattaacaaagacaaggaatccttgggcaatgtgcctgcatctccatcatttagtgcgtggaatgcttctccagtttcccaagggaatgaacgttcagatgcaaagcaatctgattcttgggatggctggaagtctgctggagttgacaaagcaattaacaaagacaaggaatccttgggcaatgtgcctgcatctccatcatttagtgcgtggaatgctgctccagtttcccaagggaatgaacgtttagatgcaaagcaatctgattcttgggatggctggaagtctgctggagttgatgattcagttaaagacaaggaatcctggggtaatgtgcctgcatccccatcagatagtgcgtggaatgctgctccagtttcccaagggaatgaaagttcagatgcaaagcaatctgattcttgggatggttggaagtctgctggagttgatgcttcaactaacaaagacaaggaatcctggggcaatgtgcctgcatctccatcagatagtgcatggaatgctgctccagtttcccaaggggatgatgtctggaattctgctgaagccaatgagtcacgtaataaggactggaaatcagatggatggggtgccagaggtggcaattggaggggccaaagaaacaatcctggtaggcccccaaggaaacctgatggcaggggtctgcctaggagacctgatgagagggggccaccaaggcgacactttgacctaacagctgaggaggaaaagattctaggagaaattgaacccactgtgctgagcatcagaaagattttccgtgaatcaattgatagcataaaactttctccggaagacgaaaaattcatcaaagagaatgttcttgaacaccaccctgagaaacaatcaaaggtgtctggtgaaatcgatcacataatggttgacaagcaccaagtgttccaggatagtcggtgcttgtttgtggtgtcttcagatggaactcggtcagatttctcctatttaaaatgcatggagaattttgtgaggaagacctaccctgagcatggggactcattctgcaagaagtatttcaagaggcgccgtgaccaaccaccagcagctgatggaggcacagcaccaggcactccagctggggctacacagtctactgcagttgatacccaggagggcacttcacagcagacccaaccagatatcgcaaccgctccagctgcaactcaacaagagactcttcaagacactccagctcctccagcagacgatggattgctcgggaagggacctagcccgtctgactgatgctcagggtgcgcttagagctgccaacatcctgcttgtgctctaatcctgccactctttttttcctacttggcctgacattgcctagtgactagacagatggtgactttgtgtagtagagaagggttagcagtctttaggtctcactcttccagacgaactctgtaaattctggatgttagtgagctgcatcccgtagcttaaactcgtttttaccctctctttttttttatcttttttgtctttccagtatggttatttggttagtccaatgcaagccgattctgcgaggccgtgccgaaaaaaaaaaaaagaaggcgcgaa

SEQ ID NO: 79680 - DNA, 1133 bp, Oryza sativa
  Clone ID: PAT_MRT4530_79377C.1
ggggctacagcaaagttacttttttttaccagtgtaagtcacaactgaacacagaagtccgaataccagcaattgcaattttaacgtaaaggaggcacgaggataggtcacaagaaaggcaaaggataaaagttacaagcgttgtatgatactatgatcactattttatcttccatccgacaacataacactcacgatccacagcatgcagatttctgcaaagttgtggcctcagcatcaccctctggtttgttgatcttgatcgtgcgatcctcagtcttggaatcagtctccgcaagtctttgcttaatatcccctaagatccacagcaagctgatttctgagccgccgctgcctcggcttccccttccgatttgatcttgatggttcggtcctcaggcttggaatcagtctctgagagtctttgtttgatatctcttgctatagaaaagaaaacctgctcaacattcaggtttgtctttgcactcgtttcaaagaacttgattccgtattcatcagcaagagcctgtccctttgaagtgggtacagcccttttgctttcatccatatcagctttgttccccaccaaaattttgttcacattatcagaggcatgttgttcgatgtttctgatccaatttcttatgttgttgaatgaagattcatcggtgacatcataaacgagtaaaatgcccattgctcccctgtagtaagcagtggtaatagttcgaaagcgttcttggccagcagtatcccagatttgcaatttaatccgtttaccatccaactcaacggtccttatcttgaagtcaataccaattgtggtaatgaaactagtcgtgaaagagccatctgagaaccgtaggaggagacaactttttcctacaccgctgtcgccaatgaggagcagcttgatgagataatcgtagtcggcccgagccctagccggcggcgccgccatcgctaccaatcaatcccccaagcccgtggtacacgcgcggcgggggggcgcggccgtccgaggcggcggcggcggcggcggcgatctcctccggcgtcgtctccccctcacgagcagcggcagcgcaggcggcgagttgcgtgggggaggggaggagattcgcgggaaaaag

SEQ ID NO: 79681 - DNA, 1416 bp, Oryza sativa
  Clone ID: PAT_MRT4530_79378C.1
ccaaactcacctcacaccagcaatcccaccgaatcggatctcaaattcgcaggtgaaacacaaccagatctcgcgcgcgctgcgcgggatcgatcgccgagcgcgcggcgaggggagagcgagcgggatggcgcagattcagctacgtaatggtcgaaagaattgcatgccctgccctttactcctataataactgaactgaaatggctacccagtagtctcctgatggacaacttctggaaaccgtaacatcagctccaccaattttattgtgctacagcaaagttacttttttttaccagtgtaagtcacaactgaacacagaagtccgaataccagcaattgcaattttaacgtaaaggaggcacgaggataggtcacaagaaaggcaaaggataaaagttacaagcgttgtatgatactatgatcactattttatcttccatccgacaacataacactcacgatccacagcatgcagatttctgcaaagttgtggcctcagcatcaccctctggtttgttgatcttgatcgtgcgatcctcagtcttggaatcagtctccgcaagtctttgcttaatatcccttgctattgaaaagaaaacctgctcgacattcaggtttgtctttgcactcgtttcaaagaacttgatgccatattcatcagcaagtgcttgcccctttgaagttggtacggcccttttgctttcatccatgtcagctttgttgcctaccaaaatcttgttcacattatcggaagcatgttgctctatgttcctaatccagtttcttatattattaaatgatgactcgtcggtgacatcataaacaagcaaaatacccattgctcccctgtagtaggcagttgtaatagttcggaaacgttcttgaccagctgtatcccagatttgaagtttaatccgtttaccatccagttcgattgttcttattttgaaatcaatcccgatggtggtaataaaactggtggtgaaggaaccatcagagaaccgtaggaggagacaacttttcccaacaccgctgtcgccgatgaggagcagcttgatgaggtaatcgtagtcggcccgagccctcgccggcggcgccgccatcgattcccccaatccccacactagagcgtcccctccccctcaacggatcgaactgggctggcggactggcgcgcgggaggcgaaccggatcgagcgatctcgctacaggcggaggcggcggcggcggcggcgggttccggcctctcctcctccggtcgccgagccctcgacgctggctgcggcggcgaggggacacggacgcggcgagatcggagggagggggagagagagagagagaaggggaaggaaggaaggaaggagggtggtggtggtggaaccggtccaccggcttttttttatttttttt

SEQ ID NO: 79682 - DNA, 1296 bp, Oryza sativa
  Clone ID: PAT_MRT4530_79379C.1
atgttcacaccgagctgaaggccataaatagtagagaccaagctgcatcttcttgttatcttcagttatccagaagttcagagcagtagaggaagaacaggataagatcatagctagagatttcagagagagaatctagagagagagagaagagatggctggaggagagcatggagttaatggccagcatgaagaaaccagagctatggaggaaggcagcagagatcatcaagcaaggtgtgagaattcagagcaagatggaggaagcaagagctctagtaataaccaccccatgttctctgtccaattcgcgcagaaggtgatcgcggagatcttggggacgttcttcctcatcttcgcggggtgcgcggcggtggcggtgaacaagaggacgggaggcacggtgacgttcccggggatctgcatcacgtgggggctcgccgtgatggtgatggtgtactccgtcggccacatctccggcgcgcacctcaacccggcggtcaccctcgcgttcgccacctgcggcaggttcccgtggcggcgggtgccggcgtacgcggcggcgcaggtggccggctcggcggcggcgagcgcggcgctgcgggcgctgttcggcggcgcgccggagcacttcttcgggacggcgccggccgggtccgacgtgcagtcgctggcgatggagttcatcatcaccttctacctcatgttcgtcgtctccggcgtcgccaccgacaaccgagctattggtgaactagctggccttgccgttggagctaccgtcttagtaaatgtgctctttgctgggtacacgtcttgagcgtccatgaacccggccaggaccatcggaccggcgatcatcctcggccggtataccggtatctgggtgtacatcgccggcccggttttcggcgcagttgctggcgcgtgggcctacaatcttatccggttcaccgacaaaccgctaagagagatctccatgactgcatccttcattagaagcacaaggaggaactaggtcccagaattgatcagttttattgtggtaaaatgtttccttttttttttctgtagctagtgatgttgatggaatgaatgggcagtaaaagtaattgacactgtgattgcatagattttacatgctttggttggcttgttgtagcttaaatggtgaaggattgggttacttgttgtaattatcattctgaagaaaaacattgaccccaaaaaaaaaaaaaaaaaaaaaaaaagatttatttttatttgagcattatcgatcacatcaaaaaaaaaaaaaaa

SEQ ID NO: 79683 - DNA, 303 bp, Oryza sativa
  Clone ID: PAT_MRT4530_7937C.1
tttcatcctgataaatgtggaattacatactacatgagtgccctctatctaggtcagtgacgccacattctgaatatacataattattaatggggaattaaagtacaaattgaaaactgatttaaagtgtaacactttcactcatccaatactcattgcctacggagattttccaagttaatccactggcgctggctgagtgggctcactctacgatttgaattcgctctaccttgccgatgaccagtatgtataccctaaactccgaataactgactcaatgagcctaccttcggtgacagg

SEQ ID NO: 79684 - DNA, 648 bp, Oryza sativa
  Clone ID: PAT_MRT4530_79380C.1
atgcggtatcgcctcctcctcctcctcctcctctgggttggttgcttgctgcctcaccccgactcggagatcataagcttcgcgaagaggacggccaaggacctcaagctgccggccaacttcgtcccccagatgctccactccatccaggggcaactgaccgagttccgttcctacgagggagaggagatgcagatcagggagaagattgtgcccctcaagattgacctccggataaacaatactgtaatcagagatcagttcttgtgggatataggcaacctggatagtgatcctgaggaatttgcaaggacgctatgtgacgatttgaacattacagatcctgaagttgggcctgcaatagctgtctccatccgcgagcagctttatgagattgctagtcaaagtgtttctgctatgagggaagcagctagagtttcaaagaaggggaggcgagcaccagaatttgcttcaaatagtaaagccatgaacaattcactagatctattcaagtattttggcagcaaagggagtgtcgttcggaaaaggaaggaatggtacttgtatgagcctgttgtagatgtcataactaatgaggaagttggagtaactgatgcaacagaggagattaactccagatgtgactga

SEQ ID NO: 79685 - DNA, 123 bp, Oryza sativa
  Clone ID: PAT_MRT4530_79381C.1
atggcggtgtgcagcgtggtggtccttggtttccccggtgctggatctttcgtttctagcttctacttgatctttacaactagctacgaagatgacatctgtggagccctctcctactcggag

SEQ ID NO: 79686 - DNA, 1242 bp, Oryza sativa
  Clone ID: PAT_MRT4530_79382C.1
atggcgggggtgtgtggctccgtcgcggcggcggcggcgaggatcgcggttgtgatggtgtcggcgtcggcgggcggcctgattgtggcgaaggggacttaggcacgtactggtggggactcgtggcagtgtagtcgcgggtcaaggcatctcaatgtatagagcacaccagcgtcattcacggggtcatgcccaagcccgccgtgcaggaacagcaatgttccgctaggttatgtaagggctcggtcgaccagcggaggccgcacggtttgttcttgtggccgcggaggttttcgcaacgcatccaccaccagagtcctgaggtcaggttcccaacccaaagctccagcaccacctccgtccgctgaactcactccgcccgctaccacgctgaaccatgattcaccgttgcccccgccattatcggcatcttcacctgccgaaccccccgccgccattccccctccgaactcgcgctcaccatcagtgcaaggagggtctttcacaagctacgagaccaccgtcacggatgtcatgaatgtgaacgccatgggaagcccgatcgccgcgccgggcgacattctcgccatcccattgccagaccatggactaattgtggcaaatgggacttatgcacttactgctggaaactgtgtgcagtgtagttgcgggccagggaatctcaatttatattgcacaccagcttcattgacagggtcatgtccaagcatgcagtgcagtaacagcaatgttctgctaggctgcaatgtttcttcttgtagctacggaggttttgttaatggaaccattaccacattgctgagcacaggtcttcaatccagatgtccaggaccacatcagttccctgaactcactgaaccccctaccacggtgaaccatgattcaacgtttctcccgccattatcggcacctggacctgcagaagccggcggcgccattccccctccgaactcaggctcaccatcagtgcaaggagggtctttcacactgcccaaagtatccactgcaaatggccctgccggaagcgtttcagaggctccttggatgaacaagccgcatcagatcctgtcaagtttcatcttgtgtctactacttctctactcgcagatgtgaattgcaatgtgtagtcaaggaccaattctgtagtaattgtaaacttgaagcctcatttaggcaaggggaggtggacagtatcatatcggcgatgtttttggagcttat

SEQ ID NO: 79687 - DNA, 441 bp, Oryza sativa
  Clone ID: PAT_MRT4530_79383C.1
atggcggtggtgcgggtggcagcgatggatggcgatggcgatggctgtctacggcgccgcttcgccgccatctcagacgcggcctcgtcgccctcctccttcgtgtccgaccgccgcgtcgcgcacgcggccctagtggagcgcggcgccgctcttgctgaccgcctggagcggcggctgcccctcccccgagtggtgacgcgggagatggtggcgctggctcattcccgagcctccctctccgactgcctcataaacgccaccaccggtcaccccttcatcttcgagggcaccttcttcccctccctcgtcgcccgcatcaacttcggcacccccaccaccgaccctgtccgctaccccgacgaccgcgtctgggagtccaacatggcgcgcatgcccaacttcctcgttgatgtcgcgctcgctaccgcccagacctga

SEQ ID NO: 79688 - DNA, 592 bp, Oryza sativa
  Clone ID: PAT_MRT4530_79384C.1
ctgttctactactggtacctcactaatgatggcatggagcacctgaggaattaccttaacttgccgtctgagattgtacctgctacactcaagaagtctgcaaggccaccaggccgcccatttggctctggcccccctggtgatcgcccaaggggcccacctcggttcgaaggggacagaccaaggtttggagaccgggatggctaccgtggtggacctcgtggtgcgcctggtgattttggtggtgagaagggtggtgctcctgcagaattccagccatcattcaggagttctggtggtagacctggctttggacgcggtggcggcggtggtttcggtgctggtccaacctcttcctccatggagtgaaaggagctcaggattcttgtcgcaggagacattttagtattcaagttttgcagtggtgtttgcagtagagatcaatgcgtagcacctatgttgaaaccttaagagatgcaagtgtaattctcctggtgttgatggcttgagagtttatcccaaaccctctgtagaagccaatgccaatggaaatatcgttcagctactcagcaatcaagtttttcctccccaa

SEQ ID NO: 79689 - DNA, 518 bp, Oryza sativa
  unsure (1)..(518): unsure at all n locations
  Clone ID: PAT_MRT4530_79385C.1
acccccccccctatttaaatttaaaacggaacgggtggggcaacccccccaaagggggcgggggctaaaatccgggaatcccgttcccccccgctttgccaaaggggggaaaagccccgagcccgataacgctttaaaaaaccggggcccccgaaaaggggggcccaaggacacccagggggctaagtcccccccccccattttggcctcgccggggggccccccccgggggggggtggggggggccgccccagaaaaaccgccctttgcgttgcccaggcccgccctggccccccgggggaccccggggccaaaggggggggggcccccaggggtaaacccggggggccggggggcctcctaaaagaggcgcttccccagggccctcaaaaaattgggggctttgttncccttgcccccctgggggacccccccccagagggaaacccccgggggggcccccggggtctttttcccccactggacccggccatgggggagtccctaaaagccggggc

SEQ ID NO: 79690 - DNA, 207 bp, Oryza sativa
  Clone ID: PAT_MRT4530_79386C.1
atatatactatatatatatatatatatatatatcgtcttgatcacctagcttcgtaaagagagatcagcatatatgttgttcaatcacatctgcatagcataataatgcatgcatagattttatatgtatctctttccggtgctgctatgtgtatctctatatgattaaataaaaataccatgttttataaaaaaaaaaaaaaaaaa

SEQ ID NO: 79691 - DNA, 444 bp, Oryza sativa
  unsure (1)..(444): unsure at all n locations
  Clone ID: PAT_MRT4530_79387C.1
aaattggatatgtttagttctcctcgaactttcagaaatttngtcacatcaaatatttagacacatgtatatagcattaaatgtggacgagtaaaaaaaccaattacacagtttgcatgtaaattgcgagtcaaattttttgagtttaattacgtcatgatttgacaatatggtgctacagtaaacatttgctaatgacagattaattaggcttaatagattcgtctnttagcttacaggcggaatctgtaatttattttgttattaatctatatttaatactttaaatatgtgtccgtatactttaaaaaaaaaattggccgtacaactaaataccgttgggtagttgggtagttacctgggtacttaccttccctgttattcctcctccatcttgcataaccaacttaaggacccgtaacttacaagaaaaaaaaaaaaaaa

SEQ ID NO: 79692 - DNA, 484 bp, Oryza sativa
  Clone ID: PAT_MRT4530_79388C.1
cccacgcgtacgcccacgcgtccgcccacgcgtccgaccacgcgttcgctgacgcgtgggctactaacaaaggtatcagaggaaattaacgtatatatgtagctatatatagaaactgacttcattcaaaggcaagaacagaaggcaaggtatactgatactaggtgacagcatgaaagctgcccacatggctgagacatatcagacatatgatcatgactctaagcatccccataaaaagagaaagcactcacgctgtgaaatagccggcgagctgacaccacacggttgcaatgttaccacggagcatacgcagaacagcagcctggctaaagagcattagactacttcctacactgaggctatgcccggtacaacatatagctgactttccaccactaagactctgacgactgaagcgtcaagtacccctagttaaaccagaaatggtgttaacattcctgtaaagtctacacctacaaat

SEQ ID NO: 79693 - DNA, 216 bp, Oryza sativa
  Clone ID: PAT_MRT4530_79389C.1
atggcgatcgaaccagacaagattgaaatatgttttgacacaagaggatcagaagctgggattactgcaaaggtggtcttctgctgcgacagctatagctgtgtggcaattgtgcaggagatggcgatgttgggtgttcatcagcttgtcaagccgacgatggccgtttgtctggatggcagcgtcaccatattcgtgaaaacgagtgtgaactag

SEQ ID NO: 79694 - DNA, 1115 bp, Oryza sativa
  Clone ID: PAT_MRT4530_7938C.1
atgaatagagtacccactagttggggttttgtttattctagggtgaacaaccgggagagaggggcgcgcggaccaggtccacgggggtgggaaccacgcggcagcctcacggtccacggtggaccgggtgcacccgggctcactccggccggcgccgtgggccccacgcgtcagccgcagccgagggcgcgggcggctgacggctgggccccacgcggcaaccgcgcggcgcgcccgaaggtggccacgtcgacgcggccggcgggaggcggcgcccgcgccccgatggtcgccgccggcgaccactggcgcggcggagcggcggccgagagaggggagggaagggggaaaggaggcgacggtccacggctcaccccggggcgacggcggcggcggaggaggcggccggagcggagggaggcggtggcgcggctcgggtcgacggggtcggtggtgctccggtggtcggcgagcgaaacggaggggtggacgaggtcggcaaggatgcggcgaagctgaaggaggcggcgccgaggtgggaggcggtccggggcgacgacggtggcggaccggagctcggcggcgacggcggagagagagagcgacggcgcgagctcgaatccggcgaggaggaagggcggcgagaggcggaaacggacgggagaagcgcggggagggtttaaatagggcaggggagagagagggcggccgagagaggaaggaaaccggcgcggcgttctcgggctccatcaatggcgccggtgggattaggggaggggtttccaaacgaatccaagggagagagggagggaaaattggggggaaagggagaggggatcacggggagtgattccccccacttaaatgcacgcggggacggcgggatgcggcggattcgacggcggcggcggcgcttggcgcaggcggagcggcgggagcggcgggaggtcggggatgacgggtgggccccacccgtcagtgagggtggcgggcgggcccgcccgtcagcggcgcgcgcgctcggagaggccgagtgggccgcggggaggaggagggagaggggaagggagatgggccgagccggcccaagagggggaggggggggattttaaggt

SEQ ID NO: 79695 - DNA, 2397 bp, Oryza sativa
  Clone ID: PAT_MRT4530_79390C.1
atggatcttgagaagtctacctcaaccaccgcgtccttgaagaaactgcaagatgacagtgccctccctggtcgcgggaccatgtagagggaggcaggaggtatagaacctgaacccatcttgggccgcatggttgtagtcgaagattatatttcttgcggttttcttcctccgccttctgagtttcttcttcctgtcttgaacttctatgtgctttctttgcttcacttgaaccccaactctatcgcatttcttagcatcttctctcatctttgcgaggcctacattggggtagagcccttcctttatctcttccgcttttactatgagctgcgttggatggaacccaacagggtatctggatgcgttggattctgacttcgggatcgcctgaagtcgcgttacatccccttccaatgcccttcttctcgtagcaagtggcgggcgagatggttctatcttcagatagagaattcggatctcgtccttgttgtccctgaagatcagccagaaaaaatcccagagtggaccgccaaacccgccctgactccctccctccaatcttttatcgacatcattgatgatctccggaaataggggttatcgggatacgaagtcactgccgacttcgtaggtaggcggattcaaccgctgcaggcccgcgcccatttggcctttgattactctgggccagaggacacgacccgggtctctcctcggggcctggatagtgacaccgtagggcgccgcgtcagtcaggcgatgatcagcgccccctcagcggtgggcgacatccccgtccccctctgcgataaggacctggccgaacgcaccgctgcgattaatgcggctgcgttgttgaaggagagcgtcgccaaggaggcatccgacgctgctgctaccaccacgagtggcagcaatgttccaaagaggggaaggaaattctcctccgtactcgggacccgctggaaagcgacgaactccgcggacttgaacgcgtctcctctgcctcagcgaaggcagaggttggtgacgatcggcgagaagatggcatgggcgaaggtggcgcaaggtgggactgatgctgcttccagcgcgtcccctgcggcgacctcgacaggagccgtggtcgctactaaggaccaggaggcggcgccgagtagccccgtcgtcagcctcgtgcctacccggagcctgtccaccgatgcgctcacctggggggagctccaagcggaggtggagcgcatcctctaggctggagctcgcagcgtaggtcgcgagatcgaggaggcccgggcggcggcgttgtcggcgaaccagcgtgccgagcagctggcgcgcgacctggcggaggcccacgaggacctcctaaagatgagggagctggtagccggcaacgagatgcagcggcgcaggctcgagcaccggatgtcggagctcgagggcagtatgatcgacatccgcggttcgctgcaacatcgttcaccagcctgcaccaactcgccggggagtgcggtgtcacgactaccatcccgacgcaccccgatgagttctcgctgacgtcatcgctcgcggaattggctacggcgatggaggagatcccctccaagcacgcggctaggatcggcgaggagacgtccaacggcatctacaccgggacatgccatgtccttgcgtgcatgaggctggcacatcccgatctagaccttaagagggctttggatcggggggccgtcgatgatgcgtgcaaggctacgatggaagaagtcggtgacttgggggaaaatgttgatatcgaggatgtccagcagcgcgggcagcccgatctgccggtgatcgtcccggcgctcacactcgagccgttcgtaccgcgggaggagatcagtcaaagcccgtccgcggaggcgaatatggcgatgactcgggcaaacttcgagaacacgttggctgaccgagatcgtcgaatccaatattggaagacgaagctcgaggtggccgaactcgaaaaaaccatggtggaggtgaagaaggactaggccgtggaagctctccgaggtcgcaagggtttgcaaggagctccgagttccccgcggagatcccgaggagtcggcggctggttatatctcgtggttgaatcgggcctgcgcacagctcgaagggattggcaagcgcattgacgaggccctgaagcaggagtgtcgtcgagcgagccgctacgccggaggacatgtgctggcctgcatccgagatcaccgcccgcagctgcacctcgagttccttcgcgaagggttctcgcgttctcaaaggacacccgcggagatcgacggtcttgcgcagtcgatggtgccacttgccgagaaggtttttgtatcctatagaaaaatttctaaaggaagc

SEQ ID NO: 79696 - DNA, 698 bp, Oryza sativa
  Clone ID: PAT_MRT4530_79391C.1
gagcggcacgccgatgtcgaggggaccaagtgcggaggctcaagtacaactcgacggtggagatcgtgctcagaacccgaccgccttcccgtcggagaaccacccgatccacctccacggcttcaacttcttcgtgctggcccagggcctcggcaacttcacgccgggcaacgtgagcggctacaacctcgtcgacccggtttcgcgcaacaccctcgccgtgccgaccggcggctgggccgtcatccgtttcgttgccaacaatccaggcatgtggttcttccattgccaccttgacgcgcacgttccgatggggctcggcatggtgttcgcggtggataacgggacgacgcctgactccttcctccctccgccgcctgccgatctgccgaagtgctagaacctgcaagattctggcgttggtgtcaaattgtaatgcactttcgtagccaaattttacttcatatttgttcttgtgtttgtgtaaatggagtacaggaggcacgaaacgaggtagtgccgttcgtttatttgttctgtgtatgtgtatcatgtgtaaactgtaaagaggtctgttttttttttcctctccgggggaacgtgtaaactgtaaagcaacaaatgtcaaacttcagattcctttgactgtgttaaacatgaatttattccaggataccaattaagcaacgatttgggag

SEQ ID NO: 79697 - DNA, 462 bp, Oryza sativa
  Clone ID: PAT_MRT4530_79392C.1
atggagaggggtggcggcaccatgaggggagggtattacaacctcaagaacgtttacttacttctcgccgatcgtcaccaacctctgccttcgctgaggcagaggagacgcgttcaagtcctgagcaagatgaaatgggcgggtcccgagtacggaggagaatttccttcccctctttggaacattgctgccactcgtggtggtagcagcagcgtcggatgcctccttggcgacgctctccttcaacaacgcagccgcctggtggtccacaagtggcccgatgaaatccgtcagtgggagagcctgcacaacgtgaagtcacgacgcgatctcgagaagaaagatgtaaaggaatcatcgagtacactcacattaatcgcagcggtgcgttcggccaggtccttatcgcagagggggacggggatgtcgcccaccgctgagggggcgctgatcatcgcctga

SEQ ID NO: 79698 - DNA, 491 bp, Oryza sativa
  Clone ID: PAT_MRT4530_79393C.1
ctaccaaataatccgccgtctcaattttttggcgaatgattcattttcggagtatgcttttgcaggtttacacaagaagcaacagcttctagcaagaaaacaagaaaaaaaaatcaagggttgcaggtatgtacacaagcccagcctagtgctgttattcacattttctccttttctccacaacaaataaagtgcgagaaattccaccatgaactttctctccctcttttcctctttcaccatcgcgagctcactgccatttcaaatggacaatggccgcctgagatggaataggagtttcccttctcctttcttcaaccttcgcctgcatccatgaccagatgcgaccaattcccttgccagccttatatctgggtggatgggcacaacacaaagccatgctccggcattcccatcttgctcatctatggagcaattccacaactgcctgactaaaactctagtacatccttgaaacaccatattgaacg

SEQ ID NO: 79699 - DNA, 279 bp, Oryza sativa
  Clone ID: PAT_MRT4530_79394C.1
ttccgggtccacccaagcgttccgggaccccgtgggtggcattggcattggttgggcaggctggagggggcctggcttccaatatttggaaggcttggttgggttaagtttggccttttattgggaccgggagattttaaaggatctagttgaaaaggacctggggcctaacattcttgatcatgaccttgaccttgaggatgaccaaaaaaggcagaagcccccctttaaggaaaatgcaaaaaaaagggttaaaagggggaaaaaggcattgggaaa

SEQ ID NO: 79700 - DNA, 250 bp, Oryza sativa
  Clone ID: PAT_MRT4530_79395C.1
atgtctttcgtgattagtctcacacctctcacaataatttgatgctataattggtaataatttgattagctcctggtttggaatggtacattcctggtttggagatagaactgtgcagccgggatggttgttcagaatggatgggcctatacaacagggtatgttgtatagcgttggattaatattgtttaattattacttaactgttttattaaattctgaaatgtttgctaaatgctgcttttgcaaa

SEQ ID NO: 79701 - DNA, 132 bp, Oryza sativa
  Clone ID: PAT_MRT4530_79396C.1
tttattcttcgatcatcaacttctaaaccctaggggggtttttattaaaccatagaccaaaaatcacctaaagaataatttcacaattaccatttcatacctctaataattcaacatttctaatccaaccat

SEQ ID NO: 79702 - DNA, 249 bp, Oryza sativa
  Clone ID: PAT_MRT4530_79397C.1
atgtctttcgtgattagtctcacacctctcatcattgtaaaagatgcttaaactggtaataatttgattagctcctggtttggaatggtacattcctggtttggagatagaactgtgcagccgggatggctgttcagaatggttgggcctatacaacagggtatgttgtatagcgttggattaatattgtttaattacttaactgttttattaaattctcaaatgtttgctaaatgctgcttttgcaaa

SEQ ID NO: 79703 - DNA, 434 bp, Oryza sativa
  Clone ID: PAT_MRT4530_79398C.1
gggaggggaggtccggatctaggagtgggagtgccgccgccgccaccgatgacctcgcgcctccgcgtcacctcagccgttgccctccccatgatgcagccagatccatgaggggaggggagtgccgccgacgacctccggcctccgccgctgcatgcagccgctatcgccaccctcccccacaacgcttccggatcctggatgggtgggccgccagctggatctgggaggtgggaacgctgccgctgacctccctcctccgccgctgcatgcggccgttgctgccgcacagctgcgccccgctgccgtccgtcccacgccaccggctaccggcctcctccctccccccttcgtctggacctgggagggaggggaggcgagccgcgctaggggtgcgccgctccatagtgtcgtcatccccgcgcctcgcctag

SEQ ID NO: 79704 - DNA, 252 bp, Oryza sativa
  Clone ID: PAT_MRT4530_79399C.1
atgtctttcgtgattagtctcacacctctcatcattataaaagatgctataactggtaataatttgattagctcctggtttggaatggtacattcctggtttggagatagaactgtgcagccggggtggttgttcagaatggttgggcctatacaacagggtatgttgtatagcgttggattaatattgcttaattattacttaactgttttatcaaattctcaaatgtttgctaaatgctgcttttgcaaa

SEQ ID NO: 79705 - DNA, 630 bp, Oryza sativa
  Clone ID: PAT_MRT4530_7939C.1
gaaagtaactgttgttaatacttcactcccggactcccagccacagtacagatcaagaggagagagaaataaatacttttgagagaaaattgttccatggtgattgatacattgggtatatatcctatactcctacagtaaaggagtggtatataatacatcgtttcaggcgttcagcttctgccagcgagcttgtgctgttgcaaatgctgattttggcattcccgttgcgattggaacgtggaggccttctccttgagctcctgaaatgctcgcatcgtgtcaccgtcgaatccacctgcaaactggtgaactctgaaggcgaatcggacaccttgaagcatcagctcctcttcgtcagggccatcttttatggcctcaagctcagaggaaaccctcctcaggtatttcattgctaacttcactgactggagtttgatctggctaactattcctgtgtcctgcatccattcccatgggatgtgatagcccggggtacctgttcatcgcgccatctggcactcgcgcaaggctgtacactccatgctccaacttcttgaacagcgcctggatcttcttgagggcagaaaagcaaggctgccgggggatcatcacagaacgacgacgcct

SEQ ID NO: 79706 - DNA, 531 bp, Oryza sativa
  Clone ID: PAT_MRT4530_793C.1
ctgcaggaatcggcacgaggatggctagcaaagctgaagacatggaactttttgaatttgggtagtagtttaaaaatgtagcaaggggcttacaagccagaattaacatttattcctaaataagaatgtttatgctagaaacatcaagtgtaagacttacaacttgtgatgtccatttgttaaattagaatgtttggttacagttttccatgtagaaacagggcgaactttatattttgaagcttgaattcaggcagtaaatagtttcacgttagttagaatccttttctgcttatcagatactgcctttgcatatgaatctcaggattgcctacttatggtcatacatggtttgatccccaattgtgaacgctagacaggaaaaatataatcagcaattacacatatctcactattcatataaaaaagttccacctaatagtttaccgttttaacttgctgactttttgatagtagccgctaacactatagctgtgtgagcttggtttccaagtcgttatatagtatatg

SEQ ID NO: 79707 - DNA, 553 bp, Oryza sativa
  Clone ID: PAT_MRT4530_79400C.1
tctatcaacttatcaagaactgcgattttgtattatgtgttcaaaattacctactctcttaacatataaaatatccacctgttagaacaattatttagtttttactttttggagaggagttcaccaaaattgttctttggcaatataacacgccagaactattttgtagtttccatatggaggttatgcatttagtaacatataccttgatctgtagatttcatggggcatggtatcttaggcagtgctttgtttatatagcattttacatgactatccacaaacattaagaaattgtgattctgaaataatatgggatggttatattgtccagttgctggaatgtgtttatgtacattttatacttgcatggaaatccttatctaaatctttacttccaactttaggtgatagatttaccatgtttctgaaaatatgttaaagtccaaaaagatatctatttatcttcagtaaaatttaaaatgtaatctaatttaggagttcttggatcaggtttttcttggattgcatgaccaattagctgatgaatagt

SEQ ID NO: 79708 - DNA, 726 bp, Oryza sativa
  Clone ID: PAT_MRT4530_79401C.1
atggggtggtggagaggaggggaccttgaagtaatatcatatcggaggggaccgaaatttccgaaattcctgcggcgcagtagctaccgtcgacggagacggactagctggcagtggacgcagtggtgccgggtgcgggcgtcgctgtcctgcgaggaccgcccggacatcgcccggacatttgctgcgcttcagctccacgcgcgccgggccgagatcaccacgctctttggccacgcctggagcgtgctcctcatcatcgccgacgagcagcagcgcaacgtacgacgacgtccaggcctcgtccatgccatcttcttcgctggatgcatgattgggagtagcattttcatattagatggacgatgcattgagaccggtgcgtcgaggttctactacgacagcagccggaagcgcctgaggccggcgcgccagaggcggcgagaggaagagaaggagaggatgaagaagatgataaatgcctctagcaaccacgccgaggagaccagcacaaagcgcccgcagctgccaccgcccgaacttcccacgcgtgccatgcactcgtgcctccgccctccggtgtccgcttgccgttgcgtttgcctggcggcggcgttgcccgatgcatcccatgaagaagatggcttggacgtcgtcttcgtgctgctgcttgtcggcggtgatgaggatcatgctccggatgcggcggccgatcgagcatggtga

SEQ ID NO: 79709 - DNA, 150 bp, Oryza sativa
  Clone ID: PAT_MRT4530_79402C.1
atggagctcgagggtagcggatccagcggcaccaccatcgggaggggtggatccgccacccctggcccgcagccctctttaacggctaatgtggtgatgacggcagtgacggactacggcaaggacgacgacggcgccttggggagctag

SEQ ID NO: 79710 - DNA, 201 bp, Oryza sativa
  Clone ID: PAT_MRT4530_79403C.1
atggcctgctgcggccctcggtcgcccctgccgctcctgcgcccaagctgcgatggcctgctgcggtgcgtcgtggtccttccatgcccgagccgcgctgccggctggctgctaggcagggccgccatccgtccccgccaccggcgcatcaaccgccgcctctgcctccgcgttcgtcgcgcccaccacctccgccgatag

SEQ ID NO: 79711 - DNA, 591 bp, Oryza sativa
  Clone ID: PAT_MRT4530_79404C.1
atgccgcctgagccgccagcgtctcctcctcctcccaagaagatgtcaccgccgggagcgggagcgggagcggggagcaagaagaagcagcagcagcaggccgacgccgcggagctggcgcgcgtgttcgagctgttcgacaggaacggcgacgggcggatcacgcgggaggagctggaggactcgctggggaagctcgggatccccgtgccggccgacgagctggcggccgtgatcgcgcgcatcgacgccaacggcgacgggtgcgtggacgtcgaggagttcggggagctctaccgctccatcatggccggcggggacgacagcaaggacggccgcgccaaggaggaagaggaggaggaggacggcgacatgagggaggcgttccgggtgttcgacgccaacggcgacgggtacatcacggtggacgagctcggcgccgtgctggcgtcgctggggctgaagcagggccgcacggcggaggagtgccgtcgcatgatcggccaggtcgaccgcgacggcgacggccgcgtcgacttccacgagttcctccagatgatgcgcggcggcgggttcgccgccctcggctga

SEQ ID NO: 79712 - DNA, 2475 bp, Oryza sativa
  Clone ID: PAT_MRT4530_79405C.1
atggtgtacggcgactaccttcgtcgccggatcgcgccactccagcggcgcgcccggggcgcctgggagtacaccgggtccgaggactacatgaggacccaccaaggggtcaaatgggactgggtccctgaagacttcaagatggtgatccaacgggtgctgaacctcagctccgtggaggcatctctcatcccccaaggagtcctccccctctgcagcgatccagatcgtgccaacatcctaaccatcatgcaggcggtcggggcgtcggaggagcgggctcctcgaggccacgatggcgcgggcgggagccgcaggggggaacaatctaccccgggagggggtcgtgcttctgggccccgtgacgggggcccggggggcagccgccctgccgacgcccgggggaagaggaaacaggaggataccccctccccatttcctccccgagggggcggggcggtgcgtgccagcagcaggcgcccggagggtgctgtgccgacgtcgcagcccgagggggagcgaaaaaagaagcggctccgcaagatgggggggccgaaccatgccggggaaacctcatctcccccccaaggtggtcgtttagccgacctcctcgcaggttcgtcccagcgcccactgcggccgtattcattcccccatctcccaaggcaagttttcactcacccgtttctttttgtcttctggtttttcttctgcctcagcgagatcccgtcgcgccccctccgccattccaagtccggccggtctgaggccggggagacggcgaccgcggaggcccggaggcgggaagctgaccggcgagaagccgcagaccgtctccgggaagccgaggtagctgcccaggaggccgtccgggttcgccaggccgaggaagccgctcgggaggaggccagactccgcccggccgaggagtccgtccgggagacggaggcggcccgccaagcccccgacccgactccgcccaaggcgacgacgacttccgaggccacccacgacgaggccgcgggcgcaccgctcgggcccgacccctcgggcgacgctcaggacgagccagcttcgggggacgcccccgagtccggcacgtcaatcggcgggccgagccgcgcggcacccacaccgaggcggctctcccctccgccttccgctgccccactgagcacaaagcccctcctgcaggcctttgccgccgcgaacaccacggtgttggacgggttaagcgcccagatggaggtcctgcaggcagagcgggcggaggtcgatgcggcgtgggcgcgcgtcgaagaggggcgacgctcagtggaagccatggtggaggcgggccgcaaggcacaccgccggcacgcctcagaactcgaggcccgtcgtagggacctggcggagatcgccagggaggtggaggaggagcgggagactgccctcatcgccaccaccgttttcaacgcggcgcgggacgacctccgcctccaatacgggagccgggcggcggagctagagaagaagctcgacgcgtcccggcagcgcgaagaggaccttgaggctcgcgccacggtgctggaggagcgcgcccgcgccctggacatgaaggagaaggaactggtgggtcgcgaggccgccgtcgccatccgggaggcaacgctggcggcgcacgaggccgcctgcgccgaagaggagtccgcactccgcctccgcgaggacgagctcactgagcgggagcgagctctcgaggaggccgaggccgcggcgcagcggcgggaggagcaagcgcgcctcaatctggaaggcgcccgcgccgagagggccgctctggatcagcgggccgctgagctcgaggcgcgggtgaaggagctggacgcgagagcgtgcagcggcggggcggccgcgggcgacggcgacctagccgcccgcctcgcagccaccgaacacaccattgccgatctgcagggcgcgctggactcgtccgccggggaggtcgaggccctccgcttggcaggcgaggtagggcccggcatgcttcgggacgccgtctcccgtctagaccgcgccgggcggcaggcgggcctctggggcgggcggaccgcgaaatacgccgcgaaccaggggggcctcgcccagcgcctctcagagatggccgggaccctccagcggctccccgaggagctcgaggagacgatcaagtcatcctcgagggacctcgcccggggagcggtggagctcgtactggcaagctaccaggccagggaccctgacttctccccgtgggcagcgctggacgagttccctcccgggaccgaggacggcgcgcgcgcgcaggtctgggacgccgccgaccacatcgtccacagcttcgagggtacagcccctcggctcgcgttcgccctcgactccgacgaggagggcggtgacggtggtgcggacgaaagcgacgacgaggcctgcggcccgggcgcgtcgaagtga

SEQ ID NO: 79713 - DNA, 748 bp, Oryza sativa
  Clone ID: PAT_MRT4530_79406C.1
agagaaaaaatgtctcaattaccaaaacggcacaaaaatacacaccatgatatagtctaaatataggttttgggatacaaatatcaccaaacaaaaatagtagaaatagatgtgtttttcaagagcagcaatgctggctcagcttttgaaaggcgattctctgatcttttggcagtaactgaggtggtattgctcttgcatgagtttctctattcaccattatatacatcagaaaggaatctcctgaaaaaaaagaatagtcaaaactgatttgcaaaagatgatgcaatgttattgcaaaaattaatgaaaattgtgggaataatatacacacaacaataggttactgggatgtgtacttccagcgttagaggctactttatacgaagagagaagaaaagagaaatatggcatctatcaacacatgatggccatggattaagaagtggcacaaacagtaagcataagagaagtattccgtcatgaacttaagatagaatcttataattgcaattgctggtgaccggcaacatggagaatttatatgcatagaacattcctggtgcagctagcatattctagaggcccggccaaacccttggatcaaggcaaagacagtggtgcaaagaaaataagttgcatgtagtcttcatcatttgcacattacattataaaaataagagctatcttctaaaatttttttttgttgggcagaatataagtttgtaggacagcattacataactac

SEQ ID NO: 79714 - DNA, 4872 bp, Oryza sativa
  Clone ID: PAT_MRT4530_79407C.1
tcatgctttgatcccttggagtatcatgccgttagcgcgctcgacttgtccgttactcatagggtgtgccacggaggcgtaacaaattttaatgccgaagtcttcacaaaagtctttaaatgctccgccagtgaattgagtgccattatcagtgatgatccgatgaggtaccccaaaccgatgcacaatgttgatgaagaaatctctagctttatctgctgtgatcgtgatgaccggtttagcctcaatccacttggagaatttgtcgatagccacaaagagatgcgtgtaaccgccgactgcccttttaaacgggccgaccatgtcaagcccccagaccgcaaacggccaggacaacgggatggtttgcaactcttgggctggcaaatgagtttgtctggcaaaaaattgacaaccttcgcatgtccgcacaatcttgtccgcatcggacacagctataggccagaaaaaaccttgccggtaagctttgccgacaatggtccgtgtagcagcatgattaccacaaataccagaatgtatatccttcaacaactgtctcccttcttccaaagacacacagcgctgcagtattcctgatggacttttcttgtacagctcagtctcatggataatgtaaagtctgctgcgcctggaaatccgctcggcctcatttttgtcttgagggagttcttgtttgctcaaaaattttataaacggttctctccagtcagcttcgatcatgcttacgccttgggtatccatggcttcgactgtctcttttctgggcatggtcggttcgtaaagatgttcgacgaacacatctgaaggagctgcttcccgttttgaaccaaaattggccagtctgtcggctgcctcattgttatatcggaggacatgggtgagctcgagtccatcgaatttattttccaacctgcatacctcttgtcgataagcggtcatattatcatctagacatgaccactctttcatgacttgattaacaaccaactgagagtctccacggacgattaatcggcgaatgcctaaagagattgcaatccttaatccatggagtagcgcctcgtattccgccacgttatgggacgcagaaaaatgtatccacaatacgtagctcaatctttctccagtcggggaaatcaagacgaccccagccccagtgcctgtaagcctcttcgacccatcaaaatgcatagtccaatattccatcttttcctctggcatgtcttcttggcactcggtccactcggcaaggaaatcagctaaagcttgtgacttgatcgaagttcgtggcttgaacgatatgtccaaagacatcaactctaaggcccacttcgcaatccgtccatttgcttcgcgattgtgaagtatatctccgagtggaaacgatgtgaccaccgtgaccgagttactttgaaagtagtgagataatttcctaacggtaattaagacaccatataataacttttgaacctgaggatatcttgtcttggagtcggctaaaacttcgctaacaaaataaattggacgttggactttttgaatatggccttcctcttcacgctcgacaaccaggaccgtactcacaacctgggaggtcgccgacacatataacagtagcggctcttgtggatgtggcgaggccaaaactggtggagtggtgagaagtttcttgaagtcttcaaaggctttctgtgctttgagtccccacggctgagcgccgccatgcaaccaatcagcttttggacgtctttttgggagcttggcggtttcatgttgaggatggcgttgatttttttccgggttggcctgtatgcctctttgagataccataaatctaagcaacttccctgacggtactccgaagatgcacttttccgggtttagtttcatcttgaaagcacgaatgcttgtaaaagtttcttctaaatctgcaatcaggtcatccttttgcttggtcttgacgactacatcatcaacataagcttcaacattgcgaccgatctgagttgaaaaacatctttgaatcatgcgttgataggttgctcctgcgttctttaatccaaagggcatggtgatgtagcagtaggccccaaagggcgtaataaacgaggtcttcaagcagtcggattcttttagtcggatctgatgatatcccgagtaatagtccaagaagctgagtaactcgcagccggccgttgagtcaaccacctggtcaatgcgaggtaacccaaaagggtctttgggacaagatttgttgaggtcggtataatcgacacacatgtgccattgccccgtcttttttcgaaccaggactgggttagccagccagtcgagatgaaggacttccttaatgaagcctgttgctaacagcttggttaattcctccttgatcgcatccttcctgtcagtagtcttatcaggatcggagggatctaagggaatctttttcgtcttagcatcacgttcttcggtcttcgtcagcttggttgcaggcacttctccctcgcttgccgtggtcgcagccagtcggatctcttcgcgggtgagagtagtctcgtgggtttgggccatctcgcaactttctttgtcacatgtgacggcctgcttgatgtcgctccgtagtgatatgactcctcgaggaccaggcatcttcatcatcatgtaggtgtagtgtgggacgaccataaatttagctaaagccggtcgtccaagtatagcatgatatgctgtctcgaaatcaacaacttcgaaacaaacattttctgtgagaaaattctcccgagtgccgaaggtaactggaagagtgatttggctgagtggtgtagctgacaatcctgggataacaccgtggaagggtgcattactcggcttcaattccgtgcgaggaatctgcatatagtccagggtcttagcaaaaaggatgttgagtgcgctgccaccatcgatgagagtctgtcggagcttgacattgcgaaccactgggtctagtactagggggtaccgccccgggtggatcactcggtcgggatgatccgagcggtcaaacttaattgctatttctaagcttgcgatccttgtggttgttacttccactctctcctgcggtcggcgtatccttctttggctttcaagtggtgcccgatcgttggctttttcgaacatctgcttaaccgacctgggaggtttacgtccgaacttgccgactaggtcctcgtggcgaatgcctttagtgaaggcggcgatgatgacgtcgtcggtgatgtcggagatgttgtagagatcaaactgtgtgccggggcgttcaaaggtgccctggaagttggcgatgaagtgatcacgaagttccgcccatgatccgatcatgccaaggggtagtccgtggagccaggatcgggcggaatccgctagggccacaggtagatagtttgccatggccttgctgtctcctcctgctgcgtggattgcgagtccgtagacggtgagccaagactccggattagtggtgccgtcatacttctcgattccagtcggcttaaagccggctggccaatccactcgacgcaggtcattagtgaaggcagctactccatccacgtcgtcgtcgtagagatttggtgaatggcggtgacctcgtgctgcacggcgctggttgatcatgtcgcgaaggtcgacaggacgctggtgaagtggagagcgaggccgttcgactcggcgctccctgtgacgttcgggaggcgagtgaacagatcgttcgtcgtgacccctgctcctgcggctagatcctgtgccgatgatgctgaggcttggctgatgataatcatgagatcggagatgagggactcggctaccagtcggagtgcgggtgcttgcggagttggctggaaccgaggcagcgatcatggtcttcatctggttcaagatgttgacaacatgatcagcttggttgagtgcgtcttccttgaggagggtgtcgaggagagtgattgctgcaaccgcgttctgctggggggtgtgaaagaccgctgttccatcgacgtcttgttgcccaatgagctctctcgctcgccgcccagattccaaggcgcgttgtcgtcgatcttcagcctcctttgcaatctgttcgtgatcttgttgctcacgctgtagtcgttctcgctcctgtcgctgtcgctcttcctccagtcggcgacgttcagcttcttgccgtgcgcgatcttggtccgcttctcgggcttggcgctgttcctccgtttcgttgtcagccatgaatacgccgaagaagaggggcgtgtagttatcctcatagctgtcgtcgaagttgtcgaggtcgccgtggtcgtagtggtagccgaaatcgtcgtagtcgaggatctcggttggtcgagaactgacgccgggggagctgaggtagccatccaactcttccgtcgagactgtcccgagaggttggagtataacgccaacctccctggatctagattggatcggggccgaagccggagctcgcctagatcttcgagtgggagatgtcttggcagtgaagacggcggccaaatcatcaggaagtttcatcaagattgagggataggacccgtcgtcttgatctggacgaggccgagcggattggatctcgtccaagtggtttgaagccgactcgggagagatgatcttagagtaggccgagttcggaataccgaatggcacggggacctggtctctccccgactggtttgaatccgagtcaaggagagagatcttgccgaagtcgttggtgatgaagttgaggctgccgaaccggaacgcctgcccgagagggaaggcgaagtcgtcgatgccagaaacaaagcccat

SEQ ID NO: 79715 - DNA, 623 bp, Oryza sativa
  Clone ID: PAT_MRT4530_79408C.1
cttactcgtccgcccacgcgtccgccgacatcgagaaggctattgtggagcctgagagactggaacccagagaaatcagagaaatgccgctcgattttagaaatagtgatgctgactttgcagtatttgcagatgagttatatgattttgatcttccaaaggtcaacagcagctgcttttcgccgttaccgtcgatccagccctcttcgccaccttcagaaatgtcagtatttgcagggggcctgtcttcacttagtagtttcagaagcaaaagaagaaagtaaagagctggtgaaaacaaactgtccagatgctactaacagttcatggatgctctcatctgtaggtagatcagtgtacatttacagaaactgattgtagattctgtgtgctgaattccgttccagcaagctcagtttttttttcacagccttcttgatgagatttttactgtatcagtgttggctgttttggtgccagaaaaaatgggaagaaaaatgtaaactcagtatcagtgtgagactgcagaagtgcagatacattgtggtgtatttgtgttgtgcggcttatacttgctgtgtgaattgtgatctccatattaccaatcatacttattctgcctg

SEQ ID NO: 79716 - DNA, 2427 bp, Oryza sativa
  Clone ID: PAT_MRT4530_79409C.1
atggcacggggctccgcactgcttgatggtagcgtgctgccgccttcccgcatcgtgagcgagaagcaggctgggttgccgcgccgctttatgccggaatctgccaccggccgtgagatagtcatgctgggcgagggacgcccggcgccagactacccggggaggtccgtcttctttctcccctttgcaatggcagggctggttccgccattttcttctttcttcatggatgtcctggagttctacgatctccagatggcgcaccttacccccaacgcagtgatgacattgggcatcttcgcacacctgtgcgagatgttcattggggtgcgcccatctcttcggctgttccggtggttcttcaccgtgcagtcggtatcgccaccgtcggtggtcggcggctgctatttcctgccgcgggggccgaagagcgactggttctatacccccctcgccgacgaagcgcgcctccgacttccgagccagcccccggcgcaggcctccagctggcgggcgccggtagatctgggggatggctatgacgccgtcctcgaccgcctcgcgggcctgcgatcccaggggctcaccagggccatggtgtacggcgactacctccgtcgtcggattgcgccgctccagcggcgcgctcggggcgcctgggagtacaccgggtccgaagactacatgcggacccaccagggagtcagatgggattgggctcccgaggacttcaagatactggtccaacgggtgctaaatctcaactccgtggaggcgtccctcatcccccacggtatcctccccctctgcagcgatccagatcgcgcctccatcttgaccattatgacggcggtcggggcctcagaggagcaggctcctaagggccatgacgacgcaggcgggagccgccgaggggatcaatctacccccggagggggtcgtgcttctgggccccgcgtcgggggctcggggagcagccgccctaccgactcccgggggaagaggaagctgggaggaacacctcccccatctcctccccgagggggcggggcggtgcgcgccagcagcaggcgcccggagggggccgcgccagcatcgcagcccgagggggagcgcaagaagaagcggctgcgcaagatgggggagacagaaccatcccggggaaacctaatttcccctccaaggtggtcatttaaccgaccccctcgcagtgatatctcatcgcgttcctcccaccatcccaagtccggccagtccgaggccgaagatccggcggccgcagaggcacggaggcgggaatctgaccggcgagaggccgcagaccgcctacgggaagctgaagaggccgcccgggaggccgcccgggctcgccaggctgaggataccgctcgggaggaggccgcccgggctcgccaagccgaagaagccgctcgggaggaggccgcccgggttcgccaggctgaggcgatggcggcttccgaggcagttcgcgacgaggccgcgggcgcctcgcttgggtccaccccttcgggcgacgcccaggaccaaacaggtccgggggcggctcgcgacgaggccgcgggtgcgtcgcttgggcccactccttcgggcgacgcccaggaccaaacaggtccgggggtggcccgcgataaggccggcgcgtctattggcgggccgagccgcgcggcatcttctccaaggcagcccttccccacgccttccgtcgccccgctgagcgcagagccccttctgcaggccttagccgccgcaaataccgcggtgttggatgggttaaatgcccaggtggaggccctgcaggcggagcgtgcggagctcgacgccgcatgggcacgtgtcgaggaggggcggcactcggtggaggccatggttgaagcgggccgcaaggcacaccgccggcacgtctcagatcttgaggcccgcaaggcggcactggcggagatcgctcgagaggtggaggaggagcggggggctgccctcatcgccaccactgtgatgaacgaggcgcaggactccctccgccttcagcacgggaactgggaggcggagctgaagaaaaagctcgacgccgcccagggggtccttgatgccgccgctgcccgagagcagcgagcgacggagaccgaagcggcgctccggcggcgtgaagaggccctcgaggcgcgcgccatggcgctggaggagcgcgcctgcgtcgcggagaaggacctggcggaccacgaggccgccgtcgcctcccgggagacaacgctggcggcgcacgagtctgcctgcgccgaagaggagtccgcactccgcctccgcgaggacgcgcttaccgagcgggagcgagctctcggaaaggccgaggccgaggcgcaacggttggcggacagcctgtccctccgtgaggcagcgctgacggagtag

SEQ ID NO: 79717 - DNA, 268 bp, Oryza sativa
  Clone ID: PAT_MRT4530_7940C.1
gcgcccacgcgtgcgcccacgcatgcattgacgcgtgggcaagagggtcggtttgaccctattcaggtgcctttgcagacagctcttttctcctctccatctaaattccgagacccatgagagattcttcgatcataaaaccgcgagcagggtggagatagcatgaacaaatcctgtgatcacagttgtgaagatcattaatatctaaagtataaacacttttgtggtggaaccatattaaaaactgatgctgtatgatctatgaact

SEQ ID NO: 79718 - DNA, 342 bp, Oryza sativa
  Clone ID: PAT_MRT4530_79410C.1
atggccagaaactcgccggcagagagctccagtggtggggctgcatcggggctgcacatgcatggattctttgggcgtattggagaggatgatgatgtgatgctggtgacgaaacagctcagtcggactcgctccgaggcagcgggaacggcgacgcaatcttgcggctacacaatgacgacggcgcagccgcgctccagagctcccatggcgaggtcggcgttcccagagattgtggagaacgagcggcgcgacggcttcttctcgatggccggcagcaagaaaaaagagagggctgctggatccctccttcctcggtttctcagcattggggtggagtga

SEQ ID NO: 79719 - DNA, 3408 bp, Oryza sativa
  Clone ID: PAT_MRT4530_79411C.1
gcacgaggactagtcaatgcaaaaaggttgtgtgcttgtgaattgtcacggcattcttctttgctggatagtagaccagcaacctgcaactgggcgagctgctgatcaatgaaaagcagcatacggtggtaattaagaaatcaggggtttcagctctgatctgttgaacagttgatggttatggatcgaacgagttggctctggaggcgcgagccgtcagacaagagccccggaggcgccgagaacaccgtgtctgtgtcgtcacattctgagcactactctgatgatcaggaggttctgaggcctgtctcaaacaatgcttcaccacatcttggccaatcacctggaatgccttcaagggttagggatgatgggacccaagagattggagtcacaaaaccctcgaatgagaagttagcattgggatttaaactaaatgattcttctccacggcatggtcaatcatcagagccacagtcatcttcaaatgtcagagatgaagatgtaaaggagaacttgaagagtttgaatgataaacttgctgctgcatttttgacaattaatgctaaagaggaattggtgaggcagcacgctaaagtcacagaagaggctgttttgggttgggaacaagctgaatctgaagttgctgccctaaagaagctacttgaagcttcagcccagaagaatggttccctcgaggttcaagtcagccacttagctgaaaaaaatgcttctctcgaggttcaagtcagccgcttagatgaggctctgaaggaatgtgtcaggcagctgcacctagcacaggaagatcaagcggagaaagtccatgatgtagttaccaagtcccaggagttggagtctgagaactcaaagctccaaaaccgcatcactgaactgaagaagcagctggaaaccacgaaactagaagcctccaacatgtctatagatcatgatctgcaagagaagtttcaggcaattaagaaagagaacatggatctcaagtccaagcttcttgtacagtccaaggacctgaagatactatcattggaaagagacttgagcaatcaagcagcggaaacagcaagcaagcaacatttggaaaacgtgaaaaaaattgcaaggcttgaggcagaatgccgcagattacatcatctaactcgcaaagcaacattaattaatgattctaggcctctggcaaacaatacttgtgtggagtcacttactgatagccaatctgacagtgctgaacgcatggatgatgttgataatgaactgcggaattccgactcatgggcatctgctctggtagctgagctttgatcagttcaagaatggaaatgctgatgagaaaaatcttgtgaacaatcctgttgtgattgatctaatggatgatttccttgagatggagaggttagctgcattgcctgaatcagatcgcacaagctctaccttcgatatggaaacagattctgataaagctgtgaccagaaacagctcctctaaacttgaaactgaagagttgaggaatcaggtggctgatttgcatgcacaggttgagaagattgaaagtgagaaaaaggagcttgagatggcactaatggaggcaagaaatcaacttgacatctcctgcaatgcactagtggcagcaaagaacaggctagttgaaatgcaaatggagttggacttggcaaatgactccaagcatgatgctttgagggattttgagggattgaactcagagaagaaggctttggagtttcaactggagtctaaatctgtacgagtggaggagttacttcaggtggtggcttcattggaagaaaacacagataaaaaggaattggagtcacaattagaactgctgtctgcggaagccaaagagcttcgtctgactgtaacatcattattagagaagattgaagctgaaaggtctctttctgtgcagcatcaagcagaagcagtggctgcatgtaatgcgaaagaatcgttggaggaacagctatattcagcaaacactgaagtagagagattgcatgtcattgtcaaagaactggaggatgaggtagaaaaagagaagatgaggcaggaagaactcgtggcagaattagaaatgaagatggaaacagctgtcgaggctattaaagaatcattggaggcacaactatgtgcagcaaacactgaagtagagagactgaatagcatagttcaggcactagagaacgatatagaaaaagagaaggcgctgcataaagaactgacagcacagttagaggtgaagtttgaagaagagaaagctcgttctgttcagactgttaaggaatcaatggaggcacagctatgctcatcaaacaccgaagtactaaaactgcgtgacattgttaaagcactagaaaatgaggtagaaaaggagaaggcactgcatgaagatctttcagcacagttggaggcgaagatcgaagcagagagaactttttctgtggaggctattaaagaatcatttcagtcagaactccagtcagtgaactcagaagttgtggagctgcgcggtatggtgactgcacttgagcatgaggtggtaaaggagaaaacattttctgcagagctccaaatgcagctagaagctctggaggcaataaaaagggtgttggagtctgagattgagtctgcacatcaggataacagaaagctcaatgataaggtgaagtcttttgaagcaaaactgaaaaaacaggtgtcttcagcggtggacttcacagccaaggaagaagccatgcagtcagagagaagggccatgaagcaacaacttgaagcagcaaagatggaagttggaaagctgacaaacaaggtgagcttgctccaaggggaggtgttacaggagagattgttatcagaagagttcgaacaagaataccacaagctggaggctcggctgtcaagggatagccgggacgcgaagctctggcgactcgcaaattcaaatgggggtctgaaggccaagcaggagaaggaacttgcaaatgctgctgggaagctcgcagaatgccagaagaccatagcttctctcggccgtcagttgaaatcattgaccgacatcgacaatacgattgtggagcctgagagactggaacccagagaaatcagagaaatgccgctcgattttagaaatagtgatgctgactttgcagtatttgcagatgagttatatgattttgatcttccaaagtggtcaaatactgaatactatacgacaagaaaacaggagaacaaacagtgcaaatgtgttaaatttcttgtgaccattatgtgctaatcgcttagtagtttcagaagcaaaagaagaaagtaaagagctggtgaaaacaaactgtccagatgctactaacagttcatggatgctctcatctgtag

SEQ ID NO: 79720 - DNA, 2874 bp, Oryza sativa
  Clone ID: PAT_MRT4530_79412C.1
atggcacggggctccgcaccgctcgacggtagcatgctgccgccttctcgcatcgtgagcgagaggcaggccgggctgccgcgccgattcatgccggaatctgccaccggccgggaggtggtcgcgctgggtgagggacgcccggcgccacactacccggggcggtccgtattcttcctttcctttgcaatggcagggctggtcccgccattctcttctttcttcatggatgttctggagctttatgatctccagatggcgcacctcacccccaacgcggtaatgacgttggccatcttcgcgcacctgtgcgagatgttcatcggggtgcgcccatctctccggctgttccgatggttcttcaccgtacagccggtgtcgccaccgtcggtagtcggtggctgctacttccagccgcgggggccggtgctgaaccgctacattccctgcgtccttcgcaagaagtgggacgactggaagagcgactggttctacacccctctcgccgacgaagcgcgcctccgacttccgaaccagcccccggcgcaggcctccagctggcgggcgccggtagatctgggagacggctacgacgccgttcttgaccgcctggctggtctgcgatcccaggggctcacggggaccatggtgtacggcgattaccttcatcgccggatcgcgccactccagcggcgcgcccggggcgcctgggagtacaccgggtccgaggactacatgaggacccaccagggggtcaaatgggactgggtccctgaagacttcaagatggtgatccaacgggtgctgaatctcagctccgtggaggcatccctcatcccccaaggtgtcctccccctctgcagcgatccagagcgcgccaacatcctgaccatcatgcaggcggtcggggcgtcaggggagcgggctcctcgaggccacgatggcgcgggcgggagccgcaggggggaacaatctaccccgagagggggtcgtgcttctgggccccgtgacgggggcccggggggcagccgccctgccgacgcccgggggaagaggaaacaggaggataccccctccccatctcctccccgagggggcggggcgatcccgtcgcgcccttcccgccattccaagtccggccggtctgaggtcgaggagacggcgaccgcggaggcccggaggcgggaagctgaccggcgagaagccgcagaccgcctccgggaagccgaagaagctgcccaggaggccgtccgggctcgccaggctgaggaagccgcttgggaggaggccagactccgccgggccgaggagtccgtccgggagacggaggcggcgcgcacacgccgggcggcctgccaagcccccgacccgactccgcccgaggcgacaacgacttccgaggccacccacgacgaggccgcgggcgcgccgctcgggcccgacccctctggcgacgttcgggacgagcccgcgtcgggggacgcccccgagttcggcacgtcgatcggcgggccgagccgcgcggcgcccacaccgaggcggctctcccctctgccttccgctgccccactgagcgcagagcccctcctgcaggccttggccgctgcgaacaccatggtgttggacgggttaagcgcccagatggaagtcctgcaggcagagcgggcggaggtcgatgcggcgtgggcgcgcgtcgaagagggacggcgctcggtggaagccatggtggaggcgggccgcaaggcacaccgccggcacgcctccgagctcgaggcccgtcgtagggacctggcggagatcgccagggaggtggaggaggagcgggagactgccctcatcgccaccgccgtgttcaacgcggcgcaggacgacctctgcctccaatacgggagccgggcggcggagctagagaagaagctcgacgcgtcccggcagcgcgaagaggcccttgaggctcgcgccacggtgctggaggagcgcgcccgcgccctggacacgaaggagagggaactggcgggtcgcgaggccgccgtcgccatccgggaggcaacgctggcggcgcacgaggccgcctgcgccgaagaggagtccgcactccgcctccgtgaggacgagctcactgagtgggagcgagctctcgaggaggccgaggccgcggcgcagcggcgggaggagcaggcgcgcctcaatctggaaggcgcccgcgcagagagggccgcactggatcagcgggctgctgaattcgaggcgcgggtgaaggagctggacgcgagagcgcgcagcggcggggcggccgcgggcgacggcgacctagccgcccgcctcgcagccgccgaacacaccatcgccgagctgcagggcgcgctggactcgtccgccggggaggtcgaagccctccgcttggcgggcgaggtagggcccggcatgcttcgggacgccgtctcccgtctagaccgtgccgggcggcaggcgggcctctggggcgggcggaccgcgaaatacgccgccaaccaggggggcctcgcccagcgcctctcagagatggccgggaccctccagcggctccccgaggagctcgaggagacgatcaagtcatcctcgagggacctcgcagggggggcggtggagctcgtactggcaagctaccaggctagggaccctgacttctccccgtgggcagcgctggacgagttccctcttggaaccgaggatggcgcgcgcgcgcaggtccgggacgccgccgaccacatcgtccacagcttcgagggtacggcccctcggctcgcgttcgccctcgactccgacgaggagggcggtgacggtggtgcggacgtcagcgacgatgaggccggcgacccgggcgcgtcggcgtga

SEQ ID NO: 79721 - DNA, 2490 bp, Oryza sativa
  Clone ID: PAT_MRT4530_79413C.1
atggtgtacggcgactactttcgtcgccggatcgcgccgctccagcggcgcgccaggggcgcctggaagtacaccaagtccgaggactacatgaggacccaccagggggtcaaatgggactgggtccctgaagacttcaagatggtgatccaacgggtgctgaatctcagctccgtggaggcatccctcatcccccaaggtgtcctccccctctgcagtgatccagagcgcgccaacatcctgatcatcatgcaggcggtcggggcgtcgggggagcaggcccctcgaggccacgatggcgcgggcgggagccgcaggggggaacaatctaccccgggagggggtcatgcttctgggccccgcgacgggggtccagggggcagccgccctgccgacgcccggggaaagaggaagcaggagggtacctcttccccatctcctccccaagggggcggggcggtacgtgccagcagcaggcgcccagagggtaccgcgccgacgtcgcagcccgagggggagcgaaagaagaagcggctccgcaagatgggggggaccgaaccatgccggggaaacctcatctcccccccaaggtggtcgtttagcctacctcctcgcagcgagatcccgtcgcgcccccaccccccccccccccgccattccaagtccggccggtctgaggccggggagacggcgaccgcggaggccaggaggcgggaagctgaccagcgagaagccgcggaccgccttcgggaagccgaggaagctgcccaggaggccgtccgggctcgccaggctgaggaagccgctcgggaggaggccagactccgccgggccgaggagtccgtccgggaggcggaggcggcgcacgcacgccaggcggcctgccaagcccccgacccgactccgcccgaggcgacgacgacttccgaggccacccacgacgaggccgcgggcgcaccgctcgggcccgacccctcgggcgacgctcaggacgagccagcttcgggggacatccccgagtccggcacgtcgatcggcgggccgagccgtgcggcaccctcaccgaggcggctctcccccatgccttccgctaccccaccgagcgcggagcccctcctgcaggccttggccgccgcgaacaccacggtgttggacgggttaagtgcccagatggaggtcctgcaggcggagcgggcggagctcgacgcggcgtgggcgcgcgtcgaaaaggggcgacgctcggtggaggccatggtggaggcgggccgcaaggcacaccgccggcacacctcagagctcgaggcccgtcgtagggacctggcggaggtcgccagggaggtggaggaggagcgggagactgccctcatcgccaccgccgtgttcaacgcggcgcgggacgacctctgcctccaatacgggagccgggcggcggagctagagaagaagctcgacgccgcccggggagtccttgatgctgccgttgcccgggaacggcgggcggcggagatcaaggcggcgtcccggcagcgcgaagaggcccttgaggctcgcgccacggtgctggaggagcgcgcccgcgcgaaggagagggacctggcggaccgcgaggccgccgtcgccatccgggaggcaacactggcggcgcacgaggccgcctgcgccgaagaggagtccgcactccgcctccgtgaggacgcgctcaccaagcgggagcgagctctcgaggaggctgaggccgcggcgcagcggctggcggacagcctgtccctccgcgaggcaacgcgggaggagcaggcgcgccgcaatctggaaggcgcccgcgccgagagggccgcactggatcagcgggccgctgagctcgaggcgcaggcaaaggagctggacgcgagggcgcgcagcggcggggcagccgcgggcgacagcgacctagtcgcccgcctcgcagctgccgagcacaccatcgccaagctgcagggcgcgctggactcgtccgccggggaggtcgaggccctccgtttggcaggcaagggagggcccggcatgcttcgggacgccgtctcccgtctagaccgcgccgggcggcaggcgggcctctggggcgggcggaccgcgaaatacgccgccaaccaggggggcctcgcccagcgcctctcagagatggccaggaccctccagcggctccccgaggagctcgaggagacgatcaagtcatcctcgagagaccttgcccggggggcagtggagctcgtactggcaagctaccaggccagggaccccgacttctccccgtgggcagcgctggacgagttccctcccggaaccgagaaaggcgcgcgcgcgcaggtccgggacgccgccgaccacatcgtccacagcttcgagggtacggcccctcggctcgcgttcgccctcgactccgacgaggaggttggtgacggtggtgcggacgacagcgacgacgaggcttgcgacccgggcgcgtcgaagtga

SEQ ID NO: 79722 - DNA, 936 bp, Oryza sativa
  Clone ID: PAT_MRT4530_79414C.1
atgggcataatggccactaggaagtgtggtggtgtgggcacaacatcgagcggggagtggagacccctccccgagtgtgaagattcgaccaggaggttagcggtgcaagacgtaggaagggatcaaattaaacaagaaaggatctacggggcccgagctccctgccaaggaaaagacacaggaatttatataggttcaggccacccggaggcacccgggcttctgtctgagacaactgggtcgcgccagctgggaccacgtggcgagtggtgggcctggtggaacccggacttcctaaaacagcgccacgctccagactggctagggcttcccataaacctgttttatttatggcggagaggaccgcttcacaacagcccgtggagcgcgcccatctccccagccagtcctgaggtcgcgtcctcaagaatgcggaaactacaagactatggtgtgtccggatcccaagacgaggccgggaccgagacttacaaggactacggtgagctcgagacccaggataagaccgggtccgaggcagaccttagcgtaggacttacaaggaccaaggtgaacccgataaaggtgggcccgggacccaccaaggatgagagaaaaacaaggattgagcttcactcgcgagccatgccgatggggtgcgagcgtaattgcatccacgtgtgtagcctcttcattagggtcaacgtccttaccccagccatgagaagaggtgttgtcagatctagactgagcgagactaatggcttgttccaagctcagacggacagattgggtggtcgtccttgtgccatggtggagccaggcccccacctccctattgtagatcacctcttcttcaaccgctgggccaccggatcttgtggcagctatggcattgagcagctcggtaacatgcagcaagtgacagataactag

SEQ ID NO: 79723 - DNA, 3060 bp, Oryza sativa
  Clone ID: PAT_MRT4530_79415C.1
atggcacggggctccgctccgcttgacggtagcgtgctgccgccttcccgcatcgtgagcgagagacaggccgggctgccgcgccgcttcatgccggaatctgccacccgccgggagatagtcacgctgggcgagggacgcccggcgccacgctacccggggcggtccgtcttcttcctccctttcgcaatggcagggctggttccgccattttcttctttcttcatggatgttctggagttttacgatctccagatggcgcacctcacccccaacgcggtaatgacattggccatcttcgcgaacctgtgcgagatgttcatcggggtgcgcccatcccttcggctgttccggtggttcttcaccgtacagccggtgtcaccgccgtcggtggttggtggctgctacttccagccgcgggggccggtgctgaaccgctacattccctgcgtcctccgcaagaagtgggacgactggaagagcgactggttctacacccccctcgccgacgaagcgcgcctccgacttccgagccagcccccagcgcaggcctccaactggcgggcgccggtagatctgggagatggctacgacgccgtcctcgaccgcctggcgggcctgcgatcccaggggctcacaggggccatggtgtacggcgactaccttcgtcgccggatcgcgccactcaagcggcgcgcccggggcgcctgggagtacaccgggttcgaggactgtatgaggacccaccggggggtcaaatgggactgggtccctgaagacttcaaggtaatgatccaacgggtgctaaatctcagctccgtggaggcatccctcatcccccaaggagtcctccccctctgcagcgatccagatcgcgccaacatcctgaccatcatgatgacggtcggggcctcagaggagagagctcccaagggccatgacggtgcgagcgggagccgcaagggagatcaatctaccctaggagggggtcgtgcttccgggccccgtgatgagggctcggggggcagccgccctgccgacgcccgagggaagaggaagcaagagggtacctcctccccatctcctccccgagggggcggggcggcgcgtgtcagcagcaggcgcccggagggggccacgccgacgccgcagcccgagggggagcggaagaagaaacggctccacaagatgggggggacagaaccatcccggggaaaccttatttcccctcgaaggtggtcgtttaaccgaccccttcgcaggcgggaatctgaccggcgagaagccgcggatcgcctacgggaagccgaggaggccgcccgggaggccgcccgggctcgccaggctgaggaagccgctcgggaggaggccagactccgccaggccgaggcgacgacatcctccgaggcaacccgcgaaactgaccggcaagaagccgcggatcgccttcaggaagccgaggaagctgcccaggtggccgtccgagctcgccaagctgaagaagccgctcaggaggaggccagacttcgccaggccgaggcgacgacgacttccgaggcagctcgcgacgaggccgcgggcgcatcgcttgggcccactccctcgggcgacgctcaggacaagccaggtccgggggacgtccccgagtccggcacatccatcggcgggccgagccgcgcggcatcctcaccgaggcggctcttccccacgccttccgctgccccactgagcgcagagccccttctgcaggccttggccgtcgcaaacaccacggtgttggacgggttaagtgcccagatggaggccctgcaagcagagcgggcggagctcgacgtcgcatgggcgcgtgtcgaagaggggcgacgctcagtggaggccatggtggaggtgggccgcaaggcacaccgccggcacgtctcagagctcgaagcccgtcggaaggtgctgggggagatcgccaaggaggacgacctccgccttcaatacgggagctgggaggcggagctagggaagaagctcgacgccgcccggggggtccttgacgctgccgctgcccgagaacggcgggcggcggagaccgaggtggcatcccggcagcgtgaagaaaccctcgaggcccgtgccatggcgctggaagagcgttcctgcgtcatggtaagggatctggcggaccgcgaggccgccgttgccattcgggaggtcacactggcggcgcacgaagccgtctgcgccgaagaggagtccgcactccgcctccgcgaagatgcgctcatcgagcgggagcgagccctcgaggaggctgaggccgcggcgcaaaggctggcggagagcgcgtccctccgtgaggctgcgctagaggaacaagcgcgtcgcaatctggaaggtgcccgcgccgagagggccgcactgaaccagcgggccgctgaactcgaggcgcaggcaagggagctggatgcaagggcgcgtagcggcagggcggccacgggcgacagcgacttagccgcccgcctcgcagctgccgaacacaccatcgcggatctgcagggcgcgctgaattcgtccaccggggaggtcgaggcccttcgcctggcaggcgagatagggcccagcatgcttcgcgacgccgtgtcccgtttagaccgcgccgggcggcaggcgggtctctggggcgggcggactgtgaagtacgccgccaaccaggggggcctcgcccagcgcctctcggagatggccgggactctccagcggctccccaaggagctcgaggggacggttaagtcatcctcgagggacctcgcccgaggagcggtggagctcgtactggcgagttaccaggccagggaccccgacttctccccctggacagcgctggacgagttccctcccgggaccgaggacggcgcgcgcgcgcaggtccgggacgccgccaaccatatcgtccacagcttcgagggttcggcccctcggctcgcgttcgccctcaactccgacgaggaggacgatgacggcggagtgggcgacagtggcgacgaggctggcaacccgggtgcatcggagtga

SEQ ID NO: 79724 - DNA, 375 bp, Oryza sativa
  Clone ID: PAT_MRT4530_79416C.1
atggagatggatcaacgcctctacaaagctcgatcagaccttgagcttgaagctgtagttgttggagcggattcggatccgcctgccggcgacgaggttgtcgacgacgaggttgcaggtcgccttcccggtcatcttccacagcttgatggcgccgaacttgatgcggatcggcacgcgcgcccacaccgtgagcggcacgaacccggcctattgctgctgcagcagctgcgccaccacggcgctgtccagctgcgtctcgccggcgacggcgacggcgaggacgagcacggcgagcagcgtccagcacacgcaccgacagcaccgccgcccgcggctcctgcgccgacgcccaccgggtggattcggtggtag

SEQ ID NO: 79725 - DNA, 3132 bp, Oryza sativa
  Clone ID: PAT_MRT4530_79417C.1
atggcacggggttccgctccgcttgacggtagcgtgctgccgccttcccgcatcgtgagcgagagacaggccgggctgccgcgccgcttcatgccggaatctgccaccggccgggagatagtctcgttgggcgagggatgcccggcgccacgctacccggggcggtccgtcttcttcctcccttttgctatggcagggctggttccgccattttcttctttcttcatggatgttctggagttttatgatctccagatggcgcacctcacccccaacgcggtaatgacattggccatcttcgcgcacctgtgcgagatgttcatcggggtgcgcccatcccttcggctgttccggtggttcttcaccgtacagccggtgtcgccgccgtcggtggttggtggctgctacttccagccgcgggggccggtgctgaaccgctacattctctgcgtcctccgcaagaagtgggatgactggaagagcgactggttctacacccccctcgccgacgaagcgcgcctccaacttccgagccagcctccagcgcaggcctccaactggcgggcgccggtagatctgggagatggctacgacgccgtcctcgaccgcctggcgggcctgcgatcccaggggctcacaggggccatgtacactgggtccgaggactgtatgaggacccaccagggagtcagatgggactgggctcctgaggacttcaagatagtggtccaacgggtgctgaatctcagctccgtggaggcatccctcattcctcaaggagtcctccccctctgcagcgatccagaccgcgcctccatcctggccatcatgcaggcggtcggggcgtcggaggagcgggctcctcgaggccacgatggcgcgggcgggagccgcaggggggaacaatctaccccgggagggggtcgtgcttctgggccccgcgacgggggcccggggagcggccgccctgccgacgcccgggggaagaggaagcaggaaggaacccctcccccatctcctccccaagggggtggggcggcgcgtgccagcagcaggcgcccggagggggccacgccgacgtcgcagcccgagggggagcggaagaagaaacggccccgcaagatgggggggacagaaccatcccggggaaacctcatttcccctccaaggtggtcatttaaccgaccccctcgcagcgagatcccgtcgcgtccctcccgccattccaagtccggccagtctgaggccgaggacccggcgaccacagaggcacggaggcgggaatctgtccggcgagaagccgcggatcgccttcgggaagccgaggaggccgctcgggaggccgcccgggctcgccagaccgaggaagccgctcgggaggaggccggactccgccaggccgaggtgatgacatcctccgaggcgacccgtgaaactgaccggcaagaggccgcggatcgccttcgagaagccgaggaagctgctcaggtggccgtccgagctcgccaagctgaagaagccgctcgggaggaggacagacttcgccaggccgaggcgacgacgacttccgaagcagctcgcgacgaggccgcgggcgcatcgcttgggcccactctctcgtgcgacgctcaagacaaaccaggtccgggggacatccccgagtccggcacgtccatcggcgggccaagccgcgcggcatcctcttcgaggcggctcttccccacgccttccgttgctccactgagcgcagaacctcttctgcaggccttggccgtcgctaacaccacggtgttggacgggttaagtgcccagatggaggccttgcaagcagagcgggtggagctcgacgccgcatgggcacgtgtcaaagaggggcgtcgctcggtggaggccatggtggaggtgggccgcaaggcacaccgccggcacgtctcagagctcgaagcccgtcggaaggtgctgggggaggtcgccaaggaggtggaggaggagcggggggctgccctcatcgccaccactgtgatgaacgaggcgcaggacaccctccgccttcaatacgggagctgggaggcggagctagggaaaaagctcgacgccgcccggggggtccttgacgctgccgctgcccgagaacggcgggcggcagagaccgaggtggcatcccggcggcgcgaagaagccattgaggcccgtgccatggcgctggaagagcatgcctgcgccgtggagagggacctggcggatcgcgaggccgccgttgctattcgggaggtcacactggcggtgcacgaagccgcctgtgccgaagaagagtccgcactccgcctccgcgaggacgcgctcaccgagcgggagcgagctcttgatgaggccgaggccgcggcgcaacggctggcggacagcctgtccctccgcgaggctgcgcaagaggaacaagcgcgccgtaatctggaaggtgcccgcgccgagagggccgcgctgaaccagcgggccgctgagctcgaggcgcgggagaaggagctggacgcgagggcgcgcagcggcggggcggccgcgggcgaaagcgacttaaccgcccgcctcgcagctgccgaacacaccatcgccgatttgcagggcgcgctagactcgtccgccggggaggtcgaggccctccgcttggcaggcgaggtagggcccggcatgcttcgggacgccgtctcccgtctagaccgcgccggccggcaggcgggcctctggggcgggcggactgcgaagtacgccgccaaccaggggggcctcgcccagcgcctctcggagatagccgggactctccaacggctccccgaggagctcgagaggacgattaagtcatcctcgagggacctcgcccgaggagcggtggagctcgtactggagagttaccaagccagggatcccgacttctccccatggacggcgctggacgagttccctcccgggaccgaggatggcgcgcgcgcgcaggtccgggacgccgccgaccatatcgtccacagcttcgagggttcggcccctcggctcgcattcgccctcaactccgacgaggaggacgatgacagcggagtgggcgatagtggcgacgaggctggcgacccgggtgcatcggagtga

SEQ ID NO: 79726 - DNA, 2745 bp, Oryza sativa
  Clone ID: PAT_MRT4530_79418C.1
atggcacggggctccgcaccgctcgagggtagcgtgctgccgccttcccgcatcgtgagcgagaggcaggccgggctgccgcgccgattcatgccggaatctgccaccggccgggaggtggtcgcgctgggcgagggacgcccggcgccgcattacccggggcggtccgtcttcttcctctctttcgtaatggcagggctggtcccgccattctcttctttcttcatggatgttctggagctttatgatctccagatggcgcacctcacccccaacgcggtaatgacgttggccatcttcgcgcacctatgcgagatgttcatcagggtgcgcccatctcttcggctgttccggtggttcttcaccgtacagccggtgttgccaccgtcggtagtcggtggctgctactttcagctgcgggggccagtgctgaaccgctacattccctgcgtccttcgcaagaagtgggacgactggaagagcgactggttctacacccctctcgccgacgaagcgcacctccgacttccgagccagcccccggcgcaggcctccagctggcgggcgccggtagatctgggagatggctacgacgccgttcttgaccgcctggcgggtctgcgatcccaggggctcacgggggccatggtgttcggcgactaccttcgtcgccggatcgcgccactccagcggcgcgcccggggcgcctgggagtacaccgggtccgaggactacatgaggacccaccaggggggcagatgggactgggcccctgaggatttcaagatggtggtccaacgggtgctgaatctcagctccgtggaggcatccctcatcccccaaggtgtcctctccctctgcagcgatccagagcgcgccaacatcctgaccatcatgcaagcggtcggggcgtcaggggagcgggctcctcgaggccacgatggcgcgggcgggagccgcaggggggaacaatctaccccgggagggggtcgtgcttctgggccccgtgacgggggcccggggggcagccgccctgccgacgcccgggggaagaggaaacaggaggataccccctccccatctcctccccgagggggcggggcgattccgtcgcgtccccctcgccattccatgtccggccggtctgaggccgaggagacagcgaccgcggaggcccggaggcgggaagctgtccggcgagaagccgcggaccgcctccgagaagctgaggaggctgcccaggaagccgtccgggttcgccaggctgaggaggccactcgggaggaggccagactccaccgggccgggaagtcagcccgggaggcagaggcgacgcgcgcacgccaggcggcctgccaagcccccgacccgactccgcccgaggcgacgacgacttccgaggccacccacgacgaggccgcgggcgcaccgctcggacccgacccttcgggcgacgttcgggacgagccagcctcgggggacgcccctgagtccggcacgtcaattggcgggccgagccgcacagcgcccacaccgaggcggctctcccctctgccttccgccgctccactgaacacagagcccctcctgcaggccctggctgccgcgaacacgacggtcctgcaagcagagcgggcggaactcgacgcggcgtgggcgcgcgtcgaagaggggcggcgctcggtggaggccatggtggaggcgggccgcaaggcataccgccggcacgcctcagagctcgaggcccgtcggtgggagctggcggagatcgccagggaggtggaggaggagcgggagactgccctcatcgccaccgccgtgctcaacgaggcgcgggacgatctccgccttcaatacgggagccgggtggcggagctagagaagaaactcgacgccgcccggggagtccttgacgccgccactgcacgggaacggcgggcgacggagaacgaggcggcgtcccggcggcgcgaagtggcccttgaggctcgcgccacggcgctggaagagcgcgcccgcgcgagggagagggacctggcggaccgcgagaccgccatcgctatccgggaggcaacgctggcggcgcacgaggccgcctgcgccgaagaggagtccgcactccgcctccgcgaggacgcgctcaccgagcgggagcgagctctcgaggaggccgaggccgcggcgcagcggctggcggacagcctgtccctccacgaggcagcgcgggaggagcaggcgcgccgtaatctggaaggcgcccgcgccgagagggccgcactggatcagcgggccgctgagctcgaggcgcgggcgaaggagctggacgcgagggcgcgcagcggcggggcggccgcgggcgacggcgatctagccgcccgcctcacagctgccgaacacaccatcgccgatctgcagggcgcgctggactcgtccgccggggaggtcgaggccctccgcttggcgggcgagaccgcgccgggcggcaagcgggcctctggggcgagcggaccgcgaagtacgccgccaaccagggggggcctcgcccagcgcctctcagagatggccgggactctccagcggctccccgaggagctcgaggagacgatcaagtcatcctcgagagacctcgcccggggggtagtggagcttgtactggcaagctaccaggccagggacccggacttctccccgtgggcagcgctggacgagttccctcccggaaccgaggacgacgcgcgcgcgtag

SEQ ID NO: 79727 - DNA, 332 bp, Oryza sativa
  Clone ID: PAT_MRT4530_79419C.1
gaaaaagtatactgaaggtccctcaacttgtcatcgggatacaaaatcgtcctcgaaccgcaaaaccagatatgcggggtccctcaactatataaaaccggtcacccgaggtccttagatggttttgacaccggttttggtctacgtggcggctgagtcagcgtgggacccatcgcgccaacacagagaaaagagggagaggtagctggggaagaggccaccggggcgaagcgggaaaagaaggccggccccgccgaccggtcgctgccgcggtggcgcaacccggatcgcggctgtcgcggtcgtcgaatatgctatgtcctgctgacaat

SEQ ID NO: 79728 - DNA, 1447 bp, Oryza sativa
  Clone ID: PAT_MRT4530_7941C.1
ctatcgttttagccccctcccgcgatctcctgtggtccctagccctctccccgccgtcctcctctctctcccgtgccgccggccgcctccagccgcctctccctcctcgccggagcgtggtccggtcgcgccgtcgcctcctccagcatcgcagctgcctccccttccccggcttgccctccgtttcccgcggagacccccggagctgcgttcccgccgtcgcccttccctttcctccacgccggccgcctccagccgcctctgtctccctgcctgagcgccgatcgacgtcgccaccacctccctcggctccgcgacaccgccctcatccccggcatcacctcctcctcgcccgaatttcgccggaacaccgtcgcccgcgccggcctctccttcctcctcgtcgacgtctcctccggcagcccccttccgccgcgcccgtgcatcagccggcgctgccgtcccccccccctcggcacggtgacgtagccctccacctcgtccacccctcggattcgcccggaagccgccgcacatcgccgcgagcctctccatccgcctcgccggagttgttcggccgcccgtccctcctcgcccgtgcaccggtcggccacacctccaccatcttcggcatcgcagccgcaacgtcgtcctcggcctcgcctcccctccgaccgaacaccgccggtgtccgtcgtcgccttcaccgttcatcctcgccggctcgtcgtctcgcggcgccgccgccgtcatcgtcatcgcagcggcgtgttccacgccgtcctcgtctccgtgctgccgctgccggctgccctcgtcgcctcctcgccggccccggtcgtcgccgtcgtcgtcctctcgtcgttcccggtcgttgtggcgttcgtccctccgtcgagccgccctcgtccgtcctcggtgtttcgtctaggtcgctgcagccccgtcgtcgtcttcgtcctcggctccgcgtcgtcaagcctcgtgccggccgcgtctcgccttcgtccaaggatcgccgccgaagtcgtcccctcgccgttcgtctccgtagttcccggccgcctccgccgcgcccgttcatcgttgtcgttcccacgcctcgtcgcgtggtggtaaggatccctctccctcgctgccccgtcctcgtcctttcggtgtcgcccgtgctcgttgtgcggttgtcggccccggtacccgtgtaccggtgtcggtagtcgtccttgtgtgctggagtccgtttgtcggccactcgcctcggttgacacacggggtccgcttctgtcgacccgtggaccgtctctgtgtacctggtctaccgcggtcctttaggttgacatgtggggctggtagctttgcttgtgtgcttcgcgtagctttcgtcgttccggaggttcccgaagcgtggttcgtggtcgtcgccgaaggttcggaaggccgttctctc

SEQ ID NO: 79729 - DNA, 186 bp, Oryza sativa
  Clone ID: PAT_MRT4530_79420C.1
atggacggcgacggctccggcacgagggacttcatgtcgcaggccgattcactttcccccgccggcgggataggcatggcccccctcgacgtcaactccgacgatgatgggtggccgggaatggaaagctacaagggcctccttcgctccggcacaaacactagcagcagcaagagagattgctag

SEQ ID NO: 79730 - DNA, 2517 bp, Oryza sativa
  Clone ID: PAT_MRT4530_79421C.1
atggcacggggctccgctttgcttgatggtagcgtgctgccgccttcccgcatcgtgagcgagagacaggccgagctgccgcgccgcttcatgccggaatctgccaccggccgggagatagtctcgctgggcgagggatgcccggcgccacgctacccggggcggtccgtcttcttcctcccttttgctatggcagggctggttctgccattttcttctttcttcatggatgttctggagttttacgatctccagatggcgcacctcacccccaacgcggtaatgacattggccatcttcgcgcacctgtgcgagatgttcatcggggtgcgcccatcccttcggctgttccggtggttcttcaccgtacagccggtgtcgccgccgtcggtggttggtggttgctacttccagccgcgggggccggtgctgaaccgctacattccctgcgtcctccgcaagaagtgggatgactggaagagcgactggttctacacccccctcgccgacgaagcgcgcctccgacttccgagccagccaccaacgcaggcctccaactggcgggcgccggggctcacaggggccatggtgttcggcgactatcttcgtcgccggatcgcgccactccagcggcgcgcccggggcgcctgggagtacaccgggtccgaggactgtatgaggacccaccagggggtcagatgggactgggctcctgaggacttcaagatagtggtccaacgggtgctgaatctcagctccgtggaggcatccctcattcctgaaggagtcctccccctctgcagcgatccagaccgcgcctccatcctgaccatcatgcaggcggtcggggcgtcggaggagcgggctcctcgaggccacgatggcgcgggcgggagccgcaggggggaacaatctaccccgggagggggtcgtgcttctgggccccgcgacgggggcccggggagcggccgtccagccgacgcccgggggaagaggaagcaggaaggaacccctcccccatctcctccccgagggggcgaggcggcgcgtgccagcaacaggcgcccggagggggctacgccgacgtcgcagcccgagggggagcggaagaagaaacggctccgcaagatgggggggacagaaccatcccggggaaacctcatttcccctccaaggtggtcgtttaaccgaccctctcgcagcgagatcccgtcgcgtccctcccgccattccaagtccggccagtctgaggccgaggacccggtgaccacagaggctcggaggcgggaatctgaccggcgagaagccgcggatcgcctacgggaagccgaggaggccgcccaggtggccgtccgagctcgccaagctgaagaagccgctcgggaggaggccagacttcgccaggccgaggcggcgacgacttccgaggcagctcacgacgaggccgcgggcggatcgcttgggcccactccctcgggcgacgctcaggacaagccaggtccgggggacatccctgagtctggcacgtccatcggcgggccaagccgcgcggcatcctcaccgaggcggctcttccccacgccttccgttgctccactgagcgcagaaccccttctaggggcgacgctcggtggaggccatggtggaggtgggccgcaaggcacaccgccggcacgtctcagagctcgaagcccgtcggaaggtgctgggggagatcgccaaggaggtggaggaggagcggggggctgccctcatcgccaccaccgtgatgaacgaggcgcagaacaccctccgccttcaatacgggagctgggaggcggagctagggaaaaagctcgacgccgcccgggggtccttgacgctgccgctgcccgagaacggcgggcggcggagaccgaggttgcatcccggcggcgcgaagaagcccttgaggcccgtgccatggcgctggaagagcgtgcctgcgccgtggagagggacctggcggatcgcgaggccgccgttgctattcgggaggtcacactggcggtgcacgaagtcgcctgtgccgaagaagagtccgcgctccgcctccgcgaggacgcgctcaccgagcgggagcgagctctcgaggaggccgaggccgcggcgcaacgactggcggacagcctgtccctccgcgaggctgcgcaagaggaacaaacacgtcgcaatctggaaagtgcccgcgccgagagggccgcactgaaccagcgggccgctgaactcgaggcgcaggcaagggagctggatgcaagggcgcgtagcggcggggcggccacgggcgacagcgacttagccgcccgcctcgcagctgccgaacacaccatcgcggatctgcagggcgcgctggattcatccaccggggaggtcgaggcccttcgcctggcaggcgagataaggcccagcatgcttcgcgacgccgtgtcccgtttagaccgcgccgggcggcaggcgggtctctggggcgggcggactgtgaagtacgccgccaactag

SEQ ID NO: 79731 - DNA, 1980 bp, Oryza sativa
  Clone ID: PAT_MRT4530_79422C.1
atggcacggggctccgctccgcttgacggtagcgtgttgccgccttcccgcatcgtgagcgagagacaggccgggctgccgcgccgcttcatgccggaatatgccaccggccgagagatagtctcgctgggcgagggatgcctggcgccacgctacccggggcggtccgtcttcttcctcccttttgctatggcagggctggttccgccattttcttctttcttcatggatgttctggagttttacgatctccagatggcgcacctcacccccaacgcggtcatgacattggccatcttcgcacacctgtgcgagatgttcatcggggtgcgcccatcccttcggctgttccggtggttcttcaccgtacagccggtgtcgccgccgtcggtggtcggtggctgctacttccagccacgggggccggtgctgaaccgctacattccctgcgccctccgcaagaagtgggatgactggaagagcgactgtttctacactcccctcgccgacgaagcgcgcctccgacttccgagccagcccccggcgcaggcctccaactggcgggcgccggtagatctgggagatggctatgacgccgtcctcgaccgcctggcgggcctgcgatcccaggggctcacaggggccatggtgttcggcgactatcttcgtcgccggatcgcgccactccagcggcgcgcccggggcgcctgggagtacaccgggtccgaggactgtatgaggacccaccagggagtcagatgggactgggctcctgaggacttcaagatattggtccaacgggtgctgaatctcagctccgtggaggcatccatcattcctcaaggagtcctccccctctgcagcgctccagaccgtgcctccatcctgaccatcatgcaggcggtcggggcgtcggaggagcgggctcctcgaggccacgatggcgcgggcgggagccgcaggggggaacaatctaccccgggagggggtcgtgcttctgggccccgcgacgggggcccggggagcagccgccctgccgacgcccgggggaagaggaagcagggaggaacccctcccccatctcctccccgagggggcggggtggcgcgggccagcagcaggcgcccggagggggccacgccaacgtcgcagcccgaggggaagcggaagaagaaacggccccgcaagatggggggacagaaccatcccggggaaacctcatttcccctccaaggtggtcgtgtaatcgaccccctcgcagcgagatcccgtcgcgtccctcccgccattccaagtccggccagtctgaggccgaggacccggcgaccacagaggcccggaggcgggaatctgaccggcgagaagccgcagatcgccttcgggaagccgaggaggccgctcaggaggccgctcgggctcgccagaccgaggaaaccattcgggaggaggccggactccgccaggccgagacgacgacatcctccgaggcgacccgtgaaactgaccggcaagaggccacggatcgccttcgagaagccgaggaagctgcccaggtggccgtccgagctcgccaagctgaagaagccgctcgggaagaggccagacttcgccaggccaaggcggcaacgacttccgaggcagtttgcgacgagggcgcgggcgcatcgcttgggcccaatccctcgggcgacgctcaggacaagccaggccttggccgtcgcaaacaccacggtgttggacgggttaagtgcccaggtggaggccctacaagcagagcaggcagagatcgacgccgcatgggcgcgtgtcgaagaggggcgacgctcggtggaggccatggtggaagtgggccgcaaggcacaccgccggcacgtctcagagctcgaagcccgtcggaaggtgctggaggagattgccaaggaggtggaggaggagcagggggctgccctcatctccaccactgtgatgaacgaggcgtag

SEQ ID NO: 79732 - DNA, 603 bp, Oryza sativa
  Clone ID: PAT_MRT4530_79423C.1
atggcccccgccggcgaccgccacacggaacgaacccgtccgaccatgaggaggggagtggagcggcaacaacaggactggcggaggcgagggcaggcggctgccgacgcatggggaaggaacgacgccgacgtggcctcgtactgcagccgccgccaccgacaaactccgcttcgcctccgtgctgactcgaggttcgctaactcctccacgccgccgacctcctccacgccgaagtccacctcccccgatttgcacgaggtggggatggaggcaggagacatcactggggaggaggaggtgcgggagggcgagcggcggcgcggatgggtcggcgacggaggcggatttgagggaagggccgtggtggtggtgcttagggggacgtggcgaggacggaggaaggcggtcaatgacggcggcgacggagagagggctcacgccacggcgtggcgagggaggggggtggggaggcggaggacgaaggcggcgacagggggaggccgcaccacggcgacgacggcggccgggcggcagccccaggccggcggcggcgcggggcgcagtggggaggaagtggggaacgggaaacgattgggttag

SEQ ID NO: 79733 - DNA, 804 bp, Oryza sativa
  Clone ID: PAT_MRT4530_79424C.1
atggcacgtatcctcaagcagaaaaggaaagggagagccgaatggaggggatccaagcgcggcgtcgagccatgcgacggctgcctgctcaccccaccgccggcgcccctcatctcctcctccgacaagcggccccctagccggcgcgcggacaagctccgtggcgaccaccactcctctcctcctcctcgcggcgatgacggatctctggcctccgtgtcgtggcctgagcggcgggcggcgatggatctctggcctccgcgtcggcgtcgggcgtcggcggcggtggccgtcgtcgacgtcgggcggcggtggatctctggcctccacgccgtggcccgaatcaacgacgagctccggatcgaagacaggcgcggcgtcggctctcccccctccgccgtcccctccccgcctccggcctctccctccggcgtcccctccctatctccggcctctccctccaccgagctctccagatccggcccatggctcgtcggatctggactgctgaggcaacaaaggggaaggtggcggtggctcgacggcgatgacagcacctccatggtaggcccacggcggagaggagaacgacgagcaggagcggcgacgaagccacgaagcgtgaggacacgacctgcacagtgcggcctcgtcgttcttcccgcgtcgatggcagtttttctgacgaggttcaagtgcccaattttggctacgcgaagctcttttggtcacactgcaagccaagctggcggagaatcttgggtttgccacgggttggccgaatgccacgcactcgcactgtga

SEQ ID NO: 79734 - DNA, 2142 bp, Oryza sativa
  Clone ID: PAT_MRT4530_79425C.1
atgtcccgcttcctgccatacatgcattttggtcctagtaatcaactacaggccgctagccatgtgatgcagccgagagaaatcgcccggctgctgctgggcttttggagcgaatgggcaacccagatccttgtagtcctcagcctcatccagcagttcttcccgctcttcttctccggcatccggcggcgccaaggcagaaacaaacggagggctgtcctctggctggcgtacaagttcgccaacatcaccgcgacgtacgccctcggcaggctctccctcagcgccgcgcagcgcagccaccggctcgtccccttctgggctcccttcttgctgctgcatctcgctggtccggacaacatcactgcctactcgctcgaggacagcaagatcgcagggcgccatgccctgactctctttgtgcagggcctaggtgctgtgtttgtcctcgtcaagcatgtcggtagcagcaggaccttgctgttgccgggtgccatcatggtcaccaccgtggccgtgttcaagatgtttgagaagacttgggctctctggatcgccaactttaaggtcatcctgtcgtcggtggaacgagaagacggtgaggaggaaccgcggcaattgtaccgggtttaccttgaggaagacgaactacctcgggggggattcaaggggaaggaagtcgacgaggaggaattcctcatgcggcgtgcccacgccgtgttcctcgtctgcaagtctgccatggttgactcttcaatgtatgatccagatagatactttctcagaatacttgcgtaccttagggagaacagggtggatttgtggacgctgatggagatggagctctccctcatgtatgacattctctacaccaaggcagccgtcatccacacctggaccggctactgcatccgcatcgtctcatcgctcaccgtggctgcctccttcctgctgttccaattatatggtaaggaggggcaaagtagcagagctgacattaccatcacctatgttttactgagttcttccttgctcatggagatggcatcacttttgagcgcgctctggtccacctggacgttctccttcctatgtgcaacgcggtggaccagccttcgacatgcagccttgtgctctaagaagtggcactgccttcgcaatatggtcctctcctttcgccggcttgcctgtagcacagggatttggagttacttgagcttgtcaaggaggtggtcaggtaccctggggcaatacaacatgttggatgcctgcactgccaggcctcctctacttggcaaactggtagtgaggctagtcttcagcagactgtccaagaagctaggcttcagcagattggcagagatgttgggcttcggaagactggcagaagaattgagctacaacgtggtgacagctgacattccaaagggactcaaggacatggtaattgagtatataaaattcatgatcaaggacaggaccgtgaatacactaggaatttttagggagcaatggggaaaggtggcaataaagcgttggttggaggataaacaagttgatgacgagtacaaggaatacctcgagaagaggcttggtgctgagctccacgagggtattatcgtctggcacatcgccactgacatctttattgctcagcgcaaggccgacgatcaagatgctgtgaaggaagctgtcaaagcattatcaaactacatgatgttcctccttgtcaaacaaccagacatgctacctggccttgctcaaaacaagatgtaccaatggaccaaagaaagtctggccaaagagtgggaggaagctggtgtacccgcatatgtttctgggctccatccaagtcagaaacttgccaacatgctacatgacaaggaggtcacacaagatctgatatctaaccgtttatttttcgccacccagctagcaaaacgactgcttgaaagagatgacacgatgaagctggtctatgggatctgggtagattttcttatatatgcgtccaaccgatgcagcagggagtcccatgccaagaggctcaacaacgatggtgagtttacaaccatcgtatggcttacagcagagcacctttaccaacttcaaatctatgatgcacaggaaaagcatcattaa

SEQ ID NO: 79735 - DNA, 2054 bp, Oryza sativa
  Clone ID: PAT_MRT4530_79426C.1
ccggccggggattgtgaggaggtaattgatgcataatccaacacttgatcagaggatggcttttgtcgtccatatgacgttacagatgcccgccggcggggatcagttgagtttccattatcctttcaataaatagccatggcaactattgcattctctcgattttctatatgcttttgtgtccttctcctttgccatggttctatggctcagatatttagtctaggcataaatccatggcaaaatcctcgacaagggggttctagggagtgtaggtttgataggctccaagcgtttgagccgcttaggaaagtgaggcatgaagctggggttacagagtactttgatgagaagaatgagcagttccagtgcaccggtacattagtaattcgtcgcattattgagcctcagggccttcttttacctcgatactccaacactcctggcctagtatatatcatccaagggactggtgtactgggattgacctttcctggttgcccagcaacttaccaaaagcaatttaggcattttggtcttgaaggaggaagccaaaggcaaggaaaaaaattaagagatgaaaaccaaaagatccaccaatttaggcaaggagatgttgttgcacttccttctggtataccacactggttctataatgagggtgacacccctgttgttgctttgtttgtttttgatgtaaacaacaatgctaatcaactcgaaccaagacaaaaggagttcttgttagctggtaacaatatagagcaacaagtgtccaacccctcaatcaacaaacattctgggcaaaacatattcaatggattcaacactaagctattaagtgaggccttaggcgttaacatagaggtgaccagaaggctacaaagtcaaaatgaccgaagaggagatatcattcgagtaaagaatggccttcgattgataaaaccaactatcacacaacaacaggaacaaacacaagatcaataccaacaaattcaatatcatagagagcaacgatcaacaagcaaatacaatggcttggatgagaacttctgtgcaattagggcaaggttaaacatagaaaaccctaatcatgctgatacttacaaccctcgtgctggaaggattacaaatctcaatagccagaagttctccattcttaaccttgtccaaatgagtgctacaagagtaaatctataccagaatgctattctctcaccattctggaatattaatgctcacagtttggtgtatacaattcaagggcgtgctcgagttcaggttgttagcaaccatggaaaggctgtatttaatggtgttcttcgtccagggcaattactaattataccacaaaattatgtggttatgaagaaagcagagcttgaaggatttcaatttatcgcgtttaagacaaacccaaatgccatggtaaaccacatcgcggggaagaactcagttctccgtgcaatgcctgtggatgtgatagctaatgcatatcgcatctcaaggcaggaagctcgtagcttgaagaataataggggagaagagattggtgctttcactcctagatatcaacaacaaaaaatccaccaagagtactcaaatccaaacgaaagtgagactcaagaggtgatttaaacccaaggcattatatactaaaaaataaagccacatgcataaagctttgtggagttttgtattttgtcgtatgtgtaagttaaataaaaaaagaattgccttcattttaaaagaaaaaaaaaaatacataggagtatattgatggactactctttggaatcttggagccaatataagatgcctaggaggactacattgaggttgttgcaaagtatggttggctgagttggacattgatttttttttttttgctgagttatttgtgggtggacctagtgtggacttagtgaatctagtttgctcttgtggctgcatttgttaagttaacctaggaggctaggaccttattttgatatctaggatctggtggaattgaacctagtttgcaattgtagctggatttattttgctatggt

SEQ ID NO: 79736 - DNA, 483 bp, Oryza sativa
  Clone ID: PAT_MRT4530_79427C.1
ggggggaaaaaaagactgactattgccttgatcagttgccaagagcgacagggcatgtgactaacactactaaaaaaccgtttttgcaaacgggccgagcgagcttcaccgccaaccgcatgcgccaaatcgtctgcaaaaatgcaaatttttgcatgcggttagggcacccgcatgcggtcacttataccggccacatgcgaaaataaattcagcaaacaaaaaaaataaaatccaaaaccccccaaaaaaataaaaatccaaaaaatcccaaaccctagcccgccatccacgccacgttttgcgccccccccccccccccgggccgcccgccgttgttgccccgttggatccggcggggggagcaccggatccattggcccagccgacccaccgacgttgccaccggcggtgccgtttcccccaccgcccgccattgttgccccgcggatccgtctcccccgctgcccgccgttgttgccc

SEQ ID NO: 79737 - DNA, 924 bp, Oryza sativa
  Clone ID: PAT_MRT4530_79428C.1
cccgggctgcaggaattcggcacgaggaagtcgtctcctctccttttcctttcctcgaaagacactctctctctcacttcactccactccactccaccgctcccccgtttccctctctcgatcctcctcctccaaatctcccacctcaactccatcgcaatccatcccaccctcctcccaaaccctagcaagcagagggagcgacgcgggcatcagcagccagccagcaatgctcacccccaccgcgccgccgtccaccttcctcttcctcctcctcttcctcctcgccgcctccaattgcagcgccacctcacaggtcggcggcgcgggggaggaggtggaggtggcgcggatggtgccggtggtggaggggggcggggggttcagcgcgatggtgctcaacgagacgcggcggaggctggggagcttccagctctgcgcgccatgcacctgctgcggcggcggaggcggaggcggaggatccaggggcggcggatgcatcctctccccgtgctgctacgccatcaactgcaacatccccaaccgccccttcggcttctgctccttcacccccaagtcctgcgactgcctcggctgcaacctctaagaaaaaggtgctcctcatcatctgcttcttggcttcttgcgatgaatttgttgagagtgatgagaatttgaagatgagaggagtatcgtttaaatattgcgagtgatagcgaaagtagtagagagtgagagagtgggggtaggagaaaagggatatatgtctcccccgctaatgcttagtttaagtgacaattgttactgtttctagctattttcttcttgtgatcattgttatatggtgtattggtgtagttgctaccatgaaattggttaaggaaaaaatgggtgatttggagatttggtaaaaaaaaaaaaaaa

SEQ ID NO: 79738 - DNA, 523 bp, Oryza sativa
  unsure (1)..(523): unsure at all n locations
  Clone ID: PAT_MRT4530_79429C.1
tttggtttttttattttttggggttttttttttttttttttttttttattttttttttttttntntgggaggagaaaaacttcctttaattccaaagtgcttttcaaattttaaaaaaagggggccccctggaagttttggggaatgccacacgcaacccttgggtttatgcaagcttttggggggccttgaaattgccccttgacccggcaaagaataacctaatttattccccccggtggggaaaaaccccccctatggggaaaataccctgggggcccaaaggaccaggggtttacaaaaaaatctgcccgaatggggcccccccaaggtggatgggtttttaaaacaaaccctggctggtggggaaaccccggaaaccctgccaaggttggggggttttttttccccggttggctaggggcgaaccccctaacatttggtaaggggggggggggtttttcgggcccagttgttttgttttaaaaaaggggtggattgcccccccccccccccccttttt

SEQ ID NO: 79739 - DNA, 1614 bp, Oryza sativa
  Clone ID: PAT_MRT4530_7942C.1
cgaggaatgcacctacagtatccaaccttcactgctcggaccggccccaagaccgttcctcggaaaccgcgcccaactccccacctctctttaaacccaaaacgcctacccatgtccatgtccgccgcgcgatccttcaggtgttctgtggagaggatggtggccgggcgtgtcaaggcggccatggggttccagcgtagccctgcgacgcccaagacgtcgtcctcgcgcaaggcgccgcctccgccgccgccgctggtgcaggcggcggcgcaccatgcggcggcggggcagccggagacgccgcggcggaggtcgtccggctcgcccgcgtcggcctcggcgtcggcgtcggggtccaagacgggcgtcttcgcgcggtcgttcggggcgtacttcccgcgttcgtcggcgcaggtgcagccggcgcgcggcgcggcgccggaggtcggggagctggtgcggctcgtcgaggagctgcaggagagggagtcgcgcctccggaccgagctgctggagcacaagatactcaaggagaccgtcgccatcgtgccgttcctcgagaacgagctcgccgccaagagcagcgagctcgggcggtgcagggacgcgctgacccgtctcgactccggcgtccggcccgtgcgtcggcgagtcccggaggtggtggagttctaccactcgctaatgcggcgagactcgaagagggacggaggcggcggcggcggcggcgcggaagcgtgccccggcggaggcgcggcggcggcgagggacatgatcggcgagatcgagaaccgctccgctcatcttctcgccatcaaatccgatgtggagaggcagggcgatttcatccggttcctgatcaaggaggtggaaggcgccgcgttcgtcgacatcgaggacgtcgtcaccttcgtcaagtggctcgacgttgagctctcacggctggtggacgagagagcggtgctgaagcacttcgagtggccggagcagaaggcggacgcgctgcgcgaggcggcgttcggctaccgtgatctgaagaagatcgaggaggaggcgtcgtcgttctgtgatgatccacggcagccttgctcttctgccctcaagaagatgcaggcgctgttcgagaagttggagcatggagtgtacagccttgcgcgagtgcgagatggcgcgatgaacaggtaccgcggctatcacatcccatgggaatggatgcaggacacaggaatagttagccagaacacgcacaaggatgcgaaaaacattaacacatataagacatacactcgagataacaacaaaaagaatttggggtgtaatgttcatgtgtgccagggggctctcatcaaactccagtcagtgaagttagcaatgaaatacctgaggagggtttcctctgagcttgaggccataaaagatggccctgacgaagaggagctgatgcttcaaggtgtccgattcgccttcagagttcaccagtttgcaggtggattcgacggtgacacgatgcgagcatttcaggagctcaaggagaaggcctccacgttccaatcgcaacgggaatgccaaaatcagcatttgcaacagcacaagctcgctggcagaagctga

SEQ ID NO: 79740 - DNA, 738 bp, Oryza sativa
  Clone ID: PAT_MRT4530_79430C.1
gccgcctcgccggagatgcagcaggcggccgtggccttcggccaggcggccttcctcgcccgcccgctccggcgcccgccgcaccgcctgggatgggcggaggctggtggcgtggcggccggacgggggcgcgcgtcgctcccgcgtccgcggctctctgcgagcctctcgatcggcgccggtggctacggtgatgagcatgctccgttgttcccaagacagcaagcatgggacccctacaagattcttggtgttgatcatgatgcatccgaagaagagatcaggagtgcaaggaattttcttcttaagcaatatgctgggcatgaagagaccgaagaggctattgaaggtgcttatgaaaaaataataatgaaaagctactcacaccgtaagaaatccaaaattaatctgaaaagcaaaatacaaaagcaagtcgaggaatccccatcatggtttaaggcaatgcttgggttctttgaggtgccatcagcggagattatttcaagaagacttgctctttttgcttttattgctgggtggagcattgtaacgtccgctgagactgggcctactttccagcttgcactatcactcgtctcatgcatatatttcctcaatgaaaagatgaaaaatctttccagggcgtctatgacagggttagatgtttactcctttgttcttccaggtttggagtttttgtgggtggctggattgtgggatctttgcttgtcccagtga

SEQ ID NO: 79741 - DNA, 538 bp, Oryza sativa
  Clone ID: PAT_MRT4530_79431C.1
tcacccctccacctccacctccgccgctgatgcagcaaacacacgcacgccgcactccccccacacacaccccgcacacgatgcccgacgccgccgaagacgacgcatgccgacgctgctgaagacgacgacgacgacgctgctgaagacgacgacgacgctgatgccgatgccgacgccgctgaagacgacgacgacgacgctgctgaagacgacgacgacgccgatgccgatgccaatgccgctgaagacgacgacgacgatggcgacgggttcaaggaggaggaggacacgcacctccgctgtggagatcgccggtatcaagcagcaagcatccgttgccggcgagccaccgtccgtcagtctcgtcatcctatcagctctcccgtcagcaacaagcgcatgcatcttcatcaggcatatcactaacagtggcgtcaagatggagcgggcgaccacgatggcggcggtggtgaagggggcgccgccgggaaggatatcgcacgccggggcgggaggtggtgttttagattgctaa

SEQ ID NO: 79742 - DNA, 255 bp, Oryza sativa
  Clone ID: PAT_MRT4530_79432C.1
atggcggagggagtgaccgccgtggatcgggcgccgccgctgcttcgacccacggatctggagacgagggagaaggagacggggggtggggagtggccggcgacggttgaggcgaaggcacgcttcgggcctcgctgccggacgctaggtatcaccttaaccagcaaagaggtgttcacctgggccaatagcaacaaccagcggctgctccacatcggcgacattgatagaacaagcaaggaaatgacactctga

SEQ ID NO: 79743 - DNA, 368 bp, Oryza sativa
  unsure (1)..(368): unsure at all n locations
  Clone ID: PAT_MRT4530_79433C.1
ggctgaccagtacttgagcgaggctgcctctttggtgacgctaatctccgacagccatgaagactggttccattctacgggcaaggagcacaagcaagcaggtaacctgtcctgtgccggaaggttgcactcgaccactgtttgccaagaacttctgacaccaatcggcgacngagcgacgtacagtcagctgcactgttacaccatgtttaagcaggccaggctttgacgctttgcntagttaatttantttcgtccatttcttatttttctctttgttctgtgtatcagatcgcgccacaaccatactgggcatgacaagtttttgttaataataatataatataaagataaaaaaaaaaaaaaaa

SEQ ID NO: 79744 - DNA, 465 bp, Oryza sativa
  Clone ID: PAT_MRT4530_79434C.1
atgacctgcctcgacgcaagccgccgtctacaaccgatctgcctcgacgaaggggaaagcttgccgtcgttgacacagctgacgcatgccgtcaccatcggaggccctgagcgaatctggacagcagctcgcgccctacgcacagccgaacactggatccggaaggcacggtgcggatcgacggccgccatgactgcaggaggttgccgggaaggaggagaggccgaccggaagcagaccaccgccgcggagtacactccgtgccgctgccgaggccactccgccccgttgactgctcaagctgcgcatgaggtgaagagcggggagggcggcagcacggagggaaggagctcggagatggggggccagtacgcagggaagaaccatggcgatgtactagaggtggccggtggtggggagttgaatcgggggagacaaggaaaggagagctggtggggaaagtga

SEQ ID NO: 79745 - DNA, 712 bp, Oryza sativa
  Clone ID: PAT_MRT4530_79435C.1
ccttgtctcccccgattcaactccccaccaccggccacctctagtacatcgccatggttcttccctgcgtactggccccccatctccgagctccttccctccgtgctgccgccctccccgctcttcacctcatgcgcagcttgagcagtcaacggggcggagtggcctcggcagcggcacggagtgtactccgcggcggtggtctgcttccggtcggcctctcctccttcccttccagccgccaaggcgcatgtgaattggcgggcgcctcgtcgacatcatctgcggcatcggcgccatcacagtggcttgatctgcggttgtttcttggtctccacgccaccggcaacctcctgcagtcatggcggccgtcgatccgcaccgtgccttccggatccagtgttcggctgtgcgtagggcgcgagctgctgtccagattcgctcagggcctccgatggtgacggcatgcgtcagctgtgtcaacgacggcaagctttccccttcgtcgaggcagatcggttgtagacggcggcttgcgtcgaggcaggtcattgcttctatcgatcgaggttggcagattgttcttattttgtgtttactggatcagctgggctgcaaggtagcggtactggacgtggtcatgttcgttgatatggacttccagaacaagctgatcgacagcctatcaagaatctgcgatgcgtacaaatag

SEQ ID NO: 79746 - DNA, 358 bp, Oryza sativa
  Clone ID: PAT_MRT4530_79436C.1
atgggggagggtggcggcgtacttggagaagcggcgtacttggagatggcggcgcaggccgtagacgtccaaggcggcggcggagaggtagcggcgaagaggtcgaggcggtcggcggtggtcggggatcccggcgtcgtggatcccgacgttggggaggtcggggtcggggaggtcggggaagtcgatggacggacggcggagaggacgaccgacggcgagggcggcggtggagaggtcgaggcggcggtggagagggcggcggcgaggaggacggtggagaggtcgaggcggcggtggagaggagggcggcggatctggatcgagaataactgcaaggtgtttgtcaatgtacggc

SEQ ID NO: 79747 - DNA, 1542 bp, Oryza sativa
  Clone ID: PAT_MRT4530_79437C.1
atgacggataatggctttgctttgcttgtgtggtcgttgccggcatgggagaagtggccgccggacggcatgcaggtccccgatatggactgtaagaatgaacagatgatcgaagacaaggatgaagtgcatgctcatttgataatgaatggattcatgaagaaatatacctgctggaccaagcatggagagcaagaggcacctgatgtcgcagctgaagaagtgttggatcaggatgtagagaacaccgccgcagctcgagaaggcatgttcgtaccttctcctttaggtggagagaccatagatttggatactcaatgtctatctacaatgttgcatgacattgaagacgcagaggacaacgacaaagattttgagaagtttagtactacaaaggatggtctcaacgcccgacaagatctggaagatatgggtgttcgctcggagctacatcccataaccacggaatccggcagggtttaccttcctccagcctgctacactctctcgaaagaagagaagattgatttgctaacatgtttgagtggtataaaggttccatctggttactcatcaagaatcagtaggctcatttcactgcaagatcttaagttggtaggaatgaagtcgcatgattgccacgttcttatcacacagctgttgcccgttgcaataaggaatattttgcctcctaaggtgcgacacacgatccagcggttgtgttccttcttccatgcaattggccagaagatcattgatcccgagggactagatgaactacaggcagaacttgtcgatcttcgcaatgtaaaagttgacaatgaaggtttcaccactgtcaacttggctaacaacgcgtacaaggatgaaccgttcgttctcgccaaacaagttgttcaagtgttctacatagttgacccgtgtaacaagaaactacatgttgttcgtgaagggaaaaggagaattgttggattggaaaatattgcagacgaggatgattacaaccagcacatccgccgtcctcctctccaccgccgcctcgacctctccaccgtcctcctcaccgccgacctttccaccgccgcctcgacctctccaccgccctcctcgccgccgccctctccaccgccgcctcgacctctccaccgcctcctcgccgccactctctcgaccgccgccgttctctctgccgccatctccgccctctccaccgccctctccaccgccgccctcaccgccggtcgtcctctccgccgtccgtccatcgacttccccgacctccccgaccccgacctcccggacgccgggatccacgacgccgggatccccgaccaccgccgaccacatcgacctcttcgccgctgcctctccgccgccgccttggacgactacggcctgcaccgccgtctccaagtatgccgcttctccaagtacgccgccaccctcccccattcctccttttttggtgcagtgaatcttagcatcaatagaggatcttacatgaattttgctgcagtggatcttagcatgaatcttagctag

SEQ ID NO: 79748 - DNA, 3024 bp, Oryza sativa
  Clone ID: PAT_MRT4530_79438C.1
atggcacggggctccgcactgcttgatggtagcgtgctgccgccttctcgcattgcgagcgagaagcaggctgggttgccgcgccgcttcatgccggaatctgccaccggccgtgagatagtaatgctgggtgagggacgcccggcgccagactacccggggcggtccgtcttctttctccccttcgcaatggcagggctggttccgccattttcttctttcttcatggatgtcctggagttctacgatctccagatggcgcaccttacccccaacgcagtgatgacattgggcatcttcgcacacctgtgcgagatgttcattggggtgcgcccatctctccggctgttccggtggttctttaccgtgcagtcggtatcgccaccgtcggtggtcggcggctgctatttcctgccgcgggggccggtgttgaaccgctacatcccctgcgtcctccgtaaaaagtgggatgactggaagagcgactggttctacacccccctcgccgacgaagcgcatctccgacttccgagccagcccccggcgcaggcctccagctggcgggcgccggtagatctgggggatggctatgacgccgtcctcgaccgcctcgcgggcctgcgatcccaggggctcaccggggccatggtgtacggcgactacctccgtcgtcggattgcgccgctccagcggcgcgctcgggccgcctgggagtacaccgggcccgaagactacatgcggacccaccagggagtcagatgggattgggcccccgaggacttcaagatactggtccaacgggtgctaaatctcaactccgtggaggcatccctcatcccccacggtatcctccccctctgcagcgacccagatcgcgcctccatcttgaccattatgacggcggtcggggcctcagaggagcaggctccaaagggccatgacggcgcaggtgggagccgccggggggatcgatctacccccggagggggtcgtgcttctgggccccccgtcgggggctcggggagcaaccgccctaccgacgcccgggggaagaggaaactgggaggaacacctcccccatctcctccccgagggggcggggcggtgcgtgccagcagcaggcgcccggagggggccgcgccaacatcgcagcccgagggggagcgcaagaagaagcggctgcgcaagatgggggagacagaaccatcccggggaaacctaatttcccctccaaggtggtcatttaaccgaccccctcgcagtgatgtcccgtcacgttcctcccgccatcccaagtccggccaatccgaggccgaagatccggcggccgcagaggaacggaggcgagaatctgaccggcgagaggccgcagatcgccttcgggaagctgaagaggccgcccgggaagccgcccgggctcgccaggctgaggataccgctcgggaggaggccgcccgggcccgccaagccgaggaagccgctcgggaggaggccgcccgggcccgccaagccgaggaagccgctcgggaggaagccgcccgggttcgccaggctgagacgatggcgtcttccgaggcagctcacgacaaagctgctggcgcgtcgcttgggcctactccctcgggcgacgctcaggcgacagcctccggggcggctcgcgacgaggccgcgggcggatcgcctgggcccacttccccaggcgacgcccaggaccaaacgggtccgggggacatccccgagcccagtgcgtcctccggcgggccgagccgcgtcgcattctctccaaggcggctcttctcctcgtcttctgttgccccgctgagcgccgagccccttctgcaggccttggccgccgcaaacaccgcggtgctagatgggttcagcgcccaggtggaggccctgcgagcggaacgagcggagctcgaggccgcatgggcgcgtgtcgaggaggggcggcgctcggtggatgtcatggtggaggtgggccgtaaggctcaccgccgtcacgtctcggagcttgaagcccgcaaagcggcgctggcagagatcgcccgagaggtggaggaggagcggggggctgccctcatcgccactactatgatgatcgaggcgcaggactccctccgccttcagcacgggaactgggaggcggagctgaagaaaaagctcgacgccgcccagggggttcttgatgccgccgctgcccgagagcagcgagcgacggagactgaagcggcgctccggcggcgtgaagaggccctcgaggcgcgcgccatggcgctggaggagcgcgcctgcgtcgcggagaaagcagcgctgacggagcaggcccgccgcaactcggaatccgtccgcgccgagagagccgcactggagcagcgggctgccgatctcgaggcgcgggaaaaagatctggacgcgagggcgtgcatcggcggggcggctgcgggcgaaagcgacttagccgcccgcctcgcagatgccgaacacatcgtcgcagacatgcagcgcgcgctagactcatccgccggggaagccgaggccctccgcttggcgggcgagatagggcccggcatgctctgggatgcggtctcccgcctggatcgcgccggtcggcaagcgggcctctggaaaggccagtcaatgacacatcccaccaacctggaaggcctcgctccgcacctcacgaagatggcctgggctctccaacaactccccgaggagctcgagaagaccatcaagtcatcctcgagggacctcgcccaaggagcggttgaactcgtactagcgagttaccaggccagggaccccaacttctctccatgggtggcgctggaagagttccctcccgggactgaggacgacgcgcgcgcgcgggtccgggatgccgccgaccacatcgtccacggtttcgaggggtcggcccctcggctcgcgttcgcccccaactccgacgaggagggcgatgccagcggtgcagacgacgtggaagacgaggccggcgacccgggcgcatcggattga

SEQ ID NO: 79749 - DNA, 297 bp, Oryza sativa
  Clone ID: PAT_MRT4530_79439C.1
atgatcccgctggtggagctggccgacccgcgggtgagcaggatctacggcgtcgcgccggacgcggagacgatcggaatcctcaccagcgccgccaaccagaaaggggtggaggtggtggcgaaggtgtactggggcgagccggcgaagaagctgacggaggcggcgcaggggattcccctgcactggctcgtcgtcgggaacagaggcctcggcgccgtcaagaggcaagcacatccatgcatctctatctctctctgtatggtgggttctgatggggagcgtgagcacctgtag

SEQ ID NO: 79750 - DNA, 1137 bp, Oryza sativa
  Clone ID: PAT_MRT4530_7943C.1
aaaaggttttataaaaagaaaaaccttaaaaatccctccttccctctcctgggccggctcggcccatctccctccccctctctcctctcccccgcggcccattaggcccctcccctcgcgcgcgccactgacgggcgggcccgcccgccaccctcactgacgggtggggcccacccgtcatccccttcctcccgccgctcccgccgcctcgcccgcgcctagcgccaccgccgtcgctaatcccgccgcctcccgtcgtccccgcgtgaaattaataggggggaattactccctgtgattccctctccctttccccccatttttccctctctctctcgcattcaaatggccggatttgctcgcgcaaatctcgccggcgccattgatggcggccggacctcccgcgcctattcctcccccgccggccgccctctcctccttccaaccccatttaaaccctgcccgcacctccttcgcccgtttccaccctttgccgcgccttctcctcgccggaatcgagctcgcgccgtcgccctctctctcctccatcgccgacgaccttcggccgaccctctccgctcgccgggaccgcctcccgccccggcgcggactcctccggctttgccgcaccgccgtcgaccccgtccaccctctcgtcgagctcgccgaccgtcggagcgcagccgtccccgtccacccgagccgcgccgccgccttcatccgctccggctgcctttttcgtcatcgccgtcgacctagggtgagccgtggaccgccacctcgtttccccctttccctcccctctctcggccgccgctccgccgtgcctatggccgccgccggcgaccataggggcgcgggtgcgccgcctcccgccggccgcgccgacgtggccgccttcgggctcgccgagctgctgccgcgtggggcccggccatctgccgcccgcgccctcgggtgcggctgacgcgtggggcccacgggcgccggccggtgtgagcccgggtgcacccggtccaccgtggaccgtcaggctgccgcgtgggccccactcccgtggacccagttcgcgcgcccctcccccggctgacacaataaaccctttttaaattaaaatttaaatgaagaaattcgtaa

SEQ ID NO: 79751 - DNA, 2091 bp, Oryza sativa
  Clone ID: PAT_MRT4530_79440C.1
atggtgttcggcgactaccttcatcgccggatcgcgccgctccagcggcgcgcccggggcgcctgggagtacaccgggcccgaggactacatgaggacccaccaggggcgcaaatgggactgggaccctgaggacttcaggatggtggtccaacgggtgctgaatctcagctccgtggaggcatccctcatcccccaaggggtcctccccctctgctgcgatccagagcgcgccaagatcctgaccatcatacagtccggccggtctgaggccgaggagacggcgactgcggaggcccggaggcgggaagctgaccggcgagaagccgcggaccgcctccgggaagccgaggaggctgcccaggaggccgtccgggttcgccaggctgaggaggtcgctcgggagcaggccagactccgccgggccggggagtccgtccgggtggcagaggcggcgcgcgcacgccaggcggcctgccaaacccccgactcgactccgcccgaggcgacgacgacttcagaggccacccatgacgaggccgcgggcgcgccgctcgggcccgacccctcgggcgacgcttgggacgagccaggttcggggggcgcccccgagtccggcacgtcgatcggcgggtcgagccgcgcggcacccacaccatgggggctctcccctcggccttccgctgccccactgagcgcggagcccttcctgcaggccttggccgccgcgaacagcacggtgctggacgagttaagtgcccagatggaggccctgcaggcggagcgggcggagctcgacgcggcgtgggcgcgcgtcgaggaggggcggcgctcggtggaggccatggtggaggcgggtcgcaaggcacaccgccggcatgcctcacagctcgaggcccgtcgtagggacctggcggagatcgccagggaggtggaggaggagcgggagactgccctcatcgccaccgccgtgctcgacgaggcgcggagcgacctccgcctccaatacgggagccgggcggcggagctggaggagaagctcgacgccgcccggggagtccttgacgccgccgctgcccgggaacggcgggcggcggagaacgaggcggcgtcccggcggcgtgaagaggcccttgaggctcgctccacggcgttgaaggagcgcgcccgcgccctggacgcgaaggagagagacctggcggaccgcgaggccgccgtcgccacccgggaggcaacactggcggcgcacgaggccgcctgtgccgaagaggagtccgcactccgcttccgcgaggacgcgctcaccgagcgggggcgagctctcgaggaggccgaggctgcggcgcagcggctggcggacagcctgttcctccgcgaggcagcgcgggaggagcaggcgcgccgcaatctggaaggcgcccgcgccgagagggccgcactggatcagcgggccgctgagctcgaggcgcgggcgaaggaactggacgggagagcgcgcagcggcggggcggccgcgggccacggcgacctagtcgcccgcctcgcagccgccgaacacaccatcgccgagctgcagggcgcgctggactcgtccgccggggaggtcgaggccctccgcttggcgagcgaagtagggcccggcatgcttcgggacgccgtctcccgtctagaccgcaccgggcggcaggcgggcctctggggcgggcggcacgcaaagtacgccgccaaccaggggggcctcgcccagcgcctctcagagatcaccggggccctcgagcggctccccgaggagctcgaggagacgatcaagtcatcctcgagggacctcgcccggggggcggtggagcttgtactggcaagctaccaggccagggaccctgacttctccccgtgggcagtgctggaagagttccctccaggaaccgaggacagcgcacgcgcgcaggtccgggacgccgccgaccacatcgtccacagcttcgagggtatggcccctcggctcgcgttcgcgctcgactccgatgaggagggcggtgacgacggtgcggacgacagcgacgatgaggccgacgccccgggcgcgtcggagtga

SEQ ID NO: 79752 - DNA, 2862 bp, Oryza sativa
  Clone ID: PAT_MRT4530_79441C.1
atggcacggggctccgcaccgctcgacggtagcgtgctgccgccttctcgcatcgtgagcgagaggcaggccgggctgccgcgccgattcatgccggaatctgccaccggccgggaggtggtcgcgctgggtgagggacgcccggcgccacactacccggggcggtccgtattcttcctttccttcgcaatggcagggctggtcccgccattctcttctttcttcatggatgttctggagctttatgatctccagatggcgcacctcacccccaacgcggtaatgacgttggccatcttcgcgcacctgtgcgagatgttcatcggggtgtgcccatctctccggctgttccggtggttcttcaccgtacagccggtgtcgccaccgtcggtagtcggtggctgctacttccagccgcgggggccggtgctgaaccgctacattccctgcgtccttcgcaagaagtgggacgactggaagagcgactggttctacacccctctcgccgacgaagcgcgcctccgacttccgagccagcccccggcgcaggcctccagctggcgggcgccgcggcgcgcccagggcgcctgggagtacaccgggtccgaggactacatgaggacccaccagggggtcaaatgggactgggtccctgaagacttcaagatggtgatccaacgggtgctgaatctcagctccgtggaggcattcctcatcccccaaggtgtcctccccctctgcagcgatccagagcgcgccaacatcctgaccatcatgcaggcggtcggggcgtcaggggagcgggctcctcgaggccacgatggcgcgggcgggagccgcaggggggaacaatctaccccgggagggggtcgtgcttctgggccccgtgacgggggcccggggggcagccgccctgccgacgcccgggggaagaggaaacaggaggataccccctccccatctcctccccgagggggcggggcggtgcgtgccagcagcaggcgcccggagggtgctgtgccgacgtcgcagcccgagggggagcgaaaaaagaagcggctccgcaagatgggggggaccgaaccatgccggggaaacctcatctcccccccaaggtggtcgtttagccgacctcctcgcagcgagatcccgtcgcgcccttcccgccattccaagtccggccggtctgaggccgaggagacggcgaccgcggaggcccggaggcgggaagctgaccggcgagaagccgcagaccgcctccgggaagccaaagaagctgcccaggaggccgtccgggctcgccaggctgaggaagccgtttgggaggaggccagactccgccgggccgaggagtccgtccgggagacggaggcggcgcgcgcacgccgggcggcctgccaagcccccgacccgactccgcccgaggcgacaacgacttccgaggccacccacgacgaggccgcgggcgcgccgctcgggcccgacccctctggcgacgttcgggacgagcccgcttcgggggacgcccccgagttcggcacgtcgatcggcgggccgagccgcgcagcgcccacaccgaggcggctctcccctctgccttccgctgccccattgagcgcagagcccctcctgcaggccttggccgctgcgaacaccacggtgttggacgggttaagcgcccagatggaggggcggcgctcggtggaagccatggtggaggcgggccgcaaggcacaccgccggcacgcctcagagctcgaggcccgtcgtagggacctggcggagatcgccagggaggtggaggaggagcgggagactgccctcattgccaccgccatgttcaacgcggcgcgggacgacctctgcctccaatacgggagccgggcggcggagctagagaagaagctcgacgcgtcccggcaacgcgaagaggcccttgaggctcgcgccacggtgctggaggagcgcgcccgcgccctggacacgaaggagagggaactggcgggtcgcgaggccgccgtcgccatccgggaggcaacgctggcggcgcacgaggccgcctgcgccgaagaggagtccgcactccgcctccgcgaggacgagctcactgagcgggagcgagctctcgaggaggccgaggccgcggcgcagcggcgggaggagcaggcgcgcctcaatctggaaggcgcccgcgccgagagggccgcactagatcagcgggccgctgaattcgaggcgcgggcgaaggagctggacgcgagagcgcgcagcggcggggcggccgcgggcgacggcaacctagccgcccgcctcgcagccgccgaacacaccatcgccgagctgcagggcgcgctggactcatccgccggggaggtcgaagccctccgcttgacgggcgaggtagggcccagcatgcttcgggacgccgtctcccgtctagaccgtgccgggcggcaggcgggcctctggggcgggcgtaccgcgaaatacgccgccaaccaggggggcctcgcccagcgcctctcagagatggccgggaccctccagcggctccccgaggagctcgaggagacgatcaagtcatcctcgagggacctcgcccggggggcggtggagctcgtactggcaagctaccaggccagggaccctgacttctccccgtgggcagcgctggacgagttctcttctggaaccgaggatggcgcgcgcgcgcaggtccgggacgccgccgaccacatcatccacagcttcgagggtacggcccctcggctcgcgttcgccctcgactccgacgaggagggcggtgacggtggtgcggacgacagcgacgatgaggccggcgacccgggcgcgttggcgtga

SEQ ID NO: 79753 - DNA, 268 bp, Oryza sativa
  Clone ID: PAT_MRT4530_79442C.1
tccccccaccctctccctcctccgcctcgtcgacgcggcggcgatggcgtcacgcggcagcagaacctgggcccggatgttctaccccatgccactgccgatggatgcgcggcggcggttgatgttagggtgtccagcgacattgccagtcaataagaaccgggcacaatcaagaagaacccggcggatgatgttagggtgtccagcgacggatctcatcctgagttgcgacgaacacgaatgccacaagcacgagagagagagagag

SEQ ID NO: 79754 - DNA, 6050 bp, Oryza sativa
  Clone ID: PAT_MRT4530_79443C.1
agaggaaagatacaaacgaaatgtctaagcgtaaaatcgacgaaggtgttcaatattccaagaattgttgatgatagtaccatcttcgcgcttgagtcgataagaacccggccgagtgacttcagcaattatgaacggtccttcccataagggagataatttatgccgatcctatgttgtttgaattttcctcagaaccaggtcaccgactaaaaaggctcgcgatcgaacattccgattatgataacgacgtaacccttgcaaatatcgagtcgattgaattaaagctgcttctcgggcttcttctagtcggttgatgtcgtctactcggccctcttcatagccctcctcgttgaagttccgaaatcgtagtgattcaaattccacttcactcggcaacattgcttctgcgccataaaccaaaaagaacggcgactggccggtagcccgactaggagtagtacgtaaagaccaaagtacggacgacagctgatctacccacttgccagcataggggcgtagtcggtcgaaaactcgtgctttgatcccttgcagtatcatgccgttagcgcgctcaacttgtccgttactcatagggtgtgccatggaggcataataaattttaatgccgaagtcttcacaaaagtctttaaatgctccgccagtgaattgagtgccattatcagtgatgatccgattaggtaccccaaaccgatgcacaatgttgatgaaaaaatctctagctttatctgctatgatcatgatgaccggtttagcctcaatccacttggagaatttgtcgatagccacaaagagatgcgtgtaaccgccgactgcccttttaaatgggccgaccatgtcaagcccccagaccgcaaatggccaggacaacgggatggtttgcaactcttgggctggcaaatgagtttgtctggcaaaaaattgacaaccttcgcatgtccgcacaatcttgtccgcatcatgccggtaagctttgccgacgatggtccgtgcagcagcatgattaccacaaataccagaatgtatatccttcaacaattgtctccctttctccaaagatacacagcgctgcagtattcctgatggacttttcttgtacagttcagcttcgtgaataatgtaaagtctgctgcgcctagaaatccgctcggcttcgtttttgtcttgagggagttcttatttggtcaaaaattttatgaggggttctctccagtcggcttcaagcatgcttacgccttgagtatccatggcttcaactgcttcttttctgggcacggttggttcgtaaagatgctcgacgaacacatcagaaggggctgcttctcgttttgaaccaaaattggccagtctgtcagctgcctcattgttatgtcgaaggacatgggtgagctcgagtccatcgaatttatcttccagcttgcgtacctcttgtcggtaagcggtcatattatcatctagacatgaccactctttcatgacctgattgacaaccaactgagagtctccaaggacgattaatcggcgaatgcctaaagagattgcaatccttaatccgtggagtagcgcctcgtattccgccacgttatgggacgcagaaaaatgtatccacaatacgtagctcaatctttctccggtcggggaaattaagacgaccccagctccagtgcctgtaagcctcttcgacccatcgaaatgcatagtccagtattccatcttttcctctggcatgtcttcttggcactcggtccactcggcaaggaaatcagctaaagcttgtgacttgatcgaagttcgtggtttgaaagatatgtccaaagacatcaattctaaggcccacttcgcaattcgtccgtttgcttcgcgattatgaagtatatccccgagtggaaacgatatgaccaccgtgaccgagtgactttgaaaatagtgagataatttcctgacggtaattaagacaccatataataacttttgaacctgaggataccttgtcttggagtcggctaaaacctcgctgacaaaataaattggtcgttggactttttgaatatggccttcctcttcgcgctcgacaaccaggaccgtactcacaacctgggaggtcgccgacacatataacagtagcggctcttgcggatgtggtgaggccaaaactggtggagtggtgaggagtttcttgaagtcttcaaaggctttctgtgcttcgggtccccactggaaattgtcagtcttcttcagcaacttgaagaaaggcatcccccgctcgctgagtcgtgagacgaaccggctgagcgccgccatgcaaccagtcagcttttggacgtctttttgggagcttggcggtttcatgttgaggatggcattgattttctctgggttggcctgtatgcctctttgagataccataaatccgagcaacttccctgacggtactccgaagatgcacttttccgggtttagtttcatcttgaaagcacgaatgcttgtaaaagtttcttctaaatctgcaatcaggtcatccttccgcttggtcttgacgactacatcatcaacataggcttcaacattgcgaccgatctgagttgaaaaacacctttgaatcatgcgttgataggttgctcctgcgttcttcaatccaaagggcatggtgatgtagcagtaggccccaaagggcgtaataaacgaggtcttcaagcagtcggattcttttagtcgaatctgatgatatcccgagtaacagtccaagaagctgagtaactcacagccggccgttgagtcaaccacctggtcaatgcgaggtaacccaaaagggtctttgggacaagatttgttgaggtcggtataatcgacacacatgcgccattgccccgtctttttccgaaccaggactgggttagccagccagtcgtgatgaaggacttcattaatgaagcctgctgctaacagcttggttaattcctccttgattgcgtccttcctgtcctgtgcaaaatggcggagtcgttgcttgatgggtttggcgtcttccttaacatgtaaagagtgctcaatcacctctctggggataccaggcatatcggatggtttccacgcaaaaatatctttattattagcagtcttgtcaggatcggagggatctaagggaatctttttcgtcttagcatcactttcttcggtcttcgtcagcttggttgtaggaacttctccctcgcttgccgtggtcgcagccagtcggatctcttcgcgggcgagagtggtctcgtgggtttgtgccatctcgcaactttctttgtcacatgtgacggcttgcttgatgtcgctccgtagtgatatgacccctcgaggaccaggcatcttcatcatcatgtaggtgtagtgcgggacggccatgaacttggctagagccggtcgtccgagtatagcatgatatgctgtctcgaaatcagcgacttcgaaacaaacattttctgtgcgaaaattctcccgagtgccgaaggaaactggaagagtgatctgcccgagtggtgtggctgacaatcctgggataacaccatggaagggtgcattactcggctttaattccgtgcgaggaatctgcatatcgtccaaggtcttagcgaaaaggatgttgagtgcgctgccaccatcgatgagagtccgtcgaagcttgacattgcgaaccactaggtctagtaccagggggtaccgccctgggtagaccactcgggcgggatgatccgagcggtcgaacttaattgctgtctctgaccaccgaagatattggggcgtgttaggctgaaccgcattgatctcccgttctgttagcttctgttttctcttggactcataagccaggggtccgccgaagatgtgattaagttctttgcgatgatcttgaaaaccagtcggggcattgtcttcatcatctttcttctttgatgtgccctgatctccgtctgcaggtttgcgggcgttcttgacgtattgctccgcgaactgtttgtagacggagcaatctttggccacgtggttggagttgggatgatgcggacattgggagttcattatcttgtcgaaggtgttgacgcgaggacgttgtcgggaagatggagaggtggtcgccacaagttcttcgggcttacgcttgcgatccttgtggttgttacttccactcccccctgcagtcggcgtgtccttatttggcttccaagtggtgcccgactgtttggacgcggtgatagcatcttcggctttggcatactcgttggctttttcgaacatctgcttaaccatcctaggaggtttacgtccgaacttgccgactagatcctcgtggcgaatgcctttagtgaaggcggcgatgatgacgtcgtcggtgatgtcggagatcttgttgcgttgttcggagaagcatcggatgtaatctcgaagggattctccagacttctgaacgatgttgtagagatcaaactgtgtgccggggcgttcaaaggtgccctggaagttggcgatgaagtgatcacgaagttccgcccatgatctgatcgtgccacagggtagtccgtggagccaggatcgggcggagtccgctagggccacaggcagataatttgccatggccttgctgtctcctcctgctgcgcggattgcgaatccgtagacggtgagccaagactccggattagtggtgccgtcatacttctcgattccagtcggcttaaagccggctggccaatccactcgacgcaggtcattagtgaaggcagctactccatccacgtcgtcatcgtagcgatttggtgaatggcggtgacctcgtgctgcacggtgctggttgatcgtctcgcgaaggtcgacgggacgctggcgaggtggagagtgaggccgttcagctcggcgctccctgtgacgttcgggaggtgagtgaacagatcgtttgtcgtgacccctgctcctgcgactagatcctgtgccggtgatgttgaggcttggctgatgataatcatgagatcggaaatgagggactcggctaccagttggggtgcgggtgcttgcggagttggttggaaccgaggcctttgtctggttcaagatgttgacaacatgatcggcttggttgagtgcgtcttccttgaggagggtgtcgaggagagtgattgctgcaaccgcgttctgctggggggtgcgaaagaccgctgtcccgtcgacgtcttgttgcccaatgagctctctcgctcggcgcccagattccaaggcgcgttgccgtcgatcttcagcctcctttgcaatccgttcgcgatcttgttgctcacgctgtagtcgttctcgctcctgtcgctgtcgctctttctccagtcggcacgttcagcttcttgccgtgcgcgatcttggcccgcttctcgggcttggcgctgttcctctgtttcgttgtcagccatgaatacgccgaagaagaggggcatgtagttatcctcatagctgtcgtcgaagttgtcgaggtcgccgtggtcgtagtggtagccgaaatcgtcgtagtcgaggatctcggttggtcaagaactgacgccgggggagctaaggtaaccatctaactcttccgtcgagactgtcccaagaggttggagtataacgccaacctccctggatctagactggatcggggccgataccggagctcgcctagatctccaagtgggagatgttttggctgtgaagacggcgaccaagtcatcaggaagtttcatcaagattgagggataggactcgtcgtcttgatatggccacggaggagtaaattggatctcgtccgagtagtttgaagccgactcggaagatatgatcttggagtaggcctcgcccgagttcggaataccgaactgcacggggacctggtctctccccgactggttcgaatccgagtcaaggagagagatcttgccgaagtcgttggtgatgaagttgaggctgccgaaccggaacgcctgcccgggagagaaggcgaagtcgtcgatggcagaaacagaacccat

SEQ ID NO: 79755 - DNA, 345 bp, Oryza sativa
  Clone ID: PAT_MRT4530_79444C.1
atgggcgccacgcggcttggcccgctgatcgacgtgccggacccaggggcgtccctcgaagctggctcgtcccaaacgtcgctcgaggggtcgagcccgagcggccgcctagcgtgcgcgcgccacctccgcctcccggacggactcctcggcccggcggagtctggcctcctcccgagcggcttcctcagcctggcgaacccggacggcctcctgagcagcttcctcggcttcccggaggcggtctgcggcttcttgccggtcagcctcccgcctccgggcctccgcggtcgccgtctcctcggcctcggaccggccggacttggaatggcgggaggggcgtga

SEQ ID NO: 79756 - DNA, 3147 bp, Oryza sativa
  Clone ID: PAT_MRT4530_79445C.1
atggcacggggctccgctctgctcgatggtagcgtgctgccgccttcccgcatcgtgagcgagaggcaggctgggctgccacgccgcttcatgccggaatctgccaccggccgggagatagtcacgctgggcgagggacgcccggcgccagtctacccggggcggtccgtcttctttctcccctttgcaatggcagggctggttccgccattttcttctttcttcatggatgttctggagttctacgatctccagatggcgcacctcacccccaacgcggtgatgacattggccatcttcgcgcatctgtgcgagatgttcatcggggtgcgcccatcccttcggctgttctggtggttcttcaccgtgcagtcggtgtcgccgccgtcggtggtcggtggctgctacttccagccgcggaggccggtgttgaaccgctacatcccctgcgtcctccgcaagaagtgggatgactggaagagcgactggttctacacccccctcgccgacgaagcgcgcctccgacttccgagccagcccccggcgcaggcctccagctggcgggcgccggggctcacaggggccatggtgtacggcgactaccttcgtcgccggatcgcgccgctccagcggcgcgcccggggcgcctgggagtacaccgggtccgaggactacatgaggacccaccagggggtcagatgggattgggctcctgaggacttcaagatagtggtccaacgggtgctgaatctcagctccgtggaggcatccctcattccccaaggagtcctccccctctgcagcgatccagaccgcgcctccatcctgaccatcatgcaggcggtcggggcgtcggaggagcgggcccctcgaggccacgatggcgcgggcgggagccgtaggggggaacaatctaccccgagagggggtcgtgcttctgggccccgcgacgggggcccggggagcagccgccctgccgacgcccgggggaagaggaagcaggaaggaacctcttccccatctcctccccgagggggcggggcggcgcgtgtcagtagcaggcgcccggagggggccgcgccgacatcgcagcccgagggggagcgcaagaagaagcggctccgcaagatgggggagacagaaccatctcggggaaacctcatttcccctccaaagtggtcgtttaaccgaccccctcgcagcgagatcccgtcgcgtctctcccgccattccaagtccggccagtctgaggccgaggatccggcggccgcagaggctcggaggcgggaatctgaccggcgagaggccgcggatcgcctacgggaagccgaggagaccgcccaggaggccgcccgggctcgccaggccgaggaaaccgctcgggaggaggccgccctagcccgccaggccgagaaagccgctcgggaggaggccgcccgagcccgccaggccgaggaagccgctcgggaggaagccgaatttcgccaggacgaggcaatggcgacttccgaggcagctcgcgacgaggtcgcgggcgcgtcgcttgggcccacttcctcgggcgacgctcaggcgacaacttccggggcagctggcgacgaggctgcgggcgcgtcgcttgggcccactccctcgggcgacgcccaggaccaaccaggtccgagggacatccccgagtccggcacttccatcggcggcccgagccgcgtggcatcctctccaaggcggctcttccccacgccttctatcgccccgctgagcgcagagccccttctgcaggccttggccgccgcaaacaccgtggtgttggacgggttaagtgcccaggtggaggccctgcaagctgagcgggcggagctcgacgccgcatgggcgtgtgtcaaggaggggcggccctcggtggaggccatggtggaggtgggccgcaaggcacaccgccagcacgtctcggagcttgaagctcgtaagacggtgttggcggaaatcgccaaggaagtggaggaggagcggggagctgccctcatcgccaccaccgtgatgaacgaggcgcaggacaccctccgccttcaatacgggagctgggaggcggagctagggaagaagctcgacgccgcccagggggtgcttgacgctgccgctgcccaagaacagcgggcggcggaaaccgaagcggcgtcccgacggcgcgaagagacctttgaggcgcgcgccatggcgctggaagagtgcgcctgcgtcgtggagagggatctggcggaccgcgaggccgccgtcactatccgggaggcaacgctggcggcgcacgagtctgcctgtgccgaagaggagtccgcactccgcctccgagaggacgcactcaccgagcgggagcgagctctcgaggaggccgaggccgcggcgcaacggctggcggacagcctgtccctccgcgaggcagcgcaggaggagcaggcgcgccgtaatctggaatgtgtccgcgccgagggggccgcactgattgagcgggccgctgaactcgaggtgcgggagaaggagctagacgcgagggcgcgcagcggcggggcggctgcgggcgaaaacgacttagccgcccgcctcgcagctgccgaacacaccatcaccgacctgcagggcgcgctagactcgtccgccggggaggtcgaggccctccgcttggcaagcgaggtggggcccggcatgctttgggacgccgtctcccgcctagattgcgccggtcggcaggtgggcctctggagagggcggtccgtaaagtactccgccaaccagggaggcctcgcccaacgcctctcgaagatggccggggctctccaacggctccccgaggagcttgagaagacaattaagtcattctcgagggacctcgcccaaggagcggtggagctcatactagcgagttaccaggccagggaccccaatttctctccatggatggcgctggatgagttccctcctgggaccgaggacagcgcgcgcgcgcaggtccgggatgccgccgaccatatcgtccacagcttcgagggctcagcccctcggctcgcgtttgcccccaactccgacgaggagggcgatgccggtggtgcagacgacagtgacgacgaggccgtcgacccgggcgcatcagattga

SEQ ID NO: 79757 - DNA, 1359 bp, Oryza sativa
  Clone ID: PAT_MRT4530_79446C.1
atgtccagcaagtcaccacatcaatctagtgagtcagatgattctagctctagtgactaccttgaagagctgattttggaagaaatcaatgatcctatggaagctgagattgaagatgagattgaagctcaacttcaagctcaaatgcaagcacaacaaactggtcattctaatcgtcgtgggggctacaaacgaaggtacatcaatagagattaccaagacgaccacaacagattgtttgcaaaatactattccgacaatcctttatataccgatgatcagttccgtagaagatttcgcatgagaaagcatctatttttgcacattgttgaagctcttggcatttggtctccatattttcgtttgcgaagagatgcatttggcaaggttggtctatcaccgttgcaaaaatgcacagctgccatacgcatgttggcatatggtacaccagctgaccttatggatgaaacttttggggttgcagaaagcacagcaatggaatgcatgataaattttgttcaaggtgttagacatatatttggtcagcaataccttcgcaagcctaatgaacaagatatccagtgtttacttcaacaaggagaggctcatgggttccctggcatgttgggtagtcttgactgcatgcattgggagtggcaaaattgcccggttgcatggaagggacaattcacacgtggtgattatggtgtacccactatcatgcttgaagcagttgcatctgctgacctatggttttggcatgcatttttcggtgctgctggttcaaacaatgatatcaatgtgttggatcagtcaccattgtttactgcagtgctacaaggaagagctcctagtgttcaatttactgtcaatgggacagaatataacatgggatactatttagctgataatatttatccagagtgggctgcatttgccaaatcaattactagacctcaaagtgacaaggctaaattgtatgcacaacgccaagaatcagcaaggaaagatgtggaacgagcatttggggttttgcaaaaacgttgggccataattcgccacccagcacggctttgggaaagggatgaactagctgatatcatgtatgcatgtattattttgcacaacatgatagttgaggataagagagacgattatgacatacctgatgacaacacatatgagcaatcacaatcttctgtacaactagcaggactcgaccatgggccaatccatggatttgcagaggtcctagacgcagacatgaatattcgcgatcgaacaacccatcgacgtctaaagtcagatttgatggagcacatttggcagaaatatggtggtcaacaacaacaaaactag

SEQ ID NO: 79758 - DNA, 3078 bp, Oryza sativa
  Clone ID: PAT_MRT4530_79447C.1
atggcacggggctctgctctgctcgacggcagtgtactgccgccttcccgcatcgtgaatgagaggcacgccggactgccgcgccgcttcatgccggagtccgccaccggtcgggagattgtgatgctgggcgaggggcgcccggcaccagactacccggggcggtccatcttcttcctccccttcgcgatggctgggctggccccgccattttctcatttcttcatggacgtcctggagttctacgatctccagatggcgcacctcacccccaatgcggtgatgacattggccatcttcgcgcacctgtgcgagatgttcattggggtgcgcccctctcttcagctgttccggtggttcttcaccgtgcagtcggtgtcaccgccgtcggtggttggcggctgctacttccagccgcgggggccggtgctgaaccgctatatcccctgcgtcctccgcaagaagtgggacgactggaagagcgactggttctacaccccccttgccgacgaagcgcgcctccgacttccgagccagcccccggcgcaggtctccagctggcgggcgccggtagatctgggggaggagtacgacgccgtcctcgaccgcctggcgggcctgcgatcccaggggctcaccggggccatggtattcggcgattacctccgtcgccggattgcgccgctccaacggcgcgcccggagcgcctgggagtacactgggcctgaagactacatgcggacccatcagggagccagatgggattgggctcccgaggacttcaagatcgtggtccaaagggtgctgaaccttagctccgcggaggcgtctcaccttcctcaggagatcctccccctctgcatcgatcccgaccgtgtctccattctatccattatgctgggggtcggggcctcagaggagagagcccctaagggcaacgacggcgcgggcgagcgccgccgggggaaacaatctgccccgggagggggtcgtgcttctgggccccgcgtcgggggctcggggagcagccgccctgccgacgccccggggaagaggaagctgggaggaacacctcccccatctcccccccgagggggcggggcggtgcgtaccagcggccggcgcccggagggggccgcgccgacgtctcagcccgagggggagcgcaagaagaagcggctccgcaagatgggggagacggaaccagcccggggaaacctaatttcccccccaaggtggtcattcaaccgaccccctcgcagagacgtcccgtcgcattcctcccgccaccccaagtccggccagttcgaggccgaagatccagcggccgcagaggagcggaggcgagagtctgaccggcgtgaagccgcagcccgccttcgggaagctgaagaggccgcccgggaggccgcccgggttcgccaagcggaggaagctgctcgggaggaggccgcccgggctcgccaagccgaagaagctgcccaggaggaggccgcccgggctcgccaggctgaggcggcagctgctgctggcgcgtcactcgggcccactccctcgggcggccctcaggcgacatcctccgaggcggctcgcgacgaggccgcgggcgcgtcgcctgggcctacctcaccgggcgacgcccaggaccaaacgggcccgggggacatccccgagctcagcgtatcctccggggggccaagccgcgtcgctttttctccaaggcggcttttctcctcctcttccatcgccccgcgcccaggtggaggccttgcgagcggaacgagcggagctcgaggccgcatgggcgcgcgtcgaggaggggcggcgctcggtggagccatggtggaggtgggccgtaaggctcaccgccgccacatctcggagctcgaagcccgcaaggcggcgctggcggagatcgcccgggaggtggaggaggagcgagaggccgccctcgtcgccaccaccgcgatggtcgaggcgcaagacaccctccgtcttcagcacgcaagctgggaggcggagctgaagagcaagctcgacgccgcccaaggggttctcgactccgctgccgcccgagagcggcgggcaacggaagccgaagcggcgtcccggcggcgcgaggaggcccttgaggcccgtgccatggcgctggaagaacatgccggcgccgtggagaggggcttgatggaccgtgaggccgccactgctctccgggaggcgacgctggcggcgcacgaggccgcctgcgccgaggaggagtccgcgctccgccttcgcgaggatgcactcgccgagcgggagcgggctctcgaggaggccgaggccacgacgcgacggctggcggacagcctctccctccgcgaggcggcgcaagaggagcaggcgcgccgcaaccttgaaagcgtccgcgccgagagaaccgcgctggagcagcgggctgccaacctcgaggcacgggagaaagagctggccgcgggggcgcgcatcggtggggcggctgcgggcgaaagcgacttagccgctcgcctcgcggctgccgaacacaccgtcgccgacatgcagcgcgcgctggactcttccaccggggaggtcgaggcccttcgcttggcgggcgagattgggcccggcatgctttgggacgcggtctcccgcatgaagcgcgccggtcggcaagcaggcctctggggaggccagacgacggtgccccccaccaatctggaaggcctcgctccgcacctcaacaggatggcttgggttctcgagcgactccccgaggagctcgagaagaccattaaggcatcctcgagggacctcgcccggggggcggtcgaactcgtgctggcgagttaccaggcccgggatcccaacttctccccatggatggcgctggaggagttccctcccgggaccgaggacgaggcgcgcgcgcgggtcggggatgctgctgaccacatcgtcaacggcttcgagggctcagcccctcggctcgcgttcgcccccagctccgacgaggaaggcgacaccagcagcgaggacggcggtggcgacgaggccggcgacccgggcgcatatgaatga

SEQ ID NO: 79759 - DNA, 2844 bp, Oryza sativa
  Clone ID: PAT_MRT4530_79448C.1
atggcacggggctccgctctgctcgatggtagcgtgctgccgccctcccgcatcgtgagcgagaggcaggctgggctgccgcgccacttcatgccggaatctgccaccggccgggagatagtcacgctgggcgagggacgcccggcgccagactacccggggcggtccgtcttctttctcccctttgcaatggcagggctggttccgccattttcttctttcttcatggatgttctggagttctacgatctccagatggcgcacctcacccccaacgcggtgatgacattggccatcttcgcgcatctgtgcgagatgttcattggggtgcgcccatctctccggctgttccggtggttcttcaccgtgcagtcagtgtcgccgccatcggtagttggtggctgctacttccagccacgggggccggtgccgaaccgctacatcccctgcgccctccgcaagaagtgggacgactggaagagcgactggttctacaccccccttgccgacgaagcgcgcctccgacttccgagccagcccccggctcaggcctccagctggcgggcgccggtagatctgggggatggctatgacgccgtcctcgaccgcctggcgggcctgcgatcccaggggctcacaggggccatggtgtacggcgactacctccgtcgtcggattgcgccgctccagcggcgcgctcggggcgcctgggagtacaccgggtccgaagacttcatgaggactcaccagggagtgagatgggactgggcccctgaggacttcaagatattggtccaacgggtgctgaatctcaactccgtggaggcggccctcattccccaaggaatcctccccctctgcagcgatccagaccgcgcctccatcctgaccattatgatggcggtcggggcctcagaggagcgagctccaaagggccacgacggcgcaggcgggagccgctggggggaacaatctaccccgagagggggtcgtgcttctgggtcccgcgacaggggcccggggagcagccgccctgccgacgcccgggggaagaggaagcagggaggaacacctcccccatctcctccccgagggggcggggcggcgcgtaccagcagcaggcgcccggagggggccgcgccaacatcgcagcccgagggggagcgcaagaagaagcggccccgcaagatgggggagacagaaccatctcggggaaacctcatttcccctccaaagtggtcgtttaaccgaccccctcgcagcgagatcccgtcgcgtccctcccgccattccaagtccggccagcctgaggccgaggatccggcggccgcagaggcccggaggcgggaatctgaccagcgagaggccgcggatcgcctacgggaagccgaggaggccgtccaggaggccgcccgggctcgccaggccgaggaaaccgctcgggagggagccgcccgggcccgccaggccgaggaagctgctcgggaggaggccgcccgagcccaccaggccgaggaagccgctcgggaggaggctgtccgagcccacaaggccgaggaagccgctcgggaggaggctgtccgagcccacaaggccgaggaagccgctcggcggcttttccccacgccttctactgccctactgagcgcagagccccttctgcaagccttggccgccgcaaacaccacggtgttggacgggttaagtgcccaggtggaggccctgcaggcagagcgggcggagctcgacgccgcgtgggcgcgtgtcgaagaggggcgacgctcggtggaggccatggtggaggtgggccgtaaggctcaccgccggcacgtctcggagcttgaaaccccgggcggcggagaccgaagcggcgtcccggcagctgaagaggcccttgaggcgcgcgccatggcactggaagagcgcgcctgcgtcgtggagagggatctggcggaccgcgaggccgccgtcaccatccgggaagcaacgctggcggcgcacgaggctgcctgcgccgaagaagagctcgcgctccgcctccgcgaggacgcgctcaccgagcgggagcgagctctcgagggggccgaggccgcggcccaacagctggcggacagcctgtccctccgcgaggcagcgcaggaggagcaagcgcgccgtaatctggaaggtgcccgcgtcgagagggccgcactgaaccaacgggccgctgagctcgaggcgcgggcgaaggagctggacgcgagggtgcgcagcggcggggcggccgcgggcgaaagcgacctagccgcccgcctcgcagctgccgaacacaccatcgccgatctgcagggcgcgctggactcgtccgccggggaggtcgaagccctccgcttggcaggcgaggttgggcccggcatgctttgggacgccgtctcccgcctagattgcgccggtcggcaagtgggcctctggagagggcggaccgtaaagtacgccgccaaccagggaggtctcgcccagcgcctctcgaagatggccggggctctccaacggctccccgaggagctcgagaagacaattaagtcatcctcgagggacctcgcccaaggagcggtggagctcgtcctggcgagttaccaggccagggaccccaatttctctccatggatggcgctggaagagttccctcctgggaccgaggaccgcgcgcgcgcgcaagtccgggatgccgccgaccatatcgtcgacagcttcgagggctcggcccctcggctcgcgttcgcccccaactccgacgaggagggcaatgccggtggtgcagacaacagtgacgacgaggccggcgacccgggcgcatcggattga

SEQ ID NO: 79760 - DNA, 408 bp, Oryza sativa
  Clone ID: PAT_MRT4530_79449C.1
atggagggggtcctcaccgaggggcgccggcgacggaaggcggccggcggagctcgggcggaggatggcgtcgctgctccggcgacaagcggcgcccgggaggaagcggacgagggcggccgcgacctcgcgtggcgggaacgggcatcggcgacggggagctcggatgaggggaacgccgggcttcctatcgacgctgcgatgccactggaggaggacgtgaggccggaaatggtttggagcggcggcgagtggcagccggaggcggctgctatgatggcggttcgggtggtgtggtggagtgacggttccagcggcggaatggaggagcggaggggatgccggggtacgggacgacgcaacgaagccgtcggtgacagttgcgcggagcagcgacggcgggagtga

SEQ ID NO: 79761 - DNA, 1137 bp, Oryza sativa
  Clone ID: PAT_MRT4530_7944C.1
atgaatagagtatccactagctggggttttgtttattctagggtgaacaagccgggagagagggcgcgcggaccgggtccacgggagtggggcccacgcggcagcctcacggtccacggtggaccgggtgcacccggctcacaccggccggcgccgtgggccccacgcgtcagccgcacccgagggcgggggcggctgacggccgggccccacgcggcagccgctaggcgcgcccggaggcggccacgttggcgcggccggcgggaggcggcgcccgcgccccgatggtcgccgccggcgaccaccggcacggcggagcagcggccgagagaggggagggaagggggaaaggaggcggcggtccacgcgtcaccccgagggcgacggcggcgatggaggaggcggccggagcggagggaggtggtggcgtggctcgggttgacggggtcggcggcgctccggcggtcggcgaccgaaatggagaggtggacgaggtcggcggggatgcggcgaagccgaaggaggcggcgccgaggtgggaggtggtccggggcgacgacggcggcggaccggagctcggcggcgacgacggagagagagagcgacggcgcgagctcgattccggcggggagagagggcggtgagtggcggaaacgacggtggggagctcggggagggtttatatagggttgggagtgagagagggcggccggaggagggggaaatgggcgcgggagacccggccgccattaatggcgccggtgaggttaggggagaggtttctaaacgaatccgagggagagagggagggaaaaatggggcgaaagggggagaggatcccggggaataattccccccactttaatgcacgcggggacggcgggatgcggcggaatcggcggcggcggcggcggcgctaggcgcgggcgaggtggcgggggcggcgggaggaaggggatgacgggtgggccccacccgtcagcgagggtggcgggcgggcccgcccgtcagcggcgcgcgagcggggagggccgagtgggccgcggggaggaggagagagggggagggagatgggccgagccggcccattagaggggagaggtgatttttagggtttttctttttataaaatcattt

SEQ ID NO: 79762 - DNA, 414 bp, Oryza sativa
  Clone ID: PAT_MRT4530_79450C.1
ggcctcactggggtgttgaacccatccagcactgcggtgtttgcggcggccagggcctgcagaaggggctcggcgctcagcggggcgacagaagatgaggagaagagccgcctggagaaaaggcgacgcggcttggccccccggaggatgcgctgggctcggggatgtcccccgggcccgtttggtcctgggcgtcgcccggtgagcctggcgagcccgggcggcctcctcccgggcagcttcttcggcttggcgagcccgggcggcctcctcccgagcagcttcctccgcttggcgaacccgggcggcctcttcagcttcccgaaggcgggctgcggcttcacgccggtcagactctcgcctccgctcctctgcggccgctggatcttcggcctcggactggccggatttggg

SEQ ID NO: 79763 - DNA, 2619 bp, Oryza sativa
  Clone ID: PAT_MRT4530_79451C.1
atggcacggggctccgcaccgctcgagggtagcgtgctgccgctttcccgcatcgtgagcgagaggcaggccgggctgccgcgccgattcaagccggaatctgccaccggccgggaggtggtcgcgctgggcgagggacgcccggcgccacactacccggggcggtccgtcttcttcctctctttcgcaatggcggggctggtcccgccattctctatttttttcatggatattctggagttttatgatctccagatggcacacctcacccccaacgcgataatgacattggccatctttgcgcacttgtgcgagatgtttatcggggtacacccgtctctccggctgttccggtggttcttcaccgcacagccggtgtcgccgccgacggtagtcggtggctgctacttccagccgtgggggcaggtgctgaaccgctacattccctgcgtcgttcgcaaaaagtgggacgactggaagagcgattggttctacacccccctcgccgacgaagcgcgcctccgacttccgaaccagcctccggcgcaagcctccagctggcgggcggcggtagatctgggagacggctacgacgccgttcttgaccgcctggcgggtctgcgatcccaggggctcacgggggccatggtgttcggcgactaccttcgtcgccggatcacgccgctccagcggcgcgcccggggcgcctgggagtacaccgggcccgaggacgtcatgaggacccaccaggggcgcaaatgggactgggaccctgaggacttcaggatggtggtccaacggcgagatcccgtcgcccctccccccccccccccccgcccttccaagtccggccggtctgaggccgaggagacggcgaccgcggaggcccggaggcgggaagctgaccggcgagaagccgcggaccgtctccgagaagccgaggaggctgcccaggaggccgtccgggttcgccaggctgaggtggccgctcgggaggaggccagactccgccgggccggggagtccgtccgggaggcagaggcggcgcgcgcacgccaggcggcctgccaaaccctcgacccgactccgcccgaggggacgacaacttccgaggccacccacgacgaggccgcgggcacgccgctcgggcccgaccccttgggcgacacttgggacgagccagcttcgagggacgcccccgagtccggcacgtcgatcggcgggccgagccgcgcggcgcccacaccgaggcggctctcccctctgtcttccgctgccccactgagcgcggagcccttcctgcaggccttggccgccacgaacagcacggtgctggacgggttaagtgcccagatggaggccctgcaggcggagcgggcggagctcgacacggcgtgggcgcgcgtcgaggaggggcggcgctcggtggaggccatggtggaggcgggccgcaaggcgcaccaccggcagaccacacagctcaaggcccgtcgtagggagctggcggagattgccagggaggtggaggaggagcgggagactgccctcatcgccaccgccgtgctcgacgaggcgcggaacgacctccgcctccaatacgggagccgggcggcgaagctggaggagaagctcgacgccgcccggggagtccttgatgtcgccgctgcccgggaacggcgggcggcggagaaagaggcggcgtcccgccagcgcgaagaggcccttgaggttcgcgccacggcgctggaggagcgtgcccgcgccctggacgcgaaggagagagacctggcggaccgcgaggccgccgtcgccacccgggaggcaacactggcggcgcacgaggccgcctgcgccgaagaagagtccgcactccgcctccgcgaggacgcgctcaccgaacgggagcgagctctcgaggaggccgaggccgcggcgcagcggctggcggacagcctgttcctccgcgaggcagcgcgggaggagcaggcgcgccgcaatctggaaggcgcccgcgccgagagggccgcactggatcagcgggccgctgagctcgaggcgcaggcgaaggagctggacacgagggcgcacagcggcggggcggccgcgggccacagcgacctagccgcccgcctcgcagccgccgaacacaccatcgccgagctgcagggcgcgctggactcgtccgctggggaggtcgaggccctccgcttggcgagcgaggtagggcccggcatgcttcgggacgccgtctcccgtctagaccgcgccgggcggcaggcgggtctctggggcgggcggcacgcgaagtacgccgccaaccaggggggcctcgcccagcgcctctcagagatggctggggccctccagcggctccccgaggagctcgaggagacgatcaaggaccctgacttctccccgtgggcagcgctggaagagttccctcccggaaccgaggatggcgcgcgcgcgcgggtccgggacgccgccgactacatcgtccacagcttcgagggtacggcccctcggctcgcgttcgcgctcgactccgacgaggagggcggtgacgacggtgcggacgacagtggcgacgaggccgacggcccgggggcgccggagtga

SEQ ID NO: 79764 - DNA, 402 bp, Oryza sativa
  Clone ID: PAT_MRT4530_79452C.1
tcttgttctagacagacctaagccaacgggagggggaggttgacacgtacagcacgttctatattagagcatttacatacacatgacgtgggcaatcatgttagctaaaggagacgcgccaaaagagacgaacactactactaggggagtattgcgcattggattccatccctctgacgcactgctgcctgcctgccattgatagagtgcatcgttgatgtacgatcaagagctctaatttgcaattcaaagcaatcccgcatacccatatgccataggataggagtatggtatacatttaccgcgatgaggtgctgctgctgtcggagccacgcccacgcagggggcctcgcctcctgggctctccaatctgctgtagcgcgccgtcgtacgacttgggca

SEQ ID NO: 79765 - DNA, 111 bp, Oryza sativa
  Clone ID: PAT_MRT4530_79453C.1
atggaggacttcctcaactataacaaaatatatgataagtacttaattgcacatgaaaatccaattttaaagaccgttgattattttccacagagaaatacattttattaa

SEQ ID NO: 79766 - DNA, 1515 bp, Oryza sativa
  Clone ID: PAT_MRT4530_79454C.1
atgccggtcatccccgagcaggcaatggagttcctctctcggacatggagcccttcctcctcggatctcttccaaatcctctctcccagtgaagacgaggtgatcggagacgaagacgttgaggtacatggggacacggttcgatttgatggaggcagaagccaagtgttcaaccagacatggctgaacatgggacacatgagggcaattctgagaggatacttgatggacagcatccccatcgccgggagtcggaggaagaggcgcgacgagctccggctgcacacggcgcaggcccacgccgccgtctcggtggcccagctcgcagctgcgatcgccggcgtcgtgtcagcttgcgagctgaggagcagctctgggggtgctggggctgacaggaagctgagcacggtgcttgcctcggctgccgcgctggtggccaccgtctgtgccgagttcgcggagtctgccggtgccgacaggtcccgggtcacctccgccgtgaaggccggcctcgacagccgctcccccgccgagctgctcaccctcaccgccaccgctgccacatgtctgagaggagcagctgtgctgaagctgagagcagacgtcagcagagggatcagcagcagcaccagcaactccatgatgatgatgagcaccaatacagctagcattcagaaaggcacaattctcagggtttgcctgccttgtggaaggttgcggctgaggacggtggccgtcttcccggagtgcggcacggtggctctgaggctggggaagaagcgcctgcatggagcattcacaacataccagcactatgaggtgttggcagtctctggcggtggcgaggcggtggtggattgtcggaagttcttccccgtggcgctgagcacggcagcagggacggtgcagctgctgctggacaaccagatgcactgcaaggggaactggaccatctcccttggtgtcgaggtaggcgcggaggatgcgcgccgccacggcctcgccggcggcgacattggcccgccttctgcgcgtcgagtcgagcccccacagtcgcgtgacgcgtcttctactccttcttcctcctcctcctcgaggatggggtggcaacttggcccatcagaaggccaccggccgactctaactcccactcccaccggcggcgacggcggcgagccgagttccccatcggtggtggcggcggagcgtgcggggaaggaggaggaggaggatggactggtcgaaccttggtggggaggggccgccgggttgatcgccgagcgcgtcctcgccaacgacgtcgccgactacatccgcttccgcgccgtgtgccggccgtggcggctgtgctcggtggatccccgctgctcgcagagcggcgccatggacggccgcttcctcccccggcggtggatgatgcttgacaaggcggcgccccaagccgtcggctgcttccgcttccatcaccagaatatgacactcctcaacctgttcgtctgttttgctgatgaatga

SEQ ID NO: 79767 - DNA, 492 bp, Oryza sativa
  Clone ID: PAT_MRT4530_79455C.1
atggcgacacgcagtgacgggacggcgcggcgcggcgttgggatggcgagcgcgacggcgacagtgcgcggcgcgggcggggctcgaggtggtgatggcgacggcggtgacgcgatggcgcagcagcggcgcggggctcaagggcgacggcgtcgcgatagagcgcgggtgttacagtctaccttggcacctccaactccaagcactctatggcttcatgggaaactgcacttagaaaatgcacaacatggaggaccaaatgtagccatcgcttgtggagatgaactggatgggatgtgctatcagcctataactttggccggcaatatgttcacatatcctcttcacctatctcgaattcattgtcacctccctgatggacacaacttcaacaatactgacgccttgaggaaacatgtggtcgccatgtcccaagttaccaacaacggatgctcgttttcccttgtcaaccagatcgacaaccaccactag

SEQ ID NO: 79768 - DNA, 557 bp, Oryza sativa
  Clone ID: PAT_MRT4530_79456C.1
gcacgaggggccgcgcttccccaccccaaccaaaccaacgccttctcctcctcctcccccccgtggccgccgcgaggcgagagcgatcgagactggagtgctggcgacgacggcgacggagaaggtagcggaggaatcggcggcggatacggggaggacgggtgctcccgaggagatgaacggccgcggcggcggcggaggcggaggcgtgggggtggtgggagcgggaggcgaggagcagatggagatggaggaggacggcgccgggcttcgcgcgcgggttgctgcggggaggaaggagcgggtggtgcttatgtgggggtacctccccggcgtctcgccgcagcgctccccgctgctcgggcccgtacccgtgaggctaccggccgcggcgggcgccgatgggtggagggacgtatgcggaggcggctgcggcttcgccatggccatctcagattctggtaaactcctcacttggggttctgctgatgatatgggccaaagctatgtgactgccgggaagcatgaggaaactccagaagctttccacttcctag

SEQ ID NO: 79769 - DNA, 1197 bp, Oryza sativa
  Clone ID: PAT_MRT4530_79457C.1
atgcctggagcaactaccgccgctattgttgacagccgccgcggcacacaacattcggaaggtcctgcaacgatcctcgccatcggcactgcaaacccggaaaacatcatgtttcaggataactttgccgactactactttggtctaaccaaaagcgagcaccttaccgagctcaaggaaaagatgaagaggatatgtcataaatctggtatagaaaagcgctacatccaccttgacgcagagcttatcagtgtccacccagagatcattgacaaacatttgccctcccttgaaactcgtgtagacatcgtggctactgaggtccccaagcttgctgagtccgctgcgcggaaagccattgctgagtggggccgtccggccactgacatcactcaccttatcttcagcacctactcaggctgtcgtgcacctagtgccgacctccaattggcttcgttgctcggactacgcccttccgtttctcgcaccattctcagtctccacggttgctcaggtggtggcagggcactccaactcgcaaaggagatcgccgagaataaccgcggtgctcgtgtcctcatagcttgctccgagctgacactgatatgcttctctaccccagacgaaagcaaaatcattggccatggactgttcggggatggtgctggcgcagtcatcgtcggtgccgatccctcagtcgatggtgagtgcccgctattcgagatggttgccgcctcacaaaccatgataccaggaaccgagcacgcgctcggcatgcaggccactagtagtggaatagattttcacctctccatccaggtgccgacactgataaaggacaacatccatcagtgcttgctcaatgcgtttcgatctgttggaaacacagatcctaactggaacgacctcttctgggcagtgcaccctggcggtcgcgcaatccttgataacatagaagacaagctccaactgcatccatgtaagcttgcggcaagccgccaagtgttgagcgagtacgggaacatgagtggtgcaacaattgcattcgttcttgatgaactacggcgccgtcgggagaaggaacaagacatacagcaacaacctgagtggggagtgttgctggcctttggacctggagtcacaatagagtcaatcgtgctgcgtaacccactctcacgtggtttgaaggaaaattaa

SEQ ID NO: 79770 - DNA, 296 bp, Oryza sativa
  Clone ID: PAT_MRT4530_79458C.1
tgaagtggtgaggtcaggggatttggtgtcgtacacatctgatgagggtgttcggatgctgagggaatgaactctgttaggatgtctgatagttgccctgactgtgaactgaacaagtactgtacgagctccgacgtactctattggagtaattgcgccactcccaccgtgaagctgtcctgttatcctaccctcttccactatcgtcctaactctctttgttggctatgctcttgtgctgaagccagcagcttaaggagcggcggctgcactacttctggtgtactgattacacc

SEQ ID NO: 79771 - DNA, 422 bp, Oryza sativa
  Clone ID: PAT_MRT4530_79459C.1
agcattcaaaagatgcattataatcatcttgccctcaaaatggcataattccacttcattacacatgtttcggtaagaatcagctttacccaaaagttaggcactataactaccaagttttcccaaaagttagccctatgaccacagccagttgaaattaaaatggatcaagttcatctaaagctgggagaaaggtggtggcaccattagcagatgaattggtcaagtagccaccaaacattccttcagctataacatttaccctgtcatctccagtttcctctctaacacatgatacttgggagtcatcaagaacaataactggacttgttggaggttcaggaggtggagataagggaggaggaatgtcagcagaagaatatccttggtccctagccattgtctcaagaagcttatgtccc

SEQ ID NO: 79772 - DNA, 728 bp, Oryza sativa
  unsure (1)..(728): unsure at all n locations
  Clone ID: PAT_MRT4530_7945C.1
cacgcgtccggtcgtcaccagccgcggcgcacgaccacgaccgcgaccgcggtgggcggcgtaaccgcgctagctccgccgtgccgcctcacctcgccctccctcccaccccgccgtacgtcccgagcgcccaccttcaacgcagctccttctaccttcggttcgccggacgcatttttaatggcatcaccagcattaatttttcaccggttaaattaatttttcgagctcagacggggcccacccggccggttgggtggtcgccatagcccatgctctcgcatacctggagatccgcccggggtggctttcgctctccctgacctgatcattcccccactcgaattctccccttcctttttttttctcagccgcggaaaagaaaaaacagataaaaagaaagaaaaggggaatcttggagcccgcggcccgttttgcagcctcacccctcaactgtgcgtcgttaatcgcggggccctcccctccccgtcgctgctgtggttgctgtcgtgccgtgtgggcgtcacaacgaataatcaatggcctctcctgcatcaccaagaagagaagaggaaggaaaaaaaaaatcagagagaggggagaggagtaaaaaaaaagaagaagaagaaaaggagaagggagacagggaagtcagtcttctccctctgcctccgtgcctgcgcctttgtttcggagtccgncagtttagattcgaggaggagaaggga

SEQ ID NO: 79773 - DNA, 399 bp, Oryza sativa
  unsure (1)..(399): unsure at all n locations
  Clone ID: PAT_MRT4530_79460C.1
gatcacgcacaaatccattcaacatttctgaatctgccgttgtcctgtgagccaggcaattttgcaccaaagaggatattacaaacacactagtactacggcctcctttagatcagagggattttgcgggaacttttaagaaaatgaactaattcgtgtgaaaatcattcaaaattccttaccaaagaaacccttcatatctacactaccatcttctgaagctttattatttgctgccaattgtcacccagatgacaaatctattcggttattcatctgggccatcggtaattttcaaatacatcagaaattctgaccctgttcccacgcgtccgcggacgcgtgggcggacgcgtggggttctagatcgcgagcnggcgntcgcganctagaactagn

SEQ ID NO: 79774 - DNA, 473 bp, Oryza sativa
  Clone ID: PAT_MRT4530_79461C.1
ttttatattttttttttttttttttttttttttttgggttttttttttttttttccacccccaaatttggaaaaccaaggggccaattttaggccaaattccgcccatataaaaaaggaaggggcctaataaaggatgagccaaccgttggtttccagagaaaaccccagtgggggttccaggcctatgggaaaatcacttacccctgcagccggcccataaggggcccatgctctccaatcttaaacaagggaaaggttaaaggatcttatccatccctgcggccctgaaaagggcccaatgggggtcggggcccccgctgcccccccataagtttttttttttttcccagacctttaagcgtaggcgaccgggaggattcaaaccatttttgaaataaaaaaggcccctgctgaaaatttggatattgctaatggaccctgcccccaagaccccggaaccccctggggggg

SEQ ID NO: 79775 - DNA, 1515 bp, Oryza sativa
  Clone ID: PAT_MRT4530_79462C.1
atggtggactcgctgctatacgggctcctagacctgcgcatggcggcgccattgcttgcagctgccgtggcgttgtacgtccttgtcgagcagctgtcctaccaccgcaagaaagggtccctgccagggccgccgctcgtcgtgccgttcatcggcagcgccacgcacatgatccgcgacccgaccgggttctgggaaatgcaggctgctcgcgctagaaagtccggcgttgggttcaccgccgacttcctggccggcaagttcacgatcttcatccgcgactcggagttgtccaaccgcgtcttcgcgaacgtccgccccgacgccttcttcgtcatcggccacccgttcggcaagaagctcttcggcgaccacaacctcatctacctgttcggcgacgaccacaaggacctgcgccgccgtatggcgaccaacttcacgccgcgcgcgctctccacctacgccgccatccagcagcgcggcatcgtctcccacctccggcggtggctcgaccggagcgccgccaacggcggcaaggccgagccgatacgggtgccctgccgcgacatgaacctcgagacctcgcagacggtgttcgcggggccgtacctcaccgaggaggcgagggagaggttcaagagcgactacaatctcttcaatgtaggcctcttggccttccccgttgacctgccggggctcgcgttccggcgtgcgaggcaagccgtggcgaggctggtgcgcatgctccgcgattgcgcgagggagagcaaggcgcggatgcgcgccggcggtgagccagagtgcctcgtggactactggatgcaggagacggtgcgggagatcgacgaggccaaggcggcggggctgccgccgccggcgcacatctccgacgacgaggagatcgggggcttcctcttcgacttcctcttcgcggcgcaggacgcgtccacctcctccctctgctgggccgtgtccgcgctggactcccacccggacgtgctcgcccgcgtgcgcgccgaggtggcctccctctggtcccccgactccggcgagcccatcaccgccgataagatcgccgaaatgaagtacacaaaggctgttgctcgcgaggtggtccggcaccgcccaccggcgacgctgatgccacacatcgccttgcagaacttccagctgacggaatcgtacacgatccctaagggcaccctggtgctcccgtcgatgtacgagtcgtcgtttcaggggttccatgaccccgacgcgttcgacccggagcgcttcttctcggaggcgcggagggaggacgtggtgtacaagcgcaacttcctcgcgttcggcgccggcccgcaccagtgcgtcggtcagcggtacgcgctcaaccacctcgtcatcttcatggcgctcttcgtctccctcgtcgacttccggcgtgagaggacggagggctgcgacgtgccggtgtacatgccgaccatggtgccgagggacggctgcgtcgtctacctcaagcagcgctga

SEQ ID NO: 79776 - DNA, 2483 bp, Oryza sativa
  Clone ID: PAT_MRT4530_79463C.1
atggcgcagcacaccgccgcggcggcgggcggggacgaggaggtggcggaggctgaggcggcggcggcggcggcggcggggagcacgctccggcaccgccacgcgggcaagggcgcggaagagcacgaggcggcgggcggaggcggcggcgggcgcaatggcggcgccgacgacccggacgcgacgtcggtggagcgggtgttcgcggacaaggcggtgccgtcgtggagggagcagctgacgctgcgggcgttcgtggtgagcgcgctgctcgccgtcatgttcagcgtgatcgtcatgaagctgaacctcaccacggggatcatcccgtcgctcaacgtctccgcgggcttgcttggcttcttcttcgtccgcctctggacctccgccgtcgagcggattggcctcctcaagcagccgttcacgcgccaggagaacaccgtcatccagacctgcgtcgtctccgcctacggcatcgccttcagcggtaaacgtcttcgacgctttcggctttactctgacttctactgcaccacctttgttggattgggactcctcgttgcagcgagtgtactatgcctagtatatgaggaatttcgtaaggatgtcccatgtgcatcagatggatataagttattcttaacaccagaattaagtttgtttactgttttctattccaaaacagcaaagaaaatcaattttattgggctatttgcacttgtgcccctaagaaaaattatgattgttgattacaagctcacctatccaagtggcacagcaactgcttatctcatcaatggttttcacacaccagagggtgccaaactagcaaagaaacaagtaaagacattgggcaagtactttctgtttagcttcttctggggttttttccagtggttctacactgctggtgatgactgtggattcaagaacttcccaacattgggccttgaagcttacaacaacaggtttttctttgatttctctcctacatatgttggagttggcatgatctgcccatatatcgtgaatgtgtcggttcttcttggcggtatcctctcatggggtgtgatgtggcctctcattgccaagaagaaaggaagttggtaccctgctgatatctcagacaacagtctccatgggctgcaggcttacagggttttcatatccattgctttgatccttggggatggtttatacaacttcctcaaggtgcttatccgcacaattgcaggctttatatcaatggttcagaacaattcaaaaggcatgcttcctgtttcagacaatggcatgtccatgtccactgctgaagaggtatccttcgatgatgagcgtcgcactgaaatcttcctgaaagatcaaattcctaagtcagttgcatatggaggctacgtcgtagttgctgctctatcgattggcacccttcctgagatcttcccgcagctcaagtggtactacattttggttgcctacatcgttgcacctgtgctggccttctgcaatgcctacggaagtggtctcactgattggtctcttgcctccacctatggcaagcttgctatcttcgtgttcggagcgtgggcgggcctttctcacggtggtgtgctcgtaggacttgccgcttgcggtgtcatgatgagcatcgtgtcgactgcctctgacctgatgcaagacttcaagactggatacttgactctggcatcaccgaggtccatgtttatcagccaggtgatcggcaccgggatgggctgtgtcatagctccctgtgtcttctggctcttctacaaggccttcagcaatattggcacaagcggcaccgagtacccggcgccatatgccatcgtgtaccgcaacatggccatcctgggtgtcgatggcttcaactcgcttccggagaactgcctcactctctgctacatcttcttcgccgcggcgatcgccatcaacctgatcagagacctggcgccgcacaaggtctccaggttcatcccgctccccatggcaatggcgatccctttctacattggatcgtacttcgcgatcgatatgttcctgggcagcgtgatcctctttgtgtgggagaagctgaacaaggccaaggcggatgcgtttggacctgcggtggcgtcagggttgatctgcggtgatgggatctggactcttccccagtccattcttgcccttgccaaggtgaagccccccatttgcatgaaatttttgtcgagggcagccaatgccaaagtggatagcttccttgccggttagtcgtgccatcgtgatcaattgatctttgaagagaacatttgcaaggagtgcgcgccatcctgtaattatctcctccaaatgtatttccagatcacttgttttgtagaaaagccaaatctgggtttcccgtaggaaagaagcatcccacaatccaaatgtaaaaacgaggaaaaatacagctgcaaccaacaaccgttttatcatttgctcgacat

SEQ ID NO: 79777 - DNA, 732 bp, Oryza sativa
  unsure (1)..(732): unsure at all n locations
  Clone ID: PAT_MRT4530_79464C.1
ctaccgcaccttgacctcggtgacgctcctcttcctctccggcgagcggggcacggtgacgtgcagcacgccgtccctcacctccgccgtgatcccctccgccaccgcgtcctccgggaggagcaggccggcgtggtacgtcgccgccgcccagcactcgccgtcgccgtcgcggccgcggtcctcctccaccacgtcgcgcttctcgccgtggatggcgagcacgccgtcgtccacgtagacgcggacgtcgtccttcccgaggcccggcacctcgaaccgcagcctgtaccgctcctcgtcctcccgcaccttccccgtcagcggccgggtcagcgtctccgccacctgcgacagcgcgctcccgatgccgtcgacgaggcggagcgggacgaagtcgcggaggtctcgccacggccagcggcggcgcgagcggtccacgacggcgacctcacggctgtgaccgtcgcctttcgcaggagcgcagccgccggtggtggcggcggcgtcggctcccgccgacgagaagagggcacgaaagttgagcggcccatgagaattggcagccgccgccgccaccggcgacgccgcgtgcagtggcctcgccagagcgcagccggcggcgaggcgtttgctgaggcattggcgagctaaagccatggccagcaaagtgtgtgtataanatgctaatgaccactaaacgagtgaatttgtcagttagttactctgctt

SEQ ID NO: 79778 - DNA, 1449 bp, Oryza sativa
  Clone ID: PAT_MRT4530_79465C.1
atggagccgaccggcgccggcgccggcgtgatccagtgctgggagacgcttcccgaggatctcctcgtcaccgtcttttgccagctggagatacccgacctcctccgctccggcgccgtgtgcgcgtcctggcacgccgcgtaccgcaccttccgccgcctccgcctcccgtcgccgaagcagccgccgtgcctactctactcctgcgacgcctacggccccgacgccgccggactctactgcccatccaccggcgccacataccgcatccccgtgtcgtgcggcggcggcggcggtggcttccgtaacctgacgctgatcggctcggcggacgggtgggtcgtcgccgccgacgagatcggcaacctacgcctcctgaacccgctcaccggcgcccacgccgagctcccgccgctgtccacgatgcaccacgtcgaggccgccgccgacgaggaggacgaaggcggcggcctcgcgtacgacatcgttgatcgcctgtacaaccggcccagcctggtgcgcgtcccggcgcgcgaggtgcgggattgcatgtacttcagggcggtgctctcctgcggccctcacgccgccgccggcggcggcgacgcggcggcgtgcgtcgtgctgctcctgcacatgcccaggtgcgagctctcctacgctaggcccggcgacgagcggtggacgtggatctcgcctggcgccggcaccggcctccggtggcgtaacctgtactgcgacgccgcctactgcaaggacgatggcctcttctacgtcgtgcgggatgacgactccgtccacgccctggacctcaccgggccatcgccggtggcgaggaaggtgttcgacgagcggacatggagcacgagcttaccatccaggtacctcgaagatgtccacctgccatgcgcccaaccttgcagatacctcgtcaacacgccgtcgggcgagctcttgcacgtctggaggttcaggcaatgggtcagttcctacgattcgtcatctgatgatcaagacgactcctccaacgattcgtcatccgaggatcaagacgacgactcctacgattcgtcatctgaggatcaagacgactcgtcctcgagagacctgtatgaagatctcatcaccagggacatacagctctacaggactgacttccatggaaagaagctcgatgcgatggacagtctagacaatcatgctctgttcctcggttacaatacctccttgtgccttccaacggaggatttccctggattgaagcccaatcatgcttacatcacggatgattcgctcgagtttgtcaactattttaaacgaaataaaaaagaaattggcatgtggaacatcgaaagccagatcttggagggatttggtggggcgtcatctcttgaagaaccttggttaaattggcctgcgcctatttggataataccctcccttttgtag

SEQ ID NO: 79779 - DNA, 175 bp, Oryza sativa
  unsure (1)..(175): unsure at all n locations
  Clone ID: PAT_MRT4530_79468C.1
gcggtggtgcgggaaagcacccgcggggcgacgttcctcgcggggtactggccggccttggggtcggacaggaggccctccagtnacctcgttaggtacggctgcaagtgtacaccacggacaccgccgacagcatgcagcacgcgtgaagacgctcgatagatgagcagcacgt

SEQ ID NO: 79780 - DNA, 1722 bp, Oryza sativa
  Clone ID: PAT_MRT4530_79469C.1
cgcgcgcttcccccgggctgccccgggccgcaggctcgtgctctccgcgccttgcgccgccccccaccagagtcgcggctgaacaggggagggccgggcggcgatctccatcgcagcggaggggaggggaggggatcctgaattgcaggcgtagtctggtcgtcgtggcggtgaggtgagggggtgacggcgatggccaacagcgagtacgagtacgtgaagagggagttcgagctcgacagcctcctcccgccctctaattggatcgttgtgcgcatcgacggctgccacttccaccgattctccaagatacatacctttgagaaaccaaatgatgagcgtgctttaagattgatgaacgcctgtgccacttctatgctcgaaaagttcccagacatagtcttcgcatatggcgtcagtgatgagtacagttttgtttttagagaggaaactgaattctatcaaagacgagaaagtaaaattctatctttatgtgtttcctacttcacttctgtgtacgtgatgaagtggaaagatttctttcctaataaggagttgaaggagcctccatattttgatggtcgagttgtatgctatccaaacttgaagactatccgtgattacctggcctggagacaagtggattgtcatataaacaatcaatataacacctgcttctggtcgttagtgaagtctgggaaaactgaaaaagaagctcaacaagcattgaaggggacattttcaaaggacaagaatgagttactttcacaacagttccaaatcaattatgatgatgaaccggctatattccgaaaagggtcttgcgtttaccgagacaaggtagaaacaatggtgaagactgatcgttgtggaaaccccataaaaaggacacgcttagttattacaaatgcaaatgtcgatatcataggacccgagttttgggaaaatcatccatatattcttcgagaagctctaaggttgatgaatgcttctgcttctttgatgatggagtcattccctgacattgtctttggctatggttttagcaatgagtacagttttgtgttccaggataagactgaactataccagcgtcaggaaagcttaatcctttcatcatgtacctcacgtttcaccttgttttacatgatgaagtggaaagattttttccccaacaaggacttagtggagccaccgcactttgaggcagaacttctatgttacccaaaacaaaagatactttgtgattatttgtcatcgagacaagcagaatgccacaccaccaaccaatacagcacatgcttttggatgctagtgaaatctggcaaaagtgaaaacgaagctcgtgagatattaaagggaacattatcaaaggacaagaacgagttgcttttccagcaatttcatttgaattacaacaatgaaccagctgtgtttcggaagggttcatgtacttaccggcaaaaggtggaagaatctgcagacgcagagggtagagaaaataccacaagagaacgtgttgtatatgcattgtccacactagtagaaaaatggctggcctctcttcattggccattcatctcgttcatttcgttcatgtgcaaaacttgtgcccctaagatgcagtttcagctgacagaattgagaatcgtgatgatatatctgtatcttgctgaatggaaaattaggctcaaacagagaaggggtacacccgtgtggtaa

SEQ ID NO: 79781 - DNA, 958 bp, Oryza sativa
  Clone ID: PAT_MRT4530_7946C.1
gcgtggctcttgcgcacgcgcgggtagagcgagggagagagagagagagagcaaccgcctcctttttcccggcttcgcctccgtttcgcggggaaaatcaccggaaaacgcgtcctcgccggcgtccagtggcgtcgccaccacttctccgcctccggccgcctctgccgcgtccccggtgcaccggccgacgtcgccaccacctctcccggcaccggagtgccgtcctctctcccggccaggccacggcgtcgcccgaatttcgccggaacgccgtcatctccgcgccggcctctccttcctcctcgtcggctcgtcgccccgctgcaccaccaccttcaccaacatcgcagcggcgtgttccacgccgtcccctcctccgctcagccgctgctgcctgccatcatcgtttcatcgtcgtctccgatcgttctcgtcgtcgacgtcccgtcggtcgcccggctcgtcgtctcgcggcgccgcctccgtcatcgtcatcgtagcggcgtgttccacgtcatcctcgtccccgtgcagccgctgccggctgtcctcgtcgcctcctcgccggtcccggtcgtcgtcgtcgtcgtcgtcctctcgtcgttcccggtcgtcgtggcgttcgtccctccgtcgagccgttctcgtccgtcgtccgcattcgtcaagcgcgccgctgcagccccgtcctcgtcttcgtcctcggctccgcgtcgtcaagccccgtgccggccgcgtctcgccttcgtccaaggatcgccgccgaagccgtcccctcgccgttcgtctccgttgtgcccgtctgtctccgccgcggcccgttcgtcgttgtcgttcctatgcctcgtcgcgtggtggtaaggatccgtcctctcgctgccccgttctcgtcctttcggtgtcgcccgtgcccgttgtgcggttgacgaccccggtacccgtgtaccggtgtcgg

SEQ ID NO: 79782 - DNA, 1363 bp, Oryza sativa
  Clone ID: PAT_MRT4530_79470C.1
cgtaccgcaatcaatataacacctgcgttctggctcgttagtgtaagtctgggtaaaactgtaaaaagaagctcaacaagcattgaaggggacattttcaaaggacaagaatgagttactttcacaacagttccaaatcaattatgatgatgaaccggctatattccgaaagggtcttgcgtttaccgagacaaggtagaaacaatggtgaagactgatcgttgtggaaaccccataaaaaggacaccccaagtttccgcaaatgcaaatgtcgatatcataggacccgagttttgggaaaatcatccatatattcttcgagaagaaaaatgtaggtatgagaatgttaagaagtttgacatcaaccataggcttccaccttgtaattggactgtcgttcgcatcgacatttgtaaatttgagcaattctcgttgatccattcatttgacaagccaaatgatgaggcagctctaaggttgatgaatgcttctgcttctttgatgatggagtcattccctgacattgtctttggctatggttttagcaatgagtacagttttgtgttccaggataagactgaactataccagcgtcaggaaagcttaatcctttcatcatgtacctcacgtttcaccttgttttacatgatgaagtggaaagattttttccccaacaaggacttagtggagccaccgcactttgaggcagaacttctatgttacccaaaacaaaagatactttgtgattatttgtcatcgagacaagcagaatgccacaccaccaaccaatacagcacatgcttttggatgctagtgaaatctggcaaaagtgaaaacgaagctcgtgagatatttaaagggaacattatcaaaggacaagaacgagttgcttttccagcaatttcatttgaaatacaacaatgaaccagctgtgtttcggaagggttcatgtacttaccggcaaaaggtggaagaatctgcagacgcagagggtagagaaaataccacaagagaacggtgggatgtgattgtggcacacgcagacatggggacggaattttggagaaagcatccttatattttaagaaaattggatttactaggctgataaaattttctcatcaaccttttccacattatcttttcgttgttgtagtgttgtatatgcattgtccacactagtagaaaaatggctggcctctcttcattggccattcatctcgttcatttcgttcatgtgcaaaacttgtgcccctaagatgcagtttcagctgacagaattgagaatcgtgatgatatatctgtatcttgctgaatggaaaattaggctcaaacagagaaggggtacacccgtgtggtaatc

SEQ ID NO: 79783 - DNA, 4029 bp, Oryza sativa
  Clone ID: PAT_MRT4530_79471C.1
atgacgattgcaggctcgagtctcaagtgtgccaaaagcatgtaccagccgatagacgatagccgatggcttggtgtagaatcagctgaaggatctgatgctgcaagggtcgtgccgtacgacgagcgtggcggcaggtcggaaagatctgcgttgtcgagctgctcagggcacgccgcgtcagggaggaggaggggcgcgctcgccactgtcgcttcatccagggatgcgctttaccgcaagctgccgggcgagtctgcgccagacccgccgccttcaagatactctgctatccctgtaggggtagcatcaagttcttcgccgactagtgcgatcggttccgtctccggcatcgacgacttcgtattccctcccaggcaggcgttccggtttggcagcctcgacttcggcaagatttctctcctcgactcggattcgaaccagtcgggaagaggccagatctccgctccgttcggtatcccgaactcggccgaggtctaccccaagatcatctctaccgagttggcttcaaaccactcggacgagatccaatctactccaacacgaccagatcaagatgacggctctagagaggtcggcgttatactccaacctctcgggacggtctcgacggaagaattggatggctacctcagttctcccgacgtcagttctcgaccaacggagatccttgagtacgatgacttcggctatcgctacgattatggtaacttcaacgacttcgacgacagctatgaggacgactacacgcctctctttttcggcgtattcatggccgacaatgagacggcaaaacagcgccaagcccgagaagcggaagaagagcgcacacgaaaagaagctgaacgtcgccgactgaaggaagaacaacaacgacaagacctcctcaaggaagacgcgctcaatcagcacgtcatcaaaatcttgaaccaaacgaagaccatgatcgccgcctcggtcccggctaactccgcaagcacccgcacgccgactggcagccgagttccccctcttcgatctcaagactatcaccaaccaagcctcagcatcgccgacgcgggatccagtcgcaggagcaggggtcacggtgagcgatctgtccattcgcctcccgaacgacacagggagcgtcgagttgaacgacctcgctccccacatcgcaggcgccccgtcgatctttgcgatactatcaaccagcgccgcgcggcaagaggctatgctccccaccattcaccagaccgctacgacgatgacgtggacggagtagctgccttcacaagtgacctgcgtcgagtggattggccggctggcttcaagccgactggaatcgagaaatatgatggcagcactaaccctgagtcttggctcaccgtctacgatctcgccatccgcacagtaggaggaaacagcaaggccatggtaccccgtggcacaatcggatcatgggcggaactacgcgaacacttcatcaccaactttcaaggcacctttgaacgtcttggcacccagtttgaactctacaacgttatcaagaagcccggagaatccctccgagattacatccgacgcttttctgagcaacgcaacaaaatctccgacatcaccgacgacgtcatcatcgccgccttcaccaagggcatttgccacgaagacctagtcggcaagttcgggcgcaagcctcccaggatggtcaagcagatattcgaaaaagccaatgagtatgccaaagccgaagatgctattaccgcgtccaagcagtcgggcaccacttggaagccaaagaaagatacgccgactacagggggagtggaagtaccaatcacaaggatcgcaagcagaaagcaaaagctgactgaacgggagatcaatgctgtccagcccgatatgccccaatatctttggtggtcagagacaacaatcaagtttgaccgctcggatcatcctgaccgagtggtccacccggggcggtaccccctggtactagacccaatggttcgtaacgtcaagcttcgcagatccctcatcgatggtggcagtgcactcaacatccttttcgccaagactcttgacgacatgcagatccctcgcacggaattaaaaccgagtaatacgccctttcacagagtcatcccaaggctatctgctacaccactcggccagatcactcttccggtcactttcggcactcgggagaatttccgcatagaaaacgtttgcttcgaagttgctgatttcgagacaccatatcatgctatactcggacgcccggcgttagccaagtttatggctgtcccgcactatacctacatgatgatgaagatgcctggtcctcgaggagtcatatccctgcggagcgacatcaaacaagccgtcacatgcgacaaggaaagctgcgagatggcccagacccacgagatcaccctcgcccgagaagaagtccgactggccacgtccacagcaagcgaaggagaagtgcctgcaaccaagatgccaaagagcggagaaagcgacgccaagaccaagaaaattcctctagatccctctgatcctactaagactgctgtaatagatatttttacgtggaaaccatctgatatgcctggtattcctagagaggtgattgagcactctttacatgttaaggaagacgctaaaccaagcaagcaacgactctgccgctttgcacaggataggaaggatgcgatcaaggaggaattgaccaagctgttagcagcaggctttatcaaggaagtcctccatctcgactggctggctaacccagtcctagttcggaagaagacgggacaatggcgcatgtgtgttgattacatcgacctaaacaaatcttgtcccaaagatccctttgggttacctcgcattgaccagatcggccgcaatgttgaagcttatgtggatgatgtagttgtcaagaccaagcagaaggatgatttgattacggatctaaaagagatctttgcaagcatcctcaccttcaggatgaaactaaaccctgaaaagtgcatcttcggagtaccgtcagggaagctgcttggatttatggtgtcccatagaggcatacaggccaacccggagaaagtcaacgccatcctcaacatgaaaccgccgagctcccagaaagatgtccaaaagcagactggttgcatggcggcgctcagccggaaactatctcactacttccaaggtcactcggtcacggtggtcatatcgtttccactcggggacatacttcataatcacgaagcaaatggacgaatcgcaaagtgggccttagaattgatgtccttggatatatccttcaagccgcgaacttcgatcaagtcccaagctttagctgactttgtcgccgagtggactgagtgccaagaagacatgcccgaggaaaagatggagtattggaccatgcattttgacgggtcgaagaggctttcaggcactggagccggggttgttttactctccccgactggagaaagattgagctacgtattgcggatacatttttctgcatcccataacgtggcagaatatgaggcgctgcttcacggattaaggattgcgatctccttaggcattcggcgtctgatcgttcgtggagattctcagttggttgttaatcaagtcatgaaagagtggtcctgccttgatgataacatgactgcttatcggcaggaggtacgcaagttggaagacaaattcgatggatttgaactcacccatgtccttcgacacaataatgaggcagccgacagactggctaatttttgttcaaaacgagaagcagctccttccgacgtgttcgttgaacatctttacgaaccaaccgtgccaaggaaagaaacaattgaagccacggacacccaagacgtaagcatgattgaagccgactggagagagcccctcataagatttttgaccaaactagaactccctcaagataaagatgaagccgagcggatttccaggcgcagcaaactctgttattcatga

SEQ ID NO: 79784 - DNA, 2433 bp, Oryza sativa
  Clone ID: PAT_MRT4530_79472C.1
atgggttcggtctccggcatcgacgacttcgtcttccctcctgggcaggcgttccggttcggcagccttgacttcatcaccaacgacttcggcaagatctctctccttgacttggatttaaaccagtcagggagagaccaggtctcagccccgttcggtattccaaactcggccaagatcgagtcggcttccaaccactcggacgagatcccatctactccaacaccaccagatcgagatgatggggcctacccgactaggcagaattcagcttcaacaccgatcctgcctagctccagggaagtcgacgtcatactccagccactcggcacggtttcgacggatcaactggaaggctacttcagctctcctggcgtcgactcacgaccaacagaggtcgtggagtacgacgaatttggctacccctacgacaatcgcgacctcgacaacttcgacgaaagctttgaagataattacacccctttctacttcggtgtcttcatggccgacaacgagacggaagaacaacaccaagcccgagaaacagaagcacaacgcgtacagcaggaggccgagcaacgccgactggaagaggagcgccaagcacaagagcaagaacggctgcagcatctcatcgggcagcaagacgttgaggggacagcggtcttccgcacccctcaacagaacgctgtcgcggcgatcaccctcctcgacaccctccttaaggaagacgcactcaatcaagctgatcacgtcgtcaacatcttgaaccagaccaagaccatgattgccgcttcagtcccggttaactccggaagtgtccgcacgccgactggcagccaggttccccatctccgatctcaagattatcaccagccaaccctcagcatcgccggcgcaggatccaatcacaggagcaggggccacgacgagcgatctgttcactcgcctcctgagcgacacagggagcgccgagttgaatggcctcgctccccacctcgtcgtcgtcccatcgatcttcgcgatacgatgaaccagcgccgtgcagcacgaggccatgcccaccgccattcaccagatcgctacgacgacgacgtggatggaatagctgcctttactaacgacctgcgtcgagtggattggccagccagcttcaagccgactggaatcgagaaggatgatggcaccactaatccggagtcttggcttaccgtctacggtctcgcaattcgcgcagcaggaggagacagtaaggccatggcaaactacttacctgtggccctagcggattctgcccggtcctggcttcctgggttaccccgtggcacgatcggatcatgggcggaacttcgcgaccactttatcgccaacttccagggcacctttgaacgccccggcacacagtttgatctctacaacctcagtcagaagtctggagaatcccttcgagattacatccgacgcttctctgaacaacgtaataagatctccgacattaccgacgacgtcatcatcgccgctttcaccaaggggatttgccacgaagatctagtcggcaagttcgggcgcaagcctcccaagacagtcaaacagatgtttgaaaaagccaacaggtatgccaaagccgaagacgccattatcgcatccaagcagtcgggtcctacttggaagccaaagaaagatgcgccgactacgggagggggtggaagtaacaatcacaaggaccacaagcgtaagcccgaggaacttgttgcgactaccacacactcctcccgacaacgttcgcgcgtcaacacttttgacaagatcatgaattcccaatgtccgcatcatcccaactccaatcatgccgccaaagattgcttcgtctacaagcagtttgcagagcaatatgccaagaatgcacggaagacgtctgatggagaacaaagcacgtcgaaaaagaagaatgatgatgatgatgccccgacagaccgagtggtccacccagggcggtaccccctggtactagacccagtggttcgcaacgtcaagcttcgcagatcgctcatcgatggcggcagcgcactcaatatcctcttcgccaagaccctggacgacatgcagatccctcgcaccgagttgaagccgagtaatgcgcccttccatggagtcatcccagggctatctgcaacaccactcggccagatcactcttccgatcacctttggtgctcgggagaacttccgcacagagaacgtctacttcgaagttgctgatttcgagacagcgtatcacgccatactcggacgcccggcgttagtcatgtttatggccgtcccacactacacctacatgatgatgaagatgcctagccctcgaggagtcatatccctgcggagcgacatcaaacaagccgtcacatgcgacaaggaaagctgcgagatggcctaa

SEQ ID NO: 79785 - DNA, 648 bp, Oryza sativa
  Clone ID: PAT_MRT4530_79473C.1
gtcgtcagactgcagagccaagaacacatccatcttgtccttctcccattgctccagatcccatcagatcctcaccgagatcatcagatcagagcaagaggaggtagctcgatgcgcggggcggcggcggcggggaggagatgatgaagccgcagcacggcggcatggcggggcatggaggaggaaggacgaggagccccttcctgacgtcgtacgcgctcacgctcgccttcatcaccttcgtctccgtcctctacttcaaggacttctcctccacgctccaccaacccttcctcacccgccctcctccccaccgccgccagatcgcccgcccccgcgccccgagccaccaccatggcggcggcagcagctccggtggcggcgatgtggtgccgccgttcgccgtgggggcggcggcggcggcggggtgcgacgtcggggtgggggagtgggtgtacgacgaggcggcgcggccgtggtacgaggaggaggagtgcccctacatccagccgcagctgacgtgccaggcgcacggccgccccgacacggcgtaccagcactggcggtggcagccgcgcggctgctcgctccccagctttaatgcaactcttatgttggagatgctgcgggggaagcgcatgatgtttg

SEQ ID NO: 79786 - DNA, 2550 bp, Oryza sativa
  Clone ID: PAT_MRT4530_79474C.1
atggcacggggctccgcaccgctcgatggtagcgtgctgccgccttcccgcatcgtgagcgagaggcaggccgggctgccgcgccgattcatgccggaatctgccaccggccgggaggtggtcgcgctgggcgaggggcgcccagcgccacactacccggggcggtccgtcttcttcctctctttcgcaatggcggggctggtcccgccattctctatttttttcatggatattctggagttttatgatctccagatggcgcacctcacccccaacgcgataatgacgttggccatcttcgcgcacctgtgcgagatgtttatcggggtgcgcccatctctccggctgttccggtggttcttcaccgtacagccggtgtcgccgccgacggtagtcggtggctgctacttccagccgcgggggcaggtgctgaaccgctacattccctgcgtcctccgcaaaaagtgggacgactggaagagcgattggttctacacctccctcgccgacgaagcgcgcctccgacttccgagccagcccccagcgcaggcctccagctggcgggcggcggtagatctgggagacggctacgacgccgttcttgaccgcctggcgggtctgcgatcccaggggctcacgggggcaatggtgttcggcgactaccttcgtcgccggatcgcgccgctccagcggcgtgcccggggcgcctgggagtacaccgggcccaaggactacatgaggacccaccaggggcgcaaatgggactgggaccctgaggacttcaggatggtggtccaacgggtgctgaatctcagctccgtggaggcatccctcatcccccaaggggtcctccccctctgctgcgatctagagcgcgccaagatcctggccatcatgcaggtagtcggggcgtcgggggagcgggccccccgaggccacgatggcgcgggcgggagccgcaggggggaacaatctaccccgggagggggtcgtgcttctgggccccgcgacaggggcccggggggcagcccccctgccgacgcccgggggaagaggaagcaggagggtacccctcccccttctcctccccgagggggcggggcggctgaggaggccgctcgggaggaggccagactccgccgggccggggagtccgtccgggaggcagaggcggcgcgcgcacgccaggcggcctgccaaacccctgacccgactccgcccgaggcgacgacgacttccgaggctgcccacgacgaggccgcgggcgcgccgctcgggcctgacccctcgggcgacgcttgggacgagctagcttcgggggacgcccccgagtctggcacgtcgatcggcgggccgagccgcgcggcacccacaccgaggcggctctcccctctgccttccgctgccccactgagcgcggagcccctcctgcaggccttggctgccgcgaacagcacggtgctggacgggttaagtgcccagatggaggccctgcaggcggagcgggcggagctcgacgcggcgtgggcgcgcgtcgaggaggggtggcgctcggtggaggccatggtggaggcgggccgcaaggcgcaccgccggcacgcctcacagctcgaggcccatcgtagggacctggcgaagatcgccagggagagacctgcggaccgcgaggccgccgtcgccacccgggaggcaacactggcggcgcacgaggccgcctgcgccgaagaggagtccgcactccgcctccgcgaggacgcgctcaccgagtgggggcgagctctcgaggaggccaaggccgcggcgcagcggctggcggacagcctgttcctccgcgaggcagcgcgggaagagcaggcgcgccgcaatctggaaggcgcccgcgccgagagggccgcactggatcagcgggccgctaagctcgaggcgcgggcgaaggagctggacgcgagagcgcacagcggcggagcggccgcgggcctcggcgacctagccgcccgcctcgcagccgccgaacacaccatcgccgagctgcagggcgcgctggactcgtccgccggggaggtcgaggccctccgcatggcgagcgaggtagggcccggcatgcttcgggacgccgtctcccgtctagaccgcgccgggcggcaggcgggcctctggggcgggcggtacgcgaagtacgccgccaaccaggggggcctcgcccagcgcctctcagagatggccggggccctcgagcggctccccgaggagctcgaggagacgatcaagtcatcctcgagggacctcgcccggggggcggtggagctcgtactggcaagataccaggccagggaccctgacttctccccgtgggcagcgctggaagagttccctcccggaaccggggacggcgcgcgcgcgcaggtccgggacgccgccgaccacatcgtccacagcttcgagggtacggcccctcagctcgcgttcgcgctcgactccgacgaggagggcggtgacgacggtgcggacgacagcgacgacgaggccggcgacccgggcgcgtcggagtga

SEQ ID NO: 79787 - DNA, 174 bp, Oryza sativa
  Clone ID: PAT_MRT4530_79475C.1
cgcatcttacaggggagctcggcagcccccgatcttcaggccaacacaccatggtcacagaggtgttccccgctccccggagaggtgtacttggagcgcacaggcaggcagacactcccggcgttctgccaacgtgaacaatccccaacgccggagtgttgtctgcctactgct

SEQ ID NO: 79788 - DNA, 2394 bp, Oryza sativa
  Clone ID: PAT_MRT4530_79476C.1
atgccggaatctgccaccggccggaaggtggtcgcgctgggcgagggacgcccgacgccagactacccggggcggtccgtcttcttcctctctttcgcaatggcggggctggtcccgccattctctaattttttcatggatattctggagttttatgatctccagatggcgcacctcacccccaacgcgataatgacgttggccatcttcgcgcacctgtgcgagatgtttatcggggtgcgcccatctctccggctgttccggtggttctccactgtacagccggtgtcgccgccgacggtagttggtggctgctacttccagccgcgggggcaggtgctgaaccgctacattccctgcgtcctccgcaagaagtgggacgactggaagagcgattggttctacacccccctcgccgacgaagcgcgcctccgacttccgagccagcctccggcgcatgcctccagctggcgggcggcggtagatctgggagacggctacgacgccgttcttgaccgcctggcgggtctgcgatcccaggggctcacgggggccatggtgttcggcgactaccttcgtcgccggatcgcgccgctccagcggcgcgcccggggcgcctgggagtacaccgggcccgaggactccatgaggcccaccaggggcgcacatgggactggcgggaagctgaccggcgagaagccacggaccgcctccgggaagccgaggaggctgcccaggaggccgtccgggtttgccaggctgaggaggccgctcgggaggaggccagactccgccgggccggggagtccgtccgggaggcagaggcggcgcgcacgccaggcggcctgtcaagcccccgacccgactccgcccgaggtgacgacgacttccgaggccacccacgacgaggccgcgggcgcgccgctcgggcccgacccctcgggcgacgcttgggacgagccagctccgggggacgcccccgagtccggcacgtcgatcagcgggccgagccgcgcggcacccacaccgaggcggctctcccctctgccttccgctgccccaccgagcgcggagcccctcctgcaggccttggccgccacgaacaccacggtgttggacgggttaagtgcccagatggaggtcctacaggcagagcgggcggaactcgacgcggcgtgggcgcgcgtcgaagaggggcggcgctcggtggaggccatggtggaggcgggccgcaaggcacaccgccggcacgcctcagagctcgaggcccgtcgtagggacctggcggagatcgccagggaggtggaggaggagcgggagactgtcctcatcgccaccgccgtgctcaacgaggcgcgggacgacctccgcctccaatacgggagccgggcggtggagctagagaagaagctcgacgccgcccggggagtacttgacgccgccgctgcccgggaacagcgggcggcggagaacaaggcggcgtccaggcagcgcaaagaggcccttgaggctcgcgccacggcgctggaggagagcgcccgcgccctggacgcgagggagagagggctagcggaccgcgaggccgtcgtcgccacccgggaggcaacactggcgtcgcacgaggtcgcctgcgccgaaaaggagtccgcactccgcttccgcgaggacgtgctcaccgagcggtggcgagctctcaaggaggccgaggccgcggcgcagcggctggcggatagcctgtccctccgcgaggcagcgcgggaggagcaagcgcgccgcgatctggaaggcgcccgcgccgagggggccgtactggatcagcgggccgctgagctcgaggcgcgggcgaaggagctggatgcgagagcgcacagcggcggggcggccgcgggccatggcgacccagccgcccgcctcgcagctgccgaacacaccatcgccaagctgcagggcgcgctggactcgtccgccggggaggtcgaggccctccgcttggcgagcgagggcgggcggtgcgcgaagtacgccgccaaccaggggggtctcgcccagcgcctctcagagatggccggggccctccggcggctccccgaggagctcgaggagacgatcaagtcatcctcgagggacctcgcccggggggcggtggagctcgtactggcaagctaccaggccagggaccctgacttctccccgtgggcagcgctggaagagttccctcccggaaccgaggatggcgcacgcgcgcaggtccgggacgccgccgaccacatcgtccacagcttcgaaggtacggcccctcggctcgcgttcgccctcgactccgacgaggagggcggtgacggtggtgcggacgacagcgacgacgaggctggtgacccgggcgcgtcggagtga

SEQ ID NO: 79789 - DNA, 150 bp, Oryza sativa
  Clone ID: PAT_MRT4530_79477C.1
atgggtataagggtagaggatctcaatccccttccatactgcctcgcccgcctggcggcggcgcaggccgagagcccttcacctcggatgggctgctgcctgctggggggagaagtcagcagcaacattgtgacgcagaagagaaaatga

SEQ ID NO: 79790 - DNA, 3042 bp, Oryza sativa
  Clone ID: PAT_MRT4530_79478C.1
atgggttccgtttctggcatcgacgacttcgccttccctcccggacaggcgttccggttcggcagcctcaacttcatcaccaacgacttcggcaagatctctctcctaactcggattcgaactagtcggggagagatcaggtccccgcgccgttcggtattccgaactcggccgaggcctactccaagatcatctctcccgagtcggcttcaaaccactcggacgagatctaatctactcctccgcgaccagatcaagatgacggccaagacatctcctgctcgaagatctaggcgagctccggcttcggccccgatccgatctagatccagggaggttggcgttatactccaaccccttgggacagtctcgacggaagagttggatggctaccttagctcccccggtgtcagttctcgaccaaccgagatcctcgactacgacgacttcggctaccactacgaccacgacgacttcgacaacttcgacgacagctatgaggataactacacgcctctcttcttcggcgtattcgtggctgacaacgaaacggaggaacaacgccgagcccgagaagtggaccaagagcgcgcatggcaagaaactgaacgtcgccaactggaggaagagcgacagcaacaggagcgagaacgactacagcgtgagcaacaagatcgcgaacggattgcaaaggagggtgaagatcgacggcagcgcgccttggaatttgggcgacgagcgagagagctcattgggcaacaagacgtcgatggaacagcgccaactccgcaagcgcccgcaccccgactggtagccgagtccctcaccttcgatctcaggactatcaccagccaagcctcagcattgacggcgccagatctagtcgcaggagcaggggacatgatgaacggtctgttcgttcgcctcccgaacgatacagggagcgtcgagttgaacgaccacactccccacatcgaaggcgccccatcgatcttcgtgacaccatcaaccagcaccgcgcagcaagaggccatcattcaccggatcgctacgacgacgatgtggacggagttgctgccttcacaagcgatctgcgtcgagtggattggccagctggctttaagtcgaccggaatcgagaaatatgacggcaccaccaaccctgagtcttggctcaccgtctatgccgaccgcaggagggagtggaagtaacaaccacaaggatcgcaagcgtaagcccgaagagcttgtggcaacaacctctccatcttcccgacaacgttcccgcgtcaacaccttcgacaagataatgaactcccaatgtccgcatcatcccaactccaatcacgtggcgaaagattgcttcgtctacaaacagtttgtagagcaatacgtcaagaacgcacgtaagccctcagacggagaccaaggcacatcaaagaagaaagatggtgaagacgatgtcccacttggttttcaagatcatcgcaaagaactaattcacatctttggcggacccctggcttatgaatctaagagaaagcagaagctaacagaacgggagatcaatgcggttcagcctaacacgccccaataccttcggtggtcagagatagcaattaagttcgaccgctcggatcatcccgaccgagtggtccacccggggcggtaccccctggtactatacccagtggttcgtaacgtcaagctccaaagaaccctcatcgatggtagcagtgcactcaacatccttttcgccaagactctggacgatatgcagattcctcgaacggaattaaagccgagtaatgcacccttccatggtgtcatcctaggattatccgctacaccactcggccagatcactcttccggttaccttcggcactcgggaaaactttcgcacagaaaacgtttgttttgaagttgccgatttcgagacaacgtaccatgctatacttggacgaccggctctagccaaattcatggccgtcccacattacacctacatgatgatgaagatgcctggtcctcgaggagtcatatcactacggagcgacatcaagcaagccgtcacatgtgacaaagaaagttgcgaaatagcccaaacccacgagatcactctcgctcgcgaagagatccgattggctgccactacggcaagcgaaggagagaataataaagatatttttgcgtggaaaccatccgatatgcctggtattcccagagaggtgattgagcactctttacatgtcaaggaagacgccaaacccatcaaacaacgactccgccgctttgcacaagataggaaggatgcgatcaaagaggaattagccaaactgttagcagcaggcttcattaaagaagtcctccatcccgactggctggctaacccagttctggttcggaagaagactgggcaatggcgcatgtgtgtcgattacaccgacctcaacaagtcttgccctaaagatcctttcgggttacctcgcattgaccagatcggtcgcattgttgaagcttatgttgatgatgtagtcgtcaagaccaagcagaagtatgacctgatcgcggatttagaagaaacttttgcaagcattcgtgctttcaggatgaaactaaaccctgaaaagtgcatcttcggagtaccgtcagggaagttgctcggatttatggtatctcaaagaggcatacaggccaacccggagaaaatcaacgccatgctcaacatgaaaccgccaagctcacaaaaagatgtccaaaagctgactgattgcatggcggcgctcagccggttcgtttcgcgactcggtgaacgggggatgcccttcttcaagttgctgaagaaaactgacaatttccagtggggacccgaagcacaaaaagcctttgaagacttcaaaaaatttctcactacaccagttttggcctcgccacatccacaagagccgctgctgttatacgtgtcggcgacctctaaggttgtgagcacggtcctggttgtcaaacgtgaagaggaaggccatgttcaaaaagtccaatga

SEQ ID NO: 79791 - DNA, 496 bp, Oryza sativa
  Clone ID: PAT_MRT4530_79479C.1
catgaacaagctgacgaccaataagccgtgggtctttgtgcttttctttcgaccgtgactatgcagaaggacacgctcaaggactggggcaacaagacggaggaacgaggaggacgcccacaacgcctgcatcaccagctgcaaggccacctttgaggctaaccttggtgcataccagcttgatgctggggtcggtgaggagcgcctatgtgagggctctacatgaagggctacaagtactgatctggctgtagaggcggttgaacatccgattggtcattcttcagatgcatatgtagggttctgcgagtgggcgggctatcatgcggccattattacgggtatgaaaaacttttggagcatgagcctgaacctgagctatacaatacataatacgtggcatctggggttgcctgtaggcatatgctggatcaaatgatgcgtatgcgtcaattggtattgcggctttaattccaaaaaaagggacggacgatct

SEQ ID NO: 79792 - DNA, 413 bp, Oryza sativa
  Clone ID: PAT_MRT4530_7947C.1
agaagtcaagaacccatttttgtgctttgtttctgctgttatgtggagtttattagcgtaaaagccttttcttttccgtcggtcgtgtagacgctgcagcttcggaagatccgctcttcgtggaagttgaagccggcatttgggaaagcgagcaaggcaagtcacatcatcgctccttctattcaaaatccccaaattggttttaggctgggctcgaggtgcgtggttgggttttgctagtcgtacctcgggtactataaggattaagctcgggcctctgttgcaaagcactaccgtacttccacatgtctagtgggtaaggcttagtttgtggctcagtctggttataaacaaaagttatgtcacgttttccgtccgtataccgtggtggtatgtggcacgtggttacacgt

SEQ ID NO: 79793 - DNA, 2973 bp, Oryza sativa
  Clone ID: PAT_MRT4530_79480C.1
atggcacggggttccgctctgctcgatggtagcgtgctgccgccttcccgtatcgtgagcgagaggcaggctgggctgtcgcgccgcttcatgccggaatctgccaccggccgggagatagtcacgctgggcgagggacgcccggcgccagactacccggggcggtccgtcttctttctcccctttgcaatggcagggctggttccaccattttcttctttcttcatggatgttctggagttctacgatctccagatggcgcacctcacccccaacgcggtgatgacattggccatcttcgcgcatctgtgcgagatgttcattgggaagagcgactggttctacactcccctcgccgacgaagcgcgcctccgacttccgagccagcccccggcgcaggcctccagctggcgggcgccggtagatctgggggatggctatgacgccgtcctcgaccgcctggcgggcctgcgatcccaggggctcacaggggccatggtgtacggcgactacctccgtcgtcggattgcgccgctccagcgacgcgctcggggcgcctgggagtacaccgggtccgaagacttcacgaggacccaccagggagtgagatgggactgggctcctgaggacttcaagatattggtccaacgggtgctgaatctcaactccgtagaggcggccctcattccccaaggaatcctccccctctgcagcgatccagaccgcgcctccatcctgaccattatgatggcggtcggggcctcagaggagcgagctccaaagggccacgacggcgcaggcgggagccgcaggggggaacaatctaccccgagagggggtcgtgcttctgggtcccgcgacaggggcccggggagcagccgccctgccgacgcccgggggaagaggaagcagggaggaacacctcccccatctcctccccgagggggcggggcggcgcgtgccagtaacaggcgcccggagggggccgcgccaacatcgcagcccgagggggagcgcaagaagaagcggccccgtaagatgggggagacagaaccatctcggggaaacctcatttcccctccaaagtggtcgtttaaccgaccccctcgcagcgagatcccgtcgcgtccctcccgccattccaagtccggccagtctgaggccgaggatccggcggccgcagaggccctcaggcgggaatctgaccggcgagaggccgcggatcgcctacgggaagccgaggaggccgcccaggaggccgcccgggctcgccaggccgaggaaaccgctcgggaggaggccggatttcgccaggacgaggcgatggcgacttccgaggcagctcgcgacgaggccgcgggcgcgtcgcttgggcccactccctcaggcgacactcaggcgacaacttccggggcagctggcgacgaggccgcgggcgcgtcgcttgggcctactccctcgggcgacgctcaggaccaaccgggtccgggggacatccccgagtccggcacttccatcggcggcccgagccgcgtggcatcctctccaaggcggctcttccccacgccttctatcgccctactgaacgcagagccccttctgcaggccttggccgccgcaaacaccacggtgttggatgggttaagtgcccaggtggaggtcctgcaggcagagcgggcggagctcgacgccgcgtgggcgcgtgtcgaagaggggcgacgctcggtggaggccatggtggaggtgggccataaggctcaccgccggcacgtctcggagcttgaaactcgtaagaaggtgctggcagagatcgccaaggaagtggaggaggagcggggggctgccctcattgccaccaccgtgatgaacgaggcgcaggacaccctccgccttcaatacgggagctgggaggcggagctagggaagaagctcgacgccgcccagggggtgcttgacgctgccgctgcccgagaacagcgggcggcggagaccgaagcggcgtcccggcggcgagaagaggcccttgaggcgcgcgccatggcgctggaagagcgcgcctacgtcgtggagagggatctggcggaccgcgaggccgccgtcaccatccgggaagcaacgctggtggcgtacgaggctgcctgcgccgaagaagagttcacgctccgcctccgcgaggacgcgctcaccgaacgggagcgagctctcgagggggccgaggccgcggcgcaacagctggcggtcaacctgtccctccgcgaggcagcgcaggaggagcaggcgcgccgtaatctggaaggtgcccgcgccgagagggccgtactgaaccaacgggccgctgagctcgaggcgcgggcgaaggagctggacgcgagggcgcgcagcggcggggcggccacgggcgaaagcgacttagccgcccgcctcgcagctgccgaacgcaccatcgccgatctgcagggcgcgctggactcgtccgccggggaggtcgaagccctccgcttggcaggcgaggtagggcccggcatgctttgggacgccgtctcccgcctagattgcgccggtcggcaagtgggcctctggagagggcggaccgtaaagtacgccgccaaccagggaggcctcgcccagcgcctctcgaagatggccggggctctccaacggctccccgaggagctcgagaagacaattaagtcatcctcgagggacctcgcccaaggagcggtggagctcgtcctggcgagttaccaggccagggaccccaatttctctccatggatggcgctggatgagttccctcctgggaccgaggaccgcgcgcgcgcgcaggtccgggatgccgccgaccatatcgtcgacagcttcgagggctcggcccctcggcttgcgttcgcccccaactccgacgaggagggcaatgccggtggtgcagacgatagtgacgtcgaggccggcgatccgggcgcatcggattga

SEQ ID NO: 79794 - DNA, 2919 bp, Oryza sativa
  Clone ID: PAT_MRT4530_79481C.1
atggagagcctagcacagttagagctgttatgtgaaaagctttacaattctagagactccgctgagcgagcacatgcagaaagcaccctcaagtgcttctcggagaacagtgactacatttcacagtgccaatatatattggacaatgcctcaacaccatatgccctgatgctggccagttcaagcttgttgaaccaagtcaacgaccgcagtctttcattgcaattgcgtcttgatatcttgaattatgtcataaactatcttgctatgaggggacctaaactgcagacgtttgtgattaaatccctaattcagcttgtctgtcgaattacaaaatttggatggttcgatgatgataaattcagagatattgtcaaggaggcagctgatttcttatctcttgcatcccaggatcattatttcataggattgaagatactatatcatcttgtaggagaaatgaaccaggcaaacgctatgcctttgacacttcacagaaaaattgcttgttcgttcaaggaccagtttcttctacagatcttccaaatttctttaacctcattacaccaactgaagagtgaagtacctgatgactttaggcgtgatcccctctcgcttgcattaaggtgcttgtcatttgactttgttggttgtcctgtggatgaaagctctgaggaatttggtacagtgcagcttcctgcatcttggaggcctctccttcaagatccttctactgttcagatcttcttcgattactataaagtcaacgatacatgtgtttcaaaagaggctttggaatgtcttgtgagacttgcttctgtcaggcgcagtatttttgttgaggacccttcaaggacccagtttctttctcatctgatgtcaggcacaaaggagatactccaaactggccaaggtcttgctgatcatggaaattaccacgagttctgccgtcttcttggacggttcaaagtgaatttccagttgtcagagcttctgagtattgagttttatggtgaatggattggtttagtagcagaattcacaactaaatccttgttgtcatggcagtgggccagcaatagtgtctactatcttttgagcctttggtcaaggctggtgacatctgttccttacttgaaaagtgacacaccaagtatgcttgatgagactgttcccaaaatcacggagggttttatcacctctagaattaattctgttcaggccagctttgcaaacgactcatccgatgatactttggataatgtggatgttcttcaggagcagttggagtctcttccttacctttgtagattccagtaccaaaacagtagcatttacatcataaatattatggagcctcttctacaagcttatacggaaaggtcaagattaccagctcctggagatgcgaatgagctctctgtcattgaaggacagctcacatggctagtccacataattgaagccattctcaagattaggcagaccattggttgtagccaagaatcacaggagttaattgatgcagaacttgcagcccgtgtgttacagttgataaacgttactgacacgggggtgcacgcacagagatatcgagtattaagtaagcaaagacttggtcgtgctattcttatctttgtgcaaaatttcagaaggtcatatgtaggagatcaagccatgcattcttcaaagcagttgtatgcaagattatctgagcttcttggattgaatgaccatttagttttactcaatgccattgttgggaaaatagctactaatctaaagtgctatgctgaggttgcagttaatttggaggcaaccgctgatgctgctttctggactgatgttgtgaagtacgcatttattggtttgatgagagacttacgaggcattgctatggccacaaacagccgcaggacctatggcctcctatttgactggctatatccatctcgcatgccacttttactgaaagccatctcactctgtgctgatgagccggaggtcaccacacccctactcaagtttatgtgcgagtttgttttgaacaaagctcagagattgacatttgattcatcatcaccaaatgggatccttttattccaggaggttagcaagctgattgtggcttatggatcacgtattctgttgcttccaaacggcactgatatttatggaagtaaatacaaaggcatatggatatcacttgctgttctttcaagagctttatgtggaaactatgtcaattttggtgtatttgagctgtatggtgacagagcacttgctgatgcccttgatatatctttaaagatgagcctctcagttccattgtctgacatattggcattcaaaaagctgtcaaaagcattctatggatatattgaagttctgttcagcagccatatcacttttgttctcaatttggatacaaacaccttcgtgcatattgtcagcactcttgaatctggcttaaaaggtctagatacagggatatcaacacagtgtgcctctgccattgatagcttggcggccttttatttcaacaatatcacagctgctgatggccctccttcaccagctgcactaaatcttgctcggcatattggagagttccccactttatttcctcagatactgaagacgctttttgagatcatcatctttgaggatgcgggtaatcaatggagtcttagtaggccaatactgagtctgataatgatcagtgaacagatgtttagtaatttgagagcacagatattagcatcacagcctgtagaccagcaacaacgcctttcgcaatgcttcgagaagctgatgtctgatgttgctaggaacttggaaccaaagaacagagataaattcactaaaaatcttacaacattcaggcatgatttccgtgtgaagaacattcaggcatga

SEQ ID NO: 79795 - DNA, 192 bp, Oryza sativa
  Clone ID: PAT_MRT4530_79482C.1
atggctgcgggcggagatctcgtcgagaggggaatcgcctttgcatcggagaaatcgccggagaggaaaggggattggatttgcttgagcggtgagaacggaggtcacggtgtgaggaaaggggatttggtccaagaagagttgaaggcggagatcgagttctggaacagagcaggaatcggctacggttag

SEQ ID NO: 79796 - DNA, 447 bp, Oryza sativa
  unsure (1)..(447): unsure at all n locations
  Clone ID: PAT_MRT4530_79483C.1
atgttcnnggacgcngtctccaatttagaccgcgtcgggcggcaggcgggcctctaggncggncggtgcgcgaagtacgccgccaacaaggggggtctcgcccagcgcctctcagagatggcggggcccctccgncggctccncgaggagctcgaggagacgatctagtcatcctcgagggacctcgcccggggggcggtggagctcgtactggcaagctacaaggcaagggaccctgacttctccccgtgggcagcgctgtaagagttccctcccggaacccaggatggcgcacgcgcgcaggtccggaacgccgccgaccacatcgtcccaagcttcgaaggtacggcccctcggctcgcgttcgccctcgactccgacgagaaggcggttaacggtggtgcgtacgacagcgacgacgaggctggtgacccgggcgcgtcggag

SEQ ID NO: 79797 - DNA, 3610 bp, Oryza sativa
  Clone ID: PAT_MRT4530_79484C.1
atggagagcctagcacagttagagctgttgtgtgaaaagctttacaattctagagactctgctgagcgagcacacgctgaaagcatcctcaagtgcttctcggagaacagtgactacatttcacagtgccaatatatattggacaatgcctcaacaccatatgccctgatgctggccagttcaagcttgttgaaccaagtcaacgaccgcagtctttcattgcaattgcgccttgatatccgtaatagtccttgccaacaatctttcattgaatcagttatttggttttttttgttttgctattgcatctgtttggaatggaattacgtcatagacgatctttctgcttgaagacctaatctgcagactttggtgaataaataactatttcagcttggctgttgatttacaaaattaggttgttacgatgatgataaatgcagagatattgtcaaggaggcagccgatttcttatctcttgcatcccaggatcattattttataggattgaagatactatatcatcttgtaggagaaatgaaccagaactgcacaatgtgcttgttggcacttataaatcgcacatgcacatacattcataaaacatcggatgagacacagaaggtcaagcgcaaacgcgatgcctttgacacttcacagaaaaattgcttgttcgttcaaggaccagtttcttctacagatcttccaaatttctttaacctcattacaccaactgaagaggaagtacctgatgactttaggcgtgatcctctcttgcttgcattaaggtgcttgtcatatgactttgttggttgtcctgtggatgaaagctctgaggaatttggtacagtgcagcttcctgcatcttggaggcctctccttcaagatccttctactgttcagatcttcttcgattactataaagtcaatgatacatgtgtttcaaaagaggctttggaatgtcttgtgagacttgcttctgtcaggcgcagtattttcgttgaggacccttcaaggacccagtttctttctcatctgatgtcaggcacaaaggagatactccaaactggccaaggtcttgctgatcatggaaattaccatgagttctgccgccttcttggacgtttcaaagtgaatttccagttgtcagagcttctgagtattgagttttatggtgaatggattggtttagtagcagaattcacaactaaatccctgttgtcatggcagtgggccagcaatagtgtctactatcttttgagtctttggtcaaggctggtgacatctgttccttacttgaaaggcgacacaccaagtatgcttgatgagaccgttccgaaaatcacggagggttttatcacctctagaattaattctgttcaggccagctttgcaaacgactcatctgatgatactttggataatgtggatgttcttcaggagcagttggagtctcttccttacctttgtagattccagtaccaaaacagtagcatttacatcataaatattatggagcctcttctacaagcttatatggaaaggtcaagattaccagctcctggagatgcgaatgagctctctgtcattgaaggacagctcacatggctagtccacataattgcagccattctcaagattaggcagaccattggttgtagccaagaatcacaggagttaattgacgcagaacttgcagcccgtgtgttacagttgataaacgttactgacacaggggtgcacgcacagagatatcaagtattaagtaagcaaagacttgatcgtgctattcttatctttgtgcaaaatttcagaaggtcatatgtaggagatcaagccatgcattcttcaaagcagttgtatgcaagattatctgagcttcttggactgaatgaccatttagttttactcaatgtcattgttgggaaaatagcaactaatctgaagtgctatgctgagagggagacttttccatttcttgaagaatacagatgtgcccgcagtagaacaaccttctactacatccttggctgcttgattttcatggaagacaccccagtaaaattcaggagtttcatggagccactcctacaggttgcagttaatttggaggcaactgctgatgctgctttccggactgatgttgtgaagtacgcatttattggtttgatgagagacttacgaggcattgctatggccacaaacagccgcaggacctatggcctcctatttgactggctgtatccatctcgcatgccacttttattgaaagccatctcactctacgctgatgagccagaggtcaccacacccctgctcaagtttatgtgcgagtttgttttgaacaaagctcagagattgacatttgattcgtcatcaccaaatgggatccttttattccgggaggttagcaagctgattgtggcttatggatcacgtattctgttacttccaaacggcactgatatttatggaagtaaatacaaaggcatatggatatcacttgctgttctttcaagagctttatgtggaaactatgtcaattttggtgtatttgagctgtatggtgacagagcacttgctgatgcccttgatatatctttaaagatgagcctctcagttccattgtctgacatattggcattcaaaaagctgtcaaaagcattctatggatatattgaagttctgttcagcagccatatcacttttgttctcaatttggatacaaacaccttcgtgcatattgtcagcactcttgaatctggcttaaaaggtctagatacagggatatcaacacagtgtgcctctgccattgatagcttggcagccttttatttcaacaatttcacagctgctgatggccctccttcaccagctgcactaaatcttgctcggcatatcggagagttccccactttatttcctcagatactgaagacactttttgagatcatcatctttgaggatgcgggtaatcagtggagtcttagtagaccaatactgagtctgataatgatcagtgaacagatgtttagtaatttgagagcacagatattggcatcacagcctgtagaccagcaacaacgcctttcgcaatgcttcgacaagctgatgactgatgttgctacgaatttggaaccaaagaacagagataaattcactcaaaatcttacaacattcaggcatgatttccgtgtgaagaacattcaggcatgacagctgttcaggaccagctgctttaaggtggtgcactcatgtgctgtaaatacttagcttagcttcgttttaggaaccaccattcccgtggggggaaagttatggtttaactcagtttggtttggattggctgaaagatgaaagggttctcctgctgcatgtggcggcaaaatgcagttgttgatctcttaccttgtcgtgtactagaatggctgagtgcaggggattgacttttttcttcttctctttttataccttagtgttaattccttctctttttgcttgtacagcaatattcatgtgaaagcctgtgatcgctgtttccccgagttgttagggggaaagcagccatcgctcaaaatataattcattcgttaccaggttagaagaaggg

SEQ ID NO: 79798 - DNA, 1214 bp, Oryza sativa
  Clone ID: PAT_MRT4530_79485C.1
tgcaggcgcaaaacaaactgctttcctgctgctctgctcgatcgtgccccggaagatggcggcgaagtccggcgagttcgtggccgtgcccgtcgcggcgcatccccatgatagcgcctccgagccggagcccgtcaccgatggcctcatcccgggcaaggaccgcgccgccgccggggcgcgcgtcctagagcgcgatcaccgcgcgccgttcgccgaccgcgacgcgcggccacgcctaaccgtggccgacaccgacggcgccgacgtcttcgcgcgcgagcgcggcgtgtcctcccgcgaggccctcctcagcaagaacggtccggccggtctggccgtgtccgacctcttcttcaagcgcgagaccggtgcgccgctagtggacatggcccgtgccggcgggctgaccgtgggtggcaccaacgccaacgacgtcttcgcgctcgagcgcggcgtgtccgagtccgacctcctcccgcgtgagaccggcgagcctctcctcctcctcctcctcctcctcgacaagcaccgcgacgtgttcgcgcgtgaacgcggcatgtcattcggcgacgccctcctgggaaacaatcaccccgctgggctgcgcgagatcgacacacctctcctggacgagaaattcttctccgacgactactccttcgcgcgcaagacagccgcgccgcccttcgccgggcttgtcgcggccgacgagcacggcgcgcgcaccgacaaggctctccgcccggcgccttccgccccgcactcggagcaggttgccattgatgttcttgtcggtgccaaggaggtgccggtagcggccggtgcagattccggcggcggccatggcggcaacctgtcaactgtggtggggattttcgctgcttcaaccgccgtcaccatggtcgccgccggccccgtcagcccgccggtggcgtttggtgcctttctcctgctgcttggtggcctcttagtttctgtctcccgtgttcttgagaatcagctggttgatgatatctgacgaaaattggggaataattttgtaggattcggatcctttacagatgaatttggaccgaattcatagcatgacatggtgcttcattaacaattacagtgatgcgacatgtcaaactatgggtcagatccaacgccacttgtacaagatcttgtcctatatatgttaatgaagcaataatatcagatgctatctc

SEQ ID NO: 79799 - DNA, 2280 bp, Oryza sativa
  Clone ID: PAT_MRT4530_79486C.1
atgactggaagagcgactggttctacacccctctcgccgactgaagcgcgcctccgacttccgagccagcccccggcgcaggcctccagctggcgggcgccggtagatctgggagacggttacgacgccgttcttgaccgccttgctggtttgcgatcccaggggctcacgggggccatggtgttcggcgactaccttcgtcgccggatcgcgccgctccagcgacacgcccggggcgcctgggagtacaccgggcccgaggacatcatgaggacccaccaggggcgcaaatgggactgggaccctgaggacttcaagatagtggtccaatgggtgctgaatctcagctccgtggaggcatccctcatccctcaaggggtccttcccctctgctgcgatccagagcgcgccaacatcctgaccatcatgcaggaggtcggggcgtcgggggagcgggccccccgaggccacgatggcgcgggcgggagccgtaggggggaacaatctaccccgggagggggtcgtgcttctgggccccgtgacgggggcccggggggcagccgccctaccgacgcccgggggaagaggaaacaggaggataccccctccccatctcctccccgagggggcggggcggctgaggaagccgcttgggaggaggccagactccaccgggccgaggagtctgtccgggagacggaggcggcgcgtgcacgccgggcggactgccaagcccccgagccgactccgcccgaggcgacgacgacttccgaagccacccacgacgaggccgcgggcgcaccgctcgggcctgatccctcgggcgacgctcaagacgagccagcttcgggggacgtccctgagtccggcacgtcgatcggcgggccgagccgtgctgcatcctttacgaggcggctcttccccatgccttccgctgccccactgagcgcagagccccttctgcaggccttggccactgcgaacaccacggtgttggacgggttaagtgcccagatagaggtcctgcaggcagagcgggcggagctcgacgcggcgtgggcgcgtgtcgaagaggggcgacgctcggtggaggccatggtggaggcgggccgcaaggcacaccgctggcacgcctcggagctcgaggcccgtcgtagggacctggcggagatcgctagggaggtggaggaggagcgggaaactgccctcattgccaccgccgtgtttaacgcggcgcgggacgacctctgccttcaatacgggagccggggggcagagctagagaagaagctcgacgcgtcccggcagcgcgaagaggcccttgaggctcgcgccacggtgctggaggagcgcgcccgcgccctggacacgaaggagagggaactggcgggtcgcgaggccgccgtcgccatccgggaggcaacgctggcagcgcacgaggccgcctgtgccgaagaggaatccgcactccgcctccgcgaggacacgctcaccgagcgggagcaagctctcgaggaggccgaggccgcggtgcagcggctggcggacagcctgtccctccgcgaggcagcgcgggaggagcaggcgcgccgtaatctggaaggcgcccgcgccgagagggccgcactggatcagcgggccgctgagctcgaggcgcgggcgaaggagctagacgcgagggcgtgcagcggcggggcggccgcgggcgacggcgatctagccgcccgcctcgcagctgccgaacacaccatcgccgatctgcagggcgcgctggactcgtccgccggggaggtcgaggccctccgcttggcgggcgaagtagggcccggcatgcttcgggacgccgtctcccgtctagaccgcgccgggcggcaagcgggcctctggggcgagcggaccgcgaagtacgccgccaaccaggggggcctcgcccagcgcctctcagagatggccgggactctccagcggctccccgaggagctcgaggagacgatcaagtcatcctcgagagacctcgcccggggggcagtggagcttgtactggcaagctaccaggccagggatccggacttctccccgtgggcagcgctggacgagttccctcccggaaccgaggacgacacgcgcgcgcaggtccgggacgccgccgaccatatcgtccacagcttcgagggtacggcccctcggctcgcgttcgccctcgactccgacgaggagggcggcgacggtggtgtggacgacagcgacgacgaggccggcgacccgggagcctcgaagtga

SEQ ID NO: 79800 - DNA, 308 bp, Oryza sativa
  Clone ID: PAT_MRT4530_79487C.1
tggactacgtttaggaaggaagatgtgattttagttataaagtcacaattttttttggtgtagatggatagacttgttcgtgtttagtacagtggtagagtggtggaaccttacgttggtgcacatgttgagtttgagatatgtcattcaagaccattttgtttcccgcccgcccaactctagatgaactaaggtcacgagtgaaagaagctcttgaatggaccgaggataatgtggagattcgtttttatggcgatacgatgttggtaaagggcataagtatatattgaatgtgctaggtcagttgg

SEQ ID NO: 79801 - DNA, 3039 bp, Oryza sativa
  Clone ID: PAT_MRT4530_79488C.1
atggcacggggctccgctctgctcgatggtagcgtgctgccgccctcccgcatcgtgagcgagaggcaggctgggctgccgcgccgcttcatgccggaatctgccaccggccgagagatagtcacgctgggcgagggacgcccggcgccagactacccggggcggtccgtcttctttctcccctttgcaatggcagggctggttccgccattttcctctttcttcatggatgttctggagttctacgatctccagatggcgcacctcacccccaacgcggtgatgacattggccatcttcgcgcatctgtgcgagatgttcattggggtgcgcccatctcttcggctgttccggtggttcttcaccgtgcagtcggtgtcgccgccatcggtagtcggtggctgctacttccagccacgggggccggtgctgaaccgctacatcccctgcgccctccgcaagaagtgggacgactggaagagcgactggttctacaccccccttgccgacgaagtgcgcctccgacttccgagccagcccccggctcaggcctccagctggcgggcgccggtagatctgggggatggctatgacgccgtcctcgaccgcctggcgggcctgcgatcccaggggctcacaagagccatggtgtacggcgactacctccgtcgtcggattgcgccgctccagcggcgcgctcggggcgcctgggagtacaccgggtccgaagacttcatgaggactcaccagggagtgagatgggactgggctcctgaggacttcaagatattggtccaacgggtgctgaatctcaactccgtggaggcggccctcattcctcaaggaatcctccccctctgcagcgatccagaccgcgcctccatcctgaccattatgatggcggtcggggcctcagaggagcgagctccaaagggccacgacggcacaggcgggagccgccggggggaacaatctatcccgagagggggtcgtgcttctgggtcccgcgacaggggcccggggagcagccgccctgccgatgcccgggggaagaggaagcagggaggaacacctcccccatctcctccccgagggggcggggcggcgcgtgccagcagcaggcgcccggagggggccgcgccaacatcgcagcccgagggggagcgcaagaagaagtggccccgcaagatgggggagacagaaccatctcggggaaacctcatttcccctccaaagtggtcgtttaaccgaccccctcgcagcgagatcccgtcgcgtccctcccgccattccaagtccggccagtctgaggctgaggatccggcggccgcagaggcccgcaggcgggaatctgaccggcgagaggccgcggatcgcctacgggaagccgaggaggccgcccaggaggctgcccgggctcgccaggccgaggaaatcgctcgggaggaggccgcccgggcccgccaggccgaggaagccgtttgggaggaggccgcccgagcccgccaggacgagatgttggcgacttccgaggcagctcgcgacgaggccgcggacgcgtcgcttgggcccactccctcgggcgacgctcaggcgacaacttccggggcagctggcgacgaggctgcgggcgcgcggctcttccccacgccttctatcgccccactgaacacagagccccttctgcaggccttggccgccgcaaacaccacgatgttggatgggttaagtgcccaggtggaggccctgcaggcagagcgggcggagctcgacgccgcgtgggcgcgtgtcgaagaggggcgacgctcggtggaggccatggtggaggtgggccgtaaggctcaccgccggcatgtctcggagcttgaaacccgtaagaaggtgctggcggagatcgccaaggaggtggaggaggagcgggaggctgcccttatcgccaccaccgtgatgaacgaggcgcaggacaccctccgccttcaatacgggagttgggaggcggagctagggaagaagcccgacgccgcccagggggtgcttgacgctgccgctgcccgagaacagcgggcggcggagacggaagcggcgtcccggcagcgcgaagaggcccttgaggcgcgcgccatggcgctggaagagcgcgcctgcgtcgtggagagggatctggcggaccgcgaggccgccgtcaccatccgggaagcaacgctggcggcgcacgaggctgcctgcgccgaagaagagctcgtgctccgcctccgcgaggacgcgctcaccgagcgggagcgagctctcgcgggggccgaggccgcggcgcaacagctggcggacagcctgtccctccgcgaggcagcgcaggaggagcaggcgcgccgtgatctggaaggtgcccgcgccgagagggccgcactgaaccaatgggccgctgagctcgaggcgcgggcgaaggagctggacgcaagggcgcgcagcggcggggcggccgcgggcgaaagcgacgtagccgcccgcctcgcagctgccgaacacaccatcgccgatctgcaaggcgcgctggactcgtccgccggggaggtcgaagccctccgcttggcaggcgaggttgggcccggcatgctttgggacgccgtctcccgcctagattgcgccggtcggcaagtgggcctctggagagggcggaccgtaaagtacgccgacaaccagggaggcctcgcccagcgcctctcgaagatggccggggctctccaacggctccccgaggagctcgagaagacaattaagtcatcctcgagggacctcgcccaaggagcggtggagctcgtcctggcgagttaccaggccagggaccccaatttctctccatggatggcgctggatgagttccctcctgggaccgaggtccgggatgccgccgaccatatcgtcgacagcttcgagggctcggcccctcggcttgcgtttgcccccaactccgacgaggagggcaatgccggtggtgcagacgacagtgacgtcgaggccggcggtccgggcgcatcggattga

SEQ ID NO: 79802 - DNA, 298 bp, Oryza sativa
  Clone ID: PAT_MRT4530_79489C.1
gcgaggagccgaggatggcggcgggcaggggaggaggcaactgctcacggcgagcgaggtgtcgaggaaggcgaccggaggggcggagcgtacgtactacacgccggggcagccctcgcccggctctgatggcggccacggccgcggcgagggcgacgagacgtggagcgaggcggcgggatcctccttccccaccgtcgtggctacgcggagctcggacatgtcggggttgaagaaattggacacggcgatgctgctacagctgtccccttgcccttccctgcgcaaagcccgctga

SEQ ID NO: 79803 - DNA, 378 bp, Oryza sativa
  Clone ID: PAT_MRT4530_7948C.1
atgctggtatggactcaagtcggcgaaatcgtcttcccggtttacaccacgatgccgatctcaaccggtcctccaatgactggaaacgagaacgcagtggctatgaaccaggacggctccatgtcgaaaaatccacccgttgaaacagagaacggattatcgactacatccaaactcgtgaaggattctgatgcggccaagtcttgtccctccgacataaaccacgggccaacaaagatgacttccgaaacaaagaatcacgacctctcgagctgcaaagttctcctcggcgccgtgaaaactccgtctcctaagtcatacgtccccgttagggataacggcaaggaacaaggagcgactccagcctcagatcgattc

SEQ ID NO: 79804 - DNA, 375 bp, Oryza sativa
  Clone ID: PAT_MRT4530_79490C.1
tcaggacgagccaggttcgggggacgtccccgagtccggcacgtcgatcggcgggccgagccgtgcggcattctcaccgaggcggctctctcccatgccttccgctgccccactgagcgcggagccccttctgcaagccttggccactgcgaacaccacggtgttggatgggttaaatgcccagatggaggtcaccgccggcacacctgagagctcgaggcccgtcggaaggagctggcggagattgccagggaggtggaggagaagcgagaggctgccctcattgccaccgccgtgctgagagctcgaggcccgtcggaaggagctggcggagattgccagggaggtggaggagaagcgagaggctgccctcat

SEQ ID NO: 79805 - DNA, 325 bp, Oryza sativa
  Clone ID: PAT_MRT4530_79491C.1
atggcgctcgaggaccgaagccacgatgccctcgacggctgccacccgtgcccagctccttccccggtggctgaggctgggggagacgtcgacgccgtcttcctcggcttcgtctacaaccacgcgccgctgccgcccttcacgccgcccgtcccatgcctgtctgttggccgccgcgaccgcgctgggctgccgccgcccttcccttctcccgtgtcgccgccgccgcgtcgccggtcggcgatcgtcggacctcctctcccgcctcaccccggcgacatccccacccaccgcccgggccgcccatcctgtcgagaggagataa

SEQ ID NO: 79806 - DNA, 189 bp, Oryza sativa
  Clone ID: PAT_MRT4530_79492C.1
atggacatggaggaggtccgcgcgtgcatggacctcggcctcgagctcccctccgactacactgtcgagatacaatgctacggcctcttcgccaccagcaaccccacccacaccaactccggcagcagtagcaacgacgaggagggcgcgaggcgggaggggagggcatcggcgattggcgacgggtga

SEQ ID NO: 79807 - DNA, 2304 bp, Oryza sativa
  Clone ID: PAT_MRT4530_79493C.1
atggcgagctcaggagcgccgctctgttcctctgctctcgttcttcttccctgcctgtttgtcatagccatggccgctctgcagagtggtgtggtggtattggcggacgccgctgacaccgtcgccgccgaccggccgttgtccggcaggcagaggccactggtgtccaaccgcggcaagttcgcgctaggtttcttccagccagaaaactcagagcattggtaccttggcacctggtactaccaaatctccaagcacacgccggtctgggttgcaaacaggggctctccaatctcgaatccggacacctcacaactaaccatagcaaccgacggcaacatggtattactcgacaattcaacaactgcaatttggtccacgaacatctccaacttcacctccaattccacggtcggtgtcatcctcgactccggcaaccttgtcctcgcagacgcatcgaacacctccatcatcctctggcagagcttcgaccatttcggcgatacctggctccccggcggcaagctcggccggaacaagctcaccggcgtgagcactcgtcttgtcgcatggaaggcacgcaatgacccagtccccggcgtgttctccctcgagctggacccgaacggcacgagccaatacctgctccaatggaacagtacactgcagtactggacaagcggcaactggaccggccgcatcttcaccggcgtgccggagatgacgccgaccggcagctacccgaattcgctgtacaccttcgactacgtcaacggcgagaacgagagctacttcgtgtacgacctcaaggacgactcggtcctcacgaggttcgtcttgggcgagatggggcagatccagttcttgacatggatgaacggcgccaacgactggatgctgttctggtcgcagcccaaggcgcagtgcgacgtgtactcgttgtgtgggccgttcagtgtctgcaccgagaatgcaatggcatcttgtagctgcctccgtggcttcggtgagcaaaacgttggcgaatggttgcagggagatcacacttcagggtgcagaagaaacgtggagctgcagtgcagcagcaatggctcggtggtaggaaggagtactgatcggttctacacgatggctaatgtaagattaccaagcgacgcagagagtgtggtggccgcagaattgtctggacagaagcaaaagcataccaagaagttgatcactttttctgtccttgctactggtgctgtactactcatgatagctgttttggttgtcatcttgagaagaagaatggtgaaggcaacaacacgagtggaaggttccttgatatcattcacataccgtgacctgaaatctgtgaccaaaaatttctccgagaagctcggaggaggcgccttcggttcagtgttcaaagggtcactgcctgatgcaaccatggtggccgtgaagaagctcgaaggttttcgtcagggggagaagcagtttcgctcagaagtgagcacaatcggcaacatccaacacgtcaacctgattagattgctcgggttttgttcagagaaaactcgaagactactcgtctacgagtacatgccgaatggttcgttggacaagcatctttttggaagtaaccaacacgtcctgagttggaacacgaggtacaagattgctcttggaatcgcgaggggattagactacctccacgagaaatgcagggattgcataatacactgcgacatcaagccagaaaacatactgctcgatggctcgtttgctcccaaggttgcggacttcggcctcgccaagctcatgggccgcgacttcagccgggtgctgaccacgtcgaggggcacggtggggtacatcgcgccggagtggatcgccggcacggccgtgacggcgaaggcggacgtgttcagctacggcatgacgctgctcgagatcgtgtcggggcggaggaacgtgcaggagcagggtggcgcggcggtggacggcctgctcccgttgctggcggcgagcacgctcggcggcggtggcggcggccgggatgagctggtcagcgccgtggtggacggccgtgtaggcgtcaacgccgacatgggcgaggtggagagagcatgcagggtggcgtgctggtgcatccaggacgacgagaaggcgaggccggccatggcgacggtggtgcaggtgctcgaagggcttgtggagatcggcgtcccgccggttccgagatcactccaaatcctcgcggacctcgcgaatcagtcgaataacttgcggtttttctccgatttaccgtcaaagtga

SEQ ID NO: 79808 - DNA, 168 bp, Oryza sativa
  Clone ID: PAT_MRT4530_79495C.1
gcttttggagcccgagtctgcccgagaactcacgccaagatccgatccggcaaccggctaaaaacaaacgtagtacgagcagtgacgcacgcccaccccacccgcgatggtagcagctcggctaaccccttccacactccacaccagcgcaacgacggaagtgtgtga

SEQ ID NO: 79809 - DNA, 399 bp, Oryza sativa
  Clone ID: PAT_MRT4530_79496C.1
gtaagttatctttgtacgtacgtacgtacatacggagaagaaacaatgaatcttatctcctcttcaacggaagaaaagaaaacatgtgttgcaggtgccggaggcgagaacctgcgctggtcctcaatggctaggttctgctacacccctgccatctagaactcgcccaacaaatacgcccgcagctctgtctaccatagcatgtcgtcccaccatggtttttaatcgatccccatcaccaatgcctctctcccgatgagacaacgaggcggatcaatcaagcaagcaagcgtaagggaatagacgaaggaagaggaggagaacagcggggcgacagtgtgcctacccggccggcccagtagcaatgggagggagaagagagaggctggggaatgggat

SEQ ID NO: 79810 - DNA, 394 bp, Oryza sativa
  Clone ID: PAT_MRT4530_79497C.1
atcaggtcaatttcttatctactttgatcctaaatttttttttgcccatgggctaggatcccagttggggtaacattgcttatcacccgtcatcgcaggaaacaacccaccatagcccagaggatatgggctacagccaatagaactaaataccatgtccctggcgacaattggaacctatatactgctagtagctgacaatagcattcccatgaccaatttttcgagggatagcttagacctctcactttggcatttaaaactagattatggactcgactgtcagctagacaagcctcggacgcttggatgctaacatctttcagcaacacccgagccacaacagatgcctgttatttaggaaagcagaaaaacctggggtagtacatgatta

SEQ ID NO: 79811 - DNA, 300 bp, Oryza sativa
  Clone ID: PAT_MRT4530_79498C.1
aaaaaaaaaaaaaaaaattttttttttattaaaaaaaccaaagggggaaaatgtaaaaattaataatttttgggcttattttaaaattccaaaccatttttttgtaaaaacttattaaaaaaacccccaaaggggggaaatgggactgggggcacaaaaaaacctaggggggaaaccatttttaaaggggccttaaaaaacaaaaaaagtttggccttgagccaaatttccttaaaaggggaaataacaaaattgttggggttgaacctgttgccctatggcccaaaaaattttaatgtc

SEQ ID NO: 79812 - DNA, 636 bp, Oryza sativa
  unsure (1)..(636): unsure at all n locations
  Clone ID: PAT_MRT4530_79499C.1
cggcacgagccgcaagcaanttgggttggntgctcttgngcaatatgncnaggnggtcgagcacnttatgggtaacctncncaaggctcaagaccgcctagtggntgtnctnncttcgctttgctcgncnngtgntcntnanntagcttacncncggnnaaagcnaaaagagaagagatggcctccccnctntngnttctaatgcagtaaccgncaanncatntggcagtggcaatgngaacacaaccnaagctnntatcggcncacctncnnctnnggccgntgntgttttnggngatgnncncagtacnggccatgtggngagctctncccncntgcatgtccnggnccccnaagatgcacaagctggncaccttgcnngccnccaaagatcccntanngncgtgntgctgngtttctnnctnggtggnccgnnnctgttcnggtgtttggggcttagtggncngcgtntgttccntgttgngngtactcctgngctggccatnggcccctctnntgctgccaaccngtcgcnngcgatcatncntnttgngatggganaaaaggaggccgttggcancccccacttacanaanccncaaancgggtgtgttccccttgnggcccctntgggga

SEQ ID NO: 79813 - DNA, 1971 bp, Oryza sativa
  unsure (1)..(1971): unsure at all n locations
  Clone ID: PAT_MRT4530_7949C.1
gactgctgctacttttttttttttgtgtaattatatacaagtccaccattcatggcattttttttttttttttttttaagacaatccaaccatattttaaggaaccacgaaggtacacatattgggtttgttaagcatgaaaactggaaatttccttgaaccaaaacatagcagccgaattaacttgacagtcaacaattcaggacactgtagcatatctttattctctaagacaatccaaccatattataaggaaccacgaaggtacacatattgggtttgttaagcatgaaaactggaaatttccttgaaccaaaacatagcagccgaattaacttgacagtcaacaattcaggacactgagcaaaactaaatctctcttcaggaacattgggagctatgagactatccaaagaagagatgctccatggcgacaagttggctgacaatacatctacagcctccttcctctcctacctccctttctgcgggtgctgtccgtgggaaccggggtcacatcctcaatgcgaccaatcttcatgccagagcgagcaagagccctaagagcagattgagcaccaggaccaggtgtctttgtcttgttgcctccagtggcacgaagcttgatgtgcagagcagtaataccaagctccttgcaacgctgtgcaacatcttgagaagcaagcatagctgcatatggtgatgactcatcacggtcagctttgaccttcatgccaccagtaatgcgaacaagagtttcccttccagacaagtcagtgacatgaatgaaagtgtcattgaaggatgcgaagatgtgggcaactccgaacacatactctccttcacggacagtgggtccaagagtgacgttctcctccttgggctccctggtcttcctcttcgacatggtgggacgaggcggcggagatcgaggcgagcgccggtttcctcctggtcgttgagatcacgagctcgccgccgccggagacacgagagaagagggaagggtggagcagcgagtgagctttatatatgggcgcggcggcgcgggggctagggtttgctgcggaagcagcggtgtccaactctcccgcctgggcggccggagcccgcctccaccgggcgccggacacgtcgccccggccggcgccgtcgccgtcgcggcgctcattaaaccgaaaaggcgccgccgcgcgccgcccactagctcgctggggagacgccgacgtgcgcgcgcgtgtcgcgcgctcacgcggcgcgggcgcgcgggcggcattaactccgccgttgaacgctagcgcgtcgcgtcgcggcattaattgttaatcatctaaaaatcaactgcatttctcaacaaattatgtaagtttctatcttagcattattgcttcagtagataggaatctcaaatggcaccactcatcagtcacccactgaagatgatatctcaattatgaattaaaaagaaacacaacgnatatctatgaaaaatagccaagaattataattcgcctgcatatccatctcacccaccgtccataaaaaaaacaacaaagaaaaagctgcatttgaaaaaaaaaagaaactatatataataacaatatctccacggtccgatccgaaccgtccgttctcgatccgacggctcacacgcatcgcgccaccgcctccattggtgcatgatcccaaaggtgcactcatcatcctacttatccttgatcatcacaaaagacatgtgaattcaagaagacgatgacggcagcaatggtggtgtcatatgtgaagaagaagatgaagaagatgaagaagacgacgatggcaatggtgtcatcacggtgtccatgtgcgcggcgaaggcgaaggcgaagctcatctctcatcaagggcagaacggcgtgccgtccttgtcgcggtggctggggatgacgaaaccgcggatgcgccccacctgctcgacgaggtaaccgtcgc

SEQ ID NO: 79814 - DNA, 355 bp, Oryza sativa
  Clone ID: PAT_MRT4530_794C.1
tttttggtttgttttttttttttttttttttcttttttttttttttttttttttttttttataaagggaaaaagccccggcttttgggagaacggtttgttttgttgggtgggactggaaaaaaaacaatacaatttggggggaaaacacgggttcataagaactttctgggggtcttctacgtccaaactaaaaaggggggcaagaccccatttttttttgaacctttttttgaaaaaaccgggggtttgaaaaaaaaaacccaatactttgaactacaacgtttaccagtttaagaactgggggcgtggttcccgtttcctttgccttggttggggggggcctctttttcccc

SEQ ID NO: 79815 - DNA, 423 bp, Oryza sativa
  Clone ID: PAT_MRT4530_79500C.1
atgaggtcccgcatcttgtggatgagccacgctgagcgcttcttcatgtggctcggcggcttctgttgctctgagctcctcaaggtacttgagagccatcttgagccgctgacgaatcagcagttgatgggcatctgcaacctgcagcagtcgtcgcagcaggccgaggacgcgctgtcacaggggatggaggctctgcagcagacgctaggagacacactggcatcggcggccgccaccgtggtcgtcggcggtgtaggcgccgacaacgtcaccaactacatgggacagatggccatcgccatggccatgctcaccacgctggagaacttcctcaagcttcggtcaaacatcaatggcgaactaaattgcttattaccatggcgtgatgcgatgatatttttgtgtaggctgatctgctga

SEQ ID NO: 79816 - DNA, 732 bp, Oryza sativa
  Clone ID: PAT_MRT4530_79501C.1
atgttccgccgcgccgccgcgtctaccttctttcgccatgccctctccacctcaccatactcctcctccgccgccgccgccgccgcggccgcctcctcctccgccgtgaactccatcatcctccgctccctcaaggagcacttcctcgaggtctccaagatgacgcccccgcccaagatcagcccgcccaagccctacacgatcgtcaagggcgccctggaccaggcatccggccccgtgctccgccgcgggtacggggatgccggcgaggagatctcaatctccgtcgccaggctcgccaacatcatgccccccggcgccgactacgactcggacgacgacgacggcggcgggggtggggtgagcgagtcgattagccagcttttcctccacgtcgacatctccaggccagggagcagcaagtcgctgcagttcctgtgcgggctgtaccccgacgccgtggggatccattccgtctgcctccggccgaagactgccgagtctgggacggcgggtttggctgggaagggcggtgacgggtaccagggccgtatcttccaagaattggatgagaatgtgcgtgatgcattccatcattacatcgaggcccgtggtataaatgagaaactcttccctttcctacaagcttggctgtatgtgaaggatcaccgcaatctcatacgctggttcaagagtgtgggtacactgatcagtgagccaaagtctgagtaa

SEQ ID NO: 79817 - DNA, 352 bp, Oryza sativa
  Clone ID: PAT_MRT4530_79502C.1
aaaacagaaaaaacttttttttaatttgtttaaggggcgaaaaatacttaaaaaaaaacataccctggagaaaaaaaattaaatttttggagcgacccccttttttttaaatttacagaacgaaaattaaaaaataaaaaacagccgttgggatgggaacacccactttaaaaggtttgggggcatttttaatgcaaaaaaaattttcctggattataaagccatggcattatttatttgccaaaatctccacacttgaatattgagcagcatgaaaaactgttcaccattccttaaagtggtttttggttaaaaaacattccacccgggggtttttaaacctttttttttt

SEQ ID NO: 79818 - DNA, 486 bp, Oryza sativa
  Clone ID: PAT_MRT4530_79503C.1
ctacgccagtgcaccgctggcgaacaactcggcggcgtcggcccggccaccaaaggagaggatggtcggcgggggagacctgctctgtgatgcacgagtcccagctggtgttgacctccgccaccttccacggccggtgctcccctgctgccgtgtgctggcgtgctgctgcagcagcaccatagttgccgctacgtccacctcgctggcctgcccaaacacgaaggcgatgacgaaggtatatctttcataagggtcatccttctctgctatccgaaactctgcctccttgagctctgccacaccaaactccagactgctaactccaacttctaactccaaactcctgctgtggtcgtgtgcctgccgccgccgcctgctagctcgcctcccgccgccgcgcgtcgtcttgccactgccaacaccgcgggacagccccgaccagagcgccgccgccgcgccctccaccgcgacaaccgacgccat

SEQ ID NO: 79819 - DNA, 607 bp, Oryza sativa
  Clone ID: PAT_MRT4530_79504C.1
gtttattctgcaccaggaaactgtgaagactgcaaagttttaattctcagagcatgttttccccttgctgaatctttcttctgaaagttagtaatccttggagctttgatgtcagagattggccggcgcatcgtttttcgttttggcgaataagcaagacaatcaaggtgcattgaagccggcagaaatcgccaaggcggtgtatttggacatacacgttgtaccgatacatccccgggattaacataggagtagaacacagtacaaatcttaccatcacacattcacactgctaggccgagcttctgtcgcagagacatctcatggtcatgttctctgaattgtattatgaccggggcacaacaagcgtcacctgggtcagctgtaactctgctaaaattaggagcaaagaaaacatagtttgtggcaatcatgggcttctaagattagcaattgtcaaagactgtttcaagggttgttaaatatggggaaactggatagatggagctgtggtttttgtttgcaagtgctcaagctggaggccatcgatcgctgccggcattctcatcgactgaagaaaaatctgtattgcaaaaaaaaaaaaaaa

SEQ ID NO: 79820 - DNA, 570 bp, Oryza sativa
  Clone ID: PAT_MRT4530_79505C.1
gggctgcgggaagaatcccatgtgattgcacgcctgcagccacaggtggaacaccaaagctaaagtggtcatgcatccatcctcaacccatcctcaggcgtgactcaacaatgctccaacaaatcagagctatatgctaacaacaggatgggatctgggactgctgcactatgccaccaaatgccctaaactaggtaaagtgacttgccatgtatagatccacggttagaactactagggagcatggcaagatatgactgatcgatgccacttcatgccatacactacgacactatcttctagaatatgcgacatttcctagcataatggggacgagaccaacatcaccactcgaaagacactgatgagcaaatatacaggggaagacgcgaagatgctctatataggtagctggttgaccacagacatgtacatgtagcgcacctgtggtctcactccatgactccttgttgagctgcgtatgtttcagagcatatgccgcgatttacgaacaacgcgttcaacctattggtcgaaatggcgcctcttttctgtccaatccttaaccgg

SEQ ID NO: 79821 - DNA, 2295 bp, Oryza sativa
  Clone ID: PAT_MRT4530_79506C.1
atggcacggggctccgcaccgctcgatggtagcgtgctgccgccttcccgcatcgtgagcgagaggcaggccgggctgccgcgccgattcatgccggaatctgccaccggccgggaggtggtcgcgctgggcgagggacgcccgacgccacactacccggggcggtccgtcttcttcctctctttcgcaatggcagggctggtcccgccattctcttcttttttcatggatattctggagttttatgatctccaaatggcgcacctcacccccaacgcggtaatgatgttggccatctttgcgcacctgtgcgagatgttcatcggggtgcgcccatctctctggctgttccagtggttcttcaccgtacagctggtgtcgccgccgttagtagtcggtggctgctacttccagccgcgggggcaggtgctgaaccgctacattccctgcgtcctccacaagaagtgggacgactggaagagcgactggttctacacccccctcgccgacgaagcgcgcctccgacttccgagccagcccccggcgcaggcctccagctggcgagcggtggtggatctgggagacggttatgacgccgttcttgaccgcctggcgggtctgcgatcccaggggctcacgggggccatggtgttcggcgactaccttcgtcgccggatcgcgccgctccaacggcgcgcacggggcgcctgggagtacaccgggcccgaggactccatgaggacccaccaggggcgtacatgggactgggaccctgaagacttccggatggtggtccaacaggtgctgaatctcagctccgtggaggcatccctcatcccccaaggagtcctccccctctgctgcgatccagagcgcgccaacatcctgaccatcatgcagacggtcggagcgccgggggagcgggccctccgaggccacgatggcgcgggcgggagccgcaggggggaacaatctaccccgggagggggtcgtgcttctgggccccgcgacgggggcccggggggcagctgccctgccgacgcccgggggaagaggaagcaggagggtaccccttccccatctcctccccgagggggcggggcgtttttcttctgcctcagcgagatcccgtcgcgcccctcccgctattccaagtccggccggtctgaggccgaggagatcgcggccgcggaagcccagaggcgggaagctgaccggcgagaagccgcggaccgcctccgagaagccgaggaagctgcccaggaggccgtctgggttcgccaggctgaggaggcccaggaggccgtccgggttcgccaggctgaggaggccgctcgggaggaggccagactccgccgggccggggagtccgtccgggaggcagaggcggcgcgcgcacgtcaggcggcctgccaagcccccgacccgactccgcccgaggcgacgacgacttccgaggccacccacgacgaggccgcgggcgcgccgctcgggcccgacccctcgagcgacacttgggacgagccagcttcggggggcgctcccgagtccggcacgtcgatcggcaggccgagccgcgcggctcccacaccgaggcggctctcccctctgccttccgctgccccactgagcgcggagcccctcctgcaggccttggccgccgcgaacaccacggtgctggacgggttaagtgcccagatggaggtcctgcaggcagagcgggcggagctcgacgcagcatgggcgcgcgtcgaggaggggcggtgctcggtggaggccatggtggaggcgggccgcaaggcacaccgccggcacgcctcagagctcgaggcccgtcgtagggacctggcggagatcgccagggaggtggaggaggagcgggagactgccctcatcgccaccgccgtgctcgacgaggcgcgggacgacctccgcctccaatacgggagccgggcggcggaggtagagaagaagcttgacgccgcccggggagtccttgacgccgccgctgcccaggaacggcgggcagcggagaacgaggcggcgtctcggcagcgcgaagaggcccttgaggctcgcgccacggcgctggaggagcgcgcccgcgccctggacgcgaaggagagagatctggcgggccgcgaggccgccgtcgccacccgggaggcaacactggcggcgcacgaggctagcggacagcctgttcctccgcgaggcagcgcgggaggagcaggcgcgccgcaatctggaaggcgcccgtgccgagagggccgcactggatcagcgggccgctga

SEQ ID NO: 79822 - DNA, 438 bp, Oryza sativa
  Clone ID: PAT_MRT4530_79507C.1
atggggttcagcgagacgcaggaagagcttgtccttcgctcatggcaatcgatgaagaaggactctgaatccattgctctcaagttcttcctcaggatcttcgagatcgcgccggcggcgaagcagatgttctcgttcctgcgtgactccggcgacgacgtgcccctcgagaaccacccgaaggcatgcgagtcggcgacacagctgaggaagacgggtgacgtgaaggtgagggaggcgacactgaggaggctgggcgcgacgcacgtcaaagccggcgtcgccgacgcgtacttcgaggtggtgaagacggcgttgctggacaccatcaaggacgcggtgccggagatgtggtcgccggagatgaagggggcgtgggaggaggcgtacgatcagctggctgctgccatcaaggaggagatgaagaaggctgcctaa

SEQ ID NO: 79823 - DNA, 2616 bp, Oryza sativa
  Clone ID: PAT_MRT4530_79508C.1
atggcacggggctccgcaccgctcgacggtagcgtgctgccgccttctcgcatcgtgagcgagaggcaggccgggctgccgcgccgattcatgccggaatctgccaccggccgggaggtggtcgcgctgggtgagggacgcccggcaccacactacccggggcggtccgtattcttcctttccttcgcaatggcagggctggtcccgccattctcttctttcttcatggatgttctggagctttatgatctccagatggcgcacctcacccccaacgcggtaatgacgttggccatcttcgcgcacctatgcgagatgttcatcggggtgcgcccatccctccggctgttccggtggttcttcaccgtacagccggtgtcgccaccgtcggtagtcggtggctgctacttccagccacgggggtcggtgctgaaccgctacattccctgcgtccttcgcaagaagtgggacgactggaagagcgactggttctacacccctctcgccgacgaagcacgcctccgacttccgagccagcccccggcgcaggcctccagctggcgggcgccggtagatctgggagacggctacgacgccgttcttgaccgcctggctggtttgcgatcccaggggctcacgggggccatggtgtacggcgattaccttcgtcgccggatcgcgccgctccagcggcgcgcccggggcgcatgggagtacactgggtccgaggactacatgaggacccaccagggggtcaaatgggactgggtccctgaagacttcaagatggtgatccaacgggtgctgaatctcagctccgtggaggcatccctcatcccccaaggtgtcctccccctctgcagcgatccagagcgcgccaacatcctgaccatcatcgagatcccgtcgcgcccttcccgccattccaagtccggtcggtctgaggccgaggagacggcgaccgcggaggcccggaggcggggagctgaccggcgagaagctgcagaccgcctccgggaagccgaagaagctgcccaggaggccgtccgggctcgccaggctgaggaagccgcttgggaggaggccagactccgccgggccgaggagtccgtctgggagacggaggcggcgcgcgtacgccgggcggcctgccaagcccccgacccgactccgcccgaggcgacgacgacttccgaggccgcccacgacgaggccgcgggcgcgccgcttgggcccgacccctcgggcgatgcttggggcgagccagcctcggggaacgcccccgagtccggcacgtccatcggcgggccgagccgcgcggcgcccacaccgaggcggctctcccctctgccttccgctgccccactgagtgcagaacccctcctgcaggccttggccgctgcgaacaccacggtgttggacgggttaagcgcccagatggaggtcctgcaggcagagcgggcggaggtcgatgtggcgtgggcgcgcgtcgaagaggggcggcgctcggtggaagccatggtggaggcgggccacaaggcacaccgccggcacgcctcagagctcgaggcccgtcgtagggacctggcggagatcgccagggaggtggaggaggagcgggagactgccctcatcgccaccgccgtgttcaacgcggcgcgggacgacctctgcctccaatacgggagccgggcggcggagctagagaagaagctcgacgcgtcccggcagcgcgaagaggcccttgaggctcgcgccacggtgctgggggagcgcgcccgcgccctggacacgaaggagagggaactggcgggtcgcgaggccgccgtcgccatccgggaggcaacgctggcggcgcacgaggccgcctgcgccgaagaggagtccgcactccgcctccgcgaggacgagctcactgagcggaagcgagctctcgaggaggccgaggccgcggcgcagcggcgggaggagcaggcgcgcctcaatctggaaggcgcccgcgccgagagggccgcactggatcagcgggccgctgaattcgaggcgcgggcgaaggagctggacgcgagagcgcgcagcggcggggcagccgcgggcgacggcgacctagccgcccgcctcgcagccgccgaacacaccatcaccgagctgcagggcgcgctggactcgtccgccggggaggtcgaagccctccgcttggcgggcaaggtagggcctggcatgcttcgggacgccgtctcccgtctagaccgtgccgggcggcaggcgggcctctggggcgggcggaccgcgaaatacgccgccaaccaggggggcctcgcccagcgcctctcagagatggccgggaccctccagcggctccccgaggagctcgaggaggcgatcaagtcatcctcgagggacctcgcccggggggcggtggagctcgtactggcaagctaccaggccagggaccctgacttctccccgtgggcagcgctggaagagttccctcccggaaccgaggatggcgcacgcgcgagggtccgggacgccgccgaccacatcgtccacagctttcgagggtacggcccctcgactcgcgttcgcactcgactccgacgaggagggcggtga

SEQ ID NO: 79824 - DNA, 687 bp, Oryza sativa
  Clone ID: PAT_MRT4530_79509C.1
cttttttttttttttttttttttttttttttttttttttttttttttttttttttttttttttttttttttttttttttttttttttttttttttttttttaaagcggaaccaagggacccaatttttattcactaattaaacaaaaaaggaaaaaaaaacagggccaaaattgttggaaaaaaaaaaaaacgagccccctagcacgaggacaagggacggggaaaactttccaaaaccttaagggggaccaggggctccaaccccaaaaaaggggggtccaccgtaatgggggggacgggggggttcgttcccagggagggggggctaaatggaagggtgaaacccccgggggggagggaaaactcaaagggccccggggggccgggcggcccccccgttttgggcgttttccactcgggaaaaaatttggcaaaaagggccccaacgggcaggtttttaaaactggtggccggaaggaaaaaaaagaaaaaacccttggggggccaccccccccaaattaaaatcccgttaaccggggggggggggaacccttccctaaaaacctggtaaaaaaacttaaccgggggggggcctttgacaaaaaccacctcggggagccacaagggaagcttgagctgccccaacggggcgagggcccccctaaagaaaaggaaatttggggggg

SEQ ID NO: 79825 - DNA, 4937 bp, Oryza sativa
  Clone ID: PAT_MRT4530_7950C.1
tacatagaatttacgtagttggtcaatgttccaagaatttgccaactcgcggccatcgccgtctacaactttgaatgcgcctggccgcaagacttgtgtgatcgtgtaaggtccttcccatttgggtgagagcttgtttcgccctgcttggctttgaactcgtcggaggatgtagtcgccgatcgaaagtatgcgtgctcggatgcgcttctcgtggtaacggcggagggcctgttggtaactggctgctcgaacggcaactcgttcgcgatgttcctcgagtagattcacatggtcgtttcgctgcttctcctgatccttgtcggaatacctctgtattcatgtactttgatatcgtagctcgctggggagcatggcctcagagccgtacacgaggaagaagggtgtttccttgttagatgttgtcggtgtggtgcatacggcccatagtagggtcttgatcccttgtagtactatgccatttgccctctcgacttgtccgttgctttgaggatgagaaaccaaagcgaaacatatcttgattcccagcctgatgcagtaatcctggaaatcggcgctgatgaactgggagccgttgttggtgatgatgcgatgtggtagtccgtatctgcaaaatatccctttgatgaatttgatggcgttgtcggccttgatttcccccgtgggtatcgcttcgatccatttagtgaatttgtcgattgccacgaataggaacctgtagccgccctgtcctcgtgggaatggcccgagtatatctagcccccagcacgagaacggccaagtaagagggatagtctggagcgcttgtgcgggtagctttgtgtgtttctatgtcgcacgcatctttgagggcggttggccagaaaaacccttgtcgaaaagctttcccgaccaacgtccgaccggcggcgtgtgacccatagatgccttcatgtatatcaaggaggaggtgtctaccgtcgtcggacgagacgcatttgagaagtaccccgtttggcgctttcttgtatagatcgttgccgatcgtgcaatagatttttgctttacgggttattttctcagcctctgcgtcgtcctcgggcaactcttcgctgttgatgaatttgatcagtggggtgcgccagtcgtctatggtctcgatatcggcaacggcgtgttctgcctctgtggcctccaagctgatgtcgggggtgtctgggttaatttcgccgctgacctctttcactgatggctttgtcaggatgtccagaaaagtgctaggctcgagtggttctcgtctggatgcgcgccgtgctagatcatctggctcaatattgttcttgcggtatacgtgtcggacctcgatcccatcgaaccttttctccagcttcctgacttctgcgagatacttggataattcggggttagagcatttataatctttgtgcacctggttcgctactagttcagagtcccctttcacgatcagtcgtttgaccccaagtgcggctgcagctcttatcccggcgagtagtccttcgtactcggctgtgttattggttgccctgaagttgaggtggattgcgtgcttgaattgatctccggaaggagatgtcaagatgaatcctgcccctactccttggctgttgagtgcaccatcgaacgccattgtccacgtttcgtcgtcgatttggttgtctgatttgttatcaggcatagtccaatcggctacgaagtcggcgagtacctgggacttgatggctgttcgtggcacaaagtggacgtcaaactggcttagctcaactacccacttcgcaatgcggccgacaacgtctttgtttctcacgacttcaccgagagggaaggaggagacaactgtgactctgtgggcttgaaagtagtgacgcagcttccttgatgtcatgattaccgcgtaaagcagcttttgtatctgtggatatcttgtctttgcgtcatggagagcttcgctgacgtagtagattggtcgttgtactttctctctcgacagcaatgacggtgctaacagaataaggcgtggcggcaatatagaggaataattcttcattaggttggggagcaacgagtacagggggggtttgataggtagcgcttgagtgcaatgaatgcctcttcagcttcctgtgtccatacaaatttgttttgcttctttagcagagcgaagaagggttgtgctcgttctcccatcctagcgacgaacctgcttagcgctgccatgcatccggttagcttttgtactttcttgagtcttttgggcgacttcatgttctcgattgctttgatcttctcgggatttgcttctattcctctgccagatacgaggaaaccgagaagcttgcccgactgtactccgaacgtgcacttctctggattgagcatgaggcgatatcatcggaggttgtcgaacgtttcccgtagatcgtcaatcaatgagtcgcttgtcttagtcttgacaacgatgtcgtcgacgtatgcctcgacgttgttgctgagctggtcgctaagtgcgccctggaccgtgcgctggaaagtattccctacggttatcagtccgaatggcatcttaacatagtagaataccccgaacggtgtgatgaatgctgtcctctcttcgtcctctttcgccatgctgatttggtggtagccagagtaagcgtcgaggaagctcaacagctcacagccggctgttgaatccaccaactgatcaattcgaggaagagggaagtgatccttgggacacgccttgttgaggtcggtgaaatcgacgcacattctccattttccgttggccttccgcaccatgactggattggctagccactctggatgaagtacctctctgataaagccagctttgagaagtttgtcgagctcttctcgtatggcttgtttttagtctggtgcaaatcgccacagtctttgttttactggcttggcatcgggtcgcaccaagagtttgtgctcgatcacctccctagggacccccggcatgtcagacggctgccaagcgaacacgtctgaaaaggttggtgatgaaggtgatgagcgcgaattcggtcttgtcaaggttggcactagagagttgaacgatcttgatcgcgccgtctggtttcagcgtcttgtttgtcttgctcactttcttgggaggctcagttgtagcgggtgggctgggcgtgtgctcgaccatgtcgaggctccgcttgtcgcattgtaccgctagcttggcgttcccttgaatagtgattgttcctttcggtcccggcatcttgagcacttgatacgcgtagtgagatgcggccatgaacttcgcaagtgcagttttcccgatgatggcgttatacgctgtatcgaattcagcgacatcaaaggtgatctgctccattcggaagttgtttgcttggccgaaagtcacaggcaacgtaattttgcccaatggtttggacgaggaatggggagtaattccatggaagggttgatcggtgggtgtcaactcgcttcgtgggattcccatcacgtccaaggtgctggcgaagagaaggttgattgagctaccaccgtcgatgagaacccgcgcgaccttgatgttccgaatagtgggttcgaccacaatcggatagcgtcactgtggaacctccgaaaatgtgcgagacgtggaggtcagagtctggatatgctgagtccgattcctgagcagccgcctccgcatccttctcgaccactcgtactcgcttgcctttttccaacgccatgtgcttctcgagcgactttttgaaaacaaggcaatcttccaaagaatgtctgtccgtcttgtgtatggggcaccatgctttctttgcgtcgctaccttgtgggtctgggcgcttgggtgggttcgcgtattctgctacgagaacttccgcttgagctttccttttcccactcttgcgatttttcttcttgcttgactcaggtgcgtccgtggctggtttcttttctcccccggttttcggcttgtcgttcttgcatctcagcgcatcgtctacgtgggtgcatcgctcaacgatctcgaataatctccgagtagttgtgatgcgtcttgtcgccaactcctgggtagtatagcgatctcggacaccggacttgaaggcgcgaattacagaagcgtcggtgatttcggggattgtatttctgcactcgttaaagcgccaaacatattccctcaaggattcacccgagttctgtgtcaacgcatgtaggtcgtcttcgatcgcgtggcgcttgtatgttccttggaagttggcgacgaactgctgccacaggtttgcccacgaagaaatcgagtagggcgggaaatgcatcagccatgaacgtgcagagccttttaatgcagttggcagataatttgccaacgcgttgtcgtctgctccggcagcgtagagtactgtggagtagacttgaaggaattcttctgggtcagtactcccatcgtacttctctattgctccgggtcggaatctctcaggccatcggacatcacgaagggaacgaccgaaagctctacacctagcgctgggagcagtgggttgtcggcgatcgtgtgtccttcgtggatgtctgtctgacgatgaggatgaagaagaagatgacaatgatgatggatcgcttggttttggtgtgggattacgaggtcgtcggctggattctcgagaatcctgtcgtcgccctccgttgttttcccggcgccgatctctgttgtcctcatcgttatggcggtgtcctcgaccagtatcgccctgcatccgcctctcacgatcatcatgatcgtggcgattgtgagggcggggcgtcggcggcggcaagcggcgggcaagcgttggtggagcggtggcggcgggcgagcgacggctccgggctcggga

SEQ ID NO: 79826 - DNA, 4977 bp, Oryza sativa
  Clone ID: PAT_MRT4530_79510C.1
tcaaaagccattatcctccatatgttgacttattaatgtgaatctgttgatgcagaccgcaagatcaaatctcaagctcaattcgacgtccttgttggcaagatcaaaaaacttgaaggagcccgggatgaggttgctaacgctgctgccccaattgttcaagcaatgttctttaataacaacggcccgagtgcacttgatgcttctgaaattttcgataagctgagagttgctccggatacatatttcaagaacatcaaataagctggaagtatgggagcaagtctggcgttggcgatgaccaaatctctttatccaagggttgatatagatgccattgatggctttgcagacgggacgagcgaagaagctgctcttgacctcatcagcgatgcgcaaaaagccgctgacaagattgctgctgatgtagttgagagattccaggacaccgatcttcgaccgactggtcctgataattctgatgatgaaaagactgactgacttgttgagcctaaaaccagcatagggacgtagtcggtcaaaaacgcgtgctttgatcccttgaagtatcatgccgttagcgcgctcgacttgtccgttactcatagggtgtgccacggaggcgtaacaaatgccgaagtcttcacaaaagtctttaaatgctccgccagtgaattgagtgccattatcagtgatgatccgattaggtaccccaaaccgatgcacaatgttgatgaaaaaatctctagctttatctgctgtgatcgtgatgaccggtttagcctcaatccacttggagaatttgtcgatagccacaaagagatgcgtgtaaccgccgactgcccttttaaacgggccgaccatgtcaagcccccagaccgcaaatggccaggacaacgggatggtttgcaactcttgggctggcaaatgagtttgtctggcaaaaaattgacaaccttcgcatgtccgctcaatcttgtccgcttcggacacagttgtaggccagaaaaaaccttgccagtaagctttgccgacaatagtccgtgcagcagcatgattaccacaaataccagaatgtatatccttcagcaattgtctcccttcctccaaagatacacagcgctgcagtattcctgacggacttttcttatacagttcagcttcatgaataatgtaaagtctgctgcgtctggaaatccgctcggcttcatttttgtcttgagggagttcttgtttgctcaaaaattttataaacggttctctccagtcagcttcaatcatgcttacgccttgagcatccatggcttcgactgtctcttttctaggcacggtcggttcataaagatgttcgacgaacacaactgaaggagctgcttcccgttttgaaccaaaattggccagtctatcggctgcctcattgttatgtcgaaggacatgggtgagctcgagtccatcgaatttatcttccagcttgcgtacctcttgtcggtaagcggtcatattatcatctagacatgaccactctttcatgacttgattaacaaccaactgagaatctccacggacgattaatcggcgaatgcctaaagagattgcaatccttaatccatggagtagcgcctcgtattccgccacgttatgggacgcagaaaaatgtttccacaatacatagctcaatctttctccagtcggggaaatcaagacgaccccagctccagtgcctgtgagcctcttcgacccatcaaaatgcatagtccaatactccatcttttcctctggcatgtcttcttggcactcggtccactcggcaaggaaatcagctaaagcttgtgatttgatcgaagttcgtggcttgaacgatatatccaaagacatcaactctaaggcccaattcgcaatccgtccatttgcttcgcgattgtgaagtatatctccgagtggaaacgatgtgtccaccgtgaccgagttactttgaaagtagtgagataatttccggctgagtgccgccatgcaaccagtcagcttttggacgtctttttgggagcttggcggtttcatgttgaggatggcgttgattttcttcgggttgggctgtatgcctctttgagataccataaatccgagcaacttccctgacggtactccgaagatgcacttttccgggtttagtttcatcttgaaagcacgaatgcttgtaaaagtttcttctaaatccgcaatcaggtcatccttctgcttggtcttgacgactatatcatcaacataagcttcgacattgcgaccgatctgaattgaaaaacatctttgaatcatgcgctgataggttgctcctgcgttcttcaatccaaagggcattgtgatgtagcagtaggccccaaagggcgtaataaacgaggtcttcaagcagtcggattcttttagtcggatctgatgatatcccgagtaacagtccaagaagctgagtaactcgcagccggccgttgagtcaaccacctggtcaatgcgaggtaacccaaaagggtctttgggacaagatttgttgaggtcggtataatcgacacacatgcgccattgccccgtctttttccgaaccagaactgggttagccagccagtcgggatgaaggacttccttaataaagcctgctgctaacagcttggttaattcctccttgatcgcatcctttctgtcctgtgcaaaacggcggagtcgttgcttgatgggtttggcgtcttccttaacatgtaaagagtgctcaatcacctctctggggataccaggcatatcggatggtttccacacaaaaatatctttattatcctcaacatgatccgagaggtcgaacttaattgctatctctgaccaccgaagatattggggcgtgttaggctgaaccgcattgatctcccgttctgttagcttctgttttctcttagactcataagccaggggtccgccgaagatgtgattaagttctttgcgatgatcttgaaaaccagtcggggcatcgtcttcatcatctttcttctttgatgtgccttgatctccgtctgaaggtttacgtgcgttcttgacgtattgctccgcgaactgtttgtagacgaagcaatgcttgcgatccttgtggttgttacttccactccctcctgcggtcggcgtgtccttctttggcttccaagtggtgcccgactgtttggacgcggtaatagcatattcggctttggcatactcgtgggctttttcaaacatctgcttaaccgtcctgggaggtttacgcccgaacttgccgactaggtcctcgtggcgaatgcctttagtgaaggcggcgatgatgatgtcgtcggtgatgtcggagatcttgttgcgttgttcggagaagcgtcggatgtaatctcgaagggattctccagacttctgaacgacattgtagagatcaaactgtgtgccagggcgttcaaaggtgccctggaagttggcgatgaagtgatcacgaagttccgcccatgatccgattgtgccacggggtagtccgtggagccaggatcgggcggagttcgctagggccacaggtagatagtttgccatggccttgctgtctcctcctgctgcgcggattgcgagtccgtagacggtgagccaagactccggattagtggtgccgtcatacttctcgattccagtcggcttaaagccggctggccaatccactcgacgcaggtcattagtgaaggcagctactccatccacgtcgtcgtcgtagcgatttggtgaatggcggtgacctcgtgctgcacggcgctggttgatcgtgtcgcgaaggtcgacgggacgctggtgaggtggagagcgaggccgttcgactcggcgctccctgtgacgttcgggaggcgagtgaatagatcgttcgtcatgacccctgctcctgcgactagatcctgtgccgatgatgctgaggcttggctgatgataatcatgagatcggaggtgagggactcggctatcagtcggggtgcgggtgcttgcggagttggctggaaccgaggcagcgatcatggtcttcgtctggttcaagatgttgacaacatgatcaacttggttgagtgcgtcttccttgaggagggtgtcgaggagagtgattgctgcaaccgcgttctggtcttgttgcccaatgagctctctcgctcggcgcccagattccaaggcgcgttgccgtcgatcttcagcctcctttgcaatccgttcgtgatcttgttgctcgcgctgtagtcgttctcgctcctgtcgctgtcgctcttcctccagtcggcgacgttcagcttcttgccgtgcgcgatcttggtccgcttctcgggcttggcgctgttcctccgtttcgttgtcagccatgaatacgccgaagaagaggagcgtgtaattatcctcatagctgtcgtcgaagttgtcgaggtcgccgtggtcatagtggtagccgaaatcgtcgtagtcgaggatctcggttggtcgagaactgacgccgggggagctaaggtaaccatccaactcttccgtcgagactgtcccaagaggttggagtataacgccaacctctctagatctagattggatcggggccgaagccggagctcgcctagatcttcgagtgggagatgtcttggcagtgaagacagcggccaaatcatcaggaagtttcatcaggattgagggataggacccgtcgtcttgatctggtcgcggaagagtagattggatctcgtccgagtggtttgaagccgactcgggagagatgctcttggagtaggcctcggccgagttcggaataccgaatggcacggggacctggtctctccccgactggttcgggtccgagtcaaggagagagatcttgccgaagtcgttggtgatgaagttgaggctgccgaaccggaacgcctgcccgggagggaaggcgaagtcgtcgatgccagaaacgaaacccat

SEQ ID NO: 79827 - DNA, 381 bp, Oryza sativa
  Clone ID: PAT_MRT4530_79511C.1
atggcgatgcacagtgcatcttcctccatccacccaacaatccacccagttctattctacattcttgcaggtccatacattcttctatggcttatccccgccccagctcaagtacaatccggcgaagaaatcattagtactttgaagtatgagttggaagagaagagaaaccaggttcatcgtcttcaagacgacattgagaagtgccatgttctgattgaggacaatgctgctaagttgaaggacaacgaacagaatcgagtggagctgcaagaacaaactgacagatgccaaagctctgttaggttctggaaatatctgttttggttaatcctgttaggattagtcgccagcaactatattgccccaaaaatgatttga

SEQ ID NO: 79828 - DNA, 3072 bp, Oryza sativa
  Clone ID: PAT_MRT4530_79512C.1
atggcacggggctccgctctgctcgatggtagcgtgctgccgccttcccgcatcgtgagcgagaggcaggccgggctgccgcgccgcttcatgccggaacctgccaccggccgggagatagtcacgctgggcgagggacgcccggcgccatgctacccggggcggtccgtcttcttcctcccttttgcaatggcagggctggttccgccattttcttctttcttcatggatgttctggagttttacgatctccagatggcgcatctcacccccaacgcggtaatgacattggccatcttcgcgcacctgtgcgagatgttcatcggagtgcgcccatcccttcggctgttccggtggttcttcaccgtacagtcggtgtcgccgccgtcggtggttggtggctgctacttccagccgcgggggccggtgctgaaccgctacatcccctgcgtcctccgcaagaagtgggatgactggaagagcgactggttctacactcccctcgccgacgaagcgcgcctccgacttccgagccagcccccggcgcaggccttcagctggcgggcgccggtagatctgggagatggctatgatgccgtcctcgaccgcctggcgggcctgcgatcccaggggctcacaggggccatggtgtacggcgactaccttcgtcgccgtattgcgccgctccagcggcgcgcccggggcgcctgggagtacaccgggtccgaagactacatgaggacccaccagggagtcagatgggactgggctcctgaggacttcaagatagtggtccaacgggtgctgaatctcagctccgtggaggcatccctcattccccaaggagtcctccccctctgcagcgatccagaccgcgcctccatcctgaccatcatgcaggcggtcggggcgtcggaggagcgggctcctcgaggccacgatggcgcgggcaggagccgcaggggggaacaatctaccccgggagggggtcgtgcttctgggccccgcgacgggggcccggggagcagccgccctgccgacgcccgggggaagaggaagcagggaggaacccctcccccatctcctccccgagggggcggggcggcgcgtgccagcagcaggcgcccggagggggccacgccgacgtcgcagcccgagggggagcgaaagaagaagcggctccgcaagatgggggggacagaaccatcccggggaaaccttatttcccctccaaggtggtcgtttaaccgaccccctcgcagatcccgtcgcgtccctcccgccattccaagtccggccagtctgaggccgaggatccggcggccgcagaggctcggaggcgggattctgaccggcgagaagccgcggatcgcctacgggaagccgaggaggccgctcgggaggccgcccgggctcgctaggccgaggaagccgctcgggaggaggccggactccgccaggccgaggcgacgacatcctccgaggcgacccgtgaaactgaccggcaagaggccgcggatcgccttcgggaagccgaggaagctgcccaggcggccgtccgagctcaccaagctgaagaagccgcttaggaggaggccagactccgccaggccgaggcggcgacgacttccgaggcagctcgcgacgaggccgcgggcgcatcgcttgggcccactccctcaggcgacgctcaggaccaaccaggccttggccgtcgcaaacaccacggtgttggacgggttaagtgcccaggtggaggccctgcaagcagagcgggcggagctcgacgccgcatgggcgcgtgtcgaagaggggcgacgctcggtggaggccatggtggaagtgggccgcaaggcacaccgccggcacgtctcagagcttgaagcccgtcggaaggtgctgggggagatcgccaaggaggtggaggaggagcggggggctgccctcatcgccaccaccgtgatgaacgaggcgcaggacaccctccgccttcaatacggaagctgggaggcggagctagggaagaagctcgacgccgcccagggggtccttgacgctgccgctgcccgagaacggcgggcggcagagaccgaagtggcatcccggcggcgcgaagaagcccttgaggcccgtgccatggcgctggaagagcgtgcctgcgccgtggagagggacttggcggaccgcgaggccgccgttgccatccgggaggcaacgctggcggcgcacgaggccgcctgcgccgaagaggagtccgcgctccgcctccgcgaggacgcgctcaccgagcgggagcgagctctcggggaggccgaggccgcggcgcaacggctggcggacagcctgtccctccgcgaggcagcgcgggaggagcaggcgcgccgcaatctggaaggtgcccgtgccgagagggccgcactgaaccagcgggccgctgagctcgaggcgcgggcgaaggagctggacgcgagggcgcgcagcggcggggcggccgcgggcgaaagcgacttagccgcccgcctcgcagctgccgaacacaccatcgccgatctgcagggcgcgctagactcgtccgccggggaggtcgaggccctccgcttggcaggcgaggtagggcccggcatgcttcgggacgccgtctcccgtctagatcgcgccggccggcaggcgggcctctggggcgggcggactgtgaagtacgccgccaatcaggggggcctcgcccagcgcctctcggagatggccgggactctccaacggctccccgaggagctcaaggggacgattaagtcatcctcgagggacctcgcccgaggagcggtggagctcgtactggcgagctaccaggccagggaccccgacttctctccctggacggtgctggatgagttccctcccgggaccgaggacggcgcgcgcgcgcaggtccgggatgccgccgaccatatcgtccacagcttcgagggttcggcccctcagctcgcgttcgccctcaactccgacgaggagggcgatgacggcggtgtgggcgacagtggcgacgaggctgtcgacccgggtgcatcggagtga

SEQ ID NO: 79829 - DNA, 644 bp, Oryza sativa
  Clone ID: PAT_MRT4530_79513C.1
tggctactggctagagcttgatagctttgcagatcttgctgtcaatcagccaccgcgcagcaagaacgaacaagatgccgtcgtccgcgcgttccgcttcgcccatcagaccgcaaccaacgaaaatcctgcgcccccggcggataggattttctccgaacgcatagcctccatgtctgccgccgccgccggaaagagattccccgtcgacgcgaccatctcggtcggggctcctacttctccgccgatggggagacgaaggcggcagacggaacgcttacacatggccgaagatggcgatggcgagtttgcctttgatctgaacgagcctccgttggagcacggcaatggttttgatttgaacttgccactaaatgaatttggtgcagtcgatttcgattatgtacaacaccttgctgaacatgtcatggctctcgttgaagtaaaccatcgaaggaaggaaagacatgaccgaagaagtgagaaaacaagtttatcaagctttgttggctagaagcaagaatgggaaactaggcaagaaagatacaagagttgttgcagatcagtttgttcatcacattacgctgttttggagcaaccttagtagaactttaacttttttctgttctttctgttcttatgac

SEQ ID NO: 79830 - DNA, 4791 bp, Oryza sativa
  Clone ID: PAT_MRT4530_79514C.1
atgggtttcgtttctggcatcgacgacttcgccttccctcccgggcaggcgttctggttcggcagcctcaacttcatcaccaacgacttcggcaagatctctctccttgactcggactcaaaccagtcgagaagagaccaggtccccgtgccattcggtattccgaactcggccgaggcctactccaagatcatctctcccgagtcggcttcaaaccactcggacgagatccaatctactcttccgcgaccagatcaagacgacgggtcctatccctcaatcttgatgaaacttcctgatgatttggccgctgtcttcactgccaagacatctcccactcgaagatctaggcgagctccggcttcggccccgatccaatctagatccagagaggttggcgttatactccaacctcttgggacagtctcgacggaagagttggatggttaccttagctcccccggcgtcagttctcgaccaaccgagatcctcgactacgacgatttcggctaccactacgaccacggcgacctcgacaacttcgacgatagctatgaggataactacacgcccctcttcttcggcgtattcatggctgacaacgaaacggaggaacaacgccaagcccgagaagcggaccaagatcgcgcacggcaagaagctgaacgtcgccgactggacgaagagcgacagcgacaggagcgagaacgactacagcgtgagcaacaagatcgcgaacagattgcaaaggaggctgaagatcgacggcaacgcgccttggaatctgggtgccgagcgagagagctcattgggcaacaagacgtcgatggaacagcgggcacctttgaacgccccggcacacagtttgatctctacaacgtcgttcagaagtctggagaatcccttcgagattacatccgacgcttctccgaacaacgcaacaagatctccgacatcaccaacgacgtcatcatcgccgccttcactaaaggcattcgccacgaggacctagtcggcaagttcggacgtaaacctcccaggacggttaagcagatgttcgaaaaagccaacgagtatgccaaagccgaagatgctattaccgcgtccaaacagtcgggcaccacttggaagccaaagaaggacacggcgaccgcaggagggagtggaagtaacaaccacaaggatcgcaagcgtaagcccgaagaacttgtggcgaccacctctccatcttcccgacaacgttcccgcgtcaacaccttcgacaagatattgaactcccaatgtccacatcatcccaactccaaccacgtggccaaagattgcttcgtctacaaacagttcgcggagcaatacgtcaagaacgcacgtaaaccttcagacggagatcaaggcacatcaaagaagaaagatgatgaagacgatgccccgactggttttcaagatcatcgcaaagaacttaatcacatcttcggcggacccctggcttatgagtctaagagaaaacagaagctaacagaacgtgagatcaatgcggttcagcctaacacgccccaatatcttcggtggtcagagatagcaattaagttcgaccgctcggatcatcccgaccgagtggtccacccgaggcggtaccccctggtactagacccagtggttcgcaatgtcaagctccgacggactctcatcgatggtggcagcgcactcaacattcttttcgctaagaccctggacgatatgcagatttctcgcacggaattaaagccgagtaatacacccttccacggtgttatcccaggattgtcagctacaccactcggccagatcactcttccagttagcttcggcactcgggagaattttcgcacagaaaatgtttgtttcgaagttgctgatttcgagacagcatatcatgctatacttggacgaccggctttagctaaatttatggccatcccacactacacctacatgatgatgaagatgcctggtcctcgaggagtcatatcactatggagcgacatcaagcaggccgtcacatgcgacaaagaaagttgcgagatggcccaaacccacgagactactctcgcctgcgaagagatccgactggctgagaccacggcaagcgagggagaagtgcctgcaaccaagctgacgaagaccgaagaaagtgatgccaagacgaaaaagattcccttagatccctccgatcctgataagactgcttcctggtttggaaaaagacggggcaatggcgcatatggtgtcgattataccgacctcaacaaatcttgtcccaaagacccttttgggttacctcgcattgaccaggtggttgactcaacggccggctgcgagttactcagcttcttggaccgttactcgggagatcatcagatccgactaaaagaatccgactgcttgaagacctcgtttattatgccctttggggcctactgctacatcaccatgccctttggattgaagaacgcaggagcaacctatcaatgcatgattcaaagatgtttttcaactcagatcggtcgcaatgtcgaagcttatgttgatgatgtagtcgtcaagaccaagcagaaggatgacctgattgcggatttagaagaaacttttacaagcattcgtgctttcaagatgaaactaaacccggaaaagtgcatcttcggagtaccgtcagggaagttgctcggatttatggtatctcaaagaggcatacagcctaacccggagaaaatcaacgccatcctcagcatgaaaccgccaagctcccaaaaagacgtccaaaagcagactggttgcatggcggcgctcagccggttcgtctcacgactcggcgagcgggggatgcccttcttcaagttgctgaagaagactgacaatttccagtggggacccgaagcacagaaagcctttgaagacttcaagaaacttctcactactccaccagttttggcctcgccacatccacaagagccgctactgttatatgtgtcggcgaccacccaggttgtgagtacagtcctggttgtcgagcgtgaagaggaaggccatattcaaaaagtccaacgttcaatttatttcgttagcgaagttttagccgactccaagacaagatatcctcagccacgaacttcgatcaagtcacaagctttagctgatttccttgccgagtggaccgagtgccaagaagacatgccagaggaaaagatggaatattggactatgcattttgatgggtcgaagaggctcacaggcactggagctggggtcgtcttgatttccccgactggagaaagattgagctacgtattgtggatacatttttctgcgtcccataacgtggcggaatacgaggcgctactccatggattaaggattgcaatctctttaggcattcgccgattaatcgtccgtggagactctcagttggttgttaatcaagtcatgaaagagtggtcatgtctagatgataatatgaccgcttaccgacaagaggtacgcaagctggaagataaattcgatggactcgagctcacccatgtccttcgacataacaatgaggcagccgatagactggccaattttggttcaaaacgggaagcagccccttctaatgtgttcgttgagcatctttatgaaccaaccgtgcccagaaaagaagcaattgaagccatggatactcaaggcgtaagcatgattgaagccgactggagagaacctctcataaaatttttgaccaaacaagaactccctcaagacaaaaatgaagccgagcggatttccaggcgcagcagactttacattattcatgaagctgaactgtacaagaaaagtccatcaggaatactgcagcgctgcgtatctttggaggaagggagacaattgttgaaggatatacattctggtatttgtgctgtgtccgatgcggacaagattgtgcggacatgcgaaggttgtcaattttttgccagacaaactcatttgccagcccaagagttgcaaaccatcccgttgtcctggccgtttgcggtctgggggcttgacatggtcggcccgtttaaaagggcagtcggcggttacacgcatctctttgtggctatcgacaaattctccaagtggattgaggctaaaccggtcatcacgatcacagcagataaagctagagattttttcatcaacattgtgcatcggtttggggaacctaatcggatcatcactgataatggcactcaattcactggcggagcatttaaagacttttgtgaagacttcggcattaaaatttgttacgcctccgtggcacaccctatgagtaacggacaagtcgagcgcgctaacggcatgatacttcaagggatcaaagcacgagtttttgaccgactacgtccctatgctgaagcaatgttgttgagtgaagtggaatttgaatcactacgatttcggaacttcaacgaggagggctatgaagagggccgagtagacgacatcaatcgattagaagaagcccgagaagcagctttcattcagtcgactcgatatttgcaagggttgcgccgttatcataatcggaatgttcgatcgcgagcctttttagtcggtgacctggttctgaggaaaattcaaacaacacaggatcggcataaattatctcccttatgggaaggaccgttcataattgctgaagtcactcggccgggttcttatcgactcaagcgcgaagacggtactctcatcaacaattcttggaatattgaacaccttcgtcgattttacgcttag

SEQ ID NO: 79831 - DNA, 480 bp, Oryza sativa
  Clone ID: PAT_MRT4530_79515C.1
atccgcactgtacatgtggtgtatgctacagaccacgtgatcctctgacccccagagctctgcactctgcgcgtcaagcgctctctgtgtgtgacactctgggggggctcaaaaactcgagcgctcatatgtgacgagacacatatacacatatggagtataagagaagcactaatgtgctcttgtgaaaaaaaaaaaaaaaaaaaaaaaatataaaaaaaaaaaaaaaaaaaaaaaaaaaaaaaaaaaaaaaaaaaaaaaaaaaaaaaaaaaattttacaaaaaaaactttcccatttaaaaaattataaaacaacaatgaaaagaaaaaaaaaaaaaaaaaaaaataagggggggacagtgggggggccccaaaaaaacaccaccttttcttcccgggaaaaaccattttaatggtgccccaaaagggaaataaaataccaaccctaaccccccgtttaacaagaaaaaccgggaaaa

SEQ ID NO: 79832 - DNA, 2943 bp, Oryza sativa
  Clone ID: PAT_MRT4530_79516C.1
atggcacgaggctccgctctgctcgatggtagcgtgctgccgccttcctgcatcgtgagcgagaggcaggctgggctgccgcgccgcttcatgccggaatctgccaccggccgggagatagtcacgctgggcgagggacgcccggcgccagactacccggggcggtccgtcttctttctcccctttgcaatggcagggctggttccaccattttcttctttcttcatggatgttctagagttctacgatctccagatggcgcacctcacccccaacgcggtgatgacattggccatcttcgcgcatctgtgcgagatgttcattggggtgcgcccatctcttcggctgttccggtggttcttcaccgtgcagtcggtgtcgccgccatcggtagttggtggctgctacttccagccacgggggccggtgctgaatcgctacatcccctgcgccctccgcaagaagtgggacgactggaagagcgactggttctacacccccctcaccgacgaagcgcgccaccgacttccgagccagcccccggcgcaggcctccagctggcgggcgccggtagatttgagggatggctatgacgccatcctcgaccgtctggcgggcctgcgatcccaggggctcacaggggccatggtgtacggcgactacctccgtcgtcggattgcgccgctccagcggcgcgctcggggcgcttgggagtacaccgggtccgaagacttcatgaggacccaccagggagtgagatgggactgggctcctgaggacttcaagatattggtccaacgggtgctgaatctcaactccgtggaggtgtccttcattccccaaggaatcctccccctctgcagcgatccagaccgcgcctccatcctgaccattatgatggcggtcggggcctcagaggagcgagctccaaagggccacgacggcgcaggcgggagccgcaggggggaacaatctaccccgggagggggtcgtgcttctgggtcccgcgacaggggcccggggagcagccgccctgccgacgcccgggggaagaggaagcagggaggaacacctcccccatctcctccccgagagggcggggcgcccgagggggagcgcaagaagaagcggttccgcaagatgggggagacagaaccatctcggggaaacctcatttcccctccaaagtggtcgtttaaccgaccccctcgcagcgagatcccgtcgcgtccctcccgccattccaaatccggccagtctgaggccgaggatccggcggccgcagaggcccggaggcgggaatctgaccggcgagaggccgcggatcgcctacgggaagctgaggaggccgcccgggctcgccaggccgaggaaaccgctcgggaggaggccgcccgggcccgccaggccgaggaagccgctcgggagaaagccggatttcgccaggacgaggcgatggcgacttccgaggcagcccgcgacgaggccgcgggcgcgtcgcttgggcccactccctcgggcgacgctcaagcgacaactttcggggcagctggcgacgaggctacgggcacgtcgcttgggcccactccctcgggcgacgctcagggccaaacgggtccggggaacatccccgagtccggcacttccatcggtggcccgagccgcatggcatcctttccaaggcggctcttccccacgccttctatcgccccactgaacgcagagccccttctgcaggccttggccgccgcaaacaccacggtgttggatgggttaagtgcccaggtggaggccctgcaggcagagcgggcggagctcgacgccgcgtgggcgcgtgtcgaagaggggcgatgctcggtggaggccatggtggaggtgggccgtaaggctcaccgccggcacgtctcggagcttgaaacccgtaagaaggtgctggcggagatcgccaaggaagtggaggaggagcggggggctgccctcattgccaccaccgtgatgaacgaggcgcaggacaccctccgccttcaatacgggagctgggaggcggagctagggaagaagctcgacgccgcccaaggggtgcttgacgctgccgctgcccgagaacagcgggcggcggagaccgaagcgacgtcccggcggcgcgaagaggcccttgaggcgcgcgccatggcgctggaagagcgcgcctgcgtcgtggagagcgatctggcggaccgcgaggccgccgtcaccatccgggaagcaacgctggcggcgcacgaggctgcctgcgccgaagaagagctcgcgctccgcctccgcaaggacgcgctcaccgagcgggagcgagctctcgagggggccgaggccgcggcgcaacagctggcggacagcctgtcctccgcgaggcagcgcaggaggagcaggcgcgccataacctggaagggcgcgctggactcgtccgccggggaggtcgaagccctccgcttggcaggcgaggttgggcccggcatgctttgggacgccgtctcccgcctagattgcgccggtcggcaagtgggcctctggagagggcggaccgtaaagtacgccgccaaccagggaggtctcgcccagcgcctctcgaagatggccggggctctccaacggctccccgaggagctcgagaagacaattaagtcatcctcgagggacctcgcccaaggggcggtggagctcgtcctggcgagttaccaggccagggaccccaatttttctccatggatggcgctggatgagttccctcctgggaccgaggaccgcgcgcgcgcgcaggtctgggatgccgccaaccatatcgtcgacagcttcgagggctcggcccctcggctcgcgttcgcccccaactccgacgaggagggcaatgccggtggtgcagacgacagtgacgacgaggccggcgacccgggcgcatcggattga

SEQ ID NO: 79833 - DNA, 234 bp, Oryza sativa
  Clone ID: PAT_MRT4530_79517C.1
atgcgagagcgctggggccgcgactgcgatccacgcagtctcgcgctacaggaacacgagagcgcccatgcggtctcgcacattggttgtgcgacaccgtacgctctcgcaaaaccaacacgcgagaccgcgggccctccacgcgccatatcgcactcccactgtgcgataccgtggctgcccgatcttccaactaaaaagtcccgctatcgcgctctaaaagagcgatactga

SEQ ID NO: 79834 - DNA, 3297 bp, Oryza sativa
  Clone ID: PAT_MRT4530_79518C.1
atgggtcatatctacctccactccgccggaagcagatgcaacgtgggagctcggttgtctgccgatgacgtgaccggcgtcagaccagtcacagaccggtcattcttgtccaccacgtgtcagtttagcacgccgcacgtctgcccttcttcatacaatgacttccttgcaatggttgcgatgaagcctggaatgtatctggccgggactgacgtgccaactccaggagttaacacgccggctccggctagggacgagagcatggaggctctcatcatttcgatgggacggggcgaggcgtgccgggctgccgcgccgattcatgccggaatctgccaccggcgggaggtggttgcgcggggcgagggacgcccggcgccacactacccggggcggtccgtcttcttcctttctttcgcaatggcagggctggtcccgccattctctaatttcttcatggatattctggagttttatgatctccagatggcgcacctcacgcccaacgcggtaatgacgttggccatcttcgcgcatctgtgcgagatgttcatcggggtgcgcccatctctccggctgttccgatggttgttcaccgtacagccggtatcgccgccgtcggtagtcggtggctgctacttccagccgcgggggcaggtgctgcaccgctacattccctgcgtcctccataagaagtgggacgactggaagagcgattggttctacacccccctcaccgacgaagcgagcctccgacttccgagccagcccccagcacaggcctccagctggcgggcgacggtagatctgggagacgactacgacgccgttcttgaccgcctggcgggtctgcgatcccagggactcacgggggccatggtgttcggcgactacgttcgtcgccggatcgcgccgctccaacggcgcgcccggggcgcctgggagtacaccgggcccgaggactccatgaggacccaccaggggtgcacatgggactgggaccctgaggacttcaggatggtggtccaacgggtgctgaatctcagctccgtggaggcatccctcatcccccaaggtgttctccccctctgcagcgatccagatcgcgccaacatcctgaccatcatgcaggcggtcggggcgtcgggggagcgggccctccgaggccacgatggcgcgggcgggagccgcagaggggaacaatctaccccgggagggggtcgtgcttctgggccctgcgacgggggcccggggggcagccgccctgccgacgcccgggggaagaggaagcaggagggtaccccttccccatctcctccccgagggggcggggcggtgcgtgccagcagcaggcgcccggagggtgccgtgccgacatcgcagcccgagggggagcggaagaagaaacggctccgcaagatgggggggaccgagccatgtcgggggaacctcatctcgcccccgaggtggtcgtttagccgacctcctcgcagcgagatcccgtcgcgccccctccgccattccaagtccggccggtccgaggccgaggagacagcgaccgcgaaggcccggagacgggaagctgaccggcgagaagccgcggaccgcctccgggaagccgaggaagccgcccaggaggccgtccgggttcgccaggctgaggaagccgctcgggaggaggccagactccgccgggccgaggagtccgtccgggaggcggaggcagggcacgcacgccaggcggcctgccaagcccccgacctgactccgcccgaggcgacgacgacttccgaggccacccacgacgaggccgcgggcgcaccgctcgggcccgaccccttgggtgacgctcaggacgagccagcttcgggggacgcccccgagtccggcacgtcgatcagcgggccgagccgcgcggcaccctcaccgaggcggctctctcctctgccttccgctgccccaccgagcgcggagcccctcttgcaggccttggccgccgcgaacaccacggtgttggacgggttaagcgcccagatggaggtcctgcaggcagagcgggcggagctcgacgcggcgtgggcgcgcgtcgaagaggggcggcgctcggtggaggccatggtggaggcgggccgcaaggcacaccgctggcacacctcagagctcgaggcccatcgtagggacctggcggagatcgccagggaggtggaggaggagcgggagactgccctcatcgccaccgccgtgttcaacgcggcgcgggacgacctccgcctccaatacgggagccgggcggcggagctagagaagaagctcgacgccgcccggggaatccttgatgctgccgctgcccgggaacggcgggcggcggagatcgaggcggcgtcccggcagcgtgaagaggcccttgaggctcgcgccacggtgctggaggagcgcgcccgcgcgaaggagagggacctggcggaccgcgaggccgccgtcgccgtccaggaggcaacactggcggcgcacgaggccgcctgcgctgaagaggagtccgcactccgcctccgcgaggacgcgctcaccgagcgggaacgagctctcgaggaggccgaggccgcggcgcagcggctggcggacagcctgttcctccgcgaggcagcgcgggaggagcaggcgtgccgcaatctggaaggcgcccgcgccgagagggccgcactggatcagcgggccgctgagcttgaggcgcgggtgaaggagctggacgcgagagcgcatagcggcggggcggccgcgggcaacggcgacctagccgcccgtctcgcagccgccgaacacaccatcgccgagctgcagggcgcgctggactcgtccgccggggaggtcgaggccctccgcttggcgggcgaggcgggcctctggggtgggcggaccgcgaagtacgccgccaaccaggggggcctcgcccagcgcctctcagagatggccgggaccctccagcggctccccgaggagctcgaggagacgatcaagtcatcctcgagggacctcgcccggggggcggtggagctcgtactggccagctacaaggccagggaccctgacttctctccgtgggcagcgctggacgagttccctcccggaaccgaggacggcgcgcgcgcgcaggttcgggacgccgccaaccacatcgtccacaacttcgagggtacagcccctcggctcgcgttcgccctcgactccgacgaggagggcggtgacggtggtgcggacgacagcgaggacgaggccggcgacccgggcgcgtcggagtga

SEQ ID NO: 79835 - DNA, 327 bp, Oryza sativa
  Clone ID: PAT_MRT4530_79519C.1
gaattaagtacatcgagattattgtaatcatgataaaaaaaaaagaggacggttcaccagtcatacaatacggacaaccatgaaaccagtgtcccagcccagagccccagatcctggagcatcaagagtttttctgccgatctaaagctgttcttaaactctaaaagatgcatcggtcagcaagcctggagttggagcaatgacaaaggcaaacatgccattacatttacatgtccctgcttgttctttgcattaccaattgaaagtgtagagcatttcattgcagtctggtacaaggctcacttgctcagaacataactgtttcga

SEQ ID NO: 79836 - DNA, 655 bp, Oryza sativa
  Clone ID: PAT_MRT4530_7951C.1
tctttcctaaaaaatcggttttgggttatgctgttacagtttctttccatatttctttttcagatgttggggcctgtgtcccaactgcatgaagatttcatgcataacatttaaacaagtagcaaagcttctgtctggccatttttagacaagttgatacatcaatgatataattctttctcaatattttgtggttcaggaatttgatattttaggccaccgactgggtcttcgacaccacagaggaccgcgcctgccaaggtgattatcgccttgtttaacctctcagcaaggtggattatttttaatcaatccaaacatggcattgcggtgatttctcgtgggatccatgcgccatccagattatgttgcgcagtagtagagtttgcaagaattatttatttgttaacatatacgcgccaaacaattccacccaaaagccttaatctgtgaaaagaggttgggtaatctactcaatacttaacaactaatatgctgcactgtttatgttaatctgtagcttggatgaatctgatgtaacatattctgagtgcttgggtacagtaattatcactatgtactagacaatacattttgccaatgagaaggtatgtggaaggtgttatcgctttttttttcttataaaagatatgct

SEQ ID NO: 79837 - DNA, 2943 bp, Oryza sativa
  Clone ID: PAT_MRT4530_79520C.1
atggcacggggctccgcactgcttgatggtagcgtgctgccgccttcccgcatcgtgagcgagaagcaggctgggttgccgcgccgctttatgccggaatctgccaccggccgtgagatagtcatgctgggcgagggacgcccggcgccagactacccggggaggtccgtcttctttctcccctttgcaatggcagggctggttccgccattttcttctttcttcatggatgtcctggagttctacgatctccagatggcgcaccttacccccaacgcagtgatgacattgggcatcttcgcacacctgtgcgagatgttcattgggaagagcgactggttctatacccccctcgccgacgaagcgcgcctccgacttccgagccagcccccggcgcaggcctccagctggcgggcgccggtagatctgggggatggctatgacgccgtcctcgaccgcctcgcgggcctgcgatcccaggggctcaccagggccatggtgtacggcgactacctccgtcgtcggattgcgccgctccagcggcgcgctcggggcgcctgggagtacaccgggtccgaagactacatgcggacccaccagggagtcagatgggattgggctcccgaggacttcaagatactggtccaacgggtgctaaatctcaactccgtggaggcgtccctcatcccccacggtatcctccccctctgcagcgatccagatcgcgcctccatcttgaccattatgacggcggtcggggcctcagaggagcaggctcctaagggccatgacgacgcaggcgggagccgccgaggggatcaatctacccccggagggggtcgtgcttctgggccccgcgtcgggggctcggggagcagccgccctaccgactcccgggggaagaggaagctgggaggaacacctcccccatctcctccccgagggggcggggcggtgcgcgccagcagcaggcgcccggagggggccgcgccagcatcgcagcccgagggggagcgcaagaagaagcggctgcgcaagatgggggagacagaaccatcccggggaaacctaatttcccctccaaggtggtcatttaaccgaccccctcgcagtgatatctcatcgcgttcctcccaccatcccaagtccggccagtccgaggccgaagatccggcggccgcagaggcacggaggcgggaatctgaccggcgagaggccgcagaccgcctacgggaagctgaagaggccgcccgggaggccgcccgggctcgccaggctgaggataccgctcgggaggaggccgcccgggctcgccaagccgaagaagccgctcgggaggaggccgcccgggttcgccaggctgaggcgatggcggcttccgaggcagttcgcgacgaggccgcgggcgcctcgcttgggtccaccccttcgggcgacgcccaggaccaaacaggtccgggggcggctcgcgacgaggccgcgggtgcgtcgcttgggcccactccttcgggcgacgcccaggaccaaacaggtccgggggtggcccgcgataaggccggcgcgtctattggcgggccgagccgcgcggcatcttctccaaggcagcccttccccacgccttccgtcgccccgctgagcgcagagccccttctgcaggccttagccgccgcaaataccgcggtgttggatgggttaaatgcccaggtggaggccctgcaggcggagcgtgcggagctcgacgccgcatgggcacgtgtcgaggaggggcggcactcggtggaggccatggttgaagcgggccgcaaggcacaccgccggcacgtctcagatcttgaggcccgcaaggcggcactggcggagatcgctcgagaggtggaggaggagcggggggctgccctcatcgccaccactgtgatgaacgaggcgcaggactccctccgccttcagcacgggaactgggaggcggagctgaagaaaaagctcgacgccgcccagggggtccttgatgccgccgctgcccgagagcagcgagcgacggagaccgaagcggcgctccggcggcgtgaagaggccctcgaggcgcgcgccatggcgctggaggagcgcgcctgcgtcgcggagaaggacctggcggaccacgaggccgccgtcgcctcccgggagacaacgctggcggcgcacgagtctgcctgcgccgaagaggagtccgcactccgcctccgcgaggacgcgcttaccgagcgggagcgagctctcggaaaggccgaggccgaggcgcaacgagccgcactggagcagcgggctgccgacctcgaggcgcgggaaaaggagctggacgcgagggcgcgcatcggcggggcggctgcgggcgaaagcgacttagccgcccgcctcgcagatgccgaacacaccgtcgccgacatgcagcgcgcgctagactcatccgccggggaagccgaggccctccgtttggcgggcgagatagggcccggcatgctctgggatgcagtctcccgtctggatcgcgccggtcggcaggcgggcctctggaaagggcagacaataaagcctgccgccaacctgggaggccttgcccagcgcctctcgaagatggccggggctctccagcagctccctgaggagctcgagaagaccatcaagtcatcctcgagggacctcgcccaaggagcggtggagctcgtcctggcgagctaccaggccagggaccccaacttctctccgtggatggcgctggacgagttcccacctgggactgaagacagcgcgcgcgcgcaggtccgggatgccgccgaccacatcgtccacagcttcgagggctcggcccctcggcttgcgttcgcccccaactccgacgaggagggcgatgccagcggtgcagacgacgtggaagacgaggccggcgacccgggcgcatcggattga

SEQ ID NO: 79838 - DNA, 1531 bp, Oryza sativa
  Clone ID: PAT_MRT4530_79521C.1
atggagcggagggcgcagccggtgtcggcggcggtggcgccggtgacggggaggaggaagggtgcggcggcgagccggaagtggatggtggtgccggcggtgggggaggagcggagggtggagtttgggaagcaccagatcatgaagatgacggggctccccgggcgcgacctccgggtgctcgacccggtcctctcctacccgtccaccatcctcggccgcgaccgcgccatcgtcgtcaggctccagggcgtcaaggccatcatcaccgccaccgaggtgctcgtccccgaccacgacgacgtcctcctcgcctccttcctcctcgacctccgctcccgcctctccctcccggatgcggcgcctagcacgaatccggcggcggctgatcgcgggaacgggacggagcagggcgatcaggggagcgtgccaggtctggcgatcagcggtgctggcaacgccaagatcccgccctttgagttcaaggtgctcgaggtctgcctcgagcacgcatgcaaagacttggaatctcagacacgctctctggagaaggaggcgtatccggccttggacaagctgggatcgaaggttagcacgctgaacctggatcacgtcaggaatctgaagagccgcatggttgatctctcagggcgcgtgcagaagattagggatgagctggagcacttgctggatgacgacatggacatgtccgagatgtacctgacgaggaagctgtcgttccaagggctcagcggatcgctgagcagagcggattcacacaagtacgcatctgttgatcatgacgacgatagggaggaggaagaccatgacgatgagacagagagtggccgtgaaagttctgtttatgttaagcctgatatagaagagttggaaatgcttctggaagcttactttgtgcagatcgatggaacgctgaataccctgtaccatatccgtgaatacgcggacgacacggaggattacatcaacataatgctggacgagaagcagaaccagctgctgcagatgggcgtgatgctgacgacggcgacggtggtggtcaccgcgggcatcgtggtggtgagcctgttcggcatgaacatccacatcgacctgatgaaagacccggagacccccgagatggtgaggatgtccaacatgcacttttgggagaccaccttcggcacggtcgccggctgcatcgccatatacctcctggcgatctacgctgggaggaagagcaagatcctgcagtgatgcttcccaacagaggaagctaagcgtcaggttgcgagttctgcagcctggctgcgattttgctgggcagtggcgtagttgataggttgtgtatggatgtgatgcatttttgttgatttcgtatggtgtgggagcaataataatcgaacgatctctctccatttcctgctcttattagaagttagcacttagcactactatgttaaatttcggccaaaggaaccactatgttaaatttcggccaaaggaaccctttcagaaaaaaaaaaaaaaa

SEQ ID NO: 79839 - DNA, 3198 bp, Oryza sativa
  Clone ID: PAT_MRT4530_79522C.1
atggcaaactatttgcctgtggccctagcggattctacccggtcctggcttcatgggttaccccgcggcacaatcggatcatgggcgaaacttcgcgaccacttcatcgccaacttccagggtacctttgaacgccctggtacatattttgatctctacaacatctccgacattaccgacgatgtcctcatcgtcgccttcactaagggaattcgtcacgaagacctagtcggcaagttcgggcggaagcctcccaagacggtcaagcagatgtttgaaaaagccaatgagtatgccaaagctgaagatgccattatcgcgtccaagcagtcgggcaccacttggaagccaaagaaagatacgccgactacaggaggaagtggaagtaccaatcacaaggatcgcaagtgtaagcccaaggaacttgtggcaactacaacaccatcctcccgacaacgttcgcgcgtcaacacttttgacaagatcatgaattcccaatgtccgcatcatcccaattctaatcacgcggcgaaagattgcttcgtctacaaacagtttgcagaacaatacgccaagaacgcacacgacatgcagatccctcgcgcggaattaaggccgagtaatgcgccctttcacggagtcatcccagggctatctgccacaccactcggccagatcactcttccgattacttttggtactcgggagaacttccgcatagaaaacgtttgcttcgaagttgctgatttcgagacagcgtatcatgccatactcggatgcccgacgttagccaagtttatggttgtcccacactatacctacatgatgatgaagatgtctggtcctcgaggagtcatatccctgcggagtgacatcaagcaagccgtcacatacgacaaggaaagctgcgagatggcccagacccgcgagatcacgctcgcccaagaagaaatccgactagctgcgtccacagcaagcgaaggagaagtgcttgcaaccaagatgccaaagagcgaagaaagcgacgccaagaccaagaaaattcctctagatccttctgatcctactaagactgctgtaataggcgctgagttagattatatctttgcgtggaaaccatctgatatgcctggtattcctagagaggtgattgaacactttttacatgttaaggaagacactaaaccaatcaagcaacgactccgccgtttcgcacaggataggaaggacgcgatcaaggaggaattgaccaagctgttagcagcaggcttcatcaaggaagtccttcatcccgattggctggctaacccagtcctggttcggaagaagacgggacaatggcgcatgtgtgttgattacaccgacctcaacaagtcttgccccaaagatccctttgggttgcctcgcattgaccaggtagttgactcaacggccagctacgaactactcagttttttggattgctacttagaatatcatctgatccgactaaaggaatccgactgcttaaagacttcattcatcacgcctttcggggcctactgctacatcaccatgccctttggattaaagaacgcaggagcaacttatcaacgcatgatccagagatgtttttcaacccagatcggccgcaacgttgaagcttacgtggatgacgtagtcgtcaagaccaagcagaaggatgatttgatcacgaatctagaagaaacctttgcgagcatctgcactttcaggatgaaactaaaccctgaaaagtgcatcttcggagtatcgtcagggaagctgcttggatttatggtgtcccatagaggcatacaagccaacctagagaaaatcaatgctatcctcaacatgaaactgccaagctcccagaaagatgttcaaaagctgactggttgcatggcggcgcccagccggtttgtttcacgactcggaaactatctcactacttctaagctgcgaacttcgatcaagtcccaagctttagccgactttgtcgtcgagtggactgagtgccaagaagacatgcccgaggagaagatggagtattggaccatgcattttgatgggtcgaagaggctttcaggcaatggagccagggttgttttaatttctccgactggagaaagattgagctatgtattatggatacgtttttctgcgtcccataacgtggcggaatatgaggtgctgcttcatggattaaggatcgcgatctccttgggaattcggcgtctgatagttcgtggagattctcagttggttgttaatcaagtcatgaaagagtggtcctgcctcgatgataacatgaccgcctaccgacaggaggtacgcaagttggaagacagattcgatggacttgaactcacccatgttcttcggcacaataacgaggtagccgacagactggctaatttcggttcaaagcgagaagcagccccttctgacatattcgttgagcatctctatgagccaaccataccaaggaaagaaataattcaggctatgaacactcaagacgtaagcatgattgaagccgactggagagagcccctcataagatttttgaccaaacaagaacttcctcaagataaagatgaagccgagcggatctccaggcacagcaggctctatgtcatccatgagactgaactgtacaagaaaagtccatcgggaatcctgcaacgctgtgtgtctttagaggaggggaggcaattgctaaaggtctcaggggctactgtggagattatggatacattcaggcatctgtgtcgggctacgggccagtcgccgtttttcctggtctatggagcggaagcaatgttgccaagtgaggtggaatttgaatctctacgatttcgtaacttcagcgaggagcgctacggagaagaccgagtagatgacctcaaccgactggaagatgcccgtgaagcagccttaattcagtcggctcggtatttgcaagggatgagccgttatcacaatcgcaatgttcgatcacgagcctttttagtcggcgacctggttctgagaagaattcagactacacgggatcgccacaagttatctcccttatgggaaggaccattcataatttctgaagtcactcggccaggttcttaccgactcaagcgtgaagacggtactcctatcgacaactcttggaatatcgaacatcttcgtcgattttatggttag

SEQ ID NO: 79840 - DNA, 1570 bp, Oryza sativa
  Clone ID: PAT_MRT4530_79523C.1
ttttttttttttttttttttcagcaggtgccaaaacggaaaaattttccattattaaaaagacacctacaagtatgaaggcaagggccagtcttatcggatgacgccctcaagcccggaagttgattccaaatccaagccatgtgtttgatttgcatcccgattaattactagttttcggaatgtaaaacaaatgtggaagaagagtaatctgagtactgtttggttgactcgtttcgtcgagaatgggaacccgtcaacagattgaatacatcatcaggggtcgtcggggtcccgtccctgccacgccggatctggagggtaccgtgtgctgggacggcggagttgcacagatttgcggagagctgacggcggtccatgctcttcgtgatgggcccggcgggcagcggcgagattatatatagtggcgaaatgaaagcttgtgatggaccggggagtctggaagcatttaacgaaacaatgacaaagttgtgtgccttgattttattccagtataacaggggggggcagagatcgacggcggaatgcacgacaagcacccggctgcggaggcggatgaggatgccggggtgatgatagcgcttatgatgattacagcgcagcagcaggcaaaatcagcggagaagctgtggtcaagatggagcaacccttcaatatgtttgccttgtaagacagtctgtgcatttcttctggatggaataatgaccatgtaaatcatcatttgtagagtaaagattgatgagactaatcaatagaacaaaataattaaaaataacaaaaggcagaccagtgaattaaaatccagatctgaaaggaaaagaagcaaatgctagattcggtaccaggactcagttttcttttttcagcagagtagtgacctaactggagctgcctgcctcatcctcatacggcagcaaatggaggagcgcgcaagtggctggatgttcgttcatcttgatggagctgactttctcatgggagtggacggcggtgcagtggctggcacacttgctccacccacacccaaatcttaacctagtcgtggccgcaagctggcgtggctgtgcgaagttcttatttggtttctgctgggtagagtcggagctgcttcgtttaggggtgacgaagacttggcaacgatgacacattgcaatctctttataaggttgttgatgctagctgtgtgtaggaagtggttccttggttgtgtgggctgatgttcttcatgggtatcgtttatgcttgttcttttggcgttagggtagcatcacagtgaagtcgaagctgctgtgtcgcttgggcggcaagctcggcaacgataacatgtgtgggctgttgtgtcgctactttaacaagcttggacgatgccttgtgttgggctccgtcgtgatagtttaggttaggttaggttagttagtgtggtattgtagttgtggttttcgttcagttttccctaattaactggacactgtaaggttcggtcccgtttgctccttaaaatgggacaccttcttcttaatataaaacgtcggcaacggcctgaccgttcg

SEQ ID NO: 79841 - DNA, 2385 bp, Oryza sativa
  Clone ID: PAT_MRT4530_79524C.1
tcagttttccatcctctcatagaaaagaagataagcctcgcacttgagaacttcttctaaagagacttctctgatgctgtcatcacttgcacgaaaccatgaggaggagccactggtctcctgccgaggacttgctctcacataagcaaggaagtgccctgcatcgttgccaaggccgcggtgctcaacaacaccaactagacgatagctgagattatctttgtcttctgaactggggtccataaacagacccatatcaaggatctccttaaatctcacatgtcctatcaccttatgaggtcccaacaaagatctcatcagatgaatgactaatacaggtggcagcttgctaataaaatgttttttaattccacctttattccaatctttctgctcattttggttttcttccacttggtgtgcaccatgatgaagctttacttgctcccccctttcctcacttagtatgctggcattttgatcctggccgctcaacaggttggcctgtttctcagctggaatgcaactaggttcagcttcttgaacaccttcatggcattcaggtcttccgttggattgctcgcttcggcatgttatcttctctgacagttcactctggtctccatcaactgttatgtcctcattggtacttgacatcataggattactgtatttacctagattgatgcctggcttctgagcaaccttggagcaactctcacaagtccattctaccatctctgcttcaaaatgcaattccaaatacttgtctattgatgcaagagagttgataccctgcgcgttatcgcaagaaatgtcactactccgacttttcctaacttctactgagaaagtgtcagtcttggcttctgaactaacttctggctcactgaacacatcatcaagaacagcactgacatttttccctacatcacttcctgattctatccatgcattctctttccttagtgaaggccctatatcttctggaacatgggcatctgtttttgtcaaatccatttcctcaactttgacatcaggtaacatgttttgaggaaggaaatcaacagtctccccttggaccttatccttctgagtctgcaaagggcgacatacagcatccttgctatgaaagatctgttcaactttagtagaatcaactttcaaaggctcagaagttttcaccaataccacatcttccaattctgaaggactttgagaatcactgtcttcagcaatagtatgaatcttttctgggttacgcttgtcaacttctagttcagcatggatcttctgttgagatttatatcctttagtcctcggtggagatgcaatacttttggattgagttggtggaaggggcaccgagagatcatggaatgcaacatgtgaaactgaactaaatgagcaacatttacacgatatgtgagaagacagctgaccaccaaaaatggaatcagtaactgtaggagtcactgcatcatcttgcatgttaggaggatttgtccccctgtcctcctcatccaatttttttcgcaaacagcaaagcaattcatggttatcttgcataaaagctcctatgaaccgtgagtccgacttgcgtacataagccaagagccaagtcatgtccagcaggcctcctgtattgttcacaccgtatgtctgatcaaaaagatcgtacagtattgtaccaagggtccccagtggagtgtccggtcctaacatccttgcccgcagctttccaagcacaaggaggcactgcaccaatgaattcaagtagcaggtgtttccaagattcagtatccctttgatagcatgggcatgcccatcagctaacccagacacatgtgacctctgtcgtaggctttcccccatcatcatccttaacgctgatttcgctgggctctcttcgcgcggcaccccattgttgtcagtcatccccccatcatcatccttaacaccgatgtcataggcttcttcacacttgaagcagtacacccgattcaatctctcatagtacaaagcaatcgaatgctcttcttcgtgcatggcgtggatacaggcgtggttggcgcagaggcgcaactcgcattccaagcacaccatgatatcgttcgccgcggtgacgtcgcaggtgtaatcaccgcacaccgggacgtcctcggagaacctgagccccgacacgatgtaatcgacgtgatcctggtcagacatgaagtgctcgcaccgctcaacgccggtgccgctggcctccagcaacatcgcctggaaccactcagaatcgtccgccgccgccgacgccgacgcagccggcggctccaggcgcggggatttccacgggctcccggcagtatccgccgcccttgccctcttcccctcttccat

SEQ ID NO: 79842 - DNA, 2870 bp, Oryza sativa
  Clone ID: PAT_MRT4530_79525C.1
cgcggtgatgacattggccatcttcgcgcatctgtgcgagatgttcattggggtgcgcccatctcttcggctgttccggtggttcttcaccgtgcagtcggtgtcgccgccatcggtagtcggtggctgctacttccagccacgggggccggtgctgaaccgctacatcccctgcgccctccgcaagaagtgggacgactggaagagcgactggttctacaccccccttgccgacgaagtgcgcctccgacttccgagccagcccccggctcaggcctccagctggcgggcgccggtagatctgggggatggctatgacgccgtcctcgaccgcctggcgggcctgcgatcccaggggctcacaagagccatggtgtacggcgactacctccgtcgtcggattgcgccgctccagcggcgcgctcggggcgcctgggagtacaccgggtccgaagacttcatgaggactcaccagggagtgagatgggactgggctcctgaggacttcaagatattggtccaacgggtgctgaatctcaactccgtggaggcggccctcattcctcaaggaatcctccccctctgcagcgatccagaccgcgcctccatcctgaccattatgatggcggtcggggcctcagaggagcgagctccaaagggccacgacggcacaggcgggagccgccggggggaacaatctatcccgagagggggtcgtgcttctgggtcccgcgacaggggcccggggagcagccgccctgccgatgcccgggggaagaggaagcagggaggaacacctcccccatctcctccccgagggggcggggcggcgcgtgccagcagcaggcgcccggagggggccgcgccaacatcgcagcccgagggggagcgcaagaagaagtggccccgcaagatgggggagacagaaccatctcggggaaacctcatttcccctccaaagtggtcgtttaaccgaccccctcgcagcgagatcccgtcgcgtccctcccgccattccaagtccggggggtgggaggctgaggatccggcggccgcagaggcccgcgggcgggaatctgaccggcgagaggccgcggatcgcctacgggaagccgaggaggccgcccaggaggctgcccgggctcgccaggccgaggaaatcgctcgggaggaggccgcccgggcccgccaggccgaggaagccgtttgggaggaggccgcccgagcccgccaggactagatgttggcgacttccgaggcagctcgcgacgaggccgggacgcgtcgcttgggcccactccctcgggcgacgctcaggcgacaacttccggggcagctggcgacaggctgcgggcgcgtcgcttgggcccactccctcgggcgacgcttaggaccaaccgggtccgggagacatccccgagtccggcacttccatcggcggcccgagccacgtggcatcctctccaaggcggctcttccccacgccttctatcgccccactgaacacagagccccttctgcaggccttggccgccgcaaacaccacgatgttggatgggttaagtgcccaggtggaggccctgcaggcagagcgggcggagctcgacgccgcgtgggcgcgtgtcgaagaggggcgacgctcggtggaggccatggtggaggtgggccgtaaggctcaccgccggcatgtctcggagcttgaaacccgtaagaaggtgctggcggagatcgccaaggaggtggaggaggagcgggaggctgcccttatcgccaccaccgtgatgaacgaggcgcaggacaccctccgccttcaatacgggagttgggaggcggagctagggaagaagcccgacgccgcccagggggtgcttgacgctgccgctgcccgagaacagcgggcggcggagacggaagcggcgtcccggcagcgcgaagaggcccttgaggcgcgcgccatggcgctggaagagcgcgcctgcgtcgtggagagggatctggcggaccgcgaggccgccgtcaccatccgggaagcaacgctggcggcgcacgaggctgcctgcgccgaagaagagctcgtgctccgcctccgcgaggacgcgctcaccgagcgggagcgagctctcgcgggggccgaggccgcggcgcaacagctggcggacagcctgtccctccgcgaggcagcgcaggaggagcaggcgcgccgtgatctggaaggtgcccgcgccgagagggccgcactgaaccaatgggccgctgagctcgaggcgcgggcgaaggagctggacgcaagggcgcgcagcggcggggcggccgcgggcgaaagcgacgtagccgcccgcctcgcagctgccgaacacaccatcgccgatctgcaaggcgcgctggactcgtccgccggggaggtcgaagccctccgcttggcaggcgaggttgggcccggcatgctttgggacgccgtctcccgcctagattgcgccggtcggcaagtgggcctctggagagggcggaccgtaaagtacgccgacaaccagggaggcctcgcccagcgcctctcgaagatggccggggctctccaacggctccccgaggagctcgagaagacaattaagtcatcctcgagggacctcgcccaaggagcggtggagctcgtcctggcgagttaccaggccagggaccccaatttctctccatggatggcgctggatgagttccctcctgggaccgaggtccgggatgccgccgaccatatcgtcgacagcttcgagggctcggcccctcggcttgcgtttgcccccaactccgacgaggagggcaatgccggtggtgcagacgacagtgacgtcgaggccggcggtccgggcgcatcggat

SEQ ID NO: 79843 - DNA, 361 bp, Oryza sativa
  Clone ID: PAT_MRT4530_79526C.1
ttttctaggcggaacccctttatccctcttacaatgccctcttggtgtttcgagagaccgcccctagttgtcgagttccttacgacaacccgtcatggccatccaatcggggctaaatacggaggagtaccctgcccaggaaagtaacttaggattatatacacgcgcgaaggaatacccgtactgagctgtcaccataagcggcccacctcgacatatccacaccatataaccccaaataatgatattcagtagcctaagcacctctcttatgctaccaaatactactctacaatcaccgtcgtgacttagagtaatcatataaatgaacattatacccacaccaatggggctgcaggaa

SEQ ID NO: 79844 - DNA, 3189 bp, Oryza sativa
  Clone ID: PAT_MRT4530_79527C.1
ttagatgctattttctctaaaatagaagggcagaatcattctatgataaagaacaggatagggtaccaatcttgcgccttgcaatccattatccttgcagaaacggactgccaaagattgagaaggggcagctggggggaaatcttcagctggcattgcaaatggacgaaccattttatcaaatttgtccaaggtgagatatgatccaacttcctgcaatctttctggctccataattttcatagtgtgatcatcaggtagcaatgaatcttttccatgttcgctctgtatggatacatttttcaagaactgtaaggaacttatatctgcaccacgactatatgtcatttctatgcgaaacctttttgggtcttccaaagaaacctctgtattctcgaacatacgcaatacaatgtaactcatgtagtcaagttcccttgttttaaacagattatctagagcatttttgcaaacaagactttcttctccatccatagattcatcaaaattgcagtatcgaagtacattcattagagaatgtatatgtgattctgatgtaaaatagagccttgttcgaacacgtcgttcaggttccatcacattggcatattttggatccaagcagtatttggtttctttgtgcgaatcatcaagatcaattgacttcttgtttgagttaggtctatcaaaaccctcattcttaacatccccatagtaacccctatccttccgttttgaagaaggcactattgttggatcatggcatgcattagattcaccaccagcagcagcaacctctcgtctggtgttatgcaggtcaatcagaatcttgcccaacaaacggcgtgcaatctttgaaccaattttgagtttctgcttcgcatttattccatactcatttggaattacaccatcagctagtgactgagaaactctgaagagatcactcaaaccattaagtttgagatgtgagttatgaaggaggtcatacctgtcaagtatattttttctttcgttgtagagatccctctctagtttcttccaacgggcaaacatcaaaaggaagctctcgctgccacaaggcaatccagaagcaatgcggtccatatcaattgctgttttccctagtgcctttgcttgatcataaggatgacttggtgagtcactatctgtcacagcctcttcatcttcattgtcagaaagcagcttcacttgtgcagttatttccttggtcaattgagcctgattggacagttgagataagggcaacttatttgtcaccattatagatgtaattatcttaacgtttggttgttttagatgtgcaagtttcaaatttgtgagaaggttagcagcatttggaggcactccagctccatcaaccatccatgggaactccatagtctcaccatttgcaatttttgaagaaaggataatattgtgcaaacgagccttcgcttcatctatctcaatagagccatcctgaagtccatcaagcatagaagagtccttactgacaagtgaaacctggacacgaccttcatctgaactgtatattttcagatcatgcctatatgtactgtgcagacgaagcaatcctggtccttcacttggatacatattatttctgaagtatcttcccaactcttctgcctgctttctcccagcatgagttagaactccaccgtacttgagaaccatcagtgcttcaattggatactcctccttcccgttgccgttacttttaggaatatggacccaattggatggctttaactgcactttcctataaatacctgaaaaatgtccaccctcttctagaactgctctaacttggcgtagcttctctgcatgctcaatttcagcatcactatcactttcacggccagacctagcacgtggaacaaggattcttgttgcatctaatagatcttgcagctgcaaggcacttttaagttttgcctctgcatgggcctttcctccattgtatttcaacattaattttaaaagcttttcttcagttaccttcagcttcaccttttgctttggcgtgcgatccccatggcgtataacagctatgacacagcgcagctcttctgattgcctagatatgccaacagttcccctttctcgatctcttacagcatcaaatggttggactggctcactgactttccatggaagattagcaggaatggtggatgaaatatgtggagctttatcatcgagaaacattttcctcagaatgcatgcagcatcatcgtagtacttgtgtgagcttttcacaaaactccagccattgacatcacatacataagaccttgcctcccccaaatcacaccttagaagatcaaaaccacacaccgcttgtccgaaggcttggcaaatattccttgcaatttgtttctcagtaggggttagtaaaacaggatagcgcacctcttttccatcagaattcctcataacaaccccatctacaactggagatttgcgggcttcagcatgtgcatatcctggcccaactgtataaaccttgacatctgttcctcctgttggcatgaattcttcataaatgtaagatccatctcgcctcaccttcctaatgtctggataaaattcactagatcgattgccaaccttgcggaacagttctttcattcctccaccagcggagctaggataatatatcattatgttatggtcatctccatcgattggtttctccacaaaaggcttgtaaaatcgctttccatggatctcaataaaatcatcttgctcaacaaagtactttaactcttggttagggtattctcttctgacaacagcataagttggaacaggaactccgaacaatttaaggtgctcatatactttgctgcgatcatggaggaggtattggggatccaactcattgaccaaaaatggcctgcgtaaagcagcatatttctctgccttttctagtggatacccagccgagtaaaaggcaatcagacagtcacatagaggccagctttcaataggatcttcaagaatgattttgtcaccaaaaattataatctcgaactccccgaacgcccgcagcctctcaagaatctgctccatgggggaacaccacaccttcttctccatgacgcagacaccaatcttgatcttgcctccaccgtcacagccatcattccgccgctccat

SEQ ID NO: 79845 - DNA, 216 bp, Oryza sativa
  Clone ID: PAT_MRT4530_79528C.1
atggaggagagcgagcgcgagacgctcgtgaccgaccgacctggcgccgtagcgcgcgcgggcgcctcctacccgcgaaaaaaagtcagacgcatgggtggagactggagaggatggggagatgggcgggggcggacgcggcaggccgtcggcgcgcgtgtcaccttgtgcctgcctggtgctgcgtgcctgcgtttcagccacgggttgatttga

SEQ ID NO: 79846 - DNA, 389 bp, Oryza sativa
  unsure (1)..(389): unsure at all n locations
  Clone ID: PAT_MRT4530_79529C.1
tctctcccacgtccgtcacgagtacacnatccgacacgacatcctccgacgcgaccccgtcccctacacaacatggccgacccacccccttacgacccgtcacactttactcctacgccgacgcacataatgcaccgacgcgctcgcacccccccccttcgcgtctccgtcttcgcaatcctaatcccctcaacaacgctacctgcgcgcccccgggcttcatcacacctcctctctccgctcctccctcgcacaattccgccctcaacaacttcttacgctctccttctccgcgattcgcgtcgtcctctactattctccctccttccccccgcgctccctctcacatcttcccctacttcacgccccctcctcgccccgcttcctga

SEQ ID NO: 79847 - DNA, 2506 bp, Oryza sativa
  Clone ID: PAT_MRT4530_7952C.1
atcaatggacggggagagaccttctcggacaagaattgggttacctacgtatcgtgtcaggtctggtatgttcgagtcctactcggagagcacccaacctgcggtataaaagggaccccccggggagggcatagatcatcgaatctcagagtcaacataacccacacagcctatgaaatccttataccagcgtaccccaataccctctatatccggtctacgggtatcccccgtcgacagtggcgcgccaggtagggggacttggtattcaaggttctactactatgccatcaagcttcgtcgacaacaacgccaacaccagctccgctcaagttcttcctacctcaacaatgctggtatggactcaagtcggcgaaatcgtctacccggtttacaccacaatgccgatctcaaccggtcccccaatgactgggaacgagaacgcggtggctacgaaccaagacgcctccacgtcgaaaaatccacccgttgaaacggagaacggattaccgactacatccaagttcgtgaaggattctgatgcggccaggccttgtccctccgacacaaaccgcgggccagcaaagatgacttccgaaactatcaggtcttggtgtcctattcataaaaccaagaaacatactcttcaagattactgggtattcgtcaacgctcgtgctgaaatccgcgcctgcaaagaacgtgggatccagcgtacttctccaactcggaacgtctattgtcctatccataagacaaagaatcacgacctctcgagttgcaaaattctactcggcgccatgaaaactccgtctcctaagtcatacgtccccatccgggataacagcaaggaacaaggagcgactccagccctagatcggttcgttggggtaatcgatctcaatccccatgaaccatctgttttacatctcctcgaagactatgggtcatcaacgtcagacgcggcgcgggaggtgttggctatcgatgacgttggcacgtcagcacaagccaatgcggtggcggcgaatcaatcgactaccccagcccaacacatcagggctgttcaagccatactgagggaaacaccttacgatcccgttctgaacaacgacctcgagcgttggacggaacgagtacgggcatcggtgactaacctcagcaatgcgttcgaagaagccatcaccgcagcacaacaaaaccgatcgccagtcggcgacgctaacggtgaaagtccagaacggagggaatcacctcgacaagctacccctccacctcgtggcactggcgatcttcgagatcaaatcaacggacgccgagaagcacgacgcacacgggatgacgcgaaccactcccggcgtcatgtctcctcacgacgccatgatcgaggaagtcgcccaaaagagaaccgagaccatgacgatcgcgatcggcgagggccagacaacactggtcacggccgtcgccgtaacgacgaagatgaaggagatcagcgtcgagacaacaacgagagatgaagacaagattcccgagatccaggtcgtcaccctcgtaatcgcacgccggaaccaagcgacccatcgtcatcatcgtcatcatccgcgtcctcttcatcgtcagaccgacatccacgaaggtcatgcgaccaccgacaacccaccgctccaagcgctgggtgtagggctttcggtcgttccctacgtgatgtccgatggcctgagagattccgacctagagttattgaaaagtatgatgggagcaccgacccggaagaattccttcaagtctactcgacaatgctttatgccgctggagcagatgccaatgcattggcaaactatttaccaaccgcgttgaagggttctgcacgttcgtggctgatgcatctcccccctactcaatttcttcgtggtcagacctgtggcatcagtttgtcgccaatttccaaggaacatacaagcgtcacgcgatcgaagacgatcttcacgcgttaacacagaactcaagtgaatctttgagggaatacgttaggcgctttaacgagtgcaggaacaccatccccgagatcactgacgcttctgtaattcgcgccttcaagtctggtgtcagagatcgctacactacccaggagttggcaacaaggcgcatcacaactactcgaagattattcgagatcgttgaaagatgtgcccacgtcgatgacgcactaagacgcaagaacgacaaaccgaagactgggggagagaagaagtcagccgcagacacatctgagtcgagcaagaagaaaaatcgcaaaaacgggaaaaggaaagctcaagcggaagtcctcgcagcagaatacgcgaaccctcccaagcgcccggacccacaaggcagcgacacaaagaaatcatggtgccccatacacaaaacagatagacattctctggaggattgctttgttttcaaaaagtcgctcgagaagcacatggcatttgaacggggcgtttaacctaggatgttacct

SEQ ID NO: 79848 - DNA, 297 bp, Oryza sativa
  Clone ID: PAT_MRT4530_79530C.1
gagcgaattgtttcggctgtcggaaatggtgtggagtcggtgcggaatcggattaaatttttcagatgttacaaatgtcggataatccgtatccgtcggattttggagataccatattctcatccgtatcttcatcatactatccacatctgcatctatatccgtcggatttctaaaagcccataccatatactcgtttcagacggatttggagtggatcgggttggatattatctgatccgttttcacccctacgaaaagacactcggtcgatcaggaattttcatgatcattgtc

SEQ ID NO: 79849 - DNA, 569 bp, Oryza sativa
  unsure (1)..(569): unsure at all n locations
  Clone ID: PAT_MRT4530_79531C.1
aattgtaatacgactcactatagggcgaattgggtnccgggccccccctcgagtttttttttttttttttttttttaccaaacctgagaatttttttttgtcagatcttgtgagttgtgagacatgtccacatgacctatggtactaggagagcccacctcatcactcaaaccatttcaggtgggcacaaaaaatcatttcagcaacatgtcctcagatttttttttccccttgggatgaaaagctgtcgcccaccacgcagtgactagtgtggccaagaacagtgagcctgttgcacttgcaaagctatctcnacccccaacttanaatgtctctngcaaaaactacctattaattctcntcnccatgananttccccganaaccctacnggaagaaacaattcccnaattaattgancccgntnccnccccccccagggataaanngtttacnggttcctncccncnaaaagcncccttccttggncccggtnctaaccnaaattnccntnaatcccgaaattggggattncgggntaaaaaaacngnnaattttttccccnttncn

SEQ ID NO: 79850 - DNA, 1100 bp, Oryza sativa
  Clone ID: PAT_MRT4530_79532C.1
atgggctcaaccgaaggattcctccggccattggttgggaagcccgcccgcatgggcaggagggcagtaacgcgccgccgctcccctcggctcccgcggtttacgctcgcgcgcaggagttcttggttggctgactgcgagtaagcgaatcatccggcaatcatggcgtcccgcgtcaggtttgagaattccagcgagattggagtgttcgcgaggctcaccaacgcctactgcgtgctccccgacggcggacagagaacttcttcagcgtgttcgaatccgagctcgccgacgtcgtgccggtggtcaggacgtccatcggcggcacgaggatcatcgggaggatgtgcgtcggcaacaagaacggcctcctcctgccgcataccaccacagaccaagagctccagcatctgaagaacagcctgcctgatcaggtggtcgtccagcgcatcgaggagcgcctctccgccctgggcaattgcgttgcctgcaacgaccatggaaccgaggagatcatctcagatgttcttggtgtggaggtgttcaggcaaaccattgcaggaaacatcctggtggggagtttctgcgccttttccaataaagggggccttgttcacccgcagacgtcggtggaggaccaggcggagctgtcgacgctgctggaggtgccactggccgccgggtccatcaaccggggcagcgaggtggtggccgccggcatggcggtgaacgactgggcggcgttctgcggcgccgacacgacggcgacggagctgtccgtggtggagagcgtgttccggctgagggacggacggccgggggcgctcggcgccgacatgagcaggtcgctcgtcgtcagcagctacctatagagagaggaggagggaccggtttttgctttgggggattttcggtcagaattcaagaatgcttaaagccaaaaatatcccttgctgtatcttgagtagtgacagtaaatgttcgcgtggatcgatgcagttttgatcctgtgtcaaagatgaattttgtatctttgcaaatctggaacgatggaagtgcttttttgaagtcaaaatataataaagtattatgctcagctc

SEQ ID NO: 79851 - DNA, 2379 bp, Oryza sativa
  Clone ID: PAT_MRT4530_79533C.1
atgacgacggcgatgacggcggggcggtttggagcggcgcgacgacacgggcgacaggcgcgggctggcgcggcagagggtgacggcggcggcggcgaccaggaggtgcttgccttaaccgtcttcctcgtctgcgcggcggcagtgacaccagcggcgtcggctcagcagcagcagctgccgggctgccccgacaagtgcggcgacatcagcatcccctaccctttcgggatcggcgcccgctgcgcccgcgaccaatacttcgagctcgagtgcaaccgcgcctactcccctccgcgcctcatcgtgtctacccaccggcaacatctggtcaacctgtccctcgccgacggggaggctactgccctcatcaacgccagacgccagtgctacaacagcacggagggtttgatcggtgatgccaataattatgtcaacaaggatatcactcttgtcggcagcaatgcctaccgcttctctgcggcgaggaaccgcttcgtcgcgctcggctgcccaaacatgggctacttcgtcgacacctacggctactacgtcagcggttgcacgtccatctgccggccatcgcaggggaatggtgcgagtggtgcctcgaccgggggatgcaccggcgagggatgctgccagagcaggataccgaccaataccgactactacgagctgtacgttcaaactttcaaaccaggggaaggggaccccatattacgtggcggtacgactgcttgccggtacgtgtttctggcggaggacaagtggatcgacaccacctaccgcggccacccggacttcgaccgaaacgacgacttcgcggtgcccgtcgtgctcaactgggccatccggaacgtcggtaactgcagcgccgctactcgtaacatgacggactacgcgtgccggagcgtcaacagccactgcatcgactccattgatggccccggataccgatgcaactgctcccagggctacgagggaaacccctaccttgacggtggatgccaagatatcaacgagtgcgagcggccagataagtacgcatgcttcggcgagtgcaccaacacgctaggatcgtactcgtgcatgtgcccgcgaggtgctcgtggtgacccgtccattccacaaggctgcctcgaaaaggacaagttcactttagctctgaaagtagttacaggggtcagtgttggtgtcttcctgccactgctcatgtacttttgcctatacctagttctccagaagaggaagctcatcagaacaaagcaaagattctttgagcaaaatgggggagtgatcctccagcagcagatgcactctggcggaggtgctggtggattcaagatattctccacggaagagcttgagaaggccaccaacaactttgctgatgaccgtgttctcggtcgcggtggtcacggtgttgtctataagggtgtcctggaggacaacatggtggtggccatcaagaagtcgaagatgatggaggaagcccagactaaggaattcgcgagagagatgttcatcctctcccagataaaccacaagaatatcatcaaattgctcggttgttgcctcgaagtcgaagtgcccatgctgatctatgagtttgtctcaaatggaacactctaccactacatacatggcaaggaacccatagctcacatatcacttgatacccgtcttcggatagtagcagagtcagccaaggcactcttctacatgcactcgtctgcttcaccgccaatcctccatggagatatcaagacagcaaacatcctacttgatgacaagctcaacgccaaagtttcagattttggggcatcaaaactagcaccagctgatgaggccgagattgcaacgttggtgcagggaacttgtgggtacctagatcctgaatacctaatgacttgccaactgaccgataagagtgacgtttacagttttggtgtcgtcgtgctagagcttctaaccaggaagaaggcattgtacttggatggaccagaggaagacaggagtctggtgtcatgcttcatcacagcagtgaaagctggtcgtcatcaagagcttctggacaaccaggtaaggaatgagatgaatgaagaaatgctcacagagattgcacacctcctgatgcgatgcctaagtatgaacggggaagaacgaccgacgatgaaggaggtagcggagaggctggagatgctgaggagataccagcaacatccttgggttgaagctgaaggaactaagggcttcatcaaactctttgcacaaagcaatgatgaaatcaacgacctgagctaccgagttgtaaatgccgagcttgttccacatggagctccaaacttgtcttgcgaaggcacaatccatgagtag

SEQ ID NO: 79852 - DNA, 2017 bp, Oryza sativa
  Clone ID: PAT_MRT4530_79534C.1
ctgcaggaattcggcacgaggctcttttctttaatcctccatgtctgtctcccaagaaacttaattggatctgtgacacgcgcagctgagctgagactgagctgagctctcggtcaatcccctcatcttttctttctttttaatcccgtctcctatgcactttgatcaatactactaatcacctctccttggagaggttttaatcctccaagaaacagaagcaggaaagaatccaaaccaagaaccgagagactgacacacacactactctacctcctcggattctctgtgtgtgtgtgagagagaagagggcttcccatttctcactgcttccagtagtagtagtccggtgctggctccagccagcggtccagcctccaatctgaagttcgtgcttcgttcttggctgtgtgtatctggaaaggggaagtggaagtggaagaaaggtctcttctccggggacaagatcagcttcggttaagtgcttctgagaaagtgagaaaagtgtcattggataataagaaatcagatgctagagcaccgaaatatgtggccagcgagcctaaaaggcgtggtgattctgttaatgctcatggttttcaatgtttcaggagcatttgttggtatcaatgttggcactgatatttcgaacccaccatcagcatcagacacagtgtctatcctgaaagaaaagaagattcaacatgttcgtctgcttgattcagaccatcagatgctatctgcccttgcaaatactggaatagaagtggtggttggggttccaaatgatcagctacttcgagtggggcaatctcgttctacagctgctgattggattaacaagaatgttgctgcatacattccagcgactaacataacgcatattgctgtagggaatgaggttcttactacagaaccaaatgcagctcttgttcttgtacctgcattgcaattcctacagtcagcgcttttggctgcaaatctcaatacccaggtgaaaatttcaagtcctcattcaacagacatgatctctaagccatttcctccatctactgctacattcaattcgacatggagctcaataatgcttcagtatcttcaatttctgaacaacacagcatctcccttcatgctgaacgcccaaccttattatgactatgtcaaagggcaaggcgtattccccttagaatatgcgctgtttcgatcactcaaccctgatagccaaatttcagatcccaacacaaatttgttctataccaatatgtttgatgctatggttgatgctacatacaactcaatgcaagcaatgaatttcactgggatccctgttatggtcacagcttctgggtggccatcgcatggtgggcaaaatgagaaggctgctaatgtggataatgctttggcctacaatacaaacctcatacgccatgtattaaataattctggtactcctggccagccaaacaatcaagtaagcacattcatatttgagttgttcaatgaggatcttcgggctggacctgtctcagagaaaaattggggcatcatgttccccaatgcaactactgtgtacagccttacatttgaagacatggccacaactaatacagattcaccagttttgcgagggacattctgtgtagcaaattctagtgctcctcatagcgcattgaagcaaagcttggattgggcctgtggccctggctctgcaaactgcagtgcaattcaacctgggcaaccatgctataaatcagatgacattgtcgctgttgcttcttatgctttcaatgattattaccataggacacgagcaagtggcggaacatgcaacttcaatagcacggcaatggtgacatctactgatccaagaatggccatggttcatgcatttttgcaggaagtgttggttcttcttgcagcactggctccaatggcagcaacggtggtgcggcgtctgggccccagatgcaaaaatgtctggcctggtttgtacaatgaagaattaagtcctacataa

SEQ ID NO: 79853 - DNA, 561 bp, Oryza sativa
  Clone ID: PAT_MRT4530_79535C.1
atgagtagtagcggcaaggagcagcggcggatggaccggttcatcgtgatccccttctcctccacctgccgcaatggctccagcgtcgacgtcgtcgacggcggcaagagcggcaagaagccccaaggcggcggcggcggcggcggcgagggcggcggcggcgcggcggagaacaagcccaagggggagtcgctggtggcgaggcttctccgggggttcaagaacctgtcccagatcttcgccgtgtacgaggacgacggcgaggaggaggaggaggaggagcgggagatggtgatcggcctccccaccgacgtaaagcacgtggcgcacatcggctgggacggcagcaccaacaccaccaccagcctccgctcctggaaccgcgccgcgccgccgtcctcctccgcctccgccgcgtccacctcgtcggccttgccggcgccggcgccgccgccgccgccgtcccagcagcagccgccgctgccggcgttctccatgcggcagttcgagctcgccatggcggcgcaggccgccgccacggggaccaccacggcgagctag

SEQ ID NO: 79854 - DNA, 928 bp, Oryza sativa
  Clone ID: PAT_MRT4530_79536C.1
ctgcaggaattcgcacgtccccacctctctctctctcgtctctcgctctcatggccgagccgccgtcgcagtcgccggcgcagacgccgccgcaggcagcgcagcagcagcagcaggggcccggggagagcgcgcgcgacgacatgatggcctgcgtggcggcgctggaggcggcgctgctgccctgcctccccgcgcgcgagctccaggccgtcgaccgctccctccaatcctcccaccagattgatgttgagaggcacgcgagggatttcatggaggctgcgaagaagctccagtcttacttcatcagcctgcagcgcgaggaccgaccgtcgacagaagaaatgcttcgaaaggatattgctataatggaggaagagctgaagaccaagtccgagctcatcgacaaacataagaagctcatcgaagggtggcagaaagagctgaaggaccagctgggaaagcatgttactgaactcgaaagagtgtgacaccactgtcttccatgaaatgtcccaggctccttccgatgatcaacctgagtagcccagtgctgggctatgccttggagattttgagtacgccagccaggaaaaaaaaaacaccacaacaatgttttaggatctgaccagtttgccgaagacgaacaaattgcgctgtattaatgttcgttgctatgttcggtttatcataatattattgttcgtagtttctcgtgtgctctccatctcatcgtgttaggcatgcctaacatgttaaacttttagatttttcggagcaacatctttttcccgattataggagtgtatgataacatgtgtgttcaatggaattgtctaattgcctcacttgtcattttagatgtttctttcaacatattaatgatttaatggtaattgaatccaaaaaaaaaaaaaaaaaaaaaaaa

SEQ ID NO: 79855 - DNA, 438 bp, Oryza sativa
  Clone ID: PAT_MRT4530_79537C.1
atggcctgcgtggcggcgctggaggcggcgctgctgccctgcctccccgcgcgcgagctccaggccgtcgaccgctccctccaatcctcccaccagattgatgttgagaggcacgcgagggatttcatggaggctgcgaagaagctccagtcttacttcatcagcctgcagcgcgaggaccgaccgtcgacagaagaaatgcttcgaaagaatctagatgaaaagctgaactgtttgagtgagcttttaattttaggaaaagctgcagctgccaaaagctccctcaaacatgccctaggttgggatattgctataatggaggaagagctgaagaccaagtccgagctcatcgacaaacataagaagctcatcgaagggtggcagaaagagctgaaggaccagctgggaaagcatgttactgaactcgaaagagtgtga

SEQ ID NO: 79856 - DNA, 414 bp, Oryza sativa
  Clone ID: PAT_MRT4530_79538C.1
atggctctaaaatcaaacatcaaggaagaggttgcttatttcgcaaaagaaaaacaaagagcctggttgatatttgctgaagagaggaatgtgtatgggcatatagctggagtaggtctggatacattgactcctaccttgatactaggtgatggcctgaaaatgattggagaataccaagagactattggcacatgctatttgttctcagaaacaaatgctccaccaaaacccattcacggtgagatggcacctcctgaagaaaacaaggacaagcaagccagctgtagcaaggaagtgccatcaaaggaggtgaagcatctcgcaagcgttcagaagatcctcaaatttcgctctatcaatgcggatcatgagcagcgtagagcctacagggataatgagagagaaatttga

SEQ ID NO: 79857 - DNA, 518 bp, Oryza sativa
  unsure (1)..(518): unsure at all n locations
  Clone ID: PAT_MRT4530_79539C.1
catataaggaaattgtcaaaaattttggacacgtgggaacacaacccacatgaagtggctctcatccgtatggccaactggcaacacaaacaatcaancccactgttttcagtgacctgcccccagaaaatgtgagaggggaaaaattgctgggagttgctcaaagtttgcttggctggataaacacagaaggtttggaaatgctgatgaaaagatgatgagagccaattgccttagagacaggattgcccnccaaaatgtgtgagatgggggaatggtttgcgccaagcacccggtataagagntccggtgggttacttgcattggggtgatatgctggaaacctgggttgcagattgacccctgtgcccaactggttgagctgcatgacncccttgttgaaacatggtgaaatnggccaatggggaacgttgaaccatgctgcccggaatgtagttaaatttacacgcatggtaccgtttgtactgaattgaaaagaaatctttgggccaaaaaaa

SEQ ID NO: 79858 - DNA, 465 bp, Oryza sativa
  Clone ID: PAT_MRT4530_7953C.1
atggagagccaggagctctgggcgctgtacgtgggcgtggcgtcgctggccatcgggatgctcggggtgctgggcgtctggctctgctacctgttccaggccgtggcgcgggggccgcctccggacccgccgccgccgccgacgccgccctgcacgccggagacggaggaggacgacaagaacgggctctcggaggaggagctgaggatgctgggcgggatctgcgtggcggtggccggggatggcgaggaagaggaggaggagcagctctgcccgatctgcctcgacggcatggaggccgggcgcgccgtgcgcgtcctccccggatgcagccgcgcctttcaccaggactgcgtcgaccggtggctcaccatctcgccgcgctgccccgtctgcaacgcctgggtcaccacgcagtcgccggggacctcgccgccgcgcaccaagcctgctctgaattcttga

SEQ ID NO: 79859 - DNA, 1981 bp, Oryza sativa
  Clone ID: PAT_MRT4530_79540C.1
cggcacgaggtttttttaattgaacaagatgaacatactcgtgtataatcacctaaatcaaacagaaataatagagagctcaacaagacagttagatcacaactacagatcacacagcattaacctttacatcacaacatcagccacacattgtatccgagaactgaaccaacgtaatcaagaattctcacagattgctgtgatcctcaaacgaggtggttgctcgggttcaccgtttcttttccagaaggcacgccgccaccatacctcgaatcctctctgaatatttgggcagtcctccccagagttcaggaaccgattgaaccatgccagcaagatctcctgctgagttgctagcggcagtgtcaggatggtgtttgccagtccatcctcaatcaaatgccggtcaagccccttgcaggctcgcctcatccatccaaagtcttcatagaatggttctaaccaagtactcaagagttgacaacggacctccttggacaccaagatctgtcccttgccaaccccaacaaagagtcttgccgtcactcggctaacttcatagcggtgtattgctggcaccttgccatgcaactctgccaactcaatctgcattgcccacgtcctcaagaaatcctcggcaatctggcgttcgacaaggatgtcaagcatccagtgaaggttgtcagcctgcctggcaatctgcgctacctcagattggtcaccccctgcagccatctcaaattgttcatgcagcaggcgcaagcagccattgcacgccgaatacagtgactccttccggaggtcacctccaatggctcctccacgcgatgtgctgttctccctgagcattttggaaaccagccccttcatctccctccttgccttctcgtccttcccttccaggacgacctgcaggagcctcactaacacctcctccccaccacctgaattgccaccaccattgcaaccactgccgacctccacctcttcagccactgccgagggagccaactccagtgagaccctcttaagcacctccccagcgcccgagttctcgaggtgcagctgtgtcaacaatgccgccaccttctcatcgtcatcctccgcccacggagctgcctctaaatactccaagcaagacaggaccccagcgtcgaacacaatggccgcggacacctttagaatgccgaggaccttgctcacatcctccctcatgagcctccggcggagatccttgcagtacatgagccgcagcgtctcgacgtagacctcgacatcgtcgcagtcggagatctcaacgatgtgcggcaacgtcctctgctgcttggaccagcggtcggagagcttggcggcgaagaacctgctgtgggcgacgagtatgtggcggtgcacgcagagcgtgacggagaggccatccttggaggtgagggtgaggcggacgtcggaggagtcggcgtcgttgaactggttcccggggctgcagctgccgatgagctcggcgacgcgatcctggagcagcacctgcctgtccatggagcgggcgggctgcagcgggtgcgcctgctgcggcggggccgggatggagtggatggcggcggcggtgcgcgggtggtagtcctgctcgttggccatcatgtcgaagagggttgggctggagcgcgtcttgtcgagcggcagcggcggcggggacattgggttgaggaggccggcgttgagcgcggagttgaacttggtgtagctggacgggtaggaggtgggcggctgcggcgggggatccatcgtttcggcggcgggggagctggattgggatgacggggaggaagaggcagcggcggcggcgggggtgggggtgtggccgtgcggagcgcagcaccaggaggaggcgaggtcgtgggggacgaggtgggaaggggaaggcttggggaacaacggcctggatctggaggtggaggtggaacccacgcgtccgcccacgcgtccg

SEQ ID NO: 79860 - DNA, 1092 bp, Oryza sativa
  Clone ID: PAT_MRT4530_79541C.1
ctgaggccggccggggactcacccccgccgcccacagactactccgcgcccccgcgatcgcctccctcgcctccgctgcccatggcggcaacgacgcccagggtctcggccgtgatcttcgacctcgacggcacgctcctcgacacagagagggcaacgagggacgtcctgaacgagttcctggcggcgtacgggaaggtcccggacaaggagaaggaggagaggaggttggggcagatgtacagggagtccaccaccgggatcatcgccgattatgggctaccgctcaccgtagaagagtacgctgtggcgatatacccgttgtacctgaaaaggtggcaaaaggcaaagccactccctggagtcgagaggcttgtcaagcatcttcataggaacggagtgcctctagcacttgcttcaaattccgtcaggagaaacatcgatcacaaactgttaaaattaaaagattggaaagactgtttttctgtgattcttggtggagaccagatttctggaggccgcaaaaggacttggtgtaaatccatcatcatgtttggtcatagaagattctctttacactttatatttttgttgcaaaattctcctagcgtcggagttcagggtgccagggcttctggggcaaaagtagttgctgtcccatcactccaaagtcaaaggcagcactactcaattgctgattctatcctctactcactgctggactttcatcctgagttgtggggtcttcctccttttgaagatcgcattcagggtgctttaccaatcgaacaattattcttgaatgcccagataggccatgcaatttcaaagagtcttcatatggtaatagcaggtgattgtacctatgaatatgttcctgaccaaatatcaggaattttctttggttgggccaagccagaagcaggcggagtatctaggtcggtgataagcattggatgggacttttcgctgcggacagttgaaagagtgatggaaaatatatcacaagcattggccataactgacgaagatcaagccattgcaagggatgcattggacctcccagttttctctgaacacgcgaagttataa

SEQ ID NO: 79861 - DNA, 566 bp, Oryza sativa
  unsure (1)..(566): unsure at all n locations
  Clone ID: PAT_MRT4530_79542C.1
gggnaagnacaggtagccagtgctcgtcgccgttcgagttcacgacgaggtgaggtgaggtgaggttgggagtagtagtggtctagtgggtggttgatggagcggaagggagggtgctgcttggcgccgaggtacggcgcggcgtcggcggcggcggcggccggagctgggggacaggcggccatggcgtggcagatggggaggatcatgctcaagttccggccgattgcgcccaagccggcggcgatggcgccggcgccggttgcgggtgtgggggccgggaaggggaagcggaaggcggtgagcggcagtggtggtgggaggagggggaggaagcccaagaaggctgctaccgcggccacgttggcgccggcgcatgcaccggcgccggcgccgtcggtggcggggaagactgtacccaaggttgtcggcgactgcaaggagatggagagggagaaggagaaggagaagtcgttgtcctcgccgtcgtcgtcctcgtccgggatgacatccgtggagtcgtcgcctccaccgccaccgtcggcgatgctgccgctcctgcctgt

SEQ ID NO: 79862 - DNA, 405 bp, Oryza sativa
  Clone ID: PAT_MRT4530_79543C.1
atggaggctcgttgtgacttgaggtcagccttggtcaatggtgaggaccggaatatgttcagggaggaacagaggtctagtgcggtcgggataccatgtgagaaggtgactagagtcaggattcttgaagatcaactttggtcaacggtggggatcgggactagactcagggaggagttgaggtccagacggttaaggataccgggtgacgaagttggatacgagatggcatacgatggatggatatcgtgtgggagagatatccgcaacgggcttcacgaggcaagccgagtcggcttcatgcagcaagcaacagcatcgcggcaggaggagttcgacttcggtgcggctgcagttttggagaaaaaagaaattaagggattgatcgagtcctattgtgaatag

SEQ ID NO: 79863 - DNA, 1867 bp, Oryza sativa
  Clone ID: PAT_MRT4530_79544C.1
atggcacggggctccgccctgctcgacggtagcgtactaccgccttctcgcatcgtgagcgagaggcaggccgggctgccgcgccgcttcatgccggaatctgccaccggctgggagatagtgatgctgggcgagggtcgcccagcaccagactacccggggcggtccgtcttcttccttcccttcgcaatggcagggctggttccgccattttcttctttccttatggatgttctggagttctacgatctccagatggcgcaccttacccccaacgcagtgatgacattggccatcttcgcgcatctgtgcgagatgttcattggggtgcgcccatctcttcggctgttccggtggttctacaccgtgcagtcggtgtcgccgccgtcggtggttggtggttgctacttccagccgcgggggccggtgctgaaccgctacatcccctgcgccctccgcaagaagtgggacgactggaagagcgactggttctacacccccctcgccgacgaagcgcgcctccgacttccgagccagcccccggcgccggcctccagctggcgggcgccggtagatctgggggatggctatgacgccgtcctcgaccgcctggcgggcctgcgatcccaggggctcacaggggccatggtgtacggcgactacctccgtcgtcggattgcgccgctccagcggcgcgctcgtggcgcctgggagtacaccaagtccgaagactacatgcggacccaccagggagtcagatgggattgggctcctgaggacttcaagatattgatccaacgggtgctgaacctcaactccgtggaagcgtctctcattcctcaaggagttctccccctctgcagcgatccagaccgtgcctccatcttgaccatcatgatgggggtcggggcctcagaggaggaggctcctaagggccacgacggcgcgggtgggaaccgccggggggaacaatctaccccaggagggggtcgtgcttctgggccccacgtcgggggctcggggagcaaccgccctaccgacgcccgggggaagaggaagctgggaggaacacctcccctatctcctccccgagggggcggggcggtgcgtgccagcagcaggcgcccggagggggccgcgccgacgtcgcagcccgagggggagcgcgagaagaagcggcttcgcaagatgggggagacagaaccatcccggggaaacctgatttccccgccaaggtggtcattcaaccgaccccctcgcagcgatgtcccgtcgcgttcctcccgccatcccaagtccggccagtccgaggccaaagatccggcggccgcagaggcacggaggcgagaatctgaccggcgagaggccgcagatcgcctgcgggaagcggaagaggccgcccgggaggccgcccgggctcaccaggctgaggaagccgctcgggaggaggccgcccgggctcgccaggctgaggcgatggcgacttccgaggcagctcgcgacgaggccgcgggcgcgtcgcttgggcccactccttcgggcgacgcccaggaccaaacaggtccgggggacatccccgagtccggtacgtccattggcgggccgagccgcgcggcatcttctccaaggcagctcttccccacgccttccgtcgccccgctgagcgcagagcctcttctgcaagccttagccgccgcaaacaccgcggtgttggatgggttaagtgcccaggtggaggccctgcaggcggagcgtgcggagctcgacgctgcatgggcgcgtgtcgaggaggggcggcgctcggtggaggccatggtggaagcgggccgcaaggctcaccgccggcacgtctcagatcttgaagccc

SEQ ID NO: 79864 - DNA, 378 bp, Oryza sativa
  Clone ID: PAT_MRT4530_79545C.1
atggctgatcaaggaagaagcgacgatgagcaggtggaatctgcagccggtggaacaagcagatcgaaggacatgactagttctggaaatgacagcaaatccagtcaaggcgggagcaatccacctccaattcgacaaagggaggggcaatttgattattctccggctattctatgcaagtgtgggtacaatgacggtcagatggatttcttgagtgggaataatccatctaggagatggtatgagccagaaactacaccttatttaaggatatacccagataggacatggccgccgctttttggagggtgtttggatgctgggcgagagtgggatagggcggcccagaggggaatattccctctagatgctggatag

SEQ ID NO: 79865 - DNA, 4950 bp, Oryza sativa
  unsure (1)..(4950): unsure at all n locations
  Clone ID: PAT_MRT4530_79546C.1
atggcacggggctccgcactgcttgatggtagcgtgctgccgccttcccgcatcgtgagcgagaagcaggctgggttgccgcgccgcttcatgccggaatctgccaccggccgtgagatagtcatgctgggcgagggacgcccggcgccagactacccggggcggtccgtcttctttctcccctttgcaatggcagggctggttccgccattttcttctttcttcatggatgtcctggagttctacgatctccagatggcgcaccttacccccaacgcagtgatgacattagccatcttcgcgcacctgtgcgagatgttcattggggtgcgcccatctcttcggctgttccggtggttcttcaccgtgcagtcggtgtcgccgccgtcggtggtcggtggctgctacttcctgccgcgggggccggtgttgaaccgctacatcccctgcgtcctccgcaagaagtgggatgactggaagagtgactggttctacacccccctcgccgacgaagcgcgcctccgacttccgagccagcccccggcgcaggcctccagctggcgggcgccggtagatctgggggatggctatgacgccgtcctcgaccgcctggcgggcctgcgatcccaggggctcacaggggccatggtgtacggcgactatctccgtcgtcggattgcgccactccagcggcgcgctcggggcgcctgggagtacaccgggtccgaagactacatgcggacccaccagggagtcagatgggattgggctcctgaggacttcaagatattggtccaacgggtgctgaatctcaactccgtggaggcggccctcattccccaaggaatcctccccctctgcagcgatccagaccgcgcctcgatcctgaccattatgatgggggtcggggcctctgaggagcaagctccaaagggccatgacggcgcaggagggagccgccggggggagcaatctaccccgagagggggtcgtgcttctgggtcccgtgtcaggggcccggggagcagccgccctaccgacgcccgggggaagaggaagcagggaggaacacctcccccatctcctccccgagggggcggggcggcgcgtgctagcagcaagcgcccggagggggccgcgccagcatcgcagctcgagggggagcgcaagaagaagcggccccgcaaaatggaggagacagaaccatctcggggaaacctcatttcccttccaaagtggtcgtttaaccgaccccctcgcagcgagatcccgtcgcgtccctcccatcattccaagtccggccagcctgaggccgaggatccggcggccgcagaggcccgcaggcgggaagctgaccggcgagaggccgcagatcgcctacgggaagccgaggaggccgcccaggaggccgcccgggctcgccaggccgaggaaactgctcaggaggaggctgcccgagcccaccaggccgaggaagctgcttgggaggaggccggatttcgccaggacgaggcgatggcgacttccgaggcagctcgcgaggaggccgcgggcgcgtcgctcgggcccactccctcgggcgacgctcaggcgacaacttccggggcagctggcgacgaggcagcgggcgcgtcgcttgggcccactccctcgggcgacgctcaggctcaaccaggtccggaggacatccctgcgtctggcacgtccatcggcgggccgagccgcgcggcatcttttccgaggcgacttttccccacgccttctgctgccctactgagcgcagagccccttctgcaagccttggccgccgcaaacaccacggtgttggacgggttaagtgcccaggtggaggccctgcaggcagagcgggcggagctcgacgccgcgtgggcgcgcgtcgaagaggggcgacgctcggtggaggccatggtggaggtgggccgtaaggctcaccgccggcatgtctcggagcttgaaacccgtaagaaggtgttggcggagatcgccaaggaagtggaggaggagcggggggctgccctcattgccaccaccgtaatgaacgaggcgcaggacaccctccgccttcaatacgggagctgggaggcggagctagggaagaagctcgacgccgcccagggggtgcttgacgctgccgctgcccgagaacagcgggcggtggagaccgaagcggcgtcccggcggcgcgaagagaccctcgaggcgcgcgccatggcgctggaagagcgcgcctgtgtcgtggagagggatctggcggaccgcgaggccgctgtcaccatccgggaagcgacactggcagcgcacgaggctgcctgcgccgaagaagagctcgcgctccgcctccgcgaggacgcgctcaccgagcgggagcgagctcttgagggggccgaggccgcggcacaacagctggcggacagcctgtccctccgcgaggcagcgcaggaggagcaggcgcgccgcaatctggaaggtgcccgcgccgagagggccacactgaaccaacgggccgctgagctcgaggcgcgggcgaaggagctggacgcgagggcgcgcaacggcggggcggccgcgggcgaaagcgacttaaccgcccgcctcgcagctgccgaacacaccatcgccgatttgcagggcgcactagactcgtccgccggggaggtcgaggccctccgcttggcaggcgaggtagggcccggcatgcttcgggacgctgtctcccgtttagaccgcgccggccggcaagtgggcctctggggcgggcggactgcgaagtacgccgccaaccaggggggcctcgcccagcgcctctcggagatagccgggactctccaacggctccccgaggagctcgagaggacgattaagtcatcctcgagggacctcgcccgcggagcggtggagctcgtactggcgagttaccaagccagggatcccgatttctccccatggacggcgctggacgagttccctcccgggaccgaggatggtgcgcgcgcgcaggtccgggacgccgccgaccatatcgtccacagcttcgagggttcggcccctcggctcgcgttcgccctcaactccgacgaggaggacgatgacggcagagtcggcgacagtggcgacgaggctggcgacccgggtgcatcgggcttgaataagggctcgtgcccaggttctggtcctcaaaaggcgcgggtcggggcttgtcacgcccagaaattcccgaatagaattccaagcagaatgtgcattaaaatccccgtccaggaccagccggggtacacaaacgacaatgttgacattcagatccacgtcggaaagaggccgtgacaggaccattcgcataaccccctctaaccaagcacaccacacctcaggtttcacccccactcctcgcaaggcagcgggcagtcccctctcgtgcctaggtgaatccggaagccgcataggccgtcgcagggcccatccaaactccatcacgcccacccttgcctggatgcggacctcgctgacgtcatcaagggggaggggcggcgccggcaagcgggccccaccggtcagcggcacaagggcgccggtccaccgtggaccgggaccaccgaggcggtccaccgccggtccacgggaaccgacggcccggatcggcccaaagccgatcggacggccacgaggcggcgcggctggggcacgggcacggcatgaagccggctcggccgagacatgacgcggcggcggcaaggggaaggcggcaagggggaggcggcaaccggctgcagcagccggcgacgtggaacggcggcgggcggccggaggacagcggcgcgcacggggacggcgacgcaccccaagaggcggcggtcggcaagaaagggggacgggaaaaaaaagaagggaggagagatcctcaccggaagcggcggccgacgcggaggaagaggacggcgacgacgattgcccaatggcggcttgcgaggacggagggcggacggggtcgcccttgaccttcagaaggagaggagggagttagggaggggaggaccgatgcgggaggtagagctcaccggcgaccgaggaaggaggagctccggcggatttccggcgaagaggggcggcggccgaggtcctcctcgtccttgcggagctgagggaggcaacggcgcgagtcgacgtcgaccgaagcggcggcgcgacgcggctggagtcggcagcggcggcggagagaggtggttcgcgtggctacggcgctacggaggtggagaggggaaatggagcggtggccaagtttgcccgggcggcggcaaagctgncggtgtcggcggaccagtgcggcggcgaccctagcgacgggaaacgcgggccggagttcgccggagtgtgncggcgcgtgggagtggcgtgaggagagcaagggagggcgcggcggcttggggaaaattggggaaatgagagaggagaccacggggatcgtttttattggctcggggcggtgggatcatggccgcggaggacggaatcgaccggcaacggtcttcggagtgggctccggcgacgtgggcgaagtggggtggttcggcgccggttttggaggggggaaagtgggggaggagagtggaggaggtggggcgacgcggtcccgcggtcggggcgagcgcgcgggtgtagaagaagccggaatcggcggcgacgtggggagaccgtgccgacggtttcggcgaggagacggttgggggagaagatgacaggtggggcctcgggtcccacctgtcggagagagagggagggagaggccggctggggagacaaagcagacttgagggagagagagagccgagcgggccgagggagaaggccggcccgagagggagagagggggggggggaattgggccgaaaggggcccaaagagaggagggaggattttatttgttttctttttatt

SEQ ID NO: 79866 - DNA, 457 bp, Oryza sativa
  Clone ID: PAT_MRT4530_79547C.1
gcacgaggcagaaacccacgaaaaggctaaggaccatgaagaatataaggaaactttatgtatttatatcgagggggtttctcaatttaattaattatgacttcagcttggtaggttcagttgacacacacacacatatatatatctgtgtgtgtgtcaagcactaacccattatatataactactttatcttaaataataatttctttaggacaacaactgagtaatgacggagaaagactgaaagagccactcagtttggataagcacgcattgcccaatgccaaatcccaacgcctatttaagtgcataccaggcttcattctacaaattcagagcatgaattagcaaagctgatcaagagcacactactttccacaatgaagaagtctgaggtcactgtttcttcatcgtcgggaagatcggtcacaaacaatgctactgattattttatcga

SEQ ID NO: 79867 - DNA, 1551 bp, Oryza sativa
  Clone ID: PAT_MRT4530_79548C.1
atggcacggggctccgctctgctcgatggtagcgtgctgccgccttcccgcatcgtgagcgagaggcaggccgggctgccgcgccgcttcatgccggaacctgccaccggccgggagatagtcacgctgggcgagggacgcccggcgccatgctacccggggcggtccgtcttcttcctcccttttgcaatggcagggctggttccgccattttcttctttcttcatggatgttctggagttttacgatctccagatggcgcatctcacccccaacgcggtaatgacattggccatcttcgcgcacctgtgcgagatgttcatcggaccgcgggggccggtgctgaaccgctacatcccctgcgtcctcccgaagaagtgggatgactggaaaagccactggttctacacttccctcgccgacaaagcgcgcctacgacttcctagccatcccccggcgcaagccttcatctggccggggctcacaggggccatggtgtacggcgactaccttcgtcgccgtattgcgccgctccagcggcgcgcccggggcgcctgggagtacaccgggtccgaagactacatgaggacccaccagggagtcagatgggactgggctcctgaggacttcaagatagtggtccaacgggtgctgaatctcagctccgtggaggcatccctcattccccaaggagtcctccccctctgcagcgatccagaccgcgcttccatcctgaccatcatgcaggcggtcggggcgtcggaggagcgggctcctcgaggccacgatggcgcgggcaggagccgcaggggggaacaatctaccccgggagggggtcgtgcttttgggccccgcgacgggggcccggggagcagccgccctgccgacgcccgggggaagaggaagcagggaggaacccctcccccatctcctccccgagggggcggggcggcgcgtgccagcagcaggcgcccggagggggccacgccgacgtcgcagcccgagggggagcgaaagaagaagcggctccgcaagatgggggggacagaaccatcccggggaaaccttatttcccctccaaggtggtcgtttaaccgaccccctcgcagatcccgtcgcgtccctcccgccattccaagtccggccagtctgaggccgaggatccggcggccgcagaggctcggaggcgggattctgaccggcgagaagccgcggatcgcctacgggaagccgaggaggccgctcgggaggccgcccgggctcgctaggccgaggaagccgctcgggaggaggccggactccgccaggccgaggcgacgacatcctccgaggcgacccgtgaaactgaccggcaagaggccgcggatcgccttcgggaagccgaggaagctgcccaggcggccgtccgagctcaccaagctgaagaagccgcttaggaggaggccagactccgccaggccgaggcggcgacgacttccgaggcagctcgcgacgaggccgcgggcgcatcgcttgggcccactccctcaggcgacgctcaggaccaaccag

SEQ ID NO: 79868 - DNA, 2661 bp, Oryza sativa
  Clone ID: PAT_MRT4530_79549C.1
atggcgcacctcacccccaacgcagtaatgacgttggccatcttcgcgcacctgtgcgagatgttcatcggggtgcgcccatctctccggttgttccggtggttcttcaccgtacagccggtgtcgccaccgtcggtagtcggtggctgctacttccaaccgcgggggccggtgctgaaccgctacattccctgcgtccttcgcaagaagtgggatgactggaagagcgactggttctacacccctctcgccgacgaagcgcgcctccgacttccgagccagcccccggcgcaggcctccagctggcgggcgccggtagatctgggagacggctacgacgccgttcttgatcgcctggccggtttgcgatcccaggggctcacgggggccatggtgttcggcgactaccttcgtcgccgaatcgcgccgctccagcggcacgcccggggcgcctgggagtacaccgggcccgaggacaccatgaggacccaccaggggcgcaaatgggactgggaccctgaggacttcaggatagtggtccaacgggtgctgaatctcagctccgtggaggcatccctcatccctcaaggggtccttcccctctgctgcgatccagagcgcgccaacatcctgaccatcatgcaggaggtcggggcgtcgggggagcgggccccccgaggccacgatggcgcgggcgggagccgcaggggggaacaatctaccccaggagggggtcgtgcttctgggccccgtgacgggggcccggggggcagccgccctgccgacgcccgggggaagaggaaacaggaggataccccctccccatctcctccccgagggggcggggcggtgcgtgccagcagcaggcgcccggagggtgctgtgccgacgtcgcagcccgagggggagcgaaaaaagaagcggctccgcaaaataggggggaccgaaccaagccggggaaacctcatctcccccccaaggtggtcgtttagtcgacctcctcgcagcgagatcccgtcgcgcccttctcgccattccaagtccggccggtctgaggccgaggagacggcgaccgcggaggcccggaggcgggaagccgaccggcgagaagccgcaaaccgcctccgggaagccgaggaagctgcccaggaggctatccgggctcgccaggctgaggaagccgcttgggaggaggccagactccaccgggccgaggagtccatccgggagacggaggcggcgcgtgcacgcgggcggactgccaagcccccgacccgactccgcccgaggcgacgacgacttccgaagccacccacgacgaggccgcgggcgcaccgctcgggcccgacccatcgggcgatgctcaggacgagccagcttcgggggactgcccagatggaggtcctacaggtagagcgggcggagctcgacgcggtgtgggcgcgtgtcgaagaggggcgacgctcggtggaggccatggtggaggcgggccgcaaggcacaccgctggcacacctcggagctcgaggcccgtcgtagggacctggcggagatcgccagggaggtggaggaggagcgagagactgccctcattgccaccgccgtgtttaacgcggcgcgggacgacctctgcctccaatacgggagccggggggcggagctagagaagaagctcgacgcgtcccggcagcgcgaagaggcccttgaggctcgcgccacggtgctggaggagcgcgcccgtgccctggacacgaaggagagggaactggcgggtcgcgaggccgccgtcgccatccgggaggcaacgctggcagcgcacgaggccgcctgcgccgaagaggagtccgcactccgcctccgtgaggacgcgctcaccgagcgggagcaagctctcgaggaggccgaggtcgtggcgcagcggctggcggacagcctgtccctccgcgaggcagcgcgggaggagcaggcgtgccgtgatctggaaggcgcccgcgccgagagggccgcactggatcagcgggccgctgagctcgaggcgcgggcgaaggagctggacgcgagggcgcgcagcggcggggcggccgcgggcgacggtgatctagccgcctgcctcgcagctgctgaacacaccatcgccgagctgcagggcgcgctagactcgtccgccggggaggtcgaggccctccgcttggcaggcgaggtagggcccggcatgcttcgggacgccatctcccgtctagaccgcgccgggcggcaggcgggcctctggggcgggcggatcgcgaaatatgccgccaaccaggggggcctcgcccagcgcctctcagagatggccaggactctccagcggctccccgaggagctcgaggagacgatcaagtcatcctcgagagacctcgcccggggggcagtggagcttgtactggcaagctaccaggccagggacccggacttctccccgtgggcagcgctggacgagttccctcccggaaccgaggacgacgcgtgcgcgcaggtccgggacgccaccgtccacatcgtccacagcttcgagggtacggcccctcgactcgcgttcgccctcgactccgacgaggagggcggcgacggtggtgtggacgacagtgacgacgaggccggcgacccgggagcctcaaagtga

SEQ ID NO: 79869 - DNA, 273 bp, Oryza sativa
  Clone ID: PAT_MRT4530_7954C.1
atgacaagtttacctctagttgaagatcgaatcgatgagctagtgtccctcaacggtgacggccatggtgcggtgttcaccggcacggggaacacggccctgcccccgtccccgtcggcggagccggccgtgagcgccacgtgcgtcggagctcttgttctccctcacctcgctcgccggcaacgggccgtcgtcgtggcccgtgaggaggccaaggccaccggatccagcgaccccggcctcctcgccgtcggatccggccgaccgaagtaa

SEQ ID NO: 79870 - DNA, 3015 bp, Oryza sativa
  Clone ID: PAT_MRT4530_79550C.1
atggcacggggctccgcaccgctcgacggtagcgtgctgccgccttcccgcatcgtgagcaagaggcaggccgggctgccgcgccgattcatgccggaatctgccaccggccgggaggtggtcgcgctgggcgagggacgcccggcgccacactacccagggcggtccgtcttcttcctctccttcgcaatggcggggctggtcccgccattctctaatttcttcatggatgttctggagttttatgatctccagatggcgcacctcacccccaacgcaataatgacgttggccatcttcgcgcatctgtgcgagatgttcatcggggtgcgcccatctctccggctgttccggtggttcttcaccgtacagccggtgtcgccgccgtcggtggtcggtggctgctacttccagccgcgagggccggtgctgaaccgctacattccctgcgtcctccgcaagaagtgggacgactggaagagcgactggttctacacccccctcgccgacgaagcgcgcctccaacttccgagccagcccccggcgcaggcctccagctggcgggcgacggtagatctgggagatggttacgacgccgttcttgaccgcctggcgggtctgcgatcccaggggctcacgggggccatggtgttcggcgactaccttcgtcgccggatcgcgccgctccagcggcgcgcccggggcgcctgggagtacaccgggcccgaggactacatgaggacccaccaggggcgcaagtgggactgggtccctgaagacttcaagatggtggtccaacgggtgctgaatctcagctccgtggaggcatccctcatcccccacggagtcctccccctctgctacgatccagagcgcgccaacatcctgaccatcatgcaggcggtcggggcgtcgggggagcgagccctccaaggccacgatggcgcgggcgggagccgcaggggggatcaatctgccccgggagggggtcgtgcttctgggccctgcgacgggggcccggggggcagccgccctgccgacgcccgggggaagaggaagcaggagggtactccttccccatctcctccccgagggggcggggcggtgcgtgccagcagcaggcgcccggagggtgccgtgccgacatcgcagcccgagggggagcggaagaagaaacggctccgcaagatgggggggaccgagccatgccgggggaacctcatctcgcccccgaggtggtcgtttagccgacctcctcgcagcgagatcccgtcgcgccccctccgccattccatgtccggctggtctgaggccgaggagacggcgaccgcggaggcccggaggcgggaagctgatcggcgagaagctgcggaccgcctccgggaagccgaggaagctgcccaggaggccgtccgggttcgccaggctgaggaagccgctcgggaggaggccagactccgccgggccgaggagtccgtccaggaggcggaggcggcgcacgcacgccaggcggcctgccaagcccccgacccgactccgcccgaggcgacgacgacttccgaggctacccacgacgaggccgcgggtgcaccgctcgggcccgacccctcgggcgacgctcaggacgagccagcttcgggggacgcccccgagtccggcacgtccatcggcgggccgatccgtgcagcacccacaccgaggcggctctcccctctgccttccgctgccccactgagcgcagagcccctcctgcaggccttggccgccgcgaacaccacggtgttggacgggttaagtgcccagatggaggtcctgcaggcagagcgggcggaggtcgacgcggcgtgggcgcgcgtcgaagaggggcggcgctcggtggaggccatggtggaggcgggccgcaaggcacaccgccggcacgcctcagagctcgaggcccgtcgtagggacctggcggagatcgccagggaggtggaggaggagcgggagactgccctcatcgccaccgccgtgctcaacgaggcgcgggacgacctccgcctccaatatgggagccgggcggcggagctagagaagaagctcgacgcgtcccggcagcgcgaagaggcccttgaggctcgcgccacggcgctggaggagcgcacccgcgccctggacgcgaaggagagagacctggcggaccgcgaggccgccgagtccgcactccgcttccgcgaggacgtgctcaccgagcggggccgagctctcgaggaggccgaggccgcggcgcagcggctggcggacagcctgtccctccgcgaggcagcgcgggaggagcaagcgcgccgcgatctggaaggcgcccgcgccgagagggccaaactggatcagcgggccgctgagctcgaggcgcgggcgaagaagctggacgcgagagcgcatagcggcggggcggccgcgggcgacggcgacctagccgcccgcctcgcagccgccgaacacaccatcgccgagctgcagggcgcgctggactcgtccgccggggaggtcgaggccctccgcttggcgggcgaggtagggcccggcatgcttcgggacgccgtctcccgtctagaccgcgccgggcggcaggcgggcctctggggtgggcggaccgcgaaatacgccgccaaccaggggggcctcgcccagcgcctttcagagatggccgggaccctccagcggctccccgaggagctcgaggagacgatcaagtcatcctcgagggaccttgcccgaggggcggtggagctcgtactggcaagctaccaggctagggaccctgacttctccccgtgggcagcgctggacgagttccctcccggaaccgaggacggtgcgcgcgcgcaggtccgggacgccgccggccacatcgtccacagcttcgagggtacggcccctcggctcgcgttcgccctcgattccgacgaggagggcggtgacgacggtgcagacggcagcgacgacgaggccggcgacccgagcgcgtcggagtga

SEQ ID NO: 79871 - DNA, 1785 bp, Oryza sativa
  Clone ID: PAT_MRT4530_79551C.1
atgccttccgctgccccactgagcgcagagcctcttttgcaggccttggccgccgcgaacaccacggtgttggacgggttaagtgcccagatggaggtcctgcaggcagagcgggcggagctcgacgctgcgtgggtgcgtgtcgaagaggggcgacgcttggtggaggccatggtggaggcgggccgcaaggcacaccgccggcacacctcggagctcgaggcccgtcggaaggagctggcggagatcgccagggaagtggaggaggagcgggaggctgccctcatcgccaccgccgtgatgaacgaggcgcaggacgacctccgccttcaatacgggagccggggggcggagctagagaggaagctcgacgcgtcccggcaacgcgaaaaggcccttgaggctcgcgccacggtgctggaggagcgcgcccgcgccctggacacgaaggagaggggactggcgggtcgcgaggccgccgtcgccatccgggaggcaacgctggcggcgcacgaggccgcctgcgccgaagaggagtccgcactccgcctccgcgaggacgcgctcaccgagcgggagcaagctctcgaggaggccgaggccgcggcgcagcggctggcggacagcctgtccctccgcgaggcagcgcgggaggagcaggcgcgccgtgatctggaaggcgcccgcgccgagagggccgcactggatcagcgggccgctgagctcgaggcgcgggcgaaggagctggacgcgagggcgcgcagcggcggggcggccgcgggcgatggcgatctagccgcccgcctcgcagctgccgaactgtcacaccctgaaaattcaaaatatataaattgttgtttaattggaatttttagaaataattttaaaaccgtcgccgtcgctcgggaagaccaccgtcgtgctcgccaagtcgtcgccgtcctcgtctgccccttcgccgtcgccggagatcgtcggagcttcgtcgccgtcgtcaagccgaagagcttcgccgcttcctcctcgtcgccgtcaccgtccgttgaccttccgccgtcgttttggtcgccggtgagttcgccgtgccgcccgcttcgtcttggtgccctccgtttgtgtcctcgcgccgccgttcgccggcgagcgtgcgccgttcgagccgtctcctccgccgagccgccgccgctgtcggtgacgtcaccgctgacgtcatcggggtcgtccgccggcgcgctggactcgtccgccggggaggtcgaggccctccgcttagcaggcgaggtagggcccggcatgcttcgggacgccgtctcccgtctagaccgcgccgggcggcaggcgggcctctggggcaggcggatcgcgaaatatgccgccaaccaggggggcctcgcccagtgcctctcagagatggccgggaccctccagcggctccccgaggagctcgaggagacgatcaagtcatcctcgagggacctcgcccaaggggcggtggagctcgtactggcaagctaccaggccagggacccggacttctccccgtgggcagcgctggacgagttccctcctggaaccgaggatggtgcgcgcgcacaggtccgggacgccgccgtccacatcgtccacagcttcgaggcgacgacgaggccggcgacccgggagcctcaaagtgagccttcgggcctccttcttcctcaaatggcgcgggtcggggctagtgcctggggagatccgcgtgtcgagactggccaggccgggaacgtggtgaccgagggttatggatga

SEQ ID NO: 79872 - DNA, 1914 bp, Oryza sativa
  Clone ID: PAT_MRT4530_79552C.1
atggcacggggctccgcaccgctcgacggtagcgtgctgccgccttcccgcatcgtgagcgagaggcaggccgggctgccgcgccgattcatgccggaatctgccaccggccgggaggtggtcgcgctgggcgagggacgcccgacgccacactacctggggcggtccgtcttcttcctctctttcgcaatggcagggctggtcccgccattctcttcttttttcatggatattctggagttttatgatctccagatggcgcacctcacccccaacgcggtaatgacgttggccatcttcgcgcacctgtgcgagatgttcatcggggtgcgcccatctctctggctgttccggtggttcttcaccgtacagccggtgtcgccgccgtcggtagttggtggctgctacttccagccgcgggggcaggtgctgcaccgctacattccctgcgtcctccgcaagaagtgggacgactggaagagcgattggttctacacccccctcgccgacgaagcgcgcctccgacttccgagccagcccccggcgcaggcctccagctggcgggcgacggtagatctgggaaacggctacgacgccgttcttgaccgcctggcgggtctgcgatcccaggggcttacggggccatgcgagatcccgtcgcgccccctccgccattcccagtccggccggtctgaggccgaggagacggcgaccgcagaggcccggaggcgggaagctgaccggcgagaagccgcggaccgcctccgggaagccgaggaagccgcccaggaggccgtccaggttcgccaggctgaggaagccgctcgggaggaggccagactccgccgggccgaggagtcagtccgggaggcggaggcggcgcacgcacgccaggcggcctgccaagcccccgacccgactccgcccgaggcgacgacgacttccgaggccacccacgacgaggccgcgggcgcaccgctcgggcccgacccctcgggcgacgctcaggacgagccagcttcgggggacgcccccgagtccggcacgtcgatcggcgggccgagccgtgcggcaccctcaccgaggcggccctcccctctgccttccgctaccccaccgagcgcggagcccctcctgcaggccttggccgccgcaaacaccacggtgttggacgggttaagtgcccagatggaggtcctgcaggcggagcgggcggagctcgacgcggcgtgggcacgcgtcgaagaggggcggcgctcggtggaggccatggtggaggcgggccgcaaggcacaccgccggcacgcctcagagctcgaggcccgtcgtagggacctggcggagatcgccagggaggtggaggagcgggagactgccctcatcgtcaccgccgtgctcaacgaggcgcgggacgacctccgcctccaatacggaagccgggcggcggagctagagaagaagctcgacgccgcccggggagtccttgatgctgccgctacccgggaacggcgggcggcggagatcgaggcggcctcccggcagcgcgaagaggcccttgaggctcgcgccacggtgctggaggagcgcgcccgcgcgaaggagagggacctggcggaccgcgaggccaccgtcgccatccgggaggcaacactggcggcgcacgaggccgcctgcgctgaagaggagtccgcactccgcctccgcgaggacgcgctcaccgagcgggaacgagctctcgaggaggccgaggccgcggcgcagcggctggcggacagcctgttcctccgcgaggcagcgcgggaggagcaggcgcgccgcaatctggaaggcgcccgcgccgagagggccgcacaggatcagcgggccgctgagctcgaggcgcgggcgaaggagctggacgcgaagtgcgcatag

SEQ ID NO: 79873 - DNA, 380 bp, Oryza sativa
  Clone ID: PAT_MRT4530_79553C.1
gtcgatgagtaaaattcttttattcaaaaatcgaaaataatttcgtgcatcagtgaccaaatgaattcgaaaactttgttgaaattttacggtttgtcccaggcaaagtccggatccgattcgaaaccatgcgaaatgaagaaatcatcagcttcgctgggtccacgcgaaccaaacacataactgtacggcttcttgtgttgcttctcaatttgatgaagcagcggcgtgaatactctccacgcctcggacaattcgtctgttcgtacgaaattcacctgcgaaccgtcaagaacttcaccaatcaatcgttcatacgattcgggaatctgagcgttcggaaattcgtcctgataaacaagatttaattgagttggatg

SEQ ID NO: 79874 - DNA, 468 bp, Oryza sativa
  Clone ID: PAT_MRT4530_79554C.1
aaggcattaaatacatggcaacaaaatttatttgattgcaaaaagaattaaacaattttgcaacaaattaaccccaatagggccgagggaaaacaaaatttatccccctttcgacaaagagagccccaagaatgcaccggggggaaaacaggaatgggaccaccaaaaaaaacttgttgaaacaaacaccgaaacattaattggttatgcccagggctagaaggggaggccccggggggggaacacggggcttttccaccccttcgggcaagccagggccatttgctcctgggggacagtttcaccagcgaggggggccaagtaaaggggccccgtgggtacccccccggaaatttccggcccggtccctgagggggaaccagttttctttaagtgggtgtaattagaggttggggacccaaggaaaagaggggggttgggaaaatgttttacccccaaatttaaaaa

SEQ ID NO: 79875 - DNA, 3189 bp, Oryza sativa
  Clone ID: PAT_MRT4530_79555C.1
atggcacggggctctgctctgcacgacggcagcgtactaccgccttcccgcatcgtgagcgagaggcacgccggactgccgcgccgcttcatgccggagtccgccaccggtcgggagatagtgatgctgggcgaggggcgcccggcaccagactacccggggcggtccatcttcttcctccccttcgcaatggctgggctggtcccgccattttcttctttcttcatggatgtcctggagctctacgatctccagatggcgcacctcacccccaatgcggtgatgacattggccatcttcgcgcacctgtgcgagatgttcattggggtgcgcccctctcttcagctgttccggtggttcttcaccgtgcagtcggtgtcaccgccgtcggtggttggcggctgctacttccagccgcgggggccggtgttgaaccgctacatcccctgcgtcctccgcaagaagtgggacgactggaagagcgactggttctacacccccctcgccaacgaagcgcgcctccgacttccaagccagcccccggcgcaggtctccagctggcgggcgccggtagatctgggggaggactacgacgccgtcctcgaccgcctggcgggcctgcgatcccaggggctcaccggggccatggtgtacggcgattacctccgtcgccggattgcgccgctccaacggcgcgcccggagcgcctgggagtacactgggtctgaagactacatgcggacccaccagggagccagatgggattgggctcccgaggacttcaagatcgtggtccaaagggtgctgaatcttagctccgtggaggcgtctcgcattcctcaggagatcctccccctctgctgcgatcccgaccgcgcctccattctaaccattatgatgggggtcggggcctcagaggagagagcccctaagggccacgacggcgcgggcgagcgccgccggggggaacaatctgccccaggagggggtcgtgcttctgggccccgcgtcgggggctcggggagcagccgccctgccgacgcccaggggaagaggaagctgggaggaacacccccccccatctcctccccgagggggcggggcggcgcgtgccagcagtcggcgcccggagggggccgcgccgacgtcgcagctcgagggggagcgcaagaagaaaaggctccgcaagacgggggagacggaaccatgccggggaaacctgatttcccctccaaggtggtcattcaaccgaccccctcgcaggaagttttttcttactcattttgttcgtcttctggttttttcttctgcttcagcgatgtcccgtcgcattcctcccgccaccccaagtccggccagtccgaggccgaagatccagcggccgcagaggagcggaggcgagaatctgaccggcgtgaagccgcagaccgccttcgggaagctgaagaggccgcccgggaggccgcccggattcgccaagcggaggaagctgctcgggaggaggccgcccgggctgaggaagccgctaaggaggtggccgcccgggctcgccaggctgaggcaacagctgctgctggcgcgtcaactgggcccactccctcgggcaaccctcaggcgacagcctccggggaggctcgcgacgaggccgcgggcacatcgcctgggcccacctccccgggcgacgcccaggatcaaacgggtccgggggacatccccgagcccagcatgtcctccggggggccgagccgcatcgccttctctccaaggcggctcttctcctcatcttccgtcgccccgctgagcgccgagcccattctgcaggccttggccgccgcaaacaccgcggtgctagatgggttcagcgcccaagtggaggccctgcgcgcggaacgagcggagctcgaggccgcatgggcacgcgttgaggaggggcggcgctcggtggacgccatggtggaggtgggccgtaaagctcaccgccgtcacgtctcggagcttgaagcccggaaggcggcgctgacggagatcgctcgtgaggtggaggaggagcgagcggccgccctcatcgctaccaccacgatgattgaggcgcaagacgccctccgccttcaaaacgccagccgggaggcggagctgaaagaaaagctcgacgccgcccagggagtccttgactccgccgctgcccgagagcggcgggtaacagagactgaggcggcgtcccggcggcgcgaggagtcccttgaggcccgtgctatggcgctggaagaacacgccggcgccgtggagaaaggcttgacggaccgcgaggccgccgctgctctccgggagacgacgctggcggcgcacgaggccgcctgcgccgaagaggagtgcgcgctccgcctccgcgaggacgcactcgctgagcgggaacgagctctcgaggaggctgaggccacgaccaaacggctggcggacagcctgtcccttcgcgaggcggcgcaggaggagcaggcgtgccgcaatcttgaatgcgtccgcgccgagagagccgcactggagcagcgggctgctgatctcgaggcgcgggaaaaggagctggacgcgagggcgcatatcggtggggcggccgcgggcgaaagcgacttagccgcccgcctcgcagctgccgaacacaccgtcgccgatatgcagcgagcgctggattcctccaccggggaggccgaggcccttcgcttggcgggcgagattgggcccgacatgctttgggatgcggtctcccgcatgaagcgcgccggtcggcaagcgggcctctggaaaggccagacgacggtgccccccaccaatctggaaggcctcgctccgcacctcaacaggatggcctgggttctcgaacaactccccgaggagcttgagaagaccatcaagtcatcctcgagggacctcgcgcggggagcggtcgaactcgtgctggcgagctaccaggcccgggaccccaacttctctccatggatggcgctggaggagttccctcctgggaccgaggacgacgcgcgcgcgcgggtcggggatgccgccaaccacatcgtccaaagcttcgaggggtcggcccctcggctcgcgttcgcccccagctccaacgaggagggcgacgccagcggcgaggacgacggtggcgacggggccagcgacccgggcgcattggaatga

SEQ ID NO: 79876 - DNA, 1267 bp, Oryza sativa
  Clone ID: PAT_MRT4530_79556C.1
agcataaaaacaacgaagatgttcaatattccaatagttgtcgatatgagtaccgtcttcacgcttgagtcgataagaacctggtcgagtaacttcagaaactatgaacggtccttcccacaaaggagataacttgtgccgatctcgtgcagtcttaattttcctcagaaccaagtcgccgactaagaaagctcgtgatcaaacattgcgattgtgataacggcgcatcccctgtaaataccgagccgactgaattagcactgcttcacgggcttcttccagtcggttgagatcatctactcggtcttctccatagcgctcctcgctgaaattacgaaatcgcaaagattcgaattctacctcacttggcaacattgcttccgcaccatatactagaaaggacggtgactgtccgtagcccgactgggtgtggtgcgcagggaccaaaggacatatggcaactgttctacccatttgccagcatagggatgcagtcggtcaaaaacttgtgcttttatcccttgaagtaccataccattagcacgttcaacttgtccattgctcatggggtgcgctacggaggcataacaaattttgatgccgaagtcctcgcaaaaatcttgaaatactccgctagtgaattgagtgccgttatcagtgatgattcgattgggtaccccaaaccggtgcacaatgttgatgaaaaaagctctagccttgtctgccgtgattgtgatgactggtttggcttcgatccacttggaaaatttgtcaacagctacaaagagatgagtataaccaccgatagcctttttgaacgggccaaccatgtcaagcccccaaaccgcgaacggccaaaataacaggatggtttgcaactcctgagccggtagatgagtctgtcgggcgaaaaattgacaaccttcacatgttcgcacaattttgtctgtatcggatacagctgtgggccagaaaaaaccctgctgataagccttgccaacaacagttcgagcggcagcgtgattgccacagatgcctgaatggttatctcttagcaattgtcttccgtcttccaaagacacacagcgttgcaaaatccctgatggacttttcttgtacagctcggtctcatgtatgacataaagtttgctgcgtctggagatccgctcggcttcgtctttatcttgagggagctaccaggatgagagactctcccgggtgggctccccaaatccagtccccactcttgcacagtcgcactcgcacc

SEQ ID NO: 79877 - DNA, 2898 bp, Oryza sativa
  Clone ID: PAT_MRT4530_79557C.1
atggcacggggctccgcaccgctcgagggtagcgtgctgccgccttcccgcatcgtgagcgagaggcaggccgggctgccgcgccgattcatgccggaatctgccaccggccgggaggtggtcgcgctgggcgagggacgcccggcgccgcactacccggggcggtccgtcttcttcctctctttcgcaatggcggggctggtcccgccattctctgtttttttcatggatatcctggagttttatgatctccagatggcgcacctcacccccaacgcgataatgacgttggccatcttcgcacacctgtgcgagatgtttattggggtgcgcccatctctccggctgttccggtggttcttcaccgttcagccggtgtcgccgccgacggtagtcggtggctgctacttccagccgcgggggcaggtgctgaactgctacattccctgcgtcctccgcaaaaagtgggacgactggaagagcgactggttctacacccccctcgccgacgaagcgcgcctccgacttccgagccagcccccggcgcaggcctccagctggcgggcgacggtagatctgggagacggccacgacgccgttcttgaccgcctggcgggcctgcgatcccaggggctcacgggggccatggtgttcggcgactaccttcgtcgccggatcgcgccgctccagcggcgcgcccgaggcgcctgggagtacactgggcccgaggacatcatgaagacccaccaggggcgcaaatgggactgggaccctgaggacttcaggatggtggtccaacgggtgctgaatctaagcttcgtggaggcatccctcatcccccaaggggtcctccccctctgctgcgatccggagcgtgccaacatcctgaccatcatgcaggaggtcggggcgtcgggggagcgggccccccgaggccacgatggcgcgggcgggagccgcaggggggaacaatctaccccgggagggggtcgtgcttctgggccccgcgacgggggcccggggggcagccgccctgccgacgcccgggggaagaggaagcaggagggtacccctcccccatctcctccccgagggggcggggcggtgcgtgccagcggcaggctcccggagggtgctgcgccgacgccgcagcccgagggggagcgaaagaagaaacggccccgcaagatgggggggggaccgagccatgccgggggagcctcatctcgcccccgaggtggtcgtttagccgacctccccgcaggttcgtccccgcgcccaccgcggccgtattcattctcccatctcctaaggcgagttttcactcacccgtttctttttgtcttctggtttttcttctgcctcagcgagatcccgtcgcgccccccccgccattccaagtccggccggtctgaggccgaggagacggcgaccgcggaggcctggaggcgggaagccgaccggcgagaagccgcggaccgcctccgggaagccgaggaggctgcccaggaggccgtccgggccttggccgccgcgaacagcacggtgctggacgggttaagtgcccagatggaggccctgcaggcggagcgggcggagctcgacgcggcgtgggcgcgcgtcgaggaggggcggcgctcggtggaggccatggtagaggcgggccgcaaggcgcaccgccggcacacctcacagctcgaggcccgtcgtagggagctggcggagatcgccagggaggtggaggaggagcgggagactgccctcatcgccaccgccgtgctcgacgaggcgcggaacgacctccgcctccaatacgggagccgggcggcggagctggaggagaagctcgacgccgaccggggagttcttgacgccgccgctgcccgggaacggcgggcggcggagaacgaggcggcgtcccggcagcgcgaagaggcccttgaggctcgcgccacggcgctggaggagcgcgcccgcgtcctggacgcgaaggagcgagacctggcggaccgcgaggccgctgtcgccacccgggaggcaacactggcggcgcacgaggccgcctgcgccgaagaagagtccacactccgcctccgcgaggacgcgctcaccgagcgggggcgagctctcgaggaggccgaggccgcggcgcagcggctggcggacagcctgtctcttcgtgaggcagcgcgggaggagcaggcgcgccgcaatctggaaggcgcccgcgccgagagggccgcactggatcagcgggccgctgagctcgaggcgcgggcgaaggagctggacgcgagggcgcacagcggcggggcggccgcgggccacggcgacctagccgcccgcctcgcagccgccgaacacaccatcgccgagctgcagggcgcgctggactcgtccgccagggaggtcgaggccctccgcttggcgagcgaggtagggcccggcatgcttcgggacgccgtctcccgtctagaccgcgccgggcggcaggcgggcctctggggcgggcggcacgcgaagtacgccgccaaccaggggggcctcgcccagcacctctcagaaatgaccggggccctcgagcggctccccgaggagctcgaggagacgatcaagtcatcctcgagggacctcgctcggggagcggtggagctcgtactggcaagctaccaggccagggaccctgacttctctccgtgggcagcgctggaagagttccctcccggaaccgaggacggcgcgcgtgcgcgggtccgggacgccgccgaccacatcgtccacagcttcgagggtacggcccctcggctcgcgttcgcgcttgactccgacgaggagggcggtgacgacggtgcggacgacagcgacgacgaggccggcgacccgggcgcgtcggagtga

SEQ ID NO: 79878 - DNA, 225 bp, Oryza sativa
  Clone ID: PAT_MRT4530_79558C.1
atgacgacgcggttgtggcctcggcacctcggcttgcgtcgggcgtcggtcgtggcctccgtgcgcgcggcgaggacagtggcgtccggcgtgaggatggcgtgcggcgcgtgcggtggtggagtgcggcggcgggtcgcgccgccggcgttctcgctggtgtcacgcacggcgcgggaagagcaggagacaggatcctcggacgtgcgcggctatcaagcgtag

SEQ ID NO: 79879 - DNA, 486 bp, Oryza sativa
  unsure (1)..(486): unsure at all n locations
  Clone ID: PAT_MRT4530_79559C.1
tgagataggggaaatagcgggctatgtctacacccgggcaaatctggccgtgtccgagccgagcatacatagggaactggccatggccatagcttcgactttcgcacggcggagcatccggcatcacctgctcgaaggttgcgatggtccattcacaagataggatctaaccgtgcaacacactggcagatggatgcgagctaggaagaaagaatccgatgtcccgcttaccgtcttcggtccatcgaccgttcgcccggccagccagcctcgccggctccggcgacggccatagatatacaagctccgccggcttgcttgcttgcttgtcgtccgacggccgcccggcgccgcctaagcttgcttgttgnngtgtcngtggccttgaatgtttggtgatgtgcaaactactacgaaatggagtaagaaataagtggagcatactgtcnccatcacttggttacttaaaaaaaaaaaaaaaaaaaa

SEQ ID NO: 79880 - DNA, 228 bp, Oryza sativa
  Clone ID: PAT_MRT4530_7955C.1
gtcgactctggaggatccccgccccgtctgcaaggcagaccgattcaacggggtggtgtcggggagaacccccgggcttcctggcacaacgtggccgttctacacgggctgggtgattcggctgatgggatcagctaggcccgggtggccgtttgaaagttttgctgaagaagatgaagcggatcctgctgatgaggagttcttccaggagcaagccggctacgatga

SEQ ID NO: 79881 - DNA, 753 bp, Oryza sativa
  Clone ID: PAT_MRT4530_79560C.1
atggcgacggcgacggcgacggtgtggatgacccgcggcggcgatggagtggacgacggagaactaacatcaggtgttgtcaccgcagcgttctgtactgtcggtgcagcagcagcagaggattctttgaagcgggagtctggcaccaaggtgcatcatgccaacatccaggcagccaaggctgtggcggatatcatacgcacaacattgggccctcagtcaatgttgaagatgcttcttgatgctgcaggaggtattgttgtaactaatgatggcaattgtatattgcgggagctagaccttgcacacccagctgcaaagggcccggaacctcctggtgaagaataccggaacttcctggcagagatgagcagcccggaacttccggagtttttgagccaggaacttccgggcaacagagaaaatcaaaatttggggaagcaaaacaggtcctagaagtttaaactggaagcctgccaggaggttccgggcaaaaagtgccaggaacttccgggcagcacttaggaaaatttgctgttgaaatggcgcccggaagttctggccagaacctccgggtagccctctcctagaaccacacttgaaaccccttttaatagtacggtttttccttcggtgattttcgcacttaggagcattcaaattggggggtctccttgcattcttagccatcacaacttgctttgggactaaactccaaaacccactagggggtttaagtgcatcttcagtcat

SEQ ID NO: 79882 - DNA, 171 bp, Oryza sativa
  Clone ID: PAT_MRT4530_79561C.1
atggacaaggcgacagatggggaaaggatccacaccaccggcctctcttcgccatggcggccgaacacacccaagaatcctcctctcgacattctaaatctcaaaaattcttcaacttaccatggtgatgggaggttgattatcctgttgctgtttcagataacccagtga

SEQ ID NO: 79883 - DNA, 306 bp, Oryza sativa
  Clone ID: PAT_MRT4530_79562C.1
tcgatcgcgtgcccgaaaagccagtctatgacgctatactccagcctgacgcacgccgacgaccgcgcgacagcagggtgcgacgcgctaactacggactcggacgcacgcgcccttctcgacctactaccgctgctttcgagccgactcctgcgacgccgacggccaaggtctaacgatctgtagagacaccagccagaccgattcctcatctgggaccatcttgcgtccgccggcgatggaggacgaccaccccgaagctcgagctaaatcgttactatcacatgcagcactcgcagagcacgc

SEQ ID NO: 79884 - DNA, 627 bp, Oryza sativa
  Clone ID: PAT_MRT4530_79563C.1
atgggccaagagataagagatgtggttagtgcaaatacccttatacattgtatattgtcaatttcaattatgtacaacataagtttaaaaaaggagcagttttacatcctcaaggagctatggacagacgccggcgcggtggcgggaagcgacagaggagaggcagcacagaaaggggtcgccgtgggctggcgtggccgagcgccgcaacgccctggtttggccagggcgctggtggcaaaaactcgtcaacgagcggaggagaaacttatcgccgttgccgtcgcgagcccgcccaccgccgccagttgcgtaggctgccgcctcgcctggccgtcgcctcgcgcgccgctcgctgcttgccgctccttcgccgagcaacgcgctgccgcggccgccgcgctgtccgccgcccgtcccgcgcccgccgcagccactgcgtcgcctccgccagcagccgccacaccccttcgccagcagccgccgcgcctcgccgacggagccgccgccgcagccttctcccgccgagccgctactccctcacggggaggaggggagggggagcagccgccaccgccggggccgccgccgctgttgacggaggaggggaggggaaggaggagctag

SEQ ID NO: 79885 - DNA, 545 bp, Oryza sativa
  unsure (1)..(545): unsure at all n locations
  Clone ID: PAT_MRT4530_79564C.1
gcaggttggaagttgattcatacagcaacatgcaccattgaccgttcatttaaaaagaacacaaagtacagtgcctagatcacagcggatgaggatactaactttacttctctctaacttcgagtcattgacaaatgactccgttgagtagaggatccacatctcagtgacccatattagagaggatccacatctcagtgacccatattagagggaagtaagtcaaaggatctcgatccgatcacagcacatctgaatataacacaatcgcagcagtaagtaggttacatttacagatgctcaagctcaatgttctcaacggcgtttggtgtcagactgtcagtaatcttggtatgcatttctacatccatttggcgtcagcaatacatttctagctcctcactcctcagcatgtaggtgagatcattaaactactgatccaaccctgcaattcaaaacatatccaaggttggtaatgcatctaaatttacagagncctctaaatcttgctgggaggcagtccatccgggttcataggcttccag

SEQ ID NO: 79886 - DNA, 214 bp, Oryza sativa
  Clone ID: PAT_MRT4530_79565C.1
ttacttatcaaacggaccattccacttcactccatgtcagacctcaacatattttcccaaaagagggcttcttttacaagtttacaacctcaacttttcaggtgccaagttctacccccccctcactttacattttggattagacagggtttccccctccccacgaaatcctttttttcgcatccttcagggccttataaaacactatttcccc

SEQ ID NO: 79887 - DNA, 402 bp, Oryza sativa
  Clone ID: PAT_MRT4530_79566C.1
cgctgtaaattataactttttttttcactggaacgcttgtctgctgtcccctactgaaactgaaagtgatctccctaattcaaaattgcagatattttcctgcaaaagatcagcgcatatcaacagcttgatatcaatcacccaccctcataaaaacaattcaacccctccaaatctgcatctcgatcatgctgacattaataaataaaccagcaactagagtgcatgcaatgtcgaacattgcttattacagttagcacgtagtactatatagtacacgtcgcgtcatcgtcgatcatggcacatataaaacttgacacaagatggtgatagccaatttcttgaagtcagtttagttatctgtattgaaaaaaaacatatattgcaagtggtttattccaa

SEQ ID NO: 79888 - DNA, 375 bp, Oryza sativa
  Clone ID: PAT_MRT4530_79567C.1
atgccaggaggcatccccgccccaccctgccgccagcatcgaagcggcggcatcgacagcgcgcggcgagcggcgagcggcgcacggctatccctccgcccgtcgccgcctctctccctccgcaaggcgagcaggacacagggcggggtggccaacggcggatggcgggcggcggcgggcctcggcgccgtcccggatttgcttgctcttctttcttccttcccaatctggatttgcttggatgtggtctgcatgcagtgcggcgattcgtccggcggcgactccggctctgccccgagtgcacgcacacgccttgcccctgcgccgcgtcgtcctcatccccttcctccggccaagggtggaataggaatatga

SEQ ID NO: 79889 - DNA, 1406 bp, Oryza sativa
  unsure (1)..(1406): unsure at all n locations
  Clone ID: PAT_MRT4530_79568C.1
tcggttctctcctcttccccgtctccgcctctattccgaactagtcctgctcctgcggatttcccaaccaccaccaccgcctccgctctatcaaccctcgctccgatccgcgccctccctgtctcctgtggtggatccgcgatggagcagcagccgctgtccttccatttaggtagagcaatgtgtaacatctataccagaagatcatgaggccacttgttggggatgtggactccgtctcatttttgcaagttatgctcctgtttttaagtgtggctggtgtggagcaatcacacaaagtaaccaaatttcacgaaaacctgacagtgtatgcttttctcattggaggaatttccgggacaggttctttgtgactgtgctcatcctcttcatgctcttcgtcatatgtggtggggtctgggcggtatatccagttgttttctcgatcagcacattttgtggcatctttcactgcatattaacaggtgtactagctgtatttaccatcacaagttattgcttggcctcttttaaatctgctggtgcaccggcagacatgcggtggggcagctatcccatggttgggaaaaatgacctggaaaactataccttctgtacatactgtagtaaaccaaagcccccaagggcacatcactgccgatcttgcaaaatgtgtgtgttagacatggatcatcattgcccatttattgggaactgtgtgggagcttcaaatcaccgtgcttttgtattttttcttatttctgtggtcatcagttgtagttatgctgctggtatgaccatttattcaagttatcatatatggcccccactagattttgaaaatctagcatcaactcaccgttcaatgggttatataaagatgctaattgagattattggtaccttggcaagctctgcattcttcttgtcagcaaggggtcttgttacagtatatattgcatttgctagtctatcagttaacgccgatataggtgtgctgttgttccagcaacttaattatatatatgaaggaaatacataccttaaccgtttaagttcgctgaatgtcatgcacagcgagagaggcctgcaaaaccttattcgattttttgggtgcccctactcagtttctagagtattatcgggctactcaaacactggcaagttacaggacaatttccagcaacttagttatatatatgaaggaaatacataccttaaccgtttaagttcgccgaatgtcatgcacggcgagagaggcctgcaaaatcttattcgattttttgggtgcccctactcagttttccagagtattatcgggctactcaaacacnggcaagtttacagggacaantcgaggctnaaaaacttcttttagagtgggtagaaatgtgtaatattatcca

SEQ ID NO: 79890 - DNA, 384 bp, Oryza sativa
  unsure (1)..(384): unsure at all n locations
  Clone ID: PAT_MRT4530_79569C.1
cggccgcgtgggnaaaaaaaaaaggggggaggaaaaaaaaaaaaaaaaaaaaaaaaaaaaaaaaaaaaaaaaaaaaaaaaaaaaaaaaaaaaaaaaaaaaaaaaaaaaattaaaaaaaaaaaaaaaggggcgggccgttttaggggttcccaagtttacttccccttccttgcaacttaatactttttttttggggcccccaaaattaaattaattggccgccttttaacaacgtcgggcctggaaaaaccttggctttcccaaattaaatcgctttgcagaaaatccccttttccccagttggcttaataccaaaaaggccccccccattcgcctttccaaacatttgcccaccttaattggcaattggacccccccttttac

SEQ ID NO: 79891 - DNA, 2427 bp, Oryza sativa
  Clone ID: PAT_MRT4530_7956C.1
atggaggcgatcgaggagctctcggagctcgccgacgccacgcggcaggcctccgcgctgctcgccgacgacgacccgtcggagcagcccgcgcagcggcgcgggggttcctccttcctcaccgtcgtcgcgctcggcaacatccctaccggggagaatggtgcgacgagggccccaatatgcgtagatcttcagagagatgcatcactcagcagcaaatccatcatgctgcaaattgacagcaagtcgcagcaggtttctgccagttccctcaggcattcgctgcaggaccggttaaccaaggccggtagttttgggaaggggcgatcggaggagataaatgtgaaattatgcacgagcactgcccctccattaaaactaattgatttaccggggattgatcagcggagcatggatgaatcaatgattgggaactatgctgcacgcaatgatgcaattttgctagttatcgttccagctctacaagcacctgatgtagcatcttctcgagctctaaggattgccagagaactagattcagaaggtagtagaactattggtgtcgtaagtaaagttgatcaagtagccgaagaccagagagctcttcttgctgttcaggccctgcttgtaaaccaaggccctagaactgcagctgacattcagtggatagctacgattgggaactctgttcctattgcctctgttcagtctggagtaggttctgaatcctcaccagaaactatttggaaagttgaagttgaaagccttaaatctatacttcttggatctccgcaaagtaaacttggtagggaggctttagttgattcacttgctaagcagataagaacacggataaaagttagactcccaaatctcctgaatggtcttcaaggcaagtctcaaataatccaggaggaattagcaaaacttggagaacagatggtccaaagttcggaaggaactcgggtcattgctttaggactttgccgggaatttgaggacaaatttcttcaacatattactggtgttgaggttcaccgtgtattgctagatatagtatcagccacagcaaatgccaccccaggacttggcagatatcctctatttaagcgtgaggtaattgcaattggatctgctgctttagatggctttaaagatgaggctaaaaagatggtaattgcactagtggatatggaacgagcattcgtgcctccccagcattttatccgcttgttgcagagaagaatggaaaggcaacgtcacgaagatgagctgaaaagtcgctcaacaaagaaggtttcagatgcagaacctagcaaagccacaagtccacaaacccaaacaaaagaaggatcaaatttacaagtcttaggacctgcaggagaaattactgctggtttccttttcaaaaaacgtgcaaaagcaaatgactggagtaaccgctggtttgttctaaatgagagaagtggaaagcttggttacaccaagaaacaagaggagaggcattttcgaggcgtcatcaatttggaggagtgcaatcttgaggaagttttagatgaggaagatcctacgagaagccttaaagatcctaaaaagccaaatgtgccagatattggaactcctggtctcattttcaagattacccataaggttgcttataaaaatgttttaaaagctcacaaggctattatactgaaggctgaaagtatggcggaaaaaactgaatgggttactaagattaggagcattgttgaccaaaaaggagcttctgcaacgagtggtttaccaatgaagcaaagccattcggatggttctctaatgtccacttctaaaaaggatggttctctagacacgatgcttagaaagccagtagatcctgaggaagagcttaaatggatatctcaagaagtccgtgggtatgtggaagctgttctcagcagtcttgcggcaaatgtccccaagttaagcatgtctgcttcttgcattaatatcattgatcctgttgagcaggctgtggttctttgccaagttgagaaggcaaaggaaggcatgcttaatcagctctatacttcgataagttcacaattgtcatttgtggttagcatgcgaagcgtagaaaggattgaagagctaatccaggaggaccacagtgtgaagcacaggcgtgaaaaaatcaaaaagcaatcatcacttctttccaaggttactcgtctgctccgtatccatgataatcgctcagctacttctaattggtcgaatgattctgctggatcagatagtaatccagggagcagtggccagtctggagacgaatggaaatctgcatttgatccatcacaagatgttgatccatctgctgctggaacaaacacggggagccgccgcattccgagccgaatgccgccgccacctccacagggtggttga

SEQ ID NO: 79892 - DNA, 205 bp, Oryza sativa
  Clone ID: PAT_MRT4530_79570C.1
cttgttagcttagcctttgcagttttatctcggatcgaggatgagggtgaaaagggccatgcaccctgacagggcgccacggggtggctccctacagacgaagaccactacgacgaactcgcaaactcctgtgtggaacgacttctaggcgctaacgacgttgcccagcaggcgcttcctgctggcagactaccacctgatcgag

SEQ ID NO: 79893 - DNA, 351 bp, Oryza sativa
  Clone ID: PAT_MRT4530_79571C.1
attatatcagggggagagctccatcgatatcggccatgaataatcatccatcaaagattatccataaacatcaactttttatttatattattgaacggggatccatatacttctacttttcttacatgccaaaagatgatcccatatagacacaggacatcaaggtcagtgccctttacttttacaccatatactcttgctgtgcgcttaactttttgtaacccttgatcaccttattcaccggctccaagaaatccttctctgtcaccttcttcctgcgagcccggatggcttacatgccatcctccgtgcacacactccctatttcggccccaattgagtttggggcaa

SEQ ID NO: 79894 - DNA, 168 bp, Oryza sativa
  Clone ID: PAT_MRT4530_79572C.1
atgggattgcttgggggtcgccttgcacgacggggaaatcgctggagagagagagagagggaagagtttgcttcggcggtgaaaacggaggaaaacggtgtgagtttctcggggacaacgagtaagaatcggctggagtccaaatcggctacgaccaagatcggctga

SEQ ID NO: 79895 - DNA, 1090 bp, Oryza sativa
  unsure (1)..(1090): unsure at all n locations
  Clone ID: PAT_MRT4530_79573C.1
atgacccctcgccggtgtgcgcactcgcccgagggtgagtgcaccaccatcgagcggccttgccctagagctcctccccgtcatctccccatagtcttccgcgcaccgtcggagacggccgacggcaccttctcgcgcccctcccccaccagtactgcctccgcaccccttccccaccactgccacctccgcgccctcctccaccgctctccccgcacggcaagaggcgagcctcccggcgccgcccacgagacagcgaatcccacgagagggccttggaagaagaggaagcagcggcaacccccgcagccgaccgaccccccctgtagagcgcattcactggtttagattggaattggatggcatccggaggaggcatcgcccgcgcccgcctcgccgaggagcgcaaggcgtggcgcaagaaccacccccatggcttcgtggccaagccggagaccctgccggatgggtccgtcaacctcatggtctggcgatgcatcatccccggcaaagaagggactgattgggagggtggatatttcccacttactatgcaattcactgaagactatccaaccaacgctccttcttgcaagttcccatcgggtttcttccacatcaatgtctatgactctggggcagtatgcctatcaatcttgagtaccgcatggaaaccttcaattacagtgaggcaaattcttataggcatccaggaattgtttgatgatccaaaccctaactctgctgcacagaatataagctatgagctttataggaaggacatggaggagtacaggaaacgcgttcgtcagcaggctaagaagtatccttcagctctgtagccgcgcaatgcctgcaggattctggcagctaaaacattttgattgaacctatcatgaaccgcacctgtaattcgtggggactaaacccggtgttcatcgtctggtgtattgagttgccgagttggcaacatggtgatgtgtctgttggaactgctaaaatacacttttaagtccacctcnatgactattgtttctggcctgtcggtgcctcaacagcagaaagtttcgagttaaaaaaaaaaaaaaaa

SEQ ID NO: 79896 - DNA, 103 bp, Oryza sativa
  Clone ID: PAT_MRT4530_79574C.1
actatgtccaacggcacactaacccaattacctggactaatagaaatcaaaggccgaatacccgacaacatctcgtatatcgtggtctacaaccaatacgtca

SEQ ID NO: 79897 - DNA, 198 bp, Oryza sativa
  Clone ID: PAT_MRT4530_79575C.1
ccgcaagcaaacccatggcctcctcggggtggtagttctaacccgcggggggggcgacaacagtgcggtcgtatgcagtgacaccaacgctgcgggccttgatgaaagacagcctagctatgtccgtcatgctacgtaacaaagacgactgtattgaaattggcaagataacccacagcaccgccagacgcctccgtg

SEQ ID NO: 79898 - DNA, 402 bp, Oryza sativa
  Clone ID: PAT_MRT4530_79576C.1
atgaccgaggcggcgaggctggggacaacaacgagcgaggaatcgcgccgaaacgcgtgggggggggggaactcgtggcttggggttccggggcgcgtacctgcgcagcccgcgaggcgggcggcgggcggggcgggcaagaacccgtggaaccctagccggcgacgaggcggacgcggaggagagtggtcggcggcggcggtggcggccgtcgagacgccggcggccgagggggtttatatgatggccgcgttgtgtgtgctgcggcgtttggacggtggagatcgcgttgcgggagagatggacggatgcgatgcgatgaggaaatccgggagtgcggctgcgcggggggaggccagctgtaaagcgatttgtgttggtggggtccgagctaaggtttag

SEQ ID NO: 79899 - DNA, 566 bp, Oryza sativa
  unsure (1)..(566): unsure at all n locations
  Clone ID: PAT_MRT4530_79577C.1
tctatctgggcggggacagaggatgctgccctactcagcgcgccgtgggactaggctgctaagaatgcggctgctttgtgccagaccctgacgcggcgccccatcacgcactagagagccgagggctcgggcacaatggacgatggcggagacgcccatccgaggacaggggagaacgtgcacgccggccgcggcggcgaggtcttttttggcgggcaggcggctgatggccgcnccctggccggctgcgtcntccagagggagtccaccctccaccttgtgctcgggctcgggggaggcatgcggatcttcgtcgagaccttggctggcgggaccatgacccttgaggtcgggtcgtgtgacgccgttggcggtgtcggggcctggatccaggacttggagggcgtgcccccgggccaggggcggctggtcttcgctggcgggcggcttgggggtgggcgggcgctggccggctgcggcgtgcggaaggggctaccctgcgccttgggctggggctgggggggggggtgcgggtcgtggggggggcctgggctgggggggccctg

SEQ ID NO: 79900 - DNA, 2925 bp, Oryza sativa
  Clone ID: PAT_MRT4530_79578C.1
atggcacggggctccgcaccgctcgacggtagcgtgctgccaccttctcgcatcgtgagcgagaggcaggccgggctgccgcgccgattcatgccggaatctgccaccggccgggaggtggtcgcactgggtgagggacgcccggcaccacactacccggggcggtccgtattcttcctttccttcacaatggcagggctggtcccgccattctcttctttcttcatggatgttctggagctttataatctccagatggcgcacctcacccccaacgcggtaatgacgttggccatcttcgcgcacctatgcgagatgttcatcgggccgcgggggccggtgctgaaccgctacattccctgcgtccttcgcaagaagtgggacgactggaagagcgactggttctacacccctctcgccgacgaagcgcgcctccgacttccgagccagcccccggcgcaggcctccagctggcgggcgccggtagatctgggagacggctacgacgccgttcttgaccgcctggctggtttgcgatcccaggggctcacgggggccatggtgtacggcgattaccttcgtcgccggatcgcgccgctccagcggcgcgcccggggcgcctgggagtacaccgggttcgaggactacatgaggacccaccagggggtcaaatgggactgggtccctgaagacttcaagatggtgatccaacgggtgctgaatctcagctccgtggaggcatccctcatcccccaaggtgtcctccccctctgcagcgatccagagcgcgccaacatcctgaccatcatgcaggcggtcggggcgtcaggggagtgggctcctcgaggccacgatggcgcgggcgggagccgcaggggggaacaatctaccccgggagggggtcgtgcttctgggccccgtgacgggggcccggggggcagccgccctgccgacgcccgggggaagaggaaacaggaggataccccctccccatctcctccccgagggggcggggcggtgcgtgccagcagcaggcgcccggagggtgctgtgccgacgtcgcagcccgagggggagcgaaaaaagaagcggctccgcaagatgggggggaccgaaccatgccggggaaacctcatctccccctcaaggtggtcgtttagccgacctcctcgcagatcccgtcgcgcccttcccgccattccaagtccggccggtctgaggccgaggagacggcgaccgcggaggcccggaggcggggagctgaccggcgagaagccgcagaccgcctccgggaagccgaagaagctgcccaggaggccgtccgggctcgccaggctgaggaagccgcttgggaggaggccagactccgccgggccgaggagtccgtccgtacgccgggcggcctgccaagcccccgacccgactccgcccgaggcgacgacgacttccgaggccgcccacgacgaggccgcgggcgcgccgctcgggcccgacccctcgggcgatgcttggggcgagccagcctcggggaacgcccccgagtccggcacgtccatcggcgggccgagccgcgcggcgcccacaccgaggcggctctcctctctgccttccgctgccccactgagcgcagaacccctcctgcaggccttggccgctgcgaacaccacggtgttggacgggttaagcgcccagatggaggtcctgcaggcagagcgggcggaggtcgatgcggcgtgggcgcgcgtcgaagaggggcggcgctcggtggaagccatggtggaggcgggccgcaaggcacaccgccggcacgcctcagagctcgaggcccgtcgtagggacctggcggagatcgccagggaggtggaggaggagcgggagactgccctcatcgccaccgccgtgttcaacgtggcgcgggacgacctctgcctccaatacgggagccgggcggcggagctagagaagaagctcgacgcgtcccggcagcgcgaagaggcccttgaggctcgcgccacggtgctggaggaccgcgcccgcgccctggacacgaaggagagggaactggcgggtcacgaggccgccgtcgccatccgggaggcaacgctggcggcgcacgaggctgcctgcgccgaagaggagtccgcactccgcctccgcgaggacgagctcactgagtgggagcgagctctcgaggaggccgaggccgcggcgcagcggtgggaggagcaggcgcgcctcaatctggaaggcgcccgcgccgagagggccgcactggatcagcgggccgctgaattcgaggcgcgggcgaaggagctagacgcgagagcgcgcagcggcggggcggccgcgggcgacggcgacctagccgcccgcctcgcagccgccgaacacaccatcaccgagctgcagggcgcgctggactcgtccgccggggaggtcgaagccctccgcttggcgggcgaggtagggcttggcatgcttcgggacgccgtttcccgtctagaccgtgccgggcggcaggcgggcctctggggcgggcggaccgcgaaatacgccgccaaccaggggggcatcgcccagcgcctctcagagatggccgggaccctccagcggctccccgaggagctcgaggaggcgatcaagtcatcctcgagggacctcgcccggggggcggtggagctcgcactggcaagctaccaggccagggaccctgacttctccccgtgggcagcgctggaagagttccctcccggaaccgaggatggcgcacgtgcgagggtccgggacgccgccgaccacatcgtccacagcttcgagggtacggcccctcgactcgcgttcgcgctcgactccgacgaggagggcggtgacgacggcgcggacgacagcgacgacgaggccgacggcccgggggcgtcggagtga

SEQ ID NO: 79901 - DNA, 541 bp, Oryza sativa
  Clone ID: PAT_MRT4530_79579C.1
cccacgcgtccggttgggcagcttgctaagatcacaggatgctacgtggttggtagtgctggttctgatgaaaaggtcaacttattgaagaccaaatttggctttgacgatgctttcaactacaagaaggagctagacctcgaggcagccctaaagaggtgttttccagatggtatcgacatctacttcgagaatgtaggtggtgcaatgctagacgcagtgctacctaacatgcgggtagctggccgcatagcggcatgcgggatgatctcacagtacaacctggagcagccggagggagtgtataacatgatttgcatcgtcaccaagcgcctacgcatgcagggattccttgtgtttgacttctatgatatgtactaccagatcgaggagcagattgccgggtacctgaaggaagggaaggtggcatacacagaggatgtcgttgaggggctcgacgctgcgccggcagcacttgtcaagctctttactagcagcagcatcggcaaacagctcgttgccgtcgcacgggagtgatacg

SEQ ID NO: 79902 - DNA, 339 bp, Oryza sativa
  Clone ID: PAT_MRT4530_7957C.1
ggggaaagccactatattttttatgggaattaattaattataaaacatgtccataccccggtgttttgaaaaatatgtttaaacttaaatctgaactcgtaaaattttttaacaccctatcctttattccaacaatgttgagggtgggtacttattcctgggggacaccttatgctaggtacttaaatacccaattctaaaaaaaacctatgacacattttgatactcccaatttagatatcccattttttggaccaaggggatttattttaaaaatgtgtgggtgggttcaacccccccccggagtgctaactcctttgggcacggggtaccccccct

SEQ ID NO: 79903 - DNA, 1592 bp, Oryza sativa
  Clone ID: PAT_MRT4530_79580C.1
atgttctgcaaactgtttgtagatgaagcaatctttggccgcgtgattggaattgggctgatgcagacattgagagttcatgatcttgtcgaaagtgttgacgcgcgaacgttgtcgggaggatggtgtagtagttgccacaagttcctcgggcttacgcttatggtccttgtgattggtacttccacttccccctatagtcggcgtatctttcttcgacttccacgtggtgcccgactgcttgtacgcgataatggcatcttcggctttggcatactcgttggctttctcaaatatctgcttgaccgtcttgggaggcttgcgcccgaacttgccgactaggtctttgtgacgaattcccttggtgaaggcggcgatgatgacgtcgttggtaatgtcggagatcttgttgcgttgctcagaaaagcgtcggatgtaatctcgaagggattctccagacttctgaatgacattgtagagatcaaaatgtgtaccagggcgttcaaaggtgccctggaagttggcgatgaagtggtcgcgaagtttcgcccatgatccgattgtgccacggggtaacccatgaagccaggaccgggcagaatccgctagagccacaggcaagtagtttgccatggctttgttgtctcctcatgctgcgcgaattgcgagaccgtagacggtgagccaggactacgggttagtggtgtcgtcatacttctcgattccagtcggcttgaagccggctggcaatccactcgacgcaggttgcttgtaaaggcagcgactccatccatgtcgtcgtcgtggtgatccggtgaatggtggggggcgtagcttcatgccacgcggcgctggttgattgtatcgcgaagatcgacggggcgcctgcgaggtggggagcgtggccgttcaactcggcgctccctgtgtcattcgggaggcgagtggacagatcgctcgccgtgacccctgctcctgcgactggatcccgcgccggcggcgctgaggcttggttgatgatagtcttgagatcgaagaaggggaactcagctgccagtcggcgtgcggacgcttgcagggttaaccgggaccgaagcggcgatcatggtcttgatctggttcaagatgttgacgacgtgattagcttgattgagtgcgtcttccttgaggagggtgtcgaggagggtgatcgcagtaaccgcgttctgttgaggggtgcgaaaaaccgcagttccctcgacgtcttgctgccggataagctctcgagctcgtcgcccggcgtccaaggcccgttgtcgttggtccttagcctcttttgcagcccgttcgcgttcctgttgctcacactgcagccgttctcgctcttgtgcttggcgctcctcttccaggcagcgttgctcggcttcctgttgtatgcgtagctcttctgcttctcgggctttgcgttgttcttctgtctcgttgtcagccataaagatgccgaagtagagaggcgtgtagttgtcttcaaagccttcgtcgaagtcgtcgaggttgcggtagtatagcgtgctatcacacagcataatatacacttcctctccctgacaatg

SEQ ID NO: 79904 - DNA, 2826 bp, Oryza sativa
  Clone ID: PAT_MRT4530_79581C.1
atggcacggggttccgctctgctcgacggtagcgtacttccgccttcccgcatcgtgagcgagaggcatgccgggctgccgcgccacttcatgccggaatctgccaccggccgggagatagtgatgctgggcgagggacgcccggcaccagactacccggggcggtccgtcttcttcctccccttcgcaatggcggggctggttccgccattttcttctttctttatggatgttctggagttctacgatctccagatggcgcacctcacccccaatgcggtgatgacattggccatcttcgcgcatctgtgcgagatgttcattggggtgcgcccatctcttcggctgttccggtggttcttcaccgtgcagtcggtgtcgccgccgtcggtggttggtggctgctacttccagccgcgggggccggtgttgaaccgctacatcccctgcgccctccgcaagaagtgggacgactggaagagcgactggttctacacccccctcgccaacgaagcgcgcctccgacttccaagccagcccccggcgcaggtctccagctggcgggcgccggtagatctgggggatgattatgacgccgtcctcgaccgcctggcgggcctgcgatcccaggggctcacaggggccatggtgtacggcgactacctccgtcgccggattgcgccgcttcagcggcgcgcccggggcgcctgggagtacaccgggtctgaagactacatgcggacccaccagggagtcagatgggattgggctcccgaggacttcaagatcgtggtccaaagggtgctgaatctcagctccgtggaggcgtccctcattcctcaaggaatcctccccctctgcagcgatcccgaccgcgcctccattctgaccattatgatgggggtcggggcctcagaggaggaaactcctaagggccacgacggcgcgggcgagagccgccggggggaacaatctaccccaggaggggcgatgtcccgtcgcgttcctcccgccatcccaaatccggccagtccgaggccgaagatccggcggccgcagaggaacggaggcgagaatctgaccggtgagaggccgcagatcgccttcgggaagctgaagaggccgcccgggaggccgctcgggttcgccatgcagaggataccgctcgggaggaggccgcccgggctcgccaagccgaagaagccgctaaggaggaggccgcccgggctcgccaggctgaggcgatggcgtcttccgaggcagcccacgagaaggctgctggcgcgtcgcttgggcccactccctcgggcgacgctcaggcgacagcctccggggcggctcgcgacgaggccgcgggcgcatcgcctaggcccacttccccgggcgacgtccaagaccaaacgggcggctcttctcctcgtcttctgtcgccccgctgagcgccgagccccttctgcaagccttgaccgccgcaaacaccgcggtgctagatgggttcaacgccaggtggaggccttgcaagcggaacgagcagagctcgaggccgcatgggcgcgtgtcgaggaggggcggcgctcggtggatgtcatggtggaggtgggccgtaaggctcaccgccgtcacgtctcggagcttgaagcccgcaaagcggcactggcggagatcgcccgagaggtggaggaggagcgggaggccgccctcatcgccaccaccgcgatgatcgaggcgcaggacagcctccaccttcaacacgggagctgggaggcggagctaaagaaaaagctcgacgccgcccaaggggtccttgacaccgccgctgcccgagagcggcgggcaacggagatcgaagcggcgtcccggcggcgcgaagaggcccttgaggcccgtgccatggcgctggaagaacacgccggcgccgtggagaggagcttggcggaccgcgaggccgccgctgctatccgggaggcaacactggcggtgcacgaggccgcctgcgccgaagaggagtccgcgctccgcctccgcgaggacgcaatcgctgagcgggagcgagctctccaggaggccgaggccgcggcgcaacggctggcggacagcctgtccctccgcgaggcagcgcaggaggagcaggcgcgccgcaatctggaatgcgtccgcgccgagagagccgcactggagcagcgggctgctgacctcgaggcgcgggaaaaagagctggacgcgagggcgcgcatcggtggggcggctgcgggcgaaagcgacttagccgcccgcctcgcagctgccgaacacaccgtcgcggacatgcagcgcgccctagactcatccgccggggaagccgaggccctccgcttggcgggcgagatagggcccggcatgctttgggatgcggtctcccgtctggatcgcgccggtcggcaagcgggcctctggaaaggccagacaatgacgcactccaccaatctggaaggcctcgctccgcacctcacgaagatggcctgggctctccaacaactccccgaggagctcgagaagaccgtcaagtcatcctcgagggacctcgcccaaggagcggtcgaactcgtactagcgagttaccaggccagggaccccaacttctctccatggatggcgctggatgagttccctcccgggaccgaggacgacgcgcgcgcgcgggtccgggatgccgccgaccacatcgtccacagcttcgagggctcggcccctcggctcgcgttcgcccccaactccgacgaggagggcgacgccagcggtgcagacgacggtgacgacgaggccggcgacccgggcgcaacggaatga

SEQ ID NO: 79905 - DNA, 2964 bp, Oryza sativa
  Clone ID: PAT_MRT4530_79582C.1
atggcacggggctctgctctgctcgatggcagtgtactaccgccttcccgcatcgtgagcgagaggcacgccggactgccgcgccgcttcatgccggagtccgccaccggtcgggagatagtgatgctaggcgaggggcgcccggcaccagactacccggggcggtccatcttcttcctccccttcgcaatggctgggctggtcccgccattttcttctttcttcatggatgtcctggagttctacgatctccagatggcgcacctcacccccaatgcggtgatgacattggccatcttcgcgcacctgtgcgagatgttcattggggtgcgcccctctcttcagctgttccggtggttcttcaccgtgcagtcggtgtcaccgccgtcggtggttggcggctgctacttccagccgcgggggccggtgttgaaccgctacatcccctgcgtcctccgcaagaagtgggacgactggaagagcgactggttctacacccccctcgccaacgaagcgcgcctccgacttccaagtcagcccccggcgcaggtctccagctggcgggcgccggtagatctgggggaggactacgacgccgtcctcgaccgcctggcgggcctgcgatcccaggggctcaccggggccatggtgtacggcgattacctccgtcgccggattgcgccgctccaacagcgcgcccggagcgcctgggagtacactgggcctgaagactacatgcggacccaccagggagccagatgggattgggctcccgaggacttcaagatcgtggtccaaagggtgctgaatcttagctccgtggaggcgtctcgcattcctcaggagatcctccccctctgcagcgatcccgaccgcgcctccattctaaccattatgatgggggtcggggcctcagaggagagagcccctaagggccacgacggcgcgggcgagcgccgccggggggaacaatctgccccaggagggggtcgtgcttctgggccccgcgtcgggggctcggggagcagccgccctgccgacgcccaggggaagaggaagctgggaggaacacctcccccatctcctccccgagggggcggggcggcgcgtgccagcagtcggcgcccggagggggccgcgccgacgtcgcagcccgagggggagcgcaagaagaaacggctccgcaagacgggggagacggaaccatgccggggaaacctgatttcccctccaaggtggtcattcaaccgaccccctcgcagcgatgtcccgtcgcattcctcccgccaccccaagtccggccagtccgaggccgaagatccagcggccgcagaggagcggaggcgagaatctgaccggcgtgaagccgcagaccgccttcgggaagctgaagaggccgcccgggaggccgcccggattcgccaagcggaggaagctgctcgggaggaggccgcccgggctgaggaagccgctaaggaggaggccgcccgggctcgccaggctgaggcaacagctgctgctggcgcgtcaactgggcccactccttcgggcaaccctcaggcgacagcctccggggaggctcgcgacgaggccgcgggcacatcgcctgggcccacctccccgggcgacgcccaggatcaaacgggtccgggggacatccccgagcccagcacgtcctccggggggccgagccgcatcgccttctctccaaggcggctcttctcctcatcttccgtcgccccgctgagcgccgagcccattctgcaggccttggccgccgcaaacaccgcggtgctggatgggtttagcgcccaagtggaggccctgcgcgcggaacgagcggagctcgaggccgcatgggcacgcgttgaggaggggcggcgctcggtggacgccatggtggaggtgggccgtaaagcccaccgccgtcacgtctcggagcttgaagcccggaaggcggcgctgacggagatcgctcagactgaggcggcgtcccggcggcgcgaggagtcccttgaggcccgtgctatggcgctggaagaacacgccggcgccgtggagaaaggcttgacgggccgcgaggccgccgctactctccgggaggcgacgctggcggcgcacgaggccgcctgtgccgaggaggagtgcgcgctccgcctccgcgaggacgcactcgctgagcgggagcgagctctcgaggaggctgaggccacgaccaaacggctggcggacagcctgtcccttcgcgaggcggcgcaggaggagcaggcgcgccgcaatcttgaatgcgtccgcgccgagagagccgcactggagcagcgggctgctgacctcgaggcgcgggaaaaggagctggacgcgagggcgcatatcggtggggcggccgcgggcgaaagcgacttagccgcccgcctcgcagctgccgaacacaccgtcgccgatatgcagcgagcgctagactcctccaccggggaggccgaggcccttcgcttggcgggcgagattgggcccgacatgctttgggatgcggtctcccgcctgaagcgcgccggtcggcaagcgggcctctggaaaggccagacgacggtgccccccaccaatctggaaggcctcgctccgcacctcaacaggatggcctgggttctcgaacaactccccgaggagcttgagaagaccatcaagtcatcctcgagggacctcgcgcggggagcggtcgaactcgtgctggcgagttaccaggcccgggaccccaacttctctccatggatggcgctggaggagttccctcccgggaccgaggacgacgcgcgcgcgcgggtcggggatgctgccgaccacattgtcaacggcttcgagggctcggcccctcggctcgcgttcgcccccgactccgacgagggggggaacgccagcagtgcaagcgacggtggcaacgaggccggcgaactgggcgcgtcagaatga

SEQ ID NO: 79906 - DNA, 756 bp, Oryza sativa
  unsure (1)..(756): unsure at all n locations
  Clone ID: PAT_MRT4530_79583C.1
atggtggtcgtggatggcgacgactccacgcggtggtcgtggacggtcgaagagggagccaaaggagatgagcgcgaggagatcctcgacagacaaatcggcgctggagaaggagggcacagcgatagatgggggaggggcgggacaggaggagagctcctcagcgagggcagcggcgagcaggacgcgcatccgctcgagctcatcgatgagcgtgatgatgacaggttgggatctctgcctagatctggtgagagagaagccaccaccgagctaccgaggtcccgccatggctcatccgtcccgccgctcgctcgtcgcttgtcagtgcgggaagaggcggtgagggtggtggttgctcgtggagcatcgatgggctggagcatgggggcatgggaggaggccgagccgcacgccgccgctggaggccgcggacgcagagctctccttgttctcccccgtgtgtcggtgctgctgctacttgccagcgttgacaccggagttgaagaagccgatgaggttgacaaagcacacgccacagatgaagagaatgtggatctaacgaggatgacaggaaagtggacggtggcatggccgctggaggggnaggcaccgggcgcccgggggtctgagcccccctgccgcgcgacggccgggcgaacgcgcccccctctatccgccctcggcaacttcatcncccgcgcctgtcctgcctcgccggcccgcccgccccgccccgcgccgggtggcgggagt

SEQ ID NO: 79907 - DNA, 515 bp, Oryza sativa
  Clone ID: PAT_MRT4530_79584C.1
aaaaaaaaaaaaaaaaaaaaaaaaaaaaaaaaaaaaaaaaaaaaaaaaaaaaaaaaaaaaaaaaaaaaaaaaaaaaaagagagaaaaaaaaaaaaaaaaaaaaaggggcggccttttttggggtcccagccttccttccccttgcttgcgagggaaacgttttggggtgggggcccttaaggttcattttcttgcccgcctttttcccccgttgggcttgttaaatccttgccgttacccaatttattggccttgcggccctcccccttttccccggggggcctattgggttaacggcccttcccgttcgcctttcccaacattttttccgcttggggggcaattggaacgccccctgtaccggccctttttccccgggggttggggtgtttccctcaatttgacccttccttttgcgggtcccttagggcccggtgttttcgttttctccctttcctttttcgcccctttggccggttttccccggcacgtttttaatggggggctcccttttg

SEQ ID NO: 79908 - DNA, 177 bp, Oryza sativa
  Clone ID: PAT_MRT4530_79585C.1
atggcatggggaaaggcgtgcaaaggcaagtttgcgggaaatcttggtacaaaggcaaaggcattcattctaatccaaatcaagatcacggacacaccacaaccatatgctatatttctacactggaagttagcaacctttgcccatccaccaaataatgcctccgtatacctatga

SEQ ID NO: 79909 - DNA, 590 bp, Oryza sativa
  Clone ID: PAT_MRT4530_79586C.1
tggtgccatgacgaacggaggcgcgctgtgcaacggcgaatggctgccacaacatactttctggtgctggaggagctgcagcctagtcagaatgacctcaggagaccgtacacctaatatacggcaatgaaacgaccgaactgcgacggaaggtggtcgcttgctcttactataacacggccaacgctggctccactcaattatgcgcacaatgaggacatctaccaggagaagatgttcttcgacaaggactaccatgactagccgtccagcgctctctaccactcaaggatcaacatgccctcgaccataccctgacaccggacatggagaaagacagagatagatcatatacagggaaactgacaaacggatgccaccttgaaagaatgtactgacccagctgaataacgagatgtgccacccggacatacggacactggatcacactacagaacgcaccatcgtctagtcataccgaggaatgcaatatggcatgcttatgtagcatgccgctgctggtctatactgatatcagattgcattgctatctcagctcatagaacgcaccgttaagtaactatcacctg

SEQ ID NO: 79910 - DNA, 2712 bp, Oryza sativa
  Clone ID: PAT_MRT4530_79587C.1
atggcacggggctccgcaccgctcgacggtagcgtgctgccgccttcccgcatcgtgagcgagaggcaggccgggctgccgcgccgatttatgccggaatctgccaccggccgggaggtggtcgagctgggcgagggacgcccggcgccacactacccggggcggtccgtcttcttcctctctttcgcaatggcagggctggtcccgccattctcttctttcttcatggatgttctggagttttatgatctccagatggcgcacctcacccccaacgcggtaatgacgttggccatcttcgcgcacctgtgcgagatgtttatcgggccggtgtcgccgccgtcggtagtcggtggctgctacttccagccgcgggggccggtgctgagccgctacattccctgcgtcctccgcaagaagtgggacgactggaagagcgactggttctacacccccctcgccgacgaagcgcgcctccgacttccgagccagcccccggcgcaggcctccagctggcgggcgccggtagatctgggagacggctacgacgccgttcttgaccgcctggcgggtctgcgatcccaggggctcacgggggccatggtgtacggcgactaccttcgtcgccggatcgcgccgctccagcggcgcgcccggggcgcctgggagtacaccgggtccgaggactacatgaggacccaccaggggggcagatgggactgggcccctgaggacttcaagatggtggtccaacgggtgctgaatctcagctccgtggaggcatccctcatcccccaaggagtcctccccctctgcagcgatccagatcgcgccaacatcctgaccatcatcgagatcccgtcgtgcccctcccgccattccaagtccggccggtccgaggccgaggagacggcggccgcggaggcccggaggcgggaagctgaccggcgagaagccgcggaccgcctccgggaagccgaggaagctgcccgggaggccgtccgggttcgccaggctgaggaagccgcccgggaggaggccagactccgccgggccgaggagtccgtccgggaggcggaggcggcgcgcgcacgccaggcggcctaccaagcccccgacccgactccgcccgaggcgacgacgacttccgaagccacccacgacgaggccgcgggcacaccgctcgggtccgacccctcggacgatgttcgggacgagccagcttcgggggacgcccccgagtccggcacgtcgatcggcgggccgagccgcgcggcgcccacaccgaggcggctctcccctctgccttctgccgccccaccgagcgcggagcccctcccgcaggccttggccgccgcgaacaccacggtgttggacgggttaagcgcccagatggaggtcctgcaggcggagcgggcggagctcgacgcggcgtgggcgcgcgtcgaagaggggcgacgctcggtggaggccatggtggaggcgggccgcaaggcacaccgccggcacgcctcagagctcgaggcccgtcggagggagctggcggagatcgccaaggaggtggaggaggagcgggagactgctctcatcgccaccgccgtgctcgacgaggtacgggacgacctccgcctccaatacgggagccgggcggcggagctagagaagaagctcaacaccgctcggggagtccttgacgccgccgctgcctgggaacggcgggcggcggagaacgaggcggcgtcccggcggcgcgaagaggcccttgaggctcgcgccacggcgctggaagagcgcgccagcgcaaaggagagggacctggcggaccgcgaggccgctgtcgccatccgggaggcaacactggcggcgcacgaggccgcctgcgccgaagaggagtccgcactccgcctccgcgaggatacgctcaccgagcgggagcgagctctcgaggaggccgaggccgcggcgcagcggctggcggacagcctgttcctccgcgaggcagcgcaggaggagcaggcgcgccgcaatctggaaggcgcccgcgccgagagggccgcactggctcggcgggccgctgagcccgaggtgcgggcaaaggagctggacgcgagagcgcgcagcggcggggcggccgcgggcgacggcgacctagccgcccgccttgcagccgccgaacataccatcgccgatctgcagggcgcgctggactcgtccgccggggaggtcgaggccctccgcttggcaggcgaggtagggcccggcatgcttcgggacgccgtctcccgtctagaccgcgccgagcggcaggcgggcctctggggcgagcggaccgcgaagtacgccgccaaccaggggggcctcgcccagcgcctctcagagatggctgggaccctccagcggctccccgaggagctcgaggagacgatcaagtcatcctcgagagacctcgcctggggggcagtggagctcgtactggcaagctaccaggccagggaccccgacttctccccgtgggcagcgctggacgagttccctcccggaaccgaggacggcgcgcgcgcgcaggtccgggacgccgccgaccacatcgtccacagcttcgagggtacggcccctcggctcgcgttcgccctcgactccgacgaggagggcggtgacggtggtgtggatgacagcgacgacgaggctggcgacccgggcgcgtcgaagtga

SEQ ID NO: 79911 - DNA, 3843 bp, Oryza sativa
  Clone ID: PAT_MRT4530_79588C.1
atgaagataactacacgccccctctacttcggcattttcatgggcgacaacgagacggaaaaacagcgtcaagcccgagaagaagaagaacaacgcgtgcgacaggaagccaaacgtcgccgactggaggaggagcgccaagcacaagagcgagaacggctgcagcgtgagcaacaggagcgcgagcgagctgcaaaggaggcttgggaggccgggcgacgagcacgagaactcatcgggcaacaagatgtcgaggggacggcggtttttcgcaccccccaacagaacgtggttgcagcgatcaccctcctcgacaccctcctcaaggaagacgcactcaatcaggccaatcacgtcgtcaacatcttgaaccagaccaagaccatgatcgcagcttcggtcccggttaactccgcgagtgtccgcacgccaactggcagccgagttccgcctcttcaatctcaagactatcaccaaccgagcctcagcgtcgtcggcgccggaaccagtcgtaggagcagggatcacgacgagcaatccgttcactcgcctcctgaccgacacagggagcgtcgagctgaatgtccccgctccccacatcgcaggcgtcccatcgatcttcgcgaaactatcaatcagcgccgtgcggcaagaggctacatcccccaccattcaccagatcgttacgacgacgacgtggatggagttgctgccttcacaagcgacctgcgtcgagtggattggccagccggcttcaagccgactggaatcgagaagtatgacggcaccactaaccctgagacttggctcaccgtctacagtctcgcaattcgcgcagcaggaggagacatcaaagctatggcaaactatctgcccgtggccctagcggattctgcccggtcctggcttcacgggctaccccgtggcacgatcggatcttgggcggaacttcgcgaccacttcattgccaattttcaaggcacctttgaacgccctggcacccagttcgatctttacaacattgtccagaagtccggagaatcccttcgagattacatccgacgtttttccgagcaacgcaacaagatctccgatatcaccgacgacgtcatcatcgccgccttcaccaagggcattcaccatgatctcttagttggcaagtttggacgcaagcctcccaggacagtcaagcagatgttcgagaaagccaatgagtacgcaaaagccgaagatgccgtcaccgcatctaagcagtcgggcaccacttggaagccgaagaaagatacgccgaccacaggagggagtggaagtaccaatcacaaggatcgcaagcgtaagcccgaggaacttgtggcaaccactacaccatcctcccgacaatgttcgcgcgtcaacactttcgacaagatcatgaactctcaatgtccgcatcatccaaattccaaccatgcggccaaagactgcttcgtttacaaacagttcgcagagcaatacgccaagaacgcacgcaagtcgacttacagagatcaaagcacatcaaagaagaaggatgatgaagatgatgccccgactggtttccaagacccccgcaaggagctcaaccatatctttggcggacccctggcttatgaatccaagccaaagcaaaagctgactgaacgggagatcaatgctgttcagcccgacacgccccaatatcttcggtggtcagaaacaactatcaagtttgaccgctcggatcaccctgaccgagtggtccacccagggcggtaccccctggtactagacccagtggtttgcaacatcaagctccgaagatccctgatcgatggtggcactgcactcaatatccttttcgccaagactctggacgacatgcaaatccctcgcacggaattgaagccaacgtaccatgccatactcggacgcccggcgttagccaagttcatggctgtcccgcactacacctacatgatgatgaaaatgccaggtccccgaggagtcatatccctgcggagtgacatcaagcaagctgtcacttgcgacaaggaaagctgcgagatagcccagacccgcgagattgcgctcgctcgagaagaaatccgactggctgcgtccactgcaaccgaaggagaagtgtctgcaaccaagatgtcaaaaggcggagaaggcgacgccaagaccgagaagattcctctagatccctctgaccctactaagactgctgtaataggcgctaaagaggtgattgagcactctttacatgttaaggaagatgctaaacctatcgagcaacgactccgccatttcgcacaggataggaaggatgcgatcaaggaggaattgaccaagctgttagcagcaggcttcatcaaggaagtcctacatcctgactggctggccaatccagtcctggttcggaagaagacggggcaatggcgcatgtgtgttgattacaccgacctcaataaatcttgtcccaaagatccctttgggttacctcgcattgaccaggtagttgattcaacggctggctgcgagttactcagttttttggattgctactcaggatatcatcagatccgactaaaggagtccgactgcttgaagacttcgttcatcacgcccttcggggcctactgctacatcgccatgccttttggattaaagaatgcaggagcaacttatcaacgcatgatacagagatgcttttcaactcagattggtcgcaacgttgaagcttatgttgatgatgtagttgtcaagaccaagcagaaggatgatttgattacggatctagaagagacctttgcgagcatccgcgctttcaggatgaaattaaaccctgaaaagtgcatcttcggagtacagttagggaagctacttggctttatggtgtcccatagaggcatacgagccaacccggagaaaatcaacgccatcatcaacatgaaaccatcgagttcccagaaagatgttcaaacgttaactggatgtatggcggcgttcactcgatttgtctcacgactcggcgagcgggggatgccctttttcaagttgttaaagaaaaccgacaacttccagtggggacctgaagcacaaaaagcctttgaaaacttcaagaaacttctcactactccaccagtcttagcttcaccacatccgcaagagccgttgttgttatacgtgtcggcgacttccaaggttgtgagcacggtcctggttgtcgagtgtgaggaagaaggccatcttcaaaaagtccaacgaccaatctatttcgtcaacgaggttttggccgactccaagacaagatatcctcagtcccaagctttagcagacttcgttgccgagtggaccaagtgccaagaagacacgcctgcagagaagatcgagtattggactatgcatttttatgggtcaaagaggctttcaggcaccagagcgggggttgttctaatctccccgactggagagaggttgagctacatattgtggatacatttttctgcgtcccataacgtggcggaatatgaggcgctacttcacggattaaggattgcgatctccttgggaattcggcgtctgatagtttgtggagattctcagttggttgttaatcaagtcatgaaagagtggtcctgccttgatgataatatgaccgcctatcggcaggaggtacgcaagttagaagataaatttgatggccttgagctgacccatgttcttcgacataataatgaggcagccgacagactggctaattttggttcaaaacgagaagcagctccttccgacgtgttgttgaacatttttatgaaccaactgtaccgaggaaagaaatag

SEQ ID NO: 79912 - DNA, 150 bp, Oryza sativa
  Clone ID: PAT_MRT4530_79589C.1
atggccgcccagtctcctgccaccacggtcgccggcaagactccgagcgccgacgtgacaatcggaacggacgagctcgtagccgtccgagaatgggaagtgtccaccaacggcagccaaaacacatggaggcaagtaacacaggcttga

SEQ ID NO: 79913 - DNA, 3381 bp, Oryza sativa
  Clone ID: PAT_MRT4530_7958C.1
atggcgacaatccaaaagcaaaacgacgccatcaaggtgtcgataggggccatcgaagaaatcaagccaatggtggtggagctggtggggtggaaaccggcggtggagaaggcggtgaccgagctgcgggaggagatgggggatctcagggcgcaagttcatcaactcgccaaggggacgacgccggaggtcaaggccgacgagcgaccagcgccttcctcgactcctcccaacattaagcctgacgagttacctgcgctgcttccaactccaccaggcccgaagctgaagcagatgaaggaggaggagcgctcgattccgcaggagcgcggtgaagaatctcatgggctatttagccatcgcgtggacttgaatcaccgggggaaggctgtgtggggaaatccctcttcacagtttctcccggtcaagtccacccatgctcatgaagttagcggtagttgggaagaatttgcagcgtgggtgtgtgggaaatttggtagggaggagttccagcgtttggaggaagtgttggaaactaatctcaaggaaggccgtaagattgactcacatggcagaaatactttgcgtgctacctccactctggcacgtccatttgggggacagtggatgaaaggggaagaacgactgaaggctgaagtgccagctgaagataaagttgctgctcttcgtgcttaccgttgttccaaaggtttatgtcatacttgtggagagaagaggagtcaggagtatcgttgtggaccgacagtgcaattacatgtggtggaggaattgttgcaattatttccctcagaggatgttgttgaatctgacaccaatgatgctactcctgatgaacctgaaacagaggaattgctggccatttctagggaagcagttctgggcattgagtctcctaagacaatgcggttgcaagggttaattcagcgccatgaagtcttgatgcctggagaatctttcagtactcctctgaaagttttgccgttgggttgttatgaggtaatacttggcatggactggcttgagcggcatagcccaatgcaaattgattggaaactcaaaactttgcagttccagtggcagaatcggcaagtgacattacagggagttatacctgatacaagtgattgtcctccggtgacctgcaatcagcttaagggtttgctgcatcataatgttgtcttgcaggcagtggctctctgtccggtggacacacctgtgaaaccttctcagacaattgtgccagctgatattgaaactttgttgttggaatttgcatcagtttttgatgaaccaactgggttgcctccttctcgtgtgtttgatcacagtattccacttttgccaggggcgtcgccggttaacttgcgcccttaccattacaaccctgcgcaaaagactgaaatcgagaagcaagtgtcagatatactgcagcaaggggtgattcagcgcagtgctagcccgttctcatctcccgtgctcttggtacagaagaaggatggcagttggcgattttgtattgattaccgtcatattaatgcgattactatcaagaatcgttatccgttgccaattattgatgagcttttggatgaattagcgggtacatgttggtttacaagtttggatttacgggccggataccaccaaattcgtatgaagccggaagatgaacataaaacggcattcaaaactcatcatggacattatgagtttaaagtcatggcttatggattgactggggcaccggctactttccaaggggtgatgaacactatatttgaaccattcttgcgaaagggggttctggtttttatcgatgatattcttatttatagccgaactcttgaggatcatattagactacttcgagcagtcttctcttttctcaccgagcagcagttaaaggccttgaagaatgcacttacatcagccccggtattggctttgccggatttctccaaagtttttgagattgaaacggatgcttcagcttttggcataggagctatgttgatgcaggatggacatcctcttgcgtttttaagcaaggcattgggaccacgcaatcgaggactgtctacttacgaaaaagaatgtttggccattttattggcagttgatcattggcgctcatatttgcaaggagctgaatttgtgatccgtactttagcggagtttgatacatttggggacgaatctgggtgggagagaatccttctttacagcaccaaatcttgcagaccttacatgctggagtgttccattgcttggtctgggctacggcgttcagttaaatcttttgtcgaaaattgcacagtatgtcaacaagcaaagacagagcgtgtgcgctatccgggttttctccaacctttacccgttcctgagcatgcctggcagatggtatcacttgactttattgagggattaccagtgtcttctaggtttgattgcgtgatggtcgtggtggataagttctccaaatatgctcattttgtggccctggcgcatcccttctcagcttttgatgtggctcaagcttacttgacaaatatttataagttacatggtttgccgcagtctctcatctctgatcgggatcgtatttttactagcacactttggactactctgttcaagctggccgacactcaactccgaatgagtactgcttaccacccgcaatccgacggtcaaacggagcgggttaatcagtgtttggagacctttttgcgttgttttgtacacgcatgtcctaagaaatggtttcattggttggccctggcagaattctgttataacacatcgttccattttgctctcggcacttccccttttgaagctctgtatggccatccacctcgtcactttggagttattgatattgctgaatgtgttgtgcctgatcttcaagatgggcggaaagagcgtgttgctgcacgagttggtaaagtggcatatcgattggtgttgccagcctcgtgtgcaattcatccggtggttcatgtgtctcagttgcggaaggcatctcaacctcaagtacctgatgctccagcactccctcctgtggtcgcggaggttgatccagttccagcacaagtgttggcgcggcggcttgtccgtcgaggagcggccgctgtgcctcaagtcaaggtgtgttggactgggtgttcttcctcggaagcaacttgggaagacttggagcgattgaaggagcgtttctcggatgctccagcttggggacaagctggttctcaagaagaggggaatgttaccgaccctaatcctatcaagacaaggcccaaaggcacaagacaaaggaagcccaatacccgtgtgagtgggccggactgggttgtgtaa

SEQ ID NO: 79914 - DNA, 2502 bp, Oryza sativa
  Clone ID: PAT_MRT4530_79590C.1
atggcggggctggtcccgccattctctaattttttcatggatattctggagttttatgatctccagatggcgcacctcacccccaacgcgataatgacgttggccatcttcgcgcacctgtgcgagatgtttatcggggtgcgcccatctctccggctgttccggtggttctccactgtacagccggtgtcgccgccgacggtagttggtggctgctacttccagccgcgggggcaggtgctgaaccgctacattccctgcgtcctccgcaagaagtgggacgactggaagagcgattggttctacacccccctcgccgacgaagcgcgcctccgacttccgagccagcctccggcgcatgcctccagctggcgggcggcggtagatctgggagacggctacgacgccgttcttgaccgcctggcgggtctgcgatcccaggggctcacgggggccatggtgttcggcgactaccttcgtcgccggatcgcgccgctccagcggcgcgcccggggcgcctgggagtacaccgggcccgaggactccatgaggcccaccaggggcgcacatgggactggtaccctgaggatttcaggatggtggtccaacgggaggtcggggcgtcgggggagcgggccccccgaggccacgatggcgcgggcgggagccgcaggggggaacaatcgggcccggggggcagccgccctgccgacgcccgggggaagaggaaacaggagggtacccctcccccatctcctccccgagggggcggggcggcccggaggcgggaagctgaccggcgagaagccacggaccgcctccgggaagccgaggaggctgcccaggaggccgtccgggtttgccaggctgaggaggccgctcgggaggaggccagactccgccgggccggggagtccgtccgggaggcagaggcggcgcgcacgccaggcggcctgtcaagcccccgacccgactccgcccgaggtgacgacgacttccgaggccacccacgacgaggccgcgggcgcgccgctcgggcccgacccctcgggcgacgcttgggacgagccagctccgggggacgcccccgagtccggcacgtcgatcagcgggccgagccgcgcggcacccacaccgaggcggctctcccctctgccttccgctgccccaccgagcgcggagcccctcctgcaggccttggccgccacgaacaccacggtgttggacgggttaagtgcccagatggaggtcctacaggcagagcgggcggaactcgacgcggcgtgggcgcgcgtcgaagaggggcggcgctcggtggaggccatggtggaggcgggccgcaaggcacaccgccggcacgcctcagagctcgaggcccgtcgtagggacctggcggagatcgccagggaggtggaggaggagcgggagactgtcctcatcgccaccgccgtgctcaacgaggcgcgggacgacctccgcctccaatacgggagccgggcggtggagctagagaagaagctcgacgccgcccggggagtacttgacgccgccgctgcccgggaacagcgggcggcggagaacaaggcggcgtccaggcagcgcaaagaggcccttgaggctcgcgccacggcgctggaggagagcgcccgcgccctggacgcgagggagagagggctagcggaccgcgaggccgtcgtcgccacccgggaggcaacactggcgtcgcacgaggtcgcctgcgccgaaaaggagtccgcactccgcttccgcgaggacgtgctcaccgagcggtggcgagctctcaaggaggccgaggccgcggcgcagcggctggcggatagcctgtccctccgcgaggcagcgcgggaggagcaagcgcgccgcgatctggaaggcgcccgcgccgagggggccgtactggatcagcgggccgctgagctcgaggcgcgggcgaaggagctggatgcgagagcgcacagcggcggggcggccgcgggccatggcgacccagccgcccgcctcgcagctgccgaacacaccatcgccaagctgcagggcgcgctggactcgtccgccggggaggtcgaggccctccgcttggcgagcgagggcgggcggtgcgcgaagtacgccgccaaccaggggggtctcgcccagcgcctctcagagatggccggggccctccggcggctccccgaggagctcgaggagacgatcaagtcatcctcgagggacctcgcccggggggcggtggagctcgtactggcaagctaccaggccagggaccctgacttctccccgtgggcagcgctggaagagttccctcccggaaccgaggatggcgcacgcgcgcaggtccgggacgccgccgaccacatcgtccacagcttcgaaggtacggcccctcggctcgcgttcgccctcgactccgacgaggagggcggtgacggtggtgcggacgacagcgacgacgaggctggtgacccgggcgcgtcggagtga

SEQ ID NO: 79915 - DNA, 438 bp, Oryza sativa
  Clone ID: PAT_MRT4530_79591C.1
atggagccattgaaggtcgaaacacaggcaatgagggtgaaggtattgacatcatttgataagttggtccagggactgcaccaggtaaatgattgggaggatctacatgaccaggaattggtggaaaagctggagaaagatatggggaaggagcaacagatggctgcggggagtgcaaagggggtgaagcttgaggaggaagacttgggttcatatatgttggaggtgcagggtaatggatgctcccagatggtgagaaagatggtggtacacttgaagaagggaatggagatggagatggagatggggatggggatggagatggtgaaggagatggactcggagataaatctgagatcgaatgctgtagggaacctcaacagctcaacggaagatggatggccaaaaagtggttctgtcaacgataggttcacctga

SEQ ID NO: 79916 - DNA, 669 bp, Oryza sativa
  Clone ID: PAT_MRT4530_79592C.1
atgggagagagcgaggacgccggccgaagacggcgaagatggcggtgctcaccgacgcacgacacggagtgggttccggtggcggattccgacggggaaggggtggacgggatgaccggaacgacggcgaacgcgacggcgtcgatggcgcggctcggcacggcgtctagcggagtggcccgatttcgccggccgacgtggggaggtggaggtggagagagaggcgggattcgaaaatcgaatcccggccgtctcgagcgcgggcgcgggcggaagatagagggagtgggcgcgggggacgcgggcgcgagtggtgacgtgggcgacgtggcccggaagacgcgggagcgagggtgcggtggcggttgcggggcgcggcggcgccggctggaggttgggggaggacctgacaggtgggccgcacctgtcggcgaccccgggagagaggagggaggcgccggctcagctgggcctcggccttcggctggcccagcggggagggggaggaaggagatctttgattttggtactcgggagattgatgcagaagaaattgaagcactcggattatcattttgtgctatgagaaaaggctatttcgttgacttcaaaggtctctggggctactgtggatattgtggataccccatacctacacggcatgtatag

SEQ ID NO: 79917 - DNA, 795 bp, Oryza sativa
  Clone ID: PAT_MRT4530_79593C.1
atggccgggcagcagccgcagcagcagggcccaccggaggacgactttttcgaccagttcttctccctgaccagctccttccctggcgccgcgccgggcggccgcgccgccggtgaccagcccttctccctcgcgctcagcctcgacgccgccgcggcggccgaggcgtccgggagcgggaagaggctcggggtcggcgatgacgccgagggtggcggcagcaaggcggatcgggagaccgtgcagctcaccggactcttcccgccggtgttcggcggcggcggcgtgcagccgccgaacctccgccccaccccgcctacccaggtgttccacccgcagcagtcgaagcagggcggagcagccgtcgggccgcagccgccggcgccgaggccgaagctaagaagagagagaatagcagaaaggatgagggccctacaggaattggtccccaatacaaacaagacagatagggcagctatgctagatgagatccttgattatgtgaaattcctgaggctgcaagtaaaggttttaagcatgagcaggctgggtggcgcgggtgctgttgcacagctggttgctgatattccactttcagttaagggggaagcaagcgatagtgggggcaaccaacagatttgggaaaagtggtcaacggatggcacagaaagacagcctgcacaatggttgacggaatttgaacacaagatgaaatggaagatgattttgatggtgatgttcatttatctccatttttccaaagtggaggcggaggctttggtcaatggaggctga

SEQ ID NO: 79918 - DNA, 378 bp, Oryza sativa
  Clone ID: PAT_MRT4530_79594C.1
gaatgaaaaaatcataccatatggtataaaccgggggaaaattttaagcacccttttttgctaaactacagaggctttatatttatacccatacatgctatttacaaaattagggacataacacatacccccgtaccacaggtaccaagaacactgtttctacctaaaaaaaaataacagaaactgggtttgctgattgtttttctacctaaaactaccacaccctttgtttatgtttggaaggtgaaagttccctgaagtaaaggccccctcctttgagaaagttttctaggtctcatttccctggagcaagggcacactcttttaaattggcgacccagggcctaaggggaccaatcttgggcccccaaacaccgg

SEQ ID NO: 79919 - DNA, 3135 bp, Oryza sativa
  Clone ID: PAT_MRT4530_79595C.1
atggcacggggctccgcactgcttgatggtagcgtgctaccgccttctcgcattgtgagcgagaagcaggctgggttgccgcgccgcttcatgccggaatctgccaccggccgtgagatagtaatgctgggtgagggacgcccggcgccagactacccggggcggtccgtcttctttctccccttcgcaatggcagggctggttccgccattttcttctttcttcatggatgtcctggagttctacgatctccagatggcgcaccttacccccaacgcagtgatgacattgggcatcttcgcacacctgtgcgagatgttcattggggtgcgcccatctctccggctgttccggtggttcttcaccgtgcagtcggtatcgccaccgtcggtggtcggcggctgctatttcctgccgcgggggccggtgctgaaccgctacatcccctgcgtcctccgtaaaaagtgggatgactggaagagcgactggttctacacccccctcgccgacgaagcgcgcctccgacttccaagtcagcccccggcgcaggcctccagctggcgggcgccggtagatctgggggatggctatgacgccgtcctcgaccgcctcgcgggcctgcgatcccaggggctcaccggggccatggtgtacggcgactacctccgtcgtcggattgcgccgctccagcggcgcgctcgggccgcctgggagtacaccgggtccgaagacctcatgcggacccaccagggagtcagatgggattgggcccccgaggacttcaagatactggtccaacgggtgctaaatctcaactccgtggaggcgtccctcatcccccacggtatcctccccctctgcagcgacccagatcgtgcctccatcttgaccattatgacggcggtcggggcctcagaggagcaggctcctaagggccatgacggcgcaggtgggagccgccggggggatcaatctacccccggagggggtcgtgcttctgggccccgcgtcgggggctcggggagcaaccgccctaccgacgcccgggggaagaggaaactgggaggaacacctcccccatctccttcccgagggggcggggcagtgcgtgccagcagcaggcacccggagggggccgcgccaacatcgcagcccgagggggagcgcaagaagaagcggctgcgcaagatgggggagacagaaccatcccggggaaacctaatttcccctccaaggtggtcatttaaccgaccccctcgcagtgatatcccatcgcgttcctcccaccatcccaagtccggccagtccgaggccgaagacccggcggccgcagaggcacggaggcgggaatctgaccggcgagaggccgcagaccgcctacgggaagctgaagaggccgcccgggaagccgcccgggctcgccaggctgaggataccgctcgggaggaggccgcccgggcccgccaagccgaggaagccgctcgggaggaggccgcccgggttcgccaggccgaagaagccgctcgggaggaggccgcccgggcccgccaagccgaggaagccgctcgggaggaggccgcccgggttcgccaggctgaggcgatggcgtcttccgaggcagctcacgacaaagctgctggcacgtcgcttgggcctactccctcgggcgacgctcaggcgacagcctccggggcggctcgcgacgaggccgcgggcggatcgcctgggcccacttccccaggcgacgcccaggaccaaacgggtccgggggacatccccgagcccagtgcgtcctccggcgggccgagccgcgtcgcattctctccaaggcggctcttctcctcgtcttctgtcgccccgctgagcgccgagccccttctgcaggccttggccgccgcaaacaccgcggtgctagatgggttcagcgcccaagtggaggccctgcgagcggaacgagcggagctcgaggccgcatgggcgcgtgtcgaggaggggcggcgctcagtggatgtcatggtggaggtgggccgtaaggctcaccgccgtcacgtctcggagcttgaagcccgcaaagcggcgctggcagagatcgcccgagaggtggaggaggagcggggggctgccctcatcgccaccactatgatgatcgaggcgcaggactccctccgccttcagcacgggaactgggaggcggagctgaagaaaaagctcgacgccgcccagggggttcttgatgccgccgctgcccgagagcagcgagcgacggagactgaagcggcgctccggcggcgtgaagaggccctcgaggcgcgcgccatggcgctggaggagcgcgcctgcgtcgcggagaaagtcctggcggaccgcgaggccgccgtcacctcccgggaggcaacgctggcggcgcacgagtctgcctgcgccgaagaggagtccgcactccgcctccgcgaagacgcgcttgccgagcgggaagccgcactggagcagcgggctgccgatctcgaggcgcgggaaaaagagctggacgcgagggcgtgcatcggcggggcggctgcgggcgaaagcgacttagccgcccgcctcgcagatgccgaacacaccgtcgcggacatgcagcgcgcgctaaactcatccgccggggaagccgaggccctccgcttggcgggcgagatagggcccggcatgctctgggatgcagtctcccgcctggatcgcgccggtcggcaagcgggcctctggaaaggccagtcaatgacacgccccaccaacctggaaggcctcgctccgcacctcacgaagatggcctgggctctccaacaactccccgaggagctcgagaagaccatcaagtcatcctcgagggacctcgcccaaggagcggttgaactcgtactagcgagttaccaggccagggaccccaacttctctccatggatggcgctggaagagttccctcccgggaccgaggacgacgcgcgcgcgcgggtccgggatgccgccgaccacatcgtccacagtttcgaggggtcggcccctcggctcgcgttcgcccccaattccgacgaggagggcgatgccagcggtgctgacgatcgtgacgacgaggccggcgacccgggcgcatcggactga

SEQ ID NO: 79920 - DNA, 1850 bp, Oryza sativa
  Clone ID: PAT_MRT4530_79596C.1
gtcccgggggtccacgtcgcatcgcaggcggtggggcccatggcgtcgtcgtcgccgccgtggctgctgctcccctccttcccctggcctcccccgccccctcccggctcctcctccggccgcggcggcggaggaggcggcggcggggaccccggcgactggaagccgaacgtcgtcgcggcgttcgccggcgcccaactcggccgcgccctccgccgtcgcctcgccggcctcctccgctcgccggaggcgcgacatcttggtgccttgccgagaataggtgacatttggtttgaaggatcagactcattcgccacacactcgattcttggagtgttggagaatgcgctctccgcaccatatgcttgcagctctgttttgttcaatggaaatggatcggacaggaggtacatcggtagggggaagttgccatccagaaggccaagtggaatcaattcgaagaagaggctttggactaatattcttcttgctgttaatattctggcttatgtcgctcagataactacacaaggacgattacttatatggggggctaagatcaacagtatgattgatagaggagaactctggcgtctggctacatcatctcttcttcatgcaaatcttgctcatcttgctttcaactgtttttctttaaattcaattggacctatggtggaaatgcttactggtcctagaagatatcttgccgtgtatttcacttcggctctggcaggttcattaatgagttatcgctattgtgcgtctcctgcggttggtgcgtcaggggccatttttggattggttggtgcctatgctgtttatacgtggaggcataggagatttttggggcatggaaaggaaagtttagagcatattggacgcgttgttatcttgaatatgggtatgggtctccttacaaggggcattgataactggggccatttgggaggcttgctcggaggcatggctatggcatggttcctcggtccagcttggcaatatcaatatgtgtcaaaggacggaagagcggtgttcaaagacaatgcccctattctccaactaagcaacgggaaatggttgaggctatcagcacaacaaatggacaaacgacaaatgtcgcagaaagacgggtgtaaatgtatcgtattatgctcagtatatgatgatgttacaggaaacgaacagtcgtatcgcaagatacaacatcaattcgactatggtaagtcattacattctcctctaccataagcacccaacccttcggtgagaaacttgatatttggtagaggcgtagggcagtcaccttcgtgacataaaaaccctggtaaattagcataatacagacctatatctacagttatactccaactctgaagtgcgagaaaccaccatacagttagaagtaaccgataagcaaaacctgcctttttgcagtatgattgctcatgattgcattcataaacctgcctttgcagtacgatcgctcacgattgcaactccatgcttcaggagatttcaagaagcaaactttgcaaccacaaccaccttgtgcactggtaactctgtaggcaaacagtccagggcaccagccaagtctcacttcaggaatggagagaatatggggaaggggcaattgaagggggggacttggtttttcgtcgcttcttccatggagccgttgaaggtcgaaacacaggcaatgagggtgaaggtattgacatcatttgataagttggtccagggactgcaccaggtaaatgattgggaggatctacatgaccaggaattggtggaaaagctggagagagatatggggactgcaaattttgacaatggatgtcaaatga

SEQ ID NO: 79921 - DNA, 6052 bp, Oryza sativa
  Clone ID: PAT_MRT4530_79597C.1
atgggtttcatttctggcattgacaacttcgtcttccctcccgagaaggcgttccggttcggcagcttcgacttcatcaccaacgacttcggcaagatttctctcctcgactcggattcgaaccagtcgggaagaggccaaatctccaccccgttcggtatcccgaactcggccgagatctaccccaagatcatctccaccgagttggcttcaaaccactcgggcgagatccaatctactccaacacgatccgatcaagacgatggggcctatccgccaatcctgatgaaactccccgatgatttggctgctgtcttcaccacaagggcgtcttctccccgtaggtctaggcgggatccggcctcagccccgatccagcctagctccagggaagtcggcgtcatactccagcctctcggcacggtttcgacggaacaactggatggctacctcagctcccccgacatcgactcacggccaacggagatcattgagtatgacgacttcggctaccgctacgactgccgcaacctcgacgacttcgatgaagactttgaagataactacacgcctctctactttggcatcttcatggctgacaacgagacggaagaacagcgtaaagcccaagaagcagaagaacaacgcgtgcaacaggaagccgaacgacgccgactggaagaggagcgccaagcacaagagcgagaacggctgcagcgtgagcaacaggagcgcgaacgggctgcaaaagaggctgaggaccggcgatagcgcgccttggatgccgggcgaagagcacgagaacttatcgggcagcaagacgtcgagggaacggcggtttttcgcacccctcaatagaacgcagttgcagcgatcaccctcctcgacaccctccttaaggaagacgcactcaatcaagccaatcacatcgtcaacatcttgaaccagaccaagaccatgatcgccgcctcggtcctggttaactctgcaagcgtccgcacgtcgactagcagccgagttccccctcttcgatctcaagactgtcaccaaccaagcctcagtgtcatcagcgcgggatccagtcgcaggagcaggggtcacgacgagcgatctgtccactcacctcccgaacgacacagggagcatcgagtttaacgacatcgctccccacatcacaggcgccccgtcgatcttcgcgacactatcaaccagcggcgcgcggcaagaggctacgttccccaccattcaccagatcgctacgacgacgacgtggatggagttgctgccttcacaagcgacctgcgtcgagtggattggccagctggcttcaagccgactggaatcgagaagtatgacggcaccactaacccggagtctcggctcaccgtctacggtctcacaattcgcgcagcaggaggagacagcaaagccatggcaaactatttgcatgtggccctagcggattctgcccggtcctggcttcacgggttaccccgtggcacaatcggatcttgggcggaacttcgcgaccacttcatcgccaacttccagggtacctttgaacgccctggtacacagtttgatctctacaatgtattcagaagtctggagaatcccttcgagattacatccgatgcttttccgagcaacgcaacaagatctccgacatcaccgacgacgtcatcatcgccgccttcactaagggcattcgccacgatgaactagtcggcaagttcgggcgcaagcctcccaggacggtcaagcaaatgttcgaaaaagccaatgagtacgccaaagccgaagatgccattaccgcgtccaagcagtcgggcaccacttgaaagccgaagaaagatacgccgactatagggggagtggaagtaccaatcacaaggatcgcaagcgtaagcccgaggaacttgtggcaactactacaccatcctcccgacaacgttcacgcgtcaacacttttgacaagatcatgaactcccaatgttcgcatcatccaacaattccaatcacgcagccaaagattgcttcgtctacaaacagtttgcagaacaatacgccaagaacgcacgcaagacctctgacggagatcaaagcacgtcaaagaagaaggatgatgaagatgatgccccgactagttttcaagaccatcacaaggaactcaaccacatctttggcggacccctagcttatgaatccaagagaaagcaaaagctgaccgaacgagagatcaatgttgttcagcccaacacgccccaatatcttcgatggtcagagacaacaattaagtttgaccgctcggatcatcctaaccgagtggtccacccggggcggtaccccctggtactagacccagtggttcacaacgtcaagcttcgcagggtccctcatcgatggtggcagtgcactcaacatccttttcaccaagactctggacgacatacagatccctcgcatggaattaaagccgagtaatgcgccctttcacggagtcatcccggggctatctgctacgccactcggccagatcactcttccagttactttcggcactcaggagaacttccgtacagagaacatttgttttgaggtcgctgatttcgatacagcgtatcatgccatactcggacgcccggcgatagccaagttcatggctgtcccgcactatacctatatgatgatgaagatgcctggtcctcgaggagtcatatccctgcggagtgacatcaagcaagccgtcacgtgtgacaaggaaagctgcgagatggcctagacccgcgagatcacgctcgcccgagaagaaatccgactggctgcgtccacagcaagcgaaggagaagtgcctgcgaccaagatgccaaagagcggagaaagcgacgccaagaccaagaagattcctctatatccctctgatcctactaagactgctgaaagcacgctcatcacctttcttcaaaataataaagatatctttgcgtggaaaccatctgatatgcctggtattccttgagaggtgattgagcactctttacatgttaaggaagacgctaaaccaatcaagcaacgactgcgccgttttgcacaggataggaagatgtgatcaaggatgaattgactaagctgttagcagcaggcttcatcaaggaagtccttcatcccgactggctggccaacccagtcctggttcagaagaagacggggcaatggcgcatgtgtgttgattacaccgacctcaacaagtcttgtcccaaagaccccattgggttacctcgcattgaccaggtagttgactcaacggctggctacgagctactcagtattttggattgctactcaggatatcatcagatctgactaaaggaatccgactgcttaaagacttcattcatcacgcccttcggggcctactgctacatcaccatgccttttggattaaagaacgcaggagcaacttatcaacgcatgatccagagatgtttttcaactcagatcggccgcaacgttgaagcttatgtggatgatgtagtcgtcaagaccaagcagaaggatgatttgattatggatctagaagagacatttgcaagcatccacgctttcaggatgaaattaaaccctgaaaagtgcatcttcagagtaccgtcagggaagctgcttggatttatgatgtcccatagaggcatacaagccaacccggagaaaatcaatgccatcctcaacatgaaaccatcgagctcctagaaagatgttcaaaagttaactggctgcatggtggcgcttagccggttcgtctcacgactcggcgagcgggggatgccttttttcaagctgctaaagaaaaccgataatttccagtggggacccgaagcacaaaaagcctttgaagacttcaaaaaacttctcactactccaccagtcttagcttcaccacatccacaagagccgttgttgttatacgtgtcagcaacttcccaggttgtaagcacagtcctggttgttgagcgcgaagaagaaggtcatgttcaaaaagtccaacgaccaatctacttcgttagcgaggttttggctgactccaagacaagatatcctcaagttcagaagctgttatacggtcactcggtcacggtggtcacatcgtttccactcggggatatacgtcataatcgcaaagcaaatgggcggatcgcaaagtgggccttagagtttatgtctttggatatatccttcaagccgcgaacttcgatcaagtcccaagctttagccgacttcatcgccgagtggaccgagtgccaagaagacacgcctgcagagaagatggagtattggactatgcattttgaaaggtcaaagaggctttcaggcaccggagcgggggttgttctaatctccccgactagagagaggttgagctacgtattgtggatacatttttctgcgtcacataacgtggcggaatatgaggcgcttcttcacggactaaggattgcgatctccttgggaattcggcgtctaatagtccgtggagattctcagttggttgttaatcaagtcatgaaagagtggtcctgccttgatgataacatgaccgcctatcggcaggaggtacgcaagttagaagatagattcgatggacttgagctaacccacgttcttcgacataataatgaggcagccgacagactggctaattttggttcaaagcgagaagcagctccttctgacgtgtttattgagcatctttatgagccaaccgtaccaaggaaagaaataatcgaggccacaaacactcaaggcgtaagcatgattgaagccgactggagagagcccctcataagatttttgaccaaacaagaactccctcaagataaagatgaagccgagcagatctccaagcacagcagactttatgtcttacatgagaccgagctgtacaagaaaagtctgtcaggaatcctgcaacgctgtgtctttggaggagggaagacaattgctaaaggatatacattcaggcatctgtggcaatcacgcggccgcacgaaccatcgttggcaaggcttatcgacagggttttttctggcccacagctgtgtccgacgccgacaaaattgtgcgaacatgtgagggttgtcaatttttcgcccgacaaactcatctaccggctcaagagttgcaaaccatcccgttgtcttggtcgttcgcggtttgggggctcgacatggttggtccatttaaaaaggctgtcggtagttatactcatctctttgtagccgttgacaaattttccaagtggattgaagctaaaccggtcattacaatcacggcaaacaaggctagagatttcttcgtcaacattgtgcaccggtttgggatacccaatcagatcatcactgataacggcactcaattcactggaggagtatttaaagatttctgtgaggacttcggcatcaagatttgttatgcctctgtaaggcaccctatgagcaatggacaagtcgaacgcgccaatggtatggtactccaaggaataaaagcacgagtttttgaccgactgcatccctatgccggcaagtgggtagaacagctgccatctgtactttggtccctgcgcaccactcctagtcgggctatgggccagtcgccgtttttcctagtctacggagtggaagcgatgttgccaagtgaggtggaatttgaatctctacaatttcgtaactacagagaggagcgctacggagaagaccgagtagatgatctcaaccgactggaagaagcccgtgaagcagccctaattcagtcggctcggtacttacaagggatgcgccgttatcacaatcgcaatgttcgatcacgaacttttctagtcggcgacctgattctaagaaaaattcaaactacacgggatcggcacaagttatctcccttgtgggaaggatcgttcataatttctgaagtcactcggccaggttcttaccaactcaagcgtgaagacggtactcatatcgacaactcttgaaatattgaacatcttcgtcgttttatgctt

SEQ ID NO: 79922 - DNA, 1135 bp, Oryza sativa
  Clone ID: PAT_MRT4530_79598C.1
atggggaagcccgtcgatgtggagctcggcggcgcggcaggcctcgagatcgccggcggcggagggggaggagggggaggggtgtgggccgtcgccggggcgatcggccgcgccgcgtcgttccggtgcgtgttcgtgctcgcgctctccgtgggagtcctcgtctcggcgctgctgctcctcgtgcccacccgcgggcacgggttcctctccgacgaccccgtcgtgctcggagctgaaatccaggttggttttaccttggaaaagccagtttcattccttgctgctcacatggataaactagggggtgacatatttgaagaaattggtattcctaatagcaaggtttccattgtgtcaatgcgttctttgacctctaagtactccacaaatgtggtttttagtgttcttccttctccaaaagaagcctcaataagtttgcctgccctaagtgtgctgagatcatccttaatagcgatgatgctaaatcaggtgaacctatcgttgacagaaccactttttggccatccatcttccgttgagctgttgaggttccctggaggaattacagtaattcctgagcagtctggttctgtatgggcggatcctcttttcaactttgtgttgaacaattccatttatcagatcttgggtaatattacagagctaaaggaccagttgaagcttggattgaacttgaggtcctacgagaaagtatatttgcagttcaggaatgagattggatcttcagttgatgccccggcaactattgaggcatctgttctagatgggagcagcattcttttaccatatagattgaaacaactagctcagctaatcaaagaacccaatgcaaggaaccttgggcttaatcactctgtatttgcattcgatctcagatttatctccgagtccatctccttcaccatctccatccccatccccatctccatctccatctccattcccttcttcaagtgtaccaccatctttctcaccatctgggagcatccattaccctgcacctccaacatatatgaacccaagtcttcctcctcaagcttcaccccctttgcctgaacttgaggccccaggagaaggtgggagcggcgttcaggaacgagataggatgaac

SEQ ID NO: 79923 - DNA, 591 bp, Oryza sativa
  Clone ID: PAT_MRT4530_79599C.1
atgcgctacggaggcatagcaaattttgatgccgaagtcttcacaaaaatctttaaatactccgccagtgaattgagtgccattatcagtaataatccgatgaggtaccccgaaccgatgtacaatgttgatgaaaaaatctctagctttgtctaccgtgatcgtgatgaccggtttagcttcaatctacttggagaatttgttgatagccacaaagagatgtgtgtaaccgccgactgcctttttgaacgggccgaccatgtcaagcccccaaaccgcaaatggccaggacagcaggatgcggtgggccagaaaaaaccttgccggtacgccttgctgactatgctcggtctcatgaataatataaagcctgctacgcctggaaatctgctcggcttcgtctttatcttgacggagttcttggcaggtcagaaatcgtatgagaggctctctctagtcggcttcgaccataggtatgtcttcaatgtccgcgtcttcacccgtttctctcttgggcactgttggctcataaagatgttcgacgaacacatcagaaggggccgcttcgcgtttggatccaagattcgctag

SEQ ID NO: 79924 - DNA, 376 bp, Oryza sativa
  Clone ID: PAT_MRT4530_7959C.1
ggggaaaaacaggagcaacgtttgcaacaccagactcagcaacataggaatccaaaggatgaaacggggggatgcagggtaacggggaagggaaacagattccaaatggggcccccaaacatagccaccattcaacgaagggccccccccccccccaaaaccaaagctaaaagaggcgatgatgattggggtatgcagaaaaaatctgaaccggaaagcgaccagccggggatgatgagcgggagatttggcattggtttttttataggaaaggggccatttcgggcaccttggggacctcatccggggtggtcagctgggccacctcgagggggggcttcccgtccagattttggggggggacaacagggccatg

SEQ ID NO: 79925 - DNA, 667 bp, Oryza sativa
  Clone ID: PAT_MRT4530_795C.1
ccggccgggacaaatagccatcccttcattagtcctacaacacagtggatccataaatcgccccatagttttcttcgcagattgcttgttcctcttgtgccatggctccctatcccaccaaatattacgtccgagcactagtcgatgatacagttctcctcgtggcacctcgagaggatgaagatgttatacagatcgcaaccatttgaatcatctccgaccgtctcctctcaagctgccacatctgagttcttcaacgcctctaatgatgtcttcccctgtaccaccatatctgctgtcccacccgctattgaacctagaggactactactaccccattacactattgacgcttctctaatatatatcatcgccggcgagagagtatatcatgctgctctttcccatgctgtcctgagaccataccatctatagttcctacaatcaggacaagtccactgtgtaccgaaacgtcatagtcacctccctaagttctcgtgtgtacatcataagattcgccgtttcagacaaagagatgttatctcgctgcctgctgccgtagctcattgatgctacactgatggtgacatgcctgaatgttgctgcactatgtcactgatatcaacaacgtggctgaatctacttgaccctcgtacgctggatttct

SEQ ID NO: 79926 - DNA, 606 bp, Oryza sativa
  Clone ID: PAT_MRT4530_79600C.1
acgctttgctctgtccatatattcgtatggctggcagtttttcatcctggaggtagacaataccgcaataaggtgcttgggctaaacaagggttccagggtatcatggttgggggcaaacacagaagtgtgcgtagtctgtatgcaagggacaatgtgaagcacaatggtgtcaaggccacaatttagctcgcaagctaaagtgacaatatcgtgccacgcacaggttgtggggtgatgcttgctgaccatctgttgatctcccggggatatctcggtctgcaaaggctgccaaagcttcctggtttgggcatgtgtgtgaaacaagtgcgcacaatgtctgaggtatgatgggtgatgcttgacacactgagggtaagctgatggggtggcaacacacaagtgtacacacttgcacccacacacactctcgtccaggtggtgcgttggtgaatggagtgtgttaaacaaggtgattagtttggtttccagggaaagttgaaataaatgaagcgtcagatatcatcaatatgtgacatgtgaaactttgggtgttataaaatagaaaaaagttgtctttcatagttaaaaaaaaaaaaaaaaaaaa

SEQ ID NO: 79927 - DNA, 561 bp, Oryza sativa
  Clone ID: PAT_MRT4530_79601C.1
atggtgtggctgtttgcaagcgctaccgtggctgaactcaaccgggctgcgatgacagagcctgcaaaatctcccaaggcgatggcagtgaagcggtttggcagggcgctgacctatccatgtaaaagaaatagaagagggcatggcactggcaattatacaggacacgggaggtggacggagaggaaggaattagtgagtagattggaagaagaagaaaagaaacggctaatcatcctcagtggtatctgtggaggaggaagccctggtccaattcaatccaacatagatcagctggaatctcgaaggattgagctcttggctcaacttgaggaatgtaatgctgagcttgccttagagaagcagaagctagccgatttgcccaaggttgttgaagaacagaagtccaagctgaaagcttccattaagcatctagctgaaatgactaagtccttgaaggtgatccctgaaaccgatgctcaagacgcccaagcaattgaagaagtgatgcagattaggcaaagggctatatcggctatccagagatatattgctgagtaa

SEQ ID NO: 79928 - DNA, 502 bp, Oryza sativa
  Clone ID: PAT_MRT4530_79602C.1
aattacttagtactatcttttgaggtgcaacatgtattggtaatcctgttgtgctaataacaatagaatccatcgaacgaaaaagaaagaatccgtgctatttttctaaatatcttccctgaactactgaacctataaaaaaaagttacggcaaagtgtgctaacaaacgggggttgctttgataattattgaactgaactttcgaaattacgtgtaaaaggctatcttaccagacaggaagtaccagttggagtctgcttgtctggcgtcaggactcgcaaactctgattcaatcatggtcttgaaagtaatcggggtggatgcactttccaattgtgctgctttttggtaaatagttttaaactacgttgaatggggactggcagatcagtatgtcggttaagctggagattgctaactctcgagtacagtaggtgagaactggagaactttcaccacagaaacgattacaaaaatatttgaaaatgttaagcatgggac

SEQ ID NO: 79929 - DNA, 1780 bp, Oryza sativa
  Clone ID: PAT_MRT4530_79603C.1
gtttttttttttttttttttggttttttttgagttcttggcactgcccccttttttttcctttttagagttaaaagtaaaactatcttacatcaattttcttgaggtctggaagcttgcagcttccataaaattgtctatacacgtacatcaacagtacaaaatctttgtactcaacacaaaagttcagaaaaaaaaaaaaccatgaacttctctactttgtagctgaaggagcctctccattgttactttgcctttttttatcaacaaaggagctaatcaatgtaagaaccaattctgttgggacatacccatcaatccacattactcaccatcataatgtgaatcgattcatcatcatccatccatggatccatgattcatccagatgatatttattcgtttcttggcatcaagaatcggatgatttattggagccagcattgaccaagcttgccagcttcactttgggcttggagtactcaccactcatcgcgagcttagccgcgaggccactgccaaaatcagtgaagtgcacaccatcccagcttagcacctttgatcctggctcgcagagatcatcgcagccaaatttccctggcttgaagttgtatggaggcccaccgttgccgcagcacaccatcaacggccacttgatcccatatttggtgtggttggcgacgaagtcgtacttgatggcaaacatgtcggtgtacacgacggtggcgttcttcagctgcaaccgcatttcgtcgcagaggtggctcagcttcttgttgaactgccgtgcagccttgttgtaattcgccaggcagccatgggcgtcgtgctcacccttctcctgcaccaccagtgcaggtaggcagccaagggcgccggtgccatgtatccagaacttcctcgcgccgttgtcgtacagaatccgaatcgcgtctttgatctcactgacgatcttgctgaattttttgtcccagttatcagatggagtgtgcatcacaccagccacatcgttgtggccgatgtccatcatgtatagagcgttctcgaagccctccttgctcactggccctttctgccctcgttcgaagagctccagggatctgtgcttgaagtacacaaactggtcgacttggacattcaaggaatagggagagacgccgtgtgatactgttgagccagccatagcgaagttgacaccattgctgtagtctgaaccaattgacttcaggtatgggttcagttcacgtgtattcaagctctcacagatgaagtcgatgatgacgcggccgtcggagaggcggccggtggggtggtggaagtaggtgcggccctccggcggcatgatccggatcccccccgccgccgccacgccgccggtgtcggagttggagtcgccgaagttgaacagcaccaccccggccgccgccgcctgctcacgctcctcctccgcggccgttgtagccgccactccggctccggcggcggcggcggaggcgtccgctccctctccggcggcggcggtggcggcgacgacggagccgaggttctgcctgacggcggcgcccatggcggacggcgagacgaacgcgagcgagagcaccatgaccgccaccaccaccgccgcgagcacgcagtagtactgcaggcgcaggctgatcaccttgttcccgcctccgcctccgccgttggtggggctcgccatggccatcgcgcgagctcgcctgagctctcgccttcgcggaggaagaagacgacgatggctgagtttctcccccctgctc

SEQ ID NO: 79930 - DNA, 373 bp, Oryza sativa
  unsure (1)..(373): unsure at all n locations
  Clone ID: PAT_MRT4530_79604C.1
cccacgcgtncgttttattatatggtttctaaacagctggtcaagaagaaaaggtagcggtgacgaatcaacatggtgagaatactcttatgttgctgcaccacatgggttaccacacgatcgcagtggtttgccatgggtttacagctttcaaggtgcataaatatgtcgttacagaagaaattccctttgtactattcaaaatataatgatagcatcattgttgatctagcgaatgcactttccaagaaaggggttggaatcttccgcttcgatttcagtggaaatggagaaagtgaaggggaattccagtacgggaactacagaaaggacgctgatgacttgcattctgctatttcacatcttaatcatg

SEQ ID NO: 79931 - DNA, 947 bp, Oryza sativa
  Clone ID: PAT_MRT4530_79605C.1
gcacgaggctcctctctttctatctctctctctccaccacctttcccccctctctctcctcccccaaatcgagccaagaatcaccgccgccgccgccgccaatgggcgcgcttctcctccgctgcgccctcctagccctcgccgccggcctcgtcgccgcgcgcggcggaggcggcggcggcgcgggggcggcggggaggctgtcccccaactactaccgccacagctgcccgcgcgtggagcggatcgtcgcggacgtcgtcgccgccaagcagcgcgccaacccgtccacggcggcgggcacgctccgcctcttcttccacgactgcttcgtcggggggtgcgacgcctcggtcctcgtctccccgctctccgccgaccggtcgcccgagcgcgccgcggagatcaacctctccctcccgggcgactccttcgacgtggtggcgcgcgccaaggtcgcgctcgaggtggcctgcccggggaccgtctcctgcgccgacatcctcgcgctggcggcgcgcgacctcgtgggcatcctcggcgggccccggttccccgtcgcgctgggccgccgcgacgcgcgccggccgtacagcttcaggagcgccgacgggtacgacccgtcgctgaacccggcgttcgcgcgcgcgctgcagagctcctgcgccaactacaggagcgacccgaccatctccatcttcaacgacatcatgacaccgggcaagttcgacgaggtctacttcaagaacctgccgcgcgggctcggcctgctcgcctccgacgccgcgctgtgggagtacccggcgacgagggtgttcgtccagcgctacgccgacaaccggacggccttcttcgaggacttcgccgcggcgatgcagaagctcggcgccgtcggcgtcaagactggccgccagggcgtcgtcaggcggcactgcgacgtcctctga

SEQ ID NO: 79932 - DNA, 1326 bp, Oryza sativa
  Clone ID: PAT_MRT4530_79606C.1
atgtcgtcgtcgtcctcgttgtttcttgcgttatgtaggatcttcgttgccacgtggaacgtgggcggccgcgcgccgccggggtcgctgagcctcgacgactggctccgcacctcgccgccggccgacatctacgtcctcgggttccaggagatcgtgccgttgaacgccggcaacgtgctcggcgcggaggacaatggcccggcgaggaagtgggtgtcgctggtgcggcggacgctgaacagcctcgcgggcacgggcggtggcggcggaggcggaggtggcgggggcatgaggacgccgtcgccggcgccggacccggtggtggagatggacgacgacttcgaggggtcgtcgtcgaggcagaacaacccggcggcgttcttccaccgccgctcgttcaacgccgggctcagccggagcctccggatggacggcgacatcctcggcggcggcggcggcgcgcagccgaggctggagcgccggtacagcgtcaacgaccgcgtcatgtacggcagccggccgagcgactacgaggccaactgccggtggggccacccgtcggacgacggcgagatcgacgacggcggcggcgagtcgccaagcgcggtgttctcgccgatgtcgtacggatacggcgcgccgccgtacatggaagagagcaatggcggcgccgcccattctagtcacctcacatcggggcagaaggatggtgatgagcaccgcagaaactccgatgtgatggaaattttgagaaaaaccaggttcccaatggtttatggacagtatgagagatcaccagagactattttggagcatgatcggatcatttggcttggggacctaaattatcggatagcgctttcctaccgatcggtgaaggctcttgtggagatgcgcaattggaaagcattgcttgagaaagatcagctgaggagcgagcaaagaggcggccgcgtatttcctggttggaatgaggggaggatatattttcctcctacttacaaatactcaaataattccgacagatatgcaggggatgacatgaaccagaaagaaaagaggagaactccagcatggtgcgaccgcattttatggtatggaaggggtcttagccaactctcatatgttcgaggagagtcccgcttctcagatcataggcctgtctacagcatgtttagtgcagaagtagaatcgatcaatcacagccgaattcagaaaatgagttgttcaagctcgcaattggacatcgaagaattgctgccctactcatatggttacaccgatatcaacccatatggatacaccgacctcaacttctattga

SEQ ID NO: 79933 - DNA, 468 bp, Oryza sativa
  Clone ID: PAT_MRT4530_79607C.1
ctatgtgacttgccttgcttcttcaaaagaaacttctgaactctttttctcgtgaccacgatcttctgaagtggcggaatccatgcgctggaacgcaaaatgaggaaaaacggcaaacgtggagggtgggcttttagcggcgcaaggcgatgattgggcggtggccgaggcgcagcttggcactgtggtgctgagggtggaggcggagtcgcccggcatggtccccagcaccggcgacgagcggttgaaagcggcaaagcaatggcggcttgggtccctggtttgaaagttctccttctcaagagagacatcgctcaagaacgacgttgattcttgatgattatcgagaacgacgttctgaaggccagagggacaaggtttaggctcgataggaggttgtgatggtggttctatggagagcaattcaagggtctcgagaatctttttgaatgaaataaagatcatcat

SEQ ID NO: 79934 - DNA, 1185 bp, Oryza sativa
  Clone ID: PAT_MRT4530_79608C.1
gcacgagctttctcttctcatcatctatatcacgatcgatcacaaagaggttaacagtaacacatggggttcggctcgagggagatggcctgcgcgctcgtggcgctggtgctcgggctctgctgcgtcggcggcgcacgggcgacggggaggatcgacgaggggctggaggtgatgtggggcgacggccgggggagcgtctcgccggacgggcaggtgatggcgctgtcgctcgaccacacctccggctccgggtggaggtccaagaacacgtacctgttcgcgcgcgtcgacctgcagatcaagctcgtcgccaacaactccgccggcacggtcaccacctgctacttcatgtcggaaggggagtgggatatccacgatgaggtggacctggagttcctcggcaacgtcaccgggcagccgtacacgctgcacaccaacgtcttcgccaatggcaccggcggcaaagagcagcagttccacctctggttcgaccccaccaccgacttccacacctactccatcgtctggacctcgcagcacatccttgtgctggtggacgggacgccgatccgggagatgaagaaccacgcggacaaggggatcgcctacccgtcgtcgcagcggatgcggctgtacgggagcctgtggaacgccgacgactgggccacgcagggcgggcgcgtcaagacggactggtcgcaggcgccgttcgtcgcgcggtaccgcaacttcaccgccacggaagccgcgtcgtcgtcgtcgccggcagggtacgaccagcagatggacgccacggcgcagcaggcgatgaagtgggcgcgcgacaactacatggtgtacgactactgcgccgacagcaagcggttcccgcagggcttcccgcccgagtgctccatgccgtagagtggagtggagacgcgccaaagcctcggtgcactttgatgaacgcggactcgatcgaactcacgcagggcacgcattgacctcgtttttttatttttacttctcttgattgaattgattcattctttctatgtaaagtagatatatatatatatatatatatatatatatatatatatatatatgtatatgtatgcacgaaagatttaaagaatggagtgtgaaagaaaaaatatgtttgcattgcaaaaaaaaaaaaaaaaaaaaaacctcgtgccg

SEQ ID NO: 79935 - DNA, 390 bp, Oryza sativa
  Clone ID: PAT_MRT4530_79609C.1
atgaacacccggcccggggaccagaccgtgcgggacaccgaggctggaaattcctcggatgatgagggagagaagaggaggaggaggaggaggaggaggaggaggcgtaccatatcgacaccgaccggggacaactgtatccgcgggcggaggggggaggattccggcgagacggaaacggtgggagcgaggcaggcgacgcgcggcgagccggagtggaagagagcggcggtagataaagctattcgcgttcttgcggcgcaagaaagaagaaacgggaaggtgggaggcggcgcgagcgcaggagatgcttctggagagggctggatcgactactcgtgggccgcctctcgtgcatgcggaggtggaggcccatgtggcccaatatga

SEQ ID NO: 79936 - DNA, 471 bp, Oryza sativa
  Clone ID: PAT_MRT4530_7960C.1
atgactgtgacgccgcagctacgtatacgatgggaccgtgcgccccgggctctttggcttcacattgcccgtgttcgtgggctcgtcgcggagggccagcagcggcaggagggcaggcgggcgagggccggatcccctttgcgagcttgcgacttcgagacaacggcgggaaagcggagacatcgtgacgtggcggagacgagggcggcggagaggcggaatggcagcggcctgattccccagctgtcgccctctcaacctcttgtcaccactgccttctgctcctcaccgccgcctcccaaccttctgtcaccgccgccttccgctccctccccgcctttgatggcctcgccgccccgaccacaggagagagggggcaggccgctcctcaccgctaccttctggaggggatggattgtggcggcccgagctcgacggtggcaagggaacgacatcgccgtggtggcttga

SEQ ID NO: 79937 - DNA, 1236 bp, Oryza sativa
  Clone ID: PAT_MRT4530_79610C.1
atggagctcgcggaggccgtccgggacgagacagccatggccatgcgcctgctcggccacctcgcgcgcgccccacgcggcggcggcggcgacaaaaacctggccgtctccccgctctcgctccacgcggcgctggcgctcctcggcgcgggggcccgcggcgaaacgctcgaccagatcatcgccttcctcggccccgcgggtggccccgcccacgcggcgctcgcgtcccacgtcgcgctgtgctccctcgccgacgacagcggccccggcgatgaccgcggcgggcccaaggtgcggttcgccaacggcgtctgggtcgacgccgcgctccgcctcaaggccgcgtacgcgcgcgtcgtcgccgacaagtaccgcgcggaggcgcgcccggtgtccttccgagacaagctagaggaagcgaggcgagagatcaacgagtggttcgagagcgcgacggccggccggatcaaggacttcctgcccaaagacgccgtggaccgcgcgacgccggccgtcctcggcaacgcgctctacttcaagggcgactgggaaagcaagttcgacgcccggtccacgagcgacgacgtcttctacctccccgacggcggccatgtctccgcgccgttcatgtcgagcggcaagtggcagtacatcgcctgccgcgccggctacaaggtcctcaggctcccgtacgcgcgcggcggccgcggccgcggccgcgacaccggccgcctcttctcgatgtacatctacctccccgacgagcgccacggcctgcctgacatgctgcgcaagctgtgctccgacccggcggcgctgatcgagagctccgccgccctgacggagaaggtccccgtgggcgccttcatggtgccgaggttcaccctgtcgtacaagacgaacgcggcggagacgctgcgacagctcgggctgcgcctgccgttcgagtaccccggcgccgacctgtcggagatggtggagtcatcgccggaggcggagaagatcgtcgtgtcggccgtctaccacgagtccttcgtcgaggtgaacgaggaaggcaccgaggcggcggcggcgaccgccgtcgtcatgacccttggctgcgcggcgccatcggcgccggttcacgtcgtggacttcgtcgccgaccaccccttcatgttcctgatcaaggaggacctcaccggcgtggtggtcttcgccgggcaagtcaccaatccttcgtcctcgacctag

SEQ ID NO: 79938 - DNA, 2898 bp, Oryza sativa
  Clone ID: PAT_MRT4530_79611C.1
atggcacggggctccgcaccactcgacggtagcgtgctgccgtcttcccgcatcgtgagcgagaggcaggccgggctgccgcgccgattcatgccggcatctgccaccggccgggaggtggtcgagctaggcgagggacgcccggtaccacactacccggggcggtccgtcttcttcctccctttcgcaatggcagggctggtcccgccattctcttctttcttcatggatgttctggagttttatgacctccagatggcgcaccttacccccaacgcgataatgacgttggccatcttcgcgcacctgtgcgagatgtttatcggggtgcgcccatctcttcggcagtttcggtggttcttcaccgtacagccagtgtcgccgccgtcggtagttggtggctgctacttccagccgcgggggccggcgctgagccgctacattccctgcgtcctccgcaagaagtgggacgactggaagagtgactggttctacacccccctcgccgacgaagcgcgcctccaacttcggagccagcccccagcgcaggcctccagttggcgggcgccgctagatctgggagatggctacgacgccgttcttgaccgtctggcgggtctgcgatcccaggggctcacgggggccatgctgtacggcgactaccttcgtcgccggattgcgccgctccagcggcgcgcccggggcgcctgggagtacaccggctccgtggaggcgtccctcatcccccaaggagtcctccccctctgcagcgatccagatcgtgccaacatcctgaccatcatgatggcggtcggggcgtcggaggagcgggctcctcgaggccacgatggcgcgggcgggagccgcaggggagaacaatctaccccaggagggggtcgtgcttctgggccccgtgacaggggcccggggggcagccgccctgccgacgcccgagggaagaggaagcaagagggtaccccctccccatctcctccccgagggggcggggcggcgcgtgtcagcagcaggcgcccggagggggccgcgccgacgccgcagcccgagggggagcggaagaagaaacggctctgcaagatgggggggaccgaatcataccggggaaaccttatctcccccccaaggtggtcgttcaaccgacctcctcgcagcgagatcccgtcgcgcccctcccgccattccaagtccggccggtctgaggccgaggatacggcgaccgcggaggcccggagacgggaaactgaccggcgagaagccgcggatcgccttcgggaagccgaggaggctgcccaggaggccgtccgggctcgccgggctgaggaagccgctcgggaggaggccagactccgccgggccgaggagtccgcccgggaggcggaggcggcgcgcgcacgccaggcggcctgccaagcccccgacccgactccgcccgaggcgacgacgacttccgaggccacccacgacgaggccgcgggcgcaccgctcgggcccgacccctcgggcgacgctcaggacaagccaggtccgggggtcgtccctgagtccggtacgtcgatcggcgggccgagccgtgcggcatcctcaccgaggcggctctcccccatgccttccgctgccccactgagcgcagaggcccttctgcaggccttggccgccgcgaacacgacagtgttggacgggttaagtgcccagatggaggtcctgcaggcagagcgggcggagctcgacgctgcatgggcacgtgtcgaagaggggcgacgctcggtggaggccatggtggaggcgggccgcaaggcacaccgccggcacacctcggagctcgaggcccgtcggaaggagctggcggagatcgccagggaggtggaggaggagcgggaggctgccctcatcgccaccgcagtgatgaacgaggcgcaggacgacctccgccttcaatacgggagctgggcggcggagctaggaaagaagctcgacgccgcccggggggtccttgaagccgctgctgcccggaaacggcgggcggcggagaccgaggcggcgtcccggtggcgcgaagaagcccttgaggcccgtgccacggcgctggaagagcgcgcctgtgtgaaggagagggacctggcggaccgcgaggccgccgttgccatccgggaggctacactggcggcgcacgaagccgcctgtgctgaagaggagtccgcactccgcctccgcgaggatgcgctcaccgagcgggagcgagctctcgaggaggccgaggccgcggcgcaaaggctggcggacagcctgtcccttcgtgaggcagcgctggagaaacaaacgtgtcgcaatctggaagctgccgaacacaccatcgccgagctgcagggcgcgctggactcgtccgccggggaggtcgaggccctccgcttggcaggcgaggtagggcccggcatgcttcgggacgccgtctcccgtctagaccgcgctgggcggcaggcgggcctctggggcgggcggatcgcgaaatatgccgccaaccatggggtcctcgcccagcgcctctcagagatggccgggactctccagcggctcctcgaggagctcgaggagacgatcaagtcatcctcgagagacctcgcccggggggcagtggagcttgtactggcaagctaccaggccagggacccggacttctccccgtgggcggcgctggacgagttccctcccggaaccgaggacgacgcgcgcgcgcaggtccgggacgccgccgatcacatcgtccacagcttcgagggtacggcccctcggctcgcgttcgccctcgactccgacgtggagggcggcgacggtggtgtggacgacagcgacgacgaggccggcgacccgggagcctcgaagtga

SEQ ID NO: 79939 - DNA, 413 bp, Oryza sativa
  Clone ID: PAT_MRT4530_79612C.1
taaccccgggatatggcctgggatttaatgtccttggtccaaaaagggggtgttggtaatataatggaacggcttccttgggtttggcttttccttggtgtttaaccgtgtccccaattcccttgtggggattccaaaccttgggcgtttccttgcaatgtgcccttgtggccttggccccaaccttccttaaggaaccaatataggccttccccttaattgaagatattaattaaggataggatataccccgcttgggaccttgggtccaaaattccttggtgtccttttccttggccaatccctgaatgtttccccaaggtttggtttgtttgactggagcgtgtaaaggaccgggaattaagtactaccagaagttggtcaatcacttgttggtttaaaaaaaaaaaaaa

SEQ ID NO: 79940 - DNA, 5904 bp, Oryza sativa
  Clone ID: PAT_MRT4530_79613C.1
atgggtttcatttccggcatcgacgacttcgtcttccctcccgggcaggcgttctgattcggcagcctcgacttcatcaccaacgacttcggcaagatttctctcctcgactcggattcaaaccagtcgggaagagatcagatctccgccccgttcggtatcccgaactcggccgaggtctaccccaagatcatatccaccgagttggcttcaaacctctcggacaaggttcaatctacttcaacacgacccgatcaagatgatggggcctatccgccgatcttgatgaaactccccgacgatttggctgctgtcttcaccacaagggcgtcttctccccataggcctaggcgggatccggcttcagccccggcccggcctagctccatggaagtcggcgtcatactccagcctctcggcacggtttcgacggaacaactggacggctacctcagctcccccggcgtcgacttgcaaccaaccgagatcgtggagtacgatgacttcggctaccgctacgactaccgcaacctcgacgacttcaatgaaggctttgaagacaactacacgcctctctacttcggcattttcatggctgacaacgagacagaagaacagcgtaaagcccgagaagcagaagaactacgtgtacaacaggaagccgaacgacgccgactggaagagaaacgccaagcacaagagcgagaacggctgcagcgtgagcaacaggaacgtgaacgggctgcaaaggaggctcaggaccggcgacgacgggccttggatgccgggcgatgagcacaagaacttattgggaagcaagacgtcgagggaactgcggttttttgcgcctctcaacaggacgcggttgcagcgatcaccctcctcgacaccctcctcaaggaagacacgctcaatcaagccaatcacgtcgtcaacatcttgaaccagaccaagaccatgatcgccgcctcggtcccgattaactctgcaagcgtccgcacgccgactggcagccgagttcctcatcttcgatcccaagactaccaccaaccaagccttagcgtcgcaggtgcgggatctagtcgcaggagcaagggtcacgacgagcgatctgtccactcaccccccgagcgacacagggagcgtcgagttgaacgaccacgctccccaccttgcaggcgccccgtcgatcttcgcgatactatcaaccagcgccacgcgacaagaggctacgctccccaccattcaccagatcgctacgatgacgacgtggatggagtcgctgccttcacaagcgacctgcgtcgagtggattggccagccggcttcaagccgactggaatcgagaagtatgaaggcaccactaacccggagtcttggctcaccgcctacggtcttgcaatccgcgcagcgggaggagacagcaaagccatggcgaattatttgcctgtggccctagcggattctgcccagtcctggcttcacgggttaccccgtggcacaatcggatcatgggcggaacttcgtgaccacttcatcgccaacttccagggtacctttgaacgccctggtacacagtttgatctctacaacatcattcagaagtctggagaatcccttcgagattacatccgacgcttttccgagcaacgcaacaagatctctgacatcactgacaatgtcatcatcgccgccttcaccaagggcattcgccacgaagacctagtcggcaagttcgggcgcaagcctcccaagacagttaagcagatgttcgaaaaagccaacgagtatgccaaagccgaagatgccattaccacatccaagcagtcaggcaccacttggaagccgaagaaagatacgccgactataggggggagtggaagtaccaatcacaaggatcgcaagcgtaagcccaaggaacttgtggcaaatactacaccatcctcccgacaacgttcgcgcatcaacacttttgacaagatcatgaactcccaatgtccgcatcatcccaattccaatcacgcggccaaagattgctttgtctacaaacagtttgtagaacaatacgccaagaacgcacgcaaaacctctgacggagatcaaagcacgtcaaagaaaaaggatgatgaagatgataccccgactggttttcaagaccattgcaaggaactcaaccacatctttggcgaacccctggcttatgaatccaagagaaagcaaaagctaaccgaacgggagatcaacgctgttcagcccgacacgccccaatatcttcggtggtcagagacaacaatttagtttgaccgctcggatcatctagaccgagtggtccacccggggcggtatcccttagtactcggcttcgaagatccctcattgatggtggcagtgcactcaacatccttttcgccaagactctggacgacatgcagatccctcgcacggaattaaagccgagtaattcaccctttcatggagtcatcccggggctatctgctacaccactcggccagatcactcttccggtcacttttggcactggggagaacttccgcacagaaaacgtttgcttcgaagttgctgatttcgagacagtgtatcatgccatactcggacgcccggcattggccaagttcatggccgttccgcactatacctacatgatgatgaagatgcctggccctcgaggagtcatatccctgtggagtgacatcaagcaagccgtcacatgcgacaaggaaagctgcgagatggcccagatccgcgagagcacgctcgcccgagaagaaatccgactggctgcgtccacggaaagcgcgctcatcacctttcttcaaaataataaagatatctttgcatggaaaccatctgatatgcctggtattcctagagaggtgattgagcactctttacatgttaaggaagacgctaaaccaatcaagcaacgactccgccgtttcgcataggataggaaggatgcgatcaaggaggaattgaccaagctgttagcagcaggcttcatcaaggaagtccttcatcccgactgactggccaacccagtcctggttcggaagaagatggggcagtggcgcatgtgtgttgattacactgacctcaacaagtcttgccccaaagatccctttgggttaccttgcattgaccagacccgactaaaggaatccgactgcttaaagacttcattcatcacgcccttcggggcctactactacatcaccatgccttttggattaaagaacgcaggagaaacttatcaacgcatgattcagagatgtttttcaactcagattggccgtaacgtcgaagcttatgtggatgatgtggtcgtcaagaccaagcagaaggatgatttgattacggatctagaagagacctttgcgagcatccgtgctttcaagatgaaactaaaccctgaaaaatgcatcttcggagtaccgtcagggaagctgcttggatttatggtgtcccatagaggcatacaagccaacccggagaaaattagtgccatcctcaacatgaaaccgccgagctcccagaaagatgttcaaaagttaaccggctgcatggcggcgctcagtcggttcgtttcacgactcggcgagcgggggatgccttttttcaagttgttgatgaaaactgacaatttccagtggggacccgaagcacaaaaagcctttgaagacttcaaaaaacttctcactactccactactcttagcttcaccacatccgcaagagccactgctgttatacgtgtcggcagcttcccatgttgtaagcacagtcctggctgtttagcgagaagaagaaggctatgttcaaaaagtccaatgaccaatttatttcgttagcgaggttttggctgactccaagacaagatacccttaggttcaaaagctattatatggtgttttaattaccgtcaggaaactatctcactacttccaaggtcactcgatcacggtggtcacatcgtttccactcggggatatacttcataatcgcgaagcgaacgggcggatcgcaaagtgggccttagagttgatatctttggatatatccttcaagccgcgaacttcgatcaagtcccaagctttagccgacttcgtcaccgagtggatcgagtgctaagaagacacgcctgcagagaagatggagtattggactatgcattttgacgggtcaaaaaggctttcaggcactggagcaggagttgttctaatctccccgactggagagaggctgagctacgtattgtggatacacttttctgtttcccacaacgtggcagaatacgaggcgcttcttcacggactaaggattgcaatctctttggggattcagcatttaatagttcgtggagattctcagttggttgttaatcaagttatgaaagagtggtcttgccttgatgataacatgaccacttaccgacaggaggtatgcaagttggaagacaaattcgatggacttgagctcacccatgttcttcgacacaacaatgaggcagccgacaaattggctaattttggttcaaaatgagaagcagccccttttgatgtgtttgttgaacatctctacgagccaaccgtaccacggaaggaaacaatcgaggccacggacactcaagacgtaagcatgattgaagccgactggagagagcccctcataagatttttgacaaaacaagaacttcctcaacatgaagatgaagccgagcggatttccaggcacagcagactttatgttatttcatgagactgagctgtagaagagaaacccatcgggaatcctgcaacgctgtgtttctttggaggagggaagacaattgctaaaggatatacattcaggcatatgtggtaatcacgctgctacacgaaccatcgttagcaaggcttatcggcagggttttttctggcccacagctgtgtccgacgttgacaaaattgtgcgaatatgtgagggttgtcaattttttgcccgacagacttatctaccggctcaggagcagcaaaccatcccgttatcttggccgttcgcggtttgggggctcgacatggttggcctgtttaaaaaggctatcggtggttatacacatctctttgtagctgttgacaaattttccaagtggattgaagccaaaccggtcatcacaatcacggcagacaaggctagagatttcttcatcaatattgtgcatcggtttggggtacccaggaggatcattactgataacggcactcaattcacctgcggagtatttaaagatttttgtgaggacttcggcatcaaaatttgctatgcctccgtagcgcaccccatgagcaattgacaagtcgaacgtgccaatggtatggtacttcaaggaataaaagcgcgagatttcgaccgactgcaaccctatgccggcaagtgggtagaacagctatcatctgtactttggtccctgcacaccactcccagtcgggctacgggccagtcgccgtttttcctggtctatggagcagaagcaatgctgccaagtgaggtggaatttgaatctttacgatttcataacttcagcgaggagcgctacggagaagaccgagtagatgaccttaaccgactagaagaagcccgtgaagcagccttaatacagtcggctcagtatttgcaagggatgtgccgttatcacaattgcaatgtttgatcacaagcttttttagtcggtgacctggttctgagaaaaattcagactacacgggatcggcacaagttatctcccttgtgggaaggaccgttcataatttccaaagtcactcggccaggttcttaccgactcaagcgagaagacggtactcatatcgacaactcttggaatattgaacatctttgtcgtttttatgct

SEQ ID NO: 79941 - DNA, 320 bp, Oryza sativa
  unsure (1)..(320): unsure at all n locations
  Clone ID: PAT_MRT4530_79614C.1
ctatctatcttaattacctagctactcgatcgatgatcagtctatatatggcggctttgaacggtaaggtggtggtggcggtgatggtggtggcgatggtggtggcggcncctggaaaccccacgaaggaccaccggccgcaggtagggccagtgttcaggactgcacttttaaaagatgaattccaggcacttgatcctcacatgaaaacatcatgggacgtgttcaggtgtcgcaccacgcacgtaccaacataatctgatgctccgattgccgtctgtaaaagatggagtgatagggccatacatatggaaatcata

SEQ ID NO: 79942 - DNA, 334 bp, Oryza sativa
  unsure (1)..(334): unsure at all n locations
  Clone ID: PAT_MRT4530_79615C.1
cgtaccatgccatgctcgnacgaccggcattagccaagttcatggctgtcccgtactccacctacatgatgatgaagatgccaggtccccaaggagtcatatccctgcggagcgatattaagctagccgtcacttgcgacaaggaaagctgcgagatggctcagacccgcgagatcacgctcgcccgagaagaaatccgactagctgcgtccacagcaaccgaaggacaagtgcctgcgaccaagatgacaaagagcgaagaaagcaacgccaagaccaagaaaattcctctagatccttccgatcctactaagactgttgtaataggcgctga

SEQ ID NO: 79943 - DNA, 3249 bp, Oryza sativa
  Clone ID: PAT_MRT4530_79616C.1
atggcacggggctccgctctgctcgacggtagcgtactaccaccttcccgcattgtgagcgagaggcaggctgggctgccgcgccgcttcatgccggaatctgccaccggccgggagatagtgatgctgggcgaggcgcgcccagcaccagattacccggggcggtccatcttcttcctccccttcgcaatggccgggttggttcctcctttttcttctttctttatggatgttctggagttctacgatctccagatggcgcacctcacccccaacgcagtgatgactttggccatcttcgcgcacctgtgcgagatgttcattggggtgcgcccatctcttcggctgttccggtggttcttcaccgtgcagtcggtgtcgccgccgtcggtggtcggtggttgctacttccagccgcgggggccggtgttgaaccgctacatcccctgcgccctccgcaagaagtgggacgattggaagagcgactggttctacaccccccttgccaacgaagcgcgcctccgactcccaagccagcccccggctccggtctccagctggcgggcgccagtagatctgggggatgactatgacgccgtcctcgaccgcctggcgggcctgcgatctcaggggctcacaggggccatggtgtacggcgactacctccgtcgccggattgcgccgcttcagcggcgcgcccggagcgcatgggagtacaccgggtccgaggactacatgaggacccaccggggagtcagatgggattgggctcccgatgacttcaagatcgtggtccaaagggtgctgaatctcagctccgtggaggcgtctcttattcctcaaggactcctccccctctgctgcgatccagaccgcgcctccattctgaccatcatgatgggggtcggggcctcagaggaggtggctcctaagggccacgacggcgccggcgggagccaccaggaagaatcaaccccaggagggggccgtgcttctgggccccgcgtcgggggctcggggagcaaccgccctaccgacgcccgggggaagaggaaactgggaggaacacctcccccatctcctccccgagggggcggggcggtgcgtgccagcagcaggcgcccggagggggccgcgccaacctcgcagcccgagggggagcgcaagaagaagcggctgcgcaagatgggggagacagaaccatcccggggaaacctaatttcccctccaaggtggtcatttaaccgaccccctcgcagtgatgtcccgtcgcgttcctcccgccatcccaagtccggccaatccgaagccgaagatccggcggccgcagaggaacggaggcgagaatctgaccggcgagaggccgcagatcgccttcgggaagctgaagaggccgcccgggaaaccgcccgggctcgccaggctgaggataccgctcgggaagaggccgcccgggcccaccaagccgaggaagccgctcgggaggaggccgcccgggcccgccaagccgaggaagccgctcgggaggaggccgcccgagtccgccaagccgaggaaaccgctcgggaggaggccgcccgagcccgccaaactgaggcgatggcgtctttcgaggcagcccacgacaaagctgctggcgcgtcgcttgggcctactccctcgggcgacgctcaggcgacagcctccgggacggctcgcgacgaggccgcgggcggatcgcctgggcccgctccctcgggcgacgcccaggaccaaacgggtccgggggacatccccaagctcagtgcgtcttctggcgggccgagccgcgtcgcattttctccaaggcggctcttctcctcgtcttctgccgccccgctgagtgccgagccccttctgcaagccttggccgccgcaaacaccgcggtgctagatggattcagcgcccaggtggaggccttgcgggcggaacgagcggagctcgaggccgcatgggcgcgcgtcgaggaggggcggcgctcggtggacaccatggtggaggtgggccgtaaggctcaccgccgccacatctcggagcttgaagcccgcaaggcggcgctggcggagatcgcccgagaggtggaggaggagcgagaggccgccctcatcgccaccaccgcgatgattgaggcgcaggactccctccgccttcaacacgggagctgggaggcggagctaaagaaaaagctcgacgccgcccagggggtccttgacgccgccgctgcccgagagcagcgagcaacggaggctgaagcggcgtcccggcggcgcgaagaggcccttgaagcccgtgccatggcgctggaagatcatgccggcgccgtggagaccagcttggcggaccgcgaggccgccgccgctatccgtgaggcgacgctggcggcgcacgaggccgcctgcgccgaagaggagtccgcgctccggctccgcgaggacgcgcttgctgagcgggagcgagctcttgaggagtccgaggccgcgacacaacggctggcggacagcctgtccctccgcgaggcagcgcaggaggagcaggcgcgccgcaatctggaatgcgtccgcgccgagagagccgcgctggagcagcgggctgctaacctcgaggcgcgagaaaaggagctggacgcgagggagcgcagcggcggggcggctacgggcgaaagcgacttagtcgcccgcctcgcagctgccgaacacaccgtcgcggacatgcagcgcgccctggactcatccaccggggaagccgaggccctccgcttgtcgggtgagatagggcccggcatgctttgggatgcagtctcccggctggatcgcgccggtcgggaagcgggcctctggaaaggccagacaatttcgcgctccaccaatctggaaggccttgccccgcaccttaggaggatggcctgggctgtccaacaactccccgaggagctcgagaagaccatcaagtcatcctcgagggacctcgcccaaggagcggtggaactcgtgttagcgagttaccaggccagggaccccggcttctccccatggatggcgctggaggagttccctcccgggaccgaggacgatgcgcgtgcgcgggtccgggatgccgccaaccacatcgtccaaagcttcgaggggtcggcccctcggctcgcgttcgcccccagctccgacgaggagggcgacgccagcggtaaggacgacggtggcgacgaggccggcgacccgggcgcattggaatga

SEQ ID NO: 79944 - DNA, 3096 bp, Oryza sativa
  Clone ID: PAT_MRT4530_79617C.1
atgccggaatctgccaccggccgggagatagttacgctgggcgagggacgcccagcgccatgctacccggggcggtccgtcttcttcctcccttttgcaatggcagggctggttccgccattttcttctttcttcatggatgttctggagttttacgatctccagatggcgcacctcacccccaacgcggtaatgacattggccatcttcgcgcacctgtgcgaaatgttcatcggggtgcgcccatcccttcggctgttccggtggttcttcaccgtacagtcggtgtcgccgccgtcggtggttggtggctgctacttccaaccgcgggggccggtgttgaaccgctacattccctgcgtcctccgcaagaagtgggatgactggaagagcgactggttctacacccccctcgccgacgaagcgcgcctccgacttccgagccagcccccggggcaggcctccagctggcgggcgccggtagatctgggagatggctatgacgccgtcctcgaccgcctggcgggcctgcgatccctggggctcacaggggccatggtgtacggcgactatcttcgtcgccggatcgcgccactccagcggcgcgcccggggtgcctgggagtacaccgggtccgaggactgtatgaggactcaccagggagtcagatgggactgggctcctgaggacttcaagatagtggtccaacgggtgctgaatctcagctccgtggacgcatccctcattcctcaaggagtcctccccctctgcagcgatccagaccgcgcctccatcctgaccatcatgcaggcggtcggggcgtcggaggagcgggctcctcgaggccacgatggcgcgggcgggagccgcaggggggaacaatctaccccgggagggggtcgtgcttctgggccccgcgacgggggcccggggagcggccgccctgccgacgtccgggggaagaggaagcaggaaggaacccctcccccatctcctccccgagggggcggggcggcgcgtgccagcagcaggcgcccggagggggccacgccgacgtcgcagcccgagggggagcggaagaagaaacgaccccgcaagatgggggggacagaaccatctcggggaaaaccttatttcccctccaagcatcacaccaccccaccgcaccccggcatccactccatctccctcctccaccgccggaaccaccttcccatcgcgaggccgagccactaccgccacacaccgccttcagccggccgctgccgctgcgttagtcgtcgccgcacctcgccgcttgcgccgtcggcaacgccgtgccaagctctaccccggcctccgctccgtttccccattccaccaccgcaaccacccttccaccgtgcatcccgagccacctccaccatacgccgcctccagccgtgtgccaccgtcgccttagccgccgccgcgtcgctccgtcttcacctctcgcctcgcagcgccgtgcagcacctcggtcaccgttgttcatcgccggaaacccaccggaacgtggtacctctcggtcgccggtcttgccggccctcggccgcggctccgccatggtcgggcgtcgtcggaccgccgttcccgtcgcctcccgtgtcggccgccgccatcctttccgccgccggtcgcctccccatggtcgtcccgtcgccggcgctcctcggtgaggacccccttcatctcctttccctttcccctcttttcgtcgcctcccgtgcgtgccgtcgcgccggtggtcgtcgccggcgaccatcgggccgtgcgccgtcgctcccggccggccgaccggtgagctggctcccgctcgcccgtggccgcccgatcctccttcggggcgatctgggccgtccacgtggccttcccgtgccgcccgcgtcggtgcctctgtggcgccacgtcggcgccacctccgctagccgtccgtcgtggccgccacgtgtctgccacgtggtgcgcccgcggaccagcgcatgcgtggactcggtccacggtgcgcccgccacccgtgagtcaccgtcaggtaccgccacacaccgccttcagccggccgctgccgctgcgttagtcgtcgccgcacctcgccgcttgcgccgtcggcaacgccgtgccaagctctaccccggcctccgctccgtttccccattccaccaccgcaaccacccttccaccgtgcatcccgagccacctccaccatacgccgcctccagcccacctcggtcaccgttgttcatcgccggaaacccaccggaacgtggtacctctcggtcgccggtgagccccaccattcctctcctctctggcgtggtattctcgccgctccggtcgcctatttccctccctaaccgctccaataatttccctaggtcttgccggccctcggccgcggctccgccatggtcgggcgtcgtcggaccgccgttcccgtcgcctcccgtgtcggccgccgccatcctttccgccgccggtcgcctccccatggtcgtcccgtcgccggcgctcctcggtgaggacccccttcatctcctttccctttcccctcttttcgtcgcctcccgtgcgtgccgtcgcgccggtggtcgtcgccggcgaccatcgggccgtgcgccgtcgctcccggccggccgaccggtgagctggctcccgctcgcccgtggccgcccgatcctccttcggggcgatctgggccgtccacgtggccttcccgtgccgcccgcgtcggtgcctctgtggcgccacgtcggcgccacctccgctagccgtccgtcgtggccgccacgtgtctgccacgtggccgacaggtgggacccgtggaccccacctgtcatccccaacctccggccagctccaaccgccgcccacgccgcccactccctccgccgatcccgcacctcccctcgtcccaaccggcgtggacccgagaccccttccacctcgcgaccacatcccgccccactccccctctctccccgcgggaatcaacgccacgccgagccgccacacccccacgacgccgccccacttcccctcgaaatccgccgctccccggccctctcctcgcccccttga

SEQ ID NO: 79945 - DNA, 465 bp, Oryza sativa
  Clone ID: PAT_MRT4530_79618C.1
atggagtcgtcgtcggcggcggcggcgtctctcccggagtacgtgcagttcgacggccatcttctccccgtggcgtggctggagggcgaggtgctcgccgagttcttggcgtttcttgatgccgccgccgcggcggcggaggatgcggcggagccgtacgaggtggagttcgaggaggaggaaccgtacgaggtcgagttcgaggaggagccggaggaggtggagttcgccgccgatgacgacgacgacggcggcctcatggaggatggaggacgcggcagcgaagtagacgacgacgacagcgacttgttcaaggcgtacgaggaggaggcggagcaggagatggcgctgctgctgccgcacatcatggccatcccggcggtcatggcgcgcgcggcggcgccggcgacggagcaagaaaccaagcgccaccagtttgtttctgaccagcgcggatggatgtaa

SEQ ID NO: 79946 - DNA, 3222 bp, Oryza sativa
  Clone ID: PAT_MRT4530_79619C.1
atggcacggggctccgctccgcttgacggtagcgtgctgccgccttcccgcatcgtgagcgagagacaggccgggctgccgcgccgcttcatgccggaatctgccaccggccgggagatagtctcgctgggcgagggatgcccggcaccacgctacccggggcggtccgtcttcttcctcccttttgctatggcagggctggttccgccattttcttctttctacatggatgttctggagttttacgatctccagatggcgcacctcacccccaacgcggtaatgacattggccatcttcgcgcacctgtgcgagatgttcatcgggggtgcgcccatcccttcggctgttccgccgcgggggccggtgctgaaccgctacattccctgcgtcctccgcaagaagtgggatgactggaagagcgactggttctacacccccctcgccgacgaagcgcgcctccgacttccgagccagcctccagtgcaggcctccaactggcgggcgccggtagatctgggagatggctacaacgccgtcctcgaccgcctggcgggcctgcgatcccaggggctcacaggggccatggtgttcggcgactatcttcgtcgccggatcgcgccactccagcggcgcgcccggggcgcctgggagtacaccgggtccgaggactgtatgaggacccaccagggggtcagatgggactgggctcctgaggacttcaagatagtggtccaacgggtgctgaatctcagctccgtggaggcatccctcattcctcaaggagtcctccccctctgcagcgatccagaccgcgcctccatcctgaccatcatgcaggcggtcggggcgtcggaggagcgggctcctcgaggccacaatggcgcgggcgggagccgcaggggggaacgatctaccccgggagggggtcgtgcttctgggccccgcgacgggggcccggggagcggccgccctgccgatgcccgggggaagaggaagcaggaaggaacccctcccccatctcctcaccgggcggcgcgtgccagcagcaggcgcccggagggggccacgccgacgtcgcagcccgagggggagcggaagaagaaacggctccgcaagatggggggacagaaccatcccggggaaacctcatttcccctccaaggtggtcgtttaaccgaccccctcgcaggttcgtcccactcccatcgtggccgtattcattctctcaacgcgagttttcactcatccatcttgtttgtcttctggtctttcttctgtttcagcgagatcccgtcgcgtccttcttgccaacccaagtccggccaatctgaggctgaaaatgcggcgaccacggaggctcggaggcgggaatctgaccggcgagaagccgcggatcgcctacgggaagccgaggaggccgcccggggggccgcccgggctcgccaggctgaggaagccgctcgggaggaggccagactccgccaggccgaggcgacgacatcctccgaggcaacccgcgaaactgatcggcaaggagccgcggatcgccttcgggaagccgaggaagctgcccaggtggccgtccgagctcgccaagctgaagaagccgctcgggaggaggccagacttcgccaggccgaggcggcgacgacttccgaggcagctcacgacgaggccgcgggcgcatcgcttgggcccactccctcgggcgacgctcaggacaaaccaagtccgggggacatccccgagtccggcacgtccatcggcgggccaagccgcgcggcatcctcttcgaggcggctcttccccacgccttccgttgctccactgagcgcagaaccccttctgcaggccttggccgtcgcaaacaccacggtgttggacgggttaagtgcccaagtggaggccctgcaagcagagcgggcggagcttgacgccgcatgggcgcgtgtcgaagaggggcgacgctcggtggaggccatggtggaggtgggccgcaaggcacaccgccggcacatctcagagctcgaagcccgttggaaggtgctgggggagatcgccaaggaggtggaggaggagcggggggctgccctcatcgccaccaccgtgatgaacgaggtgcaggacaccctccgccttcaatacgggagcagggaggcggagctagggaaaaagctcgacgccgcccggggggtccttgacgctgccgctgcccgagaacggcgggcggcggagaccgaggtggcatcccggcggcgcgaagaagcccttgaggcccgtgccatggcgctggaagagcgtgcctgcgccgtggagagggacctggcggatcgcgaggccgtcgttgctattcgggaggtcacactggcggtgcacgaagccgcctgtgccgaagaagagtccgcgctccgcctccgcgaggacacgctcaccgagcgggagcgagctctcgaggaggccgaggccgcggcgcaacggctggcggacagcttgtccctccgcgaggctgcgcaagaggaacaagcgcgtcgcaatctggaaagtgcccgcgccgagagggccacgctgaaccagcgggccgctgagctcgaggcgcgggagaaggagctggacgcgagggcgcgcagcggcggggcggccgcgggcgaaagcgacttaaccgcccacctcacagctgccgaacacaccatcgccgatctgcagggcgcgctagactcgtccgccggggaggtcgaggccctccgcttggcaggcgaggtagggcccggcatgcttcgggacgccgtctcccgtctagaccgcgccagccggcaggcgggcctctggggcgggcggactgcgaagtatgccgccaatctggggggcctcgcccagcgcctctcggagatagccgggactctccaacggctccccgaggagctcgagaggacgattaagtcatcctcgagggacctcgcccgaggagcggtggagctcgtactggcgagttaccaagccagggatcccgacttcttcccatggacggcgctggacgagttccctcccgggaccgaggacggtgcgcgcgcgcaggtccgggacgccgccgaccatatcgtccacagcttcgaaggttcggcccctcggctcgcgttcgccctcaactccgacgagaaggacgatgacggcggagtgggcgacagtggcgacgaggctggcgacccgggtgcaatggagtga

SEQ ID NO: 79947 - DNA, 807 bp, Oryza sativa
  Clone ID: PAT_MRT4530_7961C.1
taccgaatctgccatcctctcatctctgtcattctgcagctagctgaaaaaatcttcagagaatcatcagttcatcacaaaagactatcaagcgaggcaagtacgtgacggtgactgtgatgagcggcggcggcggcggcgggagggggatgacgagggggctggacctgaagctgaacctgtcgctgccggcggtggcgcgcgcggtgtcgccggcggcggacgacgagtcgtcgccgagctcgtgcctgtcgtcggagagcgagctgcggcagcagcacggcggcggcggcgggcagctgcagtggtcggacagcccggaggcgacgtcgatggtgctcgccgcgtgcccgcgctgcttcctctacgtcatgctcgccgaggccgacccgcgctgccccaagtgccggagccccgtcatcctcgacttcctccacgccggcggcggcggcggcatcaacgccgacggccgccgccaccggaggggatgaacatggccatgaccatgatggcagcaagagatcgaggagaagcatctacacgcttctttgatcgcgcagaggcatcaggaattcaggatcaagaagaacaacgagaagaagaaatctcaccttgatgatgatcacagttaattagttctaggccccattagtttcttctcaattagcagcagtagtatcatgattaatcagctcgatcctctgcagattatgcagtataaccatgatttataagcatcaatctatatattatcacacgtagtaaaaaaaattcgatcgatcccagcaaaaaaaaaaaaaaaaaaaa

SEQ ID NO: 79948 - DNA, 551 bp, Oryza sativa
  Clone ID: PAT_MRT4530_79620C.1
gtgggaaaccaactgcactatatttacaatcacaatcgactaacccaattttgactgttaacaatacacggcacattgctctggcattacatcgttattaagtacatcagatctcgataaccatgacccggacagggatctacttgcctatggttgacgcacggctaatattacagaccacacgtaataaagaccggttatctatttgcaaattatcttgactagatagatgatgctacaaaaggatgcgatctcagcagtctaatacttacgctggttcatgtataattccctatcggggaaaaggagtgaggcgacaagggaccaaatgcactgacctggcgttgcccactgagtagcaatcctgacccatacggatggccatccatcgacaacaagctatgcactctcaccaactgaggttgaccacccagtcaacagcatagcggtggacatgcttgccaaggagaagatgaggtggaagaacgagttggattatggcactgcccttgacacatgcttcttttccgcttgctgatgtggcttactga

SEQ ID NO: 79949 - DNA, 483 bp, Oryza sativa
  Clone ID: PAT_MRT4530_79621C.1
ttggtttcgaaagtctgtaagtagtgaataacaaacataatccgttcaaaggcgacaaggtcacacgcaaaccatcaacgcctaaacgtaggacacagaaggcgagaacgacacaagtcagtcataggggcgcacataatggtaagacgccatcacgcattcggcagcagaggttaagcctcgtattctgcacatagcgggcggcggcgcgcgcgggctttagaagaggaaacttcgcagagccgctgtaaacggactccgattcctacgaagtccggcacaaaaggatacagtaaatgtgttcgtgtaattgtagacgactgaacgaagaacgaggcaggaggcacatggtctgctgcggcgatggcaccaacctacagcgagatgcgcaacggtggcgtctgatcggtgtaaaggtcatagttcggctccacctcataccgctttcgcagtatgcggtatccaaacatcgcgaccagcacg

SEQ ID NO: 79950 - DNA, 3948 bp, Oryza sativa
  Clone ID: PAT_MRT4530_79622C.1
atgggttccgtctccggcatcgacgacttcgtcttccctcccgggcaggcgtttcggttcggcaacctcgacttcatcaccaacgtcttcggcaagatctctctccttgactcagattcgaaccagtcagggagagaccaggtctcagccccgttcggtattccgaactcggccaagatctaccccaagcttatcttgatcgagtcggcttcaaaccactcggacgagatcccatctactccaacaacaccagatcgagatgatggggcctacccgccaatcctgatgaaactccccgacgatttggctgccgtcttcactacaagggcgtctcctcccccgttttcatggccgacaacgagacggaagaacaacgccaagcccgagaaacggaagcacgacgcgtacaacaggaggctgagcgacgccgactggaagaggagcgccaagcacaagagcaagaacggctgcagcgtgagcaacaagaacgcgaatgggctgcaaaggaggccgaggaccgacgacaacgagccttggacgcagggcgatgagcgcgagatctcatcgggcagcaagacgttgaggggacagcggtcttccgtacccctcaacagaacgttgtcgcagaaaatcaccctcctcgacaccctcctcaaggaagacgcactcaatcaagctgatcaagtcgtcaacatcttgaaccagaccaagaccatgattgccacttcggtcccggttaactccggaagcgtccgcatgtcgactggcagccgggttccccatctccgatctcatgattatcaccagccaagcctcagcatcgccggcgcaggatccaatcgcaggagcaggggccacgacgagcgatctgttcactcgcctcctgagcgacacaacaggaggagacagcaaggccgtggcaacctacttacctgtggccctagcggattctgcccggtcctggcttcatgggttaccacgtggcacgatcggatcatgggcggaacttcgcgaccacttcatcgccaacttccagggcaccttcgccccggcacacagtttgatctctacaacgtcattcagaagtctggagaatcccttcgagattacatccgacacttctctgaacaacgtaacaagatctctgacattaccgacgacgtcatcatcgccgctttcaccaaggggattcgtcacgaagatctagtcggcaagttcggacgcaagcctcccaagacggtcaaacagatgtttgaaaaagccaacgagtatgccaaagccgaagactccattatcgcatccaagcagtcgggtcctacttggaagccaaagaaagatgtgccgactacgggaggggttggaagtaacaatcacaaggaccgcaagcacccagtggttcgcaacatcaagcttcgcagatccctcatcgatggcggcagcgcactcaatatcctcttcgccaagaccttggacgacatgcagatccctcgcaccgagttgaagccgagtaatgcgcccttccacggagtcatcctagggttatctgccacaccactcggccggattactcttccggttacctttggtactcgggagaacttccgcacagagaacgtctgcttcgaagttgctgatttcgagacagcgtatcacgccatactcggacgcccggcgttagctaaatttatggctgtcccgcactacacctacatgatgatgcagatgcctggtcctcgaggagtcatatccctgcggagcgacatcaaacaagccgtcacatgcgataaggaaagcggcgagatggcccaaacccgcgagatcgcggtcgcccgagaagacatccgactggccgcaaccacggcaagcgaaggagaagtggctacgaccaagatctccaagactggagaaagcgaagccaagaccaagaaaattcccctagatccttctgatcctactaaaactgctgtaataggcgccgagttagattatatctttgcgtggaaaccatccgatatgcctggtaatcctagagaggtgattgagcactctttgcatgttaaggaagacgctaaacccatcaaacaacgacttcgccgctttgcacaagacaggaaggacacgatcaaggaggaattgaccaagctattagcagcgggcttcatcaaagatgtccttcatcccgattggctggctaacccagtcctagttcggaagaagactgggcaatggcgcatgtgtgtcgattacaccgacctcaacaagtcttgccccaaatatcctttcgggttgcctcgcatggaccagatccgattgaaggaatccgactgcttgaagacttcgttcatcacgccctttggggcctactgctacatcaccatgcctttcggattaaagaacgcaggagcaacttatcaacgcatgatccagagacgtttctcaactcaaatcggtcgcaatgttgaagcctatgtggatgatgtagtcgtcaagactaagcagaaggatgatttgatcacggacctggaagaaacctttgcgagcatccgcgctttcaggatgaaactaaaccctaaaaaatgcaccttcagagtaccgtcagggaagctgcttggatttatggtgtctcatagaggcatacaggccaacctggagaaagtcaacgccatcctcaacatgaaaccgccgagttcccagaaagatgttcaaaagctgactggatgcatggcggcgctcagccggtttgtttcacgactcggcgagcgggggatgcccttcttcaagctgttaaagaaaacagacaatttccagtggggacccgaagcacagaaagcctttgaagacttcaagaaacttctcactactccaccagttctggcctcaccacacccacaagagccgctattactgtacgtatcggcaacttctcaagtcgtgagcacagttctggttatcgagcgtgaagaagaaggccatgttcagaaagtccagcgaccaatctactttgtcagcgaggttttggccgactccaagacgagatatcctcaagttcagaagctgttatatggtgttctaattaccgtcaggaaattatctcactacttccaagctgacttcgtcgccgagtggaccgagtgccaagaggacacgctcgaggagaagatggagtattggactatgcactttgacgggtcaaagagactttcgggcactggggccggggttgttttaatttccccgactggagaaagactgagctacgtgctatggatacatttctctacatctcacaacgtggcagaatacgaggcgctccttcacggactatggatcgcaatctctttgggaatcaggcgtttgatagttcgcggagattcacagttagttgttaatcaagttatgaaagagtggtcctgccttgacgacaatatgatcgcttatcgacaagaggtacgcaagttggaggataagttcgatggactcaaactcacccacgttcttcggcacaataatgaagcagccgacagactagcaaattttggatccaaacgcgaagcggctccttctgacgtgttcgtcgaacatctttacgaaccaaccgtaccaaggagagaaacagctgaggccacggacactcaagacatagccatggttgaagccgactggagagagcccctcatacaatttctgaccaaccaagaactcccccaagataaagatgaagccgagcggatttccaggcgcagcaggctttatattattcatgagactgagctgtacaagaaaagtccatcaggaatcgtgcaacgctgtgtgtctttggaggaaaggagacaatttgctgaaggatatacattctggtatctgtggcaattacgctgctgcacgcaccattgtcggcaaggcttactggcaaggttttttctggcctactgttgtgtccgatgctga

SEQ ID NO: 79951 - DNA, 752 bp, Oryza sativa
  Clone ID: PAT_MRT4530_79623C.1
ctaggggcatgtcttgctgaggcgtctacaaagccatcgatgtatggtgatgatgctgtcagatacacgatggatcacacaaagctctctcagctgcttctcttcacgggcagtagataagaagcagccacccctgctccgtgcctttgcatacacatggtcatctcccatttcaccagctgctgcgctgccgcttctcggcctctgtgcgtttctctgcgccgttatgctcgtcgtgtcgctggctcctcctctgggggaagaagaagaagaagcaaaggtgaggtcgtcgtcgttgccagcggcggcgacgtcggtcccggccggtggacggcgccttctgctgccggcggcgaggacgaggaggttccggccacggaggtggaactcggccggcatcgacgacagcaagcatgaggttccgagtggcccgaatccagattccaatagatgatgatagatagatccatgtcgtgtcctgttcttcagtgctgcttctctcagcttgcagtttaggtgtattgttccctgatctctcttctattttagtatggtttttcttttcggctttgctttcgttcaggtaggatttgataaaaatccttggtaagataatgtacaaacagatgggcatttactctagattactactctctgctcatgttccattgcatcgcgtgacttgttcgcccctcctgccaaatgagcatattataaatttataattacagatggtaaaaaaaaaaaaaaaa

SEQ ID NO: 79952 - DNA, 1090 bp, Oryza sativa
  unsure (1)..(1090): unsure at all n locations
  Clone ID: PAT_MRT4530_79624C.1
gcnngcttcggcacgaggggaatcctaagtaagtgaaagcttagctagcttcgcataaatccagctctctcttgctaatggcgggcgtcgaggtctccaagccgtcgaggcgcctgtcgccgaaggggagcttcaagctgagcctgcccagcctgctggcgtgcgggcagtgcaaggccacggccgtctcgccgccggagtcccccacgggcgtcggcgcgaggtcgttctcctcgtcggcgtcgtcgtcggcggggacgtcccgggggagggagcgcgaccgcctggcggagctccgggagatcttcggccacttcgaccgcgacatggacgggcggatctccggcgacgagctccgcgagttcttcgcgtccatgggcgacgactccggcgccgccgccgccgccgccgcggcgatggggctcgacggcgcggcgggcggcggcgagagcggcggcggcggtggcgggctgatgctggcgttcgaggacttcgtgcggatcgtggagcggaagggcggggaggaggaggagcgggaggacctgcggcgcgcgttcggggcgttcgaggcggtgaaggggtccgggaggatcacgccgcgcgggctgcagcgcgtgctcagccagctcggcgacgaggcgtccgtcgccgagtgcgaggccatgataagcgcctacgacgacgacggcgacggcgagctcgacttccacgacttccaccgcatgatgagccaagactaagctatagctccgccgtgcgtgcgtgttccgcgcgcgccgtccgtcgccgcgtcgtcacgaggaaatttgcctccgcgggttcgatcgtgtctgttcgtgtgtgtgctgttgtgtacgtgttcgtgcgggttgtgggaggccggctgtgactatgtgagatggagtgtgtgttttggtcgcgtgatcgtatcgatgtgcgtgcgtgcgtgcgtgcgtgcacgccgcgcgcggcgcggcgtcgtacggttgtctgcttcgatcggtcgatctatgtatatggtgcacgaacgcgggacgccttagcaatttagctgtgctttgtttaacacgaagccagcatgagtactagt

SEQ ID NO: 79953 - DNA, 4362 bp, Oryza sativa
  Clone ID: PAT_MRT4530_79625C.1
atggcggagagagagggcgacgtcgcgagctcgaatcaggcgaggagaaagggtggcaagaggcggaaacggacggaggagcacgggaggatgtattttagagtcgttttgggacgtgacaccggtcatggcttcacgggctaccccgcggcacgatcggatcatgggcagagctacgcgaccacttcatcgtcaacttccaaggcacttttgaacggcctgaagtctagagaatcccttcaagattacattcgacacttctctaagcaacgcaacaaaatctccgacatcaccgacgacgtcatcattgccgcctttactaaaggcattcgcgacgaggacctagtcggcaagttcggacacaaacctcccaagacggtcaagcagatgtttgaaaaagccaatgagtatgccaaagccgaagatgctattacggcgtccaagcagtcgggcaccacttggaagccaaaaaaggatacgcggaccgcaggagggagtggaagtaacaaccataaggatcgcaagcgtaagcccgaagaacttgtggcaacaacctctccatcttcccgacaacgttcccgcatcaacaccttcgacaagataatgaactcccaatgtccgcatcatcccaactccaaccacgcagccaaagattgcttcgtctacaaacagtttgcggagcaatacgtcaagaacgcacgtaagccctcaaacggagatcaaggcacatcaaagaagaaagatgatgaagacgatgccccgactggttttcaagatcatcgcaaagaactcaatcacatcttcggcggacccctggcttatgaatctaagagaaagcagaagctaacagaacgagagatcaatgcggttcagcctaacacgccccaataccttcggtggttagagatagcaattaagttcgaccgctcggatcatcccgaccgagtggtccacccggggcggtaccccctggtactagacccagtggttcgcaatgtcaagctccgaagaactctcatcgatggtggcagtgcactcaacatccttttcgctaagaccctggtcgatatgcagattcctcgcacggaattaaagccgagtaattcacccttccacggtgttattccaggattatcagctacaccactcggccagatcactcttccggttactttcggcactcgggagaattttcgcacagaaaacatttgtttcaaagttgctgatttcgagacagcgtaccatactatactcggacgaccggctctagccaaattcatggccgtcccacactacacctacatgatgatgaagatgcctggtcctcgaggagtcatatcactacggagcgacatcaagcaagccatcacatgtgacaaagaaagttgcgagatggcccaaacccgcgagatcactctcgctcgcgaagagatccgactggctgcgaccacggcaagcgaaggagaagtgcctgtgaccaagctgtcaaagaccaaagaaggcaacgacaaaactaagaagattccattagatccctccgatcctaccaaaactgctaataataaagatatttttgcgtggaaaccatccgatatgcctggtattcccagagaggtgattgagcactctttacatgtcaaggaagatgccaaacccatcaaagaacgactccgccgttttgcacaagataggaaggatgcgatcaaagaggaattaacaaagctgttagcagcagacttcatcaaagaagtcctccatcccgactggctggctaacccagtcctagttcggaagaagaccgggcaatggcgcatgtgtgtcgattacaccgacctcaacaagtcttgccctaaagatcctttcgggttacctcgcattgaccagatcagactaaaagaatccgactgcttgaagacctcgtttattacgccctttggggcctactgctacatcaccatgccctttggattgaagaacgcaggagcaacctatcaacgcatgattcaaagatgtttttcgactcagatcggccgcaatgttgaagcttatgttgatgatgtagtcgtcaagaccaagcagaaggatgacctgattgcggatttagaagaaacttttgcaagcattcgtgctttcaggatgaagctaaaccctgaaaagtgcatcttcggagtaccgtcagggaagctgctcagatttatggtatctcaaagaggcatacaggccaacccggagaaaatcaacgccatcctcaacatgaaaccgctgagctcccagaaagatgtccaaaagctaactggttgcatggcggcgctcagctggttcgtttcgcgactcggcgaacgagggatgccttttttcaagttgttgaagaaaactgacaatttccagtggggacccgaagcacaaaaagcctttgaagacttcaagaaacttctcactactccaccagttttggcctcaccacattcgcaagagccgctactattatatgtgtcggggacctcccaggttgtgagcacggtcctggttgtcgagcgtgaagaggaaggccatattcgaaaagttcaacgaccaatttatttcgttagcgaggttttggctgactccaagacaagatatcctcagtcacaagctttagctgatttcctcgccgagtggaccgagtgccaagaatacacgccaaaggaaaagatggaatattggactattcattttgatgggtcaaagaggcttacgggcgctgaagctagggttgtcttaatttccccgactggagaaagattgagctacgtattgcagatacatttttctgcatcccataacgtggcggaatacgaggcgctgctccatggattaaggattgccatctctttaggcattcgccaactaatcgttcgtggagattctcagttggttgttaatcaagtcatgaaagaatggtcctgtctagatgataatatgaccgcttatcgacaagaggtacgcaagttggaagataaattcgatggacttgagctcacccatgtccttcgacacaataatgaggcagcagacagattggccaattttggttcaaaacgggaagcagctccctctgatgtgttcgttgagtatctttataaaccaaccgtgcccagaaaagaaacaattgaagccatggatactcaaggcgtaggcatgatcgaagccgactggagagaacctttcataagatttttgaccaaacaagaactccctcgagaaaaaaatgaagccgagcagatttccaggcgcagcagactctatgtcatccacgagaccgaattgtacaaaaaaagtccattaggaatcctgcaacgctgtgtatctttggaagagggaagacaattgttaaaagatattcattcaggcatttgtgctgtttccgacgccgacaaaattgtgcgaacatgcgagggttgtcaattctttgcccaacaaactcacttaccagctcaggagttgcaaaccatcccgttgtcttggccattcgcggtttgggggcttgatatggtcggtccattcaaaaaggcagtcgggggttatactcatctctttgtagctgtggataagttttccaagtggattgaagccaaaccgatcgtcacaatcactccaggcaaagctagagatttcttcatcaatattgtacatcggtttggggtaccgaatcgtatcattactgataacggcactcaatttaccggcggagtatttaaagatttttgtgaagactttggcattaaaatttgttatgcctctgtggcacaccccatgagtaacggacaagttgagcgcgccaatggcatggtacttcaagggatcaaagcacgagttttcgaccgactgcgcccctatgctggcaagtgggtagaacagctgccgtctgtactttggtctctacgcaccactcccagtcgggctactggccagtcgccgttcttcttggtttatggcgcggaagcaatgctgccaagtgaggtagagtttgaatccctccgatttcgtaacttccgggaggagcgctatgaagaagatcgagtggatgatatcaaccgactggaagaagcccgtgaagcagccctaatccagtcggctcggtatttacaagggttgcgccgttatcataatcggaatgttcgatcgcgagcctttttagtcggcgacctggttctgaggagaattcaaactacacaggatcggcataagttatctcccttgtgggaaggaccgttcataatcgctaaagtcactcggccaggttcttaccgactcaagcatgaagatggtactcttgtcaacaattcttggaatattaaacaccttcatcgattttatgcttag

SEQ ID NO: 79954 - DNA, 3516 bp, Oryza sativa
  Clone ID: PAT_MRT4530_79626C.1
atggcggacggcggcggctacgacctcctcaccgcgctccccgacgacgtcctccgcctcctcctcgcccgcctcccctccaccgccgaggccgcgcggaccagcgtcctctcccgccgctggcgcagcctctggaccaacctcccgcagctgcggttcgcggacgtcaccgacctcgcccgcgtcgccgccgtcctccgccaccactccgccccggtcctcctcctgcgcatcgagagcagcgaccccgccccggagaagatcgccgccgtcctcgacctggtcgcgccccgcctccaaggcaagctccacttcgacatcatcacgccggggaaccaaaattcggcggcgggggcggcggggatcggggccgcgattcggatcccgtgcttcgagaaggccacggaggtcaccatccgcttactacgcggcatcggcatccggctgccaccaccatccggcgtcttcgcgaggctcaccgcgctgagcttgagccactgcaggttggacgaccagagccagcgcgatctcggaggcgccgtctcgtcggaggggtgcccgtcgctacgagagctccgtatccgcgatgccgatgtggtgtccaatctagccatccgctcggagtctctccgccttgttcagctgtctcgactggaagggattcgtcagctcaccatttctgctcctgcgcttacagaactagatttgtacgcttgcttattgtgggggatgccaatggttgacatctttgctccagcgctggggacacttcgttgggttgattttttccgttcgagttcagtccgattcagagcaatgccaaacgtccatacacttgctgtctttgtcatggtgtatggatacgtttcacactctctgccactcctgcagtattttacggaagcccgcgatgttcgtctctctctcgtctacagctctatcagcagtaacgataagctcttggtggaagcagtgaaagatgagctccctgccattgaaatcctatttctgcggatgtctcccagtacaagggagctgaagctgcagttagaagatcacactgagggtagaaaagttccttgctcatctggctgcatttgttacaagccccgtgactgggaaaccatgaatttgagcttggtgtttctccagaaagttgaaatcaacaacttgagtggagcagagtgtcaaatatattttgtcaaacgactgttgagatggacgccagtgctcaagacgattactctaagttttgatccttcagtaacagttagcgaggagctgtctaaggagctacttagcttctctaccccagagatttgcatggaaatttacttgcaccgcgatggagctagggagtatatgatttgttcaatttgctccaggcacccagatgcgtttgcatttgttatcagatactccatccgttttacaatgtggatgtttgagatggctgtttgtagaaatgtctctttccagcgatttggaaatatgactatcaaaaatagatggagggagtattttgttactgtcctaccacatttcattgtaacagcaaactcagctcacagaaatcccatttccaaaaccctcgtcgacgtcgcctcggggagcgccaacgccgacgccgtcgccgcggccgcgccaagagccaccgccccaactccggcgaagatggatgcgaaggtggacgagatgagcaaggcgtaccaggagctcgtcgcggcagcgcaggccatcctggaggcgcggcggcagccgggcggagagaacacggcggccatggacgcagcgcgcgaggcgttcgagcagcgccggaagctcttcgccgtcgcctgcgacgacgccgacgcgctcgtccagtcggctcgccagagtatcgtctccgaccccgggcgcttcgtcgacgtggtgaccacccccgacgaggattcggtgcgctctccgacgaggtcctccgcggaatcctcctcgtcgagcggattcggtgcgctccccgacgaggtgctccgccacatcctcctccgcctcccctccgccgccgccgccgcgcggaccagcctcatctcccgccgctggcgaaacctctggtccaccctcctcccgaagctgcggttccccggcgtcactgacctcgcccgcgtcggcgccgccctccgcctccgcgtcgccccggtccgcctcctgcgcatcgagagcagcgaccgcgccccggataagatcgtcgccgtcctccacttggccgcgcccctcctcgagggcaagctctgcttcgacgtcatcacgccggcggcagcggcagcgggggcggccgggaccgggggcgcgattcagatcccgtgcttcgagaaggccacggagatcaccatccgcttgcgcggccgcctcggcatccagctgccaccatccggcgtcttcgcgaggctcaccgcgctgagcttgagccactgcaggttcgacgaccagggccagcgcgatctcggggacgccgtctcgtcggaggggtgcccgtcgctacgagagctccgtatccgcgatgccgatgtggtgtccaatctagccatccgctcggagtctctccgccttgttcagctgtctcgactggaagggattcgtcagctcaccatttctgctcctgcgcttacagaactagatttgtacgcttgcttattgtgggggatgccaatggttgacatctttgctccagcactggagacacttcattgggttgattttttcagttcgagttcagtccgatttgttgagaagcccaacgtccatagactctccgtctatggcatggtgtatggacgtcgaaatactccaggctctctgcaactcgtgcagcattttacagaagcccgcgatgttcatctatctcttgtctatccctctgggagatccaaagagtccctatggcatgtagatttggacatcatggatatgtcctgtgagctcctggtgcaagcagtgaaaaagctccctgccgttgaaatcctatctctgcggttattaacaataggacatacctttggaccttgtgtttaccatttgcttaagatgtctactggtataagggagctgaagctgaagttagaagatcacattgcggatggagaagttccttgctcatctggctgcgtttgttacgagccccaggcctggaaaaagaataatatcagcttgaattttctccagaaagttgaaatcaacaatttgagtggagcagagcgtcaaatatattttgtcaaacgactgttgagatggacgatgccagagctcaagacgattactctaagttttgatcctttggttactgtcagcgagaaggtgtctaggaagctacttagcttctctaccccagggatttgcatggaaatttacttgcaccgcaatggaactaggcctggtgacccgccttcaattctcctatacgctgaatttattgttaacttgttacagagttccttcttggttgtcccatgctttttatacaacctttgttccaaaatatag

SEQ ID NO: 79955 - DNA, 3105 bp, Oryza sativa
  Clone ID: PAT_MRT4530_79627C.1
atggcacggggctccgctccgcttgacggtagcgtgctgccgccttcccgcatcgtgagcgagagacaggccgggctgctgcgccgcttcatgccggaatctgcgaccggccgggagatagtctcgctgggcgaaggatgcccggcgccacgctacccggggcggtccgtcttcttcctcccttttgctatggcagggctggttccgccattttcttctttcttcatggatgttctggagttttacgatctccagatggcgcacctcacccccaacgcggtaatgacattggccatcttcgcgcacttgtgcgagatgttcatcggggtgcgcccatcccttcggctgttccggtggttcttcaccgtacagccggtttcgccgccgtcggtggttggtggttgctacttccagccgcgggggccggtgctgaaccgctacattccctgcgtcctccgcaagaagtgggatgactggaagagcgactgccagcctccagcgcaggcctccaactggcgggcgccggtagatctgggagatggctacgacgccgtcctcgaccgcctggcgggcctgcgatctcaggggctcacaggggccatggtattcggcgactatcttcgtcgccggatcgcgccactccagcggcgcgcccggggcgcctgggagtacaccgggtccgaggactgtatgaggacccaccagggggtccgatgggactgggctcctgaggacttcaagatagtggtccaacgggtgctgaatctcagctccgtggaggcatccctcattcctcaaggagtcctccccctctgcagtgatccagaccgtgcctccatcttgaccatcatgcaggcggtcggggcgtcggaggagcgggctcctcgaggccacgatggcgtgggcgggagccgcaggggggaacgatctatcccgggagggggtcgtgcttctgggcctcgcgacgggggcccggggagcggccaccctgccgacgcccgggggaagaggaagcaggaaggaacccctccctcatctcctccccgagggggcggggcggcgcgtgccagcagcaggcgcccggagggggccacgccgacgtcgcagcccgagggagagcggaagaagaaacggccccgcaagatgggggggatagaaccatcccggggaaaccttatttcccctccaaggtggtcgtttaaccgaccccctcgcagcgagatcccgtcgcgtccctcccgccattccaagtccggccagtctgaggccgaggacccggcgaccacagaggcccggaggcgggaatctgaccggcgagaagccgcagaccgccttcgggaagccgaggaggccgctcgggaggccgccctggctcgccagaccgaggaagccgttcgggaggaggccggactccgccaggccgaagcgacgacatcctccgaggcgacccgtgaaactgaccggcaagaggccgcggatcgccttcgagaagccgaggaagctgttcaggtggccgtccaagctcgccaagctgaagaaaccgctcgggaagaggccagacttcgtcaggccgaggcggcgacgacttccgaggcagcttgcgacgaggccgcgggcgcatcgcttgggcccaatccctcgggcgacgctcaggacaagctaggtccgggggatatcccagagtccggcacgtccatcggcgggccgagccgcgcggcatcctcaccgagacggctcttccccacgccttctgttgctccactgagcgcagaaccccttctgcaggccttggccgtcgcaaacacgacggtgttggacgggttaagtgcccaggtggaggccctgcaagcagagcgggcagagctcgacgccgcatgggtgcgtgtcgaagaggggcgacgctcggtggaggccatggtggaagtgggccgcaaggcacaccgtcggcacgtctcagagctcgaagcccgtcggaaggtgctggaggagatcgccaaggaggtggaggaggagcggggggctgccctcatcgccaccactgtgatgaacgaggcgcaggactccctccgccttcaatacgggagctgggaggcggagctagagaaaaaactcgatgccgcccagggggtccttgacgctgccgctgcccgagaacggcgggcggcggagaccgaggtggcatcccggcggcgcgacgaagcccttgaggcccgtgccatggcgctggaagagcgtgcctgcgccgtggaggggaacctggcggatcgcgaggccgccgttgctattcgggaggtcacactagcggtgcacgaagccgcctgtgccgaagaagagtccgcactccgcctccgcgaggacgcgctcaccgagcgggacctgtccctccgcgaggcttcgcaacaggaacaggcgcgccgtaatctggaagacgcctgcgccgagagggccgcgctgaaccagcgggccgctgagctcgaggcgcgggagaaggagctggacgcgagggcacagattggcggggcggccgcgggcgaaagcgacttaaccgctcgcctcgcagctgccgaacacaccatcgccgatctgcagggcgcgctagactcgtccgccggggaggtcgaggccctccgcttggcaggcgaggtagggcccggcatgcttcgggacgccgtctcccgtctagaccgcgccggccggcaggtgggcctctggggcgggcggactgcgaagtacgccgccaaccaagggggcctcgcccagcgcctctcggagatagccgggactctccaacggctccccgaggagctcgagaggacgattaagtcatcctcgagggacctcacccgaggagcggtggagctcgtactggcgagttaccaagccagggatcccgacttctccccatggacggcgctggacgagttccctcccgaaaccgaggacggcgcacgcgcgcaagtccgggacgccgccgaccatatcgtccacagcttcgagggttcggcccctcggctcgcgttcgccctcaactccgacggggaggatgatgacggcggagtgggcaatagtggcgacgaggccggcgatccgggtgcgtcggagtga

SEQ ID NO: 79956 - DNA, 141 bp, Oryza sativa
  Clone ID: PAT_MRT4530_79628C.1
atgtcctacatggtgaccaagtacgaggaccattgtatgatcttgaagcttaatgccaagcacatctttggtggcccaaactcagagacgtacttcaccttcacccagtatagtcaaggagaggaagaactgccggtgtag

SEQ ID NO: 79957 - DNA, 138 bp, Oryza sativa
  Clone ID: PAT_MRT4530_79629C.1
gaattcggcacgaggtcacgcattcacactacatagcatataagatagcacttgtagagaggagatcacgtagagaagagtgagagtgagattgatcggtgagggagtgatgatggggtcttggtcggagaggagggg

SEQ ID NO: 79958 - DNA, 585 bp, Oryza sativa
  Clone ID: PAT_MRT4530_7962C.1
atggcgacgacggtgaccgcgacggtgacgacgacgatgatagcgaccgcgaggagggcggcggtgtcagctttaggtgggttcataacaaattggtatcacaacctcttctttgctaaacaaattctctgccaaaaccaccccatgttcaccatgattagccgtggggagaagataaccaaattgttggagaaagtccatgcggtgaagaacaacaatcatggaggatattaccacccgaccacggccatcttcaaggacaaggatcacgttacctacattgtcaccaagcaccttcccaaagtcataccttggaagtgttcgatgaaatgcaccagcctcgacactaaccctgaccttgaaacccctgattgttccaaggagacggatgccaagtgtttgatgttgggcctcgacgtcaagggtggttcattccttctcatggctaggcctctggggggtaatcacagatttgatggagttcatgggctgaagcttgacaccgtcatcagtgtggaaaatgagatgtctgacaagtgctcgatgaaatgcaccaaagacgacaagaagttgttgatggagtaa

SEQ ID NO: 79959 - DNA, 2964 bp, Oryza sativa
  Clone ID: PAT_MRT4530_79630C.1
atggcacggggctccgctctgcttgatggtagcgtgctgccgccttcccgcatcgtgagcgagagacaggccgggctgccgcgccgcttcatgccggaatctgccaccggccgggagatagtcatgctgggcgagggacgcccggcgccacactacccggggcggaccgtcttcttcctcccttttgcaatggcaggactggttccgccattttcttctttcttcatggatgttctggagttttacgatctccagatggcgcacctcacccccaacgcggtaatgacattggccatcttcgcgcacctgtgcgagatgttcatcggggtgcgcccatcccttcggctgttccggtggttcttcaccgtacagccggtggcgccgccgtcggtggttggtggctgctacttccagccgcgggggccggtgctgaaccgctacattccctgcgtcctccgcaagaagtgggatgactggaagagcgactggttctacacccccctcgccgacgaagcgcgccttcgacttccgagccagcccccggcgcaggcctccagctggcgggcgcaggtatatctgggagatggctatgacgccatcctcgaccgcctggcgggcctgcgatcccaggggctcacaggggccatggtgtacggcgactaccttcgtcgccggatcgcgccactccagcggcgcgcccggggcgcctgggagtacaccgggtccgaggactgtatgaggacccaccggggggtcaaatgggactgggtccctgaagacttcaaggtaatgatccaacgggtgctgaatctcagctccgtggaggcatccctcatcccccaaggagtcctccccctctgcagcgatccagatcgcgccaacatcctgaccatcatgatggcggtcggggcctcagaggagcgagctcctaagggccatgatggtgcgagcgggagtcgcaagggagatcaatctaccccaggagggggtcgtgcttccgggccccgtgatgggggctcggggggcagccgccctgccgacgcccgagggaagaggaagcaagagggtacctcctccccatctcctccccgagggggcggggcggcgcgtgtcagcagcaggcgcccggagggggccacgccgacgccgcagcccgagggggaacggaagaagaaacggctccgcaagatgggggggacagaaccatcccggggaaacctcatttcccctccaaggtggtcgtttaaccgaccccctcgcagcgagatcccgtcgcgtccttcttgccaatccaagtccggccaatctgaggtcgagaatgcggcgatcacggaggcccggaggcgggaatctgaccggcgagaagccgcggatcacctacgggaagccgaggaggccgcccgggaggccgcccgggctcgccaggctgaggaagccgctcgggaggaggccagacttcgccaggccgaggcgacgacgacttccgaagcagctcgcgacgaggccgcgggcgcatcgcttgggcccactccctcgggcgacgctcaggacaagccaggtccgggggacatccccgagtccggcacgtccatcggcgggccaagccgcgcggcatcctcaccgaggcggctctcccccacgccttccgctgccccactgagcgcagagccccttctacaggccttggccgtcgcaaacaccacggtgttggacaggttaagtgcccagatggaggccctgcaagcagagcgggcggagctcgacgccgcatgggcgcgtgtcgaagaggggcgacgctcagtggaggccatggtggaggtgggccgcaaggcacaccgccagcacgtctcagagctcgaagcccgtcggaaggtgctgggggagatcgccagggaggtggaggaggagcggggggctgccctcatcgccactaccgtgatgaacgaggcgcaggacgacctccgccttcaatacgggagctgggaggcggagctagggaagaagctcgacgccgcccggggggtccttgacgctgccgctgcccgagaacggcgggcggcggagaccgaggcggcatcccggcagcgtgaagaaaccctcgaggcccgtgccatggcgctggaagagcgttcctgcgtcatggtgatggatctggcggattgcgaggccgccgttgccattcgggaggtcacactggcggcgcacgaagccgcctgcgccgaagaggagtccgcactccgcctccgcgaagatgcgctcatcgagcgggagcgagccctcgaggaggctgaggccgcggcgcaaaggctggcggagagcgcgtccctccgtgaggctgcgctagaggaacaagcgcgccgtaatctggaaagtgcccgtgccgagagggccgcactgaaccagcgggccgctgaactcgaggcgcaggcaagggagctggatgcaagggcgcgtagcggcggggcggccacgggcgacagcgacttagccgcccgcctcgcagctgccgaatacaccatcgcggatctgcagggcgcgctggattcgtccaccggggaggcgggtctctggggcgggcggactgtgaagtacgccgccaaccaggggggcctcgcccagcgcctctcggagatggccgggactctccagcggctccccgaggagctcgaggggacgattaagtcatcctcgagggacctcgcccgaggagcggtggagctcgtactggcgagttaccaggccagggaccccgacttctcccactggacggcgctggacgagttccctcccgggaccgaggacggcgcgcgcgctcaggtccgggacgccgctaaccatatcgtccacagcttcgagggttcggcccctcggctcgcgttcaccctcaactccgacgaggaggacgatgacggcggagtgggcgatagtggcgacgaggctggcgacccgggtgcatcggagtga

SEQ ID NO: 79960 - DNA, 574 bp, Oryza sativa
  Clone ID: PAT_MRT4530_79631C.1
gcacgagcccctcgcagcctccccccctctcctcctcctcctcctcgtggcgccctccaagtcggcgtcggctgtggcggcggcgtgcgtgcggcggccaaggtgcgggaggagggagaggtctcctcctgcgccgacgacgacgatgtgaggagggctcccgacggcgacgacgacgacgacggtgacgaggtgaggagggagaggtctcatcgggcagcagcagcagtgaggagggctcgatggcgtccagcggcgaggaggtgtgcagcggtggtgtggtgcggcggcgctaggcagtgctaggcggcgaggaggaggcgagcggcggcggcagatccatcccacgagagcgggcgcgtgttcgccgcgggcctcaacggctttgggcagctcgggataggctcctccgtgactcatccgctggtactgcttcttgtgcatcatgcctccatgtgaaattttcatctacattgtgagtcagcctacttttgcacaggaggcaaaagctggctggacatatatcagaattgcaattttcactcctgtaaagtttcttttgtgtgcaaatcat

SEQ ID NO: 79961 - DNA, 1132 bp, Oryza sativa
  Clone ID: PAT_MRT4530_79632C.1
ccggaggggcgaacctctgaagatagcaaaatgtcctctagcgatcagaacccatcgccaacaccggcgtccggcaccggcacgtccgtgccgccgccaggcagggcgacgacggtatcctcgcagctcctggacatgggcgcgcaagcggtgcaggcgctgaagcccgtgcgccagatgaagcagcacgcgtgcagcttcgcgctgtacgctcacgacctgagccgccaggtcgaggtccaccacttcgtctcccgcctcaaccaggacgtcctccagtgcgccgtctacgactccgaacaagccctcggcccgcctcatcggcgtggagtacatcgggtcggacgccatcttcgagagcctgcctccggaggagcagaagctgtggcactcgcacgcgtacgaggtgaaggccgggctgtggaccgacgtcggcgtgccggagccgctgcagagctcggagatggcgaggatggccaagacgtacggcaagctctggtgcacctggcaggtggaccgcggcgacgcgctgcccctgggcgcgccggcgctcatggtgtcgccgcaggccgtggagcccgggcgggtgcgcgccgagctcgtgcacggccgcgacgagaggtacaagatcgacagctcggcgcaggggctgaagggggccagggttgagatggacgagccggagtggatcaacccgaacgccgactactggcgcctacacggcaaggggttcgccatcgacgtcaccgccaccgagatgaagcgccacgcgcccttccccaatgttgcacaaaaacttttggagaatggcgcagaagacatcgacctcaagaagaacggaggtccgcgcacccttatcagaggcactgctctggcatctggaggaatcgatgaggatgcgcgttgggtagctgtgtcgcccaactcgagctcccacgccattgccatcacagtcgaggttgagatcgtcgccgccgtgcagatccgacgagctcgaggccagtcgggggagagggcggggctggggagaggcagcaccatcgggaaggggaggcgcagggagagaggcgatgccggggaagagatcgtcgaagagaaaggaagcgctggagaatttggggagatatggtga

SEQ ID NO: 79962 - DNA, 1311 bp, Oryza sativa
  Clone ID: PAT_MRT4530_79633C.1
atgggagcggtggtggccgcggcagcggcggagatgaggcgcactggccgctgcggcggcggcggaggcgggggcggggagaagaagggggcgaaggaggagggggtggtggttgcggcggaggcggccgccgagagggggcggcggctgcggctggtggggtacgacgagctcccggacttcctgcgcgacaacgagttcatccgcggctactaccgcgccgagtggcccctccgcgacgccgccctcagcgccttctcctggcacaacgagaccctcaacgtctggacccatctcggtgggttcctgctcttcctggcgctcgcgctcgccggagccgccggcgacgccgccgccgacgtcgcgccggggatcatcaggtttgtggtaggatcaaccaatgcttcttggcagactaacgatcattcgggcgcggcgagccatgacgccgcggcggcggcagcggcggcggcggtgctgggcggcgggcacggcgtgccgcggtggccgcggatggtgttcctggtgggcgccatgacgtgcctggcgatcagcgcgacggcgcacctgctggcgtgccactccaggcgcgccagcgtggtgttctggcagctcgactacgccggcatctccgccatgatcgtcgcctccttcgtcccgccggtgtactacgccttcctgtgccaccgcccggcgcgcgtcgcctacctctccgccatctcggcgctgggcgcgctcgtcgtcggcgcgctgctctcgccgccctgctcgtcgccgcggttccggcgtctccgcgccgcgctgttcctcgccatggggctctccggcgtcgtcccggcgctgcacgcgctgtggctcaactggggccacgccgcctgctacctggcgctctcgctcgaggtcgccatggggctcgcctacgccgccggcgcctggttctacgtcagccgcgtgccggagaagtggcgcccgggcgtcttcgacgtcgtcggccacagccaccagatcttccacgtgctcgtgctcgtcggggccgtcacgcactacgtcgccgtcgacgtgctgctcaactggcgggagacggtggccgccgcgtgcagcgcgacgtcgtaggcgactctcctctcctaggcattttgctcattgcgttttgatgattcaaacaatattcaaatttagaagaatggagcagtgttagatgagattcaggatcagggtgtgtgaccttgtgtcattcgatcgatcgaacatctatatgtgatgaattgaggaagatgaagaaattgatttacagtacaaaaaaaaaaaaaa

SEQ ID NO: 79963 - DNA, 1089 bp, Oryza sativa
  Clone ID: PAT_MRT4530_79634C.1
aggagtaccttgaaagctgggaggagaatgaccatatggtgtaagaaacatgaagctcctgtatacgataatgacaaggaagagctacaaaggaactgttgtcatacgagctctagaagtttggttgatgcagagtccatgggtactaccacagaaaatgtagcaggaaattcttctgaattactgaaagggaagaaagtgtccgccttgcaagcttccctgtttgggaagaaactcaaaattaagactcacaaaaaaccaaactatgataccactagaaaacctaatggtgaaaacgagggttatgtgttggaccatagaaatggttcgacttacttacatactgaagataagagcttgaagactgagaaagagtctgctacagcatctgctctgctgaaggaagctagagatctgaagcacttgtctgaccgcttaaaggggaagggggatgaccttgagagtgcaaacatttgtttcgaggcttgcctaaaatttctccatgttgcatctctcaaggaggctgctggtgttgatagctccaaacaaggggatccatatggccccattggcttgttcaacagattttgtgcccgtgaatttgagcgacttaagaaaatggcaaatgctgctttggcatataaatgtgtggaagtggcatacatgaaggcagctttctacaagcatcctggtgcaattaaagatagccatgccttgcaggcagcatctgtgattgctcctccagctgaatcaccgtcgtcttctgcctcagatgttgataatttaaataacccaagtacaatagctaagattgtttcaacaagaggtctatgcacttctcagattgctaagaatcccatatctcggagcaatcatcacttgatgggattgcttgcttatgtagaggacacaaattatgcatttgagggaaccagaaattgggaaagtgcatttttttcttatctttatggtattgaaaaagatcaggatgatggcattgctcttttaacggaagtccttaatttcagtttccataatgtcaaggggctgctgcaactgatccgtcattcattggagtgtatcaaccat

SEQ ID NO: 79964 - DNA, 291 bp, Oryza sativa
  Clone ID: PAT_MRT4530_79635C.1
atggcgggtagggattttgatacgcggcctccacacatgcatgtcaccgtggcactggcccctccctccctatctgatgtggcatctgtcagtgtgtcgttcttcggcgctataccctcgtggatggcagccacaaacccatgcagcgctccatctgcagcctcactgacgccacggctagtagaggagatctacaaggtggcagagaggagctccatggctcatggcatggctatcgaacaacaaggttggaggaagaaaactagaaaagtggctgcctgtggtacatag

SEQ ID NO: 79965 - DNA, 498 bp, Oryza sativa
  Clone ID: PAT_MRT4530_79636C.1
tcggttctgcggacggcggagtgcggagagcggagagcccttgcgcctccaccaccgcgcctcttgctcggccgtcaactggtggccgcggtgtcgaggtgcggggggcgaaagggaggcctggtccgcctcggcggtcgggctcctcctcttccccggcgcgatcagaaggccggtgcctcccccaagcgcggaggccagcaggccgccactctggttgtctcgtctgttcgaaccgaaattggtgcgctcccttgtcaaacggcaatctccattgttttgcttggtgtgttagtggttgtgtgcataatctaggtttgaattctttttttaagtctaattgtactggtatggttaactccatagtcaaattatcaccattggtaaactaaactgtcttttgcaaagctagagaatttggagccaaagacaatagcattttgtttgcagcataagtacttactactacttgtggtccggtttgcttttgggatagag

SEQ ID NO: 79966 - DNA, 551 bp, Oryza sativa
  Clone ID: PAT_MRT4530_79637C.1
ttactatcctcgcatggattccgttttctttgtccccttgccagcgctagactgagttgttaaatttattcttgattagagtgcttctcctttcagcaactgtcagtatctgaaaactcatattttctatgcacatgattttgaagttttaaaaaatatttgactagatgcctcacaaatgtgatgtttgttgaatccacaaggatgctttggacataacataagactatagtttcagtgatgttcagtggcgaatccagggtgtaaattgaggaggtgctagtgtaaaaaatattatactccctccgtccctaaatatttgacgccgttgacttttttaaacatgtttgaccgttcatcttattgaaaacttttgtgaaacatataaaactatatgtatacataaaagtatatttaacaatgaatcaaatgataggaaaagaattaataattacttaaaatttttaataagacgaacggtcaaatatatttaaaaaagtcaacggcatacatatttagggatggagggagtatgattaaaacaaataaag

SEQ ID NO: 79967 - DNA, 1605 bp, Oryza sativa
  Clone ID: PAT_MRT4530_79638C.1
atggctaggatgaagaagaagggcgcgctctctcgcctccggacggcgacgtcgcgcgcggccaccgtggctaggcggaagggtgtcgtcgtcgtcggtcgcgccggggactgcggcggcggcggcgaggaccgcatcagcgacctcccggacgacctgctgcgcctcgtcctgcgccggctcgacacccgcacggcgctcgccacgggggcgctctccaggcgctgggcctccctctgtcgcggtctcgacgccctcgacttcctcgtcagcgacgtgctcccgccgcgctaccaccggtgccgcgaccacctcctcctccaccacccccacgccactaaaggcatcgacgccgacgatgccaaggttgtcgccggcaggtacgagcgcctctccatgcggaaaatggtggcctccatcgacagcttcctcgacgcggcgccggacgacgacgaccccgatcgacggaggaggatcactaggctgaggctggagttcatcatcaatcaccactccgacagcatcaaccgcttgatcgccacggccattgatgcttggggggtcaaggatctcgagattcttgctgggacgcccgcgcatcagctacggccgctggaccgcctccacatcttccctcaccaaggtatctgctctgatccccgcagctccactctgacaagcctgacgctggctaactgcacgatcccgccattgcaagggttccaagctctgaggatcctcgtcttgcagcatctgccaagctccacgcgtccagcagactacgaatcggtgttcacttcttgcacacagctgcgagtgctgcacctcaaatcctgcatgttcgatggcgttctacgggtaaacgctccgtgttcatcgatcgagcagcttgtgttcgaccactgcggcggtggcctgatcattctctacgctcttccaaagctcgaggagatggccgtggtgcagacctgcgtatggttccagcgtggctccatgccatgcctcaaacgcctgaacctcatctttcgatacaagcatgatcatcactccacctccatgccttggggcatgaacctgatgcagattgctgagtacaccccagaaataacagagctgttcctggagttcaccggacgcggggcggcgacgatggatgcgccgccatcatcgccattgccgtcgctgccaaacctccgaaagctcgtggtcgtcgtgccatcgtcgtgggacgtctcatggccgcgcctcctcttggaggtggcgccatgccttgagatcctccacgtccatgtcgccgcctgcgaggacgagccccgcggcgagatctcgtggcggcgatgcgagtcgcgacacaggaagctgaaggagttggggatgagtggcttcgaggggacgggaaggcaggtttactttgttaactttgtgatggaggtatcattagctctgaagtctgtgagtctgtgcaaatatgcaggtgtttactgggactacgacattgttcgtgaagatcgtcgttggagcagtgacgacagagctgatgtactgaagcagatcggtgagagagtttcttgcacagatattccggttcagttagtccgggagtga

SEQ ID NO: 79968 - DNA, 477 bp, Oryza sativa
  Clone ID: PAT_MRT4530_79639C.1
aaacaacaaaaaggaacccccgccccccattttatttctttttattatcattatcccaaacatagaaaagcagcatccaaacatgaaactggtagctagtactaacaaacatcgataattaattaagcaaaggcccaattaattaattaacccctaaggaaaaaattaatctaacccatgccccccccaaacatgaggcaggcaaaggaaccggccgggggctgcaggttgccccggccgtaatccgtaagcgcgctcgccatcccggggatcggcggggggtcccaccccggggccgcgggctgggaaaacatcccggaaacccgggcgccctcctccgggaccaccccgggcaccaacacgctcagggcggcgcaccggcactggattggaacgggggggagctcccggcagcacgggtccaggaacccccccggggggtgtttgggggaatccatgcggcccccgggggggggg

SEQ ID NO: 79969 - DNA, 8549 bp, Oryza sativa
  Clone ID: PAT_MRT4530_7963C.1
atgagcggccgcgacaaccaccaatggccgccgccgcaccgaggctacgacccccgggaccccgccgccgcgtggcagggcgacgcctcgacctccgccgccgccgcggcggcggccgcgggggtaaacccctacatctacgtccccaacccccagtacgcccccaaccctctcaatctcgtcctcaatcatgtgctccacaaccccgccgccctcgccgcctaccatcaccagcagcagcaacagtaccaccaccaccagcaactcctccattcatctgcgtaccaccaaaaccctacccataatctccagcaccgcgctgccgtccctgcaccagcagcaccggcggccgcccctagcatccagcaccgccctgtcgcccccgcgacagccgcggccgcgccggggcagcctcagccgaagaagaagaagaaacagaaggagccggctccgcaggcgcatcccccgccacccctgcccccaccgcagcagcagcagcagcagcagccaaagccgcagcagcagccgggggctcttgagagggcgcaggcggcggcgaggaaggtgcgggacgagatcattaaggctggtgagggcgttacagggtggaagatagcgcaggcggtgctggtggcgctcaaagtggattcctggggctctcttggtgtccagctccatgaagtacccctcctgcgcgacctcttcctcgtcgagggcaaggtgaatacattcatccattgctatgttgcagcaaggaaaattgtttcagtttatgatttagagtctgagatatgcaaaaatgagagcattggacagtttgaagagttggggttggggccttttcttcagcatccacttgttgcacattatttttcagtacctgccgatttgtccttggtacctaagcttagtagtgacgagattataaattggcttcagaagtttatggacaactctaaaaagaaaattacagtggaaaacttcttggattatcttgcggagcaaaagtcagtctctggaaaggaaaaccttggtgtacgaatacaaagcttgaggttgcatatttcctttctccggcaggccaggagaactgaagtgtctgctgttaaagttcaaggcaacaccagtggctcaggtgatggtagttgtgagaaggatttggtgaaaaatagaaaatttcatttgagcaaacaggcattggatgagaggttcagtgctataactagtcgtataaagaaattaccaggtatcaataagcacatccattttgattcaaccgatgatgaaactgatggtgattctagttctgagggtgatgcagttgataacagtgagagtaaaactggttctgctgctattgataacaaggatgttgataagcgtgttagtagctgtccatatccttcaaaaacagaagaaatggagcgtcttggcttaaagtctgaaacgagtaaaaaaccacctttggatagtagcaaggtaaaagagagtagtaaaaagggttatacgagagaaaaaaggaaatctgaagagaatgggagccccacctcttcatgcaaacggcccaagaagaagcaaaaggttcaaatgcaaaagcatgagttatcacctaattgtttcttgagtataggtaagttggagaaattcataacgacctggaaggaagcatgccgtgaacatccagttcaacagaaagaggttttagagttgctagcaaattactatgcggaaacaccaaaggagaagaagaaaataataaagtttttctccgagtaccctggcattggcttcctaaatgttgcccttgattatttcatttgggcttggaatggagaaaacattattcagattttggctgcatccatgactagccagattttgcatgcagttacacatgttttctccctggagatatttgctttacctttcttggtggaggttagagcgatgggatgtggtctgctggatagtctttatgatgcgatcaatgtctttaatgagaataaatcatcatcaaatattcctggtaccaccactgagcttatggaagtggagccaccaccaagtgtcacagctgatgatgtaatcaggagaattactgaattttttgagtccaatcgtggagtgtccagaaccgatgcttcgcaagtgagaaaatctacattcttgagaacacttctcgattgtgaaacatgcataactgctaaattttcagccaaccaatttagcgctcttggccatggtactttcctcgagttcttggggaaacatgagcaacatttaccccctaagttgagcagtttcttgaaagtcggaaagttaacacattcttcagtggaagtttctgtactgcagcaacagattgaggttttactctgccaagctgggggtaattggcttgaagatggtgagttttcggaggatagtttctctaagcttctcaaaaggcaatttccaactattagctttgatattgtgcaagataaatctggagaaggacttcttgattctattgagagacaaaggaaaaacatagaaataaataatatcatgttttctatgtctttgttggagaaacggtggtctggtattgttccaggcccagttcaagatctagcttgcatcgtgaccacagatggtaggtttattagagttgatccatctgctactgttgaccaatttttagaaggcattattcaatgttcaccattccaagtggcagtgaagctgctttccttgctacatgtttataatggttctaccaacactccaatttccttgttgaagtgttatgcacaacgagcaataggcatcataatggacaacggtaatgatttgctgaacactaaatctgaaggcaaatcctttagtgcaaggaacatttggtctgatatgtcaaaagacattgacgacatagttcatctggttgccaaatttgtacttgactgtcttggtcatctaccttccgaattccggagtcttgcagcagatgttttattggcaggacttcgaactatcacgaagaattgctattcagccatcttgcttgaagccactgaaaccgggcagctgtgcatgcttcatgatattgggttatcacttggagtagcagaatgggctgaagattgtcgcagattatgtttaactgacgaaattcatgcaaatatagaaatgcatgcttcttctaggcatccatcaactgcatctggagttgctatatgcgaaaactctaacttgcttaatgctactgatgttgatataatgaagaggagcaagtcattgcctggcaaggataatcaaattgttgctgtaagtaaaaaccaaaatgtattaaatatcgtcacagcaaagcttgatactgcagaattcattactaacaaatctcccaccttgggagaagtgaatcctgaggaagcaactctagttattgagaccatacgccgtgaagaatttggtttggatcagtccttaagttgcactgaaaatagtttgttgaaaaagcagcatgctcgacttggcagagcacttcattgtctctcacaagaactatactcccaggattctcacctacttcttgagctggtacagaatgctgatgataatacttatgttgaggatgttgaacccacattagcatttattcttcaagacaatggtattgttgttctcaacaacgagagtggcttctccgctgaaaatattcgagcactttgtgatattggtagctcaacaaagaaaggatccaaccagggttatattggaaataagggcattggattcaaatcagtatttcgggtaggatcccctgatgctcccgagatccattcaaatggtttccacgtgaaatttgatattacagaaggccaaattggttttgtattgccaactgcagttgcaccttacaatactgattctgtaagtagaatgttatctgttgaagatgtcaaggactcttcttccttctggaatacttgcattgtgcttccattcagatcaaaattcaaggagggtaccggcatgcactccattgcatccatgttttcagatctccacccatctctgctcctgttccttcatcggctaaaatgcatcaagtttaagaacatgatgaatgatacgctattggttatgagaaggaaggcccttggtaacggcattgtgagaatttcaaatgggaatgatatgatgagttggttggtagttagcaagaagttacagggcacaattgtacgcaatgatgtgtgctctacagagatagctgtggcatttactttgcaggagactcagatgggggagtatgagccttacttgaagcaacaacccgtatttgcttttctacctctaaggaattatggtcttaaattcattcttcaaggggattttgtcttaccttcttccagagaggaggtggatgctgataatgcatggaaccagtggttgctgtctgaatttccttctttgtttgtcagtgcacaagaatccttttgtgctcttccttgcttccagggttgccctggaaaggctgttacaaccttcatgagttttgttcctctagtgggagaagttcatggattcttttgtcagctacctcacttgatcctttcaaagttacgtctcacccgttgcatggttttagagggctctagttcgcgatgggtctacccatgcaacactcttcgaggttgggatgaacagactagaatattaatttctgatagcttacttctggagcatcttggtcttgggtacctatcaaaagatataatcatatctgatacattatcaagggccctaggtattcatgagtatggaccaaaagttttgattgacatcatatcatctatttgtcgagttgatggttgtattgagtcactggggctggaatggctatgtgcttggttcatttctcttcatttatcattgatgcaccattcttccaaaaatcttccattaaccacaagccctgaagatcttttgtgtgctctcagaaaaataccatgtattccactttcagatggttcatttagctctatagcagatggacccatatggttgccttatgatgttctcaattcaaaacctgattccagaagtagtatgctgaactttcctgttctatatagtaaccttcggacaataaaaccccgccttctatctgtgtcttgtcaaaacaagtatctcacagaagaaatgcgagcaaacgacctgatggacattctgctgaagatgggagtgcggaagttgtctggacatgatattataaaaaatcacatcctggtgtctttgtctaacagtacagaagctaatgtggccaatacaatgatgatagagtatgtgagctttataatgcttcatcttcagtctccttgtgcaagctgtaactttgaaaaagaagagataatgtcagaactacggaggaggcctatcttacttacgaaccatggctacaagtgcccatatgatgaaccaattcacttcagtaaagaatatggaaattctgtggacttatgcaagttacttctgaatgtagaaataaaatggattgaacttgatagttgctatttgatgaatcgtggttcagattcattaccaccatttgaacttaaaaaatggaggcaattttttgaggagatgggcgtgactgactttgttcaggtagtgaaagttgagaaaaatatttcccaggctgattcttctcttgcaggaagactttctcaaggtcatcattctggaacaccctgcattgtgtatgactgggagtcgccagaattggtgcttgacaaattctgggatgctcactatagtgcaaaagctagaatccatgcagatgcgacacattctggtgaaaacatagcagttgaatcgtcctttatgaattctattcgtaccttcaaatggatagcatcagctatggatgaggaccttcattatgcaacagatttattttataatactgaagatgtgcgttccattcttggtagtgtggcaccatatgctgtacctcaggtatgcagcagatcacttgggaaagatattggattcaaaataaaggtatcacatagtgatgctttgatgatcctcaaatcctggattgcttcacagacttcttttagtgcaagtatggaccagatgtgcaaattctacacctttgtgtcagaagagaaagtcatttcaatgaagaataagattagtatgttcccaagaaagatgctatcttcagcctatcccagcctttgcgaattctttactgaggcatgtggtgtaccaaaggttcccaagacatctgactatgttgatatacttttagggctgtcgaatgctgcattaccttcagaagtagccaatcagctatttccagctaattattgtttttacaacaaaacaccattctacatgattttgtcttgtaaggtctttcatgtgtttgcgaggtgggctaatgatctccattctgcaaatgacaatatgaatgatatattgttcttggaaggatctcttcaaaagttggagacaacaatactgccaaccttgggtgataaatgggtctctctccatccttcttttggccttgtttgctgggtagatgataatgagttgatgcaacactttgaggactacaatggtgttaacttcatacaatttggagaactttcttatgaagacaagcaactgctgtatggaagaattgctgcattgctaaaaagcctaggcatccctgcactttctaaggttatttatcgtgaagcaatattttacggtacagtggataacagagaaaaggttacagtaatttcttggctattaccatatatgcaacgctacatctataagatgcatagagatacatatgtaaactttcaacaaaatgaaatcacgaagcttagcaatctccaagttattgttgttgagaagttattccacaagtataagctgaaagaacgtgagagttcttgtaagagaagattcaaatgcaattgcctattgcagggaaataatctatatgctacgcaagaagctgattcacattcactgtttctggaactgtctagacttttctttgatggatcccctgatctgcactttgcgaactttctgcacatggtcaaaaccatggcagattctggcaccacagctgaacaaatagagtcttttatcgttaataatcagaatgtgcctgatttgcctgagcatgaagctgtttggtccttttcttccttgatcatagcagaccaagatgttgattgccaaagaactgaattccaatctatatgtgacagtcagaaaactgaaatccgatctacatgtgaactcaatatttccaagcatcagagaacgtctggagttgcttcaagttggccaccaaacgactggaaaacagccccagatttcataacatctcacaatagccagtttacacccaatcaagagacaaacttgaacaatgttgtaccttcgttagacttaaccaagactcagtgtgaaaactcagaagatattgtgggtcctgttgatcttgaaggggattggattacagaagatgattttggatcagaaaatacagtacttgcagaacgtataggggcaactggcgatgagcctcatatggtgatgtcgattaactctgccaatttgccggcttatttggatttagaaaccggaagctcagcaaactcagtggtggatattgagctaacagaattcaatgataaactggcaaatgtttcggagaagagggataggctctgcataaaggctccagacagagacaaattattgagaattggcaagcaaggggaagctgcagcccaccaacattttgttgatcattttggatccaataatgtcaggtgggtgaatcaagaaaatgaaacggggttgccttatgacattgttgtcacacacaaatcgggtttcacagaatatgtggaggtgaaggcaacaacaaattcatacaaaaattggttctacattacattgagggaatggcagtttgcattagaaaaaggcaatgcctttaccattgctcgtgttgttctgaaggattcaaagaaagcaaatgacaaatcaaatgttctcattttgaagaatccatacaaactttgcctgaacaaatcagtgtatcttgccctcataataccacagcaatatcaaacaaaacgccgttactttgaaggtaactcggatttgcaaagtgaggtaaaccattgagatctgcaactttggctaagcctttactcaataggaagggaggttgtggggattttgccactgcacctttacttcaataggtacaatctgacatacgctatatcagttttgtttggctccatatttaccaacatagggttttccatagtaagctcattctatgctttctggatatactacttgtcgcgatggttctcggccatgtcataggacatcacctcgtctaacttgtaattttagctgttgtaactattcatccaactttgtggcctcggttttcagttcgaggttcttgatacatgaacgtgcctgatcataatgaaaagtcccattgcaattgt

SEQ ID NO: 79970 - DNA, 297 bp, Oryza sativa
  Clone ID: PAT_MRT4530_79640C.1
ttacagaaaccatagccccaatccccaatcgaaatcgccgccattgcaattcgtcatcatcgccgcaaccatccccataatggccgccaccgactttgttgatgccatccctggactcccgtcgttggatatgcctctcccaaggctagcgcggtcatcatcaacgtcgctcccatgcacgctggggatctgccccaaccgaggccagtggcgatggatccatcgcgcgctcccaaggccgccgccgctcctaaggttgttgtcattttcgtcgttgctcttgaggccggccgccat

SEQ ID NO: 79971 - DNA, 3333 bp, Oryza sativa
  Clone ID: PAT_MRT4530_79641C.1
atggcagcagaagcaattttaggagccttcatgcaaaccctcttccagaaattgtcagaagcaacccttgatcatttcatatcttggagaggcatacatggcaagctagagagcctctcttccacactgtctcagttacaggctttccttgacgacgctgaggagaagcagttgacagatgcatctgtgaggggatggctagcgaagctcaaggatatcgcgtacgaccttgatgatctgctggacagctattcagccaaaagtatgcgcatgaagcagaggcaggtgatattccccacaaaggcaagttttctttcttcctccttcttgagtaggaatctgtaccagcataggataaagcataagattaacatcatattggagagattagataagattgcgcaagaacgcgacaccattgggctccagatgatatgtgaaatgagacggtatgatacctcagagcgtccgcaatcaagttctcttgtagatagttcggctgtatttggtagggagagggacagagaagaaatggtgaggctggtgctctctgataatggacataattcctgcaacttatgtgtcattccagttgttggcatgggtgggcttggtaaaactactcttatgcagatggtgtaccatgatgacagagtaagagaacactttgacttgaggatctggatctatgtgtctgaaagttttgatgagagaaagctaacacaagaaactcttgaggcttctgactatgaccaatctgttgctagtactaacatgaatatgctacaggaaacactctccagagtattgcggggcaagaggtacttgcttgtcttggatgatgtctggaatgaagaccttgataaatggcacagctatagagcagccttaatttcaggagggtttggaagcaagatagtggtgacatcacgaaatgagaatgttggcagaatcatgggaggaatagagccctacaagttacagaaactatcagatgatgacagctggtctgtattcaagagccatgcatttagggatggtgactgcagcgcacatccggagttggaggcgataggaatggaaattgtgaagaagctgaagggattgcctcttgcatcaaaggcattagggagcctcctgttttgcaaaacagatgaagaggagtggaaggacatactgcaaaatgacatatgggagttaccggcagataagaataacatcctgccagccctacgtctaagttacaaccatttaccaccacatcttaagcagtgctttgcattctgttctgtatatcctaaggattatatgttcaggagagagaaactggttaagatctggctagcacttggtttcatcagacagtctagaaagaagagaatggaagatactggaaatgcatactttaatgagttattaagcaggtctttcttccagccatatgagaataactatgtgatgcatgatgcaatgcacgaccttgcaaaatctatctccatggaagactgcgaccacttagattatgggagaagacatgacaatgccattaagacccgtcatctttcatttccatgcaaggatgccaagtgcatgcacttcaatccactgtatgggtttaggaagctaaggacactgactattatccatggatacaagtcaaggatgtctcaattgcctcatggtctatttatgaaacttgaatatcttagagtgcttgatatgcatggacaaggccttaaagagttaccagaatctatagggaatctgaaacaactgcgcttcctagatctcagtagcactgaaatcgaaacattaccagcatctcttgttaagctctataacttgcaaatactaaagctgagtgactgcaattttctaagggaagtgccacaaggcatcactaggctcattaatctgcgccacttagaagcaagtacaagactactgtccaggatacatggaattggaagtttggtatgcctacaggaactagaagaatttgtagttcagaagcgctcagggcacaacgtcacagaactaaataacatggatgagctgcaaggacaactttctattcgtggcctcaataatgtacctaatgggcaagatgcagtttgtgcaaagttgagaaacaaagagcatcttcgaactctacaccttatatgggatgaggactgtgaaagcaatccttcagagcagcaagaagttctagaaggtcttcaaccacatctcgatctcaaggaattagtgattaaagggttccctggggtgaggttcccaagctggctggctagttcatttcttcccaagctgcaaaccatacatatatgcaactgtagaagcacaaggcttccagctttaggccagcttccctttttaaaatatcttgtcatagctggagtaactgaggtgacacaactcagcagtgagttcacaggatttggacaaccaaaaggttttccagctttagaagatcttctattggaagatatgccaaatctgagcgagtggatttttgatgttgctgatcaattgtttccacaattaactgaacttggtctcatcaagtgcccacagttgaagaagttacctcctattccatcaacactaagaacactgtggatttctgaatcagggcttgagtcacttccagagcttcagaataattcttgtccatcttcaccaacatctctatacatcaatgattgcccaaatctaacatctctacgtgtaggtttacttgcatacagaccaacagctctcaaaagtctaacaatagcccattgtgaagggcttgtttcactgccagaggagtgtttccgtccattaatatcactcagaagcctgcacatctacgagtgcccttgtctggtgccttggacagcactggagggaggcttgcttcccacttcaatcgaagatatccgtctaaactcatgcactccattagcaagtgtgcttctaaatggcctaagttaccttcctcatctaaggcattttgaaattgctgattgtcctgatatcaataactttccagcagagggtttacctcacacacttcaatttttggagatatcatgctgtgatgatcttcaatgcttacctcctggtctgcacaacatctcctcacttgaaacactacggattagtaactgtcccggggttgaaagcttgccaaaagaaggcctgccgatggggctcaacgagctttacatcaagggatgtccacaaattaagcaacaatgccaagaaggtggggagtatcatgcaaagatagctcacatcagagatatagagattgacggggatgtcattgtgcctgagcagatatag

SEQ ID NO: 79972 - DNA, 153 bp, Oryza sativa
  Clone ID: PAT_MRT4530_79642C.1
atggcggcgaaggtccgcagcggcgatgtggctggggataagggaataggcagcggcgaggcgagagaggacgacaccgactacgagagggggacgaaagttggaatcgcgcagcaccacatggagggtctatttgcatgcaaatccgcatag

SEQ ID NO: 79973 - DNA, 222 bp, Oryza sativa
  Clone ID: PAT_MRT4530_79643C.1
atgcctgatgagtgcctggacaattcgccgaaagtgagggtgggtgctgacggctacctcccaacgacttcatgggtattccggcgcggcaaagtgctggatgctgttgtgatggtgatcaccgaaggtagccagcccctgggtaggcccagcccgacctcggctcaggcctggttgtgcctgggccatgtcgggccggacggcccatttgggcatctatag

SEQ ID NO: 79974 - DNA, 508 bp, Oryza sativa
  Clone ID: PAT_MRT4530_79644C.1
cccacgcgtccgcagacacggatgttattaacattgatggtggttcttcaattgaaggatatttgtctctagcaatctctgtccctgatggttaccatttctccaaggtccaaaatcatcacagaattttagctataatgtttttgcatcatatatggtagccttatatagttactgacgagcattttcccgttatattgtgaatgttattgtatggtacactttttaaatagaaatatcatttcattcgatggtttgtcagcactcttcacaggactatactatttttagtttagttttatgctataaggtctttctggttgcttttacctactatgaaatatatggcataacatccatgcaatcatacttcatgcatatcaattcttccttccttttggacactctttttctgagaaaaaagagaacagttaacttgttaaaggcctgaatgatctggtcacaccaccgaagtggatggtgcttactttcatagtgtcatggagtc

SEQ ID NO: 79975 - DNA, 507 bp, Oryza sativa
  Clone ID: PAT_MRT4530_79645C.1
acacacttattaaatcctttaacaggctaaaaggaggagaaaattagcttttaattagcaagatggagattgaaggtttgggcatttcctttttcttcctttgtcaacgtatgtgataaagcactgaacttactcattctgaaaacgtgagcctacccattgtggtccacctctccatgagacggactgaatcatgtcattctgaaaagactcagtttccactcatgtatcacagagcactgagaatatcaccaccaatgttaagagagcaccaggggtgcaggagaggagatgtgaaagaaggggtttctgcaacagcaaatgctacagaaaaatgagaactgatgattagattttgtgactaagagtggagttgcatgttgatcccagagaaaattatttcagttgagtaggctgggatgatgtcaagccctatgtggtaaaaaggagagtggaggacaagaaaacaaaggggggggtgcaaaaaagtacagactctaaaatcct

SEQ ID NO: 79976 - DNA, 796 bp, Oryza sativa
  Clone ID: PAT_MRT4530_79646C.1
ccttaaccgcaaaatcagaaatcttcgcccctcaactttacaaaccatctaatgtgggtcctaaggcagtatacatggctggtattgatgatgtggcatcctaatcagcaaaaaaatatttaaataaacattgaatccaaaatctgggaatggtcaaagggaaaagaaggaaatattaggtcattgctttctacactacaatatgttctatggcctgagagtggatggaaaccagtcccccttgttgatataattgaaggagcagctgttaagaaggcctatcagaaggcattgttatgccttcatccagataagttgcaacaacgaggagctgctatgcatcagaagtatatagcagaaaaggtttttgacattctacaggaggcatggaaagaattcaatacagttacttttggatagtattccttagatcctatcgttgttttggctctatcattcagatatggtgcttgttgttgtccactttaatgtacggatggtaatgcccaggatcacattggatatggacatggccatgggaggccatgatatgcatttttttttgaggtattgcagtcctcttgcagtctggtgaattgcactgtatgaatttgcttgcctaaatgtaagtacttagaaaaatagcagttcttgtacaaattttccggttgtggcaaataaacgggtgtatccagagtattgaaattctataaaaaaaaaaaaaaacaaaagtgtgtgtgtgttgccaaaaatagtatgtgagacctggttcttgctttgaaaaaaaaaaaaaaaa

SEQ ID NO: 79977 - DNA, 587 bp, Oryza sativa
  unsure (1)..(587): unsure at all n locations
  Clone ID: PAT_MRT4530_79647C.1
gcaaaggctcctgtcgcagaggcatttcgtcgaacaccctatgggcgtcaacccaaataggtgcaccaaacatgcccatggcaaagctgtttcttggtagagtgttgatgcagtcagtagttgccaatgccaatgccaatgccaacgccaacgccaagccactggccttcaactggttcctcccctcacctgatcggtccagcattcaagctaggcaggatggagtagccatggatggagacaaaatgcagctgtcgtcacggaaaacagccgtaaagtgtcctgggctgggctggactgtctggcctgcaatcagtcgcgatcctgttcgggccatattacatgggccgcaagagaatcgctgtcagtcagttaaggcctatgggccgcacgtgactgtaatcccaagcccacnaaaggggccctttnccccaatgcattacgtggcgagttgccttacctcggactcgcgccgacgtgtcgactgcttgcgcgcccctactgagttcctcgatctttcacatggagacgctgcgtctcacttcagtacagcaggaatggacactagagacacactaaaaaggtaa

SEQ ID NO: 79978 - DNA, 1248 bp, Oryza sativa
  Clone ID: PAT_MRT4530_79648C.1
atggcatgcctacctcctcgtctcgttctcgcttccaccgcgccagtgctagtgctactgctcttcgtcccgctctcgccgtgccgcgcggcttcaggcagtagcccgagcgccgtgctgctgccggtggacaaggacggcgcaacgcagcagtacgtgacgatgttctggcagcggacgccgagtgtgcccgtgaaggccgtggttgacctcgcgggcgccatgctctgggtggactgcgagtccgggtacgagtcgtcgtcgtatgcgcgcgtgccgtgcgggtccaagccttgccgcctcgcgaagagcgccgcctgtgccaccggctgctccggtgcggcgtccccgggctgcctcaacgacacctgcaccgggttcccggagtacactatcacgcgcgtcagcaccggcggcaacatcatcacagacaagctgtcgctgtacaccacctgccgccccatgccggttccgcgcgccaccgcgccggggtttctgttcacctgcggtgcaacgtccctgaccaaaggcctcggcgccgcggccacgggcatgatgtcccttagccgcgcccgcttcgcgctccccacgcaagtcgcctccatcttccgcttctcccgcaagttcgcgctctgcctcgcgccggctgagtcatctggcgtcgtcgttttcggcgacgcgccctacgagttccagcccgtcatggacctctccaagtcactaatctacaccccgctactcgtcaatccggtgaacggccgcgccgtgcccctgaacgcgacgctgctggccatcgccaagagcggagtgggcggcaccaagctgagcatgttgtccccttacaccgtgctggagacctccatctacaaggcggtcaccgacgcgttcgccgccgagacggctatgattccccgtgtgccggccgtggcgccgttcaagctttgctacgacgggaccatggtggggagcacccgcgcggggccggccgtgccgaccgtcgagctggtgctgcagagcaaagccgtgtcgtgggtggtgttcggggcgaactctatggtggccaccaaggacggcgcgctctgcttcggcgttgtggatggaggcgtagccccggagacgtcggtggtgatcggcggacacatgatggaggacaacctgctggagttcgacctggaggggtcacggctgggtttcacctcctacctcccgttgctgcagacgacctgcaacagctttcaccttggctag

SEQ ID NO: 79979 - DNA, 762 bp, Oryza sativa
  Clone ID: PAT_MRT4530_79649C.1
atgatcggcgatgaagaagtcctaaggattcaatcagctgaagattcatgcccacccattttagtcaagtggtgggatgacgacaagcaacctcagggaatcgtgataaacagacaaaaagaagatgaggaagtatgcttgctgaaaaaggcactcagccaagccactcgcattgtaaatgtcgactctagaggatcccctaattttggaactctcgaggccactaggaaccagctgcacgagagaagcagatccaaagacagagttgaattggcaaagcagagagactcggctctgaaagatgttgaagatcgcaaaatcaagtcccaagcccaatttgacgtcctggtgaacaaaatcaagaggcttgagggagctagagatgaggttgccaacgttgctacaccactcattcaggctatgttcttcaataacaatggtccgagtgcattcgatgcttccgaaatcttcgacaagctaagagttgctccggatacatactttaagaacatcaagaaagctgggagtatgggagcgagtctggcgttggcaatgaccaagtctttgtatccgaagattgatgtcgatgccattgatggattcgcagatgggacgagcgaagaagccgcctttgacctcatcaatgatgcgcagaaagctgccgagaagatagccgttgatgtagttgatagattccaggataacgacctccggccgactggttctaataactccgatgatgaaaaaactgacaccgattga

SEQ ID NO: 79980 - DNA, 252 bp, Oryza sativa
  Clone ID: PAT_MRT4530_7964C.1
atgggcgacggcggcgaggcttccctcctcgagccgaagaggctggatgagatcgattcgatctggtcaaacagggaagtcgggaggggatcgatgaagtatgaggcccaggtcgcatttgggctgctttttttttccaaacaaccgttcatggatatttgggatgcacaatttttccaaaaatataccgtcgatttcgtacaaccattgcacgaaaatgacgtgggcgtgacgtcgcgggtggtattttaa

SEQ ID NO: 79981 - DNA, 3039 bp, Oryza sativa
  Clone ID: PAT_MRT4530_79650C.1
atggcacggggctccgctctgctcgatggtagcgtgctgccgccttcccgcatcgtgagcgagagacaggctgggctgtcgcgccgcttcatgccggaatctgccaccggccaggagatggtcacgctgggcgagggacgcccggcgccagactacctggggcggtccgtcttctttctcccctttgcaatggcagggctggttccgccattttcttctttcttcatggatgttctggagttctacgatctccagatggcgcacctcacccccaacgcggtgatgacattggccatcttcgcgcatctgtgcgagatgttcattggggtgcgcccatctcttcggctgttccggtggttcttcaccgtgcagtcggtgtcgccgccatcggtagtcggtggctgctacttccagccacgggggccggtgctgaaccgctacatcccctgcgccctccgcaagaagtgggacgactggaagagcgactggttctacactcccctcgccgacgaagcgcgcctccgacttccgagccagcccccggcgcaggcctccagctggcgggcgccggtagatctgggggatggctatgacgccgtcctcgaccgcctggcgggcctgcgatcccaggggctcacaggggccatggtgtacggcgactacctccgtcgtcggattgcgccgctccagcgacgcgctcggggcgcctgggagtacaccgggtccgaagacttcacgaggacccaccagggagtgagatgggactgggctcctgaggacttcaagatattggtccaacgggtgctgaatctcaactccgtagaggcggccctcattccccaaggaatcctccccctctgcagcgatccagaccgcgcctccatcctgaccattatgatggcggtcggggcctcagaggagcgagctccaaagggccacgacggcgcaggcgggagccgcaggggggaacaatctaccccgagagggggtcgtgcttctgggtcccgcgacaggggcccggggagcagccgccctgccgacgcccggggtaagaggaagcagggaggaacacctcccccatctcctccccgagggggcggggcggcgcgtgccagcagcaggcgcccggagggggccgcgccaacatcgcagcccgagggggagcgcaagaagaagcggccccgtaagatgggggagacagaaccatctcggggaaacctcatttcccctccaaagtggtcgtttaaccgaccccctcgcagccgaggaggccgcccaggagccgcccgggctcgccaggccgaggaaaccgctcgggaggaggccgcccgggcccgccaggccggggaaaccgctcgggaggaggccggattttgccaggacgaggcgatggcgacttccgaggcagctcgcgacgaggccgcgggcgcgtcgcttgggcccactccctcgggcgacgctcaggcgacaacttccggggcggctggcgacgaggctgcgggcgcgtcgcttggacccactccctcgggcgtcgctcaggaccaaccgggtccgggggacatccccgagtccggcacttccatcggcggcccgagccgcgtggcatcctctccaaggcggctcttccccacgccttctatcgccccactgaacgcagagccccttctacaggccttggccgccgcaaacaccacggtgttggatgggttaagtgcccaggtggaggtcctgcaggcagagcgggcggagctcgacgccgcgtgggcgcgtgtcgaagaggggcgacgctcggtggaggccatggtggaggtgggccgtaaggctcaccgccggcacgtctcggagcttgaaactcgtaagaaggtgctggcggagatcgccaaggaagtggaggaggagcggggggctgccctcattgccaccaccgtgatgaacgaggcgcaggacaccctccgccttcaatacgggagctgggaggcggagctagggaagaaactcgacgccgcccagggggcgcttgacgctgccgctgcccgagaacagcgggcggcggagaccgaagcggcgtcccggcggcgtgaagaggcccttgaggcgcgcgccatggcgctggaagagcgcacctgcgtcgtggagagggatctggcggaccgcgaggctgccgtcaccatccgggaagcaacgctggcggcgcacgaggctgcctgcgccgaagaagagttcacgctccgcctccgcgaggacgcgctcaccgagcgggagcgagctctcgagggggccgaggccgcggcgcaacagctggcggtcagcctgtccctccgcgaggcagcgcaggaggagcaggcgcgccgcaatctggaaggtgcccgcgccgagagggccgtactgaaccaacgggccgctgagctcgaggcgcgggcgaaggagctggacgcgagggcgcgcagcggcggggcggccacgggcgaaagcgacttagccgcccgcctcgcagctgccgaacgcaccatcgccgatctgcagggcgcactggactcgtccgccggggaggtcgaagccctccgcttggcaggcgaggtagggcccggcatgctttgggacgccgtctcccgcctagattgcgccggtcggcaagtgggcctctggagagggcggaccgtaaagtacgccgccaaccagggaggcctcacccagcgcctctcgaagatggccggggctctccaacggctccccgaggagctcgagaagacaattaagtcatcctcgagggacctcgcccaaggagcggtggagctcgtcctggcgagttaccaggccagggaccccaatttctctccatggatggcgctggatgagttccctcttgggaccgtggaccgcgcgcgcgcgcaggtccgggatgccgccgaccatatcgtcgacagcttcgagggctcggcccctcggctcgcgttcgcccccaactccgacaaggagggcaatgccggtggtgcagacgacagtgacgacgaggccggcgatccgggcgcatcggattga

SEQ ID NO: 79982 - DNA, 2811 bp, Oryza sativa
  Clone ID: PAT_MRT4530_79651C.1
atggcacggggctccgctctgctcgacggtagcgtactaccgccttcccgcattgtgagcgagaggcaggctgggttgccgcgccgcttcatgccggaatccgccaccggccgggagatagtgatgctgggcgaggcgcgcccagcaccagattacccggggcggtccatcttcttcctccccttcgcaatggccgggttggttcctcctttttcttctttctttatggatgttctggagttctacgatctccagatggcgcacctcacccccaacgcagtgatgactttggccatcttcgcgcacctgtgcgagatgttcattggggtgcgcccatctcttcggctgttccggtggttcttcaccgtgcagtcggtgtcgccgccgtcggtggggctcacaggggccatggtgtacggcgactacctccgtcgccggattgcgccgcttcagcggcgcgcccggagcgcatgggagtacaccgggtccgaggactacatgaggacccaccggggagtcagatgggattgggctcccgatgacttcaagatcgtggtccaaagggaggtggctcctaagggccacgacggcgccggcgggagccgccaggaagaatcaaccccaggagggggccgtgcttctgggccccgcgacgggggctcggggagcaaccgccctgccgacgcccgggggaagaggaaacagggaggaacacctcccccatctcctccccgagggggcggggtggtgcgtgccagcagcaggcgcccggagggggccgcgccgacatcgcagcccgagacggagcgtaagaagaagcggctccgcaagacgggggagacggaaccatcccggggaaacctgatttcccctccaaggtggtcgttcaaccgaccccctcgcagcgatgtcccgtcgcgttcttcccgtcatcccaagtccggccaacccgaggccgaagatccggcggccgcagaggaacggaggcgagaatctgaccggcgagaggccgcagaccgccttcgggaagctgaagaggccgcccgggaggccgctcgggttcggcaggcggaggataccgctcgggaggaggccgcccgggctcgccgagccgaagaagctgctcgggaggaggccgcccgggctcgccaggctgaggcgatggcgtcttccgaggcggttcacgacaagaccgccggcgcgtcgctcgggcccactccctcgggtgacgctcaggcgacaacctccggggcggctcgagacaaggccgcgggcgcatcgcctgggcccgctccctcgggcgacgcccaggaccaaacgggtccgggggacatccccgagctcagtgcgtcttctggcgggccgagccgcgtcgcattttctccaaggcggctcttctcctcgtcttctgccgccccgctgagtgccgagccccttctgcaagccttggccgccgcaaacaccgcggtgctagatggattcagcgcccaggtggaggccttgcgagcggaacgagcggagctcgaggccgcatggacgcgcgtcgaggaggggcggcgctcggtggacgccatggtggaggtgggccgtaaggctcaccgccgtcacatctcggagcttgaagcccgcaaggcggcgctggcggagatcgctcgagaggtggaggaggagcgagaggccgccctcatcgccaccaccgcgatgattgaggcgcaggactcccttcgccttcaacacgggagctgggaggcggagctaaagaaaaagctcgacgccgcccagggggtccttgacgccgctgctgcccgagagcagcgagcaacggaggctaaagcggcatgccgacagcgcgaagaggcccttgaagcccgtgccatggcgctggaagatcatgccggcgccgtggagatcagcttggcggaccgcgaggccgccgccgctatccgggaggtgacgctggcggcgcacgaggccgcctgcgccgaagaggagtccgcgctccggctccgcgaggacgcgcttgctgagcgggagcgagctcttgaggagtccgaggccgcgacacaacggctgacggacagcctgtccctccgcaaggcagcgcaggaggagcaggcgcgccgcaatctggaatgcatccgcgccgagagagccgcgctggagcagcgggctgctaacctcgaggcgcgagaaaaggagctggacgcgagggagcgcagcggcggggcggctacgggcgaaagcgacttagtcgcccgcctcgcagctgccgaacacaccgtcgcggacatgcagcgcgccctggactcatccaccggggaagccgaggccctccgcttgttgggtgagatagggcccggcatgctttgggatgcagtctcccggctggaccgcgccggtcgggaagcgggcctctggaaaggccatacaatttcgcactctaccaatctggaaggcctcgccccgcaccttaggaggatggcctgggctgtccaacgactccccgaggagctcgagaagaccatcaagtcatcttcgagggacctcgcccaaggagcggtggaactcgtgttagcgagttaccaggccagggaccccggcttctccccatggatggcgctggaggagttccctcccgggaccgaggacgatgcgcgcgcgcgggtccgggatgccgccaaccacatcgtccaaagcttcgaggggtcggcccctcggctcgcgttcgcccccagctccgacgaggagggcgacgccagcggtgaggacgacggtggcgacgaggccggcgacccgggcgcattggaatga

SEQ ID NO: 79983 - DNA, 3144 bp, Oryza sativa
  Clone ID: PAT_MRT4530_79652C.1
atggcacggggctctgctctgctcgacggcagtgtactgccgccttcccgcatcgtgaacgagaggcacgccggactgccgcgccgcttcatgccggagtccgccaccggtcgggagatagtgatgctgggcgaggggcgcccggcaccagactacccggggcggtccatcttcttcctccccttcgcaatggctgggctggtcccgccattttctcatttcttcatggatgtcctggagttctacgatctccagatggcgcacctcacccccaatgcggtgatgacattggccatcttcgcgcacctgtgcgagatgttcattggggtgcgcccctctcttcagctgttccggtggttcttcaccgtgcagtcggtgtcaccgccgtcggtggttggcggctgctacttccagccgcgggggccggtgttgaaccgctacatcccctgcgtcctccgcaagaagtgggacgactggaagagcgactggttctacacccccctcgccgacgaagcgcgcctccgacttccaagccagcccccggcgcaggtctccagctggcgggcgccggtagatctgggggaggagtacgacgccgtcctcgaccgcctggcgggcctgcgatcccaggggctcaccggggctatggtgttcggcgattacctccgtcgccggattgcgccgctccaacggcgcgcccggagcgcctgggagtacactgggcctgaagactacatgcggacccaccagggagccagatgggattgggctcccgaggacttcaagatcgtggtccaaagggtgctgaatcttagctccgcggaggcgtctcgccttcctcaggagatcctccccctctgcaccgatcccgaccgcgtctccattctaaccatcatgatgggggtcggggcctcagaggagagagcccctaagggccacgacggcgcgggcgagcgccgccggggggaacaacctgccccaggagggggtcgtgcttctgggccccgcgtcgggggctcggggagcagccgccctgccgacgcccaggggaagaggaagctgggaggaacacctcccacatctcctccccgagggggcggggcggcgcgtgccagcagtcggcgcccggagggggccgcgccgacgtcgcagcccgagggggagcgcaagaagaagcggctccgcaagatgggggagacgggaccatcccggggaaacttgatttcccctccaaagtggtcatttaaccgaccccctcgcagcgatgtcccgtcgcactcctcccgccaccccaagtccggccagtccgaggccgaagatccggcggccgcagaggagcggaggcgagaagctgaccggcgtgaagccgcagatcgccttcgggaagccgaagaggccgcccgggaggccgcccgggttcgccaagcggaggaagctgctcgggaggaggccgcccgggctcgccaagccgaagaagctgcccgggaggaggccgcccgggctcgccaggctgaggcgacagctgctgctggcgcgtcacttgggcccactccctcgggcggccctcaggcgacatcctccgaggcggctcgcgacgaggccgcgggcgcatcgcctgggcctacctcaccgggcgacgcccaggaccaaacgggcccgggggacatccccgagcccagcgcatcctccggggggccaagccgcgtcatattttctccaaggcgacttttctcctcatcttccgtcgccccggtgagcgccgagcccattatgcaggccttggccgccgcaaacaccgcggtgctagatggatttagcgcccaggtggaggccttgcgagcggaacgagcggagctcgaggccgcatgggcgcgcgtcgaggaggggcggcgctcggtggacgccatggtggaggtgggccgtaaggcccaccgccgccacatctcggagcttgaagcccgcaaggcggcgctggcggagatcgcccgagaggtggaggaggagcgagaggccgccctcgtcgccaccaccgcgatgatcgaggcgcaggactccctccgccttcaacacgggagctgggaggcggagctaaagaaaaagctcgacgccgcccagggggtcctcgacgccgccgctgcccgagagcagcgagcaacggaggctgaagcggcgttgcggcggcgcgaagaggccctcgaagcccgtgccatggcgctggaggatcatgccggcgccgtggagaccaacttgggggaccgcaaggccgccgccgctctccgggaggcgacgctggcggcgcacgaggccgcctgcgccgaggaggagtgcgcgctccgcctccgcgaagacgcactcgctgagcgggagcgagctctcgaggaggctgaggccacgaccaaacggctggcggacagcctgtcccttcgcgaggcggcgcaggaggagcaggcgcgccgcaatcttgaatgcgtccgcgccgagagagccgcactggagcagcgggctgctgaccttgaggcgcgggagaaggagctagacgcgagggcgcctatcggcggggcggccgcgggcgaaagcgacttagccgcccgcctcgcagctgccgaacacaccgtcgcggagatgcagcgagcgctggactcctccaccggggaggccgaggcccttcgcttggcgggcgagattgggcccgacatgctttgggactcggtctcccgcatggatcgcgccggtcggcaagcgggcctctggaaaggccagacgaggatgcgccccgccaacctggaaggcctcgctccgcacctcaacaggatggcctgggtcctcgaacgactccccgaggagctcgagaagaccatcaagtcatcctcgagggacctcgcgcggggagcggtcgaactcgtgctggcgagttaccaggcccgggaccccaacttctctccatggatggcgctggaggagttccctcccgggaccgaggacgacgcgcgcgcgcgggtcggggatgctgccgaccacatcgtcaacggctttgagggctcggcccctcggctcgcgttcacccccagctccgacgaggagggcgacgccagcggcgaggacgacggtggcgacgaggccggcgacccgggcgcatttgaatga

SEQ ID NO: 79984 - DNA, 588 bp, Oryza sativa
  Clone ID: PAT_MRT4530_79653C.1
atggccgacccgcggctgttcccgtcgggatccaactcctccggcgacgcctccggccccggccgccggaagtacaacccctaccacgacctcagcaccccctacagctaccagaccctctacgacctccccacctcgccggagttcctcttccaggaggagtccgcggcgcagcgccgctcgtggggggagaacctcacctactacacgggcgtcgggtacctctccggcgccgtcgccggcgccgccctcggcctccgcgacgccgccgcgggcgcggagcccggggacaccgccaagatccgcgccaaccgcgtcctcaactcctgcggcggcggcggccgccggctcggcaacaggctgggcgtcatcgggctgatgtacgccgggatggagagcgccatggtcgccgcgcgcgaccgcgacgactgggtcaacagcgtcgcggcggggctcggcaccggcgcgctcttccgcgcggcgaacgggccgcggtccgccgccgtcgctggcgccatcggaggggtcctcgccggcgccgccatggccggcaagcagctcgccaagcgatatgtgcctgccatatga

SEQ ID NO: 79985 - DNA, 2901 bp, Oryza sativa
  Clone ID: PAT_MRT4530_79654C.1
atggcacggggctccgctttgcttgatggtagcgtgctgccgccttcccgcatcgtgagcgagaggcaggccgggctgccgcgccgcttcatgccggaatctgccaccggccgggagatagttacgctgggcgagggacgcccggcgccatgctacccgggacggtccgtcttcttcctcccttttgcaatggcagggctggttccgccattttcttctttcttcatggatgttctggagttttacgatctccagatggcgcacctcacccccaacgcggtaatgacattggccatcttcgcgcacctgtgcgagatgttcatcggggtgcgcccatcccttcggctgttccggtggttcttcaccgtacagccggtgtcgccgccgtcggtggttggtggttgctacttccagccgcgggggccggtgctaaaccgctacattccctgcgtcctccgcaagaagtgggatgactggaagagcgactggttctacacccccctcgccgacgaagcgcgcctccgacttccgagccagcctccagctggcgggcgccgctccgcggaggcatccctcatcccccaaggagtcctccccctctgcagcgatccagatcgcgccaacatcctgaccatcatgcaggcggtcggggcgtcggaggagcgggctcctcgaggccacgatggctcgggcgggagccgcaggggggaacaatctaccccgggagggggtcgtgcttctgggccccgtgatgggggctcggggggcagccgccctgccgacgtccgagggaagagaaagcaagagggtacttcctccccatctcctccccgtgggggcggggcggcgcgtgtcagcagcaggcgcccggagggggccgcgccgacgccgcagcccgagggggagcggaagaagaaacggctccgcaagatgggggggacagaaccatcccggggaaacctcatttcccctccaaggtggtcgtttaaccgaccccctcgcagcgagatcccgtcgcgtccctcccgccattccaagtccggccagtctgaggccgaggacccggcgaccacagaggcccggaggcgggaatctgaccggcgagaagccgcggatcgccttcgggaagccgaggaggccgctcgggaggtcgcccgggctcgccagaccgaggaagccgctcgggaggaggccggactccgccaggccgaggcgacgacatcctccgaggcgacccgtgaaactgaccggcaagaggccgtggatcgccttcgagaagccgaggaagctgcccaggtggccgtccgagctcgccaagctgaagaagccgctcgggaggaggctagacttcaccaggccgaggcgacaacgacttccgaggcaactcgcggcgaggccgcgggtgcatcgcttgggcccactccctcgtgcgacgctcaggacaaaccaggtccgggggacatccccgagtccggcacgtccatcggcgggccaagccgcgcggcatcctcttcgaggcggctcttccccacgccttccgttgctccactgagcgcagaaccccttctgcaggccttggccgtggaggcgctgcaagcagagcgggcggagctcgacgccgcatgggcgcgtgtcgaagaggggcgacgctcggtggaggccatggtggaggtgggccgcaaggcacaccgccggcacgtctcagagctcgaagcccgtcggaaggtgctgggggagatcgccaaggaggtggaggaggagcggggggctgccctcatcgccaccaccgtgatgaacgaggcgcaggacaccctccgccttcaatacgggagctgggaggcggagctagggaagaagctcgacgccgcccggggggtccttgacgctgccgctgcccgagaacggcgggcggcggagaccgaggtggcatcccggcggcgcgaagaagcccttgaggcccgtgccatggcgctggaagagcgtgcctgcgtcgtggagagggacctggcggatcgcgaggccgccgttgccatccgggaggcaacgctgactgcgcacgaggccgcctgtgccgaagaggagtccgcgctctgcctccgtgaggacgcgctcaccgagcgggagcgagatctcgaggaggccgaggccgcggcgcaacggctggcggactgcctgtccctccgcgaggctgcgcaagaggaacaagcgcgtcgcaatctggaaagtgcccgcgccgagagggtcgcactgaaccagcgggccgctgaactcgaggcgcaggcaagggagctggatgcaagggcgtgtagcggcggggcggccacgggcgaaagcgacttaaccgcccgcctcgcagctgccgaacacaccatcgccgatctgcagggcgcgctagactcgtccgccggggaggtcgaggccctccgcttggcaggcgaggtagggcccggcatgcttcgggacgccgtctcccgtctagaccgcgccggccggcaggcgggcctctggggcgggcggactgcgaagtacgccgccaaccaggggggcctcgcccagcgcctctcggagatagccgggactctccaacggctccccgaggagctcgagaggacgattaagtcatcctcgagggacctcgcccgaggagcggtggagctcgtactggcgagttaccaagccagggatcctgacttcttcccatggacggcgctggacgagttccctcccgggaccgaggatggcgcacgcgcgcaggtccgggacgccgccgaccatatcgtccacagcttcgagggttcggcccctcggctcgcgttcgccctcaactccgacgaggaggacgatgacggcggagtgggcgacagtggcgacgaggctggcgacccgggtgcatcggagtga

SEQ ID NO: 79986 - DNA, 199 bp, Oryza sativa
  Clone ID: PAT_MRT4530_79655C.1
gcaaagcaacaaactccaaggaacatgtgactagaactccatccatctcccatggactattgggcgcatagaagagatcatggagcatcctaaaagattgcatttgcggggctcgtgcatgttacgtagggtcggaggacaaagcgacgagtagtaattgctgcgtgatcyatgatagtagatgtatggttcttgatag

SEQ ID NO: 79987 - DNA, 3501 bp, Oryza sativa
  Clone ID: PAT_MRT4530_79656C.1
atgggttccgtctccggcatcgacgacttcgtcttccctcccggacaggcgttccggttcggcagcctcgacttcatcaccaacgacttcggcaagatttctctcctcgactcggattcgaaccagtcgggaagaggtcagatctccgccccgttcggtaccccgaactcggccgaggtctaccccaagatcatctctgccgagttggcttcaaaccactcgtacgagatccaatctactcggacacgaccagatcaagatgatgggtcctatcccccaatcctgatgagacttcccgatgatctggctgctgtcttcacgaccaaggcatctcccacccgaagacctagacgggatccggcttcggcttcgatccaatctagttctagggaggtaggcgttatatttcagcctctcgggacggtctcgacggaagaattggattgctacctcagctcccccggcgtcagttctcgaccaacggagatcctcgagtacgacgacttcggctatcgctacgactacgcgatcaccctcctcgacaccctcctcaaggaagacgcgctcaatcaggctgatcacgtcgtcaacatcttaaaccagacaaagaccatgatcgccgcctcggtcccggctaactccgcaagcacccgcacgccgactggcagccgagttccccctcttcgatctcaagactatcaccaaccaagcctcagcgtcatcggcgcgggatccagtcgcaggagcaggggtcacgacgagcgatctgtccattcgcctcccgaacgacacagggagcgtcgagttgaacgacctcgcaggcaccccatcgatcttcgcgataccatcaaccagcgccgcgcggcaagaggctgtgctcccaaccattcaccagaccgctacgacgacgacgtggatggagttgctgccttcacgaccaacctgcgtcgagtggattggccagccggcttcaagccgagtggaatcgagaagtatgacggcaccactaacccggagtcttggctcaccgtctacggtctcgcaatccgcgcagcaggaggagacgatctctacaacgttgtccagaagtccggagaatcccttcgagattacatccggcgtttttccgagcaacgcaacaagatctccgacatcaccgacgacgtcatcatcgccgccttcaccaagggcattcgccacgacgacctagtcggcaagttcgggcgcaagcctcccaggacggtcaagcagatgttcgagaaagccaacgagtatgccaaagccgaagatgctattaccgcgtccaagcagtcgggcaccacttggaagctgaagaaaaatatgccgaacacaggggggagtggaagtaccaatcacaaggatcgcaagcgtaagcccgaggaacttgtggcaaccactacaccatcctcccgacaacgttcgcgcgtcaatacttttgataagatcatgaactcccaatatccgcatcatccaaattccaatcacgcggccaaagattgcttcgtctacaaacagtttgcagagcaatacgccaagaacgcacgcaagaccgctgacggagatcaaagcacgtcaaagaagaaggatgatgaagacgatgccccgactggttttcaagaccatcgcaaggaactaaaccacatctttggcggacccctggcttatgaatccaagagaaagcaaaagttgactgaacgggagatcaatgctgtccagcccgacacgccccaatatcttcggtggtcagagacgacaatcaagtttgaccgctcggatcatcctgaccgagtggtccacccggggcggtaccccctggtactagaccctgtggttcgcaacgtcaagcttcgcagatccctcatcgatggtggcagtgcgctcagcatccttttcgccaagactctggacaacatgcagatccctcgcacggaattaaaaccgagtaatgcgccctttcacggagtcatcccagggctatctgctacaccacttggccagatcactcttccggttactttcggcactcgggagaacttccgcacagaaaacgtttgttttgaagttgctgatttcgagacagcgtctcatgccatactcggacgcccggcgttagccaagtttatggctgtcccgcactatacctacatgatgatgaagatgcctgatatctttgcgtggaaaccatctgatatgcctggtattcccagagaggtgattgagcactctttacatgttaaggaagacgctaaacctatcaagcaacaactccaccgtttcgcacaggataggaaggatgcgatcaaggaagaattgactaagctgttagcagcgggcttcatcaaagaagtccttcatcccgactggctggctaacccagtcctggttcggaagaagacggggcaatggcgcatgtgtgtcgattataccgacctcaacaagtctagtcccaaagacccttttgggttacctcgcattgaccagacttcattcattacgcccttcggggcctactgctacatcaccatgccctttggattaaagaacgcaggagcaacttatcaacgcatgatccagagatgtttttcaactcagatcggccgcaatgatgaagcttatgtggatgatgtaatcgtgaagaccaaacagaaggatgatttgatcgcggatctagaagagacctttgcaagcatccgcgccttcaggatgaaactaaaccctaaaaagtgcatcttcggagtaccgtcagggaagctgcttggatttatggtgtcccatagaggcatacaagccaacccggagaaaatcaacgccatcctcaacatgaaaccgccgagctcacaaaaagatgtccaaaagctgactggttgcatggcggcgcttagcaggatcgcgatctccttgggcattcggcgtctgatagttcgtggagattctcagttggttgttgatcaagtcatgaaagagtggtcctgccttgatgataacatgaccgcttatcggcaggaggtacgtaagttggaagacaaattcgatagacttgaactcactcatgttcttcggcacaataacgaggcagccgacagactggctaattttggttcaaaacgagaagtagctccttccgacgtgttcgttgaacatctttacgaaccaaccgtgccaaggaaagaaacaattaaagccacggatactcaagacggttgtcaatttttcgcccgacaaactcatttaccagctcaggagttgcaaaccatcctgttgtcttggccgtttgcggtttgggggcttgacatggtcggcccattcaaaaaggcagtcggtggttatactcacctctttgtggctgttgacaaattttccaagtggattgaagctaaaccggtcattacaatcatggcagacaaggctagagatttcttcatcaacattgtgcaccggtttggggtacctaatcgtatcatcactgataatggcacttaa

SEQ ID NO: 79988 - DNA, 2475 bp, Oryza sativa
  Clone ID: PAT_MRT4530_79657C.1
atggcacggggctccgcaccgctcgagggtagcgtgctgccgccttcccgcatcgtgagcgagaggcaggccgggctgccgcgccgattcatgccggaatctgccaccggccgggaggtggtcgcgctgggcgagggacgcccggcgccgcattacctggggcggtccgtcttcttcctctctttcgcaatggcagggctggtcccgccattctcttctttcttcatggatgttctggagctttatgatctccagatggcgcacctcacccccaacgcggtaatgacgttggccatcttcgcgcacctatgcgagatgttcatcggggtgcgcccatctctccggctgttccggtggttcttcaccgtacagccggtgtcgccaccgtcggtagtcggtggctgctacttccagccgcgggggccggacgactggaagagcgactggttctacacccctctcgccgacgaagcgcgcctccgacttccgagccagcccccggcgcaggcctccagctggcgggcgccggtagatctgggagatggctacgacgccgttcttgaccgcctggcgggtctgcgatcccaggggctcacgggggccatggtgttcggcgactaccttcgtcgccggatcgcgccactccagcggcgcgcccggggcgcctgggagtacaccgggtccgaggactacatgaggacccaccaggggggcagatgggactgggcccctgaggatttcaagatggtggtccaacgggtgctgaatctcagctccgtggaggcatccctcatcccccaaggtgtcctctccctctgcagcgatccagagcgcgccaacatcctgaccatcatgcaagcggtcggggcgtcaggggagcgggctcctcgaggccacgatggcgcgggcgggagccgcaggggggaacaatctaccccgggagggggtcgtgcttctgggccccgtgatgggggcccggggggcagccgccctgccgacgcccgggggaagaggaaacaggaggataccccctccccatctcctccccgagggggcggggcggtgcgtgccagcagcaggcgcccggagggtgctgtgccgacgtcgcagcccgagggggagcgaaaaaagaagcggctccgcaagatggggggggaccgaaccatgccggggaaacctcatctcccccccaagatggaggtcctgcaagcagagcgggcggagctcgacgcggcgtgggcgcgcgtcgaagaggggcagcgctcggtggaggccatggtggaggcgggccgcaaggcataccgccggcacgcctcagagctcgaggcccgtcggtgggagctggcggagatcgccagggaggtggaggaggagcgggagactgccctcatcgccaccgccgtgctcaacgaggcgcgggacgatctccgccttcaacacgggagccgggtggcggagctagagaagaaactcgacgccgcccggggagtccttgacgccgccactgcacgggaacggcgggcgacggagaacgaggcggcgtcccggcggcgcgaagtggcccttgaggctcgcgccacggcgctggaagagcgcgcccgcgcgagggagagggacctggcggaccgcgagaccgccatcgctatccgggaggcaacgctggcggcgcacgaggccgcctgcgccgaagaggagtccgcactccgcctccgcgaggatgcgctcaccgagcgggagcgatctctcgaggaggcagaggccgcggcgcagcggctggcggacagcctgtccctccgcgaggcagcgcgggaggagcaggcgcgccgtaatctggaaggcgcccgcgccgagagggccgcactggatcagcgggccgctgagctcgaggcgcgggcgaaggagctggacgcgagggcgcgcagcggcggggcggccgcgggcgacggcgatctagccgcccgcctcacagctgccgaacacaccatcgccgatctgcagggcgcgctggactcgtccgccggggaggtcgaggccctccgcttggcgggcgagaccgcgccgggcggcaagcgggcctctggggcgagcggaccgcgaagtacgccgccaaccagggggggcctcgcccagcgcctctcagagatggccgggactctccagcggctccccgaggagctcgaggagacgatcaagtcatcctcgagagacctcgcccggggggtagtggagtttgtactggcaagctaccaggccagggacccggacttctccccgtgggcagcactggacgagttccctcccggaaccgaggacgacgcgcgcgcgcaggtccgggacgccgccgaccacatcgtccacagcttcgagggtacggcccctcggctcgcgttcgccctcgactccgacgaggagggcggcgacggtggtgtggacgacagcgaccacgaggccggcgacccgggagcctcgaagtga

SEQ ID NO: 79989 - DNA, 3165 bp, Oryza sativa
  Clone ID: PAT_MRT4530_79658C.1
atggcacggggctccgctctgctcgatggtagcgtgctgccgccttcccgcatcgtgagcgagaggcaggctgggctgccgcgccgcttcatgccggaatctgccaccggccgggagatagtcacgctgggcgagggacgcccggcgccagactacccggggcggtccgtcttctttctcccctttgcaatggcagggctggttccgccattttcttctttcttcatggatgttctggagttctacgatctccagatggcgcacctcacccccaacgcggtgatgacattggccatcttcgcgcatctgtgcgagatgttcattggggtgcgcccatctcttcggctgttccggtggttcttcaccgtgcagtcggtgtcgccgccatcggtagttggtggctgctacttccagccacgggggccggtgctgaaccgctacatcccctgcgccctccgcaagaagtgggacgactggaagagcgactggttctacaccccccttgccgacgaagcgcgcctccgacttccgagccagcccccggcgcaggcctccagctggcgggcgccggtagatctgggggatggctatgacgccgtcctcgaccgcctggcgggcctgcgatcccaggggctcacaggggccatggtgtacggcgactacctccgtcgtcggattgcgccgctccagcggcgcgctcggggcgcctgggagtacaccgggtccgaagacttcatgaggacccaccagggagtgagatgggactgggctcctgaggacttcaagatattggtccaacgggtgctgaatctcaactccgtggaggcgtccctcattccccaaggaatcctccccctctgcagcgatccagaccgcgcctccatcctaaccattatgatggcggtcggggcctcaaaggagcgagctccaaagggccacgacggcgcaggcgggagccgcaggggggaacaatctaccccgggagggggtcgtgcttctgggtcccgcgacaggggcccggggagcagccgccctgccgacgcccgggggaagaggaagcagggaggaacacctcccccatctcctccccgagggggcggggcggtgcgcgccagcagcaggcgcccggagggggccgtgccgacatcgcagcccgagggggagcgcaagaagaagcgcgagatcccgtcgcgtccctcccgccattccaagcccggccagtctgaggccgaggatccggcggccgcagaggcccggaggcgggaatctgaccggcgagaggccgcggatcgcctacgggaagccgaggaggccgcccaggaggccgcccgggctcgccaggccgaggaaaccgctcgggaggaggccgcccgggcccgccaggccgaggaagccgctcgggaggaggccgcccgggcccgccaggccgaggaagccgttcgggaggaggccacccgagcccgccaggccgaggaagccgctcgggagaaagccggatttcgccaggacgaggcgttggcgacttccgaggcagctcgcgacgaggccgcgggcgcgtcgcttgggcccactccctcgggcgacgctcaggcgacagcttccggggcagctggcgacgaggctgcgggcgcgtcgcttgggcccactccctcgggcgacgctcaggaccaaccgggtccgggggacatccccgagtccggcacttccatcggtggcccgagccgcatggcatcctctccaaggcggctcttccccacgccttctatcgccccactgaacgcagagccccttctgcaggccttggccgccgcaaacaccacggtgttggatgggttaagtgcccaggtggaggccctgcaggcagagcgggcggagctcgacgtcgcgtgggcgcgtgtcgaagaggggcgacgctcggtggaggccatggtggaggtgggccgtaaggctcaccgccggcacgtctcggagcttgaaacccgtaagaaggtgctggcggagatcgccaaggaagtggaggaggagcggggggctgccctcattgccaccaccgtgatgaacgaggcgcaggacaccctccgccttcaatacgggagctgggaggcggagctagggaagaagctcgacgccgcccagggggtgcttgacgctgccgctgcccgagaacagcgggcggcggagaccgaagcggcgtcccggcggcgcgaagaggcccttgaggcgcgcgccatggcgctggaagagcgcgcctgcgtcgtggagagggatctggcggaccgcgaggccgccgtcaccatccgggaagcaacgctggcggcgcacgaggctgcctgcgccgaagaagagctcgcgctccgcctccgcgaggacgcgctcaccgagcgggagcgagctctcgagggggccgaggccgcggcgcaacagctggcggacagcctgtccctccgcgaggcagcgcaggaggagcaggcgcgccgtaatctggaaggtgcccgcgccgagagggccgcactgaaccaacgggccgctgagctcgaggcgcgggcgaaggagctggacgcgagggcgcgcagcggcggggcggccgcgggcgaaagcgacttagccgcccgcctcgcagctgccgaacacaccatcgccgatctgcagggcgcgctggactcgtccgccggggaggtcgaagacctccgcttggcaggcgaggttgggcccggcatgctttgggacgccgtctcctgcctagattgtgccggtcggcaagtgggcctctggagagggcggaccgtaaagtacgccgccaaccagggaggtctcgcccagcgcctctcgaagatggccggggctctccaacggctccccgaggagctcgagaagacaattaagtcatcctcgagggacctcgcccaaggagcggtggagctcgtcctggcgagttaccaggccagggaccccaatttctctctatggatggcgctggatgagttccctcctgggaccgaggaccgtgcgcgcgcgcaggtccgggatgccgccgaccatatcgtcgacagcttcgagggctcggcccctcgactcgcgttcgcccccaactccgacgaggagggcaatgccggtggtgcagacgacagtgacgacgaggccggcgacccgggcgcatcggattga

SEQ ID NO: 79990 - DNA, 5259 bp, Oryza sativa
  Clone ID: PAT_MRT4530_79659C.1
atgggttccgtttctggcatcgacgacttcgccttctcccccgggcaggcgttccggttcggcagcctcaacttcatcaccaacgacttcggcaagatctctcttcttgactcggattcgaaccagtcggggagagaccaggtccccgtgccgttcggtattctgaactcggccgaggcctactccaagatcatatcttccgagtcggcttcaaaccactcggacgagatccaatctactcctccgcggctagatcaagacgacgagccctatccctcaatcttgatgaaacttcctgatgacttggccgccgtcttcacagccaaaacatctcccactcggagacctaggcgagccccggcatcggccccgatccagtctagatccagggaggttggcgttatactccaacctcttgggacagtctcgacagaagagttggatggctacctcagctcccccggcgtcagttctcgaccaaccgagatcctcgactacgacgacttcagctaccactacgaccacggcaacttcgacaacttcgacgacagctatgagtataactacacgcccctcttcttcggcgtattcatggctgacaacgaaacggaagaacagcgccgagcccgagaagcggaccaagaccgcgcacggcaagaagctgaaccggtctttcgcaccccccagcagaacgtgattgcagcaatcactctcctcgacaccctcctcaaggaagacgcactcaaccaagcttatcatgtcgtcaacatcttgaaccagacgaagaccatgatcgctgcctcgattccagccaactccgcaagcaccctcaccccgattggtagccgagtccctcacttccgatctcatgattatcatcagccaagcctcagcatcaccggcacaagatctagtcgcaggagcaggggtcacgacgaacgatctgttcactcgcctcccgaacgtcacagggagcgccgagttgaacggcctcgctctccacctcgtcagcgtcctgtcgaccttcgcaacacgatcaaccagcgccgtgcagcacgaggtcaccgccattcaccaaatcgctacaacgacgacgtggacggagtagctgccttcactaatgacttgcgtcgagtgaattggccagccggctttaagccgactggaatcgaaaagtatgacggcaccaccaatccggagtcttggctcaccgtctacggactcgcaatccgcgcagcaggaggagacagcaaggccatggcaaactatctacctaagtctggagaatcccttcgagattacatccgacgcttctccgaacaacgcaacaagatctccgacatcaccgacgacgtcatcatcgccgccttcactaaaggcattcgccacgaggacctagtcggcaagttcggacgtaaacctcccaggacggttaagcagatgttcgaaaaagccaacgagtatgtcaaagccgaagatgctatcaccgcgtccaaacagttgggcaccacttggaagccaaagaaggacacgccgactgcaggggggagtggaagtaacaaccacaaggatcgcaagcgtaagcccgaagaacttgtggcgaccacctctccatcttcccgacaacgtccccgcgtcaacaccttcgacaagataatgaactcccaatgtttgcatcatcccaactccaaccacgtggccaaagattgctttgtctacaaacaattcgcggagcaatacgtcaagaacgcacgtaaacctttagacggagatcaaggcacatcgaagaagaaagatgataaagacgatgccccgactggttttcaagatcattgcaaagaacttaatcatatcttcggcagacccctggcttatgagtctaagagaaaacagaagctaacagaacgggagatcaatgcggttcagcctaacacgccccaatatcttcggtggtcagagatagcaattaagttcgaccgctcggatcatcccgaccgagtggtccacccgaggcggtaccccctggtactagacccagtggttcgcaatgtcaagctccgacggactctcatcgatggtggcagcgcactcaacatccttttcgctaagaccctggacgatatgcagattcctcgcacggaattaaagccgagtaatgcacccttccatggtgttatctcaggattgtcagctacaccactcggccagatcactcttccagttactttcggcactcgggagaattttcgcatagaaaatgtttgtttcgaagtcgctgatttcgagacagcataccatgctatactcggacgaccggctctagccaggttcatggccgtcccgcactacatctacatgatgatgaagatgcctggtcctcgaggggtcatatcactacggagcgacatcaagcaagccgtcacatgtgacaaagaaagttgcgagatggctcaaacccacgagaccactctcgcccgcgaagagatccgactggctgcgaccacggcaagcgatggagaagtgcctgcaaccaagctgacgaagaccgaagaaagcgatgccaagatgaaaaagattcccttagatccctccgatcctgacaagactgctaataataaagatatttttgcgtggaaaccatctgatatgcctggtatcccaagagaggtgattgaacactctttacatgctaaggaagacgccaaacccatcaagcaacgactccgccattttgcacaggacaggaaagatgcgatcaaggaggaattaaccaagctgttagcagcaggcttcattaaggaagtccttcatcccgactggctagctaacccagtcctggttcagaaaaagacggggcaatggcgcatgtgtgtcgattataccgacctcaacaaatcttgtcccaaagacccttttgggttacctcgcattgaccaggtggttgactcaacggccggctgcgagttactcagcttcttggactgttactcggggtatcatcagatccgactacaagaatccaactgcttgaagacctcgtttattacgccctttggggcctactgctacatcaccatgccccttagattgaagaatgcaggagcgacctatcaacgcatgattcaaaggtgttttttaactcagatcggtcgcaatgttgaagcctatgttgatgatgtagtcgtcaagaccaagcagaaggatgacctgattgcggatttagaagaaacttttacaagcattcgtgcttttaagatgaaactaaacccggaaaagtgcatcttcggagtaccgtcagggaagttgctcggatttatggtatctcagagaggcatacaggccaacccggagaaaatcaactccatcctcaacatgaaaccgccaagctcccaaaaagatgtccaaaagctgactggttgcatggcggcgctcagccagttcgtctcacgactcggcgagcgggggatgcccttcttcaagctgctgaagaaaactgacaatttccagtggggacccaaagcacaaaaagcctttgaagacttcaagaaatttctcaccactccaccagttttggcctcgccacatccacaagagccgctactgaaattatctcactattttcaaagtcactcggtcacggtggtcacatcgtttccactcggggatatacttcataatcgcgaagcaaacggacggattgcgaagtgggccttagaattgatgtctttggacatatctttcaaaccacgaacttcgatcaagtcacaagctttagctgatttccttgccgagtggaccgagtgccaagaagacatgccagaggaaaagatggaatattggactatgcattttgatgggttgaagagacttacaggcactggagctggggtcgtcttaatttccccgactggagaaagattgagatacgtattgtggatacatttttctgcgtcccataacgtggcggaatacgaggcgctactccatggattaaggattgcaatctctttaggcatccgccgattaatcgtccgtggagattgtcagttggttgtcaatcaggttatgaaagagtggtcatgtctagatgataatatgaccgcttatagacaagaggtacgcaagctggaagataaatttgatggactcgagctcacccatgtccttcgacataacaacgaggcagctgacagactggccaattttggttcaaaacgggaagcagccccttctgatgtgttcgttgagcatctttatgaaccaaccatgcccagaaaagaagcagttgaagccatggatactcaaggcgaagggagacaattgttgaaggatatacattctggtatttgtggtaatcatgctgctacacggaccatcgtcggcaaagcttaccggcaaggttttttctggcctaccgccgtatctgatgcggacaagattgtgccgacatgcgaaggttgtcaattttttgccagacaaactcatttgccagcccaagagttgcaaaccatcccgttgtcctggccgtttgcggtctgggggcttaacatggtcggcccatttaaaagggcagtcggcggttacacgcatctctttgtggctatcgacaaattctccaagtggattgaggctaaaccggtcatcatgatcacagcagataaagctagagattttttcatcaacattgtgcatcggtttggggtacctaatcagatcatcactgataatggcactcaattcactggcggagcatttaaagacttttgtgaagacttcggcattaaaatttgttatgcctccgtggcacaccctatgagtaacggacaagttgagcgcgctaacggcacgatactgcaagggatcaaagcacgagttttcgaccgactacgcccctatgatggcaagtgggtagatcagctgccgtccgtactttggtgtttacgtactactcctagtcgggctaccagccagtcgccgttctttttggtttatggcgcagaagcaatgttgctgagtgaagtggaatttgaatcactacgatttcggaacttcaacgaggagggttatgaagagggccgagtagacgacatcaaccgactagaagaagcccgagaagcagctttaattcaatcgactcgatatttgcaagggttgcgtcgttatcataatcggaatgttcgatcgcgagcatttttagtcggtgacctggttctgaggatcggcataaattatctcccttatgggaaggaccgttcataa

SEQ ID NO: 79991 - DNA, 107 bp, Oryza sativa
  Clone ID: PAT_MRT4530_7965C.1
acatacaatattttgttcgattcaaaatgaggatttgaaaagcccggaaaatttcagacaggtccattccatggcgatgcaagggatccctagtgtagattaaacca

SEQ ID NO: 79992 - DNA, 3156 bp, Oryza sativa
  Clone ID: PAT_MRT4530_79660C.1
atggcacggggttccgctctgctcgatggtagcgtgctgccgccttcccgcatcgtgagcgagaggcaggctgggctgccgcgccgcttcatgccggaatctgccaccggccgggagatagtcacgctgggcgagggacgcccggcgccagactacccggggcggtccgtcttctttctcccctttgcaatggcagggctggttccgccattttcttctttcttcatggatgttctggagttctacgatctccagatggcgcacctcacccccaacgcggtgatgacattggccatcttcgcgcatctgtgcgagatgttcattggggtgcgcccatctcttcggctgttccggtggttcttcaccgtgcagtcggtgtcgccgccatcggtagttggtggctgctacttccagccacgggggtcggtgctgaaccgctacatcccctgcgccctccgcaagaagtgggacgactggaagagcgactgccagcccccggcgcaggccaccaactggcgggcgccggtagatctgggagatggctatgacgccgtcctcgaccgcctggcgggcctgcgatcccaggggctcacaggggccatggtgtacggcgactacctccgtcgccggatcgcgccgctccagcggcgcgcctggggcgcctgggagtacaccgggtccgaagactacatgaggacccaccaagaagtcagatgggactgggctcctgaggacttcaagatagtggtccaacgggtgctgaatctcagctccgtggaggcgtcccttattccccaaggagtcctccccctttgcaacgatccagaccgcgcctccatcctggccatcatgcaggtggtcggggcgtcggaggagcgggctcctcgaggccacgatggcgcaggcgggagccgcaggggggaacaatctaccccgggagggggtcgtgcttctgggcctcgtgacgggggcccggggagcagccgccctgccgacgcccgggggaagaggaagcagggaggaacccttcccccatctcctccccgagggggcggggcggcgcgtgccagcaacaggcgcccggagggggccacgctgacgcccagcccgagggggagcgcaagaagaagcggctccgcaagatgggggagacagaaccatctcggggaaacctcatttcccctccaaggtggtcgtttaaccgaccccctcgcaggccagtctgaggccgaggatccggcggccgcagaggcacagaggcgggaatctgaccggcgagaagccacggatcgcctacgggaagccgaggaggccgcccgggaggccgctcgggctcgccaggccaaggaaaccgctcgggaggaggccgctcaggctcgccaggccgaggaaaccgctcgggaggaagccggatttcgccaggacgaggcgattgcgacttccgaggcagctcgcgacgaggccgcgggcgcgtcgcttgggcccactccctcgggcgacgctcaggcgacaacttccggggcagctggcgacgaggttgcgggcgcatcgcttcggcccactccctcgggcgacgctcaggcgacaacttccggggcagctggcgacgaggttgcgggcgcatcgcttgggcccaccccctcgggcgacgcccaggaccaaccaggtccgggggacatccccgagtctggcacgtccatcggcgggccgagccgcatggcatcctctccaaggcagctcttccccacgtcttctatcgccccgctgagcgcagagccccttctgcaggccttggccgccgcaaacaccgcggtgttggacgggtcaagtgcccaggtggaggccctgcaagcagagcggacggagctcgacaccgcatgggcgcgtgtcgaggaggggcggcgctcagtggaggccatggtggaggtgggccgcaaggcacaccgccggcacgtctcggagcttgaagcccgtaagaaggtgttggcggaaatcgccaaggaagtggaggaggagcggggggctgccctcattgccaccaccgtgatgaacgaggcgcaggacaccctccgccttcaatacgggagctgggaggcggagctagggaagaagctcggcgccgcccagggggtgcttgacgctgccgctgcccgagaacagcgggcggcggagaccgaagcggcgtcccggcggcgcgaagaggcccttgaggcgcgcgccatggcgctggaagagcgcgcctgcgtcatggagagggatctggcggaccgcgaggccgccgtcaccatccgggaggcaacgctggcggcgcacgagtccgcctgtgccgaagaggagtccgcactccgcctccgcgaggacgcgctcaccgagcgggagcgagctctcgaggaggccgaggccgcggcgcaacggctggcggacagcctgtccctccgcgaggcagcgcaggaggaccaggcgcgtcgtaatctggaatgtgtccgcgccgagagggccgcactgaatgagcgggccgctgaactcgaggcgcgggagaaggagctggacgcgagggcgcgcagcggcggggcggctgcgggcgaaaacgacttagccgcccgcctcgcagctgccgaacacaccatcgccgatctgcagggcgcgctagactcgtccgccggggaggtcgaggccctccgcttggcaggcgaggtagggcccggcatgctttgggacgccgtctcccgcctagatcgcgccggtcggcaggtgggcctctggagagggcggaccgtaaagtacgccgccaaccagggaggcctcgcccagcgcctcttgaagatggccggggctctccagcggctccccgaggagctcgagaagacaattaagtcatcctcgagggacctcgcccaaggagcggtggagctcgtactggcgagttaccaggccagggaccccaatttctccccatggatggcgctggatgagttccctcctgggaccgaggacagcgcgcgcgcgcaggtccgggatgccgccgaccatatcgtccacagcttcgagggctcggcccctcggctcgcgttcgcccccaactccgacgaggagggcgatgccggtggtgcagacgacagtgacgacgaggccggcgacccgggcgcatcggattga

SEQ ID NO: 79993 - DNA, 798 bp, Oryza sativa
  Clone ID: PAT_MRT4530_79661C.1
agctgtgcaactgctggcatatgagtagatcacactgatagagatcagatgacttgacaaactcaatgatgctgcaacagcttcttcctttgcatcaccgattgcatcagcgtcatcggccgatccatcgaaggtggcaaggtacttattcagaaagttgaagtactccttgttcatgcctttctggtccttgaggatcctagcggcagcgaggaacaggtccctctgctccaccttgccaatgccccaatcgctgatgaagctgtcgatgttcttaaaagtagggataatgcagtcggcagccttcccagcggcggcgaggtcgagtgccttcttgtagacgaaggccttggcataggggctcccgagcagattgtacaagctgaagagaactttgaggcgcagggccggtttgtcttggggctggtgggtgagcttggcgcagatgagttcggcgatctgcagggcctcgtcttgggatcgggccttggtgacgaggttgcagatgatagcgaggatgcactcgagatctttgtccttgtcggggaggcgcgtggattggaggaggaggtcggcggaggcgagcatgagggaggccatgtcgagccagcgggcggcgaggatgtgctgctgcgcctcgacgcagagacgggtgacctccggctcggcgacgtcggcgccggcgtccgcccaggccagctcggcggtgaagcgcaccacggccagcatcggctcctcctccgtcgtgttcacgatcgtcgccatcttcttctcctctctttctcacgcgcacaagac

SEQ ID NO: 79994 - DNA, 2739 bp, Oryza sativa
  Clone ID: PAT_MRT4530_79662C.1
atggcacggggctccgcaccgctcgagggtagcgtgctgccgccttcccgcatcgtgagcgagaggcaggccgggctgccgcgccgattcatgccggaatctgccaccggccgggaggtggtcgcgttgggcgagggacgcccggcgccgcactacccggggcggtccgtcttcttcctctctttcgcaatggcggggctggtcccgccattctctatttttttcatggatattctggagttttatgatctccagatggcgcacctcacccccaacgcgataatgacgttggccatcttcgcgcacctgtgcgagatgtttatcggggtgcgcccatctctccggctattccggtggttcttcaccgtacagctggtgtcgccgccgacggtagtcggtggctgctacttccagccgcgggggcaggtgctgaaccgctacattccctgcgtccttcgcaaaaagtgggacgactggaagagcgactggttctacacccccctcgccgacgaagcacgcctccgacttccgagccagcctccggcgcaggcctccagctggcgggcggcggtagatctgggagacggctacgacgccgttcttgaccgcctggcgggtctgcgatcccaggggctcacgggggccatggtgttcggtgactaccttcgtcgccggatcgcgccgctccagcggcgcgcccggggcgcctgggagtacaccgggcccgaggacatcatgaggacccaccagggacgcaaatgggactgggaccctgaggacttcaggatggtggtccaacgggtgctgaatctcagctccgtggaggcatccctcatcccccaaggggtccttcccctctgctgcgatccagagcgcgccaacatcctgaccatcatgcaggagtttggccggtctgaggccgaggagacggcgaccgcggaggtccggaggcaggaagctgaccggcgagaagccgcggaccgcctccgggaagccgaggaggctgcccaggaggccgtccgggttcgccaggctgaggaggccgctcgggaggaggccagactccgccgggccggggagtccgtccgggagacagaggcggcgtgcgcacgccaggcggcctgccaaacccccgacccgactccgcccgaggtgacgacaacttccgaggccacccacgacgaggccgcgggcgcgccgctcgggcccgacccctcgggcgacacttgggacgagccagcttcgaaggacgcccccgagtccggcacgtcgattggcgggccgagccgcgcagcgcccacaccgaggcggctctcccctctgtcttccgctgccccactgagcgcggagcccttcctgcaggccttggccgccgcgaacagcacggtgctggacgggttaagtgcccagatggaggccctgcaggcggagcgggcggagctcgacacggcgtgggcgcgcgtcgaggaggggcggcgctcggtggaggccatggtggaggcgggccgcaaggcgcaccgccggcacacctcacagctcgaggcccgtcgtagggagctggcggagatcgctagggaggtggaggaggagcgggagactgccctcatcgccaccgccatgctcgacgaggcgcgggtcgacctccgcctccaatacgggagccgggtagcggagcttgaggagaagctcgacgccgcccggggagtcctcgacgccgccactgcccgggagcggcgggcggcggagaacgaagcggtgtcccgccagcgcgaagaggcccttgaggttcgcgccacggcgctggaggagcgtgcccgcgccctggatgcgaaggagagagacctggcggaccgcgaggccgccgtcgccacccgggaggcaacactggcggctcacgaggccgcctgcgccgaagaggagtccgcactccgcctccgcgaggacgcgctcaccgaacgggagcgagctctcgaggaggccgaggccgcggcgcagcagctggcggacagcctgttcctccgcgaggcagcgcgggaggagcaggcgtgccgcaatctggaaggcgcccgcgccgagagggccgcactggatcagcgggcccctgagctcgaggcgcgggcgaaggagctggacgggagagtgcacagcggcggggcggccgcgggacacggcgacctagtcgcccgcctcgcagccgccgaacacaccatcgccgagctgcagggcgcgctggactcgtccgccggggaggtcgaggccctccgcttggcgagcgaagtagggcccggcatgcttcgggacgccgtctcccgtctagaccgcgccgggcggcaggcgggcctctggggcgggcggcacgcgaagtacgccgccaaccaggggggcctcgcccagcgcctcttagagatgaccggggccctcgagcggctccccgaggagctcgaggagacgatcaagtcatcctcgagggaccttgcccggggggcggtggagctcgtactggcaagctaccaggccagggaccctgacttctccccgtgggcagcgctggaagagttccctcccggaaccgaggacggcgcgcgcgcgcaggtccgggacgccaccgaccacatcgtctacagcttcaagggtacggcccctcggcttgcgttcgcgctcgactccgacgaggagggcggtgacgacggtgcggacgacagcgacgacgaggccgacgacccgagcgcgtcggagtga

SEQ ID NO: 79995 - DNA, 1762 bp, Oryza sativa
  Clone ID: PAT_MRT4530_79663C.1
ggatccccgggctgcaggaattcggcacgagggagagaggcacggggctagtctcgagtttttttttttttttttttttttttgtttctaagcggtaatacattaactcatcaatccgttatgaaggaaaattgccacaatagatctgccattctgttggaactctttagtaatcgactgattggtacttgtgtaacaaccgacttttaagcaccgctatgactacaaaaacaatgagattgcttagcatgccatagcaatccagatccagccacaaggtcatgggatcaaagtaattcacattacaagtaatctcatacaaaaggattgctcatctactcaaagttgaaactataatttcaattcaggaacccctctccatcaacggatcatcaagccttggatcccctgtgatccatcatcagtcaccttgtttgcttgtattgtgttaatagcactagcaatgtttcccctccaaactccaagctttgaacgtaaactctgccactgtggcatcccaaatatcctctcagtatgccgactgacaatgataacctggttaagctggtcaactttgcaatccaatatcttgcatgaaatagctttcacaatccaatactccacttcatcatcattgatcttaagtgcatctatgattgcatggtaagggatctccccagcacaacggctgctgaggtcaagcagggacatcagtctcatttttgttatgcaatcctcatgaaccagtccataacctttcagcaaggcagaattagctgactgaaactctaaataggaatcaagcctctgagtaaggaatatcttcaagagctcataaaccagctgatacttttcgtctttttccagctgtgcaactgctggcatattgagtagatcacactgatagagatcagatgacttgacaaactcaatgattgctgcaacagcttcttcctttgcatcaccgattgcatcagcgtcatcggccgatccatcgaaggtggcaaggtacttattcagaaagttgaagtactccttgttcatgcctttctggtccttgaggatcctagcggcagcgaggaacaggtccctctgctccaccttgccaatgccccaatcgctgatgaagctgtcgatgttcttaaaagtagggataatgcagtcggcagccttcccagcggcggcgaggtcgagtgccttcttgtagacgaaggccttggcataggggctcccgagcagattgtacaagctgaagagactgccttgtgtggggcgcatacaatggaagcaaagcattgtgacaaatccaataactttgaggcgcagggccggtttgtcttggggctggtgggtgagcttggcgcagatgagttcggcgatctgcagggcctcgtcttgggatcgggccttggtgacgaggttgcagatgatagcgaggatgcactcgagatctttgtccttgtcggggaggcgcgtggattggaggaggaggtcggcggaggcgagcatgagggaggccatgtcgagccagcgggcggcgaggatgtgctgctgcgcctcgacgcagagacgggtgacctccggctcggcgacgtcggcgccggcgtccgcccaggccagctcggcggtgaagcgcaccacggccagcatcggctcctcctccgtcgtgttcacgatcgtcgccatcttcttctcctctctttctcacgcgcacaagacgccgccgccgccggagaggagatgggaggatgcaagagaagag

SEQ ID NO: 79996 - DNA, 465 bp, Oryza sativa
  Clone ID: PAT_MRT4530_79664C.1
ccgggggggctgaacctgcagcacagcatcgagtactggctcacgctggacctgctggcctccgagcagggcgcgcccatggccgcggtggcggtggcaacgtgtgacgacaccgtcggggagtgcgacttggacgatgaggaggaggtggagcagatggcgttgatgggggcggccggcgccgccgccggggagaccggttgtcgcacgttgcagcggaggctgctcgattacctcgccgcgcgccccgagtggcggaggtccggcgggagggaccacgtcgtgctcgcgcaccaccccaacgggatgctcgacgcgcgctacaagctctggccatgcgtcttcgtgctctgcgacttcgggaggtacccgcccagcgtcgttggcctcgacaaggacgtcatcgcgccgtaccggcacgtcgtccccaacttcgctggccaacgactccgccggctacgatga

SEQ ID NO: 79997 - DNA, 195 bp, Oryza sativa
  Clone ID: PAT_MRT4530_79665C.1
acgaccacgcgtaggaccacgcgtacgccaatagaagaagagggagagcagcatggacactccactagtagaagccgagcgaccggcttatctatccatatcttccggtcgagttcatgggtgatctgtgtcgttctccaccttctcctgacaggttctaggtgtagcttgccactttcaacagcaaagtgtcat

SEQ ID NO: 79998 - DNA, 393 bp, Oryza sativa
  Clone ID: PAT_MRT4530_79666C.1
atggcgtggctgccgttcgatggccggccgcacatcgggctcgtcgtctacgacgacgcgcgcaacacggcggtcctggtgcgccgaggagggttcacggccggctcgctgccgctaccgttgccagcggcgcaggccgcggcggcggaggaggagggagtcgtcgtcggcggcggtggtggcggcggcggcgcgcgcgtccgctactgccactgcggcgtggagagccgggagaaggaggtgcggaggccggggccgacgcaggggcggcacttcttcggctgcggcaggtggacggcggcgagaggggcggcgtgcgattactatgtgtgggacgaggccgcgccgtcgacttttggtctcaactctcaaccaagtccaccacgtgaatag

SEQ ID NO: 79999 - DNA, 2949 bp, Oryza sativa
  Clone ID: PAT_MRT4530_79667C.1
atggctgagctggtgaccagcatggtgatcgggccgctggtgtcaatggtgaaggagaaggcctccagctaccttcgggacaagtacaaggtgatggaaggcatggaggagcagcatgagatcctcaagcgcaagctgccagctatccttgatgttatcaccgatgctgaggagcaggcatcccaccgagaaggagcaaaagcctggcttgaggcactcaagaaggtggcctatgaggctaacgacatcttcgatgagttcaagtacgaggcactccgccgtgaagccaagaagaatgggcactatagagaacttggcatgaatgcggtaaaactctttcctacccataaccgtatcgtgtttcgttataggatgggcaacaaacttcgcaggatagttcagttcattgaggtccttgtggctgaaatgaatgcttttggcttcaaatatcagcggcaagcattggcttccaagcaatggaggcaaacagattccatcattgattactctgagaaagatattgtggaaagatccagagcggcagagaagcaaaagattgtgaaagcattgcttgaaaatgatgatataatggtgcttccaatagttggaatgggtggcctaggaaagactacttttgcaaagcttatatacaatgaaccaaaaatccaggagaatttccagctgaaaagatgggtgtgtgtatctgatgagtttgatcttggtgaaatcgcaagcaagattaccatgactacaaatgataaagattgtgacaaggcacttcagaagctcaagcaagaagtttgtggaaagaggtacctcctggtgcttgatgatgtgtggaatcgtgatgctgataagtgggcaaaactgaagacatgtcttgtgcagggtggtgctggcagtgcaatactaacaacaactcgtctcacagaagttgctcgaactatgggatcagttcaagcacacaacctcacaactttggagaaaagctttctaagggaaataatcgaaagaagagcattcaatttgcagaaggaaaaacccagtgagcttgttgatatggttgacaaatttgtggatagatgtgttggctctcctttagctgcaagagctctaggttctgtactaagcaatagaaccactcctgaagaatggagtactttattgagaaaaagcgtcatctgtgatgacgatagtgagatcctaccaattctcaaacttagctatgaggacttgccttcacaaatgaagcaatgctttgccttctgtgctgtatttccaaaagattatgagattgacgtggaaatgttggtaaagttatggatggcaaatgacttcattccttctaaggatggagtttgcctagaaaaaattggccacagtattttcaatgagctggctcgaaggtcattctttcaggacgtggaggaaaccttaatgtccaagtactctttagaatataacctttgccgatttaggaagatgtgcaagatccatgatctcatgcatgacattgctttgcatgtcatgagagaagaatgcatcacagtaacaggcacgcctaattcgacgcggttgaaagattcttctcgccatctgtttttatcatatgatagaacaaacacgcttttggatgcttttttcgagaaaagaactcctctgcagacagtgctgctcgatactattcgattagatagcttgccaccacatttattgaaatacaactctctacgagcattatactgccgttgttttatgggaacaaatctaatccaaccaaagcatctacatcatctaaggtatctcaatcttacttatagccagaatatggtaagacttcctgaggaaataagtatattatataatctacaaacgttggatctttctgcttgctggccgcttcgttgtcttccaaagaatatgaagtatatgactagcctccgacacctctacactcatggatgtgaacaattggagtgcatgcctccagaactgagaaaactaactgcactgcagacacttacatattttgttgtgggtaatgtctcagattctagcaatattggagagctccagaaattgaagcttggaggtgagctggatatatgcaacctagaaaattcaaatgaggaacaagcaaatggagccaatatcgaagaaaaggtggatctcacccatctgtctttcaaatggagtagtgacataaaaaaggaaccagaccattatgagaatgttctaggcgctcttaggcctcctgctaagctacaattactaaaggtacggtcctacaaaggagccaaatttccagcgtggatgacagataacagtacattgaggcacttaacagagctccatttagttgattgcccattgtgcatggaatttcctgaattctggcagctacatgcccttcaagttctgtatctaataggattggataatttgcaatgcctatgtagtggtgctaggtttcgcgatctcccgtcatcgctccagtcattggcactgtttaactgtcctaaggttcagtttctatcagggaagctggatgcactgacatgtctagctatttctggatgcgagactttgaggtccttggaatcatgcctgggggacttgccgtcgttgacaacactcatgattgaaagatgcaaaagcctaacatccttgccggatggtcctagagcttactcctccttggagagtcttgaaatcaagtactgcccagctatgaagtcacttcctggatgcctcaagcaacgtcttgatagcgttgaggagaaactcttgtcacatatgcgctccagcgatccacgggaaggaagtatgggctatggtaatcactcgtcttaccaggagctggtgctaaattgctggaaccaaaatcttggaaatatgtcattcgtcggaacagagatttgtgatccaacactattgatgaggccatga

SEQ ID NO: 80000 - DNA, 1784 bp, Oryza sativa
  Clone ID: PAT_MRT4530_79668C.1
ccttttatatctgcagctaccggcacgaggcagggggggagaactgatcgcgatgtatttttttattttttttttttttttttttatcccgtataaaggcaatatatcctgtattaaggattccagtcaatgtagcctcatcatacttacacaccacatgccgcactcaaatctttaacaaatgaatagctaatatagacagaacgtgtatggttttccctctgaaattcctagttgaccaatctagccaaaatgtggttcactgctctcctaattctagcctctcttaacagttccagttagacagaatcgtgtcttgcctgtggtgaccaagctttcaacactcagcattacaccatcagattcatcctttcaactgaaaatgccataccaccagtatgcggtggtcaatgaatgatccaacatggtgttctcatacaatcgcagttagccaactcaattagaccactaattcttctatttggctcgttgagtcagtctgattagtggatttcacttcttcgatatcttcttcaccctctacactctgaaattggctctccagaacctcatatatgttgtccggagggcatttgtctgcacggttccttggattcggttggcagaagcactcaggccatgagtttgtgtagaaagattctggatggacacgcttgtgggggccaccaaaatatgtgttgaacataacctgcctgactcgctcctcaaagcgagcggcgcgaccttcctccctgtccatgaatatgggagctagggccttccgcgtcggggcgacggttgtccggaaaccatagtataggcggtggcccattaggttgtttgcaaagttgctcgggccatcatatgtaggaataaaaatgtctgacaggagacagaccatgtaatccactgcagaacccgcgagccctcttgtattttcttccagctttccaggaccaacagtgctgtggtcttctaaagcgtggaaacatagcctttagatggcgtcatgaatcggttcccaccgaagagatcgccagaagcaaggtagattcttgttttatggtcaaatcccatggatcgaagaataagacctacctcttctggagttaaagggcacttcccgatgagccttctttccctataaataagttccttttctgcaaaatgttccttgcggtacttgatcagaattttctgttcttgaggtgtgaatatatcaatgcacccagcaaatgcaagcatatccatctcaaatcgaaggtgaattgacatgaaatggccttctgtacggagcttattgactatctcactgcttgttttcattatgtgaggcttgaatcgtagtgcatggtaattcaccctgcatctcaatctctggagctctggatcatcaatgtcttctgccaggcggtgtgaaaatggggttaaatatatagctccatacttcttcatcttctccaaagcaactgttgtataccacgtaactggtgcatctcgaggcggtcgaatctgatgggctttcagcttcttggtctttccatttgtagtaatttctggaatgaccatagcaattcgaacatcatactttaatgtcttgatgaagtggagcacatcataaatacctaaaaaaccactctcatcatataagaaagaatttgtgtccagctcgatctccctggcagcactagtgtagcattcattattcgtgcagcaacaacagcattacatatcgcactacgttgttggttcaagccaccattgcaccggacacgtaagtaacc

SEQ ID NO: 80001 - DNA, 249 bp, Oryza sativa
  Clone ID: PAT_MRT4530_79669C.1
atggaggtcggcgtgaggtcagatgtgacgggttttataaatggtgtggaggcggtggaggttgggtgcggcggcgacggtctccgggaactaggcacaccggcgaagccgaggccgacgacggggtctaggagcgccggtggtgaactccaaaccactcacaaccggcgccgggcctcctccacaatcttctcggagaggtcaccgggcaacacctctacaagccgtctaagaggcggcaacctctaa

SEQ ID NO: 80002 - DNA, 123 bp, Oryza sativa
  Clone ID: PAT_MRT4530_7966C.1
ttaatcttgtctgtgcaaagaatctaaagagggacagtttcattcacagtgcggggtgtcaaagcaatcaggtctgcgcagcactttatattcattgagaaccagttttttattgtgtttatc

SEQ ID NO: 80003 - DNA, 4423 bp, Oryza sativa
  Clone ID: PAT_MRT4530_79670C.1
gttcccccgggctgctcgttctttttttttggtgtttctgtcttttcttctggtcaaccgcgccggttctcttcagttctgctgcggcgtgcgaggcgaagagggcctatgttttccctgttttctgctcaggcaaatggatggccatcggcaagggttcactcgcaagatgtaccatagccttctgaatcattccgttttccatcgacttgatgcagaaccacacaagcaccaccaaagcaactcttctttttctcctttggatccagctcagtttctcatgctccaggagagcagggctgcctggcttgctgacacgcgccttgcgaacggcttcttggatctgcctctcgtgctccttgagcatgtcctcaacgttccctcctggcggcatcaatggccctgagtggtggatccttctgtacttcctcccatggttcatgccgtccttgacttctgggttcttgttctcatcatgcctgtctggtgagtcgttatgatcagtagcttcaacagtgctcctcaaatcggtcgcaccaaactgtggtatgagcgagtgtgatgaccccttcttccttatgccacaaggattcgcgacgcgcactgagcagcaagcgcggccaggtactgttggctggtcattgtcgccctccatgttgttccatgtggaactgtacccagggagctgcaccgcagttggacgttcccgtggttccaccctaaaccctggaacactgtcctcttggttgaacacctcgctgttgctctttgagctggtgtgtgtttgttgctgcatttcaccattaacaccactaatagtacgattcgttacacgattgtcattttctggcctgacagattcagctccttgtccggcaagagctgcggttttttgcctcctggcttcctcttgcctcagtctaacatcatactccttgcttggtggaagttttggcaggcttgatgggtcgcatgcaaatggctcttttgtgaaaaaatcactttgaagagctgaggcagctgttcctcgagcttctgggtctaatgaaagcaaggagtctatgagaacaacagctgaagtaggaaaaactttgaaagtctcagcaacacaccgcctatactgatgctgaggcttgaacattgctgtctctggcacttttgatttcttgcaataatcatccatgggtgacccacagagcttaaaaatcttgtgaatttgctccacctcagttcttcctggcatgattggttttccagcaaagagttctgccacaatgcaccctgtgctccacatatcaacagccacaccatattctgttgcaccgagcaaaagttctggtggtctgtaccacaatgtcacaacacggcttgtcagcggttgtggattcttgggatcataagatattgccagtccaaagtcggcaattttcagcactccattgttatcaatcaaaaggtttgagcctttgatgtctctatgaagaactccatttttgtggcaatgatcaaggccatgaagcagctgctgaacgaagcactttatctgtggctcagagagcttgaggccaggagttgcaatgagaccagaaaggtcatgttccatgtattcgaagacaagatacaggctttgcgatacgcgagatgttacaatcccttgaagctttatgacatttggatgatccagtgtcctaaggattttgatttctctagccataaagcgcacgctctcagggtccatgttgacaaaccgcaccttttttagtgcaacaatgtttcctgtttcaagatcccgagctttgtatacaatactataagttccctgtccaatcttgtctaatttctcaaatgaatcggctcgccgaggcacccagccttctactgcttttggtgccacatttgcgagccaagcaggccacccagcagctacatgctcacctgagagccccttcagttctgcattgttaccactaccggtcctaacatctagagctacgatcgccttctctccatcacccaattgcaatttacttgcattttctttcagctgtccatcaatcacagctgagttgccatcatttgtaccggttgctgtcttagcacttgctgcagcagaattcctcgatggtgttttgttctcagaagtggcatcggtatcatcttttgcgcctttggagcaaaggcagcccataagcacataagatgccttcttgaatgagtggatcaaattgagaccaattttgacagagtttcttccaaatatcttggggaggaggcatgagtacgcaaatttcagcttggtgtgaaggcacattccaaaagcaagaacaaagaatctagtattaatctgtttttcccgatgtgcttcagaagtcctgtctgcagcagtgagaagccgtataatgcagtcaaaattatgttcagacgcttccagattgtattcttgcaccatggagttgaaaatctgaagagcttcatcatgcaaccctgccgcttcacagattctcagcaacacatcaaaggtgccattatttggaacaaacctgtttgacagcatccaagcaaagagttccagtgcctccttgtgtctctggttgattgcgtaagcttctattatggcagtgcaagtaagggatcccttggactcaatccggttgaaaacccgttgcgctgccttgaggtctccacatgtgccatacatgctaactagccctgctgcaactagggggagaggttccatccgcaactttaacgcttgaccatgcaattccttgccaagttttgatgccccaatgtcacggcaggcactcaacatcctgctgattgcaacagcatcaggccggcggtttgagagcagcattgatctgaacacatcaacagcagttgaaggatcaccattctttaggtacgcatcgaccaatgctgtccaagcttgtacagtcttcttgtccatgacatggaacacccgttgagagtaatccgagtgactgcacgtaccatacatagtgatcagtgaagtgcacaaggaaatatttggcaggaaccacctccgcaaggcatatgcgtgaagctctttcccttccctcaatgctttcaacttcgtacatactgggagcacagtccccacggctataagatccggtctgattccttcttgttgcatccaaagtatgcacctcagcgcctggtcaggcctgccattggatgcatagccagacatcagtgccgtccatgagacaacattcctcttcttagcgctatagaacacccgtctcccagagaccatatcgccacacttgcagtacatatctaccaaccctgcctgaatgtttccaacatccttacgatgttggaacttcttcagcacaaaaccatggatctccctacccaagttccaggcacgcaactcgccgatgacaggcacaactgacgtaagcaccacagagttcaccttgatcccatcctccaccatccaccggaaatgctccagcgcctccctcttcatccccttatgcgcaaacccggcaatcactgcaccccacgcaaccacatccctctctggcatttcctcgaacaccataaccgcaggcttcaccttcccgcacttgaagtacacgtccatgagccccgtcatgagcatcctgggagcgcccgcgtaggcgttcttgatcagcatcgcgtgcgtggcggtggccatggccatggacggcgcggcgctcccggagatggacttgaggacgcagccatacgtgtactcgttggcgtcggcgcccgcggcgcgcatctctgcgaacccatccacgacggcggcgcccgcctggccgcgtccccggcgcacgtgcccgtggaggagcgcgttccacgagaaggagctcgcccggggcaacccgtcgagcaccttgcgcgcgtcctcccgggcgccgagcgcgaggtagagctcgacgagcctggcgagcaggaactcgttggagtcgaggccgtggacgcggaggtgcgcgtggacctggcgcgcgtgggcgagcgaccggcacgcggtgagcagcgcggcgaaggccgaggccgtggcggggacaccgcggtgggagaggtggtcgaggagggcgagcgcggaggggagcctcccgacgcgcgccagcctccggagctccgcggacagcgcgggcgcgttcttggagtccggccggagctccgcctgcgacgtcgaagcgccccgcgcggccgcggcggcgccggcgtggagcgcgcgggagaggggcgtcgcgcgggtgaggggcttggggcaggagagcggcttggaggggaggagggggtggtttgcggcggcgagggaggaggacgccatcgccatggatggtggggcggaggttttcgggagggaaggagaaggggttaacggttgggaaggatggtggttgttgacgacaga

SEQ ID NO: 80004 - DNA, 1288 bp, Oryza sativa
  unsure (1)..(1288): unsure at all n locations
  Clone ID: PAT_MRT4530_79671C.1
tttttccnnnnnggngggggggcnttttgggccnngggcccccccaantttttttcccgggngnaaaaaaccnggaaaaggcccccngaacagggnggtttccnngngttccccccctccttncccccctttncccttaacaattaccccccccctttnccccntttttaatnaatttcccccctttccccccccntcccccngggtcccaaantttnttncccccnggggcccgggaccccccgggnggggaaaagtncccttttgggnaaaaggngggnaaaggcgggngggnaaacccaaanggncccggggaaaaggnccccccctaaggggncccggcnaaaaggggggggggnaaaaggggggnttttggnggggggggggggcccnaannaaattttcccccccgaaanggncccaagagaaaaaggacccngggcccccccanaangnccnaatttggcccnnttttccgggncaaaaccncccccccntttttccccttttgggnccccccngggggggnccnggnnaaaatttggncccngnnccccttttccccccntttggggggggnccccccctttttttnaaanaaaacccttttgnntgggngccncnnngggggggggggttttccccgggnttttggggcccccccntttccccccccgggggggggccgggnncccccccngggnatttttttnatttccctttnttttttnggggnaaaaananggnaaaaaaaaaaaattttttttnaaattttaaaaagnctttttggnnccttntccccaaaaaantttaantgnncnctttattaaagggggccttttcaaattttcnctttgnccccnttttccccttcggggggnttaaaattcaattttcnnanccctttgnccccattttgggtttttttttttcngcannttttgggnaaaattttttttttttttttttctttaacccccccatttnacccnnnggggnnaaaaattttttttttttttccccaannggggnttccccccctttttttnaaatttttttngggggntttttcccnttttttaaaacccggggnnccncgngnttttttttttttttttnttngggggggnngaaaaaattttccccngggnttttttttttccccccnccccnntttttttcncccgggaaaaaaaaanttttttttccccccccccccnaaaaaangggggggggnnaaaaaaaaaaaaccccccccccccccngaaaaaaantttttttntccaag

SEQ ID NO: 80005 - DNA, 782 bp, Oryza sativa
  Clone ID: PAT_MRT4530_79672C.1
cttctgtcgtccgtcaaaaaacgggagaaaaaaaccgagcgaaaaaaagaaaagtccgataaaaaaacctggcgaaaaaaaaacgggcggaaaaaaaacaaatatgtccgacaaaaaaaaaggaaaaaaaaggaaaaaataccgaaacgaatccgactacatcgacgcggtaaaaagagtttaaaaaaataaaaagaaaactgtcctattccaaagaaaaatgaattatatgtatcgtggagaaaaaaaaaagtccgataaaaaaaacctgggcggaaaaaaaccgggtggaaaaaaaacaaatctgtccgacaaaaaagaaagcaaaaaaaggaaaaaaatcgaaaaaaaaacgtaaaaaaggcaaaaaaaaaaagaagcgccccaaaaaatcatctgattcctattcctatcgtaccataaaatttaaaaaaagggcagaaaaatgcaaaaaaaaaagaggcgcagcaaaaaaaaaaaaaagagagaacaaaagcagaaaggtgcataaaaagaaaaaggaaagctgaaaaaaaaaaaagaaaaacaacaacaacaaaagttccgtttcccctatgtggcaaaaaaaaaagcgtaatccgaacgaaaaaaaatctgattcctataaaaggcaaaaaaaaagtgaaaaaaaatactagattcgattccgttaaaaacaggaaaaaaagtcagattactataaaggcgaaaaaaaacagaaaaaaaatctaaaaaattttgtccgattccataagaaagtggcgaaaaaaatggttcgtaaa

SEQ ID NO: 80006 - DNA, 1938 bp, Oryza sativa
  Clone ID: PAT_MRT4530_79673C.1
atggcggctgcagcggtggctgacgaaaatgggtcgcccaagaagacgaagcagggtggcttcaagacattgccattcatactagtgcaagtactgcatctcaagtgttcgattcgtgttctaagagtacactactccgtcaatgcagcgaacgaggtgtgcgacaggttcgccacggccggattcaacgcgaacatgatcacgtacctgacacagcagctgcacctgccgctggtggaggcctcgaacctcctcaccaacttcaccggcacggcggcgttcaccccggtgctgggcgcgatcgccgccgactccttcgccggccgcttctggaccatcgccggcggcggcgtgctgtaccagatcggcatgctcggcctcgtcgtgtccgctctcgtccctgccctccgccccgcgccgtgcggcggcggcggcgccgcggccccgtgccagcgcgcggacggcgggcagctcgccatgctgtacctgtcgctgctctgcaccgcgctcgggtccggcggcatccggccgtgcgtggtggcgttcggcgccgaccagttcggcctcggcgggaggcgccccggcggcgagcagaagtggagctacttcaacctctacttcttcagcatggggctcgccgtgctgctcgccctgacggtggtggtgtacatccaggagaccgtggggtgggggtgggggttcgggatcccggccatcgccatgttcgtctccgtgctgtccttcgtcgtcgggtacccgctctacgtgaaggtgaagcccgaagggagccccttcaagcggcttgtgcaggtcgtcgtcgccgcgttcaagaagatcaaggagcccgtgccggacgacgccggcgagctctaccacaacaaggagctggacgccgccatcgccgccgacgggaggctgctccactccgaccagctcaggcaagcattttcaatgcatcgatctctgtgtccttttacatgtggttcgttgtttattttgacgcaattcaacgtgttcttggatcgagcggcgatcgtgacggcgggggacatcgccggctccggcgagccgaacctgtggcgggtgtcgacggtgcaccgcgtggaggagctcaagtccatcgtccgcatgctgccgctgtgggcggccagcatcaccgccatcgccgccgggtcgcacaacttcaccttcgccatccagcaggcgcgcaccatggaccgccacctcgcgccgagcttccagatcccgccggcgaccatgatcatcttcaccacgctgaccatgctcgtcagcctcgcgctctacgaccgcgtcctcgtccccgtggcgcgccgctacaccggccggcggtcgggcatcacctacttccagcgcatgggcgccggcttcgcggtcgccgcgctgggcgtcctcgccggcgcgctcgtcgaggccaagcggcgcgccgcggcggccgagcacggcctgctcgacgcccccggcgccgtcgtgccggtcagcgtgttctggcttgtcccgcagtacgcgctccacggcgtgggcgacgcgctcgccacggtggggcacatggagttcctctacgaccagtcgccggagagcatgcggagctcggcggcggcgctgttctgggtcgccggctccctcggcaactacctgggcacggtgctggtcacggtggtgcagagcgccagcagaggggagtggctccaggacaacatcaacagggggaggctggactactactactggctcgtcaccttcctcttggtgctcaacctcgcctactacttcgtttgcttccatttttacaccttgaagtcgttcgaggtggacgccggagacgaggcgcaacggcggcgagatgttgccgggagtgcagaaggagagactgagctctctgctggttgtgttgttgcgtcaagaaatggggtgttgtaa

SEQ ID NO: 80007 - DNA, 794 bp, Oryza sativa
  Clone ID: PAT_MRT4530_79674C.1
aagtccgactgtaaaaaaaaaaaggccagcgcgaaaaaaaataggaagggtgaaaaaaagggcggcgagaaaaaaaaaagcggcaaaaaaagaccgattccgacgcggcaaaaaaaacgtaaaaaaggcaaaaaaaaaaaaaagaagcgccccaaaaaatcatctgattcctattcctatcgtaccataaaatttaaaaaaagggcagaaaaatgcaaaaaaaaaagaggcgcagcaaaaaaaaaaaaaaaaagggcgacaaaaaaccggcgaaaaaaaccaaatgaaaaaaaccgtaactgtccaataaaaaagggaaaaaaaaagtccgattctgtgaaaaagggcgacaaaaaaactgccccaaaaaaacggacgagcgagaaaaaaaaccgtaaatataaaagagagaacaaaagcagaaaggtgcataaaaagaaaaaggaaagctgcaaaaaaaaaaagaaaaacaacaacaacaaaagttccgtttcccctatgtggcaaaaaaaaaaccgtagatccgaacgaaaaaaaatctgattcctataaaaggcaaaaaaaagtgaaaaaaaaaatactagattcgattccgttaaaaacaggaaaaaaagtcggattcctataaaggcgaaaaaaaacagaaaaaaaatctaaaaaagtttgtccgattccataagaaagtggcgaaaaaaaaggttcgtaaaaaataaaacgcttgttcgtataaaataaaaaatgcacacaggaaaaaaatggaaagggcgaaatttctaatcaatatatatctcttc

SEQ ID NO: 80008 - DNA, 905 bp, Oryza sativa
  Clone ID: PAT_MRT4530_79675C.1
aataagagatgcttccatcgtccgtcaaaaaaactggcgaaaaaaaaaccgggcgagcgaggaaaaaaaccaaaacagggcgagcgaggaaaaaaaccgggccaaaaaaaccgtaactgtccggcgaaaaaaataattcgattctgtgaaaaaaatacaaagtgtttccttcgtccgtgtaaaaaaagtccgactgtaaaaaaaaaaaaggccagcgcgaaaaaaaataggaagggtgaaaaaaagggcggcgagaaaaaaaaagcggcaaaaaaagaccgattccgacgcggcaaaaaaaacgtaaaaaaggtaaaaaaaaaaaggccagcgcgaaaaaaaataggaagggtgaaaaaaagggcggcgagaaaaaaaaaagcggcaaaaaaagaccgattccgacgcggcaaaaaaaaacgtaaaaaaggcaaaaaaaaaaaagaagcgccccaaaaaatcatctgattcctattcctatcgtaccataaaatttaaaaaaagggcagaaaaatgcaaaaaaaaaaagaggcgcagcaaaaaaaaaaagaagaaaaaaagggcgacaaaaaaccggcgaaaaaaaccaaatgaaaaaaaccgtaactgtccaataaaaaagggcaaaaaaaagtccgattctgtgaaaaagggcgacaaaaaaaccgccccaaaaaaacggacgagcgagaaaaaaaaccgtaaatgtccgatcccaaaaaaagggcgaaaaaaacaaaagcagaaaggtgcataaaaagaaaaaggaaagctgcaaaaaaaaaagaaaaacaacaacaacaaaagttctgtttcccctatgtggcaaaaaaaaaccgtagatccgaacgaaaaaaaatctgattcctataaaaggcaaaaaaaagtgaaaaaaaatactagat

SEQ ID NO: 80009 - DNA, 672 bp, Oryza sativa
  Clone ID: PAT_MRT4530_79676C.1
atggagaatttttttgagggccgtggttttcaatcagtcgtaaagatgtattatgcagaagagacatttgataaagatgttttgctatggtggcttcatgtggatgacccttgtcagacatgggaagatatgacatttgtgttgcgacgaaaatttgtttattcacttgattctgttagatttaattgggtaattgatccatttaaatcaattaaatcaaataaattccaagattcactggaaaaggttgttgctgctgctatcctacaatctctagctaccaagccaactgatagttctaaagaattccatgaagaagattctcagttattgctaaagggtgcagtgcttgaccagacagttatgcatgagagtgatggtttatctatgatggcatgggaagtacacagtgatgatactcctgttgatgtgaaagggcagcgatctaatatatttcagactgcgtgcaaaattcaagataaggctgaggtgtttgctgctttgaaagtgaagaaaaaggctattgctcctacctcaaagccgaggacggctttacttcaagagggagagaatgatgtgaccgtacgttctaaaattattgcttatgagagctcaggtgagaatgcaattgctcgcacttctgaatgttattggtacttatgggaattttga

SEQ ID NO: 80010 - DNA, 1127 bp, Oryza sativa
  Clone ID: PAT_MRT4530_79677C.1
cgggggcgtgaggggggcctacgggaacacccgccggggcgcgcgcccgagcgtcacggggcccggcaccggggatagcacgacaatccctctcccgtcccgcccgcgaactgcgcatccccgcccgcgcaccgccccattacccacctgttccccatccagagggccgtagtgatcccagctcctgacggcccgtgacctgattcctagagcaccgacacggaaccgaagtccagggtcgccccaggggactttgtgatggggtcgaacgagcagatccaccgggacaagctcatcatcgacacggatcccggcatcgatgatagcatgacaatccttatggcgttcagagctccaactgtggagatcatagggctcacaaccatatttggcaacaccaccacaaagaatgcgactcagaatgcgctcttgctgtgtgagagagcaggacatcctgaggttccagtagcagagggcagcgcagagcctctcaagggaggagagccacgtgttgctgactttgttcatgggtctgatggcctggggaatttgtttcttcctgcacccactagtaagaaggttgatgaaaatgctgctgagttcatggttaataaggtctctcaatttcctggagaagtttctatactcgcattgggacccctgacaaacgtggcgctggccatcaaaagggacccttcctttgcaagtaaggtgaagaaaatagttgtactggggtggtgctttctttgcggctggaaatgtcagcccagctgctgaagcaaatatatattggagatccagaagcagctgacatagtttttacctcaggagcagatgttgacgtggttggcattaacataacaactcaagtctgttttacaggaattttcctccatgatcctgtgagcttcactgccctagttcaccctgagtacttcacgttcaagaagggtgttgtgagagtagaaacccagggcatttgcactggtcacactttaatggaccaaggattgaaaaagtggaattcagagaatccatggtctggctacaagccaatctcagttgcatggacagttgatgtgccaaatgttctcgcattcgtgaaggaactcctcatggctccatga

SEQ ID NO: 80011 - DNA, 459 bp, Oryza sativa
  Clone ID: PAT_MRT4530_79678C.1
atgacagcagcggacggcacagtaaggcgaccgaggggagccgacgactctagcggctggggcggaggagcgtggcagcagcggaggagcgcggaggagttcgggctcgccggagtgtggaggtacccgaagccggcgtcgcaggagatgtgccccgggtggacgcgccgcggtggtgcgcgtgcctcgggtacctacacccgaaacctgcgtcgcggcatggaggaaccgggcggatgtatttccggccgccggccactggatgccaccggcctctcccccacgcccgtcgcgcccctgccgcacctagcgccggccaccaactcgccgccggacgccgcccgcctctccaccacgcccgcggcgcccccgccgcgcctagcgctggccaccaactcgccgctggacgtcgcccgcctctccaccatgcccgccgcgcctagcgtcggccacatctga

SEQ ID NO: 80012 - DNA, 522 bp, Oryza sativa
  unsure (1)..(522): unsure at all n locations
  Clone ID: PAT_MRT4530_79679C.1
cctggttgtcagtttccatgtctggaattttcgtttttggtttcttttatgtttactcgaagagagataaattgttcaggagcaaaaggaaacagttttgactgcacttcagttcacggatactgtttgaatgctcatcttgataccatagtcaggattcagaaaagttgcatccttgcataatacatggagatgtcactggatgcatgaaacgggtgcatcttgttttaaacagatgaattcacttgtacgagatatactggatttccttaggaagcactacttccactagttttgtaagttgcatgtgcccattcactcggtacatactgttgatctagattctggagacatgcatatatgttttctattctngactagcttaattactgtcatacttgctgggtgcataacctatgtgggatcctgtgctcaattgatcatgtgtaatttcgagatgtcatttttctaaacatcccttccaggatattttaactgattcttaagaaaaaaaaaaaaaaa

SEQ ID NO: 80013 - DNA, 593 bp, Oryza sativa
  Clone ID: PAT_MRT4530_7967C.1
ctcaacaatattgtctacaccatctggaatcttgtttaacactagtattgtagaatcagcaatggcagcatacaccagcaagatctttgccctgtttgccttaattgctctttctgcaagtgccactactgcaatcaccactatgcagtatttcccaccaacattagccatgggcaccatggatccgtggacgcactacatgatgcaaacactaagcatgcgtacctccaccgccatggtcctgcgatgcacaaggtgatgatggcggcgaggacggcgatccagttcatccatggcaccgaccagcagacaatcccgcacgtgcggctgaccaagtcccgccacggcaccaaccacgtggccatcttcaccttccaccaagcgtcggtgttcgactcgtctccagagctcggcgacatcaccggcttctacatgatctacgacgagggcgggctccactccgtggacgtcaacgccaagttcatcacggcaagccggcgctcatccacgccaagaacgtcatgcgcacgcccgcgcaattggacaggttcatgccattccttgaaagggactcccagcccaacggcctccag

SEQ ID NO: 80014 - DNA, 1296 bp, Oryza sativa
  Clone ID: PAT_MRT4530_79680C.1
atggctgatgaactggtgacgccatcgcaatcgagttcatcttgtttccagcaacataagggcgggctggttttggatggatatttaacttgtttgcaactacatatggccttgttttactggattgaggagctagaatttgagtgctcagttggaatagctagccgtgtagatgttcgcttctctgtggatggatttttctcgctgtgctacgaatgcacattcttgaaacataaagatcagaaggcattgtattcagctctcgagagactaaaagaagagttaatgcttctgggattcatttccttcgtcctgagcctctctgaaggtttcattgttggtatttgtgtttcggaaaatgctatgcatttgatgcttccatgcaagaaagagacttaccagctttcagaaggtgttaagctttgcaagaaaaagggtgaagttcccctgttatcagtggaggcattgcatcagctgcacatcttcatatttatacttggtttggtccatgttgtgttctgtgctacaacaatattacttggtggagcgaagataagaaaatggaagctttgggagacagaaatccaacaggaaatgcaacagaaattacaaaaaagagatgctacacctgggcgtattgcacataatcaacagggtgaatttgtcagtgagcgaacaaaggggttatggatgaagctggctgttgtaagctggataattgctttctttaagcagtttcatgattctgtgagtaaatcagattataaagcacttagatcagcattcggcttggattcagaaagtggtatcagttctcttatggagcaagaactctttcgagattggttttttcatctgggtcttggtattgtccattgcgctctcccacttcaattgcaagcatttaatgattatgacttcgcagaatcgcagctaataaaggaatcactcgacagtgtgctcatccaaatgatctgcagctacgtcactctaccactatacgccatcgttacacatatggacggaggcatcaagctgcaagggattgggtcgggcctgcacgagtccgtcgcggggtgggccctggacgcccggaggaagaaggaggagcagcagtcgtcccacggcggcgccaccaccggcgcgacggaggggagcaattacaggagcgaccacttcggggcctcgccgcgcagcgccctggcgccgccgccaccaccttcccccgacctggtcgagatcgtctccgtcgccgccgccgacgacgacggcgacgacagccgccaccgtaggtga

SEQ ID NO: 80015 - DNA, 626 bp, Oryza sativa
  Clone ID: PAT_MRT4530_79681C.1
ggggaacatgtctagtgagagtggaggaaggaagagactctcctccatttcttcagctatacttttggctgctgcaattggtgtcattgaggcctcagctttgattctggggtctgaaatactcctcagcattatgggtgtgtcacatgcgtcaaccatgcatagtcctgcaaagttgtttctttctttaagggcacttggtgctcctgccgtagtggtttcattggctattcaaggtatctttcgtggattgaaagacacaaagacacctctactttacagtggcttgggcaacatctcagctgtgcttctacttccctttctcgtgtattcgctgaaccttggattaaatggagcagctctcgcaactattgcttcacagtatcttggtatgtttctgctcctttggtctttaagcaaaagagcagttctactgcctccaaaaattgaagaccttgatttcgttgggtacataaaatctggtggcatgctattagggagaactctttcagttcttataacaatgacccttggaactgcaatggctgctaggcaaggcacaatagccatggctgctcatcaaatatgtctacaggtttggctggcggtatcattactttcggatg

SEQ ID NO: 80016 - DNA, 6040 bp, Oryza sativa
  Clone ID: PAT_MRT4530_79682C.1
atgggttccgtctccggcatcgacgacgtcaccttccctcccgggcaggcgttccggttcggcagcctcaacttcatcaccaacgacttcggcaagatctctctccttgactcggattcgaaccagtcggggagagaccaggtccccgcgccgttcggtattccgaactcggccgaggcctattctaagatcatctctcccgagtcggcttcaaaccactcggacgagatccaatctactcctccacgaccagatgaagacggcgggtcctatccctcaatcctgatgaaacttcctgatgatttggccactgtcttcacaaccaagacatctcccactcgaagatctaggcaagctccggcttcggccccgatccaatctagatccagggaggttggtgttatactccaacctcttgggacagtctcgacggaagagttggatggctacctcaactcccccggcgtcagttctcgaccaaccgagatcctcgactacgacgacttcggctaccactacgaccaaggcgacctcgacaacttcgacgacagctatgaggataactacacgcccctcttcttcggcgtattcatggatgacaacgaaacggaggaacagcgccgagcccgagaagcggaccaagatcgcgcacggcaagaagctgaatgtcgcagactggaggaagagtgacagcgacaggaacgagaacgactacagcgtgagcaacaagatcgcgaacggattgcaaaggaggctgaagatcgacggcaacgtgccttggaatctgggcggcgaccgagagagctcattgggcaacaagacgtcgatggaacaacggtctttcgcaccccccagcagaacgcgattgcagcaatcactctcctcgacaccctcctcaaggaagacgcactcaaccaaactgatcatgttgtcaacatcttgaaccagacgaagaccatgatcgctgcctcggttccagccaactccgcaagcacccgcaccccgactggtagccgagtccctcatcttcgatctcaagactatcaccagccaagcctcagcattgccggcgtcggatctagtcgcaggagcaggggacatgatgaacggtctgttcgttcgcctcccgaacgatataggaagcgtcgagttgaacgaccacactccccacatcgaaggcgccccatcgatcttcgcgacaccatcaaccagcgccgcgcagcaagaggccatcattcaccagatcgctacgacgacgatgtggacggagttgctgccttcacaagcgatctgcgtcgagtggattggccaaccggctttaagccgactagaatcgagaaatatgacggcaccaccaaccctgagtcttggctcaccgtctatagtctcgcaatccacgcagcaggaggagacagcaaagccatggcgaattatctacctgtggccctagcggattctgcccggtcatggctccacgggctaccccgcggcacgatcggatcatgggcagagctacacgaccacttcatcgccaacttccaaggcacttttgaacggcctggtacacacttcgatctctacaacatcattcagaagtctggagagtctcttcgagattacattcgacgcttctctgagcaacgcaacaagatctccgacatcaccgacgacgtcatcattgccgcctttactaaaggcattcgccacgaggacctagtcggcaagttcggacgcaaacctcccaagacggtcaagcagatgtttgaaaaagtctatgagtatgccaaagccgaagatgctatcacggcgttcaagcagtcgggcatcacttggaagccaaagaaggatacgccgaccgcaggagggagtggaagtaacaaccacaaggatcgcaagcgtaagcccgaagaacttgtggcaacgacctctccgtcttcccgacaacgttcccgcgtcaacaccttcgacaagataatgaactcccaatgtccgcatcatcccaactccaaccacgtggccaaagattgcttcgtctacaaacagtttgcggagcaatacgtcaagaacgcacgtaagccctcagacggagatcaaggcacatcaaagaagaaagatgatgaagacgatgccccgactggttttcaagatcatcgcaaagaactcaatcacatcttcggcggacccctgacttatgaatctaagagaaagcagaagctaacaaaacgggagatcaatgcggttcagcctaacacgccccaataccttcggtggtcagagatagcaattaagttcgaccgctcggatcatcccgaccgagtggtccacccggggcggtaccccctggtactagacctagtggttcgcaatgtcaagctccgacggactctcatcgatggtggcagtgcactcaacatccttttcgctaagaccctggacgatatgcagattcctcgcacggaattaaagccgagtaatgcacccttccacggtgttatcccaggattgtcagctacaccactcggccagatcactattccagttaccttcggcactcgggagaattttcgcacagaaaacatttgtttcgaagttgctgatttcgagacagcataccatgctatactcggacgaccggctctagccaaattcatggccgtcccacactacacttacatgatgatgaagatgcctggtccttgaggggtcatatcactacggagcgacatcaagcaagccgtcacatgtgacaaagaaagttgcgagatggcccaaacccacgagatcactctcgctcgcgaagagatccgactggctgccaccacggcaagcaaaggagaggtgcctacgaccaagctgtcaaagaccgaagaaggcgacaacaaaactaagaagatttcactagatccctccgatcctaccaaaactgctgaaagcgcgctcatcacctttcttcaaaataacaaagatatctttgcatggaaaccatccgatatgccgggtattcctagagaggtgattgagcactctttacatgttaaggaagacgccaaacccatcaagcaacgactccgccgttttgcacaagacatgaaggatgcgatcaaggaggaattaaccaagctgttagcagcgggcttcatcaaggaggtccttcatcccgactggctggctaacctagtcctggttcggaaaaagacggggcaatggcgcatgtgtgtcgattacaccgacctcaacaagtcttgccctaaaaacccttttgggttacctcgcattgaccaggtggttgactcaacagccggctgcgagttactcaatttcttggattgctactcgggatatcatcagatccgactaagagaatccgactgcttgaagacctcgtttattacgccctttggggcctactgctacatcaccatgccctttggattgaagaacgcaggagcaacctatcaacgcatgattcaaagatgtttttcaactcagatcggtcgcaacgttgaagcttatgttgatgatgtagtcgtcaagaccaagcagaaggatgacctgatcgtggatttagaagaaacttttgcaagcattcgtgctttcaggatgaaactaaaccctgaaaagtgcatcttcggagtaccgtcagggaagttgcttggatttatggtatctcaaagaggcatacaggccaacccggagaaaatcaacgccatcctcaacatgaaaccgccaagcacccaaaaagacgtccaaaagctgactggttgcatggcggcgcttagccggttcgtctcacgactcggcgagcgggggatgcccttttttaagttgctgaagaagactgacaatttccagtggggacccgaagcacaaaaagcctttgaagacttcaagaaacttattaccactccaccagttttggcctcgccacatccgcaagagccgctactgttatatgtgtcggcaacctcccaggttgtgagcacagtcctggttgtcgagcgtgaaaaggaaggccatgttcaaaaagtccaacgaccaatttatttcgttagcgaggttttagccgactccaaggcaagatatcctcaggttcaaaagttattatatggtcacttggtcacggtggtcacatcgttttcactcggggatatacttcataaccgcgaagcaaatggatggattgcgaagtgggccctagaattgatgtctttggatatatcgttcaagctacgaatttcgatcaagtcacaagctttagctgatttccttgccgagtggaccgagtgccaagaagacatgccagaggaaaagatggaatattggactatgcattttgatgggtcgaagaggcttacaggcactggagctggggttattttaatttccccgactggggaaagattgagctacgtattgtggatatatttttctgcgtcccataatgtggcggaatacgaggcgctactccatggattaaggattgccatctctctaggcattcgccgattaatcgtctgtggagactctcagttggttgttaatcaagtcatgaaagagtggtcctgtttagatgataatatgaccgcttatcgacaagaggtacgcaagttggaagataaattcgatggacttgagctcacccatgtcctccgacataacaatgaggtagccgacagactggccaattttggttcaaaacgggaggcagccccttctgatatgttcgtcgaacatctttatgaaccactgtacccagaaaagcacaattgaagccctggatactcaaggcgtaagcatgatcgaaaccgactggagagaacctctcataaaaattttgaccaaacaagaactccctcaagacaaaaatgaagccgagcggatttccaggcgtagcagactttacattattcataagactgagttgtacaagaaaagtccatcaggaatactgcagtgtgtgtctttggaagaagggagacaattgttgaaggatatacattctagtatttgtggtaatcatgctgctgcacggactattgtcggcaaagcttaccggcaaggttttttctggcctacagctgtgtctgatgctgacaagattgtgcggacatgtgaaggttgtcaattttttgtcagacaaattcatctgccagcccaagagttgcaaaccatcccgttgtcctggccatttgcagtctgggggcttgacatggtcggcccatttaaaagggcagtcggcggttacacgcatctctttgtggctatcgacaaattttccaattggattgaggctaaaccggtcatcacgatcacagcagataaagctagagattttttcatcaacattgtgcatcggtttggggtacctaatcggatcatcactgataatggcactcaattcactggcggagcatttaaagacttttgtgaagactttggcattaaaatttgttatgcctccgtggcacactccatgagtaatggacaagttgagcgctccaatggcatggtacttcaagggataaaagcacgagttttcgaccgactacgtccctatgctggcaagtgggtagatcagctgccgtccgtactttggtctttacgcactactcccagttgggctaccggtcagtcgccgttctttttggtttatggtgcagaagcaatgttgccaagtggagtggaatttgaatcactacgatttcggaacttcaacgaggagcgttatgaagagggccgagtagacgacatcaattgactagaagaagcccgtgaagcagctttaattcagtcgactcggtatttgcaagtgttgcgccgttatcataatcggaatgttcgatcgcgagcctttttagtcggcgacctagttctgaggaaaattcaagccacacaggatcggcataaattatctcccttatgggaaggaccgttcataattgtcgatgtcactcggccaggttcttatcaactcaagcgcgaagatggtactctcatcaacaattcttggaatattgaacaccttcgtcgattttattct

SEQ ID NO: 80017 - DNA, 440 bp, Oryza sativa
  Clone ID: PAT_MRT4530_79683C.1
atggagtggggaataatggagaggggtggggtgtttatagggaaaaggacaaagagggagagaagggggggggtgcccccccggcgggcggcgcggcgcagggatcgggccggcccgggcgcaagatgacagggcgctcgcgcggcgacgggacggcacgtggcgcgaggcgcgaggcgcgacgggcgacggccgacggcgcacggcgcggcaggcgacagcggcacagcggcgatggcgacaggcggcgatggcgacggctcggggcgcgaggcgcgcacggctcggggctcgcggcgaccgcggcacgcacagtgatggcgacgacgacggcagaggggaggcggatcggcgggcggcgcacggggcgcgagggcagcgcggcagaggaggggctagggctagggaacgcgatcgaacaccttgggagcaatgaatag

SEQ ID NO: 80018 - DNA, 2901 bp, Oryza sativa
  Clone ID: PAT_MRT4530_79684C.1
atggcacggggctccgcaccgctcgagggtagcgtgctgccgccttcccgcatcgtgagcgagaggcaggccgggctgccgcgccgattcatgccggaatctgccaccggccgggaggtggtcgcgctgggcgagggacgcccggcgccgcattacccggggcggtccgtcttcttcctctctttcgcaatggcagggctggtcccgccattctcttctttcttcatggatgttctggagctttatgatctccagatggcgcacctcacccccaacgcggtaatgacgttggccatcttcgcgcacctatgcgagatgttcatcggggtgcgcccatctctccggctgttccggtggttcttcaccgtacagccggtgtcgccaccgtcggtagtcagtggttgctacttccagccgcgggggccggtgctgaaccgctacatttcctgcgtccttcgcaagaagtgggacgactggaagagcgactggttctacacccctctcgccgacaaagcgcgcctccgacttccgagccagcccccggcgcaggcctccagctggcgggcgccggtagatctgggagatggctacgacgccgttcttgaccgcctggcgggtctgcgatcccaggggctcacgggggccatggtgttcggcgactaccttcgtcgccggatcgcgccactccagcggcgcgcccggggcgcctgggagtacaccgggtccgaggactacatgaggacccaccaggggggcagatgggactgggcccctgaggatttcgagatggtggtccaacgggtgctgaatctcagctccgtggaggcatccctcatcccccaaggtgtcctccccctctgcagcgatccagagcgcgccaacatcctgaccatcatgcagccggtcggggcgtcaggggagcgggctcctcgaggccacgatggcgcgggcgggagccgcaggggggaacaatctaccccgggagggggtcgtgcgtctgggccccgtgacgggggcccggggggcagccgccctgccgacgcccgggggaagaggaaacaggaggataccccctccccatctcctccccgagggggcggggcggtgcgtgccagcagcaggcgcccggagggtgctgtgccgacgtcgcagcccgagggggagcgaaaaaagaagcggctccgcaagatgggggtgaccgaaccatgccggggaaacctcatctcccccccaaggtggtcgtttagccgacctcctcgcagcgagattccgtcgcgcccccctcgccattccaagtccggccggtctgaggccgaggagacagcgaccgcggaggcccggaggcgggaagctgtccggcgagaagccgcggaccgcctccgggaagctgaggaggctgcccaggaagccgtccgggttcgccaggctgaggaggccactcgggaggaggccagactccaccgggccgggaagtcagcccgggaggcagaggcgacgcgcgcacgccaggcggcctgccaagcccccgacccgactccgcccgaggcgacgacgacttccgagtccacccacgacgaggccgcgggcgcaccgctcggacccgacccttcgggcgacgttcaggacgagccagcctcgggggacgcccctgagtccggcacgtcgattggcgggccgagccgcatagcgcccacaccgaggcggctctcccctctgccttacgccgctccactgaacacagagcccctcctgcaggccctggccgccgcgaacacgatggtgctggacgggttaggtgcccagatggaggtcctgcaagcagagcgggcggagctcgacgcggcgtgggcgcgcgtcgaagaggggcggcgctcggtggaggccatggtggaggcgggccgcaaggcataccgccggcacgcctcagagctcgaggcccgtcggagggagctggcggagatcgccagggagaacgaggcggcgtcccggcggcgcgaagtgacccttgaggctcgcgccacggcgctggaagagcgtgcccgcgcgagggagaaggacctggcggaccgcgagaccgccgtcgctatccaggaggcaacgctggcggcgcacgaggccgcctgcgccgaagaggagtccgcactccgcctccgcgaggatgcgctcaccgagcgggagcgatctctcgaggaggccgaggccgcggcgcagcggctggcggacagcctgtccctccgcgaggcagcgcgggaggagcaggcgcgccgtaatctggaaggcgcccgcgccaagagggccgcactggatcagcgggccgctgagctcgaggcgcgggcgaaggagctggacgcgagggcgcgcagcggcgaggcggccgcgggcgacggcgatctagccgcccgcctcgcagctgccgaacacaccatcgctgatctgcagggcgcactggactcgtccgccggggaggtcgaggccctccgcttggcgggcgaggtagggcccggcatgcttcgggacgccgtctcccgtctagaccgcgtcgggcggcaagcgggcctctggggcgagcggaccgcgaagtacgccgccaaccaggggggcctcgcccagcgcctctcagagatggccgggactctccagcggctccccgaggagctcgaggagacgatcaagtcatcctcgagagacctcgcccgggggggcagtggagcttgtactggcaagctaccaggccagggacccggacttctccccgtccgggacgccgccgaccacatcgtccacagcttcgagggtacggcccctcggctcgcgttcgccctcgactccgacgaggagggcggcgacggtggtgtggacgacagcgaccacgaggccggcgacccgggagcctcgaaatga

SEQ ID NO: 80019 - DNA, 256 bp, Oryza sativa
  Clone ID: PAT_MRT4530_79685C.1
agcagctcaccactcgtgcctaatccgtactcctagttcatctgctgtcccctgtagctacctcgctctcctctcacagtctacgcaacctacgacccctaagcctacagcggcacgccagaggcgcctaataaggaaactaccatacattaattgcaccgcactgactcgcccggcttacaggcgaaacacctgtactcgccagactcctttaatcattgtacccacactcagagagacgcggggggcctattct

SEQ ID NO: 80020 - DNA, 3135 bp, Oryza sativa
  Clone ID: PAT_MRT4530_79686C.1
atggcacggggctctgctctgcacgacggcagtgtactaccgccttcccgcatcgtgagcgagaggcacgccggactgccgcgccgcttcatgccggagtccgccaccggtcgggagatagtgatgctgggcgaggggcgcccggcaccagactacccggggcggtccatcttcttcctccccttcgcaatggctgggctggtcccgccattttcttctttcttcatggatgtcctggagttctacgatctccagatggcgcacctcacccccaatgcggtgatgacattggccatcttcgcgcacctgtgcgagatgttcattggggtgcgcccctctcttcagctgttccggtggttcttcaccgtgcagtcggtgtcaccgccgtcggtggttggcggctgctacttccagccgcgggggccggtgttgaaccgctacatcccctgcgtcctccgcaagaagtgggacgactggaagagcgactggttctacacccccctcgccaacgaagcgcgcctccgacttccaagccagcccccggcgcaggtctccagctggcgggcgccggtagatctgggggaggactacgacgccgtcctcgaccgcctggcgggcctgcgatcccaggggctcaccggggccatggtgtacggcgattacctccgtcgccggattgcgccgctccaacggcgcgcccggtgcgcctgggagtacactgggcctgaagactacatgcggacccaccagggagccagatgggattgggctcccgaggacttcaagatcgtggtccaaagggtgctgaatcttagctccgtggaggcgtctcgcattcctcaggtgatcctccccctctgcagcgatcccgaccgcgcctccattctaaccattatgatgggggtcggggcctcagaggagagagcccctaagggccacgacggcgcgggcgagcgccgccggggggaacaatctgccccaggagggggtcgtgcttctgggccccgcgtcgggggctcggggagcagccgccctgccgacgcccaggggaagaggaagttgggaggaacacctcccccatctcctccccgagggggcggggcggcgcgtgccagcagtcggcgcccggagggggccgcgccgacgtcgcagcccgagggggagcgcaagaagaaacggctccgcaagacgggggagacggaaccatgccggggaaacctgatttcccctccaaggtggtcattcaaccgaccccctcgcagtgatgtcccgtcgcattcctcccgccaccccaagtccggccagtccgaggccgaagatcctacggccgcggaggagcggaggcgagaatctgaccggcgtgaagccgcagaccgccttcgggaagctgaagaggccgcccgggaggccgcccggattcgccaagcggaggaagctgctcgggaggaggccgcccgggctgaggaagccgctaaggaggaggccgcccgggctcgccaggctaaggcaacagctgctgctggcgcgtcaactgggcccaccccttcgggcaaccctcaggcgacagcctccggggaggctcgcgacgaggccgcgggcacatcgcttgggcccacctccccgggcgacgcccaggatcaaacgggtccgggggacatccccgagcccagcacgtcctccggggggccgagccgcatcgccttctctccaaggcggctcttctcctcatcttccgtcgccccgctgagcgccgagcccattctgcaggccttggccgccgcaaacaccgcggtgctagatgggttcaacgcccaagtggaggccctgcgcgcggaacgagcggagctcgaggccgcatgggcacgtgttgaggaggggcggcgctcggtggacgccatggtggaggtgggccgtaaagctcaccgccgtcacgtctcggaggttgaagcccggaaggcggcgctgacggagatcgctcgtgaggtggaggaggagcgggcggccgccctcatctctaccaccgcgatggtcgaggcgcaagacaccctccgccttcagcatgcaagctgggaggcggagctgaagaaaaagctcgacgccgcccaaggggtccttgactccgccgctgcccgagagcggcgggtgacggagactgaagcggcgtctcggcggcgcgaggaggcccttgaggcccgtgccatggcgctggaagaacacgccggcgccgtggagaggggcttgacggaccgcgaggccgccgctggtctccgagaggcgacgctggcggcgcatgaggccgcctgcgccgaggaggagtccgcgctccgcctccgcgaggatgcactcgctgagcgggagcgagctctcgaggaggccgaggccacgacgcaacggctggcggacagcctgtccctccgcgaggcagcgcaggaggagcaggcgcgccgcaatctggaatgcgtccgcgccgagagagccgcactggagcagcgggctgccgacctcgaggcgcgggaaaaagagctggacgcaagggcgcgcgtcggtggggcggctgcgggcgaaagcgacttagccgctcgcctcgcggctgccgaacacaccgtcgctgacatgcagcgcgcactagattcctccatcggggaggccgaggccctccgcttggcgggcgagatggggcccgacatgctttgggactcggtctcccgcatggatcgcgccggtcggcaagcgggcctctggaagggccagacgaggatgcgccccatcaatctggaaggcctcgctccgcacctcaacaggatggcctgggtcctcgaacgactccccgaggagctcgagaagaccatcaagtcatcctcgagggacctcgcccggggggcggtcgaactcgtgctagcgagttaccaggcccgggaccccaatttctctccctggatggcgctggaggagttccctcccgggaccgaggacgacgcgcgcgcgcgcgtccgggatgccgccgaccacatcgtcaacggcttcgagggctcggcccctcggctcgcgttcgcccccaactccgacgaggagggcaacaccagcagtgcagacgatggtggtgacgaggtcgtcgactcgggcgcgtcggaatga

SEQ ID NO: 80021 - DNA, 254 bp, Oryza sativa
  Clone ID: PAT_MRT4530_79687C.1
atgccgccgcgccgccaccttcgaagccgccgcgccgtcgtcccggagccgccgcgccgtgcgtcgccgccttgcgccgccgtcgagcccgagggagtggtggatccaagtgaaggccaagacccgcaagactttgagcaaggcaagtcatcactattctttgaacatgttgatcccaattgtgaaattatttttatttacaaataaaaattgcatgcaatgatgaacatcctacttgtgattatgccatgcct

SEQ ID NO: 80022 - DNA, 3144 bp, Oryza sativa
  Clone ID: PAT_MRT4530_79688C.1
atggcacggggctctgctctgctcgacggcagtgtactgccgccttcccgcatcgtgaatgagaggcacgccggactgccgcgccgcttcatgccggagtccgccaccggtcgggagattgtgatgctgggcgaggggcgcccggcaccagactacccggggcggtccatcttcttcctccccttcgcaatggctgggctggtcccgccattttctcatttcttcatggatgtcctggagttctacgatctccagatggcgcacctcacccccaatgcggtgatgacattggccatcttcgcacacctgtgcgagatgttcattggggtgcgcccctctcttcagctgttccggtggttcttcaccgtgcagtcggtgtcaccgccatcggtggttggcggctgctacttccagccgcgggggccggtgttgaaccgctacatcccctgcgtcctccgcaagaagtgggacgactggaagagcgactggttctacacccccctcgccgacgaagcgcgcctccgacttccgagccagcccccggcgcaggtctccagctggcgggcgccggtagatctgggggaggagtacgacgccgtcctcgaccgcctggcgggcctgcgatcccaggggctcaccggggccatggtgtacggcgattacctccgtcggcggattgcgccgctccaacggcgcgcccggagcgcctgggagtacactgggcctgaagactacatgcggacccaccagggagccagatgggattgggctcctgaggacttcaagatcgtagtccaaagggtgctgaatcttagctccgcggaggcgtctcgccttcctcaggagatcctccccctctgcatcgatcccgaccgcgtctccattctaaccattatgctgggggtcggggcctcagaggagagagcccctaagggccacgacggcgcgggcgagagtcgcccggggaaaaaatctgccccaggagggggtcgtgcttctgggccccgcgtcgggggctcggggagcagccgccctgccgacgccccggggaagaggaagctgggaggaacacctcccccatctcctccccgagggggcggggcagtgcgtaccagcggtcggcgcccggagggggctgcgccgacgtcacagcccgagggggagcgcaagaagaagcggctccgcaagatgggggagacggaaccagcccggggaaacctaatttcccctccaaggtggtcattcaaccgaccccctcgcagcgatgtcccgtcgcattcctcccgccgccccaagtccggccagtccgaggccgaagatccagcggccgcagaggagcggaggcgggagtctgaccggcgtgaagccgcagcccgccttcgggaagctgaagaggccgcccgggaggccgcccgggttcgccaagcggaggaggctgctcgggaggaggccgcccgggctcgccaagccgaagaagctgcccaggaggaggccgcccgggctcgccaggctgaggcggcagctgctgctggcgcgtcactcgggcccactccctcgggcggccctcaggcgacatcctccgaggcggctcgcgacgaggccgcgggcgcatcgcctgggcctacctcaccgggcgacgcccaggaccaaacgggcccgggggacatccccgagcccagcgcatcctccggggggccaagccgcgtcgccttttctccaaggcggcttttctcctcttctctcgtcgccccagtgagcgccgagcccattatgcaggccttggccgccgcaaacaccgcggtgctagatggatttagcgcccaggtggaggccttgcaagcggaacgagcggagctcgaggccgcatgggcgcgtgtcgaggaggggcggcgctcggtggacgccatggtggaggtgggccgtaaggcccaccgccgccacatctcggagctcgaagcccgcaaggcggcgctggcggagatcgcccgggaggtggaggaggagcgagaggccgccctcgtcgccaccaccgcgatggtcgaggcgcaagacaccctccgtcttcagcacgcaagctgggaggcggagctgaagagcaagctcgacgccgcccaaggggttctcgactccgccgctgcccgagagcggcgggcaacggaagccgaagcggcgtcccggcggcgcgaggaggccctcgaggcccgtgccatggcgctggaagaacatgccggcgccgtggagaggagcttgatggaccgcgaggccgccactgctctccgggaggcgacgctggcggcgcacgaggccgcctgcgccgaggaggagtccgcgctccgccttcgcgaggatgcactcgccgagcgggagcgggctctcgaggaggccgaggccacgacgcaacggctggcggacagcctctccctccgcgaggcggcgcaggaggagcaggcgcgccgcaaccttgaaagcgtccgcgccgagagagccgcgctggagcagcgggctgctggcctcgaggcgcgggagaaggagctagacgcgagggcgcctatcagcggggcggccgcgggcgaaagcgacttagccgctcgcctcgcggctgccgaacacaccgtcgctgacatgcagcgcgcgctggactcctccaccggggaggccgaggcccttcgcttggcgggcgagatcgggcccgacatgctctgggatgcggtctcccgcatgaagcgcgccggtcggcaagcgggcctctggggaggccagacgtcggtgccccccaccaatctggaaggcctcgctccgcacctcaacaggatggcttgggttctcgagcgactccccgaggagcttgagaagaccatcaaggcatcctcgagggacctcgcccggggggcggttgaactcgtgctggcgagttaccaggcccgggatcccaacttctccccctggatggcgctggaggagttccctcccgggaccgaggacgacgcgcgcgcgcgggtcggggacgctgccgaccacatcgtcaacagcttcgagggctcggcccctcggctcgcgttcgcccccagctccgacgaggagggcgacgccagcagcgaggacggcggtggcgacgaggccggcgacccgggcgcatatgaatga

SEQ ID NO: 80023 - DNA, 856 bp, Oryza sativa
  unsure (1)..(856): unsure at all n locations
  Clone ID: PAT_MRT4530_79689C.1
acnaagncacccgcgcggcggcgacccgcccggacgcaacaagccaaccaagaagaggagaggagaagagaggagtcaagaaacgcaaaaggttatcaacagtaagtactcattgaagtatcacttcttcaggagtagtatgggtattgaaattgtacctcaatccttcaatgaggagctggattctactgttactatcactcctgctagtgacaacatagatgtgtctgatgatacaagtgttcctcatccatcagaagtgcctgccacagtaaatgttgttctagttgagcaatctgataattcaatctctgaacctttggaatctgatggagccaatggagctacagaaaatgttgttcccttggcaagtgagaagtctactgacaacaatgatgctatgaattcagagccagtgaattcagaaccatatgaagcatctcctgctaataatgctgaaaagggagatgtgatgcagcagagtgatgagaacaatggtgataaacaggagaatcaggatctgttgtctccaatggcagaaacagcaggaagtgacagtacctcagtcacatcgatggaagatgttcaagaagcaaaggatgctgctccatcagagacagatgatgctactggccaccctcctgatctgtcaaatgacaaagcttgtgctggaaatggaaatggaaatgtcttccaaaatgcaaagtgtgtcttgacaacttcgacaaagaagatgaagagaagtgcatctgcaactacaaggaagtcactgcaagctactaatactgacgaagggaatgcttctactctcaccaactcgaaatcatcaaatggaaggaccacaacagttccagca

SEQ ID NO: 80024 - DNA, 3978 bp, Oryza sativa
  Clone ID: PAT_MRT4530_7968C.1
atggtgatcactcgcagcaatgggaatggccccaacaaccccaataacaacaatgaagggaacccaacacttgctcaagttcttgctcaacagactcagttaatgaacatgatgatgcagcaacttcagaaccagcagaaccagggaaataaccatgcacctccccagaacaagttagcagaatttcttcgtgtgaggccgcctattttctctagtaccactaatcctgttgaagctggtgattggctgcatgccatagagaagaagttggatttgcttcaatgcactgatcaggaaaaggtctcatttgcatcacatcagttgcatggccctgcctctgaatggtgggatcacttccgccttaataggactactgctgaacctattacttggcttgaattcaccgctgctttccggaagacgcatataccatcgggagtggtgtctctcaagaagaaggaattcaggtcgctcactcaggggtctcgctctgtcacggagtatctgcacgagttcaatcgtctggctcgttatgctccggaagatgtgcgcaatgatgaagagcgccaggagaagttcttggaaggacttaatgatgagctttcttatccactcatggctggagattatcctgatttccagaagttagtggataaggctattcgtcaggaggacaaatacaatcgcatggaacagaagaaacgccggattgctcaattcaagacacaaccgggaaataatcaaaggccgcgtcttactttaggaccccagtccatgccacatggaggttcttcgtctgttgttcgtccgcggcgtcagttcttcaacaacaatgctggcaacaacatccgcaatcaagctccacgccctgttgcagtttcgacacagcaacagcctgccaagagggagcaaggcagcaagcccgtagtgtgcttcaactgtggagacccaggacattatgctgacaagtgtccgaagccccgacgcgtgaaggttgtccctgcccagagcaactctaccgcatcagcatcaaaggcccgtgtcaatcatgttgctgctgcagaagctcaagatgctccagatgtgattttggaatccaaagaccttgatgtcatcctagggatggactggttagccagacataaaggtgtgatagactgtgctaacagaaaagtaactctcactagcaatgatggtcgagttgtaactgttcatgcattgtcttctgagtctttaaggtcaagactgaaccagataactttggaagagattcctatagtccgggagtatcccgatgtgttcccagatgatttacctggtatgccgcctaaaagggatatagagttcagaatagatttggtacctggaacaactccgatccataagagaccttatagaatggcagccaacgagttggcagaagtcaaaaggcaagtagatgatttgcttcagaaaggatacatcagaccgagttcatcaccatggggagctccggttatttttgtgaaaaagaaagatcatacccagaggatgtgtgtggactatcgtgcactaaacgatgtgactatcaagaataagtatccactacccagaattgatgatttgtttgatcagcttaaaggtgccactgttttctccaagatagatcttcgatcagggtatcaccagttaagaatcaaagaggaagatatacctaagacagcttttaccactaggtatggattgtttgaatgtactgttatgtcttttggacttaccaatgcccctgctttcttcatgaacttgatgaataaggtatttatggaatacctagacaagttcgtggtggtctttattgatgacattcttatctgctcccgaaccaaagaagagcatgaagaacatcttcgccttgtactagagaagctacgagaacatcaactgtatgctaagtttagcaagtgtgaattttggttgtctgaagtgaagttccttggtcacgtcatctcagcaggaggagttgccgttgatcctagcaatgtggaatccgtaaccaactggaaacaaccaaagacagtttcagagattcgcagtttcctaggcctcgcaggatattaccggaggtttatagagaatttttccaagattgctaagcccatgacacgactgcttcagaaagatgtgaagtacaagtggtcggaagaatgtgagcagagttttcaagagttgaagaatcgcttgatatcagctcctattttgattttacctgatccaaagaagggtttccaagtgtattgcgatgcatccaaacttgggttaggttgcgttctgatgcaagatgggaaggtggttgcctatgcatctcgtcagttacgtccgcatgagaagaactaccctactcatgatattgagttagctgcagtggttcatgcgttgaagatttggcgtcattatctttttggtactcgtacagaggctaatgttgtagcagacgctcttagcaggaaaggctattgcaatgctacagaaggacgacagttgccattggaattatgcaaggaatttgaaagattaaatttgggaattgtcagtagaggttttgttgcagccttagaagcgaagcccacactaattgatcaagttagagaagcccaaattaatgatcctgatattcaagagatcaagaagaatatgagaagaggaaaagctatcggtttcttggaagatgagcaaggaactgtatggttaggtgagagaatttgcgtccccgacaacaaagatttaaaagatgcaattctgaaagaagctcatgatactttatactccattcatcctggtagtaccaaaatgtaccaggatctcaaggaacgattttggtgggcaagtatgaagcgtgaaatcgcagaatacgtagcagtatgtgatgtttgtcagcgcgtcaaggcagaacatcagaaacccgccggtttattgcagcctttgaagattcctgaatggaaatgggaagaaataggtatggattttatcactagtttacccagaacgtcatcaggccatgactctatttgggtgatagtcgacagacttaccaaagtggctcatttcattccggtaaagacaacttattctggaagtcggttggcggaattgtatatggccaggattgtgtgtttgcatggcgtccctaagaagatagtgtctgatcgaggcagtcagtttacttcaaatttttggaagaagcttcaggaagagatgggttctaagctgaactttagtactgcttatcatccgcagacagacggacaaaccgaaagggtgaatcagattttggaagatatgttgagagcttgtgctttagatttcggtggaagttgggataagaatctaccttatgcagaattttcgtacaacaacagttatcaagctagtcttcagatggccccttacgaagcactgtatggtcagaagtgccgcactccacttttgtgggatcaaacgggagaacgtcaggttttcgggactgatatcctgagggaagcagaagaaaaggtaaaaatcattcaagaaagattgcgtgtggcccagtcccgacataagagttatgccgacaatcgccgcagagatttgagttttgaagaaggagattatgtgtatcttcgtgtcacgcctcttcgaggggttcattgttttcacaccaaaggaaaattgtcaccgcgttttgtgggaccttataagatcgtcagtagaagaggagaggttgcttatcagttggagttacctcaatctttggcaggagtccataatgtgttccatgtgtcgcaattgaaaaagtgtttaagggtacctaccgaagaagctaatcttgaacagatagaagtccaagaggatctgacctatgttgagaaaccaatccgtatcttggaaacagatgagagaagaaccaggaatcaagttatccgtttttgtaaagttcaatggagtaatcactcggaagaataa

SEQ ID NO: 80025 - DNA, 363 bp, Oryza sativa
  Clone ID: PAT_MRT4530_79690C.1
tcgacaggcaaagccatgggcggcttgtcaccttggtaaacctggacctcatatcaagtcacatgaagagctagctagctagctaaaatacgatctataccatctctaccacaatcccactagtcttgttacactgtgttatagacctcagcaacacgagactgtcgctgctagcactctaaagtcctaatttcttgaacagatgttccaatggggtaccacccgtgcatgccacggtttccagctaacgttcaccttatccgtcgttttactctccttctgcttacacgatgatctagttagatcgccaaaactatcactttgccacttggaggaatcctggcgattgaacaataatacgct

SEQ ID NO: 80026 - DNA, 2724 bp, Oryza sativa
  Clone ID: PAT_MRT4530_79691C.1
atggcaccattgccagcttatgaaggaagagagagggggaggcagagaagggggacggggaataagccgcgggggccggtgttaaaccgctacatcccctgcgtcctccgcaagaagtgggacgactggaagagcgactggttctacacccccctcgccaacgaagcacgcctccaacttccaagccagcccccggcgcagttctccagctggcgggcgccggtagatctgggggaggactacgacgccgtcctcgaccgcctggcgggcctgcgatcccaggggctcaccggggccatggtgtacggcgattacctccgtcgccggattgcgccgctccaacggcgcgcccggagcgcctgggagtacaccgggcccgaagattacatgcggacccaccagggagccagatgggattgggctcctgaggacttcaagatcgtggtccaaagggtgctgaatctcagctccgtggaggcgtctcgcattcctcaggagatcctccccctctgcagcgatcccgaccgtgcctccattctaaccattatgatgggggtcggggcctcagaggagagaactcctaaggaccacgatggcgcgggcgagagccgccgggggaaacaatctgccccaggagggggtcgtgcttctgggccccgcgtcgggggcccggggagcaaccgccctgccgacgcccaggggaagaggaagctgggaggaacacctcccccatctcctccccgagggggcggggcggtgcgtgccagtagtcggcgcccggagggggtcgcgccgaccttgcagcccgagggggagcgcaagaagaagcggctccgcaagatgggggagacggaaccatcccggggaaacctgatttcccctccaaggtggtcatttaaccgaccccctcgcagcgatgccccgtcacattccccccgccaccccaagtccggccagtccgaggccgaagatccagcggccgcagaggagcggaggcgagaatctgaccggcgtgaagccgcagatcgccttcgggaagctgaagaggccgcccgggaggccgcccgggttcgccaggcggaggaagctgctcgggaggaggccgcccgggctcgccaggctgaggaagctgctaaggaggaggccgaccgggctcgccaggctgaggcgacagctgctgctggcgcgtcacttgggcccactccctcgggcggccctcaggcgacatcctccgaggcggctcgcgacgaggccgcgggcgcatcgcctgggcctacctcaccgggcgacgcccaggaccaaacgggcccgggggacatccccgagcccagcgcatcctccggggggccaagccgcgccctggccgccgcaaacaccgcagtgctggatgggttcaacgcccaagtggaggccctgcgtgcggaacgagcggagctcgaggccgcatgggcgcgtgttgaggaggggcggcgctcggtggacgccatggtggaggtgggccgtaaggctcaccgccgtcatgtctcggagcttaaagcccggaaagcggcactggcggagatcgcccgtgaggtggaggaggagcgggcggccgccctcatctctaccaccgcgatggtcgaggcgcaagacaccctccgccttcagcacgcaagctgggaggcggagctgaagaaaaagctcgacgccgcccaaggggtccttgactccgccgctgcccgagagcggcgggtaacggagactgaagcggcgtctcggcggcgcgaggaggcccttgaggcccgtgccatggcgctggaagaacacgccggcgccgtggagaggggcttgacggaccgcgaggccgccgctggtctccgagaggcgacgctggcggcgcatgaggccgcctgcgccgaggaggagtccgcgctccgcctccgcgaggatgcactcgctgagcgggagcgagctctcgaggaggccgaggccacgacgcaacggctggcggacagcctgtccctccgcgaggcagcgcaggaggagcaggcgcgccgcaatctggaatgcgtccgcgccgagagagccgcactggagcagcgggctgccgacctcgaggcgcgggagaaagagctggacgcaagggcgcgcgtcggtggggcggctgcgggcgaaagcgacttagccgctcgcctcgcggctgccgaacacaccgtcgctgacatgcagcgcgcactagattcctccatcggggaggccgaggccctccgcttggcgggcgagatggggcccgacatgctttgggactcggtctcccgcatggatcgcgccggtcggcaagcgggcctctggaaaggccagacgaggatgcgccccatcaatctggaaggcctcgctccgcacctcaacaggatggcctgggtcctcgaacgactccccgaggagctcgagaagaccatcaagtcatcctcgagggacctcgcccggggggcggtcgaactcgtgctagcgagttaccaggcccgggaccccaatttctctccctggatggcgctggaggagttccctcccgggaccgaggacgacgcgcgcgcgcgcgtccgggatgccgccgaccacatcgtcaacggcttcgagggctcggcccctcggcccgcgttcgcccccaactccgacgaggagggcaacaccagcagtgcagacgatggtggtgacgaggccgtcgactcgggcgcgtcggaatga

SEQ ID NO: 80027 - DNA, 750 bp, Oryza sativa
  Clone ID: PAT_MRT4530_79692C.1
atggcggcgggatctggagcccgcgcggtcggcgacaacggtggtggcggcgtgggtggaggccctcctgctcccgcgtcgttgccgctgccgccgcgtcacccgtcgtcgccgcgccgtcggactcccgcctcccccatcggcctcctccccacccgccggctgcgttgccagtactcgactggaagtcttcctgaatcggcggctggacatgcggtggcgacgccgcgttctccttcgaggcgccccggcgccgacgcggcggacgagggcgaagtcctcgggctgagcagcgcagcggcggtgtggatgggtgcccaggcgaggagcggctgtgaggggaacgccgagtccatggccgtggcgctctcggcgtgcccttatgccggcgaccttgcattggccaaaggggaggcgacacacggctgcggcgtcatgaagggcgtcatccatggctacgtgttcatcaccaactcgctggtgtgcatgtacggcaagctcggggagatggacaacgccaagaaagctttcagggacgcgacggagaagaacatcgtgacatggaataccctgatcaccagctacgctacagctgggctgtgcgacgaggcattggacgtgctcgcccagatggagcagatcggcggcacggtcgcgcccaatgtggtcagctggagcgcggtcatcagcgggttcggaaagagaaagagagaaagaatgagagagagaagaataaggaaggaggagtag

SEQ ID NO: 80028 - DNA, 466 bp, Oryza sativa
  Clone ID: PAT_MRT4530_79693C.1
aagacatcgagagggtgagcgagagctccgttcggcggagacgatggggatgtggcggtgttgataggatgcgtcgtcgctgtctactgcgcggacgcggtttccgcgtcgttgatgacgaccgtccggagaagccgcggcggcacggagtgacggagatgaggagccctttttacgccttccgccctcgcgccaccacgcgctccaggaaatattgaattctctaggaccttttggtgatggttggaagtttactggaggatctgaaggcttgatggggaaagaactgcgtagagagattactgacttaccacacgagcttgacatatatgtgagtacaggaagattgggcagagtgtcttctgcgtcaaggaccttctttctttaatcaatatgtagaggagagcatgggattaagatttgacatccatcgagctgaatgctggatctatcaagctgccggaag

SEQ ID NO: 80029 - DNA, 4126 bp, Oryza sativa
  Clone ID: PAT_MRT4530_79694C.1
ctatctccggtcgccccttccactgtacccatcccttctgtcgatgcagacgagtaggactccgaccgtcccctccgccgtcgcagacgagtcgactgcagccatcccctcctccttcgctccatccttggtacatgcgcaggcctccatctccgccgccgccggggttgggagcggcggatctgccaccgacggtgctcccgggcctagtgcgatgggtttcgtttccggtatcgacgactccgtcttccctcccaggcaggtgttccaattcggcagcctcgacttcatcaccaacgacttcggcaagatttctctcctcgactcggattcaaaccagtcgggaagagaccaggtctccgccccgttcggtatcccgaactcggccgaggtctaccccaagatcatctccaccgagttggcttcaaaccactcggacgagatcctatctacttcaacacgacccgatcaagacgatggggcctatccgccgatcctgatgaaattccccgacgatttggctgctgtcttcaccacaagggcgtcttctccccgtaggcctaggcgggatccggcttcagccccggcccggcctagctccaaggaagtcggtgtcatactccagcctctcggcacggtttcgatggaacaactggacggctacctcagctcccccggcgtcgactcgcgaccaaccgagatcgtggagtacgaagacttcggctaccgctacgactaccgcaacctcgatgacttcgacgaagcagaagaactacacgcacaacaggaagccgaacgacgccaactggaagaggaacgccaagcacaagagcgagaatggctgcagccgatcaccctcctcgacaccctcctcaaggaagatgcactcaatcaagccaatcacgtcgtcaacatcttgaaccagaccaagaccatgatcgccgcctcggtcccggtctgcaagcgtccgcacgccgactggcgccccgtcgatcttcgcgatactatcaaccagcgccgcgcggcaagaggctacgctccccaccattcaccagatcgctatgatgatgacgtggatggagtcgctgccttcacaagtgacctgcgtcgagtggattggccagccagcttcaagccgactggaatcgagaagtatgacggcaccactaacctagagtcctggctcaccgtctacagtcttgcaattcgcgtagcgggaggagacagcaaagccatggcaaactatttgcctgtggccctagcgaattctgcccggtcctggcttcacaggttaccccgtggcacaatcggatcatgggcggaacttcgcgaccacttcatcaccaacttccagggtacctttgaacgccctggtacacattttgatctctacaacgtcattcagaagtctggagaatcccttcgagattacatccgacgcttttccaagcaacgcaacaagatctccgacattaccgatgacgtcatcatcaccgccttcaccaagggcattcgccacgaagacctagtcggcaagttcgggcgcaagcctcccaagacggtcaagcagatgttcgaaaaagccaacgaatatgccaaagtcgaagatgccattaccgctttcaagctgtcgggcaccacttggaagccaaagaaagatacgccgactacaagggggagtggaacgccgccgtcgccgccgtcgctccagccgtgctccgccgccgtctcggtcgtcgtcgtcgctcgggaaggccaccgtcgtgatcgcctagtcgtcgccgtcctcgtccgctccttcgccgccgccgaagaccatcggaacaccctcgccgccgtcgacccgaagtttgccgccgcttcctcctcgtcgccgtcgccgtccgttgatcttccgccgtcgctttggtcgccgtttgcagaacaatacgccaagaacgcacgtaaggcctccaacagagatcaaagcacgtcaaagaagaaggatgatgaagatgatgccccgactggttttcaagaccaccgcaaggaactcaaccacatctttggcggacccctggcttatgaatcaaagagaaagcaaaagctgaccgaacgggagatcaacgctgttcagcccgatacgccccaatatcttcggtggtcagagacaacaattaagtttgaccgctcggatcatcctgaccgagtggtcctcccggggcggtaccccctggtactagacctagtggttcgcaacgtcaagcttcgcagatccctcatcgacgagggcagtgcactcaacatccttttcgccaaaaccctggatgacatgcagatccctcgcacagaattaaagccgagtaatgcgccctttcacggagtcatcccggggctatctgctacaccactcggccagatcactcttccggtcacttttggcactcgagagaacttccgcacagaaaacgtttgcttcgaagttgctgatttcgagacagcgtatcatgccatacttggacgcctggcgttagccaagttcatggccgttccgcactatacctacatgatgatgaaaatgcctggccctcgaggagtcatatccctgcggagtgacatcaagcaagccgtcacatgcgacaagaaaagctgcgagatggcccagatccgcgagatcatgctcgcccgagaagagatccgactggctgcgtccacggcaagcgaaggagaattgcttgcaaccaagatgccaaagagcggagaaagcgacgccaaaaccaagaaaattcctctagatccctttgatcctactaagactgctgtaataggcgctgagttagattacgctaaaccaatcaagcaacgacttcgccgtttcgcacaggataggaaggatgcgatcaaggaggaattgaccaagctattcgtagcaggcttcatcaaggaagtccttcatcccaactggctggccaacccagtcctggttcggaagaagacggggcaatggcgcatgtgtgttgattacaccgacctcaacaagtcttgccccaaagatccctttgggttacctcgcattgaccagatcggccgtaacgtcgaagcttatgtggatgatgtggtcgtcaagaccaagcagaaggatgatttgattacggatctagaagagacctttgcgagcatccgtgctttcaggatgaaactaaaccctgaaaagtgcatcttcggagtaccatcagggaagctgcttggatttatggtgtcccatagaggcatacaagccaactcggtgaaaattaacgccatcctcaacatgaaaccgccgagctcccagaaagatgttcaaaagttaactggctgcatggcggcgctcagccgtcttagcttcaccacatccgcaagagccgctgttgttatacgtgtcggcaacttcccagccgacttcatcgccgagtggaccgagtgccaagaagacacgcctgcagagaagatggagtattggactatgcattttgacgggtcaaaaaggctttcaggcactagagcaggagttgttctaatctccccgactggggagaggctgagctacgtattgtggatacatttttctgcatctcacaacgtggcagaatacgaggcgcttcttcacggactaaggattgcaatctctttagggattcggcgtttgatagttcgtggagattctcagttggttgttaatcaagttatgaaagagtggtcctgccttgataataacatgaccgcttaccgacaggaggtacgcaagttggaagataaattcgatggacttgagctcacccatgttcttcgacacaacaatgaggcagccgacaaattggctaagtttggttcaaaacgagaagcagccccttctgatgtatttgttgaacatctctacgagccaaccgtaccaaggaaggaaacaatcaatgccacggacactcaagacgagctgcaaaccatcccgctgtcttggccgttcacggtttgggggctcgacatggttggcccgtttaaaaaggctgtcggtggttatactcatctttttgtagctgttgacaaattttccaagtggatcgaagccaaaccagtcattacaatcacgcagacaaggctagagattttttaa

SEQ ID NO: 80030 - DNA, 2361 bp, Oryza sativa
  Clone ID: PAT_MRT4530_79695C.1
atgcatctcgccgccgccgaccacccccaccgcggcggcggcggccgcgccgccctcggcctcggcctcggccacctcgcggccgcggcgctccgccgggagcaccggcgccgcgcgctcgccgggggggccgtcctcgcctcggcgctgctcctggtggccacgccgcggctccgccactcccccgcgctccacctcttcgccgacatgcgcaacctcctcggcgtccccaacacgctcaacgtgctcaccgcctacccgctcctcctggcgggcgtgcccgggctcgtcctctgcctctgtggcagtgggtgcttcggcatcagcttgagatgggaggccttgggatggttcctcttctatgctgggaatgtagcagcagcatttggctcggcttactatcacctcaaaccagatgatgaccgcttaatttgggacaggttgccggtttttaccttcttgcaagatttgaaggccttgctgacagaaagccatcggcctcgcggcgcgcgccatctctccaccgccgccggcgaccaaccgatccaccatcaccaccctccgaccaccagcgccgtcccatggaatcgcctcctccgcgcccacctcggccgttcccgcggggacctcgccctcgcgctctaccgccgcatgcgcgcgctctccccggcgctgccgaactcctacacgctccccctcgccctccgcgccgccgcctccccgcgcgtcgcctccgccgtccacgcccacgcccttcacctcggcctccacgcgcagcacgacgtcgccggccagatcctcgccgcctactccaggctcggccgcgccgccgacgcacgccgcgtgttcgacgcaatgccgccggggaggacgaccttccactggaacgcgctcatctccgcctactccagcggctgcgaccccgacgcggcgagggacgcgttcgcgcgcatggccgccgcaggggcgcgtcccgacgccgtgacgtggacggcgctgctctcggcgcacgcgcggagcgggaagcacgcggatgtccttcagctgttcggtgaaatgcaaaggagcggctgcgaggggaacgccgagtccatggccgtggcgctctcggcgtgcccttacgccggcgaccttgcattggccaaagggaaggcgatacacggctgcggcgtcgtgaagggcctcatgcatggctacctgttcgtcaccaactcgttgatctgcatgtacggcaagctcggagagatggacgacgccaagaaagctttcagggacgcgacggcgaagaacaccgtgacatggaacaccctgatcaccagctacgccgcggctcggctgtgcgacaaggcgttggacgtgctcgcccagatggagcagatcggcggcacggtcgcgcccaatgtggtcagctggagcgcggtcatcggcgggttcgcgtcgtccggcgacactgaccgcgcactggagctgttccggcgaatgcagcagcaatggctctcgccgaacgtggtgaccatggcgaccgtcctctccgcttgcgtcgacctactggcgttacggctgggtcgagagctccatggccacgccatgaaagccgagctagataggcactcgctggtcgagaatgggctcatcaacatgtacgcgaagtgcgggaaggtctccggcgcacggaaggtgttcgatggaatgaagacgagggacctgatctcatggaactcgatgctggccggctacggcatgcacggcctgtgcgacgaagccctcgctctgttcaccgacatggccggagctacggttgagcccgacggcgtcaccttcgtcgccgtcctgtcggcgtgcggccacgccgggcgtgtcacggagggccgccgcctgttcgatcgcatggtgagagcgcacaagatctccccatccatggagcactacacatgcatggtctacctcctcggccgcgccggcttgctccgggacgcgtcggagctcgtcgagacgatgccggtgagacctgacctgtgcgtgtggggagcattgctgaattcctgcaggattcatggtgatgcagccatggccgaggccaccattgccaatgtcctgcaatccgaggaccagagcaccggcaaccacatgctgatcaccaacctgtacgccatgtgtggcatgtgggacgagtccaagaaggtgagggtgatgacgaaggaggccggattgaggaagaatccggggcagagctggattgaagtggacaacaaggtggtcgccttcgccgccgggagcgcgccgccgaatctcaccggagctgaggatgtcttcggaatgctcgatgatctatatgcagagatggaagatgaacaaagatga

SEQ ID NO: 80031 - DNA, 3090 bp, Oryza sativa
  Clone ID: PAT_MRT4530_79696C.1
atggcacggggctctgctctgcacgacggcagcgtactaccgccttcccgcatcgtgagcgagaggcacgccggactgccgcgccgcttcataccggagtccgccaccggtcgggagatagtgatgctgggcgaggggcgcccggcaccagactacccggggcggtccatcttcttcctccccttcgcaatggctgggctggtcccgccattttcttctttcctcatggatgtcctggagttctacgatctccagatggcgcacctcacccccaatgcggtgatgacattggccatcttcgcgcacctgtgcgagatgttcattggggtgcgcccctctcttcagctgttccggtggttcttcaccgtgcagtcggtgtcaccgccgtcggtggttggcggctgctacttccagccgcgggggccggtgttgaaccgctacatcccctgcgtccttcgcaagaagtgggacgactggaagagcgactggttctacacccccctcgccaacgaagcgcgcctccgacttccaagtcagcccccggcgcaggtctccagctggcgggcgccggtagatctgggggaggactacgacgccgtcctcgaccgcctggcgggcctgcgatcccaggggctcaccggggccatggtgtacggcgattacctccgtcgccggattgcgccgctccaacggcgcgcccggagcgcctgggagtacactgggcctgaagactacatgcggacccaccagggagccagatgggattgggctcccgaggacttcaagatcgtggtccaaagggtgctgaatcttagctccgtggaggcgtctcgcattcctcaggagatcctccccctctgcagcgatcccgaccgcgcctccattctaaccattatgatgggggtcggggcctcagaggagagagcccctaagggccacgacggcgcgggcgagcgccgccggggggaacaatctgccccaggagggggtcgtgcttctgggccccgcgtcgggggctcggggagcagccgccctgccgacgcccaggggaagaggaagctgggaggaacacctcccccatctcctccccgagggggcggggcggcgcgtgccagcagtcggcgcccggagggggccgcgccgacgtcgcagcccgagggggagcgcaagaagaaacggctccgcaagacgggggagacggaaccatgccggggaaacctgatttcccctccaaggtggtcattcaaccgaccccctcgcagttcgaggccgaagatccagcggccgcagaggagcggaggcgagaatctgaccggcgtgaagccgcagaccgccttcgggaagctgaagaggccgcccgggaggccgcccggattcgccaagcggaggaagctgctcgggaggaggccgcccgggctgaggaagccgctaaggaggaggccgcccgggctcgccaggctgaggcaacagctgctgctggcgcgtcaactgggcccactccctcgggcaaccctcaggcgacagcctccggggaggcacgcgacgaggccgcgggcacatcgcctgggcccacctccccgggcgacgcccaggatcaaacgggtccgggggacatccccgagcccagcacgtcctccgggggggccgagccgcatcgccttctctccaaggcggctcttctcctcatcttccgtcgccccgctgagcgccgagcccattctgcaggccttggccgccgcaaacaccgcggtgctggatgggtttagcgcccaagtggaggccctgcgcgcggaacgagcggagctcgaggccgcatgggcacgcgttgaggaggggcggcgctcggtggacgccatggtggaggtgggccgtaaagctcaccgccgtcacgtctcggagcttgaagcccggaaggcggcgctgacggagatcgctcgtgaggtggaggaggagcgagcggccgccctcatcgctaccaccacgatgattgaggcgcaagacgccctccgccttcaaaacgccagccgggaggcggagctgaaagaaaagctcgacgccgcccagggagtccttgactccgccgctgcccgagagcggcgggtaacagagactgaggcggcgtcccggcggcgcgaggagtcccttgaggcccgtgctatggcgctggaagaacacgccggcgccgtggagaaaggcttgacgggccgcgaggccgccgctactctccgggaggcgacgctggcggcgcacgaggccgcctgcgccgaggaggagtgcgcgctccgcctccgcgaggacgcactcgctgagcgggagcgagctctcgaggaggctgaggctacgaccaaacggctggcggacaacctgtcccttcgcgaggcggcgccggaggagcaggcgcgccgcaatcttgaatgcgtccgcgccgagagagccgcactggagcagcgggctgctgacctcgaggcgcgggaaaaggagctggacgcgagggcgcatatcggtggggcggccgcgggcgaaagcgacttagccgcccgcctcgcagctgccgaacacaccgtcgccgatatgcagcgagcgccattctccaccggggaggccgaggcccttcgcttggcgggcgagattgggcccgacatgctttgggatgcggtctcccgcctgaagcgcgccggtcggcaagcgggcctctggaaaggccagacgacggtgccccccaccaatctggaaggcctcgctccgcacctcaacaggatggcctgggttctcgaacaactccccgaggagcttgagaagaccatcaagtcatcctcgagggacctcgcgcggggagcggtcgaactcgtgctggcgagttaccaggcccgggaccccaacttctctccatggatggcgctggaggagttccctcccgggaccgaggacgacgcgcgcgcgcgggtcggggatgctgccgaccacatcgtcaacggcttcgagggctcggcccctcggctcgcgttcgcccccagctccgacgaggagggcgacgccagcggcgaggacgacggtggcgacgaggccggcgacccgggcgcattgggatga

SEQ ID NO: 80032 - DNA, 1372 bp, Oryza sativa
  Clone ID: PAT_MRT4530_79697C.1
atgacggagcttgggggtcctcatcgggagaccgcgcaggcccccctttgccggttcggccgggggccctgggtgagctaccccgagcccgcgggggcctgccgggtggcgatggaattcccgtcgtcgacgtcgccgtcgccgtcgccgtcgtccgggcagcatcagcagcagccgacgacgccgcggcggcagcttcagggcccgcgccccccgcggctcaacgtgcggatggagtcgcacgccatcaagaagccgtcgtccggggcggccgcggcggcggcgcaggcgcaggcgcaccagctgccggcccaggcgcaggcgaggcgggagcagcagcagccgccgccgcgggcgccggtgatcatctacgacgccgtcgccgaagattatccacgccaagcccaacgagttcatggcgctcgtgcagcggctcaccggcccggggtcggggccgccggcgccgccgcatcagggggaggcccaggcgcaggactacccgatgatggacgaggccgccgcgcagcagttcttcccgccggagctgctgctctcgccgtcggccgcgatgtccccggcggcgaggctggcgaccatcgagaggtccgtccgcccgatgcccgagccggcgccggagtacgtggacatcacgaacggcggcggcggcggcggggtcgacgacggcggcctcgcggcgatcctcggctcgatccggccaggcatcctctccccgctcccctcctccctcccgcccgccgccgtccccggccagttctcgccgctcccgttcgacgcgagctgcatcagctggctcaacgagctgagccccatcctccgggccgcctccgccggcgccgcctcgtccggcagcggcggcggcggcagcggtggcaacaccagcaacggcggcgccgcccgcccgccgccgtcctactacgccgacccattcgtccccagcccacgtcacctcctcgccacgcccaccgtgccgtcgccggcgacctgcgccgagctcttcagcaacctgccggatctctagcccgccgccggccgccgcatccgtccaagacagcttcagtggcagaagcttagctccatttcctcttttcttttttttcccctccattttttttctctctctctggtaggctcaaggtggtgggcccgatcactgatgacaaattgattagtgctccgtttcatccatgcgctttgttaattattcttgggcaaaccacttagcaatgagaaggagcaaagaggaaaagaattgagaagaagaagaaaaccccaaaagaaacaataggcagtggcaaaagtagtagcagtagcagatgagagtgtaagactatagaacaaaccggctggccca

SEQ ID NO: 80033 - DNA, 345 bp, Oryza sativa
  Clone ID: PAT_MRT4530_79698C.1
gagcggaaaaaacgcgatggatatgtgcagaattttctcttagcagcctttccgacgagaagcttttttatatacgctgtgagatccatgcttccggggtgggcgtgagaatgatgggagtaggacactcgatggaccacgacatgatgttcaccatcccgcacaagttagtggctatctagttcctcatccttcgagacgacatcctcttttttcgggtgtatcgggacgatactgtagaagagatggatggcgcattaaagatgcacattatccccacacaagaactcgcccacatgctctgttctccgaagaggaggctgttcattccttctcctgaggatt

SEQ ID NO: 80034 - DNA, 3084 bp, Oryza sativa
  Clone ID: PAT_MRT4530_79699C.1
atggcacggggctctgctctgctcgacggcagtgtactaccgccttcccgcatcgtgagcgagaggcacgccggactaccgcgccgcttcatgccggagtccgccaccggtcgggagatagtgatgctgggcgaggggcgcccggcaccagactacccggggcggtccatcttcttcctccccttcgcaatggctgggctggtcccgccattttcttctttcttcatggatgtcctggagttctacgatctccagatggcgcacctcacccctaatgcggtgatgacattggccatcttcgcgcacctgtgcgagatgttcattggggtgcgcccctctcttcagctgttccggtggttcttcaccgtgcagtcggtgtcaccgccgtcggtggttggcggctgctacttccagccgcgggggccgaagagcgactggttctacacccccctcgccaatgaaacgcgcctccgacttccaagccagcccccggcgcaggtctccagctggcgggcgccggtagatctgggggaggactacgacgccgtcctcgatcgcctggcgggcctgcgatcccaggggctcaccggggccatggtgtacggcgattacctccgtcgccggattgcgccgctccaacggcgcgcccggagcgcctgggagtacactggacctgaagactacatgcggacccaccagggagccagatgggattgggctcccgaggacttcaagatcgtggtccaaagggtgctgaatcttagctccgtggaggcgtctcgcattcctcaggagatcctccccctctgcagcgatcccgaccgcgcctccattctaaccattatgatgggggtcggggcctcagaggagagagcccctaagggccacgacggcgcgggcgagcgccgccggggggaacaatctgccccaggagggggtcgtgcttctgggccccgcttcgggggctcggggagcagccgccctgccgacgcccaggggaagaggaagctgggaggaacacctcccccatctcctccccgagggggcggggcggcgcgtgccagcagtcggcgcccggagggagccgcgccgacgtcgcagcccgagggagagcgcaagaagaaacggctccgcaagacgggggagacggaaccatgccggggaaacctgatttcccctccaaggtggtcattcaaccgaccccctcgcagcgatgtcccgtcgcattcctcccgccaccccaagtccggccagtccgaggccgaagatccagcggccgcagaggagcggaggcgagaatctgaccggcgtgaagccgcagaccgccttcgggaagctgaagaggccgcccgggaggccgcccggattcgccaagcggaggaagctgctcgggaggaggccgcccgggctgaggaagccgctaaggaggaggccgcccgggctcgccaggctgaggcaacagctgctgctggcgcgtcaactgggcccactccctcgggcaaccctcaggcgacagcctccggggaggctcgcgacgaggccgcgggcacatcgcctgggcccacctccccgggcgacgcccaggatcaaacgggtccgggggacatccccgagcccagcacgtcctccggggggccgagccgcatcgccttctctccaaggcggctcttctcctcatcttccgtcgccccgctgagcgccgagcccattctgcaggccttggccgccgcaaacaccgcggtgctagatgggttcagcgcccaagtggaggccctgcgcgcggaacgagcggagctcgaggccgcatgggcacgcgttgaggaggggcggcgctcggtggacgccatggtggaggtgggccgtaaagctcaccgccgtcacgtctcggagcttgaagcccggaaggcggcgctgacggagatcgctcgtgaggtggaggaggagcgagcggccgccctcatcgctaccaccacgatgattgaggcgcaagacgccctccgccttcaaaacgccagccgggaggcggagctgaaagaaaagctcgacgccgcccagggagtccttgactccgccgctgcccgagagcggcgggtaacagagactgaggcggcgtcccggcggcgcgaggagtcccttgaggcccgtgctatggcgctggaagaacacgccggcgccgtggagaaaggcttgacggaccgcgaggccgccgctgctctccgggaggcgacgctggcggcgcacgaggccgcctgcgccgaggaggagtgcgcgctccgcctccgcgaggacacactcgctgagcgggagcgagctctcgaggaggctgaggccacgaccaaacggctggcggacagcctgtccctccgcgaggcggcgcaggaggagcaggcgcgccgcaatcttgaatgcgtccgcgccgagagagccgcactggagcagcgggctgctgacctcgaggcgcgggaaaaggagctggacgcgagggcgcataccggtggggcggccgcgggcgaaagcgacttagccgcccgcctcgcagctgccgaacacaccgtcgccgatatgcagcgagcgctggactcctccaccggggaggccgaggcccttcgcttggcgggcgagattgggcccggcatgctttgggatgcggtctcccgcctgaagcgcgccggtcggcaagcgggcctctggaaaggccagacgacggtgccccccaccaatctggaaggcctcgctccgcacctcaacaggatggcctgggttctcgaacaactccccgaggagcttgagaagaccatcaagtcatcctcgagggacctcgcgcggggagcggtcgaactcgtgctggcgagttaccaggcccgggaccccaacttctctccatggatggcgctggaggagttccctcccgggaccgaggacgacgcgcgcgcgcgggtcggggatgctgccgaccacatcgtcaacggcttcgagggctcggcccctcggctcgcgttcgcccccgactccgacgaggaggggaacgccagcagtgcaagcgacggtggcaacgaggccggcgacctgggcgcgtcagaatga

SEQ ID NO: 80035 - DNA, 751 bp, Oryza sativa
  Clone ID: PAT_MRT4530_7969C.1
atggcggccgacctcccgcgccggtttcctcccttccccggccaccctctctcgccccggctctatttaaaccctccccgcaccccctgtgtccggttccgcctctcgccgctctctctctccgccggaatcgagctcgcgccgtcgctctctctctccgccgtcgccgccgagctccggtccgccgccgtcgtcgccccggacctcctcccgtttcggcgtcaccttcttcgggttcgccgcaacctcgccgacctcgtccacccctccgttttgcccgccgaccgccggaacgccgccgtcctcgtcgacccgagccgcgccgccgccttcctccgctccggtcgccgttcccgtcgccgccgtcgacccggggtgagccgtggaccgccgtttcgcttcccccttccctcccctctctcgggcgccgctccgccgcgccagtggtcaccggcggcgaccatcggggcgcgggtgcgccgcctcccgtcggctgtgccggcgtggccgccttcgggcgcgccccgcggctgccatgtggggcccggccgtcagccgcccgtgccctcgggtgcggctgacgcgtgggacccacggcgccgaccggtgtgagccgggtgcacccggtccaccatggaccgtgaggctgccgcgtgggccccactcccgtggacccggtccgcgcgcccctcccctcggccttattcaccctagattaaacaaaaccccaactagtggacactctactcat

SEQ ID NO: 80036 - DNA, 385 bp, Oryza sativa
  unsure (1)..(385): unsure at all n locations
  Clone ID: PAT_MRT4530_796C.1
agatatatatttcgcgtctcgatctcatcatcacaatttgggttttcttgantccttcttcttcttctttttgcaattaatatcatggatgcagctagagtttccttgtctgatctccatatttatttagttttgttngccgtgccgggntcgatttncagtgtagttcagtggtnagctagctagctaaanagtgagtgagtnagtgtcagctaggcagctggagatnganagtgtgagtttggtgatgagttggttgtgtgtttgtcagtgtgtgtnaaagtgtgtgtgcccttagcncatggaaagttggaaaggagagaaaggaagaaanaaaagggnattnagntcaggttnaaaaaaaaaaaaaaaaaaaaaaaaaaaa

SEQ ID NO: 80037 - DNA, 3303 bp, Oryza sativa
  Clone ID: PAT_MRT4530_79700C.1
atggcacggggctccgctctgctcgatggtagcgtgctgccgccttcccgcatcgtgagcgagaggcaggccgggctgccgcgccgcttcatgccggaatctgcctccggccgggagatagtcacgctgggcgagggacgcccggcgccagactacccggggcggtccgtcttcttcctcccttttgcaatggcagggctggttccgccattttcttctttcttcatggatgttctggagtttttcgatctccagatggcgcacctcacccccaacgcggtaatgacattggccatcttcgcgcacctgtgcgagatgttcatcggggtgcgcccatcccttcggctgttccggtggttcttcaccgtacagtcagtgtcgccgccgtcggtggttggtggctgctacttccagccgcgggggccggtgctgaaccgctacatcccctgcgtcctccgcaagaagtgggatgactggaagagcgactggttctacacccccctcgccgacgaggcgcgcctccgacctccgagccgacctccgagccagcccccggcgcaggcatccagcttgcgggcgccggtagatctgggagatggctatgacgccgtcctcgaccgcctggcgggcctgcgatcccaggggctcacaggggccatggtgtacggcgactaccttcgtcgccggattgcgccgctccagcggcgcgcccggggcgcctgggagtacaccgggtccgaagactacatgaggacccaccagggggtcagatgggactgggctcctgaggacttcaagatagtggtccaacgggtgctgaatctcagctccgtggaggcatcactcattccccaaggaatcctccctctctgcagcgatccagaccgcgcctccatcctgaccatcatgcaggcggtcggggcgtcggaggagcgggctcctcgaggccacgatggcgcgggcgggagccgcaggggggaacaatctaccccgggagggggtcgtgcttctgggccccgcgacgggggcccggggagcagccgccctgccgacgcccggggaagaggaagcagggaggaacccctcccccatctcctccccgagggggcggggcggcgcgtgccaacagcaggcgcccggaggggaccacgccgacgtcgcagcccgagggggagcgaaagaagaagcggctccgcaagatgggagggacagaaccatcccggggaaaccttatttcccctccaaggtggtcgtttaaccgatcccctcgcaggttcgtcccacgcccatcgtggctgtattcatcctctcaacgcgagttttcattcacccatcttgtttatcttctggtctttcttctgtttcagcgagatcccgtcgcgtccctcccgccattccaagtccggccagtctgaggccgaggatccggcggccgcagaggcccggaggcgggaatctgaccggcgagaagccgcggatcgcctacgggaagccgaggaggccgcccgggaggccgcccgggctcgccatgctgaggaagccgctcgggaggaggccagactccgccaggccgaggcgacgatgtcctccgaggcaacccgcgatactgaccggcaagaagccgcggatcgccttcgggaagccgaggaagctgcccaggtggccgtccgagctcgccaagctgaagaagccgctcgggaggaggtcagatttcaccaggacgaggcggcgacgacttccgaggcagctcgcgacgaggtcgcgggcgcatcgctggggcccactccctcgggcgacgctcgggaccaaccaggtccgggggacatccccgagtccggcgcgtccattggcgggccgagccgcgcggcatcctcaccgaggcggctctcccccacgccttccgctgccccactgagcgcagatccccttctgaaggccttggccgtcgcaaacaccacggtgttggacgggttaagtgcccagatggaggccctgcaagcagagcgggcggagctcgacgccacatgggcgcgtgtcgaagaggggcgacgctcagtggaggccatggtggaggtgggccgcaaggcacaccgccggcacgtctcagagctcgaagcccgtcagaaggtgctgggggagatcgccaaggaggtggaggaggagcggggggctgccctcatcgccactaccgtgatgaacgaggcgcaggacgccctccgccttcaatacgggagctgggaggcggagctagggaagaagctcgacaccgcccggggggtccttgacgctgccgctgcccgagaacagcgggcggcggagaccgaggcggcatcccggcagcgtgaagaaaccctcgaggcccgtgccatggcgctggaagagcgttcctgcgtcatggtgaaggatctggcggaccgtgaggccgccgttgccattcgggaggtcacactgacggcgcacgaagccgcctgtgccgaagaggagtccacactccgcctccgcgaagatgcactcatcgagcgggagcgagccctcgaggaggctgaggtcgcggcgaaaaggctggcggagagcgcgtccctccgtgaggctgcgctagaggaacaagcgcgccgtaatctggaaggtgcccgcgccgagagggccgcactgaaccagcgggccgctgaactcgaggcgcaggcaagggaattggacgcgagggcgcgcagcggcggggcggctgcgggcgaaagtgacttagtcgcccgcctcgcagctgccgaacacaccatcgccgatctgcagggcgcgctagactcgtccgccggggaggtcgaggcccttcgcttggcaggcgaggtagggcccggcatgcttcgagacgccgtctcccgtctagaccgcgccggccggcaggcgggcctctggggcgggcggactgcgaagtacgccgccaaccaggggggcctcgcccagcgcctctcggagatggccgggactcttcaacggctccccgaggagctcgagaggacgattaagtcatcctcgagggacctcgcccgaggagcggtggagctcgtactggcgagttaccaggccagggatcccgacttctccccctggacagcgctggacgagttccctcccgggaccgaggatggcgcgcgcgcgcaggtccgggacgccgccgaccatatcgtccacagcttcgagggttcggcccctcggctcgcgttcgccctcaactccgacgaggagggcgatgacggcggtgtgggcgacagtggcgacgaggctggcgacccgggtgcatcggagtga

SEQ ID NO: 80038 - DNA, 2766 bp, Oryza sativa
  Clone ID: PAT_MRT4530_79701C.1
atggcacggggctccgcaccgctcgacggtagcgtgctgccgccttcccgcatcgtgagcgagaggcaggccgggctgccgcgccgattcatgccggaatctgccaccggcagggaggtggtcgcgctgggcgagggacgcccggcgccacactacctggggcggtccgtcttcttcctccctttcgcaatggcggggctggtgctgaaccgctacattccctgcgtcctccgcaaaaagtgggacgactggaagagcgattggttctacacccccctcgccgacgaagcgcgcctccgacttccgagccagcccccggcgcaggcctccagctggcgggcgacggtagatctgggagacggctacgacgccgttcttgaccgcctggcgggtctgcgatcccaggggctcacgggggccagggtgttcggtgactaccttcgtcgctgggtcgcgccgctccagcggcgcgcccggggcgcctgggagtacaccgggcccgaggactacgtgaggacccaccaggggcgcaaatgggactgggaccctgaggacttcaggacggtggtccaacagatgctgaatctcagctccgtggaggcatccctcatcccccaaggggtcctccccctctgctgcaatccagagcgcgccaagatcctggccatcatgcaggtggtcagggcgtcgggggagcgggccccccgaggccacgatggcgcgggcgggagccgcaggggggaacaatctaccccgggtgggggtcgtgcttctgggccccgcgacgggggcccggggggcatccgccctgccgacgcccgggggaagaggaagcaggagggtacccctcccccatctcctccccgagggggcggggcggtgcgtgccagcagcaggcgcccggagggtgctgtgccgacgccgcagcccgagggggagcgaaagaagaaacggccccgcaagatgggggggaccgagccatgccgggggagcctcatcttgcccccgaggtggtcgtttagccgacctccccgcagccggtctgaggccgaggagacggcgaccgcggaggcccggaggcgggaagctgaccggcgagaagccgcggaccgcctccgggaagccgaggaggctgcccaggaggccgtccgggttcgccaggctgaggaggccgctcgggaggaggctaggctccgccgggccggggagtccgtccgggaggcagaggcggcgcgcgcacgccaggcggcctgccaaacccccgacccgactccgcccgagacgacgccgacttccgaggccacccacgacgaggccgcgggcgcgccgctcgggcccgacctctcgggcgacgcttgggacgagccagcttcgggggacgcccccgagtccggcacgtcgatcggcgggccgagccgcgcggcacccacaccgaggcggctctcccctctgccttccgctgccccactgagcgcggagcccttcctgcaggccttggccgccgcgaacagcacggtgctggacgggttaagtgcccagatggaggccctgcaggcggagcgggcggagctcaacgcggcgtgggcgcgcgtcgaggaggggcggcgctcggtggaggccatggtggaggcgggccgcaaggcacaccgccggcacgcctctcagctcgaggcccgtcgtagggacctggcggagatcgccagggaggtggaggaggagcgggagactgccctcatcgccactgccgtgctcgacgaggcgcgggacgacctccgcctccaatacgggagcctggcggcggagctagaggagaagctggacgccgcccggggacgcgaagaggcccttgaggctcgcgccacagcgctggaggagcgcgcccgcgccctggacgcgaaggagagaaacctggcggaccgcgaggccgccgtcgccaaccgggaggcaacactggcggcgcacgaggccgcctgcgccgaagaggagtcctcactccgcctccgcgaggacgcgctcaccgagcgggggcgaactctcgaagaggccgaggccgcggcgcagcgactggcggacagcctgttcctccgcgaggcagcgcgggaggagcaggcgcgccgcaatctggaaggcgcccacgccgagagggccgcactggatcagcgggccgctgagctcgaggcacgggcgaaggagctggacgcgagagcgcacagcggcggggcggccgcgggccacggcgacctagccgcccgcctcgcagccgccgaacacaccatcgccgagctgcagggcgcgctggactcgtccgccggggaggtcgaggccctccgcttggcgagcgagaccgcgccgggcggcaggcgagcctctggggcgggcggtacacgaagtacgccgccaaccagggggggcctcgcccagcgcctctcagagatggccggggccctcgagcggctccctgaggagctcgaggagacgatcaagtcatcctcgagggacctcgcccggggggcggtggagctcgtactggccagctaccaggccagggaccctgacttctccccgtgggcagcgctggaagagttccctcccggaaccgaggacggcgcgcgcgcgcaggtccgggacgccgccgaccacatcgtccacagcttcgagggtacggcccctcggctcgcgttctccctcgactccgacgaggagggcggtgacgatggtgcggacgacagcgacgacgaggccggcgacccgggcgcgtcggagtga

SEQ ID NO: 80039 - DNA, 823 bp, Oryza sativa
  Clone ID: PAT_MRT4530_79702C.1
aagattattttcgctccagattttattgctagtgtgatgatcaaaagaaaacgtatcgtttgacgaagtggagaattatgtgccaacccaaagaaagggggtttaggaattcatgattcagatatgaaaaacatcgcctttcttagcaagtggttatttcaactactcacggccgatggtgtctggcaacaattgattcgtaacaagtacttgggctcaaaacttgtgtcacaagttgagtttaaagctggggattcacaattctaggccagccttatgaaggtcaagcgtgactttttacattttggcaaattcattatgagagatggtgcccaaattaatcaggtttgggaagacaagtggttgggagaagcaccattgcgataacaatatccttgcctatacaatatagttaggaataaataggatactgtagcaaaagtgctacaaaattaccctccgaatgtatcttggtgaagggatcttattgggccaaaattagtggcatggaataaccttcttccacaaaccgctagcctagtgcttactgaggatcaagataagtttcatttggaatttaacccaaaatggagagttttcagtgaagtcgcattatcttgccttggtacattcagatttgccaaacataaacaaagtaatttagaaattaaaaatcaccctccttgggaaagcgaaacaatggttttatgccaaccgtgctatgatcaacatctgggacaaatgttcaacgacattcctatcaaagttcttcccgatgggcaaaaccaacgcccttcatggaagaatttcaagtttccagtag

SEQ ID NO: 80040 - DNA, 245 bp, Oryza sativa
  unsure (1)..(245): unsure at all n locations
  Clone ID: PAT_MRT4530_79703C.1
aaaaaanaggaaaaggaaaccanaggcttaaaggntgcccgtccccgtcgaagnctaaaaaaatccctgccgccgggcgccggggaccccttggagcgggtccttttgttgtatctagacgggtcagtgtaaccatcctcgaaagagactcgcatcctcttccttgtgcaagtagtatctatgtacttaaaacgaagatgcattggatgatggcgtcttctgtgcattcaaaaaaaaaaaaaaaa

SEQ ID NO: 80041 - DNA, 142 bp, Oryza sativa
  Clone ID: PAT_MRT4530_79704C.1
cctgaaagacctttacggtgtggacccaaaggtaattaaaaagcgcaccttcccaagaaaaagggactgttccgtgggcaaagcaagctcaagtcaagtagtggaatcctacaagccgaagggtaagggtgctgggggttag

SEQ ID NO: 80042 - DNA, 587 bp, Oryza sativa
  Clone ID: PAT_MRT4530_79705C.1
gcacgagggagagagagagagaacttgtctgagtttttttttggttttttcttgtcaacatgagggtactttttgatgtgcttaaacttacattccaaatttctaatatgttttgtattgccattcacaaattctaaaagaatgtacatctaaatacaatttggaaatcacctgaaaaaagtaccgtgttacagtttcatcgtgtcaggaaataccatggttggaaccatcggctaatatcaattccaaacatcccataattttgtggtcgccacagacattccatgtatttattctaatgccaagctcctctttcctttgtctttgtacttaagtccccattcttgtggaaacaatcaaattgcactttcttatccttactgattaggaagaaataggcagatattgtgcgttcgcgattaattcaacttgcttaagagaagagtcagaagccagaagatggagattcaccttccattgaatgttcagaaaaatcggctgaaacatttcttctcccgtcaggcatcagctataagtaatttcgtctaaattttctatgcaaccctcatgtgtttcatgtatcttaa

SEQ ID NO: 80043 - DNA, 219 bp, Oryza sativa
  Clone ID: PAT_MRT4530_79706C.1
atgcgtgttgtgcgaagccccaacgtgagagatgatggttgtgggggcaagacaagttcggcgctgcgcagtgcttatacgacacgtggaggaaattcagccagcgacaagttgcaacaaagagccaagcctcatcctgcccatgatgacccaacggcccgattcaatttgaacaaaccgaccaaaattaacaacatggaccaaaatatcaccaaatag

SEQ ID NO: 80044 - DNA, 119 bp, Oryza sativa
  Clone ID: PAT_MRT4530_79707C.1
caaaagcacattgaagcacgccccacgcagccgcctggtcagtttcatctaccgggcacctccccaccggccttctggcaggcaaccactccacctcacctttgccctcaattcctcag

SEQ ID NO: 80045 - DNA, 195 bp, Oryza sativa
  Clone ID: PAT_MRT4530_79708C.1
atggtggtccgggaagagggtgacggcggcgaggccgcggcggcggaggaggtgagcgaagtggatgagcgggacgccaccgccgccgccatgaacgaccgggagtccgggagctggttgctgatagtgtgtactgcgcagtggctgctaattgattgctgcagctcccacgtgtttggcacaagtaatatttaa

SEQ ID NO: 80046 - DNA, 276 bp, Oryza sativa
  Clone ID: PAT_MRT4530_79709C.1
atgggtatacccacgggcacaaataatctcacgggcatgggtatgggtaggcactacccgtgcccgtcgcgcccgattgccatccctacttccgagtccctaagcaccacttcgatacctccagtccccgtttgtgcatcatatgacccatcaacattaaccttcatccaaccttgctgcggcttctcccagtcgttccgccacagcaccatcaggagcagagaacgccctgaatccgccaggttctccaggcaatcaaacaaccaatggccataa

SEQ ID NO: 80047 - DNA, 449 bp, Oryza sativa
  Clone ID: PAT_MRT4530_7970C.1
gttgggattaacagaggccggccggaggggaagcaacccggcgcggctatttcggctccatcaatgacgccggcgaaagtttgcgggaggatttccagacgaatccgaaaaagagagagagagggaaaagtggggggggaaagattgagggaatcacggggagtgatttccccctctttattgcgcgcgggggcggcgggatgcggcggaatccgcggcggcggcggcgctagggcacgggcgaggcggcgggagcggcgggaggacagggatgacaggtgggccccacccgtcagcgagggtggcgggcgggcccgcccgtcagcggcacgcgcgcggggaggaggccgattgggccgcgggggagaggagagagagggagggaggtgggccgagccggcccaagaggggaagggggggaaaaagactttttagggtttttcttttta

SEQ ID NO: 80048 - DNA, 375 bp, Oryza sativa
  Clone ID: PAT_MRT4530_79710C.1
atgggccgctacagatcgcacacagtgtgcagccgaggagggcgcaccattgtccacgcgtcagatatctggagcagggttgcagacgagaagctgggccctcgccgtgcttctcctcttcacgtcatcgggcggctctgcggcggccgctccgccatcgaccaagggtggagctgctggtgccaagggcagcggcggcggtgcaccgtgatcgggatcaacctcggcaccacctactcatgggtcggcgtctaccggaacggcattgtcgagatcatcgccaacgaccaggggaatcatattacaccttggtggtggtggatcaccttcaccgacgatggcgagcggctcatcggcgaggccgccaagaactag

SEQ ID NO: 80049 - DNA, 470 bp, Oryza sativa
  Clone ID: PAT_MRT4530_79711C.1
atggcaccaacattgctgccggccttcttcaccgccgtccaccaccaccttgcccggcaaccgcgccggaacctagccgtgcccgccttcgtgccgtcacctcgccacgccggccttcgtgccggcgggcgccacccaacgccgcgccgggagaaaggaggccggcgagatcccgggcttcaccaccaccaccggcactgtcacctcgtcgcgtcgttctccaccttacccgcgccgccctggaggaggagagaagggggagggccccagagccgggggaggaccgccgcgccatcattctccatcaccacaggcgctacttcagccgcgtccgtgccctcgccggccggccttctccactggcgggctgccctggaggaggagagaagggggagggcccccgggccgggtgaggacctccgggccatcattctccgtcaccaccaccgctactccgtcgcacccgccgc

SEQ ID NO: 80050 - DNA, 783 bp, Oryza sativa
  Clone ID: PAT_MRT4530_79712C.1
atggagaccactagagagtggaaatatgaaatgccaagttgtgttgccgtgccggttgcggcaatcgacgacggcggttgcatccgtgcccatgactccaccgacgctcccgatgaacggcaccgcggcaaccggggcagaggcggtgcagccgattggtgtaccaccggcaccggatgctctctagcacggggcacctgcacggcgtgctcgctgacacgctccgcggctacagcgccatcgcgacaggctccatatatcggctacggctccacggcggcagcagcaacagcttgcgttcatggcagtagatcaatcagattattcggagggggagaggagctcgacagcgtggacaaagcgggcgtggagattgctcgacagctcgtccaacacatccttggggggtggggtggggggaggcatgctgcggcagggcgccaagagcaaatgcggcatgaagcgagaggaggcgaggctgccgccgtggaagcgtgtcgctgcgcggccgagagcatcgcgtcagagcgcgcggcggcgcacgacggcgcccctgagcctcccgagcgccctgtcgaactccggcagctccgcctccccgagcgcctcgacgttggtggcctcccaccaccagaaccgcctccccgcgacgtcgcgcagccgcgccacctccaccttggcctcgtccgccgcccgcctcaacgcctcgggctcgcagtcgtggacgtcggggacgggcgcttagcagcggctgcggaggacggcgtcgtcgacgagggatga

SEQ ID NO: 80051 - DNA, 591 bp, Oryza sativa
  Clone ID: PAT_MRT4530_79713C.1
atggccggggagatattatcgtcgcaggctagctttgtagttgtatgtgcctatcaaccagccggcatgatctgctgtagcgagcaggacagacagaggctggacctgggcgcggcgtgcgttgcggcaggccggcggcgggcgcggcgtgcggcggcggcgagccggcgaccgcggggcagcaagccaggcaggggcagccgccggctgggcgcaccattgcagccgcagcggctgtcggccgagcaggcgcagtgcgtcggtgtcgccggctcgttgactcaagggacgggccgcgcgacgctgtggcctgtccgcctgtggggcgtgccggcgtgggcggctggacgccgagccaccttccccttccgccgacgcctgacgaccgagcgggcgcgccgccttccccttccgccggaccaggctcgagcgatgggctgcgcggtgctgtggggcgtgtcggcgtgggcggctgggcgccgagccgcctccccttccgctgatgaccgaggccaggtgctgaggcgccactcgctgacgccgagacgccgacaggccacaccgccacaacactgccaccacgcacagtga

SEQ ID NO: 80052 - DNA, 442 bp, Oryza sativa
  unsure (1)..(442): unsure at all n locations
  Clone ID: PAT_MRT4530_79714C.1
tttnttttttnttttttttttttttttttttttttttttttttttttttttttttttttaaaaccagtcttacagagatgttttattttttacagaaaatttacccattggttgatcatttacatttgggcagcacaaaaatgggccatggaaagggggcccaccccaattggggattttttattacggggattacaacaaggtggctaatatcaacattttaactggaagagctcaagccccacttttttattttatgtcccaaagaaaattgggggatcctgccattttttttttgaaaaaaaagctttttaactggggctgaaaatggtggttttcacaaacacttttcctaaaaggaaatctccctcggggcatggaaaggccccccaccggatatgggttccaggttttctcccgcataaaagctaaggggagaaac

SEQ ID NO: 80053 - DNA, 628 bp, Oryza sativa
  Clone ID: PAT_MRT4530_79715C.1
actcccaccaccgcatcctccccgcttttcccactcccaaccacgaccgcggccggccggcgaatcgcctcgattccggcgtgcgaattcctccacctcgccgccgccgctgctcgcgaccgatcttcaccttccgcttccccccccctgcagccgattggactcgatcctatcctatcctatcctatccccgaacgggcgatctggtaggcgagagagaccagccatgtcgggggtgttcggcaaggtgttcgggaagtccaaggcgcagagccaggccaccgcgctggcctccatcgacaagctcagcgagactcttgaaatgctggaaaagaaagaaaatttgctagtgaagaaagcgaatcttgaggttgagaaggccaagaccttcactaaagcgaagaataaaagagctgcaatacaatgcttaaagaggaagagattatatgagcaacagattgagcagcttggtaatttccaattaaggatacatgatcagatgataatgctggaaggtgcaaaggctacaacagagactgttgatgcattgagaactggagcatcggcgatgaaagcaatgcacatagcgaccaatattgacgacgttgacaagaccatggatgaaatt

SEQ ID NO: 80054 - DNA, 3225 bp, Oryza sativa
  Clone ID: PAT_MRT4530_79716C.1
atggcacggggctccgcactgctcgatggtagcgtgctgccgccttctcgcatcgtgagcgagaggcaggccgggctgccgcgccgattcatgccggaatctgccaccggctgggaggtggtcgagctgggcgagggacgcctggcgccacactactcggggcggtccgtcttcttcctctctttcgcaatggcagggctggtcccgccattctcttctttcttcatggatgttctggagttttataatctccagatggcgcacctcacccccaacgcggtaatgacgttggccatcttcgcgcacctgtgcgagatgtttatcggggtacgcccatctcttcggctgttccggtggttcttcaccgcacagccggtgtcgccgccgtcggtagtcagtggctgctacttccagccgcaggggccggtgctgagccgctacattccctgcgtcctccgcaagaagtgggacgactggaagagcgactggttctacaccccccttgccgacgaagcgcgcctccgacttccgagccagcccccggcgcaggcctccagctggcgggcgccggtagatctgggagacggctacgacgccgttcttgaccgcctggcgggtctgcgatcccagatgctcacaggggccatggtgtacggcgactaccttcgtcgccggatcgcgccgctccagcggcgtgcccggggcgcctgggagtacaccgggtccgaggattacatgaggacccaccaggggggcagatgggactgggtccctgaggacttcaagatggtggtccaacgggtgctgaatctcagctccgtggaggcatccctcatcccccaaggagtcctccccctctgcagcgatccagatcgcgccaacatcctgaccatcatgcaggcggtcggggcgtcggaggagcgggctcctcgaggccacgatggcgcgggtgggagccgcagggggaacaatctaccccgggagggggtcgtgcttctgggccccacgacgggggcccgaggggcagccgccctgccgacgcccgggggaagaggaagcaggagggtaccccttccccatctcctccccgggggggcggggcggtgcgtgccagcagcaggcgcccggagagtgccgtgccgacgccgcggcccgagggggagcgaaagaagaagcggctccgcaagatgggggagatcgaaacatgccggggaaacctcatctcacccccaaggtggtcgtttagccgacctccccgcaggttcgtcctcgcgcccaccgcggccgtactcattctcccatctcccaaggcgagttttcacttacccgtttctttttgtcttctggtttttcttctgcttcagcgagatcccgtcgtgcccccctcgccattccaagtccggctggtctgaggccgaggaggcggcgaccgtggaggcccggaggcgggaagctgaccggcgagatgccgtagaccgtctccgggaagccgaggaagctgcccaggaggccgtccgggttcgccaggctgaggaaaccactcgggaggaggccagactccgctgggccgaggagtccgtccgggaggtagaggcggctcgcgcatgccaggcggcctgccaagccctcgagccgactccgcccgaagcgacgacgacttccgaggccacccacgacgaggccgcgggcgcactgctcgggcccgacccctcggacgacgttcgggacgggccagcttcgggggacgcccccgagtccggcacgtcgatcggcgggccgagccgcgcggcgcccacaccgaggcggctctcccctctgccctctgctgcccctccgagcgcggagcccctcttgcaggccttggccgccgcgaacaccacggtgttggacgggttaagcgcccagatggaggtcctgcaggcggagtgggcggagctcgacgcggcgtgggcacgcgtcgaagaggggcgacgctcggtggaggccatggtggaggcgggccgcaaggcacaccaccggcacgcctcagagctcgaggcccgtcggagggagctcgcggagatcgccagggaggtggaggaggaacgggagactgccctcatcgccaccgccgtgctcgacgaggtgcgggacgacctccgcctccaatacgggagtcgggcggcggagctagagaagaagctcgacgccgcccggggagtccttgacgccgccgctgcccgggaacggcgggcggcggagaacgaggcggcgtcccggcggcgcgaagaggcccttgaggctcgcgccacggcgctggaagagcgtgcccacgcaaaggagagggacctggcggaccgcgaggccgccgtcgccatctgggaggccactctggcggcgcacgaggccgcctgtgccgaagaggagtccgcactccgcctccacgaggatacgctcaccgagcgggagcaagctctcgaggaggccgaggccgcggcgcacggctggcggacaacctgttccttcgcgaggcagcgcaggaggagcaggtgcgccgcaatctggaaggctcccgcgccgagaaggccacactggatcagcgggccgctgaactcgaggcgcgggcgaaggagctggacgcgagggcgcgcaggcggcggggcggccgcgggcgacagcgacttagccgcccgcctcgcagctgccgaacacaccatcgccgagctgcagggcgcgctggactcgtccgccggggaggtcgaggccctccgcttggcaggcgaggtagggcccggcatgcttcgggacgccgtctcccgtctagaccgcgccgggcggcaggcgggcctctgggacgagcggaccgcgaagtacaccgccaaccaggggggcctctcccagcgcctctcagagatggctaggaccctccagcggctctccgaggagctcgaggagacgatcaagtcatcctcgagagacctcgcccggggggcagtggagctcgtactggcaagctaccaggccagggaccccgacttctccccgtgggcagcgctggacgagttccctcccggaaccgaggacggcacgcgcgcgcaggtccgggaagccgccgactacatcgtccacagcttcaagggtacggcccctcggctcgcgttcgccctcgactccgacgaggagggcggtgacggcggtgaggatgacagcgacgacgaggctggcgacccgggtgcatcgaagtga

SEQ ID NO: 80055 - DNA, 213 bp, Oryza sativa
  Clone ID: PAT_MRT4530_79717C.1
atgcccaaggttggcggccccaccatcaaccgcgcccacctccaagtcgccctcgagcttgctggccgccgcaacccccgccgaccaggtccacttagtgttgcggtgttaagaggcgccctcctccatggatggacctccacaacacagtccaagagatatgataccatgtctaattacaagcccaccgtctcacgtgatacgagatactag

SEQ ID NO: 80056 - DNA, 2295 bp, Oryza sativa
  Clone ID: PAT_MRT4530_79718C.1
atgtcaatctcactccccccttctcctctctcgagcgcgacggccgacaacaacacctgccgcaacctcgaccgccacgcctattgcagccgcgtgctccgtctcggcctcgccgatctgggagtagcagggcactcgcgcggcagcggtgagccgcacgagctggcgggcattgaggactcaacagacgccgcatcgcttgtgcagggggtgccacccagcgccgatggcagctgcggagacagtgggcgccatggaggcgcagggagacgcgcaccgcgtcgccgttatcccccgcgggagccgttcgcccccgccgacgggcaaagtggggaagtcggcgtcatactccagcctctcggcacggtttcgacggaacaactggacagctacctcagctcccctggcgtcgactcgcgaccaacgaagatcgtggagtacgatgacttctgctaccgctacgactaccgcaacctcgacgacttcgacgaaggctttgaagacaactacacacctccctacttcggcatcttcatggttgacaacgagacggaagaacaacgtaaagcccgagaagcagaagaactacgccaagacgtcgaggaaactgcggtttttcgcacccctcaacagaacgcggttgcagcgatcaccctcctcgacaccctcctcaaggaagacgcactcaatcaacccaatcacgtcgtcaacatcttgaaccagaccaagaccatgatcgccgcctcggtcccggttaactctgcaagcgtcagcacgctgactagcagccgagtttctcctcttcgatctcaagactatcaccaaccaagcctcagcgtcgccggcgcgagatccagtcgcaggagcagggccggcttcaagccgactggaatcgagaagtatgacggcaccactaacccggagtcctggctcaccgtctacggtctcgcaattcgcgtagcgggaggagacagcaaagccatggcaaactatttgcctatggccctagcggattctgcccagtcctgtcttcacgggttaccccgtggtacaatcggatcatgggcgaaacttggcgaacacttcatcgccaacttccagggtacctttgaacgccctggtacacattttgatctctacaacgtcattcagaagtctggagaatcccttcgagattacatccgacgcttttccgagcaacgtaacaagatctctgacattaccgacgacgtcatcatcaccgccttcaccaagggcattcgccacgaagacctagtcggcaagttcgggcgcaagcctcccaagacagtcaagcagatgtccgaaaaagccaacgaatatgccaaagccgaagatgccattaccgcgtccaagcagtcaggcaccacttggaagccgaagaaagatacgccgactacaggggagactggaagtaccaatcacaaggatcgcaagcgtaagcccgaggaacttgtggcaactactacaccatcctcccgacaacattcgcgcatcaacacttttgacaagatcatgaactcccaatatccgcatcatcccaattccaatcacgcggccaaagattgtttcgtctacaaacagtttgcaaaacaatacaccaagaacgcacgtaaggcctccgacggagatcaaagcacgtcaaagaagaaggatgatgaaggtgatgccccgactggttttcaagaccaccgcaaggaactcaaccacatctttggtggacccctggcttatgaatctaagagaaagcaaaagctgaccaaacgggagatcaacgctgttcagcccgatatgccccaatatcttcggtggttagagacaacaattaagtttgaccgctcggatcatcctgaccgagtggtccacccggggcggtaccccctggtactagacctagtggttcacaacgtcaagcttcacagatccctcatcgatggtggcagtgcactcaacatccttttcgcccccgccggccgcccgcctctgctgccgggcgtggccccgccggccgccgccacgcacggcaccgccgctgcccgccatggccgccgccccgcgtggcaccgccgccgcccgccatggtcgccgccgggcgcggcccctccagccgccgcccgtcacggccgtcgccgccgtggccccgccggccgccggccaccggatcgaatgggaagggaggagaggaggagaaggggcggatgggaagtgaggaggggaggaggagttagatctgtgaagaggaagtggaacggatctatgaagtgtaggagaggataa

SEQ ID NO: 80057 - DNA, 3039 bp, Oryza sativa
  Clone ID: PAT_MRT4530_79719C.1
atggcacggggttccgctctgctcgatggtagcgtgctgccgccttcccggatcgtgagcaagaggcaggctgggctgtcgcgccgcttcatgccggaatctgccaccggccaggagatagtcacgctgggcgagggacgcccggcgccagactacccggggcggtccgtcttctttctcccctttgcaatggcagggctggttccaccattttcttctttcttcatggatgttctggagttctacgatctccagatggcgcacctcacccccaacgcggtgatgacattggccatcttcgcgcatctgtgcgagatgttcattggggtgcgcccatctcttcggctgttccggtggttcttcaccgtgcagtcggtgtcgccgccatcggtagttggtggctgctacttccagccacgggggtcggtgctgaaccgctacatcccctgcgccctccgcaagaagtgggacgactggaagagcgactggttctacactcccctcgccgacgaagcgcgcctccgacttccgagccagcccccggcgcagacctccagctggcgggcgccggtagatctgggggatggatatgacgccgtcctcgaccgcctggcgggcctgcgatcccaggggctcacaggggccatggtgtacggcgactacctccgtcgtcggattgcgccgctccagcgacgcgctcggggcgcctgggagtacaccgggtccgaagacttcacgaggacccaccagggagtgagatgggactgggctcctgaggacttcaagatattggtccaacgggtgctgaatctcaactccgtagaggcggccctcattccccaaggaatcctccccctctgcagcgatccagaccgcgcctccatcctgaccattatgatggcggtcggggcctcagaggagcgagctccaaagggccacgacggcgcagacgggagccgcaggggggaacaatctaccccgagagagggtcgtgcttctgggtcccgcgacaggggcccggggagcagccgccctgccgacgcccgggggaagaggaagcagggaggaacacctcccccatctcctccccgaggggacggggcggcgcgtgccagtaacaggcgcccggagggggccgcgccaacatcgcagcccgagggggagcgcaagaagaagcggccccgtaagatgggggagacagaaccatctcggggaaacctcatttcccctccaaagtggtcgtttaaccgaccccctcgcagcgagatcccgtcgcgtccctcccgccattccaagttcggccagtctgaggccgaggatccggcggccgcagaggccctcaggcgggaatctgaccggcgagaggccgcggatcgcctacgggaagccgaggaggccgcccgggctcgccaggccgaggaaaccgctcgggaggaggccggatttcgccaggacgaggcgatggcgacttccgaggcagctcgcgacgaggccgcgggcgcgtcgcttgggcccactccctcaggcgacactcaggcgacaacttccggggcagctggcgacgaggccgcgggcgcgtcgcttgggcctactacctcgggcgacgctcaggaccaaccgggtccgggggacatccccgagtccggcacttccatcggcggcccgagccgcgtggcatcctctccaaggcggctcttccccacgccttctatcgccctactgaacgcagagccccttctgcaggccttggccgccgcaaacaccacggcagagcgggcggagctcgacgccgcgtgggcgcgtgtcgaagaggggcgacgctcggtggaggccatggtggaggtgggccgtaaggctcatcgccggcacgtctcggagcttgaaactcgtaagaaggtgctggcggagatcgccaaggaagtggaggaggagcggggggctgccctcattgccaccaccgtgatgaacgaggcgcaggacaccctccgccttcaatacgggagctgggaggcggagctagggaagaagctcgacgccgcccagggggtgcttgacgctgccgctgcccgagaacagcgggcggcggagaccgaagcggcgtcccggcggcgcgaagaggcccttgaggcgcgcgccatggcgctggaagagcgcgcctgcgtcgtggagagggatctggcggaccgcgaggccgccgtcaccatccgggaagcaacgctggtggcgcacgaggctgcctgcgccgaagaagagttcacgctccgcctccgcgaggacgcgctcaccgaacgggagcgagctctcgaggaggccgaggccgcggcgcaacagctggcggagcaggcgcgccgcaatctggaaggtgcccgcgccgagagggccgtactgaaccaacgggccgctgagctcgaggcgcgggcgaaggagctggacgcgagggcgcgcagcggcggggcggccacgggcgaaagcgacttagccgcccacctcgcagctgccgaacgcaccatcgccgatctgcagggcgcgctgaactcgtccgccggggaggtcgaagccctccgcttggcaggcgaggtagggcccggcatgctttgggacgccgtctcccgcctagattgcgccggtcggcaagtgggcctctggagagggcggaccgtaaagtacgccgccaaccagggaggcctcgcccagcgcctctcgaagatggccggggctctccaacggctccccgaggagctcgagaagacaattaagtcatcctcgagggacctcgcccaaggagcggtggagctcgtcctggcgagttaccaggccagggaccccaatttctctccatggatggcgctggatgagttccctcctgggaccgaggaccgcgcgcgcgcgcaggtccgggatgccgccgaccatatcgtcgacagcttcgagggctcggcccctcggcttgcgttcgcccccaactccgacgaggagggcaatgccggtggtgcagacgacagtgacgtcgaggccggcgatccgggcgcatcggattga

SEQ ID NO: 80058 - DNA, 347 bp, Oryza sativa
  Clone ID: PAT_MRT4530_7971C.1
gcctgcttgatctactggcattaaacgggacatgaacaacacattactgtgccggagaagatgagctcagccccatctctcccaagcttcttccttctaatccttgctgacatgcggacaaccggtccaaaatacaaacgtccggccacattatttggagacaaactcagtgccgatgtcagcgggatactccagtgggccccacccggctcacctgacacgtgcggctccactgttcgctggcgccaatgttttatactccagttttaacaccccccaccaacctccaacaaagagaaaacaaggacccatcgtcgactcgcctaatcatcatcctttccgatgcc

SEQ ID NO: 80059 - DNA, 630 bp, Oryza sativa
  Clone ID: PAT_MRT4530_79720C.1
atgaagtctgagtatatgaccgaggaagatccactggtattatggcaatccctgaaggatcgctgcgaccatcaagggtcaattttgctcccatgggcacaacatggcctaatcaccctatgcttccaagactacaaatttatagtggcgtataactctgccctatattggatcagtgcttggttatgtttatgtgaccaaaagatcactgatactgagatgattgagaaaaagttatccacctaccaccccaacaacatgcatgggagaagagatagaagggtaagggaagtatcatgttcaaggggcaagggaagggtaagcccaaaggcaaaagccgaatgcaagaaagttacatgtggaacatctggggaaaacatgataattgctatagatgtggaggcattgagcattggtctcgtaactgccatgttcccaagcatctggttgagctctaatgagaaaatgagccaatatgagtcatacttcaccactgagcctgaagctcacattgaaaactatgatgacatgtttgtcaacactaaggatggtgaagatgtccatatggacgatgatgaggacaaccttattgaagaagtaatctcctatatgtctcttataagtgtctga

SEQ ID NO: 80060 - DNA, 4308 bp, Oryza sativa
  Clone ID: PAT_MRT4530_79721C.1
atgggttccgtctccggcatcgacgacttcgtcttccctcccgggcaggcgtttcggttcggcaacctcgacttcatcaccaacgtcttcggcaagatctctctccttgactcagattcgaaccagtcagggagagaccaggtctcagccccgttcggtattccgaactcggccaagatctaccccaagcttatcttgatcgagtcggcttcaaaccactcggacgagatcccatctactccaacaacaccagatcgagatgatggggcctacccgccaatcctgatgaaactccccgacgatttggctgccgtcttcactacaagggcgtctcctcccccgttttcatggccgacaacgagacggaagaacaacgccaagcccgagaaacggaagcacgacgcgtacaacaggaggctgagcgacgccgactggaagaggagcgccaagcacaagagcaagaacggctgcagcgtgagcaacaagaacgcgaatgggctgcaaaggaggccgaggaccgacgacaacgagccttggacgcagggcgatgagcgcgagatctcatcgggcagcaagacgttgaggggacagcggtcttccgtacccctcaacagaacgttgtcgcagaaaatcaccctcctcgacaccctcctcaaggaagacgcactcaatcaagctgatcaagtcgtcaacatcttgaaccagaccaagaccatgattgccacttcggtcccggttaactccggaagcgtccgcatgtcgactggcagccgggttccccatctccgatctcatgattatcaccagccaagcctcagcatcgccggcgcaggatccaatcgcaggagcaggggccacgacgagcgatctgttcactcgcctcctgagcgacacaacaggaggagacagcaaggccgtggcaacctacttacctgtggccctagcggattctgcccggtcctggcttcatgggttaccacgtggcacgatcggatcatgggcggaacttcgcgaccacttcatcgccaacttccagggcaccttcgccccggcacacagtttgatctctacaacgtcattcagaagtctggagaatcccttcgagattacatccgacacttctctgaacaacgtaacaagatctctgacattaccgacgacgtcatcatcgccgctttcaccaaggggattcgtcacgaagatctagtcggcaagttcggacgcaagcctcccaagacggtcaaacagatgtttgaaaaagccaacgagtatgccaaagccgaagactccattatcgcatccaagcagtcgggtcctacttggaagccaaagaaagatgtgccgactacgggaggggttggaagtaacaatcacaaggaccgcaagcgtaagcctgaggaacttgttgcgactaccacacactcctcccgacaacgttcgcgcgtcaacacttttgacaagatcatgaactcccaatgtccgcatcatcccaactccaatcatgcagccaaagattgcttcgtctacaagcagtttgcagagcaatatgccaagaatgcacgaaagacctctgatggagaacaaagcacatcgaaaaagaaggatgatgatgatgatgccccgacaggttttcaagatcatcgcaaggaactcaaccacatctttggcggccctctggcttacgagtctaaaagaaagcaaaagctgactgaacgggagatcaacgctgttcagcccgatacgccccaatatcttcgatggtcggagacaacaatcaaatccctcatcgatggcggcagcgcactcaatatcctcttcgccaagaccttggacgacatgcagatccctcgcaccgagttgaagccgagtaatgcgcccttccacggagtcatcctagggttatctgccacaccactcggccggattactcttccggttacctttggtactcgggagaacttccgcacagagaacgtctgcttcgaagttgctgatttcgagacagcgtatcacgccatactcggacgcccggcgttagctaaatttatggctgtcccgcactacacctacatgatgatgcagatgcctggtcctcgaggagtcatatccctgcggagcgacatcaaacaagccgtcacatgcgataaggaaagcggcgagatggcccaaacccgcgagatcgcggtcgcccgagaagacatccgactggccgcaaccacggcaagcgaaggagaagtggctacgaccaagatctccaagactggagaaagcgaagccaagaccaagaaaattcccctagatccttctgatcctactaaaactgctgtaataggcgccgagttagattatatctttgcgtggaaaccatccgatatgcctggtaatcctagagaggtgattgagcactctttgcatgttaaggaagacgctaaacccatcaaacaacgacttcgccgctttgcacaagacaggaaggacacgatcaaggaggaattgaccaagctattagcagcgggcttcatcaaagatgtccttcatcccgattggctggctaacccagtcctagttcggaagaagactgggcaatggcgcatgtgtgtcgattacaccgacctcaacaagtcttgccccaaatatcctttcgggttgcctcgcatggaccagatccgattgaaggaatccgactgcttgaagacttcgttcatcacgccctttggggcctactgctacatcaccatgcctttcggattaaagaacgcaggagcaacttatcaacgcatgatccagagacgtttctcaactcaaatcggtcgcaatgttgaagcctatgtggatgatgtagtcgtcaagactaagcagaaggatgatttgatcacggacctggaagaaacctttgcgagcatccgcgctttcaggatgaaactaaaccctaaaaaatgcaccttcagagtaccgtcagggaagctgcttggatttatggtgtctcatagaggcatacaggccaacctggagaaagtcaacgccatcctcaacatgaaaccgccgagttcccagaaagatgttcaaaagctgactggatgcatggcggcgctcagccggtttgtttcacgactcggcgagcgggggatgcccttcttcaagctgttaaagaaaacagacaatttccagtggggacccgaagcacagaaagcctttgaagacttcaagaaacttctcactactccaccagttctggcctcaccacacccacaagagccgctattactgtacgtatcggcaacttctcaagtcgtgagcacagttctggttatcgagcgtgaagaagaaggccatgttcagaaagtccagcgaccaatctactttgtcagcgaggttttggccgactccaagacgagatatcctcaagttcagaagctgttatatggtgttctaattaccgtcaggaaattatctcactacttccaagctgacttcgtcgccgagtggaccgagtgccaagaggacacgctcgaggagaagatggagtattggactatgcactttgacgggtcaaagagactttcgggcactggggccggggttgttttaatttccccgactggagaaagactgagctacgtgctatggatacatttctctacatctcacaacgtggcagaatacgaggcgctccttcacggactatggatcgcaatctctttgggaatcaggcgtttgatagttcgcggagattcacagttagttgttaatcaagttatgaaagagtggtcctgccttgacgacaatatgatcgcttatcgacaagaggtacgcaagttggaggataagttcgatggactcaaactcacccacgttcttcggcacaataatgaagcagccgacagactagcaaattttggatccaaacgcgaagcggctccttctgacgtgttcgtcgaacatctttacgaaccaaccgtaccaaggagagaaacagctgaggccacggacactcaagacatagccatggttgaagccgactggagagagcccctcatacaatttctgaccaaccaagaactcccccaagataaagatgaagccgagcggatttccaggcgcagcaggctttatattattcatgagactgagctgtacaagaaaagtccatcaggaatcgtgcaacgctgtgtgtctttggaggaaaggagacaatttgctgaaggatatacattctggtatctgtggcaattacgctgctgcacgcaccattgtcggcaaggcttactggcaaggttttttctggcctactgttgtgtccgatgctga

SEQ ID NO: 80061 - DNA, 3027 bp, Oryza sativa
  Clone ID: PAT_MRT4530_79722C.1
atggcacggggctccgcaccgctcgacggtagcgtgctgccgccttcccgcatcgtgagcgagaggcaggccgggctgccgcgccgattcatgccggaatctgccaccggccgggaggtggtcgcgctgggcgagggacacccggcgccacactacccagggcggtccgtcttcttcctctctttcgcaatggcggggctggtcccgccattctctatttttttcatggatattctggagttttatgatctccagatggcgcacctcacccccaacgcgataatgacgttggccatcttcgcgcacctgtgcgagatgtttatcggggtgcgcccatctctccggctgttccggtggttcttcaccgtacagccggtgtcgccgccgacggtagtcggtggctgctacttccagccgcgggggcaggtgttgaaccgctacattccttgcgtcctccgcaaaaagtgggacgactggaagagcgattggttctacacccccctcgccgacgaagcgcgcctccgacttcagagccagcctccggcgcaggcctccagctggcgggcggcggtagatctgggagacggctacgacgccgttcttgaccgcctggcgggtctgcgatcccaggggctcacgggggccatggtgttcggcgactaccttcgtcgccggatcgcgccgctccagcggcgcgcccggggcgcctgggagtacaccgggcccgaggactacatgaggacccaccaggggcgcaaatgggactgggaccctgaggacttcaggatggtggtccaacgggtgctgaatctcagctccgtggaggcatccctcatcccccaaggggtcctccccctctgctgcgatccagagcgcgccaacatcctgaccatcatgcaggaggtcggggcgtcgggggagcgggtcccccgtggccacgatggcgcgggagggagccgcaggggggaacaatctaccccgggagggggtcgtgcttctgggccccgcgacgggggcccggggggcagccgccctgccgacgcccgggggaagaggaagcaggagggtacccctcccccatctcctccccgagggggcggggcggtgcgtgccagcagcaggcgcccggagggtgccgtgccgacgccgcagcccgagggggagcgaaagaagaaacggccccgcaagatgggggggaccgagccatgccgggggaacctcatctcacccctgaggtggtcgtttagccgacctccccgcagcgagatcccgtcacgccccccccgccattccaagtccggccggtctgaggccgaggagacggtgaccgcggaggcccagaggcgggaagctgaccggcgagaagccgtggaccgcctccgggaagccgaggaggctgcccaggaggccgtccgggttcgccaggctgaggaggccgctcgggaggaggccagactccgccgggccggggagtccgtccgggaggcagaggcggcgcgcgcatgccaggcggcctgccaagcccccgacccgactccgcccgaggcgacgacgacttccgaggccacccacgatgaggccgcgggcgcgccgctcgggcccgacccctcgggcgacgcttgggacgagccagcttcgggggacgcccccaagtccggcacgtcgatcggcgggccgagccgcgcggcacccacatcgaggcgactctcccctctgccttccgctgccccactgagcacggagcccctcctgcaggtcttggccaccgcgaacagcacggtgctggacgggttaactgcccagatggaggccctgcaggcggagcgggcgcagctcgacgcggcgtgggcgcgcgtcgaggaggggcggcgctcggtggaggccatggtggaggcgggccgcaaggcacaccgccggcacgcctcacagctcgaggcccgtcgtagggacctggcggagatcgccagggaggtggaggaggagcgggagactgccctcatcaccaccgccgtgctcgacgaggcgcgggacgacctccgcctaccatacgggagccgggcggcggagctagaggagaagctcgacaccgcccggggagtccttgacgccgccgcttcccgggaacggcgggcggcggagaacgaggcggcgtcccggcagcgcgatgaggcccttgagactagcgccacggcgctggaggagcgcgcccgcgccctggacgcgaaggagagagacttggcggaccgtgaggccgccgttgccacccgggaggcaacactggcggcgcacgaggccacctgcgccgaagaggagtccgcactccgcctccgtgaggacgcggtcaccgagcggggcctgttcctccgcgaggcagcgcgggaggagcaggcgcgccgcaatctggaaggcgtccgcgccgagagggccacactggatcagcgggccgctgagctcgaggcgtgggcgaaggagctggacgcgagagcgcacagcggcggggcggccacgggccacggcgacctagccgcccgcctcgcagccgccgaacacaccatcgccgagctgcagggcgcgctggactcgtccgccggggaggtcgaggccctccgcttggcgagcgaggtagggcccggcatgcttcgggacaccgtctcccgtctagaccgcgccgggcggcaggtgggcctctggggcgggcggtacgcgaagtacgccgccaaccaggggggcctcgcccagcgcctctcagagatggccggggtcctcaagcggctccccgaggagctcgaggagacgatcaagtcatcctcgagggacctcgcccggggggcagtggagctcgtactagcaagctaccaggccagggaccctaacttctccccgtgggcagcgctggaagagttccctcccgaaaccgaggacggcgcgcgcgcaggtccgggacgccgccgaccacatcgtctacagcttcgagggtacggcccctcggctcgcgttcgccctcgactccgacgaggagggcggtga

SEQ ID NO: 80062 - DNA, 486 bp, Oryza sativa
  Clone ID: PAT_MRT4530_79723C.1
atggctgacataggcagcggcgcccacacccgcactgtcgacgcactgccccgtgatcgtgagctcctcgccggcggcgtcggcaccggcgcaggggaggaggaggacaacacggacgcggcaacagatgaggaagtagagtgcgaaggtgttgccctcaccaccgccgtcggcgcagagcacaacgagcacgatgcggccgtctacgacgagctccggcgtgggacatggatgacgaaggacacggctgtcggcgacgagctccatcgtgggacgtggatgacgaaggaagcggttgccggtgatgagctccaacgtggcgtagacggtggaggatgcggtcgtcgacgacgagctccggcatggggcgtggatgacggaggacgcggccgccggcgacaagctctgacatggcgtggacggtggaggatgtggctgccagcaacgagctctagcgtgggacatggacggtgggatatctggtag

SEQ ID NO: 80063 - DNA, 3138 bp, Oryza sativa
  Clone ID: PAT_MRT4530_79724C.1
atggcacggggctccgcactgcttgatggtagcgtgctgccgccttctcgcattgtgagcgagaagcaggctgggttgccgcgccgcttcatgccggaatctgccaccggccgtgagatagtaatgctgggtgagggacgcccggcgctagactacccggggcggtccgtcttctttctccccttcgcaatggcagggctggttccgccattttcttctttcttcatggacgtcctggagttctacgatctccagatggcgcaccttatccccaacgcagtgatgacattgggcatcttcgcacacctgtgcgagatgttcattggggtgcgcccatctcttcggctgttccggtggttcttcaccgtgcagtcggtgtcgccgccgtcggtggttggtggctgctatttcctgccgcgggggccggtgttgaactgctacatcccctgcgtcctccgtaaaaagtgggatgactggaagagcgactggttctacacccccctcgccgacgaagcgcatctccgacttccgagccagcccccggcgcaggcccccagctggcgggcgccggtagatctgggggatggctatgacgccgtcctcgaccgcctcgcgggcctgcgatcccaggggctcaccggggccatggtgtacggcgactacctccgtcgtcggattgcgccgctccagcggcgcgctcgggccgcctgggagtacaccgggtccgaagactacatgcggacccaccagggagtcagatgggattgggcccccgaggacttcaagatactggtccaacgggtgctaaatctcaactccgtggaggcgtccctcatcccccacggtatcctccccctctgcagcgacccagatcgcgcctccatcttgaccattatgacggcggtcggggcctcagaggagcaggctcctaagggccatgacggcgcaggtgggagccgccggggggatcaatctacccccggagggggtcgtgcttctgggccccgcgtcgggggctcggggggcaaccgccctaccgacgcccgggggaagaggaaactgggaggaacacctccctcatctcctccccgagggggcggggcggtgcgtgccggcagcaggcgcccggagggggccgtgccaacatcgcagcccgagggggagcgcaagaagaagcggctgcgcaagatgggggagacagaaccatcccggggaaacctaatttcccctccaaggtggtcatttaaccgaccccctcgcagtgatatcccatcgcgttcctcccaccatctcaagtccggccagtccgaggccgaagatccggcggccgcagaggcacggaggcgggaatctgaccggcgagaggccgcagaccgcctacgggaagctgaagaggccgcccgggaagccgcccgggctcgccaggctgatgataccgcttgggaggaggccgcccgggcccgccaagccgaggaagccgctcgggaggaggccgcccgggttcgccaggccgaagaagccgctcgggaggaggccgcccgggttcgccgggctgaggcgatggcggcttccgaggcagttcacgacgaggccgcggacgcctcgcttgggcccaccccttcgggcgacgcccaggaccaaacgggtccgggggtggcccgcgatgaggccggcgcgtccattggcgggccgagccgcgcggcgtcttcttcaaggcagctcttccccacgccttccgccgccccgctgagcgcagagccccttctgcaggccttagccgccgcaaataccgcggtattggatgggttcaacgcccaggtggaggccctgcaggcggagcgtgcggagctcgacgccgcatgggcgcgtgtcgaggaggggcggcgctcggtggaggccatggtagaagcgggccgcaaggcacaccgccggcacgtctcagatcttgaggcccgcaagacggcactggcggagatcgctcgagaggtggaggaggagcggggggctgccctcatcgccaccactgcgatgatcgaggcgcaggactccctccgccttcagcacgggaactgggaggcggagctgaagaaaaagctcgacgccgcccagggggttcttgatgccgccgctgcccgagagcagcgagcgacggagaccgaagcggcgctccggcggcgtgaagaggccctcgaggcgcgcgccatggcgctggaggagcgcgcctgcgtcgcggagaaagtcctggcggaccgcgaggccgccgtcacctcccgggaggcaacgctggcggcgcacgagtctgcctgcgccgaagaggagtccgcactccgcctccgcgaagacgcgcttgccgagcgggagcgagctctcgaagaggccgaggccgaagcgcaacggttggcggactccctgtccctccgtgaggcagcgctgacggagcaggcccgtcgcaatttggaatccgtccgcgccgagagagccgcactggagcagcgggctgccgatctcgaggcgcgggaaaaagagctggatgcgagggcgtgcatcggcggggcggctgcgggcgaaagcgacttagccgcccgcctcgcagatgccgaacacaccgtcgcggacatgcagcgcgcgctagactcatccgccggggaagccgaggccctccgcttggcgggcgagatagggcccggcatgctctgggatgcagtctcccgtctggatcgcgccggtcggcaggcgggcctctggaaaggccagtcaatgacacgccccgccaacctggagggcctcgctccgcacctcacgaagatggcctgggctctccaacaactccccgaggagctcgagaagaccatcaagtcatcctcgagggacctcgcccaaggagcggttgaactcgtactagcgagttaccaggccagggaccccaacttctctccatggatggcgctggaagagttcccttccgggaccgaggacgacgcgcgcgcgcgggtccgggatgccgccgaccacatcgtccacagtttcgaggggtcggcccctcggctcgcgttcgcccccaactccgacgaggagggcgatgccagcggtgcagacgatcgtgacgacgaggccggcgacccgggcgcatcggactga

SEQ ID NO: 80064 - DNA, 705 bp, Oryza sativa
  Clone ID: PAT_MRT4530_79725C.1
ctacgcaccggaattccgtccggacgggatccttttatccccttgcttattcaaatagtagcgatacctggccatgcacgtcctgaacagcagcagcaacctctgcaggacacggtgccgctccagcgcgcgcgcatggctgacataggcagcggcgcccacacccgcactgtcgacgcactgccccgtgatcgtgagctcctcgccggcggcgtcggcaccggcgcaggggaggaggaggacaacacggacgcggcaacagatgaggaagtagagtgcgaaggtgttgccctcaccaccgccgtcggcgcagagcacaacgagcacgtacttggctagctcgtcgaggtggggaaggacgtggccgtcggcgacaagctccgacgcggcgtggacggtggaggatgcggccgtgtggcgtggacagtgcaggatgcggccgtctacgacgagctccggcgtgggacatggatgacgaaggacacggctgtcggcgacgagctccatcgtgggacgtggatgacgaaggaagcggttgccggtgatgagctccaacgtggcgtagacggtggaggatgcggtcgtcgacgacgagctccggcatggggcgtggatgacggaggacgcggccgccggcgacaagctctgacatggcgtggacggtggaggatgtggctgccagcaacgagctctagcgtgggacat

SEQ ID NO: 80065 - DNA, 627 bp, Oryza sativa
  Clone ID: PAT_MRT4530_79726C.1
atggctgctgtcttctccatcctttccatcacatcttatcatcacgtgatggccaccggaggcgagcatctgcactggtcctccatggccagcatcggtgccgacgttggtgggaggtcggaggcagagacggcgggaggtcaggggctgaggcggctgcagcgggtgcaagcgcaaggtagcggtggcgtcaggagctctggggtggaggcgcccctgatgaggttgggtggtgggccgagagcttgccgtcctcgtcttcttcgtctccactggctcttctccacctcctccttcatctccatctccgtggcggcttctgagctcggggcagccgtcggggcagccggatcaacggcacccaatggggaggcggtggggaggcagtgggaaggcggcgagctcccctcccatggccggcggcggcaggctggcagaggtggcggcagcggcggtggccgcaccctcccctccaccagatccagcgggaggggaggcggcgagctcccctctgctagatccggcgccaggggagctagtggggaggtggcgggctcccgcctggcagaggcgacggcggcgcaactaggcggtggcagcggccgcaccctccccatgcggcgatga

SEQ ID NO: 80066 - DNA, 1716 bp, Oryza sativa
  Clone ID: PAT_MRT4530_79727C.1
ccacgcgtcccaaaccctcaatcgtcgcatcgcctcctcctcctctcgccgctcgcagcgaaaaagccagcgcctcccagcgcccacgcgatcccgacgaatcgaatcgagtccgagacgccgatctcggattcgagaccgttgatttcaaccaacacaagccctcctccggatcgatccgctcctcttcagccatggcaggaatggcacccgaaggctcccagtttgatgctaagcactatgacagcaagatgcaggaactactgcaccaaggtgacaatgaggaattcttcacttcatatgatgaagtttttgagagttttgatgacatgggcctccaagagaaccttctcagaggcatctatgcttatggttttgagaagccatcagctattcagcaaagggggattgttcccttctgcaaagggcttgatgtgattcagcaggctcaatctggaacaggaaaaactgctaccttctgttctgggatcctgcagcaacttgactatggattggtggagtgccaatccctggtccttgcaccaacacgtgagcttgcccagcaaattgaaaaggtcatgcgtgctcttggtgactacttaggtgtcaaggtgcatgcctgtgttggtggaacctctgtccgtgaggaccaaaggattcttgctagtggtgtgcatgttgttgttggcacacctggacgtgtgtttgacatgctacgtcggcaatctctccgcccagaccacattaagatgtttgtgctggatgaagctgatgagatgctctcccgtggtttcaaggatcagatctatgatatcttccagctccttccaccaaagatccaggtcggagtgttctctgctaccatgcctcctgaggcccttgagatcacccgcaagttcatgaacaagcccgtgaggattcttgtgaagagagatgagcttacccttgagggtatcaagcaattctacgtcaatgtggagaaggaagattggaagctcgacactctttgtgacttgtatgagacactggccatcacccagagtgtcatctttgtgaacacccgccgcaaggtggactggctcaccgacaagatgaggagcagggaccacactgtctctgccacacatggagacatggaccagaacactagggacatcatcatgagggagttccgatctggttcttcccgtgtgcttatcaccactgatctgcttgctcgtggtatcgatgtccagcaagtctcccttgtcatcaactacgacctgcccacccagcctgagaactacctccatcgcattggtcgtagtggtcggtttggcaggaagggagttgccattaactttgtcacccgcgatgatgagaggatgctgttcgacatccagaggttctacaatgtgaccatcgaggagctgccggccaacgtcgctgaccttctctagattatgtcttaggaagtaaggttctggataaaagtttgtttttgtttttgttttaatatgaccaactttctcgtttgggaggagtggtaaggacggggtctatttgaattgtggttaaggacggcttccatgtttttctcttttccgtatgcaactatgtttggaaatttttgtagctgttaggctgtgctgcttcctgggctagctgggagagggagacactactggaatatttactttctttattaagctatgcttgccttgtgaaaaaaaaaaa

SEQ ID NO: 80067 - DNA, 2958 bp, Oryza sativa
  Clone ID: PAT_MRT4530_79728C.1
atggcacggggctccgcaccgctcgaaggtagcgtgctgccgccttcccgcatcgtgagcgagaggcaggccgggctgccgcgccgattcatgccggaatctgttaccggccgggaggtggtcgcgctgggcgagggacgcccggcgccacactacccggggcgatccgtcttcttcctctctttcgcaatggcagggctggtcccgccattctcttctttcttcatggatgttctggagctttacgatctccagatggcgcacctcactcccaacgcggtaatgatgttggccatcttcgcgcacctgtgcgagatgttcatcggggtgcgcccatctctccggctgctccagtggttcttcaccgtacagccggtgtcgccgccgatggtagtcgatggctgctacttccagccgcgggggcaggtgctgcaccgctacattccctgcatccttcgcaagaagtgggacgactggaagagcgattggttctatactcccctcgccgacaaagcgcgcctccgacttccgagccagcccccagcgcaggcctccagctggcgagccccggtagatctgggagacggctacgacgccgttcttgaccgcctggcgggtctgcgatcccaggggctcacgggggccatggtgttcggcgactaccttcgtcgccggatcgtgccgctccagcggcgcgcccggggcgcctgggagtacaccgggtccgaggactacatgaggacccaccaggggagcaaatgggactgggtccctgaagacttcaagatggtggtccaacgggtgctgaatctcagctccgtggaggcatccctcatcccccaaggtatcctccccttctgcagcgattcagagcgcgccaacatcctgaccatcatgcagacggtcggggcgtcgggggagcgggcccctcgaggccacgatggcgcgggcgggagccgcaggggggaacaatctaccccaggagggggtcgtgcttctgggccccgcgacgggggcccggggggcagccgccctgccgacgccagggggaagaggaagcagcagggtaccccttccccatctcctccccgagggggtggggcggcgcgtgctagtcagcaggcgcccggagggtgccgtgccgtcgtcgcagcccgaggggagcgaaagaagaagtggctccgcaagatggggggaccgaaccatgccggggaaacctcatctcccccccaaggtggtcgtttagccgacctcctcgcaggttcatccccgcgcccactgcggccgtattcattctcccatctcccaaggcaagttttcactcacccgtttctttttgtcttctggtttttcttctgcctcagcgagatcccgtcgctcccccttcgccattccaagtccggccggtctgaggccgaggagacagcgaccgcggaggcccggaggcgggaagctgaccggcgagaagccgcggaccgccttcgggaagccgaggaagctgcccaggaggccgtccgggctcgccaggctgaggaaaacgctcgggaggaggccaggctccgccgggctgaggagtccatccgggaggcagaggcggcgcgcgcacgccaggcggcctgccaagcccccgacccgactccgcccgaggcgacgacaacttccgaggccacccacgacgaggctacgggcgcaccgctcgggcccgacccttcgggcgacgctcaggacgagccagcttcggggggcgtccccgagtccggcacgtcgatcggcgggccgagccgtgcggcaacctcaccaaggcggctctcccctatgccttccactgccccactgagcgcggagccccttctgcaggccttggctgccgcgaacaccacggtgttggacgggttaagtgcccagatggaggtcctgcaggcagagcggacggagctcgacgcggcgtgggcacgcgtcgaagaggggcgacgctcggtggaggcaatggtggaggcgggccgcaaggcacaccgccggcacacctcagagctcgaggcccgtcggagggagctggcggagatcgccagggaggtggaggaggagcgggagagtgccctcctcgccgccgccgtgctgaacgaggcgcgggacgacctccgcctccaatacgggagccgggcggcggagctagagaagaagctcgacgccgcccggggagtccttgacgccgccgctgcccgggaacggcgggcggcggagagcgaggcggcatcccggcggcgcgaagaggcccttgaggctcgcgccacggcgctggaggagcgcgcccgcgtgaaggagcgggacctggcggaccgcgaggccgtcgtcgccatccgggaggcaacactggcggcgcacgaggccgcctgcgccgaagaggagtccgcactccgcctccgcgaggacgcgctcaccgagcgggagcgagctctcgaggaggccgaggccacggcgcagcggctggcggacagcctgttccaccgcgaggcagcgcgggaggagcaggcgcgccaccgcgccgggcggcaggcgggcctctggggcgggcggactgcgaagtacgctgccaaccaagggggcctcgcccagcgcctctcagagatggccgggaccctccctcggctccccgaggaactcgaggagacgatcaagtcatcctcgagagacctcgccctgggggcagtggagctcgtactggcaagctaccaggccagggaccccgacttctccccgtgggcagcgctggacgagttccctcccggaaccgaggacggcgcgcgcacgcaggttcgggacgccaccgaccacatcgtccacagttttgagggtacgacccctcggctcgcgttcgcccttgactccgacgaggagggcggtgatggtggtgcggacgccagcggcgacgaggccggcgacccgggcgcgtcggaatga

SEQ ID NO: 80068 - DNA, 2730 bp, Oryza sativa
  Clone ID: PAT_MRT4530_79729C.1
atggcacggggctccgctctgctcgatggtagcgtgctgccgccttcccgcatcgtgagcgagaggcaggccggactgccgcgccgcttcatgccggaatctgccaccagccgggagatagtcacgctgggcgagggacgcccggcgccagactacccggggcggtccgtcttcttcctcccttttgcaatggcagggctggttccgccattttcttctttcttcatggatgttctggagttttacaatctccagatggcgcacctcacccccaacgcggtaatgacattggccatcttcgcgcacctgtgcgagatgttcatcggggtgcgcccatcccttcggctgttccggtggttcttcaccgtacagtcggtgtcgccgccgtcggtggttggtggctgctacttccagccgcgggggccggtgctgaaccgctacattccctgcgtcctccgcaagaagtgggatgactggaagagcgactggttctacacccccctcgccgacgaagcgcgcctccgacttccgagccagcccccggcgcaggcctccagctggcgggcgccggtagatctgggagatggttatgacgccgtcctcgaccgcctggcgggcctgcgatccctggggctcacaggggccatggtgtacggcgactaccttcgtcgccggattgcgccgctccagcggcgcgcccgggacgcctgggagtacaccgggtccgaagactacatgaggacccaccagggagtcagatgggactgggctcctgaggacttcaagatagtggtccaacgggtgctgaatctcagctccgtggaggcatccctcattccccaaggagtcctccccctctgcagcgatccagaccgcgcctccatcctgaccatcatgcaggcggtcggggcgtcggaggagcgggctcctcgaggccacgatggcgcgggagggagccgcaggggggaacaatctaccccgggagggggtcgtgcttctgggccccgcgacgggggcccggggagcagccgccctgccgacgcccgggggaagaggaagcagggaggaacccctcccccatctcctccccgagggggcggggcggcgcgtgccagcagcaggcgcccggagggggccacgccgaccgagatcccgtcgcgtccctcccgccattccaagtccggccagtctgaggccgaggatccggcggccgcagaggctcggaggcgggaatctgaccggcgagaagccgcggatcgcctacgggaagccgaggaggccgctcgggaggccgcccgggctcgccaggccgaggaagccgctcgggaggaggccggaccccgccaggccgaggcgacgacatcctccgagacgacccgtgaaactgaccggcaagaggccgcggatcgccttcgggaagccgaggaagctgcccagatggccgtccgagctcgccaggctgaagaagccgctcgggaggaggccagacgtcgccaggccgaggcgacgacgacttctgaggcagctcacgacgaggccgcgggcgcatcgcttgggcccactccctcgggcgacgctcaggacaagccaggtccgggggacatccccgagtccggcacgtccatcggcggcccgagccgcgcggcatcttctccgaggcggctcttccccacgccttccgttgccccactgaacgcagagccccttctgcaggccttggccatcgctaacaccacggtgttggacgggttaagtgcccaggtggaggccctgcaagcagagcgggcggagctcgacgccgcatgggcgcgtgtcgaagaggggcgacgctcggtggaggccatggtggaggtgggccgcaaggcacaccgccggcacgtctcagagcttgaagcccgtcggaaggtgctggcggagatcgccaaggagcccgcctgctccgaagaggagtccgcactccgcctccgcgaggacgcgcttaccgagcgggagcgagctctcgaggaggccgaggccgcggcgcaacggctggcggacagcctgtccctccgcgaggcagcgcgggaggagcaggcgcgccgtaatctggaaggtgttcgcgccgagagagccgcactgaaccagcgggccgctgacctcgaggcgcaggcaaaggagctggacgcgagggcgcgcagcgggcggggcgtctttgggcgaaagcgatttagccgcccgcctcgcagctgccgaacacaccatcgccgatctgccgggcgcgctagactcgtccaccggggagttcgaggccctccgcttggcaggcgagaccgcgccggccggcaggcaggcctctggggcgggcggactgtgaagtacgccgccaaccaggggggcctcgcccagcgcctcttggagatggccgggactctccaacggctccccgaggagctcgagaggacaattaagtcatcctcgagggacctcgcccgaggagcggtggagctcgtactggcgagtcaccaggccagggatcccgacttctccccatggacggcgctggaggagttccctcccgggaccgaggacggcgcgcgcgcgcaggtccgggacgccgccgaccacatcgtccacagcttcgagggttcggcccctcggctcgcgttcgccctcaactccgacgaggaggacgatgacggcggagtgggcggcagtggcgacgaggctggcgacccgggtgcatcggattga

SEQ ID NO: 80069 - DNA, 744 bp, Oryza sativa
  unsure (1)..(744): unsure at all n locations
  Clone ID: PAT_MRT4530_7972C.1
gagcgcaaagaacgataggccgaagaccgggggagagaagaaaccagccccggacacatctgagtcaagcaagaagaaaaatcgcaaaaccgggaaaagaaaagctcaagcggaagtcctcgcagcagaatacgcgaaccctcccaaacgcatagacccccaaagcagcgacccaaagaaatcatggtgccctatacacaagacggacagacattctctggaagattgccttgttttcaaaaagtcgctcgagaagcacatggcatttgaaaaaggcaagtgagtacacgttgtcgagacgaacgaagagacagctcctcacgaaccggactcagcgtatccagacttcgacctccacgtctcacacatcttcggcggttccacaacgtactcctccaagcgagaatacaagaaagtggaacatgaagtctgctcgacatggcagggggctacacccaagatgaagtggtctgagcagaagatagagttctcggaaagaagaccaccccaagaccgtcgttatcccaggacgatatctgatcgtggtcgaacccactattcggaacatcaaggtagcgcgagttctcattgacggtggtagctcaatcaatcttcttttcgccaacactttggacgcgatgggaattccgcaaaacgagttgataccaactgatcaactcttccatggaattactccccaatcatcgttgatgnnntnctgtacagctngtcgtacttgaacat

SEQ ID NO: 80070 - DNA, 6088 bp, Oryza sativa
  Clone ID: PAT_MRT4530_79730C.1
atgggtttcgtttctggcatcgatgacttcgccttccctcccgggcaggcgttccggttcggcagcctcaacttcatcaccgacgacttcggcaagatctctctccttgactcggattcaaaccagtcggggagagaccaggtccccgtgccattcggtattccgaactcggccgaggcctactccaagatcatctctcccgagtcggcttcaaaccactcggacgagatccaatctactctttcgcgactagatcaagacgacgggtcctatccctcaatcctgatgaaacttccttatgatttggccgctatcttcactgccaagacatctcccactcgaagatctaggcgagctccggcttcggccccgatccaatctagatccagagaggttggcgttatactccaacctcttgggacagtatcgacggaagagttggatggttaccttagctcccccggcgtcagttctcgaccaaccgagatcctcgactacgacgatttcggctaccactacgaccatggcgacctcgacaacttcgacgacagttatgaggataactacacgcccctcttcttcggcgtattcatggctgacaacgaaacggaggaacagcgccaagcccgagaagcggaccaagatcgcgcacggcaagaagctgaacgtcgccgactggaggaagagcgacagcgacaggagcgagaacgattacagcgtgagcaacaagatcgcgaacggattgcaaaggaggctgaagatcgacggcaacgcgccttggaatctgggcgccgagcgagagagctcattgggctacaagacgtcgatggaacagcggtctttcgcacccccagcagaacgcggttgcagcaattactctcctcgacaccctcctctaagaaaacgcactcaaccaagctgatcatgttgtcaacatcttgaaccagacgaagaccatgatcgctgcctcggttccagccaactccgcaagcacccgcaccccgactggtagccgagttcctcacctccgatctcatgattatcatcagccaagcctcagcatcatcggcacaggatctagtcgcaggagcaggggtcacgacgaacgatctgttcacttgcctcccgaacgtcacagggagcgccgagtcgaacggcctcgctctccacctcaccagcgtcccgtcgaccttcgcgacacgatcaaccagcgccgtgcagcacgaggtcaccgccattcaccaaatcgctacgacgacgacgtggatggagtagctgccttcactaatgacctgcgtggagtggattggccagccagctttaagccgactggaatcgagaagtatgacggcaccactaatccagagtcttggctcaccatctacggactcgcaatccgcgcagcaggaggagacaacaaggccatggcaaactatctacctgtggccctagcggactctgcccgatcctggctccacggactaccccgtggcacgatcggatcatgggcggaacttcgtgatcacttcatcgccaacttccagggcacctttgaacgccccagcacacagtttgatctctacaacgtcgttcagaagtctggagaatcccttcgagattacatccgacgcttctccgaataacgcaacaagatctccgacatcaccgacgacgtcatcatcgccgccttcactaaaggcattcgccacgaggacctagtcggcaagttcggacgtaaacctcccaggacggttaagcaaatgttcgaaaaagccaacgagtatgccaaagccgaagatgctattaccgcgtccaaacagtcgggcactacttggaagccaaagaaggacacgccgaccgcaggagggagtggaagcaacaaccacaaggatcgcaagcgtaagcccgaagaacttgtggcgaccacctctccatcttcccgacaacgttcccgcgtcaacaccttcgacaagataatgaactcccaatgtccgcatcatcccaactccaaccacgtggccaaagattgcttcgtctacaaacagttagcggagcaatacgtcaaaaacgcacgtaaaccttcagacggagatcaaggcacatcaaagaagaaagatgatgaagacgatgccccgactggttttcaagatcatcgcaaagaacttaatcacatcctcggcggacccctggcttatgagtctaagagaaaacagaagctaacagaacgggagatcaatgcggttcagcctaacacgccccaatatcttcggtggtcagagatagcaattaagttcgaccgctcggatcatcccgaccgagtggtccacccggggcggtaccccctggtactagacccagtggttcgcaatgtcaagctccgacggactctcatcgatggtggcagcgcactcaacatccttttcgttaagaccctggacgatatgcagattcctcgcacggaattaaagccgagtaatgcacccttccacggtgttatcccaggattgtcagctacaccactcggccagatcactcttccagttacctttggcactcgggagaattttcgcacagaaaatgtttgtttcgaagttgctgatttcgagacagcatatcatgctatacttggaggaccggctttagctaaatttatggccgtcccacactacacctacatgatgattaagatgcctggtcctcgaggagtcatatcactacggagtgacatcaagcaggccgtcacatgcgacaaagaaagttgcgagatggcccaaacccacgagactactctcgcccgcgaagagatccgactggctgcgaccatgggaagcgaggaagaagtgcctgcaaccaagctgacgaagaccgaagaaagtgatgccaagatgaaaaagattcccttagatccctccgatcctgataagactgctaataataaagatatttttgcatggaaaccatccgatatgactggtatccccagagaggtgattgagcactctttacatattaaggaagacgccaaacctatcaagcaacgactccgccgttttgcacaggacaggaaggatgcgatcaaggaggaattaaccaagctgttagcagcaggcttcattaaggaagtccttcatcccgactggctggctaacccagtcctggttcggaaaaagacgaggcaatggcgcatgtgtgtcgattacaccgacctcaataagtcttgtcctaaagacccttttgggtaacctcgcattgaccaggtggttgactcaacagccggctgcgagttactcagtttcttggactgctactcgggatatcatcagatccgactaaaagaatccgactgcttgaatacctagtttattacgccctttggggcctactgctacatcaccatgccctttggattgaagaatgccggggcaacctatcagcgtatgattcaaagatgtttttcaactcagatcggtcgcaatgtcgaagcttatgttgatgatgtagtcgtcaagaccaagcagaacgatgacctgattgcagatttggaagaaacttttgcaagcattcgagcttccaggatgaaactaaaccctgaaaagtgcatcttcggagtaccgtcagggaagttgctcggatttatggtatctcagagaggcatacaggccaacccggagaaaatcaacgccatcctcaacatgaaaccgccaagctcccaaaaagacgtccaaaagctgactggttgcatggcggtgctcagccaattcgtctcacaactcggcgagcgggggatgcccttcttcaagttgctgaagaagactgacaatttccagtggggacccgaagcacaaaaagccttcgaagacttcaagaaacttctcaccactccaccagttttggcctcgccacatccacaagagcctctactgttatatgtgtcggcgacctcccagtttgtgagcacggtcctggttgtcgagcgtgaagaggaaggccatattcaaaaagtccaacgaccaatttacttcgttagcgaggttttagccgactccaagacaagatatcctcaggttcaaaagttattatatggtgtcttaattaccgtcaggaaattatctcactactttcaaagtcactcggtcacggtggtcacatcgtttccactcggggatatacttcataaccgcgaagtgaacggacggattgcgaagtgggccttagaattgatgtctttggacatatcgttcaagccacgaacttcgatcaagtcacaagctttagctgatttccttgccgagtggaccgagtgccaagaagacatgccagaggaaaagatgaaatattggactatgcattttgatgggtcgaagaggcttacaggcactggagctggggtcgtcttaatttccccgactggagaaagattgagctacgtattgtggatacgtttttctacgtcccataacatggcggaatatgaggcgctactccatggattaaggattgcaatctctctaggcattcgctgactaattgtccgtggagactctcagttggttgttaatcaggtcatgaaagagtggtcctgtctagatgataatatgactgcttatcgacaagaggtacgcaagttagaagacaaattcgatggactcgagctcacccatgtcctccgacataacaatgaggcagccgacagactgccaattttggttcaaaacgggaagcagctccttcagatgtgttcgtcgaacatctttacgaaccgatcgtgcccagaaaagagacaattgaagctacggatactcaaggcgtaagcatgatcgaagctgactggagagaaccgtttataaaatttttgagcaaacaagaactccctcaagacaaaaatgaagccgagcggatttccaggcgcagcagactttacattattcatgagggtgagttgtacaagaaaagtccatcaggaatactgcagcgctgtgtgtctttggaagaagggagacagttgttgaaggatatacattctggtatttgtggtaatcatgctgctgcacggaccattgtcggcaaagcttaccggcaaggttttttctggcctacagctgtgtccgatgcggacaagattgtgcggacatgcgaaggttgtcaattctttgccggacaaactcatttgccagctcaagagttgcaaaccatcccgttgtcctggccgtttgcggtctggggacttgacatggtcggcccgtttaaaagggcagtcggcggttacacgcatctctttgtggctattgacaaattctccaagtggattgaggctaaaccggtcatcacgatcacagtagataaagctagagattttttcatcaacattgtgcatcggtttggggtacctaatcggatcatcactgataatggcactcaattcactggcagagcatttaaagacttttgtgaagacttcggcattaaaatttgttacgcctccgtggcacaccctatgagtaacggacaagtcgagcgcgctaacggcatgatacttcaagggatcaaagcacgagtttgcgaccgactacgtccctatgctggcaagtgggtagatcagctgccgtccgtactttggtctttacgcactactcctagtcgggctaccggccagtcaccgttctttttggtttacggtgcagaagcaatgttgccaagtgaagtggaatttgaatcactacaatttcggaacttcaacgaggagggctatgaagagggccgagtagacgacatcaatcgactagaagaagcccgagaagcagctttaattcagtcgactcgatatttgcaagggttgcgccattatcataatcggaatgttcgatcgcgagcctttttagtcggtgacctggctctgaggaaaattcaaacaacacaggaccagcataaattatctcccttatgggaaggaccgttcataattgctgaagtcactcggccgggttcttatcgactcaagcgcgaagacggtactctcatcaacaattcttggaatattgaacaccttcgtcgattttacgcttaggcatttcatttgtatctttcctct

SEQ ID NO: 80071 - DNA, 608 bp, Oryza sativa
  Clone ID: PAT_MRT4530_79731C.1
gcagccgccgccacgggaaccgcagccaccgccgccgccaccacctcgcgcagcagcagcagccgccacgggaaccgaagccaccgccgccaccaccacgtgagcccttgccgttgccctagccacctcgccgccgccgccgccgtcgccgccgccgccgtcgccccttttttttttgatcgaacgagtgttaacagtgaaatttggtaagcccggagtagtcatcggcttagagtcagcatcggcttggaagtcctgagattagccgatgagagttgtcaagtcgtcagttgtcggattcttgctatattcggttaaggaaattgatctactaaaggaagcttatccagaagtgtggatttcatgacattggacctccagccgatgtgtgctttaaccttcggatcagtgcttattctatcatatcaatgctagccgattggtttatactggattatattgttattttattacatcatcaacaaccgattgccattataccattatctacattggacatatagccgagttcttacaccctatcggcatcggctattatcggcatcggctagaatcactacatcggcttgtcagctgatcggctgttt

SEQ ID NO: 80072 - DNA, 720 bp, Oryza sativa
  Clone ID: PAT_MRT4530_79732C.1
tggtgcacggggcacgacaccggacgcagggtaccatactggttgcacgccatgggcagcacgttctgtacctacgtggcttcaaacccccggtaccggaaggtggtggccacgcaccgggcaggcaggccccccccaccagcccgggttggaacacgggttgccaaacacattgggaacccggcccggggcctgttggggaaccccttggggccgccttgcgccccgattgggaaggaaaccacccgcttccaattgccccaccaagccaaggcgcccaaccgcaccgccttggccttgccttccgcccattggccccggagggcgcccgccaaggaaccgtgtccaaacttgccccgtgtgcgtgtccaaaccgtgtccattcgcgccaaccctgccaaccaccagaaccattcccgggttcgttctttcgaccgttcccaaaccttcccgccaattccgcccttttccccaaaggaagttcccgtccaacctttaagttaagaacttaagaattaagttaagaagtgaattcctcccgccttattcttcatattagacccaaccttccgtctataccaaaagcaccgagaccgcctggccagtctaaggaattctctgcgttgcccgttcggaaatccgtgccctctttggtttttacttcccgatctggccaataagtatacggacaccaaaactgggccaaaaaaaaaaaaaaaa

SEQ ID NO: 80073 - DNA, 516 bp, Oryza sativa
  Clone ID: PAT_MRT4530_79733C.1
catttttcgacgatgatatcacaactcgtagcgaagatgttgctctcctcgaagagatagggaagctattgctcaagtgtatttgtttggaaatagatcaaagaccaacaatgaaacaagtggcacaacaccttcggatcattcggagatgttggaagaataattgcacagccgatggagcttcactggtaactaattaaatctcatatatatcactagagctgatcaaggaactgaacttgacagtacacttggttcactctaagtgatcgtgtacaagcattgtgtgtgaattgtaatatattatttgttaccagaacatcttgcagtatatgctgccattcggatgatgttatctgaacttgcatgcaatctgcttcttatgcggtcgatcccatgatgtttatctgaacttggttctactagtggatatagaaaattcatgttcaatgttggtagtggtgtttcccttaatacatgtttataaataatttgcgatcatcaagctatatatgt

SEQ ID NO: 80074 - DNA, 3162 bp, Oryza sativa
  Clone ID: PAT_MRT4530_79734C.1
atggcacggggctccgctctgctcgatggtagcgtgttgccgccttcccgcatcgtgagcgagaggcaggctgggctgccgcgccgcttcatgccggaatctgccaccggccgggagatagtcatgctgggcgagggacgcccggcgccagactacccggggcggtccgtcttctttctcccctttgcaatggcagggctggttccgccattttcttctttcttcatggatgtcctggagttctacgatctccagatggcgcaccttacccccaacgcagtgatgacattagccatcttcgcgcacctgtgcgagatgttcattggggtgcgcccatctcttcggctgttccggtggttcttcaccgtgcagtcggtgtcgccgccgtcggtggtcggtggctgctacttcctgccgcgggggccggtgttgaaccgctacatcccctgcgtcctccgcaagaagtgggatgactggaagagcgactggttctacacccccctcgccgacgaagcgcgcctccgacttccgagccagcccccggcgcaggcctccagctggcgggcgccggtagatctgggggatggctatgacgccgtcctcgaccgcctggcgggcctgcgatcccaggggctcacaggggccatggtgtacggtgactacctccgtcgtcggattgcgccgctccagcggcgcgctcggggcgcctgggagtacaccgggtccgaagactacatgaggatccaccagggagtcagatgggactgggctcctgaggacttcaagatagtggtccaacgggtgctgaatctcaactccgtggaggcgtccctcattccccacggaatcctccccctctgcagcgatccagaccgcgcctccatcttgaccattatgacggcggtcggggcctcagaggagggagctccaaagggccacgacggcgcaggcgggagccgcaagggggatcaatctaccccgggagggggtcgtgcttctgggtctcgcgacggagacccggggagcagccgccctgccgacgcccgggggaagaggaaacagggaggaacacctccccaatctcctccccgagggggcggggcggtacgtgccagcagcaggcgcccggagggggccgcgccgacatcgcagcccgagggggagcacaagaagaaacgcgagatcccgtcgcgtccctcccgtcattccaagtctggccaatctgaggccgaggatccggcggccgcagaggcccggaggcgggaatctgaccggcgagtggccgcggatcgcctacgggaagccgaggaggccgcccaggaggccgcccgggctcgtcaggccgaggaaaccgctcgggaggaggccgcccgggcccgccaggccgaggaaaccgctcgggaggaggccgcccgggcccgccaggccgaggaagccgctcgggaggaggccgcccgagcccaccaggccgaggaagccgctcgggagaaagccggatttcgccaggacgaggcaatggcgacttccgaggcagctcgcgacgaggtcgcgggcgcatcgcttgggcccactccctcaggcgacgctcaggcgacaacttccggggcagctggcgacgaggctgcaggcgcgtcgcctgggcccactccctcgggcgacacccaggaccaactaggtccaggggacatccccgagtccggcacttccatcggcggcccgagccgcgcggcatcctctccaaggcggctcttccccgcgccttctatcgccccgctgagcgcagagccccttctgctggccttggccgccgcaaacaccgcggtgttggacgggtttaatgcccaggtggaggccctgcaagcagagcgggcggagctcgacgccgcgtgggcgcgtgtcgaggaggggcggcgctcagtggaggccatggtggaggtgggccgcaaggcacaccgccggcacgtttcggagcttgaagcccgaaagaaggtgttggcggaaatcgccaaggaagtggaggaggagcggggggctgccctcattgccaccaccgtgatgaacgaggcgcaggacaccctccgccttcaatacgggagctgggaggcggagctagggaaaaagctcgacgccgcccaaagggtgcttgacactgccgctgcccaagagcagcgggcggcggagaccgaagcggcgtcccgacagcgcgaagagacccttgaggcgcgcgccatggcgctggaagagcgcgcctgcgtcgtggagaaggacctggcggaccgcgaggccgccgtcgccatccgggaggcaacgctggcggcgcacgagtctgcctgcgccgaagaggagtccgcactccgcctccgcgaggacgcgcttaccgagcgggagcgagctctcgaagaggccgaggccgcggcgcaacggttggatgacagcctgtccctccgtgaggcagcgctggcggagcaggcacgccgcaatctagaatgtgtccgcgccgagagggccgcactggaccagcgggccgctgacctcgaggcgcgggaaaaggagctggactcgagggcacgcagcggcggggcggctgcgggcgaaagtgacttagccacccgcctcgcagctaccgaactcaccatcgccgacatgcagcgcgcgctagactcatccgccggggaagccgaggccctccgcttggcgagcgagatagggcccggcatgctttgggatgcagtctcccgtctggatcgcgccggtcggcaagtgggcctctggaaaggccagacaatgaagtactccaccaaccagggaggcctcgctcagcacctctcgaagatggccggggctctccagcagctccccgaggagctcgagaagaccatcaagtcatcctcgagggacctcgcccaaggagcggtggaactcgtactagcgagttaccaggccagggaccccaacttctccccatggatggcgctggatgagttccctcccgggaccgaggacgacgcgcgcgcgcgggttcgggatgccgccgaacatatcgtccacagcttcgagggctcggcccctcggctcgcgtttgcccccaactccgacgaggaggacgatgccggaggtgcagacgatagtgacgacgaggccggcgacccgggagcatcggac

SEQ ID NO: 80075 - DNA, 610 bp, Oryza sativa
  Clone ID: PAT_MRT4530_79735C.1
acgagctgccctcccactgcagcaccgagctcaactcaatgtagcggcgaacttcggccgagcgaggtgagtaccagaaaccggcgccggagacccgtcgtgtttgctcgccgccgcttgctcccctgctgctgcttacgtcaccgccgccgggcatgaatccaattaaccctaaacatataatactgttaacagtgaaatttggtaagcccggagtagtcatcggcttagagtcagcatcggcttcgaagtcttgagattagccgatgagagttgtcaagtcgtcaattgtcggattcttactatattcgcttgcttcttgattgtcaataagggtttcatcggggtttcagccgatttcatgacatcggacctccagccgatgtgtgctttaacctttggatcgatgcttattctatcatatcaatgctagccgattggtttatactggattatattgttattttattacatcatcatcatcatctgattgcctttatatcattatctacattggacatatagccgattgcttaaaccctatcgctatcggctattatcggctatcggctggaactactccatcggcttgtcagccgataggctgttt

SEQ ID NO: 80076 - DNA, 2724 bp, Oryza sativa
  Clone ID: PAT_MRT4530_79736C.1
ccgatgtgtatcagtttggtgttcttgtcttgacgcatggatacaaagcttgcagaaaataagattatgattggaaatatcacacgatgctatgataagttgaagttcaaagtagacatcaatcagaatattaaggttttcacagaagatgagattaaacggattactagcaacttcagcattccgatcggacaaggcggctttggagaagtgtataaagggactcttgatgatgactatgatcttgttgcggtgaagagatatattagcaaagatttaaggaaagagtttatggaagaagtaagcatccatagtcaaatgagtcacagaaatgtggtggagctcataggctattgcattggagaaagtactctaatgattgttactaagtatatctccaaaggaaaccttgatgacatactccacaacagtgacatttccatccctttggatgtaaggctgggtattgctataggatgtgcggacgcattgagctacatgcattcgatgcatttatcgaatggcagtcttatttgtcatggtgatattaagcctgccaacatacttctagatagcaatctgacatcgaaattgtcagactttggagtgtcaaggcttctttcaggtggtgtcactcagtacactgtacatataaaaggaagcgtatcttacatggatcctatatactttcatgagggttgtcttactccgaggagtgatgtttatagtttcggaatggttctcttggaactaatagctcgaaaaagggtaagaaaaggtgacattaacctcattggaggtggagaaatatttgatgctgagatagcaaaccggagcaatatgaagattctaaaagaaatgaggaaattggcaattgaatgcctaacactggacattcataaacgtcctcaaatgaatgttgtggcaaaacgccttcgtacacttaaaaaagaattaaaagacatgcatggaagatactcagaacacattttggcatcacaccgctcatggcgaaaaaatgacaaccaggggccgagctataattctaggatgcaactgaagaagagtttgagcattttcaagagaaatcttagcaattcttctaagatcctattgggactcggcaatatgagaattttcacacaggaggagctaaatgaaatcacacagaattactcgtgtctactcagtggaggtacttcgggtaaggtttacaaaggaacgcttgaggacaatacggtggtagcggtgaggatattttccgaggcacttgagggtttcgaagaggcgtttatcaacggagggatgatcctatctcaaattgtccacaagaacatcatcagactcttgggttactgcttgaatgctgattgtcccgcatttgtgtacgagtatgctgctagaggaaccctctctgacattctagatggccgtgaagatttcccactgcatttacgcgtgaagatcgcagttgagacagcagaagcattagagtacctccattcctcagcagctggtatgatcagacatggctatgttgcaccatccaagacacttgttgatgacagtttcacgccaaagctgacgggattctcatgggcgcagaggctcaacaatgatgacagcgcaattcatgatcatgataagtactgtgtgtcactaaaactgaaaaccgatgtgtatcagtttggtgttcttgtcttgacgctcattagtaggaagaactttgcgttttatgcggatcacgaacaccttgtctcgcaattccttgcagcttacaaggcagataacagtggaagggcatttttcgacgatgatatcacaactcgtagcgaagatgttgctctcctcgaagagatagggaagctattgctcaagtgtatttgtttggaaatagatcaaagaccaacaatgaaacaagtggcacaacaccttcggatcattcggagatgttggaagaataattgcacagccgatggagcttcactgctgccgtgtgccgtccttgctggcagaggacgcgatgaggatgacgcagctgccaagcgtggatccgaaatccgccttccatttgagcatcacgccttcttccacgctgatctcaccggcgaggagctcgatctgcaggcggagggtacgaatgccacgaggacggaagcggtcgaagtggtcattgcgaccaccggcggcggaggaggagagccatccgtgatcttcgccggcgtcacaccgctagcgggaccccaccggattttcgaccatcaccggcgaggcggaccggatctggagaaaaggcgtggctccgtggagatgcagggacaccgccggcgaggacgggtttcctgtcctccctagtaactcattaaatctcatatatatcactagagctgatcaaggaactgaacttgacagtacacttggttcactctaagtgatcgagtacaagcattgtgtgtgaattgtaatatattatttgttaccagaacatgatccagtatatgctgccattaggattatgttatgtgaacttgcatacgatctgcttcttattcggtcgatcccatgatgtttatctgaacttggttccactagtgtatatagaagattcatgttccatgttggtagtggtgtttcccttaatacatgtttataaataatgtgcgatcatgaagctatatatgttaaccatgtactccattgttattcaggtcgtgcagcttagtg

SEQ ID NO: 80077 - DNA, 446 bp, Oryza sativa
  Clone ID: PAT_MRT4530_79737C.1
ggggacagctaacgcgctgttaacagtgaaatttggtaagcccggagtagtcatcggcttagagtcagcatcggctttgaagtcctgaaattagccgatgagatttgtcaagtcgtcagttgtcggattcttgctatattcgcctgcttcttgattgccaataagggtttcatcggagtttcagccgatttcatgacattggaccttcagccgatgtgtgctttaaccttcggatcgatgcttatttatcatatcactatttaccgattggtttatactggattatattgttattttattacatcatcatcaaccgattgcctttatatcatcatctacattggatatatagccgattgcttaaactctattgctatcggctggtatcggcatcggagagagataggtggaactgaggaagagaagagggaggagagagatgacgt

SEQ ID NO: 80078 - DNA, 510 bp, Oryza sativa
  Clone ID: PAT_MRT4530_79738C.1
cagacgcgtgggctgcaacaaagaaatggcttccaacatggtactcgcctcagtgttgcttctcgcgcggacctccacgctggcggagacccacaccatagaccagtaccaccaccaacaccagccggtctacaccccaggaccggtctgtcagacaggaccggtctacccgaggcacccgctcgcgaatcgccagtgcgtggggaagcgccagtgcgtcggccgcgagacggtccgccgagactagcagcgccagctagactgctgccagcacctctgcggcaggtacgacaggtgcagccacagccaggcgagcagccacaggctgctaggcatctacaaggagcgtcacgccacggacgacgtgcaccccatgtgcgagatattccacttgtagcgcacaggggacatccagcgcgcggagtgcagcctgcacatgctcaacaacggatgcatcctcaactactgacgggcgagatgctactacctgctgagatcttgctactagct

SEQ ID NO: 80079 - DNA, 224 bp, Oryza sativa
  Clone ID: PAT_MRT4530_79739C.1
acatcaacaaattgtctgacctaatatgtacagctcctactaaaagtaggggtgcattcaccataagcatgtcctccccgcttctacctctaacaggaccgctggaatgaacagacttccctagggcagaaacttgcgttcagctcctattgaaattaaatcttatgaagacgagtggcatgtcgcgtggctctctttgcccggcttgctcttcgcgtacctcc

SEQ ID NO: 80080 - DNA, 1045 bp, Oryza sativa
  Clone ID: PAT_MRT4530_7973C.1
agaacaaacccaaaataaataatttatagaaaatgtgtcccacatgtagaaccatacagagatacatcattcacttgatgtaaaaattgttagctttcaacaataatactattgtttatatgcttgttctctctcattctttacatattttttctgcacagaaatatttacatgcgattcaatctgacaaatgctctatttgcctaaactttatttcaaataacttgctcaaaaatcacttcagaaatgtgttggtcaagcatatgtggtgagcaattggcagcatagtaacagcttttcacaatgctcaagaaggtctgcttggttttgttgttaattcttctatcatcaactcttggaagaagatattgagcaagttcttgcatacccaactcaatttccttgtcaatttgatttattgttgtctcatttttcttggtatcctgtgaaagtaacatcttggcatgaagagaatcgcaaatagaggaagcaagttgaataaaccaagaaccttcggtgttatttatcatagatgctgcctcctcaattcgtccagcacaaatttcaacaatttgagcaataagtaaacatgtttctttattatgaacagtgcatgaccctggatgcataactctgcctttgtcatatctgccatccttcatattgatttgttgcatcatccattcaatccaagcacatcttatgagattatgaatacacttttgaccttctcgaactggcggtgtctcttgagacaacaaatctataagttgacaaagtgtcctcgcaaggattccatcttttgcatatccttctagccccaaaacattgccattttcttcatagaggctgctccacatgaaacgctccatccttttcatgcttgacatatcgctgtaaaaatgcctagaaatagtgttggccagcactgacactctagcccatgcaagtcgctcagaggcacggtttggttcgaaaatgcacgcggcagccaaaaaataagctctcaaaacatcttcaggtgtcatcccaaaagcttccagcg

SEQ ID NO: 80081 - DNA, 338 bp, Oryza sativa
  Clone ID: PAT_MRT4530_79740C.1
atgacaagatcgcacaagggaatacgagaacattgacttcttcaccttcgatgagatatgacgacttctccacgcaatgcatatgaggtacctgcctataattttgcacgagttgaatctaagttaccattctacgatgagaagtatgattctgttgcatatattgattgggagctagcagtagataatgaatttgatgagtatgatttttctgatgctcaaatgattaaggctgttagtaataagtttacctcttccgctctcttttggtggagttatgttactccctccgtttcataatgtaagtcattctagcatttcccacatccatatggatg

SEQ ID NO: 80082 - DNA, 412 bp, Oryza sativa
  unsure (1)..(412): unsure at all n locations
  Clone ID: PAT_MRT4530_79741C.1
ccaagcagcccaagctacgaacccgacgancctaaacccattgattttgatnccttttgtgctgtanatttatgatggaaacctcaaatgcaagtagctgttttgtgattgaaccaagtactgtactgatggantgatgtgtgctgctgttgtgtgatgnccgaaacaattgatnanctatgtactgatgatggngtgatagctcatagcagattagcngtagctcatagcngattagcnctatagcactgnataatagtgtatactatatatcttatacaagggtgttttgctgtaattttttttaaatatttgttatgcnaattatatgnagttatagnagaatatnttttgctgttgagacgntttnttaaaaaaaaaaaaaaaaaaaaaaaaaaaaaaaaaaaaaaaa

SEQ ID NO: 80083 - DNA, 272 bp, Oryza sativa
  Clone ID: PAT_MRT4530_79742C.1
ctcttttttttttttttttagaaaatgctagcacagatagaatagaatatgtgtcttagtgggaatcggaaaaaggaacgagaccgaggggcactgagatacaccggcaagagctggtaagtaaacttgaaaactgggaggaggaggaggatgaacaagaagggtgggcaagaggcccacgccccataccggcctctaaaagaacaccaccggacccggggcccgccccgggaataccggacgggtcccggcacgggaaccagacttgccta

SEQ ID NO: 80084 - DNA, 156 bp, Oryza sativa
  unsure (1)..(156): unsure at all n locations
  Clone ID: PAT_MRT4530_79743C.1
ctgctgttggagttcatcctctcccttcgcttcttgatatacaatatggtattgtttatcatttacacatagtgcatcggaacagaagcttcatggtgtatnactatcatggctggttatagctatagttcttcgtcatcacttcacgtcaacagt

SEQ ID NO: 80085 - DNA, 614 bp, Oryza sativa
  Clone ID: PAT_MRT4530_79744C.1
atgaccctcattgctgccggccgcgacacgataggctcggcactatcatggttcttctacctcctcaccaagaaccctcatgtggcgtccaagatcctagaggagcttgactccgtcgagcgcgccaccaccaccccggacggcatggtgaccttcgacccggacgagctcaagtcactcgtgtacctgcacgccgccgtgtgcgagtcgcttaggctctacccacctgttccgctggaccacaaaggcgtggttgccgccgacgtgatgccgagcgggcacaaggtgcgccctggtgacaagatcgtggtgtccatctatgcgatgggtaggacggagtccgtgtggggcagcgactgcatggagttcaggccggagcggtggatctccgacgacggcaagctgcggtacgtgccgtcgtacaagttcacgcccttcatcacggggcctcggacctgcctaggcaaggacatggcgttagtgcagctcaaggtcgtggcggctactgtggtgaagaacttcgagatcgaggccgtgccaggacatatcgtggagcccaagctgtccatggttctccacatgaagaatggcttaatggtcagggttaagagaag

SEQ ID NO: 80086 - DNA, 438 bp, Oryza sativa
  Clone ID: PAT_MRT4530_79745C.1
atgccgcagtactccgtcgagatcgcctccgtctccggcctcgacccggcgacggacctccacgccggggcggcgctcgacccggtgttcaacctgaccgtcggcatcgcctcgaagggcgagtatcgcggggtgtgcatcgagccgcgcaccgccgtcaaggtgtcctactcgtacctcggcctcccgctggccgggggccgcgtgccggaggtgtgcgcggggccgaaggagccggccgagaagcggaccgtcgtcgcgcggggcgtcggggtgagcgtgccggggtacatgctggacagcctcgccgaggacatgaggagcggggaggcggtgttcgaggtcaagctgatcaagggagacggcgacaggtacagcaggacggtggcgacgtgctgggccagggtcggcggcggcttggacgataggtgcatctga

SEQ ID NO: 80087 - DNA, 207 bp, Oryza sativa
  Clone ID: PAT_MRT4530_79746C.1
atgaccaaaataaaaattttgcacctcgatgagttctacaactttggttttgccgaaggaaccgccgtcgacgccgcgcctcctgccactgcgcctcctgccactgctggatccgccgcggcagccgccaccaccgccctgcccaccgctgacgccaccgacaccgcatctgccacgggagccgacaccgccaccgcctgccgctaa

SEQ ID NO: 80088 - DNA, 328 bp, Oryza sativa
  Clone ID: PAT_MRT4530_79747C.1
ggggaaaaagctgcaagccaatgcatgttttgattaacggcaagatcatgcacattatcccaggaagggggggaagaatttacggggctttaaagaccaaaaaaaaggaaaattctgtctgatctactgaacaaaactcgggggcgccgggtccttcccttcctgaacctacacggggccccgcgccggggccggcactacgggggacggcctccggggggatgagcaacttgaacctgccctcctccttgcacgggtggagcaacttctgggacgggagccctatctcccggagaacgagccggccggccttccggggcccccgggg

SEQ ID NO: 80089 - DNA, 344 bp, Oryza sativa
  Clone ID: PAT_MRT4530_79748C.1
acacatatggggaaattgcatttcaccattatattgacctatataatccttactgagtccaaaaaagacttgccatacacacggtgatacgctgatcctgagagaaaaagaaatgcgtgcacaacttcccagagtatacaagcgcgggagcctgaaccgccaagcctgaggcgcccaatgagagagctagcacacagtaagagcgtggtacagactgccctgggtaacccacagaaaaccggacaggccagagggattaacggatcagacaaccgcgagtgcgaggctggccgcgcaaagcacgtaagcctggaaacttccttatattagtgagacaaaccaac

SEQ ID NO: 80090 - DNA, 2670 bp, Oryza sativa
  Clone ID: PAT_MRT4530_79749C.1
agcgcagtacgtgacacccgcacacgaagccatgggacgccgcgcgcgcgctctcctccacgcgccggcgccgctcctgctgctgctggcactggccgccgcggcggcggcggtcgccgtggcgtcgggcccgcccttctcctgcggcgcgccgtccagcgcggcgttctgcaacccgaggctgcccatcgagcagcgcgcggacgacctcgtgtcgaggctgacgctggaggagaagatctcgcagctcggggaccagtcgccggccgtcgaccggctcggcgtcccggcgtacaagtggtggtcggaggcgctccacggcgtctccaacgccggccgcggcatccacctcgacggcccgctccgcgccgccaccagcttcccgcaggtcatcctcaccgccgcgtcattcaacccgcacctctggtaccgtatcggccaggtgatcggcacggaggcgagggcggtgtacaacaacgggcaggcggaagggctcacgttctgggcgccaaacatcaacgtgttcagggacccgaggtggggccgcgggcaggagacccccggcgaggaccccacggtgaccggcaagtacgccgccgtgttcgtccgcggcgtccagggctacgccctcgccggcgccatcaactccaccgacctcgaggcctccgcctgctgcaagcacttcaccgcctacgacctcgagaactggaagggcgtcacccgctacgccttcgacgccaaggtgacggcgcaggacctggccgacacgtacaaccctccgttcagaagctgcgtcgaggacggcggggccagcggcatcatgtgctcctacaaccgcgtcaatggcgtgccaacttgtgccgattacaacctcctctccaaaactgcaaggggagattggaggttttacggatatatcacctcagattgtgatgctgtgtccatcatccatgatgtccaaggatatgccaagacagcggaagatgcagttgcagatgtcctcaaggctggaatggacgtgaactgcggcagctacgtgcaggaacatggtctatctgcaatccagcaagggaagatcacagaacaagacatcaacagagccctccacaacctcttcgctgtcaggatgaggctggggctcttcaacggcaatccaaagtacaaccgctacggtaacattggcccagaccaggtgtgcacgcaggagcaccaaaaccttgcccttgaagcagcacaacatggcgttgtcctactgaagaacgacgccaatgctctccccctgtccaaatcacaagtctcatccattgctgtcattgggcacaacgcaaatgacgccacgagattgcttgggaattacttcggccctccttgcatatcggtgactcctctccaagtgctgcaaggctatgtgaaggacaccaggttcctagctgggtgcaactcggctgcctgcaatgtgtcatcaattggtgaagcggcgcaattggcaagttcagtggactacgttgtgctgttcatgggattagaccaagatcaggagagggaagaggttgataggctggaactgtcgctcccaggaatgcaggagaacctcatcaacacggtcgctaacgcggcaaagaagccggtgatcttggtgctactgtgtggtggtccagtggatgtgacctttgctaagtataatcccaagattggggccatcctgtgggctggttaccctggcgaggctggagggattgcgattgctcaggtcctctttggagagcacaaccctggtggaaggctgccagtgacctggtatccaaaggagttcacgagcgtgcccatgacagatatgcggatgcgtgccgatccatccacgggatatcccggacgaacgtacaggttctaccgaggcaacaccgtctacaagttcggctacggcctcagctactcgaagtactctcaccacttcgtcgcaaacggcacgaagctgccgtctttgagcagcatcgatggcctgaaggcgatggcgacagcagctgcaggcacggtgagctatgacgtcgaagagattggccccgagacgtgtgacaagctcaagttcccggcgctcgtcagggtgcagaaccatggccccatggacggcaggcaccccgtgctgctcttcctgcgctggccgaacggcgcggcggacggcggcaggccggcgagccagctgatcggcttccagagcctgcacctcaagtcgatgcagactgtccatgtggagttcgaggtgagcccatgcaagcacttcagcagagcgacggaggacggcaagaaggtgattgatcatgggtcgcatttcatgatggttggcgatgatgagttcgagatgagcttcacgccttgatcgagctgggtccagttcattgagttggggttgggtactgatcgagctattccaagccagcgcatggttgcatttcatttgcttgcttgggaaatctgctgcttcgttcagggggctgaggatttaagttgctcagcaagtgtaaccatctatcttcttttctcaaaaagaaaaaaaaagaatctaacttatgtgaacaagagaatgattatttaagaaagattgaggcaccgttgacgtcataacaaaaaaaaaaaaaaaaaacggtccgcggccactcgagtcgacgcgttctc

SEQ ID NO: 80091 - DNA, 1088 bp, Oryza sativa
  Clone ID: PAT_MRT4530_7974C.1
ttgtgaccatgtttgtcacgaccggaaataacccaacgggcgttccttacgtgcgtgtattattccttgtcccaggaggcaagactgagccataaactaagccttacccactagacatgtggaagtacggtagtgctttgcaacagaggcccgaagatcggtccttatatggccgaggtggggcccacgcggcagcctcacggtgcgcccgaaggcggccactcggcgcggccggtgggaggcggcgcccgcgcccctatggtcgccggcggcggccataggcacggcggagcggcggccgagagaggggaagggaagggggaaaagaggcggcggtccacggctcaccctaggtcgacggcgacgacgaaaaaggcggccggagcggaggaaggcggcggcgcggctcgggtcgacggggtcgacggcgctccggccgtcggcgaccgaaacggagaggtggacgaggtcggcgaggatgcgacaaagccgacggaagctgcgccgaggtgggcgacgacggcagtggaccggagctcggcggcgacggcggagagagagagcgacgtcgcgagctcgaatccggcgaggaggaagggcggtgagaggcggaaacgggcgagggaggcgcggggagggtttaaatagggttggaagggggagagagcggccggagtggatggaaaccggcgcgtgaggtccggccgccatcaatggcgccggcgagatttgcgggggcaaatccgcccgtttgaacgcgagagagagagggaaaaatggggggaaagggagaggggatcacggggagtgattccccccactttattgcacgcggggacggcgggaggcggtgggattcgcgccgccgccggtgctagggcgcggggaaggcggcgtgagcggcgggaggaaggggatgacgggtgggccccacccgtcagcgagggtggcgggctggcccgcccgtcagcggggcgcgcgcccggagaggccgagtgggccgcggggagaggagagagagggggagggagatgggccgaattcggcccaagggagggaagggggactttttagggtttttcttttta

SEQ ID NO: 80092 - DNA, 380 bp, Oryza sativa
  Clone ID: PAT_MRT4530_79750C.1
aaagctgcaagccaatgcatgttttgattaacggcaagaacatgcccattatcccaggaaggggaggaaaaatttacggggctttaaagaccaaagaaaaggaaaattctggctgatctactgaacaaaactcgggggccccgggtccttcccttcctgaacccacccggggccccgcgccggggccgacactacggggggcggcctccggggggatgagcagtttgaacctgccgtccttcttgcacgggtggaaaaactcctgggacgggagccgtatttcccgaaaaacgagccggccggcctcccggggcccccggagggttaaacacgggcgcccgcccttgccgataaaccgaattgggggggggaaacccccc

SEQ ID NO: 80093 - DNA, 2872 bp, Oryza sativa
  Clone ID: PAT_MRT4530_79751C.1
atggcgccgccgccgccgccgacgccatcgccggcgcagccgaagaccagaaagaaggaccacgtccgcctcaacaacccgttcccgagggccgtgccgtcgtcctccctccggcaccgggacgccgcgccgccgctctccttctcgccgtcctccaagctcgcccacggcgcccacgacttccctgtcggcccccacttcctcctccgctgggacccgtccctcggcggcgcggtgtcgctggctcctcgccgtggtggcggtggcgcgacgatgtgggagaccgtccccggcgtcgcgttcgtctcggcggcgtccgtggacaccgaggccgacgagtgccgcggctcgttcgcgctccgcgacggccgcgcccgcctcgtccccgaccgccagcgcgtcgacaggatccgcgccgtgtaccgccgcgacgccgacgccgacgccgacgccgacctcctgcgcgtcgccggcgcggcgttccaggcgtccgagcacgagcaggcgcggttccccgtggtggtgatcaccggcgtcgtgtccgccaggaagccgaccccctcgccgtcctgcctctgcggccggcgccgcgccgcagccgccgccggacggccggtcctctcggcgcggtactggatcctcctcgaggagaagagcgacacgcaggtcgcgttccgcgtcaacctcggcgactaccaatggagctgcgaccacgaccgccacgccacccacccatccccattgccatcgccatccccctccacctccccaagaacgcaccgcgccggcagcatcctccggctccgcctatccacccgggtgcagcggagcagcggcggcagcaagaagaagaagaagctcgccttcgccgccgcgggcgtcccggctgaccgggaggagctcgcgccgctcgtgccagcggcggcggcgaaggaggagttggagttcaaccgggtgtggatgacgttggcgagctcgcgggaggagaggttctacgggttcggggagcagttcagccgcgtggagtttaaggggaagcgcgtgccggtgttggtccaggagcaggggatcgggaggggcgaccagcccatcacgttcgccgccaacctcgtcagctacaggtctggaggaaactggagtactacgtatgctccgtctccgttctacatgacctcaaagatgagatctttgtacctcgagggatacgattactccatttttgacctgacaaagcctgatagagtgcagattcaggtgtacgggagttcagtccaggggaggatcctgcacggcggctcgccgacggagctgatcacgagctacacggagtcgacggggaggccgccggctcttccccggtggatcacgtccggcgcggtggtcgggatgcagggcggcacggacgccgtccgccgcgtctggaagcagctgcaggaccacgacgtcccggtctctgcattctggctgcaggattgggttggccagaggaagacgtccattggatcccagctatggtggaactgggaggtagacgacgaccactacgccggatggaatgatctggtccgcgatctccggcgccgcggcgtcaggaccatgacctactgcaacccatgcctcgtcccgatggacaagaaggcgaacgcgaggaggcacctgttcgaggaggccaagaagctggggctcctggtccgggacgccgccggcgagccgtacatgatgcccaacacggcgttcgacgtcgccatgctggacttcaccaacccggccgcgcgcgcctggttcaagggcgaggtcctcgccgtgatggcccgcggcggcgccgccggctggatggccgacttcggcgagggcctcccgctgaacgcgcggctgcactcctccggctccggcgacgacggccccgtcgcggcgcacaaccggtacccggagctgtgggcgcgcgtcaaccgcgagttcgccgacgagtggcgctccggcgagcaccgccgcgtcgcggacgacgccgacgacggcgacggcgacggcgagctggtgttcttcgtgcgggcggggttcagggagagctcgaggtgggcgatgctgttctgggaaggggaccagatggtgagctggcaggcgaacgacggcatcaagagcagcgtcgtcggcctcctcaccggcggcatgtccggcttcccgctcaaccacggcgacgccggcggctactgcaccgtcgacctgccgctcctccgctaccgccgcagcgaggagctcctcctccgatggctggagctcagcgccttcaccgtcgtcttccgcacccacgagggtaacaagccaggatccaactgccagttctactccaataaccgcacgctcgcgcatttcgcgcgctgcgcaaagatctacaaagcctgggagttctaccggatccagctcgtcgaggaggcggcggagaagggccttcccgtggcgcggcacctcttcctccactacccggaggatcagcgtgtgcagaagatgacataccaacaattcctggttgggacagagatgctggtggtgccggtcttggacaaggggaggagcacggtgaccgcctactttcccatgtcagatggcggcttatggaagcacgtttggaccggcgatgagttcggtggtcgtacgagtagagggggtgtaggagaggggatgtcgcatgggtctgaggccgaggttgaggcccggattggcttcccggctgtgtttgtgagagttgggtcgaccgttggagaaaggtttgtaagaaatttgagggatctcaaagtattatgatttcataacccattgtttatacaacgaaaagaaaggaaatttaatttgggtttcaaaaaaaaaaaaaaaaaaa

SEQ ID NO: 80094 - DNA, 309 bp, Oryza sativa
  Clone ID: PAT_MRT4530_79752C.1
gcacgagggtcgagccgggcaaatctgcccttcacagagaaggatgtgaggaacctcatccagtcgtgcaggaagtctgatcaggaggagagcgtcgatctgatcaaaatgtgcagaagatttcaggagaaggaccccgatttcaagtatgaattcaccaaaggcgcgagcaaccgcgtcgagaacgttgcctggtcgtttgcatcgtcggttcagtcgtatgagatgtttggtgatgctgttgtattcaacacgacacatcggttgcctgctctggacatgctgcttggtatttgggttggattgaac

SEQ ID NO: 80095 - DNA, 475 bp, Oryza sativa
  Clone ID: PAT_MRT4530_79753C.1
gtgttgtaacaccacaaacatctataacaccgctaaaacactcttttgttgtaacccaaaaccaaataccccaactttccctaatataccccttgcttcgacgcacacataaaataaaaggctgaaggcaacgggcaagcaggagaaccagcaagaaattcaccaaaaacgccccaacaaaagaacacgaaccaaaccatatgaacctacaggctgggatcaaacactgaaactaacggccggggtcaaagtattacacaaggggcgggggagctctagggctccattaaagctgaaccgggttcagataaaggagcacgccagacctcgaaggcgtcctgaaataaagaaggctccaacaacagggggggggagaatacttgttctgagccccacccgttataaaagactgatggcccagaccactgactggaccaagcatgctggtgacagtgtaaggaccaacacgcccatt

SEQ ID NO: 80096 - DNA, 253 bp, Oryza sativa
  Clone ID: PAT_MRT4530_79754C.1
ggaccccaaaggttccaattgatggaaagggaattctaaaaagcggcgacccgaattaaaattaaaaaccacccccaagagggatcgaaattccaactccaccgaatggaacccaagaactggggctattccacccaaaccttgggggagcttaatgttaccaacacggcccgaacctcctaaaagggtcttaaaccccccccacctgagtgtttttttagggctcctaacatactaaaaacaccggttcctg

SEQ ID NO: 80097 - DNA, 180 bp, Oryza sativa
  Clone ID: PAT_MRT4530_79755C.1
atggagaggggaataccggagcagtgtgtggcgtcgttttccccgggactccgcgaggcttttgctcgcaacacacttgtgcactgtgtggaggtgtacgggcttatggtttggtgtttgcaccccgaaacaacggtgatcaagattgtaataatgcaaaacagcaagaagcatcgttaa

SEQ ID NO: 80098 - DNA, 624 bp, Oryza sativa
  Clone ID: PAT_MRT4530_79756C.1
atggagaaaaccacggagattacaacagagaacactagtaccccgagattaccgaagatccatgtcgagaacggctcgacgagatccaccggccagttggcttcgaatcctctggattgcttctactatggcaggcgtcttgcgctaagattcgataccctgcacccctctagggggagacggattccttgcgcattggctattttcgttgatctggtgggcaaccttctcgtgtacttgaggatataccgtattcgtatacctcacaacctcaagaataggaggggccaaagtggtggcggccggcggaagttgaagcggcgacggcggcggaactgcagcagtttgctctggatgaacctggccgacaaccaattgatcggcaggattccgccggagatggcagagatagggagaaaccctgctccgactttcgagaagaatcggaaggatgtcagcgtgctcgcacgcctccccgcgcaccccgccgccgcatggggcagcttccatgccacacactccagcgcccgcccgccagccctcccgcctgccgccgccgccgctccggctcccgcccactttcgccgcccctgcccgtcgattgctccacgagagagaaggtga

SEQ ID NO: 80099 - DNA, 365 bp, Oryza sativa
  Clone ID: PAT_MRT4530_79757C.1
gccacacgtaccccttcgataaggcacggtacctgatgctataggtactgctggccctggaaccaggggagcacaagatcacatacggggtagcacgaatcctaaacatacccttcctcaagctcgtgcacaccgcacctttgcggacaaccaccctgccatccatgctgatcattacagaatccatgggggcgatcacggacgtggccgcactggtacaggagatacaagccactcttgagaacaagaccaacgacgcctggacattaaatggtgacatctacgtcaacccagacttcaacatatatgaccggcaccgtaacggtcgcagtcctgcggcgcacccctacatcgacatgagagat

SEQ ID NO: 80100 - DNA, 125 bp, Oryza sativa
  unsure (1)..(125): unsure at all n locations
  Clone ID: PAT_MRT4530_79758C.1
gcgtccgcccttttttctccggagctttaagcgcgcgccgaggagatcaggttctttggccatggtgggctggcgggcggcanaccacnctcttgccgttcttcnccttctcatctctaccgggg

SEQ ID NO: 80101 - DNA, 531 bp, Oryza sativa
  Clone ID: PAT_MRT4530_79759C.1
atggaagagggcgaggatgccggccgaaggcggcggccatggcggtgctcaccggcgcacggcgcggagtgggttccggcggtggaatctgatgggagaggggtggacggggtggcccgcacgacagcgaacgcgacagcgtcgacggtgcggctcggtgcagcggctagcggcggccggagcggtggcggcggcggtggaaaggggggcgacggcgctagggcgatggagggcacgggaacgggcgattgcaaaacgaaaaagagagaggagggaacggggaacctttatatagacccgcgggggtcaatcgtggccggggtgaccgtgatttcggcggcggagtggggagagaggcgccgctggtttgtggtgctgatcggcgtgggagtatcgcaagtagaaatgcacgaggaggaaaaggctcgagccggtgcgatcgactacttcctctacatcgatgcgcgctaccttcgcgagagtaccttcgacttctcagcgtcttcttccactgcgcagcacgtcgagtag

SEQ ID NO: 80102 - DNA, 2969 bp, Oryza sativa
  Clone ID: PAT_MRT4530_7975C.1
agatcatacccaaaataaataatttatagaaaatgtgtcccacatgtagaaccatacagagatacatcattcacttgatgtaaaaattgttagctttcaacaataatactattgtttatatgcttgttctctctcattctttacatattttttctgcacagaaatatttacatgcgattcaatctgacaaatgctctatttgcctaaactttatttcaaataacttgctcaaaaatcacttcagaaatgtgttggtcaagcatatgtggtgagcaattggcagcatagtaacagcttttcacaatgctcaagaaggtctgcttggttttgttgttaattcttctatcatcaactcttggaagaagatattgagcaagttcttgcatacccaactcaatttccttgtcaatttgatttattgttgtctcatttttcttggtatcctcttgacacctattcgtagtggtacctaggaggtacatctgtgaaagtaacatcttggcatgaagagaatcgcaaatagaggaagcaagttgaataaaccaagaaccttcggtgttatttatcatagatgctgcctcctcaattcgtccagcacaaatttcaacaatttgagcaataagtaaacatgtttctttattatgaacagtgcatgaccctggatgcataactctgcctttgtcatatctgccatccttcatattgatttgttgcatcatccattcaatccaagcacatcttatgagattatgaatacacttttgaccttctcgaactggcggtgtctcttgagacaacaaatctataagttgacaaagtgtcctcgcaaggattccatcttttgcatatccttctagccccaaaacattgccattttcttcatagaggctgctccacatgaaacgctccatccttttcatgcttgacatatcgctgtaaaaatgcctagaaatagtgttggccagcactgacactctagcccatgcaagtcgctcagaggcacggtttggttcgaaaatgcacgcggcagccaaaaaataagctctcaaaacatcttcaggtgtcatcccaaaagcttccaggccattctcaatgaaccacttttgtagaccctgcaactcatgctgatgtagagcttgacaacggttgaaatcctgtttcgccaactcgagatatgtagcgttattcacaattggcatcctgtagagtgtctttccaatccagacgtcatcatttccaccatattgacctatgtatgttcttgcctcgacgcgtggcaagctcgcataccaaggaaaatctagtgtgtattgtacctctcctggtaggtccttggagatgatccatttatcatgaagtgtcccctgggcttctctttctctaaggaactcatatgagaaattccttgcacgctgcaaaatgtcttctcctggaaaacttatctgagatgctctgttcaggttatacatcccagtgactgcttgagttgattgccccacaaaacagaagaactccccatccttctcaaaattcttgaacacacttggtgatacattgtatccatggaggcgtagtagacggaaagccatagcggtgtcatccacttcttttacattggagttcctagcccagcaaatcccatcttcagtccagtgcctgttgacatagtccatgttctgttcaatctctcgttggaagtaccgcgatatcccaagacgctccaaccgatcgacaacccatatgtgctcaaaaagatcgaccgggtaaacgttcggaacgcctccgtcgaatttcttaatgatcctgtcgatgtacgcgaagcatttcttgtcaccggtctgcatgagagcataagcagtagctgaaggggagaacaagaaggatccatcactgcattggagcttcagaagcctctgccaatccagcccaggcatcccttcaaggctatgcagaattgaagttgggactatatgcatcatgtcctttggaatcctcttaagcttgagttctctgtttgcataaatgcccttgagagcagggtgatcatatgggaaatcaatacccaaacccctagctgcctccacaagagaagggaatgcaatctcaaacccaatcggcatcgtatccggctcctcctctgctaacctccacaagttcagattcagaaactgaagcccttgcttgcactggtcatggtggagggaccatctggtgagggcgacgacgcaggcgagggtgttgatgacgcggtcgtaggcggagaagagcgcctcgtcgccccacgacccgtcggcgagctggctgccgacgatccaccgcacggcggccgggaactgcgtgccgccctcgccgtccagccgcggcaccagcgccacccacgccgtgtcgtacgccgacgcggtgatcgcgccgtcctccatggacgacagcatcgacctcacctgctcgaccagtggctgcagctcatcatctgcctcctcatcagcctcgttgttttgttggtgatcgtcgaggtcgcgtgattcattgggccatttcgtgatccggggggtctcatgttcgatgatgttggcttgcagcccagaatttgacatgctggagctcgacacgccggcggtggtggcccgcgccctccacgccgctcctcctccgccgccgccgccgctgtcggcgtgatgatcctcgccgccgccgtcgtcgccgccgcgccgccaaacgcacggacgaagatggccacctttagccaccggagcgcgggacgacgacgaccatgaccaccgccgccgccgccgccagtccgccgagccggcgccgccgaatgcggcgggcgccgtcggcggggagtggaggtgaatcatcgtcggcggcggaggagggagtagagagctcgtcggagatgcgcgcgagggatgcaccaatggaagacacgagtccacccgaggatggggagatgatggagatgcaatgaa

SEQ ID NO: 80103 - DNA, 1508 bp, Oryza sativa
  unsure (1)..(1508): unsure at all n locations
  Clone ID: PAT_MRT4530_79760C.1
ccacgcgtccagaagcaccggcggtcaataattaaaaaaaaaagaaaaaaatggctttcagaaaccatgacgctgccatggtcctcttcttcttcctcctcatggtgactacctacgccaacgcgcacggacacagcaagaagcccgaggagatcactcagggcgtttacggggcggcggcggcggtggcggccggccccggcggcacgttcgacatcaccaagctcggcgccgtcggcaacggcagggcggacagcaccggcgcggtgatggcggcgtggaggtcggcgtgcgccggcgccgggaagcagacgatcctgatccccaagggggatttcatgacgggggcgatggagctcaggggcccctgcaatggcgccgtgaccatccagctcgacggcaacctgctgggctccaacgacctcagcaagtacccgggcaagaagatgcccaactgggtcgaggtccgccatgtcgacaacttcgtcatctccggcaagggcaagctcgacggccagggccccggcgtctggagcaagaactcctgcgccaagaactacaactgcaagctcctccccaacacgctggtgctgaacacggtgaacgacggggtggtgagcgggatcacgctgctgaacgccaagttcttccacatgaacatctaccggtgcaaggacataaagatcagcggcgtgaccatcaacgccccgggggacagccccaacaccgacggcatccacatgggcgactcctccaagatcaccatcgccgccaccaccatcggcaccggcgacgactgcatctccatcggccccggcaccgacggcgtcaacatcaccggcgtcacctgcggccccggccacggcatcagcatcggcagcctcggccggtacaaggacgagcgggacgtccgggacgtctccgtcacccgctgcgtcctccgcaagaccaccaatggcctccggatcaagtcgtacgaggactccgtgtcgccggtgaccgtgtccaaggtgtcctacgacggcgtcgtcatggaccacgtcgacaaccccatcatcatcgaccagaagtactgccccaacagcatctgcaccagcaagggcgactccaaggtgtccgtcagggacgtcaccttcaggaacatcaccgggtcgtccaacacgccggcggtcgtccagctgctctgctccggcaagctgccgtgcagcggcgtcgcgatgcaggacgtcagggtgctgtacggcggcagcgacaagaagaccacggccgtctgcgaccacgcgctggggaagtccaccgggtgcctcaaggagctcgcttgcctctaatggattattaattcgatcatcatcgatctctttgtgtgtgttcatcgtgtttaagagacagatcgaggtttggagagcatatggatgtatccgcgtgtgttccttgattttgatcttccaagttaatgtccatatcctttctttctgtaaaattaagaccctnccagatgcatgggaacc

SEQ ID NO: 80104 - DNA, 456 bp, Oryza sativa
  Clone ID: PAT_MRT4530_79761C.1
atgacggcggagggagcgaggcggtgggacccggagaacaccagacagaggaaagaagagattgagagggcgaaggagaggacaagaggcgaaggcacgagatgggacgccagcccgagggagagcagagggggaagcagcaagcagagtgcaaaagcaacccgaagagacacagcgataggaagagaaaacactcgcgcacaatacgcacacgccccgaaaggtcaaacagactttgagcgagaaggtccccagcctttcaagcttgctggtattggtggggtttcggaatttttcggctggacggatcagcaacgagcgcaggctgtgaaagaagggctgggctaccgtctgatcttcacaggccgtttggttggagcactcgtgcttgtcgacgcattatttcttggcgctcaaaggattggccctctgcttcaagaactgcaatctcgctaa

SEQ ID NO: 80105 - DNA, 490 bp, Oryza sativa
  Clone ID: PAT_MRT4530_79762C.1
cgaggatctgctccgccttttcttctctcctgttccaatatatattttgctgtaaatctatgagcgcaagttgcgggcagaaatttcatgcgcttcatgatttcagtggcagaactcagcgtgcaccagtcaccagtgcacagtacagctgtctgtgcgtcaaattttgtttagatcggtcttttcatatttcaaatgcgaatgctcccggtcttgggggtatataggagtagatgatagtccatggcctgtgtcctctagatctccaccaactctttctgtagctttgcccaatacaggttaatcgttacctgcttggagtacagtggaccattcgctttatgtacagtatatagtatgtgctggtatatgacagtatactagtacatgttagtatagtgtatactcctatgattacttattatatattggtcacatatctgccattctacctcacgcaggaacatggaaacgtaggtgcaattgcaaa

SEQ ID NO: 80106 - DNA, 390 bp, Oryza sativa
  Clone ID: PAT_MRT4530_79763C.1
gcagtccttattacctggtacgaccgagacgtctggagtgatgttgagatgaatactcaggcgagggctgacctgacctgtgctaggatggaagcgggccatggtgtccatcgacccgcatgtcgccgggcgtgcatctggcctccgggcccaggcgcgccggcggtaggtccaggctcgccagagctggggccgccgccgcctccgccgacgcccaaaccggacggcgggccgtgctctaactcgtggggacctagatcgccggagaagccctatcacgggtggcacccgacgacgacgacttgccgatctggatgggcccctcatctgccttctctggaaggatacaggaggcgcttatctcgcatcactcgaccggcacggggtggt

SEQ ID NO: 80107 - DNA, 633 bp, Oryza sativa
  Clone ID: PAT_MRT4530_79764C.1
ccggaattcccgggtcgacccacgcgtccgctttttttttttttttttacctttcaatttggggggatattccgtagattgaaccatacatacctttcaatttgtgatagattaccacgttacattttttctcgaacaatacgaaagagattgcaatatatatacaatttaaacctttttcaaattcactgacatgttcccttatttaaaacatgcatgttgcaatgcacgctatatatatcttaaaaacaaataaacacgaaaatggcgatcgatcgagtagaaactctggtttattcgtccatcaactcttgaatcttgatgacctgatcttctcatcccatctgtctagtacttgtcgaggctttcatagccattcctttgcttgatccaggcgacgaaggcgtccatggtgttggtgtccgaccggtagtgcctctgcgtgaactcgaggaactcgcgccacgtgaagtccgggaacgcgcgcgggtgcgcggcgtcgacgagcgccggcggcggcgacacgacgcggtcgaggcgcgggttgaggaagaaggtgagcgacctgcgcgcgacgcggtcgttcaccacggcgcggtggaggctgctggcgtggcgcccgttggtgtgcgc

SEQ ID NO: 80108 - DNA, 1367 bp, Oryza sativa
  Clone ID: PAT_MRT4530_79765C.1
accacgtatcctggcaagcatagattatttcgacgtttaagttgaatgggcagtagtagaagatacaaaattctacaagaaagttatctgaactctgacacgagtattcagtaagtgtacaaaatttccacctaactgattttgttcagcaactgcttacaacacccacatgctgatagtattagactccagcttaccatacactgctgctgctgccagtaaacaggggttactgactcagcatatgatccctgctttatatgaaacgaaaatcctccattatttggtcagtggcactcaatgattctccttttgaccaatcatgacgagcagataggtccaagctaggacttcactgcaacattagaagcagcttcagctgttttgtcaccaccagcgttaccagcttctagctgagtctgcttagccaaagctcttcttgcttccctgcggtgctctctcttggcagctcgagcctcctcaaaaccctgttcgatcttagtctcttcctcaggagagaagaagcctacctccatttgagctagctgtgaatacatcttctcaatctttgccttccaggctacccccatctcagtatccattttgttgtaaggtgtcttcaggaggtattcgtctatcccaccagctttgtcaatgcaccgaagagcatgggtggttaccttgaccctaatgtgccggtcgtgaatatagctaaaaagacgcttctcctgaacatttggcttccatgttcgccttgacttgttgccaccgtcctcggagaccttgttgccgaactggatgtggcgtccggcgtagatgccgcgcttggccctccccatgacgaccttgctgtcaggcagcaagttcttcaccgacgccatcagctccgccggcagcttcccctcgccgcccacgcgccgcaccaccttcttgtacatctcccgcgcacggaacgacatcttcctctccccgcttactctccggtagtgccggtgaagggcggggacggtggtgccggcatcggggacgcgggggcgcggtggggcgaggaggccgtggcggcgaggaaggcacgagggagcggctgggggaaggcggcgtctgtcggcgcgggcagggatgtcgcgtgccggggggagggacggccgtagctgccggccgcatcgacagtggggacgacatgtcggggacgcggggacgcggtggggcgaggaggccgcggcagcgaggaaggcacaagggagcggctgggggagttggcggcggccggcgcaggcgtggggcgcggccataactgccggcccctgtggcggtggggacgacatgtcggggaagcggagatagcggccagcggcgacggcaacacc

SEQ ID NO: 80109 - DNA, 977 bp, Oryza sativa
  Clone ID: PAT_MRT4530_79766C.1
atggccaccgccgaggtcgcctcgccggaaacggccgtgcggcatggatctgggcgggaggagcaacccccaccgtcgacgtcctggtgccccactccttctagcgccgtcgggggagaaaagggccccgccgccgccatccttgcagccaggcagcttgccggcgggctgctcaggctgcggcgaggtggaggagaggggggagggagggagggcggcggtggcgcgtggaggtccaagagcatcggcggcgccggcggcggcgtcggcgcggacatctgcgcgatggtcgcggagcacgagaagatcgagtgggaggtgcggccgggcgggatgctggtgcagaagcggcgggcgccggaggagcaggacgacggcagcagcagcatgtccgcccactccggcgcggacgccatcgtcgtcagggtctccaccgggtggcaatggcacgacgtctccatcgactccaccgccaccttcggtgatctgaaggtgatgctgtcgctggtgaccgggctgtggccgagggaccagaggctgctgtacaaggggaaggagagagacgacggcgatcacctgcacatggtcggagtccaggacaaggacaaggtgctgctgctggaagacccggccgtcaaggagaggaagctccggtcgaccaccctggcgcagctcatgggagtgccctgccattccttcatcgaagtctagaaattaaattaaacccgccattttgacttgttcttttttggtctgcttgcaagagtgacaccacgcaaagatccttttttgtttccagctcaatcgtctaactgcattgttcggagtcactgttccatttctcgagttcgagggtagtctggattcagccgattgaatcgaatcgtctgcaccaatagtccaatacgacacaaagacataatgtaaattaatgtaattagataatgtcagtgtgtgttgtgtattatttcagctgt

SEQ ID NO: 80110 - DNA, 238 bp, Oryza sativa
  unsure (1)..(238): unsure at all n locations
  Clone ID: PAT_MRT4530_79767C.1
ngngcgacgggaaccggaaagaancccacctttntcgcgtcctatgaacagccaaaaaaaggaaagaaaggtaaagggcagctcaccggatatcggcaaggcgatcacccgttcgaggcggcgcctgtgccgccgcagcgacggcggtcggcggaccccggcggcgccctccgcggtgtactccctcctccttcgacgtgggagaacaacgactttttccgagggcgggctggcactt

SEQ ID NO: 80111 - DNA, 474 bp, Oryza sativa
  Clone ID: PAT_MRT4530_79768C.1
cgagaaggggaatagtacatttaattgtgtcaaatattcaacgttaacaagatgttgtttgtgcactagccttcaaaaagtgaaggaatgcctattcatcacaatgaactgatatggacagctttacaacttacagctagtatgatttgttgaaggtaaaaacaaatcattcgacatgcatctcgtatctaaacatagactgcacaatgccattctgaactctgccagccatgtcgcctcccaaatcggtggatctccaagcggtaaaccgcataagtttcctccaaagttcgaatggttcatgcactttgttcatctgtttctctgttcctgttctttgatatcctcgaacagaacatgaacatcagcaggactgttgatagcatgaatagtctaaagcaggttcttagctcctgcatccaaggccaaggccttcaagtttcctttatcgggactgtctctcgtgccgactta

SEQ ID NO: 80112 - DNA, 697 bp, Oryza sativa
  unsure (1)..(697): unsure at all n locations
  Clone ID: PAT_MRT4530_79769C.1
ccttttatatgtacttatctgattttttttatgatgtttgatgtccgtgtggttgctggggatgtctgagttgtgtttcagagataggcactgagggttattttactagttttggaaggacaaaaggctttagtttattgctagagctctagctagcccctaattagcatgtttttcatccttgtctatggttagttttcagaactcgaactcaatgcctgagaattgaactttcagaacatttgtcatagatgatttggagttcattttttaactaggtagaaaagtgctacctgtattatgacaggatccattagcatatagggtccattagccttacatcccacttagcggcgagcccggcggagtcacggcgggcggcgcgncctcccagctcgtggcggccgggcgaacgaatggcagcgaagcgcgcgggatggatggattggggcgccgtctcccgccgtggtggatggattnggggattttcttgacctgcaagcgggcccaatcaagacagtcgttggatggggattggatggctgagatccaccgaatgtcacattgtgacatgcttacacaatgtcaccgaatctgagtccgtcatactagggtcagattctgccgaaattcagatgtaacacaactgtactggtttcggccaaacacaacgcagccatagacgaatctcaccccc

SEQ ID NO: 80113 - DNA, 840 bp, Oryza sativa
  Clone ID: PAT_MRT4530_7976C.1
tttaaaagggtttattgcgtcagccgaggggagggggcgcgcggaccgggtccacgggagtggggcccacgcggcagcctcacggtccacgctggaccgggtgcacccgggctcacaccggccggcgccgtgggtccaacgcgtcagccgcacctaagggcgcgggcggctgacggccgggccccacgcggcagccactcggcgcgcccgagggcggccaagccggtgcggccggcgggaggcggcgcccgcgcccctatggtcgccagcggcggccataggcacggcggagcggcggccgagagaggggaagggaaggaggaaaagaagcggcggtccacggctcaccctaggtcgacggcgacgacgaaaaaggcggccggagcggaggaaggcggcggcgcggctcgagtcgacggggtcgacggcgttccggcggtcggcgaccgaaacggaggggtggacgaggtcggcgaggatgcggcaaagccgaaggaggcggcgccgaggtgggaggtgatccgggacgacgacggcggcggaccggagctcgatggcgacggcggagggagagagcgacggcgcgaccttgattccggcgaggaggaagggcggcgagaggcggaaacggaaggaggagggcgcgggcgagccggtgggagcggcgggaggaaggggatgacgggtgggccccacccgtcagcgagggtggcgggcgggcccgcccgtcagtggcgcgcgcgcggggagagtccagatggtccacggggagaggagagggagggggagggagatgggccgagccggcccaagagggagagggagggaaaggggactttt

SEQ ID NO: 80114 - DNA, 653 bp, Oryza sativa
  Clone ID: PAT_MRT4530_79770C.1
ttcttccccatccgtggtggccgccgaagtccaccgctgcccccgacgaagtcgaggtcttccccaaccgcggcctgcccccgccagcgcttgaatacactcaaccgatccaacatcctccacttgcgccggcgagagccttcctccactccagcgcctcaccgtacactccaccgcagctcggtcatccttagtcgcacaccgatacacgaaggcgaggtcggagcccctggtgccgccacgagcgagaggcaattcgccgttgcggccgcgctcgtcgtgcaaataccggaacgcaagtggtccctttcctgccgccgcaagcgagcagttgcgtcgctacatgcacccccaaggtcttcctccaccgatctgtcctgaacatgcaaatgctgatgtgatgttttggttgctcagatccatcagtgggatttcatcaacgacaaacattgatagtggttctgacaaatattcatgtatagtggttcgatctacatcaggtactcggcccggtaatgcaggaagctttacgtcaccattgcttgcagtgacaagtaaataatacacatcatgttcgcttcttttgcaaagctgttatgccgctgccagttaattgctaattgtatatctctgaaattaatttatacagatcg

SEQ ID NO: 80115 - DNA, 276 bp, Oryza sativa
  Clone ID: PAT_MRT4530_79771C.1
atgcagaacatatgcgccaagcagaacctgaacccggacaggacagatcggtggaggaagaccttgggggtgcatgtagcgacgcaactgctcgcttgcggcggcaggaaagggaccacttgcgttccggccgcggttggggaagacctcgacttcgtcgggggcagcggtggacttcggcggccaccacggatggggaagaactcggctccagcggcaactggggacgacgtcggctccggggaagaccacggctccggcggtggctggggatga

SEQ ID NO: 80116 - DNA, 708 bp, Oryza sativa
  Clone ID: PAT_MRT4530_79772C.1
atgcccggagcgcgcggcctaataggcggccgaggacgccatggccgcctcgtcgcaagaaccgagcagctcatcgacacccaaaaccaaatagaggcgcgtcgtcatcgccagcgtcatgcgcgcgcgccagcagccagcatcacggagacttgcagcttcgccaagctgtgcatggagtcgcagtcatcgttgccactgacagcgagggcggcagcggacacgagcgtgctggcgagcgcggcagtgcttctcgtgaagcagaacctgcatggcgccaccgctgccgccggcggcggcgacctagatggcacgccgtacgacaacgcggacgacggcatggtcaggtatggcagggcggtggctgcacggcttgccggagctgctcgccgcgcgcaatggcgccgtcgaacgcctctgcaacgtcgccatggacatcaccaggctgcgccgacgccaacgttcttcctcttcctcgtcggcctcgagctcgacctggagccggcctcgcttcgccgcaccggccgcaccgccctcgcgaacgtggcgctggcgttggtcgcagcagcgttgttggcggcgacggcacacgccttgccgctggcgatggcgagggaggtggtggcgcgagaagcagtgcctcggccgccggtgccgagtaagccgtgcgcgctctgggcgtcgccgccctcgccgagcaagccgtga

SEQ ID NO: 80117 - DNA, 472 bp, Oryza sativa
  Clone ID: PAT_MRT4530_79773C.1
tcgtacactccaccgcagctcggtcatccttagtcgcacaccgatacacgaaggcgaggtcggagcccctggtgccgccacgagcgagaggcaattcgccgttgcggccgcgctcgtcgtgcaaataccggaacgcaagtggtccctttcctgccgccgcaagcgagcagttgcgtcgctacatgcacccccaaggtcttcctccaccgatctgtcctgtaagtacaacgattggctacaactcttgttcatcgcaatcccttttcttgttccttctagctttacaaattttgagtgagattgaaggcgacctgtccgggttcaggttctgcttggcgcatatgttctgcatgaatacaatacgcagaacaaactcatgattggttcctcggccttgctaggaacatgcaaatgctgatgtgatgttttggttgctcagatccatcagtgggatttcatcaacgacaaaaca

SEQ ID NO: 80118 - DNA, 234 bp, Oryza sativa
  Clone ID: PAT_MRT4530_79774C.1
atggagtcttggagaggagtcgatgaggcagcggcggcggcgggcggctccaaggtcgacgatgagtgcgagacggcgcggcgagtgcgagaagacagagcgttatggtgggtgtctcacgggagtaaatgcgcgtccttggtggtgcttggtcccagcattttccgccccaaatctcgtccttgctgccccgacttaagtggtggagattccgtcaccggcggtcgtagatga

SEQ ID NO: 80119 - DNA, 237 bp, Oryza sativa
  Clone ID: PAT_MRT4530_79775C.1
atgctcctgggtaaaaacatcccgtgccacctggtccaaacgtcgagataccaccgcaatagtatcccgcaatcccggtttgtggaggatagcccagacccgacaattgctcaaaggctagaagcaccgacttcatattctgagctttctcaagagcagaccaagatggggcatactgtggcggtgacgcttgaggcagtggaacagcacagcatcgatggaggaggcagcgcgtaa

SEQ ID NO: 80120 - DNA, 270 bp, Oryza sativa
  Clone ID: PAT_MRT4530_79776C.1
atggtggccacgctcctccgccgtgcgctccacctccaccgcgtgctcccctgtcccctccccttcctgcgccgggccgccgcgctctcgccatccacccagccaccgccgccgccgccgacgagctcgcctgctccgccctccgctgctggcccgcttggcctaccaaatacacgcccaggcatgccgacgcggcctgcctgcaacctgttcgacgaaatggcgcacaaggatgccgcctcctacacagccatgagtaatagaggctga

SEQ ID NO: 80121 - DNA, 240 bp, Oryza sativa
  Clone ID: PAT_MRT4530_79777C.1
atggcatcgggctacagatttgtagccagctgcagcacggactccaagacgcagggtgtgtatgacaggccgagaggtagcggttgtggcggcctcgacggtgagattagcggcaaaaggcagcacggtgcaacggggttagcagtgacacagtgcagccggattagcggcgggaagcagcgcagtgcgtcttgcacgctaggcatctacatggattctccaagctcgtccctgtcttga

SEQ ID NO: 80122 - DNA, 117 bp, Oryza sativa
  Clone ID: PAT_MRT4530_79778C.1
atgaagccgctggtgaaggagctcgctggttccgccgccgcggatggcagatgcggggcgagcaagcgagcgcacaggcgggggcatggatgcggggtgagcatgcgcgcggctcag

SEQ ID NO: 80123 - DNA, 240 bp, Oryza sativa
  Clone ID: PAT_MRT4530_79779C.1
atgggttgggtaaccctagaaaaggatcttggactctatggaaagctagtttcgtgggctatcaaacccaacataaaacatggtccaaaaccttcaagagatgttgaaaaacttgcaaagaaacccggtagcttttcaacggcgtggaaggaacacaaggcacgtttcttcgagaacgaggttaggaagttcaggactctgtcgcaagaagatggtaaaggaatatcgccggggttttga

SEQ ID NO: 80124 - DNA, 356 bp, Oryza sativa
  Clone ID: PAT_MRT4530_7977C.1
ccaagcagccgacacgcgtgcgaaaataagaacaaaattgagcgtgaactgctcgttctaatgaatataacttgcttaaaggaatgctggtattcggctagacaccatcatacacaatgatgctttaccgagatcaggatcgagacagtttaatataggctaggtctactcctcggcgaactttaatagcattccaaaggtgtgtgttcatgaataaactgtgtgcaactgtgcatgcactatcatctgattaaaacctgtatggtgaaaggtgaatgaacgcaggctcatctttttaacatgattgcacaagataacatgatgcaccgggctctcttctgaagaagtacttcctt

SEQ ID NO: 80125 - DNA, 296 bp, Oryza sativa
  Clone ID: PAT_MRT4530_79780C.1
attattatatttttttttttttttgtttttttttatttttaattatttttccaagaacaaaaaggacgggatcgtcgacaccgacgacctttgtctaaaaccctaagggaacccccaaggtgtcggcgccaacaaaaacaacttttggcaggatggaaacgaggagtgcttactgaacaacggggaggcttgcgccatcggggcaaggacagaattgagagggcaattccgcttcatctactgcgtggaggacctgttggtgaaccacaagcaacgggagggggaatcctggtggg

SEQ ID NO: 80126 - DNA, 3149 bp, Oryza sativa
  Clone ID: PAT_MRT4530_79781C.1
atgcggcggcgctccggcgaggtacagtacggaagcacggcgtgtgttctttgctaccagcgggggttcaaagttttaaactccgaacctcctgggacactactagccgttggatcagtgaagatcattccattgctcgtgtctgaaaactggattattatggtgtcctgctatggcctgttcgacctcgcctatgtttcttgcacttccatggagctcgagctctttcagctgctgaaggtgctgtactccagacagagagtcaatggcggcgatagacaatatcactctctcaagccttggagctgctccgtaatcaaagataatgtcaaggaggttattgtcctggacaacaagagctacgaggttccgaaacgctccactcctgaacgatagactgctacccatggttgaattgcactggagcttgaggcaccgcaggctgccaagctgtcccaggataccgagaacatgttccgtgagtgaagtctcatgcagagttatcttggaaagttggtggaggtcaccaatccaaccaagcaatgcacttctgatgccactgatgtttagcttctgaacaaactttggaggtgagaagggaaatgacgcgggtaccatgtcatcccttttgcgagcatcgtctttggctaacttcagtcgttccatccggattgacaaagagtgcaggcttctatccaacatatcgatttgtcggaacaagtaatccagattacaagctgcattaccttgcaagagtactcccaattttctgagtcgtcgtaactgacaaatgcccattagcccagtgaggccactggaaacctcagcatagcatagtatctccaactttcccatcctcacaattttttgaggcatgagcacagtggaaaacgagcaagattccttttccatgagattatttttcttgctaggacaattggtgcaaccagcaagtaggtgcttcagcccaggaaggataaaatgctttcctgggaatgcctttatctgggtttgccggatgtcaagtgtctccaggtactgtagcttgtcgatcttcttgggcaagtgggaaacatctgtattcctgaggctcaaatacttgagttgaaatatcttgcaaacgctgttcaggtgatacttctccaatcctttgcagccttctagatcaagtacattgaggcgtaatcctagttgagcagattcctgaattgatctaagtaacatggatatgccagccaagggatccactgacttcgttgtgaagcaacaccttgtcatgctccaacaatcgtcgaaatgagaagcacgaagtttgatccgcgagacctgctgcagtctttctccattgtggatgggaagacggtgagccaagtcgactggtagctttgtgtacacaaagttgtcatctctgatgacccaggcaatgaagtcacggactagattgtgcactctgcagctgtttaccttgcctgaatttccaacatcaccaggaagaacaaatctttgagcgagaagagcatcaaaacatcggttggcaacatcaaatgcactcagtccatctctttcagctattaggccttccgcgatccattttctgagcaggctcgttctcctgatattgtggtcattggggaaaatggtaagatacagcaagcagctcctgtaatcacaaggcaaggcgttgtagcagaatgtgagcattttctcggcattggacagccatgaagacagatgcagagggctgcagaagcacaggctgttgctgaagtcatgcagttcctgtagggtcttgttaggattcgcataaaggaatcggagaagcatcttcatgctaaagatacagggggaacattttactaaaatgctgcgaagaacctcctccttgagactagctttgccatgaccattgtcacttataaagttagctgctctcacgaggaagaaatcaactaaggagcggttatgctcctcctggatataccttagatcatatattctgtaaggacaaaatgactgtgccacttcaggcaagcttgtggtgacaagtatagcactgggagcagaattaccgcagtggagagaagcttcgatatctttccagagcgactcggagcagacatcatcaagaacaataaggaaccttttaccttccagctgctcctgaatcatcagtgcgatttggctgtttccccatgttcccatgtcctgcagattgttagcatgaagccctacaatctgcgcgagtatgtcccggagtacttgctgtggagattggttggagccaaccgagatccatgccttgtggtctgccaaccttgaggaataacctttgtacacttgctcagcaagagtggttttgcccatgccacgggagccgacaatggggatgattctgagatctgatctgccatctccttccactgtcagccagctggtgagctcatcagcagcctccttgaacaggccagagtcgtcttcggccaagatacgcctccgaagatgctcctgctgatcggcttcactgtcaccggtaaggaaagcttgctggctatgatcgctggccatgccagactgcggctcctgctcggtagccgtgccatggagaggatacctctgctgcctctggctaacctccactacccggatcttgatgtcctggatttggatagccaaccggtagcgcgccggcaacgtgctgacgaaccgggggagacggcgcacggagccccagaggccacccggcgagcggtggctggtggtgccgaggcaccgcaagtactggtcgacgcagtactgggaatggttggcgaggtccttgacctggttcatccacgcctggagctggtggtccatgcggcccctgcgggcatgattgaggaggaagccgttcatgctctccatctcgtcccggatgaactgcacctcgcgcctcagcccgcctagcagctgcacttggtcggagaggacgtcggtcagccggccgacgagcgacttcacggcggagtgggtggagctcaggccaaacccgtccatatccgggatctccctcactcagctcgctcatcagacacacaccatggccactactggcagctaagtgggaaggatgaactcaacctgaacaggtgcaagtgcaacccacgcgtccg

SEQ ID NO: 80127 - DNA, 4116 bp, Oryza sativa
  Clone ID: PAT_MRT4530_79782C.1
atggggttggttgccactgcaattgaggctgcaataggatgggtggttgagagcatcctcggaaatttcttcactggacagatgcaagtgtggactcgtgaagttggcctttctgaagaagtggaggagcttgagactgagatgaggagcatgcagatggtgcttgcagctgccgagagtagcaagattgacaacaggccactgtccgagtcacttgatgagctaaaagagctgctttatgatgctgaggacgtgatggacgagcttgattactaccggctccagcaacacatcgaaggtgggaaaggttctactgctgcttcttgtactaaccctgagggaagttatgtgtcttcatccactccatcttacttccaacgaaaaaggaaaagagaggaagaagaggagcaaactcatagcaccatgctgcctcttgagattaaacatgatatttctaagaggatcaatgaaatagtgaattgtttacgcactaggtgcaagcctgtgcaaggagttcttcagctggagattttacgccaaattgcaatgccaaagcacagtcagagtgagcccagaaagcctcgtcagacgacttctcttgcaattgaacacaaggtttatgggcgggacacagagagggacaacataatagagttgttaacaaaggaaattagaggcaaaaggtttctgctcatattggacgatatgtgggaagatgggaacaggagcggatgggacaagctgttagctccattgaaatgtaatgaagtaagcggctgcatggttttagcaacaactcgaagggcatcagttgcaagaattataggaacaatgagtaaggttgaagtgaatggtttggatgaaacagtgttttggttgctcttcaaggaatgggcatttcttggtaatgagaagctggagtgcaatccaactttgcaatccattgggaaacacattgctaaagcattaaagggcaacccactggctgcccgtagtgttggtgcacttttgaataggagtgttagctttgaccactggaggaaagttcagcacaaatggaaatttcttctaaaacaggatgatgatattttagccatcttgaagttcagttatgaatttctaccggtccacctgcagcactgtttctcttactgctctctgttcccaaaggatcataaatttaatgggaaaaaattagttcgtgcttggatatcgcaaaattttgtgaagtgcgaatgccgtgctgagagacttgaggaaacagggaagcaatatttggataatttagttgattggggcttctttgaagaggttgagtcacactatgttatgcatgacctaatgcatgacttggcagaagaagtttcatcagatgagtgtgatactgtagatggattggaatccaagaaaatttcaccaggtcttcagcatttatcaataataactactgcttatgatagagaagaaccttgcaattttcctagggagaagtttgagaacatactacagagtatcgggtctttgccaaagttgagaacattaatgttcttcggtgaaaatagtataatgttattaaggtccttaaatactatatgcaaggagtcaaaaaggttacggttactaaagatttatgtgacagctgctgacatcagctctacacacaatttgttcaagccaaatcatcttcgctatcttgaatttattgttgttcccaccaataatatgtttggaagtcgaggcattgtaaatacctctattcctcaagctttgacaaaattttatcacctccaagtgttggatgttagcagtaaaggaaatcttgcagttcctactggtctaaacaatctcattaatttacggcatcttatcgctcatgagaaagtgcactcaacaattgctggccttggtaacttgacctctcttcaggaactaatcttcaaggttcaagatgctgacaattttaatataggacaacttcgagccttgaatgagcttgtaatacttggaatttctcaactcgaaaatgtgaaaactaaacaagaggccagcagtgcaagaatgatagacaaagagcatcttgaagagttgtcgttgttgtggaacgataacagcatgaaccctgaacctactgcagaaaaaacaagagatgatgtgattgagggtctcgagccgcttcaaaacctcaagcatctacaattgattcggtacagtggtgctacatccccaacttggcttgctagcagggttacctcactgcaagtacttcatctagagaactgcagacaatggcaaattgttcaatctcttgaaatgcttccactgcttagaaagctaaaattgattaggatgtggaacttgatggaagtctcaattccttcttgtttggaagagttggatttagttaatgtgccaaaattggaaaaatgtgttggcacttacgggctagatttgacttctggtctgagggtattgatagtgaaggattgccctatactaaacgagttcacgtttttccacaaggactattttcatgccgagcagaagtcatggtttccatctctcaacaaactcatcgtcggtcgttgtcatcgtataattacaattgcagaagtttcctacacttactttgttaaattatgttacagagcatggaagatccttccactggaagaaatgcaagcactcaagaagctggagttgatggatgtgcctgttgttgaagaattgtcagttccttctctggagaagttggtgttgattcaaatcccaaggctgcaaagttgcagagggataacaactgctccatctccacatttttcgacttcccaaggagatcaaagggaattggtatgtggtctccgggaactcactatcaatgattgccccagtttgttagtgcagtttcctatcccgccttcttctctgatttcgttcttatccatcaagggcctttcatcatttccaacaatggtgataaatcggagagtgctcacaatcgaatctaatgagttgagtgagctcgatggcaggatctcaccattccataatctgaagggcataacatgggtaaacctacggcgttgtccaaacttgacccgcatttcgatagacggtttcagccaaccacatgtcatgtcaaagcctgttcatgataacagtatacctattacgagttaccctgtcctcccatctgtcaattctctcagcattcagtcgtgtggcatagctggtggatggctaactctaatgcttcctcatttgcagtctcttgagaacttggagttacgagactgcccacagataaaacttttatcaacaagtcaatgtacaaaaatagaagcaccgaacagtttggcttcagcagagacaacctctgccagggacaaataccttttgcaaattccatataatctcctccgttctctaaagtggttaattatttgggcatgccgagacctggaattttctggagtcaatgaaggatttggaggattcacctctcttgtggagctacaaattagggattgccccaggctggtcccatcattgtgtccattctcgctttctggcctcccttctattacgaaattagacttgtggaatagtccagatttgaagtctctacagttaggatactgcacagcgctggtagatttggcaattgacagctgcaagtcgcttgcatcaatcgagggtttccagtccattagaaaccttaggtccttgagagtaggtgactcccccagcgtatacccatgtctgcagcttatgtcgcagcagcaaggggcatctgacatcttttctcaactggaaactctaacggttgatgatgcctctgtcctttccgtgcccctttgcaaacatctcacgtctctacgagtcttaggattacaccgggatggatatagtggcaagtctatggcctccagagcaaatttcttgactggacagatgcaagtgtggactcgtgaagttggcctttctgaagaagtggagcttgagactgagatgaggagcatgtatgacgccgaggatgtcatggacgagcttgactactaccggctccagcaacacatcgaaggtggtgccgaatctcatcaaccttccattccatga

SEQ ID NO: 80128 - DNA, 1767 bp, Oryza sativa
  Clone ID: PAT_MRT4530_79783C.1
atggacctcgacaagtccacttcaaccagtgcgtcgctgaagaagttgcaggaggagggcgccctccccggttgcgggaccatgaagagggaaccgggaggtactgaacctgaacctatcctaggccgcatggttgcggtagaggattatattctttgtggctttctccctccgccttctgagtttctcctcctcgttttgaatttctatggtctttctttgctccatctgaaccccaactccatcgccttcctcagtatcttttcacatctctgtgaggcctacattggggtagagccgtttctcgatctctttcatttttactacgagttgcattggatggaatccaccagggtatctggatgtgttgggttccgacttcgggatggcctgaagtcgcgctatatccccttccagtgcccctcttctcatagcaagtggcgagcaagatggttctatcttcagatagagaattcggatccgatctttgctgttcctgaggaacagccagataagtctacaggtttgaacagcgagactgtgggacatcgtgtcggtcagctgatgatcagcggcccgtcaacagcgagtgacgtccctgtccccctttgcgagaaggggaaggctgagtgtgaagccgcaatcaacgctctccctctgaccgacgtcattggaccactcgtggaccaccaggcggcggattcgttgaaggagggcgtcgcccaggagacgtccgacacggccgtggctactgttgccacgactagtgggagccacgtcccgaagaaggggagaaaattcacctccgtgctctgcagccgccggaaagcgccctccccatcgctgttgccgcctgtctcagttgcagcttttcgcagggcggcgcggacgaaggcggcacaagacgggcctagtgggacctccagcgcgtctcctgttgtggcctcgacggatgtcgtggtcatgcccaggagccgcgaggcgacacctagcggcccagccagcgatctcgtggctagtcgtggcccgccggctgccgtcctcacctgggaggagctccaggttgagatggggtgcctcctcgaggctggtgctcgcggcattagccgcgaggttgcggaggcgagggcggcagcggcgtcgtcggcaaacaagcgtgctgacaagctggcggaggctcgtggcggaggctttttgaagagtaggatcttagttcccttagatctcgatgtcgaggatgtccagcagcgtgggcagcctgagttgccagtgatcatcccagcacttgcgtttgagccacatgtgtcgccggacaatgtagatcagaatttacccgtggaaacagggatggcgacgacttccctagatcttgagagtgcgcttgctgaccaggatcgtcatatccaatattggaagacgaaatttgaggtagcggaactcgagagaactatgctggaagtaaagaaggagcaggctgtggaaacactccgaggtcgtgaggtgtggttcaactcgtacttgaagagttgttgcacgtccatggccagagtttgtagagagctccgagtaccccgtggagatcccgaggagtcggcggccgggtacatctcgtggctgaacggggcctatacgcagctcgaaggcgtcgacaaagggttttctcgttctcggagaactccggtggagatagatcaccttgcgaagtcgatggcgccgctggccgagaaagtcttccagtctatggactggcgttggccttcttggtag

SEQ ID NO: 80129 - DNA, 684 bp, Oryza sativa
  Clone ID: PAT_MRT4530_79784C.1
gatcatactgtggttcttatttgagaatgttatggcattgcaccggttgaaagccaccctgatcggattttttgaggctggaagggcaaacgaatggattgtcacgcaaaagttgggaaacatccagaagctcaaatccattgtcagagttaccaagaattgccgtttcaaagacaggttccactgccttgagctattcattggtggatttcttcttacgtctgcatgctatgactacttgtacagagatgatattttttacatctttcttctgtcccaatcgatcatatattttgcaattggatttgaattcatgggcgtcagtgtctccagttagatcaaggcagggcaattgcaagatctgctccagaagcaggatccatgttaaagcagtcaatggggaactcttgtgccttgcatgtgacaggaaagctcaacgctgcggcaattgagggcttcaacaaattgcgataagcatatgggagataagaacacattgagcaagaagaaaatcatctagtattgtcaacgtatttaataggcaagtgctatctttagtgaagagtagcttcgcatcttatgtaacttagcatgttaatagtgacaattatcatttcagagctaccgatattgtagcccgacatttaacacctatgaacttcaatggaatacatttacgataac

SEQ ID NO: 80130 - DNA, 1422 bp, Oryza sativa
  Clone ID: PAT_MRT4530_79785C.1
atggacctcgacaagtccacttcaaccagtgcgtccttgaagaagttggcaagaggagggcgccctccccagtcgcgggaccatggagagggaaccaggaggtttgaaccgcgagactgtggaacgtcgcgtcggccagttgatgatcagtggcccgacaacagcgagcgacgtccctatccccctttgcgagaaggggaagctgagcgtgaagccgcaatcaactcggaagacgtccccctcacgtcgtactggtcttacttaggccttggacgcgtctccgccacctccacgatggcagaagctggtgacgctgggcgagaactccaagtcgagatggggcgcatcctcgaggctggcgctcacggcataagccgcgagattgcggaagcgaggacgtcggcggcgtcatcggcaaacgagcgtgccgacaagctggcgcgtgacctggcggaggtttgtgaggacctccagaagatgagggaactggtggccggcaacgagcgacaacggcggggactcgaggaccgcatgtcggaacttgagaacaacccgtcgaggatccgcggctcgttgcgggtcacctacaccggcctacaccagctcgccagggaatgtggtgttacgaccaccatcccggtgaaccccgacgagttctcgctgacgacttcactcgcgaaattggccaaggcgatggaggcgataccctccaagcatgcagccaggatcggggaggaggcgtccaacgggatctataccgaggcgtgtcacgtccttgcgtgtgtgagagatgttgatgtcgaggatgtccagcagcgtgggcagcctgagtcgccagtgatcgtcctggcacttgcgtttgagccacatgtgtcgccggacgatgtaggtcagattttacccgtggaaacggggatggcgacgacatccttagatctcgagagtgcgcttgctgaccaagatcgtcgtatccaatattggaagacgaaatttgatgtagcggaactcgagagaactatgctggaagtaaagaaggagcaggccgtggaaacactccgaggtcgtgaggtgtggttcaactcgtacttaaagagttgctgcacgtccatggccagagtttgtagagagctccgagtaccccgtggagatcctaaggagtcggcggctagatacatctcgtggctgaatggggcctgtactcagctcgaaggcgtcggcaaacgtattgacgaagccctgaagcaggagtgccatcgatcgagccgatatgccagagggcacgtgttggcttgcatacgagatcatcgtccgcaactgcacctcgagttcctccatgaagggttttctcgttctcggagaactctggcggagatagattacctggcgaagtcgatggcgccgctggctgagaaagtcttctag

SEQ ID NO: 80131 - DNA, 204 bp, Oryza sativa
  Clone ID: PAT_MRT4530_79786C.1
atgaacaaagagtacgcagccaaggagataagagaggacgccggcaagcttgtgatggagatgattggattgtggacgtcggcaagctttttcagctggcggattcagcagctgcccgggttggattggaggacgtcgccgtcaaacggcacacgacatggtcgccttccgtgggacctcgtgccggcaacgggtccactttga

SEQ ID NO: 80132 - DNA, 657 bp, Oryza sativa
  Clone ID: PAT_MRT4530_79787C.1
ttattcccatattgaacagatctcgagagtgctcttgctggccaagatcgtcgtatccaatattggaagacgaaatttgaagtagcggaactcgagagaactatgctggaagtaaagaaagagcaagctgtggaaacgctctgaggtcgtgaggtgtggttcaactcgtacttgaagagttgctgcacgtccatggccaaggtttgtagagagctccgagtaccccgtggggatcccgaagagtcggcggccggatacatctcgtggctgaatggggcgtgtactcagctcgaaggcgtcggcaaacgcattgacgaacccttgaagcaggaatgtcgtcgatcgagccgatatgccggagggcacgtgttggcttgctccgacggagatagaccacctagcgaagtcgatggcgccgttggcggagaaggtcttccagtctatgaactggcgttggccttcttggtagtctttgtaccactctccccagcccccagccttgtcgtcggaggattcttctcggagggtaaggctcttggacctttgacctgccttggttgaataagcactgatcaaggccttatcggctctgggcgtccccagccgaagatcccttaggttcctcgaaggccttgttaagacggcgtaaagggacat

SEQ ID NO: 80133 - DNA, 287 bp, Oryza sativa
  Clone ID: PAT_MRT4530_79788C.1
gataaacagcctcatttggttctgtatttgctgttaaaaaaatgcataaacattggtgagcacaagagtacgaatttggttcctgtgcagtccagtatgactgcaacttagacagtcatgctacggctgtgggatgcaaatccaaagcccaaatttaatggacactgttcattcaaacaatctagcacaaaattattataacaaggttattgtagcatttaatctagatcttccactgaaaaattgaatggacaagatcttgggcagtccctaacgtgcagttgtag

SEQ ID NO: 80134 - DNA, 924 bp, Oryza sativa
  Clone ID: PAT_MRT4530_79789C.1
atgaatgggcgatccggatctgtggtgctgtgcagcttcgccgcccaactcttcctcgcgctcctcgccggggtccgtcggcgcaaggccaccggcgtgcgggtgctccttctatgggcggcgtaccagctgggcggcttcgccgggacgtacgctctcgggagcatgtccctcagccgcacgacgccgcagcagcagcagcagctggcgctctgggcgccgttcctgctcctgcacctcgctggccccgacaacatcaccgcctactccctcgacgacaccgccctcgccgggaggcaggtgctcaccgtcgcggtgcagatcgccggagcagcctatgtcctgtacaggcagatatacagcagcagcagcagcactgccggtggtggcgatggcggcagcggcttgatgtgggtctccgtcgtcatgttcgtcatcggcgttgctaagtacgtggagagggccgtggcgatgaggcaggctgacctgggaagcatgaggagctcaagcaagaagagcaagctagaaagaaggagatccttcagcgatgtcagggagctgggtaacgagcttgccttgctggttgcccacgacctgctctacatcaccaagggcgcctttgtcgatcatttggacgacgagcatcctcttgatcgtgatgccgtcagatcagagatatttcgccatggatggaaggagatgtgcgaggtggtcgagatggagctcttgttagctgctaatcacccgatcgaacactttgtgcgcacactgcacacgtccggcacggcaacagacaaaaaaagactggagaacacaggaagaaattcagaacagagaagcagagtatttcagagtttcagagaatcacgagagagaaggaatttgtgggacaattttctgggttctttcattcaactgaattga

SEQ ID NO: 80135 - DNA, 2409 bp, Oryza sativa
  Clone ID: PAT_MRT4530_7978C.1
atggataacactggtaacaaaggctatgggaatgatggatccgatgactcaaaaacccaagccaatgggaatgagaaaagcatcaacgaaacctcaccagagctaatccaaattgtggttaaccaaaccaacatgttggcaacagcctttcaactattacagaatcggaacaacccagcaggggcaaccaatgttcaagtacctacagtccagcaacagtgcaagttatcagaatttctcaaaacggggcctccaacctttgccatggccgtcgatcctatggaagccagtgattggttgcgcacagtcgagaagaagctagggttgattcagtgcaccgaccaggagcgggttggcttcgcaactcatcagttggttggaccggcttcagagtggtgggatagctacgaagcatcacggccagaaggacataccatcacctggaacgagttttcatctgtattcaagagatcacatgttcccgcaggaatgatcacactaagaaaacgagagtttcgctacctgaagcaaggagatttgaccgtcgcagagtacctgcacgagttctatcgtttggctcactatgcaccagaagatgtggaaacggacgaagacaaacaagagaagtttctccaggggttaaaagatgagctcgcagtgcaactacttctagaggattatgaagactttgagaaacttgtggacaaagccatgcaactcgaaagtgagcataatcggatgacgaattgcaagagaaggatggttaacaacccagtatttccaggtggtaaccaaagacagcgcactgagccacttcagatcaccggatcttctgttgtgtatccagagttcctgcctcaagaagatggacgcaatgcagacaacaacactagcaatactaataatgatgataccaccaacaaccatggttcttgccccattagtgaccactcgaataaagcgtgcaatgtcggtagcattcgccaagatgtcaacgatagtatcaatgttggaacccagaatgacaaccttagcaatttttgacactgagaaagactccaatggtgatagcaacgatggtaccgctgatgccaatgttagcaagggtttccaaccaccaattccaactccaagtcacaatgatcatccccagatggacagctcagcaaagaagacgttgatttgttacaactgcaaagaaccaggtcatttctctagagattgtccacagccgaagcgtaacctgcgccatcactccggccattatgcaagaagaagacaggtcactcgccttgtggtcactggagcaaacgccgtacctgtttcactgaaaggcagcaagccaaaggacctcatcgtcaccagaagcatccacaactctcggagtgaagagtacttggttgacaaagttgactccaaagatatgaactatgcaaagttctggaactgaagccccatcttcaagtgccgcaacccagtcgaagtcagctaaaggttcaaccagggacaagtcagctgccccctctccctcggtcagccctccgtttcgcggggaaagcaccggagacgcgtcctcgccggcgtccagtggcgtcgccaccacttctccgcctccggccgcctctgccacgtccccggagcgccggccgacgccgccaccaccttcctcggctccacgacgccgctctcatccccggcatcacctcctcctcgcccgaacttcgccggaacaccgtcgcccgcgccggcttctccttcctcctcggcggcagcaccggtcggccacacctccaccacctccggcatcgcagcggcaaggtcgtcctcggcatcatttcccctccatccaaacccctccgcggtccatcatcgtcgtctccgatcgttctcgtcgtcgacgtcccgtcggtcgcccggctcgtcgtctcgcggcgccgcctccgtcatcgtcatcgtagcggcgtgttccacgtcatcctcgccgccgtgcagccgctgccggctgccctcgtagcctcctcgccggccccggtcgtcgtcgtcctcgtcctctcgtcgttctcggtcgtcgtggcgttcgtccctccgtcaagccgttctcgttcgtcgtcctcgcttcgtcaaggtcgctgcagcccccgtcatcgtcttcgtcctcgcctccgcgtcgtcaagcctcgcgccggccgcgtctcgccttcgtccaaggatcgccgccgaagccgtcccctcgccgttcgtctccgttgcgcccgtctgtctccgccgcgcccgttcgtcgttgtcgttcccacgcctcgtcgcgtggtggtaaggttccctctccctcgctgccctgtcctcgtcctttcggtgtcgcccgtgcccgttgtgcggttgtcggccccggtacccgtgtatcggcgtcgg

SEQ ID NO: 80136 - DNA, 299 bp, Oryza sativa
  Clone ID: PAT_MRT4530_79790C.1
gtatggcctagccactgcccgctcgcgcgccgacgattcttagcaagattgtgaggctttgttggtcgttcgtgcgtccaagggaaggagagccatgggggcaaccttctcctggtcggcgtcctcgtcgtggtcgctcgggtccctcgacgactacatcatcgtcgggtgcgttgtcacggcagcggacgccgtcgtcgagggggctagcgtcaagttactattcagctgcggggggaggatcctaccacgccacgccgacggtgcgctgcgctacgtgggtggtgacaaccgcgtca

SEQ ID NO: 80137 - DNA, 1542 bp, Oryza sativa
  Clone ID: PAT_MRT4530_79791C.1
atgggaggatcacgattcacgagctggagctggagctcgagcagtcaacagaagaagggaggaaaggaatcctccctcaccccacccgagcaggaggaggaactcgaaactgtaggagatgacaggatcagcgcgcttcctgacgatattctgctgcaaatccttgagagacttgacctgcctatggcaattcggaccagcacgctctccagaagatggctgcaactccctcgcttactctcccatctcatcatagatatcacccacttcatgcctgctcctcctcgccgcgctgtgaatttcaatgtagatcagatcatggctgcctacacggctgcagtcaacaacctgctcttgtcatccccctccagcagtaacagcaacacgagaagaattatcaagtggctcaccaatcttgccctgcgcaacctcgcgtttcaagaatcggacgtctcccatatcctaaacacatgccataacctgaagttccttgccttgtgttcttgtgtctcggactttgttgtcctcaagatcgatgccccacactcggagctcctcacgcttgaaattgtcacttgtgggtttgacagagctgatctgatccatttgccaaatcttaggcgggtagtctgctgggattggtgccttccaaaccccccaatccgttttggcaatgttactcgccttcacaacatgagcctctcttgctctgcgacgtatgaccagatgccgttcaggttgaccgagcttatatcaagcgccacaaacttaactatcttatacctggatttccaagatcagatgatttggattgagccacaaggtcctaaacttctctatcctgtattcagcaacgtcagagatgtctatctttgcaacattttctatgaatgtgacctgaactggactgtgtttgtccttgaagctgcagctcgtctcagcaacttttatctcaagttatgtcagcatccatgtgaaaggaacagatgcgaggacagcgctgagaaggtcaatttgttatgggatcagatgtcatctgatttcaaacatcgccacttgaatctattagagattacaggatttgcgatggatgataagatgataaattataccaggcttattatggagcgagctgtgaacttgaagagaatccgcttgctcgatcaagttccatgtgacaagggcaatgccatgaatgttccaaggaggactttcatttggaaccttagaattcctttgaaaattaagattttcctgtggtacttatggagagggattactctaaccaaagacaatcttgcaaaaaggaagtggaagggtagcattaaatattgcttttgtaattctaatgaaacaatacaacacctctttgtttattgtcatttggtgatcttcaaggggacttattgggcacaacagtggtctttgttgtttaaggaagaggatggccacaatttgaaagaatatcgcaagatgttggaggcaagggtcatggagttgtatgcaaaatatgggtggaaccttataagaagattggagtag

SEQ ID NO: 80138 - DNA, 1165 bp, Oryza sativa
  Clone ID: PAT_MRT4530_79792C.1
ctgcaggaattcggcacgagggccaccaaccatccatcgctgacgcttccaacccaactgaattcaaacgaagcgaacgacacgaaccatgcaggcgcaatcccgcctcgctgctgccgcgagcggcggcagcggcagtggaattagcgggagcggtggcattagcaggttgggtggtggagcgggggaggagcacgaggcggtggtgagggagctgacgcgcgggcacgagctgacggcgcggctgcgggcggaggcgctgcgggcgctgcgcgggcaggggcaggccgaggccaccgctacattcatcctcggggaggtctcccgcgccttcaccgtctgcctctccatcatggccagcgcctccccgtccgcctcgccgccacaaccggacgagacgccgccggccgactcagccgtctcgccaccaccaccgcgcgcggcgagagaggacaacgtcccgcgaaagagattattgacagcctctccttacgacgatgggtaccagtggaggaagtacggtcaaaagaagatcaacaacaccaacttcccaaggagctactacaggtgcagttaccaccgggagcgcagatgccccgcgcagaagcacgtgcagcagcgcgacggcgacgacgtcccggcgctgcacgtcgtcgtctacacccacgagcacacgtgcctgcagggggcgcccgccgagcttcccgacgcggcgacgaacggtggcgccgccgccgccgcgtcgccggactacttccccgccggcggcgagacgccgtcgtcgctgcggcggctccggggcgtcggcggcggcggcctgcagcctcagttcgtggaccaccgcgccgccatggaggagcgcgagcgccaggtgctcgtctcgtccctcgcccgcgtgctgcaggggcggcagtgctacgacgacgacgacgacgacgacaccgacgtcgcctccctcggcgccgtgcacgcgcgcgcgcctgcggcggcggcgccggtcgccgcgtcgtcgtcgtcgtccgggcccgtcgacgctgccggcgaggagctggacgtcatggactacgacatgacggacgcgctgttctgggggcctttcggcacggacagcaactcgtacgacggaaacctgacgtcgacacgctgttttgatctaattaattaa

SEQ ID NO: 80139 - DNA, 576 bp, Oryza sativa
  unsure (1)..(576): unsure at all n locations
  Clone ID: PAT_MRT4530_79793C.1
ttacagnagcctaccaannacgtttataatggcggggaggagtgcctcttaggtcggcttgcggataaagaataactaaataaataaattgcaagcaattgttttgctgctatgtactgtccagtctttcgactaatgatgataaagcctctctttaaaaaaaaaaaaaaaaaaaaaaaaaaaaaaaaaggaggggggggggggaaaaaaaaaaaaaaaccaaaactaaataacacaaacatgcaaaaaaaataactttttatatagtgtcaccaaaaaaaaaaaaaactgaaacaaaaaaaaacaaaaaaaaagacggggggcaaccccttggggggtaaccaactttaatcccccttgcggtgacataccttattttttttttttggggtacccccaaaaaaaaaccacgcgcgaccgcttttaccaccggttgcgcggaaaaaacggcggttgccccactcttatgtcgcggcgcataaatcccttttggtgaggtgggtacaatcagagagaccccctcacttgccccctccctaaaagttgggtctttttggtttgggacgggcccccccc

SEQ ID NO: 80140 - DNA, 673 bp, Oryza sativa
  unsure (1)..(673): unsure at all n locations
  Clone ID: PAT_MRT4530_79794C.1
ccggccgagatgtcatgctactcttcggggcctcaactctctctctctctctcgctccactcccctcgagccgccgccacagccccggccgccggccgccgccgtgacggctcggcggtggtagtgcggcaaccggcaggaccaatcctgagcggattccagcgctatgccatcggagtgcgcggcggaaactggtcaagtcaaccgcactggggtggcggcgatgcggtcgtgccttgggcaagggaactgccgtggccggcggggcgggggaactggacgagcattggcatccacccaggcaggcaggcaggggtgctgatgaaagcgcgtgttcctccgacggctttacagattagcccactaccaagtaaactccgcagattgctgatctgaacttttgcctctgacggtacatcagccaagcaagaaaggcgaaaaccaagccagccgcagcagacagagatactgaaggtaaagaagaggtacagcaggtcaacgcgtatacctttcatgaaagaaagccagagccggaaggtgacctcatatgcaagttacttcctanatgccagttttctctgtaacgaagctcgattttccacagagatcacggcgaagagatttttcgctggagcggatggagccatgcgaatggatggacaaggacttcgat

SEQ ID NO: 80141 - DNA, 369 bp, Oryza sativa
  unsure (1)..(369): unsure at all n locations
  Clone ID: PAT_MRT4530_79795C.1
atttttattttnaaaaanaanaacannnnaatgaaaaacttggggggagatcttctggaccacgaaccgctgtgaccgccattgcggagggtcacccctacaggggagatcaaggtggagagcattgggaaatagttcacgcgcatctcacctgaccaggggagcggcttgatatccctgaccatgaattgtgcaatgatctactatctttatataacaagaactatcaccccaatccanaactgactattctatgaagattgtcanaaaatctacacttcactaccatcaccgatctcactcatgaatcacttaccttacatgaaaatggccgcatccagcgccggccatgacccatgataacacatt

SEQ ID NO: 80142 - DNA, 778 bp, Oryza sativa
  Clone ID: PAT_MRT4530_79796C.1
gtgaatgttggttatgggtcgccgctggtgttcccaggtttgaccaaaccggggtcaagcaggtgtctatgcgttgttggaatggtcggcaatgcagggaatcaagttggtgacgatagtgatgatggaatcaaggttaccaatgagaagcttcgtgctgttatccgcaagagcaaagaggtgttggagatccatcggaatctacttgagaaggtgggcttggagatgttgctggagctttgccaaaggctttggctaggagaggtcaccgtgtcatggtagtagtgccaatgtataaaaactacgcagaacctcaacagctaggagagccaaggagataccaggttgcagggcaggatatggaggtaatttattatcatgcatacatagatggtgtggattttgttttcattgacaatcctatcttccaccacgttgagaatgacatttatggcggagaccgaacagacatcttaaaacggatggttttgttgtgcaaagcggctatagaggttccatggtatgttccttgtggtggctactgctacggtgatggaaatcttgtgttccttgcaaatgattggcatactgcactactgcctgtttatttgaaggcatactatcatgacaatggtttcatgatatatgcccgttctgttcttgtcctacacaatatagcacatcagggttcgtggcccattagatgacttcagttatctggatttgccagttgattacatggatcttttcaaacttatgacccatttgggggtgatca

SEQ ID NO: 80143 - DNA, 1511 bp, Oryza sativa
  Clone ID: PAT_MRT4530_79797C.1
ggccgcgggtttttttttttttttttttaaatccatatgctaaaatattacttcatttcattatttatgggcagaagcatacatgctttatcattcagttcttttctaagatatgaatgtccctttctgtttccatctatcctccctgtattctggtttacagtttattcagagacgcgaagtgatcgcagactcagaacggggaattctatcgcactgataattgacccatccgagcagcgatctctcgctgtcatatatgaccatctgatccagcattgtaattcctccaattaagtttgttccagctaacgacagatgctccttcgatccatcaaggatgcccaagcacacatggccctcttgagagataatgaggtagtgctcaggtgggatctccaaagtggccttcttatcgccatcggcgaattccagagacagtgatctgaagcacttcttgacttcatcgatagttacgattttatccttccctttccagcatacagtaagagcccgatctttttctgtcacctcggtaagaaacttacattcgctgttgagagtggatttcaccactgagagagtcgcttggtatggctgcgcagcaaagtaggtgtatgtggcaccactgtcaaatatcactgccattggtgccgcgcttatcgccttgctatttgaatcgaagtgcaaggttccatgcccaggagagtagtacttatgttctctgttcatgggggtccaggttacacctgaagttggcacctgggcatccccaaagaagaggaaacccccaccttttgagctgatgcaatggcccaagacatgtttggtgatcaccccctgggacttgagctgcgagagcagcgtaaccttgcctctactgagcccgaggatgctgtctaccggtatgggcacattgcgattcttcttcccctggtcgtacccacagccgaaggctatggtagtaggattggtgccgttgcttgctgagagggagaacctgtcgatgacgagcacgcccatggatgaactgtcgacgtactgaatcacatagtcacattgcttctgggatccacatctcttgggcttgcccagatcagtgtacaggtcagtgcagagtgagtcggcacaggtcaccagcttctttggggttggcttgtacagcacgtgtggtacaatgttgcaattcgtgcagggggcgtcgcactgcagccaggtgagggtgctgccggtgtcgatgtccaggaagtaggattttgccgggtcgccgatgttcatggtgatgaagaaatggccaatagggtagacgttaccgtggagctccaacaccacggcagaggatggcggcaccagttggagcaggagaagaaggctggcgagcagtgccaaccttgcagtcatggtgtgatggaggtggagctcttagacacaagtgctgtgacagcctgaagggctatacttctttctcttttgaaactctgttcattgggatggtttgagtcccggccggg

SEQ ID NO: 80144 - DNA, 3260 bp, Oryza sativa
  Clone ID: PAT_MRT4530_79798C.1
ccgcgggaggagggctcgccgattccactacttcactccagtaggtggccaacgcgcggggtgggagcagcagcgacgacctccaatggcggcggcggccgtctcctccctcctcgccccttcgggatcctgctactcccccggatgccacagctgctggggtcccgggcccggaggcgggcggcgcctaccttccccgcgccggcgcccgattaccgccgcggctcgccctacttgggcagtgccgaggaggagcaggttggagtgggggcgtgtggaggctcagaattcgggcgctcgcaccagctgccgagcagcactgcaatggctatcatccacggcaaggtcccatgtgaatgttggttatgggtcgccgctggtgttcccaggtttgaccaaaccggggtcaagcaggtgtctatgcgttgttggaatggtcggcaatgcagggaatcaagttggtgacgatagtgatgatggaatcaaggttaccaatgagaagcttcgtgctgttatccgcaagagcaaagaggtgttggagatccatcggaatctacttgagaagatatcggcatcagaaaggaagaagatcacttcaattatagaggacagttccatttataatgagcaagatccatttggtcaaagagatagttctttttatcatcttgatgaagttccagacgatgatgaatttagctatgacctacagatgtaccttgatagacatccagatcaatctgaagttgttgcaactcaggattatgaggcacaactaagtcaaataagtgaaatgggacagtcagttgctgagggcacaagtgatgatccatctgcttcagcttctgtagatcttatcaatatcatattggtagcggcggagtgtgctccttggtccaaaacaggtgggcttggagatgttgctggagctttgccaaaggctttggctaggagaggtcaccgtgtcatggtagtagtgccaatgtataaaaactacgcagaacctcaacagctaggagagccaaggagataccaggttgcagggcaggatatggaggtaatttattatcatgcatacatagatggtgtggattttgttttcattgacaatcctatcttccaccacgttgagaatgacatttatggcggagaccgaacagacatcttaaaacggatggttttgttgtgcaaagcggctatagaggttccatggtatgttccttgtggtggctactgctacggtgatggaaatcttgtgttccttgcaaatgattggcatactgcactactgcctgtttatttgaaggcatactatcatgacaatggtttcatgatatatgcccgttctgttcttgtcatacacaatatagcacatcagggtcgtggcccattagatgacttcagttatctggatttgccagttgattacatggatcttttcaaactttatgacccatttgggggtgatcacctaaacatatttgcagctggtattaaagctgctgaccgtttgcttactgtaagccatggttatgcatgggagctcaaaacagctgaaggtggttggggtcttcatgggatcatcaatgaaagcgattggaaatttcagggcattgtaaatggcattgatacaactgattggaatcctaggtgtgatatccacctaaaatctgatgggtacaccaattattctctagaaacagttcaggcaggtaaacagcaatgtaaggcagcattgcagaaggaacttggtctcccagttcgtggcgatgttcctgtcattgctttcattggacggctagaccatcaaaaaggtgtagaccttatagcagaagcaatgccatggattgctggccaagatgtacagttaataatgttgggcactggacggcaagacctcgaagatacattgaggaggcttgagagccaacattacgatagagttagggggtgggttggtttttccatcaggttggctcatcgaatgacagcaggggctgatatactattgatgccatcaaggtttgagccatgtggattgaatcagctctatgccatgatgtatgggactgtcccagtagtccatgcggtcggtggtcttcgagacaccgttgagcactacaatccctacgaggagtccggacttggttggacttttgaaaaggcagaggcaaacagactgattgatgctctagggcactgcttgaacacgtacaggaactacaggactagttgggagggactccaaaagagagggatgatgcaagatctaagttgggataatgctgctaagctgtatgaggaagtcctcctagctgccaagtatcaatggtgatcagtccaagaagacctcgacggttgttcagtcattcatgaccgaaatgcctttttctcgtgtcagctgctcagatgcggccaccatctagttccatggcttacatcttcctgtgatttggatgaacagagtttttttgtcagatctgacatcattttcaagaaggcacatgatgaacctacttcccaggtgaatacagcagcggacgatgcctttgttggaaggtggcaaaacacatggaagattcagccgtctgccagcatgcacctctgtcctaaggagaggctccaagccccattgtgcgctctggagaggctccaaaccaccattgttcgcccctgggtaggttgttgagctcggttagatgcttttagtacagtagaatagcagatactagcggatagactagttgatatttcccctatgcaccgagtggttcggttgtaccttatttttttcttggctcttgttgtccagttcttcgatctttagacgattagcgtcccgggatttcccagatgacattgacattgatactagtgggaatttcccctgcaaatttactgtcagcttttccaaaaaaaaaaaagctgaacttaaaaaaaaaaaaaaaaaaaaaaaaaaaaaaaaaaaaaaaaaaaaaaaaaaaaaaaaaaaaaaaaaaaaaaaaaaaaaaaaaaaaaaaaaaaaaaaaaaaaaaaaaaaaaaaaaataaagaaaaaaaaaaacattgattgtaaaaaaaaaggggggggccccttttaaaaagataactattttcaccgcgggggtgaagaagatatttttttttttgggggcccaaaaaaaaaatttcggtgccgctcgttttacacagccggtgtgtgaggaaaaccttggggtaccaaaaaaaaaatttttttttcgaaaaaaacccttttttttg

SEQ ID NO: 80145 - DNA, 3148 bp, Oryza sativa
  Clone ID: PAT_MRT4530_79799C.1
gcgcggggcgcccctccgggccctcggattccgggcgcccccgccgccgcccccgccgcccccccggggcgagcgcccgccgcttcctcccctgcgctcctgggggtggcctccccgcgggggggccccggctgcgccgacccccgatggcggcggcggccgtctcctccctcctcgccccttcgggatcctgctactcccccggatgccacagctgctggggtcccgggcccggaggcgggcggcgcctaccttccccgcgccggcgcccgattaccgccgcggctcgccctacttgggcagtgccgaggaggagcaggttggagtgggggcgtgtggaggctcagaattcgggcgctcgcaccagctgccgagcagcactgcaatggctatcatccacggcaaggtcccatgtgaatgttggttatgggtcgccgctggtgttcccagggaatcaagttggtgacgatagtgatgatggaatcaaggttaccaatgagaagcttcgtgctgttatccgcaagagcaaagaggtgttggagatccatcggaatctacttgagaaggtacataaattgaaaatacaagattactatgaacttcccaaaatatcggcatcagaaaggaagaagatcacttcaattatagaggacagttccatttataatgagcaagatccatttggtcaaagagatagttctttttatcatcttgatgaagttccagacgatgatgaatttagctatgacctacagatgtaccttgatagacgtccagatcaatctgaagttgttgcaactcaggattatgaggcacaactaagtcaaataagtgaaatgggacagtcagttgctgacggcaatagtgatgaagcatctgcttcagctgctgtagatcttatcaatatcatattggtagcggcggagtgtgctccttggtccaaaacaggtgggcttggagatgttgctggagctttgccaaaggctttggctaggagaggtcaccgtgtcatggtagtagtgccaatgtataaaaactacgcagaacctcaacagctaggagagccaaggagataccaggttgcagggcaggatatggaggtaatttattatcatgcatacatagatggtgtggattttgttttcattgacaatcctatcttccaccacgttgagaatgacatttatggcggagaccgaacagacatcttaaaacggatggttttgttgtgcaaagcggctatagaggttccatggtatgttccttgtggtggctactgctacggtgatggaaatcttgtgttccttgcaaatgattggcatactgcactactgcctgtttatttgaaggcatactatcatgacaatggtttcatgatatatgcccgttctgttcttgtcatacacaatatagcacacatgtggattgaatcagctctatgccatgatgtatgggactgtcccagtagtccatgcggtcggtggtcttcgagacaccgttgagcactacaatccctacgaggagtccggacttggttggaagctgctgaccgtttgcttactgtaagccatggttatgcatgggagctcaaaacagctgaaggtggttggggtcttcatgggatcatcaatgaaagcgattggaaatttcagggcattgtaaatggcattggctgctaagatgtatgaggaagtcctcctagctgccaagtatcaatggtgatcagtccaagaattattctctagaaacagttcaggcaggtaaacagcaatgtaaggcagcattgcagaaggaacttggtctcccagttcgtggcgatgttcctgtctacatcttcctgtgattttggatgaaacagagtttttttgtcaagatctgacatcattttcaagcaaggccatggattgctggccaagatgtacagttaataatgttgggcactggacggcaagacctcgaagatacattgaggaggcttgagagccaacattacgatagagttagggggtgggttggtttttccatcaggttggctcatcgaatgacagcaggggctgatatactattgatgccatcaaggtttgagccatgtggattgaatcagctctatgccatgatgtatgggactgtcccagtagtccatgcggtcggtggtcttcgagacaccgttgagcactacaatccctacgaggagtccggacttggttggacttttgaaaaggcagaggcaaacagactgattgatgctctagggcactgcttgaacacgtacaggaactacaggactagttgggagggactccaaaagagagggatgatgcaagatctaagttgggataatgctgctaagctgtatgaggaagtcctcctagctgccaagtatcaatgtttttttgtcagatctgacatcattttcaagaaggcacatgatgaacctacttcccaggtgaatacagcagcggacgatgcctttgttggaaggtggcaaaacacatggaagattcagccgtctgccagcatgcacctctgtcctaaggagaggctccaagccccattgtgcgctctggagaggctccaaaccaccattgttcgcccctggattcctcgactggtccattggcacatgaaagaaaaggagattgcaagtatgcaacgaccgtgtgggtatcagcgtgtgcaatgctcgcaagctcgcatgaggtggccgcaagcctgcgacgccggatgcttagccccaaggagagacggtgacatacaagggtacaagaaggagcacatcaaggtgcagctggtccgcagccggcggcggctggtcgtgagcggcgagtgccccgtcgccggcgagaccaaccggtggagccgcttccggctgcagttcccggtgcccgacggctgcgacctcaaggccatccaggcgaggctccacgacggcgtcatccgcgtcaccctgcccggcgtcaagccgcagcagcagccgccgcccgccaagacggccgccgccgccgcggtagtaggaggggatcagcggggcggcggcgaacgatgccaattcctccgggagcggggaaagctcgcgaccaccctgctcggcgtggtgctcgtcttgtttagcttcgtcatctacatcaggtacagcgtgaagccatga

SEQ ID NO: 80146 - DNA, 1009 bp, Oryza sativa
  Clone ID: PAT_MRT4530_7979C.1
tcgttcatctcctccgatcccttcctttcctgccatctagtagcaaagatgatctccccggacgcggctcgcaacgtcgtcggcatcatcggcaatgtcatctccttcggcctcttcctctcccccgtgccgacgttctggaggatctgcaagaggaaggacgtggagcagttcaaggcggacccgtacctggcgacgctgctcaactgcatgctatgggtgttctacggtatccccatcgtccacccgaacagcatcctcgtcgtcaccatcaacggcatcggtctcattgtcgagggcacctacctcttcatcttcttcctctactcccccaacaagaagcgcctgaggatgttggctgtgctgggcgtggagttggtgttcatgctggcggtgattctgggcgtgcttctgagcgcgcacacgcacaagaagcgttccatgatcgtcggcatcctctgcgtcttcttcggctccatcatgtacttctccccgctcaccatcatggggaaagtgataaagacgaagagcgtagagtacatgccgttcttcctgtcgctggtgtgcttcctcaacggcgtttgctggacggcctacgcgctcatccgcttcgacatctatgtgaccatccccaacggcctcggtgccatcttcggtgccatccagctcatcctctacgcctgctactaccggaccacacccaagaagaccaaggccgccaaggacgtcgagatgccctccgtcatctccggtcccggtgccgccgccaccgccagtggcggcagtgtcgtctccgtcaccgtcgagcgataaattaagtaaaattaaattaattagcttgtgttaattttggtggtagttttttcggctcgatatatatgatctaagtgagagtgtaatatttacctatatagttgaagtttgatgagacaatacaatgatacaatatcacccgccagtggcggatttaggctatttatgtggggtcggccgaccccatagctttttg

SEQ ID NO: 80147 - DNA, 398 bp, Oryza sativa
  Clone ID: PAT_MRT4530_797C.1
tctttccccgctccccgcgtaccgtctgcgagccagccaaacaccggcaccgccgcgctactcgagcacgggaccgcggcacggggcgactccgcaagcaacaagccgaggagaaccccgagcgctgccgcccgcatcaccgtcggatggccgtcggccgccgccggtggggcgataggcggcaagatccagatccagcggggcgggatcatatacaccgcgcgccgatggggggcgccgtgccagggctgtgccctctggacataaagggccgtgtcctagtctggcgcgactaccgcggagacgactccagcctccaggctgagcgcttcttcaccaagctactggacaaggagggcgactcggaggcgcactcgccgggggtctacgacgatgcc

SEQ ID NO: 80148 - DNA, 316 bp, Oryza sativa
  Clone ID: PAT_MRT4530_79800C.1
aaaaaaaaacgggcaaatttttggcacccttttggcccataatacattggccatacagaataaaaccaacccctttttacattaaaacggctttaaagtggcctagagggcaaagggttttcctggggggaccacaagggggggggctaagggggaaaaacaaatttcctggttgttaacagcaccccgtttttaatcaaaggccccaccagaccggggccttggcaaatcacagggcccaaactaaaccggggccttgccggggctgccaaagagggggggtcccatagcacccttggttgaaacccaatttgct

SEQ ID NO: 80149 - DNA, 414 bp, Oryza sativa
  Clone ID: PAT_MRT4530_79801C.1
gccgaggctccatgcttcctcctcctccgcaccaacacaagcctaaacgccgcagccgcagctgcacctccttctctgcactgctttcgattccctggcccatagccttcaggaggtcctggacaagcacaaaccaaagctacatctggacacattattcctccatggaaacctccctttcgcaaaggttggggtaccgccgcctcccccgggagccgcacccctcctctccccagcgtctgtctccgtccaccagcaagagcaacctgcaactccacctgaaaccgaaaccgaggacactgctggtccttgccatcccctgatactcatccagacaagaagaaactcttctctgtacagcacttcttccgatatgcagaatttgaaggaaagcgattctttgaggagttagac

SEQ ID NO: 80150 - DNA, 213 bp, Oryza sativa
  Clone ID: PAT_MRT4530_79802C.1
acactaaagatggctcaactcatgagcttgaggactataatgaaattgctgagattgctgatataactgctggtggctgttcattggagattgttgctggaaacaagtactgtatcacaggaaactccaaatcattttatgtgaactctagcaatggaagtattctggatccaaggcctagcaaacaggctctggaggacagcaccctagtcg

SEQ ID NO: 80151 - DNA, 193 bp, Oryza sativa
  Clone ID: PAT_MRT4530_79803C.1
ggtgattattctgaagcaccgctaaaacagtatgctgagtgcactcttcctacactcgttgatccctgttacttgactttgctctcaaagttagcacagaaatcaattcaacttgattgccatcagaagtttatggaaatatacagagaaattcgtagttcaaccttggaacggactcttaagcgcttgggag

SEQ ID NO: 80152 - DNA, 2499 bp, Oryza sativa
  Clone ID: PAT_MRT4530_79804C.1
atgtccgctgatcgccaagaaacagctaaagccaaagtccaaaaatttctcaagactggggtcatccaagagatcgactatcctgagtggctggcgaatcgagtgctggtgcagaaatcaaacggcaaatggcgcatgtgtgtcgatttcacagacctgaacaaggcatgcccgaaggacgatttccccttgtcgcgaatcgaccagctcgtggattcgacagctggttgcaaactcatgagtttcctggatgcatattccggctatcaccagatccacatgagcccggccgatatccccaatacagctttcattacactatttggcacattttgtcacctcaggatgcctttcggcctgaggaatgccgaagcaaacttcgctaggctggtgtacaaggtccttgataagcagctggggcgaaacatggaagcttatgtcgacgatatcgtcgtaaaaagccgcaaggctttcgaccacaggagaccttcgacaacttgcgcggcgggtatgaaactgaaacctgagaagtgtgtttttggtgttcgcgcaggcaagttgttgggtttccttgtttctgaaagaggcatcgaggcgagttctgagaaaatcgatgccattcaacaaatgaagcccctgacgagcgtacatgagatacaaaagctcgcaggccgaattgcggcactcagtcgattcctctcaatggcagccgaaagaggtttgcccttcttcaagaccctccggggcgcgggaaaattcaattggacacccgaatgccaagcagtgttcgacgagctgaagcaatatctgcaaagcccgccagctctgatcaacctagcaccaggaagtgaactgctactatacccagcagctttgccagtggcagtcagtgctgccctcgtccaagaaacagagtcaggacagaaaccagtctatttcgtctccgaagcattgcaaggagcgaagacaagatacattgaaatgggaaagctcgcttacgccttggtgatggcttcgcgcaaacttaaacattacttacaggcccacaaagtcatagtgtcatcgcagtaccctttgggcaaaatactccgaggcaaggaagttactggctggcttagcaagtggacagcagagctatcccctttcgacttgcatcttgttgcccgcactgcagtcaatggtgtgccgattcggtatgccgcaaggctgcagttcgacacaaccaacaacgcggcagaatacgaagccattcttctgggcctaagaaaggcaaaagcattaggaattcggcgcttgctaatccggaccgactacaagctggtggcaggccatgtcgacaaatcctttggggcaatagaagaaggaatgaagaggtatttggaggccgttcggtctatggaaaagtgcttcaccggcataacggttgaacatttacctagaggctataacgaggaagcagacgccttggcgaaatctgctgcttgtggaggcccacactcaccaggtatctttttggaagtccaatacgaaccaagtgtgcccatggagagcatggaggtcatggcaatcgaccaggcaaaactgggcgaagatctatacgactggcgaacaccgttcgtaaaataccttgagactagctggcttccagaagatgaagcagaagcaaagcacctgcaactcagagccgcaaggtacaagatggtctcgggccagccatatcgctctggggtacttcaacccttgcttcgctgcatctcttttgccgaaggcgaggaaatggcgaagaagatacaacaggggctctgcggcacgcaccaggccgcaagaacagttgcctccaaaaaagtcaagaagtgcgaaagctgccagcgccatggccgaagtcaaaccgcgccccagtatgagttgcagcctatcgcaccaatctggcccttcgccatatggggattggacatcattgggccattcccggtggcgcgaaatgggtacaagttcgcaattgtggccgtcgaatacttctcccgatggattgaggccgaacccctcggagcgatcacttcggcagcagtacagaagtttgtatggaaaaacattgtttgccatttcggtgtgccaaaagagttcatcactgacaacggtaagcagttcgactctgacaaattcaaagaaatgtgcgaagggcttaacctggaaatcaggttcgcgtcggtcacgcacccacagtcaaatggggcggccaaacaaacaaatggtaagatcctagaagcactaaagaaaaggcttgagggggcagcgaagggcaaatggccagaggaaatgttatctgttctctgggccctttggatgacccccacaagaccaaccaagttcagtccgttcatgctcctttatggcgaagaggcaatgaccccgacagagctgggggctaactcaccaagggtgttgttctctggggcgaagaggggcgcgaggtgccactcgaactcctggagggggtga

SEQ ID NO: 80153 - DNA, 2437 bp, Oryza sativa
  Clone ID: PAT_MRT4530_79805C.1
atggagcaggacttaccggcgctcaagccgcaatggctggtgcagggccaggtcaccaccacgggagccgccaacctctggaccgtagcttcgccccgcccaggcccagataaccaaggtaggggtggttcatcaaggaaccattcatcatctggccaccaccgtgaccagaattctaggacatcttcgtcacggatttcctcaaatgggccccgtaaacatgaccgggaccgggatggtatgggaaagtcgaggggttatgcaagttttggtagaaacagggaaagggagcgagagaaagaatttgactcccgtgacagagagagtaggtccattacagcagacggttttgggtcgtttagtacatgtagaccggaaagggatagattgaatcgttcccgctcgaggacagattcatggaataaaggtgtagttagtccaaataattgtaatacctctagaaacaatactggtactggtggctcctttgaacgagaatttccacagctgccttttgatgacaagaggcaagatatcaacagagtaccatctcctgcctctccaattcagagaactgttgcaccggatcgttggaattcactgctagcggatgtccctggctcaagtgagccaaagaaaaacctgggtgtatcttctgtattacgaccggctcctagtaaacagcctgaggcagcgccgaacagcgggatctcattgagcatggcggagactgtgatgcaagttcctttgtcagttgggcctcagttatcgatggaagcccaaaagatggaagaaatcagtttaagacagaacactctaaggcctatgacatctccagcaatcaaatcttcagtaacaaattcttcaaaaacaaaaggtgtgagaaatggagatccttctggtcccatcaaggcacatcaatcattaataccgtccacaaatggctctgctcgagctccagttaaaactgatctttcaaaggtatctcacgcaggaaatctaaaaatcctcacccgagagcaaaactgtactatacacactgccaaagactgtcctgacaatcctatgagtcctcctccagctcctgttgcttcagtggaaccactgaaaaagccatgtgttagccaaaagcttaaggttgccacccatgacattcctctctctatactgcaaagtgcttatgtagataaaaaattaaatgcaagagataagcatagattctttgagtcgttgaggatcaagtcttcaaatggttcaagctcaactgctgagtcaggttgtccatcaccatccagtgtagctgatgtgaaacaagattcttgtcttaatgttggaaaagatgtatccttgtatcattctggaaaagatatatccttatatcattctggaacaaaatgtatgggaaatggaaagtgttcctgtgaagaagcaaattcttctgatggatctcagaggcatctgtctgataatgagaacaattcatccttggatcacactgcagatggggtttctcagaatcttctagtagaaagcaggtccatctcatcatctgaaccttctgataggggagatgaattccgggtgttcctatcaaacaataccgaaggcagttcatcatcagcacctgctgattcagatgatgggtacaagagatcccagtctggcagtgaggaagctagttcatcctcagagactaccgaaccaggagatgaggagcatccagctgaggatagtcttcctgctgattttgtggctttcatgatatctctcggctgggaaaaagacaaaaaggtggaacctttgggactggaagagattgctgtcactgtgagggctaatgaggagctagagcagaaacttttgtccatggaagacaatgccaacatcaagatcgttctcctgtatatctattcgggcagagggctggataaggagctgatgaagcctaacgcaggggataaaaacaatgcttgaagaacgcacggtgctagggagtaaggccacagtagctatctgcaaaaaaatgcattgccaatcacacatcagtgagccattgggcgttggttttgtttggatgctgagaagacaggtagcaaagggagtcttggcctgaattttgtcttagattaacaagtcaagattattttttttcctctattgaggcttgtccagcaatttggggaggtgggggttcactggtagctctgacattttttgcttgataaaacagaggaagtttaggatttgtcgtctttttcccaggaataccaaatgtaagtccggttattggaggcgcatggctgtgctgtcctttaaaaagaataggttcaagttttcccccttctcagggcttatctttgttttggaaaaagataagatgggtttttaacatgaggaaaggtgaatagttatattggtctcaaaaaaaaaaaaaaaa

SEQ ID NO: 80154 - DNA, 531 bp, Oryza sativa
  Clone ID: PAT_MRT4530_79806C.1
atggcgaaggaaatacaccaggggctctatggcgcaaaccaggccgcaagaacagttgcctccaaagtgtttcgacaaggaatatattggcccaccatactgaaagtctgtgttgtgcaagtcaagaaatgcgaaagctgtcagcgccatggccgaagcccaactgcgccccagtacgagttgcaacccatcgcaccaatctggcctttcgctagatgggggttggacatcattaggccgttcccggtggcgcgaaacgggtacaagttcgcaattgtggccgtcgaatacttctcccgatggattgaggctgaacccctcggagcggtcacttcggcagcagtacagaagtttgtatggaaaaacattgtttgccgtttcggagtgcaaaaagagttcatcacggacaacggcaagctacttcttcttctccttctatgtgatgacttcctgcagccgatggagtttgctcactggattcagaaatcagagttggaggacgaggaggctgacaacacaactacagattag

SEQ ID NO: 80155 - DNA, 187 bp, Oryza sativa
  Clone ID: PAT_MRT4530_79807C.1
ctgaagaaacgaaatggattgatgcatgcatagtagttgcagtacacatttgagcgctatagctggccagagaattaatggtggttgtacgttcgtgcttccctattaagctcgcttttctcggctccgttcgtcggtctcatcctttcctcttggaagttttgaggttacctttgaattggccagg

SEQ ID NO: 80156 - DNA, 1236 bp, Oryza sativa
  Clone ID: PAT_MRT4530_79808C.1
atgagaaaagatgttgagatgttcgtgacacgttgcaccacttgtcagaaagccaagtctcgttttaatccacatggtttgtatatgcctcttcctgtaccgtctatttcttgggcagatatttctgtggactttgttttgggattgcctaggactaagagggggagggatagcatttttgttgtggtggatcgtttttctaagatggcacatttcataccatgtcataaaagtgatgatgttgttcatattgctgatatgtttttccatgagattgttcacttgcatggtatgccttctactattgttttagattgtgatgcaaaattcttaagtcatttttggcgcacactatggaacaagttgggtacaaaactattgttttctacaacatgtcacccacaaacagatggacaaacggaggtagtaaaccgtactttgggtactatgttgagggctattttgaagaaaaatttgaagatgtgggaagaatgtttgcctcatgtggagtttgcatacaaccgagcaacacattctactaccaaggtaagtccttttcaggtagtgtatggtttcaaccctcgtgcgaaaatgcatgagacaactaagcacaacattgaaaagatgaccgaaaagtatagaattgctggtaataaaggtaggcaagaagttaagtttgaaccgggtgatttagtttggttgcacttgagaaaggatagatttccggaattaagaaagtctaagttgatgcctcgtgctgatggtcctttcaaaattgttgagaagattaatgataatgcatataaacttgagttgcctcccgagtttggggtcagtcccacgattaacatttcagatttgaaaccgtacttgggagaagaagatgagcttgagtcgaggacgacttcaattcaagaaggggaggatgatgcagacatcactcctttggatacacaaaacaatcctccaacggtcattcaaggaccgataacaagagctcgtgcgcgacaattgaatttagaggtgagctcgttcctatgttcttctttgtacgaattcgagaatagatttctacctaatgattatactgtgatcaggaacaatggaggggacaagaagacacttggagaaggacttagagccatgggggatcatcgaggacgtccaagtcaaggtggaggcccaaaccaagtcgacctcggatgtaattcggagtccataactagtctgtactaa

SEQ ID NO: 80157 - DNA, 2625 bp, Oryza sativa
  Clone ID: PAT_MRT4530_79809C.1
atggcgcggtggagcgagggcgaatgggagaggaaaggaaagtgggggagcttgggtttatatgggcgacaaagtcggtttgggagaggggaaccgacattggacgctccacatatttacttctggacagcacaggttcttgatccctgcatcgctgactacgccttccaggtaacgaaggtgagaagagtccccaggattttgctgactatgtcagctaagagcaactatgaactctccaagaaaaaggacatcacggaggccgttggaaagtctgtgcaagatgccttcactaaactcagcttcctgaaccacatggagaggttggacaaacggatatccacgctaactgatcgggttgccgcgttggagacaccttccaatgaggaagtggtgagtggtgacgacgatgctcatccggaagatacggtgtatgattccagtggctatattgacacaccagctacaaggcaagcacagctacgacgtcacctacgcacaaaccgcacaggtatgggtggcactcgccaccaacaaggtaataataatcgtgtgcccgattatccttatgctatggttatgtttaaaataccatctttttcgggatattatgatgctgagaaataccttgattgggagatggcagtagaacaaagtttaatgcccaacttatacctgagcaacatagagttagacaagccagtaagaaggaattgcaggggcgtgaccatcagggcaagaacaaggcaagtacatacactccgcgcacgacgccatctgcgggactgcccaaggctgtctcttttcgggtgcattcccagccagcgagcaagcgaccagctgcatctggagcttctacggcaccaaaaccatctccaccaagcagagtcagaaaaagattgccctagtcaacgggcctatgttgctacagaagatggctacatcaccacctccgacgtgaaagaggaagaggaggaagaagaagttgaggatgaggatggcgaagtctttggtcatgatgacacatcggattacaggaccatcattgtgcagcgggtgctcagcacgcagattttctttgtcatcaacaaccatcgtgcacgtgtgatcattgatgcaggtagctgcaataatttgtggttaaacgattccggaagagcaaaggtaacacaggtttgtagggtttcattttccattggctcatatgcagattctgttgattgtgatgtggttcctatgcaagcttgtttacttttgctgggtcgtccttgggaacatgataatgatgctacacaccatgataggagtaataaatacacttttgtgcataatgaaaagaaaattacttttctaccttttacccctgctgaaattgtagaagctgataaagagcgagctgctagtttgaaacttgatgagtctgaaaatcagcaagtggctaaatctgtttttccacccaaaaaggataagctttcacctagttctaaggttgagggaattaagttgaagggtggtgttatgcttgctacgaaatgtgacattgctgagtatgaggatgtctttccagctgagatatccccgggattgccacctatgagagggatagagcatcaaattgatttgattccaggagcatcattgccaaaccgtgctgcttatcgaactaacctagaggagactaaggaaattcagcggcaagttcaagatcttttggacagcgggttagacgacatgcttgatgagttgtgtggttctataattttcacaaagattgacttgcgtagtggctaccaccaaattagaatgaaacttggagatgaatggaaaacagctttcaaaactaaatttggattctatcgccgtttcgtcaaagattttagtacctttgctgcaccattgcatgagttgatgaagaaaggggtggtcttccattggggaaagacacaggggaagtcgtttgacactttgaagaacaagcttacacacgcaccattgctacaacttccaaactttggtaagacttttgagttagaatgtgatgctagtggagttggcattggaggtgtgttgatgcaagatggtaagcctgttgcatactttagcgagaagttgcatggtcctgttttgaattattccacgtatgataaggaattgtatgctcttgaagcgcatggaggaggcttgatgggacattttggagctaagaagacggaagatgttttggccatgcatttcttttggccaaggatgagaaaagatgttgagagatcgagatgcaaaactcttaagtcatttttggcgcacgctatggaacaacttgggtacaaagctattgttttctacatcatgtcacccacaaacagatggacaaacagaggtagtcaaccaaactttgggtaccatattgagggctattttgaagaaaaatttgaagatgtgagaagaatgtttgcctcatgtggagtttgcatacaatcgggcaacacattctactaccaagatttgaagccatacttgggagaagaggatgagcttgagttgaggacgacttcaattcaagagggggaggatgatgcagacatcactacctcggttacacacaacaatcctccaatggtcatttaa

SEQ ID NO: 80158 - DNA, 174 bp, Oryza sativa
  Clone ID: PAT_MRT4530_7980C.1
atgccgatcgagccgcgcgcggggcgaaacgagccggtagcccggccggtacggtggccggacgacccatgccgatcccctgcgctgcagccaacgcaacggacaaaaacgccagccatagaaatgggaatcgaaggccatcgatcgagcgccgttgccactccacctgataca

SEQ ID NO: 80159 - DNA, 801 bp, Oryza sativa
  Clone ID: PAT_MRT4530_79810C.1
atgagtttgaaagtgctcccgtggacggcggcgcctgcaccgacgccgacggtcggcgagacgaccgccaggacgggcatacaccgtgccgtgctgtggtttctggccgtctacttcccatctattcccatcttcaccacctcgggggcagcctacgcgttgtgcaccgcgctccagtaccccaccttctccggctgcgtccgccgcgacctgtggaggctgacgactctcacgctgtgggcggcctacatgtcgctgctcgcgctggtgagcatgcacatgcgcctcttcctgccgcgcgcgcccgacgccgtgctcacggacctcctcgacgtcggcgcggcacggatcggcatcccgctcgcgttcctcgcgtgccttgctgccagcctcggcgtcaccagggtggccatcgccttggattgcgttttcgtcgtcctcatcgcccacgtacttgccatctggtcgcggcttgttcgcacatcagaacatggtgatgaacaattgaccggtgctcaactgcgtccgccgcgacctgtggaggctgacgcctctcatgctgtgggcggctacatgtcgctgctcatgctgcgcgcgccctacgccgtgctcaaggacctcctcgacgtcggcgtgaagcggatcgggatcgccaccgtcctcgtgtttctttcgtgccttggcctcagctttggcgtcacctgggtggccattgccttggattgcgtttacctcgtcatcatcgcccacgtgctcgccatctgggtacggcttgtgcgcacgtacgccttacgtgattag

SEQ ID NO: 80160 - DNA, 408 bp, Oryza sativa
  Clone ID: PAT_MRT4530_79811C.1
atgcgcgcgaaagatgaggaggaggtgttgggaactacccctaacgaacgcagccttagagtacgcccgaggcacgtcggcggcccgccatgcgcgccggcgggcgtgaaccattgcgagttctacgacgagtgcgcgccgccgcgataccactttgtgctgcgggacaacggccacctggacatgctggacgacggcgtgccgtacgccatcaacaactgcatgtgcatgaggaacctcggggacaccaaggaggtggccaggaggaccatcggtggcctcatggtggccttcctcagggacgcgctggaggaccaacacgacgacctcaagctcgtgctcaaagttggcgttaacccgggcctcgcgccagcggtcatcaagccggttgcttacgatttggcttga

SEQ ID NO: 80161 - DNA, 1734 bp, Oryza sativa
  Clone ID: PAT_MRT4530_79812C.1
atgtcaggtaacaaaggtgagaagagtccccaggattttgctgattgtgtcagccaagagcaactacgaacactccaacaaaatactcaaaaggacatcacggaggccgttgcaaagtctgtccaagataccttcactaaaatcggcttcctgaaccacatggagaggttggacaagcggatatccacgctaactgatcgggtcgccgcgttggagacaccttccaatgaggaagtgacacggtgtatgattccaatggctatattgacgcaccggctacaaggcaagcacggctatgacgtcgcctacgcacaaaccacacaggtatgggtggcactcgccaccaacaaggttaagtttaaaataccatctttttcgggatattatgatgctgagaaataccttgattgggagatgacagtagaacaaaagtttaatgcccaccttgtacccgagcaatatagagttagacaagccagtagtgagttcaaggattttgctattatgtggtgggctaggttatctgatgagggggtactacctactacttgggaagaacttaaggtagctatgcacgataggtttgttcctccatcttatcatagagatttacgcaagaaactgatgcgtttggaacaaggggataaatctgtacaggattactatttgtttcggtttgctatgcttgcagagaaggaattacaggggcgtgagcatcaaggcaagagcaaggcgagcacatacactccgcacacgatgccatctgcgggactgcccaaggccgtctcttttcgggcgtcctcccagccagtgggcaagcaaccagctgcatccggagcttctgcggcaccaaaaccatctccaccaccacgaccagcagagtcagaagatggctacatcaccacctccgacgtggaagaggaagagggggaagaagaagaagttgaggatgaggatggcgaagtttttggtcgtgatgacacaacggactacaggaccatcattgtgcagcgggtgctcagcgcgcaggtacagcagcatgacaggttgcaatgccataatttgtttgagattttcttcgtcatcaacaaccgtcgtgcacgtgtgatcattgatggaggaagctgcaacaacttggtgagttctgatttggtcaagaagcttggcttgactacacgtacgcatccacacccttaccatattcagtggttaaacgattccggaagagcaaaggtaacacaggtttgtagggtttcgttttccattggctcatatgcagattctgttgattgcgatgtggtttctatgcaagcttgttcacttttactgggccgtctttgggaacatgataatgatgctacacaccatggtaggagtaataaatacacttttgtgcataatgggaagaaaattactttgctacctttgacccctgctgaaattgtagaagctgataaagagcgagctgctagtttgaaacttgatgaatctgaaaatcaacaagtggctaaatctgtttttccacctaaaaaggataagctttcacctagttctaaggctgagggaattaagttgaagggtggtgttatgcttgcaacgaaatgtgacattgctgaaatttcagatgatgatatgtgctatttcttgatatgcaaacaagccttggtttctttagatgatattgctagttcgatacctttcggaagatcgggaaccctagtacacatcatatag

SEQ ID NO: 80162 - DNA, 226 bp, Oryza sativa
  Clone ID: PAT_MRT4530_79813C.1
cccacgcgtacgtccacgatcagcctatgcgtccaccagactacacctcgctccattatcatgtgggtaaacaacagtaaggcacgatccaatctgacggaagtggtgagcagctagggatcactccaccagtcgacggtgggggtcacctcgtgcgtcctctaccagtccacggccagagtgaccgagcgcgttgtctgccgggcccagaagaaagagaaccacc

SEQ ID NO: 80163 - DNA, 245 bp, Oryza sativa
  Clone ID: PAT_MRT4530_79814C.1
gagtatgaggatgtctttccagctgagatacccccaggattgccacccatgagagggatagagcatcaaattgatttgattccaggagcatcattgccaaaccgtgctgcttatcgaaccaacccagatgagactaaggaaattcagcggcaagttcaagaccttttggaccgcggggaattgaggtggatgagtcaaaaattgaagccacaaggagttggccggttccccaaaccatcacacag

SEQ ID NO: 80164 - DNA, 2202 bp, Oryza sativa
  Clone ID: PAT_MRT4530_79815C.1
atggcgaagactatggaacatgaacggcgaggggcgagagatcgtgcgagtaccttgtcaagccagaggcctcttgggcgaagggtgcagggcgaagagtatataccggaggaagatgacttcgccacagcaagttcgcccccgcgagggccgaagaagcctttccgtcccatcaaccccagggaccgtaaggccgacgatcgcccgatggcccatcaggggcccatgagtccttattacattatgtacccatgtaaatgtccctttcataagggcaaccatgatgcggacatcactatctcggatacacacaacaatcctccaacggtcattcaaggaccgataacaagagctcgaacaatggaggggacaaggagacacttggagaaggacttagacccatggaggaccatcggggacgtccaagtcaaggtggaggcccaaaccaagtcaacgtcgggtgcaattcggagtccaggaccagtctacactaaaacgggcgcccagcattactatctgtcattggattgtgtaccactcatattcgtatatttggccttcctagctccacttattacttctggacagcacaggttcttgatccctgcaatcactgactacgccttccaggtatcctttgctttgctggtaacgaaggacatcacggaggccgttgcaaagtctgtccaagatgccttcactaaaatcggcttcctgaaccacatggagaggttggacaagcggatatccacgctaactgatcgggtcgccgcgttggagacaccttccaatgaggaagtggtgagtggtgatgacgatgctcatccggaagacacggtgtatgattccagtggctatattgacgcaccggctacaaggcaagcacagctacgacgtcgcctacgcacaaactgcataggtatgggtggcactcgccaccaacaaggtaataataataatcgtgtgtccgatgatccttatgctaaggttaagtttaaaataccatctttttcgggatattatgatgctgagaaataccttgattgggagatgacagtagaacaaaagtttaatgcccaccttgtacccgagcaacatagagttagacaagccagtagtgagttcaaggattttgctattatgtggtgggttgggttaactgctgagggggtactacctactacttgggaagaacttaaggtagctatgcgcaataggtttgttcctccatcttatcatagagatttgcgcaagaaactgatgcgtttggaacaaggggataaatctgtacaggattactatggtgagctacaaaagggtttgtttcggtttgctatgcttgcagagaaggaattacaggggcgcgaccatcagggcaagagcaaggcaagcacatacactccgcgcacgacgccatctgcggcactgcccaaggccgtctcttttcgggtgtcctcccagccagcgggcaagcgaccagctgcatccggagcttctgcggcaccaaaaccatctccaccaccacgaccagcagagtcaggtaaaggttccacgcaggtacccgccaagagtgcctcatctgtcgcctcgacgggacgcattcagtgccaccgttgccaagggtttgggcatgtgcagaaagattgccctagtcaacgggcctatgttgctacagaagatggctacatcaccacctccgacatggaagaggaagagggggaagaagaagttgaggatgaggatggcgaagtctttggtcgtgatgacacaacggactacaggaccaacattgtgcagtgggtgctcagcatgcaggtagctgcaacacacttggtgagttctgatttggtcgagaagcttggcttgactacacttacacatccacacccttaccatattcagtggttaaacgattccggaagagcaaagcaagtggctaaatctgtttttccacctaaaaaggataagatttcacctagttctaaggttgagggaattaagttgaagggtggtgttatgcttgcaactaaatgtgacattgctgaaatgtcagatgatgatatgtgctatttcttgatatgcaaacaagccttggtttctttagatgatattgctagttcgatacctcctgttgttactaaccttttgcagaagtatgaggatgtctttccagctgagatacccccaggattccgcctatga

SEQ ID NO: 80165 - DNA, 1584 bp, Oryza sativa
  Clone ID: PAT_MRT4530_79816C.1
ggagactgacatgtggaccatatatttatagtaaagagttaaccactatctgagtaagttgagagatagactataaagatctatacaataagtagccggttatattattagtcttgctattattaattatacctttattaagcagtattattttgtgattaactttttagtggcaagtatagctagtaactaaagctaggcgatgttgtagcaaatcttcttgaactcttctagatggttctcgaagagtggcacgtagacgtcgatgctgccgtcgccgaggaaggaggggacgaggaagatggtgccttccatggcgaggtaggacggcatgaagtacagggggcagccgccgccgaagtcgaggtcgtagaagctcatgcccagccagctgtccacctccatgtccgggcacaccaccacctcgccggcgtcggcggtggggacgaggccctccgcctcgacggcgccggaggacgcgaagtcgacgaacgagcggaagtaggcgtcgtcgatgcccgccacggcgcggtggatgagctccgcggcgtggtgcgacgggcgcgcgacgagctcgccggcgtcgcagcgcgggaacgcccagagcaccaggttgccgaagtagtcgcgcggcaccggcgggcgcatgcgggcgcggccgttgacggcgatgcggaccctggtggtggtggcggcggccccgagcccgcgcgccgcggtcaccgcgcgccagaggtgggcgacgaggctctcgaaggtggtgtagccacgcccgcgccgcgacggcgggagccccgacgaggcccgggacttgagccgcgccacgaagtccttggtgtagtgtaccttgtgcatcttgatcttgtcgtgcgccggcgccgcgccgagctcgtcgtcgtcgtcgtcctcgccggcgacgccgctcttgatcttggccggaggcggcggcgccttgtactccgtctcgcggtgcgggaactcgacgagcggcgggtcccgcggcacgaaccgggtggcgcggtcgcggacggggacgcccacggcgggcagcagcccgccgcggcgcgtggcgagcccccacgccaccaggaagcccgccgtggcctgcccgtcggcgacgcggtggtgcgccgcgacgccgagcaccatggacccgcacgagaaccgcgtcacctgcacccgcagcagctcctcctccgcgggggcgccgtcgacgctcgggtgcagccgcttcacctccggcgacggccgcctcctgatgatgaacggcgccgccgcggcgagcggcgcgtccacggcggcctcgtcgagccgcgcgccggcgtcgctgagcagcaccgaccgccgcccgtcgggcccgacgccgagccgccccgcccactcccggtacaccgccagcgtccgcgccaggccgagctccatcgccgcgctgggcgggttcggcggccggaacgcgtagatgatggcgatgctctcgtcgtacgtcgccgtgtcgaacacgctcagcggcatccactccggcgccggcgccgccgcgtcgtacaacggcttgacaatcctcgagctctcgaccttaaccttcat

SEQ ID NO: 80166 - DNA, 3810 bp, Oryza sativa
  Clone ID: PAT_MRT4530_79817C.1
atgtcaggtaacgaaggtgagaagagtccccaggattttgctgactgtgtcagccaagagcaactacgaactctccaagaaaatactcaaaaggacatcacggaggccgttgcaaagtctgtccaagatgccttcgctaaaatcggcttcctgaaccacatggagaggttggacaagcggatatccacgctaactgatcgggtcgccgcgttggagacaccttccaatgaggaagtggtgagtggtgacgacgatgcttatcctgaagacacggtgtatgattccagtggctatattgacgcaccggccacaaggcaagcacggctacgacgtcgcctatgcacaaaccgcacaggtatgggtggcactcgccaccaacaaggtaataataataatcgtgtgcccgatgatccttatgctaaggttaagtttaaaataccatctttttcgggatattatgatgctgagaaataccttgattgggagatgatagtagaacaaaagtttaatgcccaccttgtacccgagcaacatagagttagacaagccagtagtgagttcaaggattttgctattatgtggtgggctgggttatctgatgagggggtgctacctactacttgggaagaacttaaggtagctatgcgcgataggtttgttcctccatcttatcatagagatttacgcaagaaactgatgcgtttggaacaaggggataaatctgtacaggattactatgagaaggaattacaggggtgcgaccatcagggcaagagcaaggcaagcacatacactccgcgcacgatgccatctgtgggactgcccaaggccgtctcttttcgggcgtcctcccagccagcgggcaagcgaccagctgcatccggagcttctgcgacaccaaaaccatctccaccacgaccagcagagtcaggtaaaggttcctcgcaggtacccgccaagagtgcctcatctgtcgcctcgacgggacgcattcagtgccaccgttgccaagggtttgggcatgtgcagaaagattgccctagtcaaccggcctatgttgctacagaagatggctacatcaccacctccgatgtggaagaggaagagggggaagaagaagttgaggatgaggatgttgaagtctttgctcgtgatgacacaacgaactacaggaccatcattgtgcagtgggtgctcagcacgcagattttcttcgtcatcaacaaccgtcgtgcacgtgtgatcattgatggaggtagctggaacaacttggtgagttctgatttggtcaagaagcttggcttgactacacgtacacatccacacccttaccatattcagtggttaaacgattccggaagagcaaatgtaacacaagtttgtagggtttcgttttccattggctcatatgcagattctgttgattgtgatgtggttcttatgcaagcttgttcacttttgctgggtcgtccttgggaacatgacaatgatgctacacaccatggtaggagtaataaatacacttttgtgcataatgggaagaaaattactttgctacctttgacccctgctgaaattgtagaagctgataaagagcgagctgctagtttgaaacttgatgaatctgaaaatcagcaagtggctaaatctgtttttccacctaaaaaagataagctttcacctagttctaaggttgagggaattaagttgaagggtggtgttatgcttgcaacgaaatgtgacattgctgaaatttcagatgatgatatgtgctatttcttgatatgcaaacaagccttggtttctttagatgatattgctagttcgatacctcctgttgttaataaccttttgcaggagtatgaggatgtctttccagctgagatacccccaggattgccacccatgagagggatagagcatcaaattgatttgattccaggagcatcattgccaaaccgtgctgccaagtctttggatgaacacatggatcatttacgtgctatttttaatgctctacgcgatgcacgtttgtttgctaaccttgaaaagtgcatcttttgcacggaacgagtctcttttcttggatatgttgttactccacagggaattgaggtggatgagtcaaaaattgaagccataaagagttggccggttccccaaaccatcacacaggtgaggagctttcttggtcttgcaggattctatcgccgtttcgtcaaagatttcagtaccttttctgcaccattgaacgagttgacgaagaaaggggtggtcttccattggggaaagacacaggagaagtcgtttgacactttgaaggacaagcttacacacgcaccattgctacaacttccaaactttggtaagacttttgagttagaatgtgatgctagtggagttggcattggaggtgtgttgatgcaagatggtaagcctgttgcatactttagcgagaagttgcatggtcctgttttgaattattccacgtatgataaggaattgtatgctcttgaagcgcatggaggagggttgatgggacattttggagctaagaagacggaagatgttttggccatgcatttcttttggccaaggatgagaaaggatgttgagaggttcgtggcacgttgcaccacttgtcagaaagctaagtctcgtttgaatccacatggtttgtatatgcctcttcctgtaccttctattccttgggcagatatttctatggactttgttttgagattgcctagaattaagagggggagggatagcatttttgtggtggtggatcgtttttctaaggtggcacatttcataccatgtcataaaagtgatgatgctgttcatattgctgatctgtttttccatgagattgttcgcttgcatggtatgccttctactattgtttcagatcgtgatgcaaaattcttaagtcatttctggcgcacgctatggaacaagttgggtacaaagctattgttttctacaacatgtcacccacaaatagatggacaaacggaggtagtcaaccacactttgggtaccatgttgagggctattttaaagaaaaatttgaagatgtgggaagaatgtttgcctcatgtggagtttgcatacaatcgggcaacacattctactaccaagatgactgaaaagtatagaattgctggtagtaaaggtaggcaagaggttaagcttgaaccgggtgatttagtttggttgcacttgagaaaggataggtttccagaattgagaaagtctaagttgatgcctcgtgctgatggtccttttaaaattgttgagaagattaatgataatgcatataaacttgagttgcctcccgagtttggggttagtcccacgtttaacatttcagatttgaagccatacttgggagaagaggatgagcttgagtcgaggatgacttcaattcaagagggggaggatgatgcggacatcactaactcggatacacacaacaatcctccaacggtcattcaaggaccgataacaagagctcgtgcgcgacaattaaatttagaggaacaatggggggggacaaggagacacttggagaaggacttagagccatggaggatcatcgaggacgtccaagtcaaggtggaggcccaaaccaagtcgacgtcgggtgcaattcggagtccaggaccagtctgcactaaaacgggcgcccaggtcgcatacgcactcagattggggcgttctttatatgtatggaaagctaagaagataacctttccaatggttttggtcccttgtccaaattctttccgagtcaatgggaattga

SEQ ID NO: 80167 - DNA, 2859 bp, Oryza sativa
  Clone ID: PAT_MRT4530_79818C.1
atgccgatggattggacttgccgacgagcaactggtggcaaaggtgatgagaggctacttgtgtatgaacacatggtaaatggttctcttgatgcccatctatttcagagcaaggctactattctgaattggaccaccaggtataacctagccataggagttgctagaggattgtcctacttgcatcatagctgcaacgaatgcatcatacattgtgatattaagccagaaaacatacttctggatgtatcgtttgctcctaaaattgcagactttgggatggcagcatttgtaggaagaaattttagccgagttttgactacattcagaggcacagtaggatatcttgctccagagtggattagtggagttgctattacaccaaaagttgatgtttatagctttggttttcaacagtattccatattagttgctcaatcatttgcttcattccaaacaggaacaatagatgggacaaggagacatttggagaaggacttagagccatggaggatcaacgaggacgtccaagtcaaggtggaggcccaaaccaagtcgaactcaagtgcaattcgatgtccaggaccagtctgcactaaaacgggcgcccaggtcgcatacgtgctcggattagggcgttctttatatggatggaaagctaagaagataaactttccaattgtttttgtcccacgtccaaattatttcagtgtcaacagaaatcgagcgaacaatttgacgtccagaatctgtcccagtgctgcgtcaacaatctgtcggaagatcgggaaccctagtacacatccacatccttaccatattcagtggttaaacgattccggaagagcaaaggtagcacagattttgttgattgtgatgtggttcctatgcaagattgttcacttttgttgggtcgtccttgggaacatgataatgatgctacacaccatgcaagttgctaaatctgtttttccacctaaaaaggataagctttcacctagctctaaggttgagggaattaagttgaagggtggtgttatgcttgcaacaaaatgtaacattgctgaaatttcagatgatgatatttgctattcatggatatgcaaagaagctttggtttctctagatgatattgctagttcgatacctcctgctgttgctaaccttttgcaggagttagacgacatgcttgatgagttgtgtggttctataattttcacaaagattgacttgcgtagtggctatcaccaaattagaatgaaacttggagatgaatggaaaacggctttcaaaactaaatttggattctatgagtgcaagtctttggatgaacacatagatcatttacatgctgtttttaatgctttacgtgatgcacgtttgtttgctaaccttgaaaagtgcatcttttgcacggaacgagtttcttttcttggatatgttgttactccacagggaattgaggtggatgagacgaaaattgaagccataaagagttggccggttccccaaaccatcacacaggaaacgcatggaggaggattgataggacattttggagctaagaagacggaagatgttttggccttgcatttcttttggctaaggatgagaaaagatgttgagaggactaagagggggagggatagcatttttgttgtggtcaaaagtttttctaagatggcgcatttcataccatgtcataaaagtgatgatgctattcatattactgatctgtttttccatgagattgttcgcttacatggtatgccttctactattatttcagatcgtgatgcaaaattcttaagtcatttttggcgcacactatggaagcagttgggtacaaagctattgctttctacaacatgtcacccacaaacagatggacaaacggaggtagtcaaccatactttgggtaccatgttgagagctattttgaagaaaaatttaaagatgtgggaagaatgtttgcctcatgtggagtttgcatacaatcaggaaacacattctactaccaaggtaagtccttttcagatagtgtatggtttcaaccctcgtgctcctattgatatcttgcctttacctactagtgagagggttcataatgattctcaagcacgtgttgaatttattttgaaaatgcatgagacaactaagcacaacattgaaaagatgactgaaaagtatagaattgctggtagtaaaggtaggcaagaagttaaacttgaaccgggtgatttattttggttgcacttgagaaaggatagatttccagaattgagaaagtctaagttgacgcctcgcgctgatggtccttttaaaattgctgagaatattaatgataatgcgtataaacttgagttgcctcccgagtttggggttagtcccacgtttaatatttcagatttgaagccatacttgggagaagaagatgagcttgagtcgaggacgacttcaattcaagagggggaggatgatgcggacttcactccttcgaatacacacgacaatcctccaatagtcattcaaggaccgataacaagagctcgcgcgcaacaattgactttagaggtgagctcgttcctatgttcttctttgtacgaattcgagaatagattgctacctaatgtttatattgtgattaggaacaatggaggggacaaggaaacatttggagaaggacttacagccatggaggatcatcgaggacgtccatgtcaaggtggaggcccaaaccaagtcgaactcggtgcaattcagagtacaggaccagtctgcactaaaacgggcacccaggtcgcatacgtgctcggattagggcattctttatatggatggaaagctaagaagatataa

SEQ ID NO: 80168 - DNA, 138 bp, Oryza sativa
  Clone ID: PAT_MRT4530_79819C.1
atgtcatcctttgcgctccactacaatgtacaagaaatagatgaggcagtgaagttggataaccccgttgctagtcagccaacaacattcgatcttggtttcgacagtgagcttcatggtgctgttcgtgatatttga

SEQ ID NO: 80169 - DNA, 4266 bp, Oryza sativa
  Clone ID: PAT_MRT4530_7981C.1
tcatacatagaatttacgtagttggtcaatgttccacgaatttgctagttcgcgaccgtcgccgtcggcgattttgaatgcgcctggccgcaagacttgtgtgatcgtgttgggtccttcccattttggtgagagtttgtttcgccccgcttgagtttgaactcgcctgaggacatagtcgccgatcgaaagtatgcgtgctcggatgcgcttctcatgataacggcggagggcttgttgatagctagctgctcggacggcaactcgctcacgatgctcctcgagaaggtttacatcgatatctcgctgattctcctggttctcgtcggaatgcttctgtactcgtgtgctttgatgccgtaactcgtcggggagcatggcttcagaaccgtacacgaggaagaagggtgtttccttattggacgttgtcggtgtagtgcgcacggcccatagtactgatgggagttcttcaacccattttttgtcgtgtgacatgagtctgtcgtagacgcgggttttaatcccttgtagtactatgccgttcgccctttcggcttgtccattgctttgagggtgagagaccgaggcgaaacatattttgactcccaagccgatgcagtaatcctggaaatcggcgctgatgaattgagagccgttgtcggttatgatgcggtgcggtagtccgtatctgcaaaatatccctctgacgaacttgatggcgttatcggccttgatttccccggtgggtactgcttcgatccacttggtgaacttgttgatcgccacaaataggaatctgtagccgccctgtcctcgtgggaatggaccaagtatgtctagcccccagcatgagaacggccaagtcagagggatagtctggagcgcttgtgcaggcagctttttgtgcttgctgtggaattgacaggcttcacatcgctggaccatgtcgcatgcatctttaagggctgttggccagaagaacccttgtcgaaaggctttgccgaccaatgttcgaccggcggcatgtgacccgcatatgccttcatgtatgtcgaggaggagttgtttgccgtcgtcggtagagacgcatttgagaaatatcccatttggcgagtaaatctttgctttgcgggttattttctcagcctctgtatcgtcttcgggtaactcctcgctgccgatgaatttgattaatgggctgcgccagtcgtctgtagtttcgatgtcagcaacttcgcattctgcctcagtgacctctgagctgatgtcgggggtgctcgggccaacttcgccgctaacttctttcaccgatggctttgtcagaacgtcgagaaaagtgccgggctcgagcggctctcgtctggatgcgcgtcgtgctaggtcatctggctcgacgttgtccttgcggtagacgtgccgaacctcgatcccatcgaacctcctctctagctttctgacttctgagagatacttggataactcggggttggagcatttgtagtctttgtgcacctggtttgcgactagctcagagtcccctttgatgattagtcgcttggccccaagtgcggctgcagctcgtatcccggcgagtagtccttcgtattctgcagtgttattggttgccctgaagttgaggtggatcgcgtgtttgaattgatctccagaaggagatgttaagataaatcctgcccctgctccttggctgttgagtgcgccatcgaacgccattgtccatgtctcattttcgccttggctgtctgacttgttatctggtatggtccaatcggccacgaagtcggcaagcacatgagatttgatggctgtttgcggcacaaagtggatatcaaattggcttagctcgactacccattttgcgatgcggccgacaacgtctttgtttctcacaacttcgccgagtgggaaggaggagacaactgtgactctgtgggcttgaaagtagtggcgtagcttccttgatgtcatgattactgcgtagagcagtttttgaatgtaataaactggtcgctgcactttctctctctcaacgacaatgacggtgctaacggaatatggcgtagcggcaatataaaggaataattcttcattaggttggggagcaacgagtacagggggttttgataggtagcgcttgagtgcaataaatgcctcctcagcttcctgtgtccatacgaatttgtcttgtttcttcagcaaggcgaagaaaggctgtcctcgttctcccatcctggcgacgaatctgcttaatgctgccatacatccggttagcttctgtacctccttaagtcttgtgggcgacttcatgttctcaattgctttgatcttctcgggattcgcctctattcctctgccagaaacgaggaatccgagtaacttgcccgacggtactccgaacgtgcacttctctgggttgagcatgaggcgatatcgtcgggggttgtcgaacgtttcccgcaggtcatcgatcaatgagtcgcttgtcttggttttgacaacgatatcgtcgacataagcctcgacattgttgccaagctggttgctaagtgcgccctggaccgtgcgctggaaggtattcccggcggttatcagtccgaaaggcatcttaacgtaacaaaataccccgaatggcgtgatgaacactgttttctcctcgtcctctttcaccatactgatttggtggtaaccggagtaagcgtcgaggaagcttaaaagctcgcatccggctgttgaatccaccaatttcttgggtggctcaaacgtggcgggtggggtgggcatttgctcgaccatgtcgaggctccgcttgtcgcactgcaccgccagttttgcgttcccttgaatagtgattgttcccttcggtcccggtatcttgagcacttgatatgcgtagtgggatgcggccatgaacttcgcaagtgcagttctcccgatgatggcgctgtaagtctgcggaactcccattgcatccagagtgctggcaaagaggaggttgatcgagctgcctccgttgatgagaacccttgctaccttgacgttccgaatggtgggtttgaccacgatcggataccgtcctgggataacagaggtctttgggtggtcttctgccgagaactctattctctgctcagaccacttcatcttgggtgcagccccccgcttgcctttttcaaacgccatgtgcttctcgagcgactttttaaaaacaaggcaatcctccagagaatgtctgtccgttttgtgtatagggcaccatgatttttttgtatcgctgccttgtgggtctgggcgcttgggagggttcgcgtactctgctgcgaggacttccgcttgagcttttctcttcccgtttttgtgatttttcttcttgcttgactcagatgcgtctgcggttggtttcttctctcccccggtcttcggcttgtcgttcttgcgtcttagcgcgtcatccacgtgggcgcaccgctcaacgatctcgaataacctttgagtagttgtgatgcgtcttgttgccaacacctgggtagtgtagtgatctctgacaccggacttgaaggcgcaaattacagaagcatcggtaatctcgggaattgtgtttctgcactcgttgaagcgtcgaacgtatcccctcaatgattcccccgagttatgtgttaacgcgtgtaagtcgtcttcgatcgcgtggcgcttgtttgttccttggaaattggcgacgaactgttgccataggtctgaccacgaagagattgagtaggaggggagatgcatcagccacgaacgtgcagaacccttccacgcggttggtaaatagttcgccaacgcattgtcatctgctccggcagcataaagcactgtcgagtagacttgaaggaattcttctgggtcggtgctcccatcatacttttcaatagctccgggtcggaatctctcaggccatcggacatcacgtagggaacgacttaaagccctacacccagcactgggagcggtgggttgtcggtggtcgcgtgaccttctggatgtctgtcgtcgccgccgtcgacccgatcttctccggcgctttttcctcgtcgccggcgccgtccgttgcttctccgccgcttctttggtcaccggtgagttcgccgcgtcgcgctctacgtcctggtgctcttcgtttgcgccgccgcgccgtcgttcaccggcgagcatgcgttgccgagccaccgccggtgctgacgtcatcgctgacgtcgttgctgacgtcat

SEQ ID NO: 80170 - DNA, 798 bp, Oryza sativa
  Clone ID: PAT_MRT4530_79820C.1
gaagcgcatggaggagggttgatgggacattttggagctaagaagacggaagatgttttggccttgcatttcttttggccgaggatgagaaaggatgttgagagtgatgatgctgttcatattgctgatctgtttttccatgagattgttcgcttgcatggtatgccttctactattgtttcagatcgtgatgcaaaattcttaagtcatttttggcacatgctatggaacaagttgggtacaaagctgttgttttctacaacatgtcacgcacaaacagatggccaaacagaggtagtcaaccgtactttgggtaccacgttaagggatattttgaagaaaaatttgaagatgtgggaagaatgtttgcctcatgtggagtttgcatacaatcgggcaacacattctactaccaaggtaagtccttttcagatagtgtatggtttcaaccctcgtgctcctattgatattttacctttacctactagtgagagggttcataatgatgctaaggcacgcgctgaatttattttgaaaatgcatgagtcaaccaaactcaacattgaaaagatgactgaaaagtatagaattgttggtagtaaaggaacaatggaggggacaagaagacacttggagaaggacttagagccatggaggatcatcgaggacgtccaagtcaaggtggaggcccaaaccaattcgacctcgggtgcaattcggagtccaggaccaatctgcactaaaacaggcgcccaggttgcatacatgctcggcttggggcgttctttatatggatag

SEQ ID NO: 80171 - DNA, 3263 bp, Oryza sativa
  Clone ID: PAT_MRT4530_79821C.1
atagaagcttgatatgcttcccaccattcattggctggtccttctacaaaaccatctccaccatgataagcagagtcaggtaaaaattcttcgcaggtacccgccaagagtgcctcatctgttgcctcgacgggacgcattcagtgccaccgttgccaagggtttgggcatgtgtagaaagattgccctagtcaacaggcatatgttgctacagaagatggctacatcaccacctccaacgtggaagaggaagaggaagaaggagaagttgaggatgaggacggcgaagtctttggtcgtgatgacacaacggcctataggaccatcattgtaaagcgggtgctcagcacgcaggtacagcagcctgagaggttgcaacgccataatttgttccagattttcttcatcatcaacaaccgtcgtgcacgtgtgatcattgatggaggtagctgcaacaacttggtgagttctgatttggtcaagaagcttggcttgaccgcacgtacacatccacatccttaccatattcagtggttaaacgtttccggaagagcaaaggtaacacaggtttgcagggtttcgttttctattggctcatatgcatattctgttgattgtgatgtggttccaatgcaagcttgttcacttttgttgagtcgtccttgggaacatgataattatgctacacacaatggtaggagtaataaatacacttttgtgcataatgaaaagaaaattacttcgctacctttgacccctgctgaaattgtagaagctgataaagagcgagttgctagtttgaaacttgatgaatctgaaaatcagcaagttgttaaatctgtttttccacctaaaacggataagctttcacctagctctaaggttgagggaattaagttgaagggtggtgttatgcttgcaacaaaatgtgacattgctgaaatttcagatgatgatatttgctattccttgatatgcaaacaagccttggtatctctagatgatattggtagttcgatacctcctgttgttactaaccttttgcaggagtatgaggatgtttttccagctgagatacccccgggattgccacctatgagagggatagagcgtcaaattgatttgattccaggagcatcattgccaaaccgtgctgcttatcgaaccaacccaaaggagactaaggaaattcagcggcaagttcaagatcttttggaccgcgggtatgtacgtcaaagccttagtccttgtgcaattcctgtaattttggttcctaggaaagatggttcttggcgaatgtgtgttgattgtagagccattaataatattattattcgatatcgtcatcctatttgaatgtgtgttgaattattccacgtatgataaggaattgtatgctcttgtacgttctttagagacgtggcgtcattatttgtggcctaaagaatttgttattcactccgatcatgaatcgcttaaatatcttcgctcacaaaataatttcaatcgtagacatgctaaatgggttgaatttattgaatcttttccttatgttatcaaacataagaaagggaaagataatgtgattgcagatgctttgtctaggcgctatactttcttgtcccaacttgattgtcagatttttggacttgaatcaattaaagaacaatatgtgcttgatcctgattttaatgaagtgatgttgaattgcaaagagggacgtacttggaacaaatttgtgatcaatggtggatttgtttatagagctaaccatctatgcattccagttggttccattcgtctttcgttgatacaggaagcgcatggaggagggttgatgggacattttggagctaagaagacgaaagatgttttggctttgcatttcttttggccaaggatgagaaaagatgttgagaggttcgtggcatgttgcaccacttgtcagaaagctaagtctcatttgaatccacatggtttgtatatgcctcttcctgtaccttctattccttaggcagatatttctatggactttgttttgggaatgcctagaactaagagggggagggatagcacttttgttgtggtagaccgtttttctaagatggcacatttcataccatgccataaaagtgatgatgttgttcatattgctgatctgtttttccatgagattgttcgcttacatggtatggcttctactattgttttagatcgtgatgcaaaattcttaagtcattttttccgcacaccatggaacaagttgggtacaaagctattgttttctacaacatgtcacccacaaacagatggacaaacagaggtagtcaaccgtactttgggtaccatgttgagggctattttgaagaaaaaattgaagatgtcggaagaatgtttgcctcatgtggagtttgcgtacaatcgggcaacacgttctactaccaaggtaagtccttttcagatagtgtatggtttcaaccctcgtgctcctattgatatcttgcctttacctactagtgagagggttcataatgatgcaaaggcacgtgctgaatttattttgaaaatgcatgagacaaccaagcacacaattgaaaagatgactgaaaagcatagaattgctggtagtaaagataggcaagaagttaagcttgaaccgagtgatttagtttggttgcatttgagaaaggatagatttccagaattgagaaagtctaagttgatgcctcatgctgatggtcctttcaaaattattgagaagattaatgataatgcatataaacttgagttgcctcccgagtttggggttagtcccacgtttaacatttcagatttgaagccatacttgggagaagaggatgagcttgagtccaagacgacttcaattcaagagggggaggatgatgcggacatcactacctcagatacacacaacaatcctccaacggtcattcaagtaccgataacaagagctcatgcgcgataattgaatttagagaaacaaccttgttcttgcacgatgcatctcttgggaaggagaacctgcaagccatggacaagcttgagacaccaactctagaggatgaaagtccacaaatgagcatgaaagattctctttcaaagttcctcagtgttcatgctcacataaagaatcctcatagttccgtccgattagtttcacttccttgtgcaagaaccataaccgccttagggtcctcatctctatcatgtttagaaggttggttgtggatgcttttatttat

SEQ ID NO: 80172 - DNA, 4199 bp, Oryza sativa
  Clone ID: PAT_MRT4530_79822C.1
atgccgttcttctccggcggcggatgcgacctctcgggcacgacagtcccgacgctaccctagcccaagggcctccaccacttccgctacaggggcatcatctcccccgccgtctcccgcaggcgcgggacccacaccgccgcaacgtcgacctccttctcctttcgacgccgtgtactctacatcgcagccgcggcctacgccgttgttatcctcgtcgccttcttccccctcgtcctcgttttctccatccccgtggtgcctgtttgagaagtcaaatttcccctgagtggcagtatgttagtggcgaaaaggtttctactggccagcaccgtctttattggagagcttctgttcctgctcttggtttggagacctactatgttgctactgggtacgacgattgtgcaaaggcgactccagctgtggtgaaggcattcacaactgctgggcaatttccttgccctgaaccatatgtttgttcaaaactggaaggaaaaacagtggagatgaagaactcttaccactctctctcttttgatgtaaggcatggcctcctccagacagtaactcgcaacaagcatgctgaacacaccgatgttggtgaactaattggcatgtaccgcagcatttttatgggaggagatgtcatacctggagaggtggtggcgcgacgcccctcggaagaagcaggaggcgttcaccaagcttgtgcgtgatggacagctgaggctcattcccttccaaagacacagtggcataagtcacccatctcacatagcacacggatttatagctgtggagactctatacaggatatgctgattgagaaggaataccatgttgaacttgttggccatgtatttaatgacaaggagttgattgtcagattcaagacagatattgacaaccaaggagtcttctattctgatctaaatggctttcagatgagtaggaggcagacatatgataagatccctttgcagggcaattactacccaatgtcatcacttgcatttttacaggattcgctgggcaatcggttttcagtacactccaagcagtcactaggggcagcaagcttaaaaaatggatggctggagattatgttggatcgtagactaactcaggacgatggtcgtggtctgggccagggagtggtggacaaccggcctatgaatgtaatcttccacctcctcagggagtcaaatgttactgccttgcctaaaactcacagcttgctaactctacagtatgttagtacagaggaagcagaagcacagttccgcaattatgaaaagctttttgattacataaactctaatccccatcttaaggctgaagtaaaatttggtaccctggaggattacttctccacgctgagagatgaagctgaaaggataaactatacacgccctggtgaactggtttcttctgagctgccaggttttccaacactttcaggtgatttctttacatatgctgatagaaatcaggattactggagtggttactatgtatcaaggccgtacttcaaagcagttgaccgagtactagaacagacactacgtgcctcagagattctgagttcttttgttctaggatactgtcagaagcttcaatgtgtaaaactccccatcagcttttctcacaagctaacagcagctaggaggaacctggcactcttccagcatcatgatggtgtaactggcacagctaaggatcatgttgtagtggactatgggactcgaatgcacacttctttgcaagacttgcagctctttatgtccagggcggttgaagtgcttttaggtgatatccatgacagatctgatcctaccttactatcgcattttgagccagtgcaggaacggtcaaaatatgatgttcaacctgtatacaaggttctcaaccctcatggagggaaggcacattctgttgtcctttttaacccattagagcaaacaagggatgagattgttatggttgttgtaagtaatcctgatgtatctgttctcaattcaaatggttcctgtttgatttctcaaaggtgaccgtttgacaaattggaaatttggggcacattcaagcaagcaaattgtagtaatttccatttctttttgctctagtgcagactagctgtgctattacagcttctgtatgctttgctactgtagtcatacagcgtgatatgccggctagtgctatcataataggaacctgaacctatatatgaggaaatttatcgtgtatctcctttgggtatctgacttttgtagtgtgatcacagagcttgctgtctctctttttaagtaagtctagacagtcgccactcactatgagagttcaaagatggggaacacaccgatgttggtgaagaaatggcatgggaagcacaatccattgttgaggaagggggatatttcatccttagtgaagggccattggttcaagaggctcattcccttccaaagacacagtggcataagtcacccatctcacatagcacacggatttatagctgtggagactctatacaggatatgctgattgagaaggaataccatgttgaacttgttggccatgtatttaatgacaaggagttgattgtcagattcaagacagatattgacaaccaaggagtcttctattctgatctaaatggctttcagatgagtaggaggcagacatatgataagatccctttgcagggcaattactacccaatgccatcacttgcatttttacaggattcgctgggcaatcggttttcagtacactccaagcagtcactaggggcagcaagcttaaaaaatggatggctggagattatgttggatcgtagactaactcaggacgatggtcgtggtctgggccagggagtggtggacaaccggcctatgaatgtaatcttccacctcctcagggagtcaaatgtttctgccttgcctaaaactcacagcttgctaactctacaaccatctcttctctcccaccgtgtgggtgcacacctgaactacccaatgcatgcttttgtgagcaaaaaagctcaagaaaaatcgttcaagcttgctcaacaaacatttgctccattaacttctcctttgccctgtgatgtacatgttgtgaacttgaaggcccctcagcctctaaaatttcaccatgctgaagcagtcgaagcaagatttgcccttctgttgcagcgaagaggctgggatgcatcattctgcagaaggggcggattaaactgtacaactattggagaagagcctgtgaatttgttctacatgttcaaagatctggccgttctggatgtgaaggcaacttctctgaatctcttacatgatgaccctgaaatgctagggtaccttgagcaaattggtgatgtagctcaggagggaaacgttcttatctcaccaatggacattcaggcatacaagctggacctacagccaccatcatcacaggaagagtagtatgtcaggacagtatgccggattccgatctgtgctactaacaggagacgatggctttatccgtaataagtgatagttgcatcatgattctgctggaacatctctcctactcaaatctctgctcgctttgttgacgtacttcgtatcaacataaggtgatcttcaaaatgctctttagtcctaaatatatagaggtgttgggtgacctttgaagtctggatgtcaccctctgaattcagcccggctgtttcctggcaaccttttgatatacgcaggtgcatatacttccttttttctcggtgattgtttgacaaattggaaatttggggcacattcaagcaagcaaattgtagtaatttccatttctttttgctctagtgcagactacctgtgctatcacagcttctgtatgctttgctactgtagtcatacagcgtgatatgccggctagtgctatcataataggaccctgaacctatatatgagcaaatttttggtgtatctccttttggtatctgacttttgtagtgtgatcacagagcttgctggccaagacctgaaatagtctagccagttgattcctgctttgagagttttcacatgcacaaattatgcctgtaaacattttctgaagatctctcgaaggcaggccttggttatttttggggcttatgtatcctcgttgctccccaccacgaatgaaaaaaaaaaaacagctctcaa

SEQ ID NO: 80173 - DNA, 192 bp, Oryza sativa
  Clone ID: PAT_MRT4530_79823C.1
cgagtcgttctggaagaactgttctcggtggatggagccatggaggccagctagctgcagacgcagctggctcttccgttcaccgaggacgagggacagaacagatattggggactcctgtagcggaaactctaaatgcgcgatcgatcgcggctgcgatcggatagcgatcaccacccctcccccctccat

SEQ ID NO: 80174 - DNA, 510 bp, Oryza sativa
  unsure (1)..(510): unsure at all n locations
  Clone ID: PAT_MRT4530_79824C.1
aggtcgccgancgncccctgccccnantttcggttgcaccacgccgcgcgccgtcaaactccgccgttccgccacttcgtcgtaagccctcgcgcctgtagtattgcctggacacctagaagccagcggccccctcgatttggggtgtgcgccgccgtaaccgtgccgactccggccgccaccgcgccatggccgagctcatcatggagggacctcgttccaatacaacctaggctagatttttgcttctatatgctccatgtggaccctagatggttgaatcgtcgttggtttttttnncnttggtcctcattgtgccgccgccgattttgggatctcggcgccgtcgaccgccgtcgcgccgcgcgccggangatcgccgcgcttcgccgccgccggnggggggtctctggtgatgcgccaccgctcgccccancgtgcgccnanccgttccggctcgggccgtcncatcatcanncgccgctcctctgctccgtcncgagcgggaag

SEQ ID NO: 80175 - DNA, 1593 bp, Oryza sativa
  Clone ID: PAT_MRT4530_79825C.1
atggtggcactgggtcccgaaggtcgggtcggcgctagggatggcgacgttggcgaggcgtggcgctgtggcggcactgggaagggtggtgatgcggcgctgggagatgcgatgctgggaaaaaaggggccctgggccatgctagggactgatagatgcattacgtcttacctcagcattttctttagaactttcatcattgtttacaaggtctcaaacggtgacggagcctttgttctcaccaggtcaagaaaaccagaaagtgaaatatgtcttgactttttgatggagggggtagaactgaagtcacccctgtttggagaaaagagaagggtgtctcatgaggtaatggcattaatatatgaggatcacattacggtagagttagctttaaaagttttcatcccttttgggagagaagagaaggtcgactctagaggatccccggcagagccagagatgatcacccaccacgaccacccgcagcacaagcttcgcctggtgaccacgacttgtgacatgccgttccgctgtgacggctgcttggagccaggatacgctcccagataccgctgcgacgcctgcaactttgacatgcacacgttctgctccaacctctgccggccattctacagcaccctatgtacaaaggccgcatattcaggttttgtcccaagcctctgcctccctcgggccgcagggtctgtgacgcctgcggcgatcccgtgcgcgggttcatctaccactgcttcggcgccaacctcgacctccacccgtgctgcgccagcctgcacgggccgatcatcctcgacgggcttgccttcgacatcggggcaccaaggaagtgctgcctttgcatgcaggaaaagggcccagaacgcgatctgtggtgctatcactccaacatcaatggcgagggtgatcttaatgcctcgagagaatgttgccgatgatgaatcaggagtcaacttgggagaagatgacgtccgaatgatcaggatatcatacggcgtgcttaggctaaacatcaatgcatgtggatgcggagtcgaatttagaaggagtctaaatttggtacaattgaagtttgtaaagtttgtctatcactgctccgtgcgcggcttcgtctaccactgctccggcaccaacctgaacctccacccgtgctgcgcgagcctgcaggggcccatcacccttgacggccacgacttcgatgtccgggcacccaggaagtgcagcctgtgcaagaaggagaaagggccggaccgtgagctgtggtgctaccacaccaacatcaacggcgagggcgtgtacctgcacgtggcctgcgtcaagcacctcgccgggaagagatggcaggcgggccgcgagaagaaacacggaggccagatcatgctggcgagcaaggagctcatgatgaaggagggccccctcaagagcatttcgtcggaacaagaccgcattgttgtcgggggtgtcgtgcgcatcatcatatcggtgattttcggagacccgactgccaacaagggagacaacgctagggtggctttatccctccaggggcttgcagatttatttagcattcagagctaa

SEQ ID NO: 80176 - DNA, 206 bp, Oryza sativa
  unsure (1)..(206): unsure at all n locations
  Clone ID: PAT_MRT4530_79826C.1
ggcgnnggcggcgnnggngnggatcntcggagagaaaaccgatggctttctcggtcttngtttncttattctcncaatttctgtccttttcntctcctcctcctccngctgccaattttggngtcaaaaattgtgagaaatcatatctgtcccnatctgtaaatgtcaactcttccatgcatnattcccngtaanaaaaaaaaaaa

SEQ ID NO: 80177 - DNA, 303 bp, Oryza sativa
  Clone ID: PAT_MRT4530_79827C.1
atggctagcaccaccgaccaatctactgctatggggccagtgccattgccgtacgttcaaccacgcctcgccgccggcaacgtgccggcgaggacgtgggtgcccgggatcatcgccatccagcgccgcggcgaagtcgtcctcgcgagcccgcccaagtgcggcaccacgtggctcaaggccctcgccttcgccaccatggcgcggcgcgcgcacccacgccggccgccgccgacggtgtgcagcatccgctcctccgcctcaacccgcacgaccggcgaccgtgtcctgttcatggagtag

SEQ ID NO: 80178 - DNA, 481 bp, Oryza sativa
  Clone ID: PAT_MRT4530_79828C.1
ctagctatcattcctccaagtgtcaagtacttacgaaacgaatatgccggcattggtgaagatcgggcagtggggtggatatggagggtcagctcaggacatcactgtgacacccatcaaactcaccggcatgacaattcgtagcggaaatgcgatcgattccataagcttctcctacagtggcattgacggacaggagcatgtcgtgggcccatggggtggtaacggtggacacgctaccacgatcatgttaggccctacggagcatgtgatagaagtttctggaacccatggcaagtttggacctgtagctgatgttgtgacgtaccttaagattgtcaccgacattacaacatatgagttcggtgtgcgtagtggaacagacttcagtgtcccgctgcagggcggtgcccatgttgttggtttctttggacgctttggagtgctcatggatgcgattggcatctacacccgcccatga

SEQ ID NO: 80179 - DNA, 1094 bp, Oryza sativa
  Clone ID: PAT_MRT4530_79829C.1
ggccaacccggtgctctgataccattgttggatatgctttggatcggtttggcacaaagtgaaactacaaaaaagtggaaagaaaaaacgaaaaaaaatcggtaaaaaaacgaaaagaaaagctgaaagcacatgtagtgccccgcgcgatcgagttgttcagtttgtcagagctcgcaaaggcgaccatggacttcgctcttgacagagagatcggtgaaggcagcttcagcaatgtgtacaggggaatgcttcctgacgggcgggaggtggccatcgaacgcaaaaaggtggactctagtgctcgggggatggaggcatttcgtgcagaggttacaatccagtccctccttcaccacaagcatattatccgcctggttggctgctgcaacatggtggagaaacggctgctcgtcttcgagtatatggagaacggctcgcttttcgaccaccttcatggtccatccacatcatccttctcaccggtgacggcgtcctggaagacgcgcattgagatactgctgggcgtgtcacgcgccattgagtacctgcactcatacgccacgccggcggttatccactgtgacatcaaatcgtccaacatcctgcttgactccagctggtcaccgcgcttgtcgagctttgacatagcggttagctgcgacgaggcggagtgtgttgacatttgcgtccgtggcacgttgggatatcttgacccggagtttgtacgcacaagaactctgaagccagcgagcgacgtctataattttggcgttgtgatgctggaagtattgtcaggcaggagggcaatttgccgctggaaggaggatcatggcgatggcgatggcgatagccccatggattctttggttaaccacgcgctgccactcatcgatgcggggcaggtgctccatctgctggataggcggccggcggaggagccaacgccaaggcagctcgaggcggcggacctggtggcacgcacggcagcgcactgcctgcaagagaatggggacgaccggccggccatgtcggacgtcgtgaccagactccaggcggcgctggagctcgtccgttgcgatgatgagtagcat

SEQ ID NO: 80180 - DNA, 436 bp, Oryza sativa
  Clone ID: PAT_MRT4530_7982C.1
ccgaagagggaggaatcggccgcggagatctcggccgccattgatgacgccggcgaggattgcgggcgcgatttcggacgaatccgagggagagagagagggaaaaacgggggaaacgggagagggaatcacggggagtgatttccccctctttattgcgcgcggggacggcgggatgcggcggattcggcggcggcggcggcgctagggcacgggcgggcggcgggcgcggcgcgaggagggagatgacaggtgggtcccacccgtcagcgagagtggcgggcgggcccgcctgtcagcggcgcgcgcgcgcgggggaggccgatgggccgcggggagaggagagagggggagggaattgggccgagccggcccaagaaggaaaaggggggaaagaagacttcttttagggttttttctttttataaaaccattt

SEQ ID NO: 80181 - DNA, 489 bp, Oryza sativa
  Clone ID: PAT_MRT4530_79830C.1
ggccgcccttttttttttttttttttttttggctcccatgtaaaacggtataagcatctaatattggattccaccatcatttttcagcactattacactgcaaacgcaggacagagcttcacctgtgcaacaacagaaggggcctgccacctccttggctttgaccactacacacaggtatgcttgtttttgcatttgccccgcccatatttacatgtttctaacacaatatacaccacccacctgacctggatgcgcaatttcgcgcatgagcaacttcagttatcttctgaagacggccggtgatcggtgaggctgcttatttttggagtatatattctgtttagatagtctgccctccttatggtagacccattagcatgcacaacaggaatgcaagagcccattgacacgaatgctgccgcgtggcatatgatgagtgaggagcaggggccacagctggcgattgggcagtactatgtgcatgag

SEQ ID NO: 80182 - DNA, 1073 bp, Oryza sativa
  Clone ID: PAT_MRT4530_79831C.1
atgaccgcctacaaaaatataaatcaggatctggccggaggagggagggggaacgccggcagcggcggcaacagcgtggagcggcggcggcgcggggatcgagatccagctcacctgagcggcggtgtcgaggaggccacggttggcgaggatggagaggagtgtgtcgaccacggaggcagggctgaggacgagtgtcgtgtggtggaggaggtcggtgagggaggcagcaaggtggggaagagggcgggggcggccaaaggcaaggatgtggtgggagttagcgtagaggtggttgcggagaaggaggtgggcggcagcgcagatgtgcgcagtggacaggagtgggtgggattggaggtggtcggcaggaaggggggactgcttggagggagcggaggaggcggagacggtgggagattggggcggcggtggtggtgttgttggtggaggcctgcgaggacaacatcatccggctgcggatgcggctgcccaaggccgagatgaatagcgtaatagctaaagtttctaagatgatcaaatgtccatattatggatgtctcgtgcaggttcgtccacttgcagcgctcgtgtttaccctcgaggcaccacggacgggccgctggtgtgttgtgatgctgccgggcctcgtctcaggatgggaatggttaggatatggattgaacctaaaccgttttaagcgcacgcgactacggcgtcgacggccaggcacgagcgacggcgttggtagccacgcacagccatctgcaggaggcagcggccgccaaggcgtgggcggcagcgtcgatggccaggcacgggcgacggcatcgccagccacgcttagccatccgcgggcggcggcggctcgtctcgtcgccgtccagctaaccatcctcatcaccgtccagctcaccgttctcgtcgccgtcatccagctcgccgtccaccagcccggccgggccgttcgggacaattggactcgcgtgggcttccatcgcgtggcagactcgatacaacaaatcaagcccatgcccaccaattccatcggcaaatccgcaatgcgtaagaat

SEQ ID NO: 80183 - DNA, 299 bp, Oryza sativa
  Clone ID: PAT_MRT4530_79832C.1
atgaacttagattgggacagtacataggaattggttgatttccgggtggctagtactgtctcggtcgatataattgttcaccaaatacttatgtcaaacgaacgagtacgaccgcagcttctagaatggggacagacctagttatcatgttaattaacaatgtggtacctctgtgtagtggttctctttttaagtcctcgcgcaggaggcaaacttacaccgagcagggcgattgtaatatttaccgaggcgcaggtatccgatatacacgctatgtgggtatggagtatccataatct

SEQ ID NO: 80184 - DNA, 331 bp, Oryza sativa
  Clone ID: PAT_MRT4530_79833C.1
cacccaactcgctgctcgttttctccactaaatacatccacattctcgcatgacagtgcctgatcaacaaccggtttccagcttttacaagcccctttcttttaaactaccgaatacagaatctcaaagggggggggggggccccggcccccttggaatccttctgaagttcctgtttctttatcccacctgcccggcgcccccagtttctgctctgcactcgcttctcttcccctgtcccttttttcggatatcttgctcttttcttcgccctgtagtcctcggttgtgtgttcacttcatcatctctccttttttttgtccctcccttt

SEQ ID NO: 80185 - DNA, 1299 bp, Oryza sativa
  Clone ID: PAT_MRT4530_79834C.1
atggatccccacgccggcgcagttgccagcggcgaatccgccggcgacgaggacgacggcagcggcgagcacgagacccacccgacgtctcccgcgccctccgccaacagcaggccccggaagcgctcgcgcctgaccgccgccgcagacgaatccacgaccgtcgacgactgctccgccggcggcagcggcagcggcagcggcgacggcggcggcggcggcggcgagtcggtgggcgcctggccctacgacgagagcgcagccagggacgagctcgtgacgctcatcgtctcccaggatctgcccgtcgggatcgcgggcagtgcgtccttcgaggccatggtgctgcaagcgttctgcccccagttcgagcgaatcgacaatgctgtcaccatcagagacatcttggtgttccacgaagaccatgtggcgggattgaaggaggagttcaccggtggtgatctctccttcgcgttgtcatgtgaaatctgggggacttcgtatcataggatgagctatctctgcgtggccgctcactatgtcgatggggatcacattctgaacaagagggtgattagcttcaagcttatcgacggcgcgccgaccgcggaggcgatggcgcggcgcattcttgatgttgccatggaatacggcattgagaatcggattgtttctgttactcttggggatggtttagcagatgctgaaaccatggatgcattggctcctcttcttgggtggtacaccggcggatttgtgttcctgcagaggtgcattttcagcatcctcaatgacatcgttcgagctggtttgactgagatggctgagcctttggatgctattcgttccgcgattgcgtacgtttccagttcggaggcgaatttcgccgagtttgagaagtgctgcgtcgagcgaggccagaaggctaggaagctatggcctgattccaaagtaaggtgggattccacatatgacatgctcaaggaagtgcttccctacaaagaagttctgactgactttgtcaatggcagtatgcagcaagagtttctttccgagcacaattgcctcgtgctcagtatatttcacaagttcctcgcgaagttttataaggctgctaccaagttactgaaggagttggagctgaaggagttggagcttcaaaaggattcctcgccctcttcatcagtacaccaacgaaaagccaaaaacgagttcaacaagaaatacatcgagactccatgctcgttgcgtcttaattctcgtggacctgatcccaatattatcatggggatcctctag

SEQ ID NO: 80186 - DNA, 121 bp, Oryza sativa
  Clone ID: PAT_MRT4530_79835C.1
ggacccgtggggccccccgggaatacccgggagtgtcctgccggggccccagggttccccatatttacctatattaaagcttggagaaaccatgggcatacctgtttcctgggggaaattg

SEQ ID NO: 80187 - DNA, 2797 bp, Oryza sativa
  Clone ID: PAT_MRT4530_79836C.1
ccggattatttcttgttattgatcatcacaccataaacaagaagtttaggggacagttgtgcatagcttgtgtagtagatgggcgcaactggatgtatccagtagctgttggtgtgattgactcagagaccaatgagaactggttctggtttatggagagattgaaggaagcaataggtaccccagatggcttgacattcaacacagattgtggacaggtagtcatgaaagggaaaactcacaagaagttgtggactaggagcaagtacaggactgcatcaaagatggattatgtgactaacaatctggctgagtcattcaataactggtttaatggaaaaattctacctcacatcctgcagaggcttaaggatcagaagagagctacaacctggatattgaggtgataacagcccctccagaaggtgtggcagaactgtgcgctaaagctactaatggctctgggttcaggtttgtggtcagcctaaaggatagaacctgttcttgtaggggttggcagggctcagacatcccatgcaagcatgcaatagcatacattacatccattcctggagaaaagcttgagaaccatgtggatgagtacttctctgtcaacaaattcagcgctgcatatgagggttatattccttccataccagacaagaccatgtggcccaaggctacccatgacttcttcatgcgccctcccttgcttaagtccatagctggagtagaattggcgggcatttggtcgtcactctcactcccgcggccccgccgcaccacctcatccatcccacgaatcctatcgcctccgccttctccatccttcaccaccccgacgaccatggccatcacctcctcctcctcctcgccgcccgccgcccaccaccccttctctttccctcgccgcgccaagcaacacgggcgcccccgcctcgccgccgcctcctccaggtgggcgaaccgcagggccagctcctccatatgggtcaacccggccgcgccgccccgccctggccagacgctgcgccgcctcgtccagctcggggacctcgacgccgcgctccgcctcctcctcctccccggcgcgctgcccgcccccgccgccgccctcatctcctgcaacatactcatcaagaagctctgcgccacccgccgcctcgccgacgcggagcgcgtgctcgacgcgctcaaggcggccgccgccgcggacgccgtctcgcacaacaccctcgtcgcgggctactgccgcgacggccgcctcgccgacgcggagcgcgtgctcggcgcggccagggcgaccggcgcggccaacgtcgtcacctacaccgcgctcatcgacgggtactgccgctccggccgcctcgacgacgcgctccgcctcatcgcctccatgcccgtggcgcccgacacctacacctacaacaccgtgctcaagggcttgtgcatcgccaagaagtgggaggaggccgaggagctcatggcagagatgatcaggaaccgttgccctcccaacgaggtgacattcgccacgcagatccgttctttctgccagaacgggttgctcgaccgcgccgtccaactgctcgaccaaatgcctaggtacggatgcactcctgacgttgtcatttacagcacccttatcaatggattctcagagcaagggcatgtcgaccaagccctcgaccttctcaacactatgctatgcaagcccaacaccgtttgctacaatgctgcgttgaagggtttatgcatcgccgagcgatgggaggatatcggtgagctgatggctgagatggttaggaagggttgctcgccaaacgaagctacattcagcatgctgatcagttccttgtgccaaaataatttagtggacagcgcagtcgaagttcttgagcaaatggagaagtacgggtgtgagcctgacaccgtcaattacaatataatcatcaattccttgtctgaacgagggcgcgtggatgatgccctcaggttgctgaacagcatggtgtgtaagcctgatgcccttggttttaatgctgtgttgaagggcttttgtagagctgaacgatggcatgatgctagtgagcttattgctcagatgtttagggatgattgccctctaattgaaatgacctttaatatactgattgacatgctttgccaaaatggtctggtcaactatgcaacccaagtgtttgagcaaatgccaaggtacagatgtacgcctgacattgtcacatacagcagtcttcttaatggcttttctgaacaaggtcttgtagaggttgccattcagttatttagaagcatgccgtgcaagcctgatatctttagctacaatgctgtgttgaagggtttgtgcagagctgcacgatgggaagatgctggggagcttatagctgagatggttggaaaggattgtcccccaaatgaagtaacgttcaatatattaatcaattccttgtgccaaaaagggctggttgatcgtgcaattgaggttcttgagcaaatgccaaactatggaagtacacctgatatttttacatataacgcccttatcaatggcttttctgaacaaggccgtttggacgatgccctcaagttattgagcaccatgtcatgtaagcctgatgctatttcttataactctacattgaagggtttgtgtagagctgagcggtggcaggatgcagaggagcttgtagctgagatgcttaggaataagtgcactccaaatgaagtaacattcaagtatgctaatcatttacttatgcctaacagggctggttga

SEQ ID NO: 80188 - DNA, 228 bp, Oryza sativa
  Clone ID: PAT_MRT4530_79837C.1
gattacaaaggtcaagtgagcgaacgtcggtatagttatacatccacgactataccattaccaccagcatgtttttaacatgcttggttttatttatacccactataagaaagttcaccaacacataccatggcatgcataaccagagccctcaaacacaaccatacaccagtggcacacgcgaaattagaatcaccacaacaaacttgggtgactactacatacggg

SEQ ID NO: 80189 - DNA, 559 bp, Oryza sativa
  Clone ID: PAT_MRT4530_79838C.1
aatggcatggtgaaggaagataacagtgaactcaagcaatctatatctatcataacaatggaagagcatgatagcaagcctgaacatggagacagcaccacaactgccatcagcaggaaaactgggaaggtgcagccgaagaaagagaccaacctgttttggctaatcattagggcatttgttgtttccatgtccaagatgtgggcaaaatgagaggatgtgcaaaagacactttcatctggcactgcagcctgggatgccctctgcctactggcaaatgtgaagctccattttgacgcgatgcatatacatatttgttttctgtgccgcacgttaggttggttggtaggcttcaggagtttatttaggttctagcttgtaggagtagcatttggtgaactttctcagccttttcaactctaaaatctattagctgtaattgcactatttttgtagaaggggtgaggtatgtgcttctcttatatatgaaagtatgaaacagtagtatccacagattctcctctgaatgaggattaccggcctggtggccttgcgttct

SEQ ID NO: 80190 - DNA, 428 bp, Oryza sativa
  Clone ID: PAT_MRT4530_79839C.1
attattgtacaatcagcaatggcagcatacaccagcatgagcattgccctgtttggagtaattgctctttctgcaagagccactactgcattcaccactctgcagtcttacccaccaacattagccatgggcacattggatccgtgtaggcagtacatgatgcacacgttgggcatggagtagctccacagccatgttcatgtcgcagccaatggcgctcctgcatcagcatagttgcatgcaggtacaaggcatgatgcctcagtgccactgtgggaccagctgccagatgatgcatagcatgcatcaagttatttgtgctgcacttgcgcatcaacacatgatgaagatggtgatgcagatgccatacatgtgcaacatggccacttgtaactaacaactatcttgctgcggtttcttgatgatca

SEQ ID NO: 80191 - DNA, 195 bp, Oryza sativa
  Clone ID: PAT_MRT4530_7983C.1
atggaggagaacaaggtgcaccggcatgtggaaggaggggccgtcgcggggggcgcgaagggagtggatccggcgccagtggcggctcgtggagggagcggcgacggtggtagggcccggattgaggggatctgcgccagcgctggctcgtggaggcccgggcggagctcgggctgcgaccggtggatccggtga

SEQ ID NO: 80192 - DNA, 2208 bp, Oryza sativa
  Clone ID: PAT_MRT4530_79840C.1
atggcagccgcggcgccctcgtcggcgcggcgaatgtcgcacacgcagttcatcgagctcctccgccggcgcgcctcctgccctcgccacggcgaggccctccacgcctgggcgctcaagtccggcgccgcctcccacgcgcccgtcgccaactccctcatcaacttctactcctcgctcccccggcccctcctcgccgccgccttcgcggtgttcgacgatatccctcccgccgcccgcgacgtcacctcctggaactccctcctcaacccgctctccggccaccgcccgctcgacgcgctctcccgcttccgctccatgctctcctcctccaccgtccttccgtcgccccattccttcgctgccgccttcaccgccgccgcccgtgcggcctccgcgcccgccggcaccgcggcccacgctctcgcttgcaagatcccctctgccgtatccaatgtgtacgtgtgcaccagcctgctcaacatgtactgtaagctgggcattgtttctgatgctcgcagagtgttcgacggaatgcctcagcgcaactcattttcctggtccaccatggtggcaggttatgctgcagagaaatgctccgaggaggcattcgatctcttccgactaatgctcgaagagtgcccttctgagaaaagcgagtttgttgccacagcagttctcagcgcagttagtgtgccattgggtttgctgatgggggagcagatgcatggactgattgtgaaggatgggttgctggattttgtatctgtggaaaactcgcttgtcacgatgtatgcgaaggctgggtgtatgggtgctgcgtttcatgtgtttgagtcatcgagggagaggaattcgatcacttggtcggcgatgattactgggtatgcacaaaatggtgaggcagacagtgcagttagtatgttctcacagatgcatgctgctgggttcacaccaacagagttcacttttgttggggttctcaatgcaagtagtgatttgggagcattggcagtagggaagcaagcccacggtttgatggtgaagcttgggtttgaggttcagatatatgtgaagagtgcactggtggacatgtatgcaaaatgtggttgtattgctgacgcaaaagaagggtttgatcagttgtacgaggttgacattgtcctttggacagcgatggtttctgggcatgtgcagaatggggagcacgaggaagccctgacattgtatgccaggatggacaaggaaggtatcatccccagtaaatcgactatagctagtggtctgagagcatgtgctggcattgcagcactggaaccagggaaacaattgcacacgcaaatcgtgaaatatgggttaggtttgggggcccctgttggaagtgccttgtctacgatgtattcaaagtgtgggaaccttgaagatggcatgtctgtcttcagaaggattcctgatagggatgttattgcatggaactcaatcatttctggtttttcacaaaatgggtgtggcaatggtgcactggatctttttgaagaaatgaagatggagggcactatacctgataatataacattcattaatatattgtgtgcttgcagtcatatgggtctagttgacagaggatgggaatattttagtttaatgacaaaagattatggtttaactcctaggctggatcactatgcttgcatggttgatattcttagccgagcagggatgcttaaggaagcaaaggatttcatagagtccattactattgaccacggaacatgtttgtggcgtatagtactaggagcatgtcgctctttgcgagattttgatgtcggagcatatgctggtgaacggttgatggagttaggtaccggagattcctcagcatatatattgctgtcaaacatctatgcttcccagagaaaatggaatgatgttgaaagggtgaggcatttgatgagacttcgaggagttaacaaagatcctggatgtagctgggttgagcttaacagccgagttcatgtgtttgtagttggcgaacagcagcatcctgaagcagaaaatataaatgcacagctgagaaggctagctaaacacatgaaggatgaaggttaccactcatcatctaagttatcgtttgatgaagagctgggtccattggcagaatctcatgaagaagatcaactggaatggatatctgcagcttatagctga

SEQ ID NO: 80193 - DNA, 1426 bp, Oryza sativa
  Clone ID: PAT_MRT4530_79841C.1
atggccgccgccgcgcgccgcctcctcctcctcgccatcgccgtcgcggcggtgtccctcgcgccccgcgccgcggcggaaatcaggacggaggccttccgtgaggacccgaggcccaccatcctgttcgagaagttcgggttctccaagacgggcgcggtcaggatcgtcatcaccggcgccggcatctcctcgacgttcgcccgcccggaccccaagcagctcgggttcttcctcctctccgacgagtcgatgttccaggccatctacgaggcgcaggcgcggcggccgccggagaggcgggaggaggtggcgggcggcggcgccgacgagcccgacgtctcccgctgcatcctcacgagcccctacgtcaagacgctcttcaccttccacgacctcaagcgcggccactacaacaagacgttcccggtcacccaccccgacgagtacagcctctacttcgccaactgcgcgccggagtcgctcgtcaccatgagggtgcgcaccgagatgtacaacggaaacgccgacggctccgtcgactacctccccgtcggccaggcgcccgtgccggcgatctacggcttcttcgccgcctgctacgccgcgttcctcgccgcctgggggtacctcacgctctcctcccgcgaccaccgcgccgcggcgcaccagatccaccacctcatgtcgggcctcctcgccgcgcgcctgctctactgcctctccgccgccgaggaccagcactacatccgcgtcacggggacgccgcacggctgggacgtcgcgttctacctcttccagctcgtcaagggcgtcgtcctgttcgcggtgatcgtgctcgtcggcacggggtggtcgttcctcaggccggtcttgcaggacagggagaagaaggtgctcatggtggtgatcccgctgcaggtcatggccaacatcgcgtccgccgtgattggggagaccggcccgttcttgcaagggtgggtgacatggaaccagatcttgctgttcgtcgacgtcgcctgctgctgcgccgtgctcttcccggtcgtctggtcgatgcgatcgctccgggagacgtccaagactgatggcaaggcagcgcggactctatcgaagctcaccctgttccggcaattctacattgtggtgatcggttacctatacttcactaggatcgtcgtgtatgcgctcaagaccattgccagttaccagttccggtgggtgagcgtcttggccgaggaggtggccacattggcattctacctcttcatgttctacacattcagaccggccgagaggagcagatacttttcgttcgacgaagatgaggaggaggctgctgagatggtgctccgggaagaggaattcgagctttgatgagttgcggcgattcgcagcaatggcggctgcctggcaattggaaaat

SEQ ID NO: 80194 - DNA, 137 bp, Oryza sativa
  Clone ID: PAT_MRT4530_79842C.1
atgaaggcaatcttgccgaacaaaggatttaaacacaccaccaaccgctcagtccatgacaatgaaaacaatatgctttccataagctacagatcatggccaatgtggaccacaattgggtacacgtgcgacaacta

SEQ ID NO: 80195 - DNA, 683 bp, Oryza sativa
  Clone ID: PAT_MRT4530_79843C.1
ggagagaactagtctcgagtttttttttttttttttttttttgcaacaaaccaaacccgtaatttcatttccttcaagataactgtacttcagttggcaactatggctcttaaacaacaattaacatttccgaaaactagcaccgacccacgtgacagatttacatgtcagccaaaaaaaaaaaagtgagacgtacacaatggattatggaagggatcatttccagcttgtaagaactagattccatggtaaggaaaaattgtagacagactgaaattgaaaaaaactaacaatgatgctattaaatatttctctttgcgtggatatttcacctatagaaagtcgcaatccagctagagccactaaaaaaatcagggcagaaatgaaaagagtaatgaacataacaatcctcccttccttaagattgttaatcttacttcccctgagggtatgttcccttgtgtatgttggtaatcacgccgctagagcacctcctagtgaacatggatgtacctagggtatcatcgtctaactctaggcttgcaccgaaattctgctaagagtgctatacgatctgatgaccattcaggtgaaggaagcgcagtgtctttccgtaagctatcctcatccagaagttccagcaacgactccactgataacgaatccgctgtgtaaaatatgta

SEQ ID NO: 80196 - DNA, 1143 bp, Oryza sativa
  Clone ID: PAT_MRT4530_79844C.1
atggcctaccgccggaagcagggccccatcgccgccgatgatcgccggagctcctacccccagccgccgcaggcatgcgcccctctcccccctccttgtctctcactcttcaggtgtgtctcacaagtcacaaatgatgtatcctaagcatgtcaatttctctgaatagggctcttcttcatcgtacagttacacatcaatcaaaagtatgaacgagcccaagcttgggctatgggaaactttggcaagaaaagccaagggaattcttgatgaggatggcacagcacataagtctgacgagtacacaaaacaaaagacccctcgcaagtttgattcatccaatactggatcccggacaaggtcggaagctcttgctgcttctgtcaaccaacttggtggaagaatcagagatgcgttggaaaagatacaaattagaaggaagcaagccaattcgaattcttatatgccgaacccagcatttgatacattaagacctcctaatctttcacatgatcaagctgaaactgcagcccaggaaacccaattaaaagcttctcgcgatgttgctaatgcaatggctgctaaagcaaaacttgtgctccgtgaactaaaaacagtaaaagctgatctagcttttgcgaagcagcgatgtgctcagctagaagaggagaacaagttcttgcgagaagcaaagcagaaagggagcaaaactgaagaggatgatgacctgattcgtgtgcaactggagaccttattggccgagaaatcaagactggcgcaggaaaattccatgtacgcacgcgaaaatcgtttcttgcgtgagatagtagattttcatcaattcaccacccacgatgttgcccccttggatgatgacatggaagacagtataccaggagaagatagcaatcacacttactcggaagatatgtttccggtagttgaagcatatttagaccgtgaagaactatctcctgtcccctcaaggcctgaatctccaatcctcagctcatgtgagtcatcatcccccaaatccagcaattctaaaagcagtgctgccaatttaccaagctatgtctcaaagccaaatgcattggtacctgacacagattgacgaccggcttcatcactaccttcctccgg

SEQ ID NO: 80197 - DNA, 355 bp, Oryza sativa
  Clone ID: PAT_MRT4530_79845C.1
aagcaagggaaaaacccgcattccaaaacagccgggggacaaaaatcggacccaaagcatcagttttaaccgaacaaaaaaaaacgaggtttaaacgacgggcattttgcccattgggagcaaaaattaacgggccaaaaaaaaaaagccagggccgggggccaaacttaacaaaaaccaaaaccagattttttaacgggggacaggcaaacccccctttgaacgagggtcacttttttttggggggagccctgggcaccctggcaccggggggggcccttttttccacggtcttgaagaccccaacacccaccggttgccctatgggaccccccccaaaacaaccaaaaagggg

SEQ ID NO: 80198 - DNA, 1127 bp, Oryza sativa
  unsure (1)..(1127): unsure at all n locations
  Clone ID: PAT_MRT4530_79846C.1
gcatcaggnagattcagagttggttggttgctctcctactccgggtccgggccacgacccgccgccgcgccgccaccatggcctaccgccggaagcagggccccatcgccgccgatgatcgccggagctcctacccccagccgccgcagggctcttcttcatcgtacagttacacatcaatcaaaagtatgaacgagcccaagcttgggctatgggaaactttggcaagaaaagccaagggaattcttgatgaggatggcacagcacataagtctgacgagtacacaaaacagaagacccctcgcaagtttgattcatccactggagctcaggaatctcaatctcgctggtcatttgaaaaccacagcaggacaggagatactggatcccggacaaggtcggaagctcttgctgcttctgtcaaccaacttggtggaagaatcagagatgcgttggaagaaggactcacaattgtggacaataagacatccaatatcattgaggagacaaagaagatacaaattagaaggaagcaagccaattcgaattcttatatgccgaacccagcatttgatacattaagacctcctaatctttcacatgatcaagctgaaactgcagcccaggaaacccaattaaaagcttctcgcgatgttgctaatgcaatggctgctaaagcaaaacttgtgctccgtgaactaaaaacagtaaaagctgatctagcttttgcgaagcagcgatgtgctcagctagaagaggagaacaagttcttgcgagaagcaaagcagaaagggagcaaaactgaagaggatgatgacctggtatgttaatgttttccaagcaagcaaccctggaattattttattctcatgataaagttatcagaactacattcttcttgatggtgaatttgtgatgactcatcccaaaactctggctatgaccattgaaaagtgtgaaatttcttctttcccttgcatttctggacaattttgaaaaagatatgcaaattttgcagtacgttgcacaatgtgggttggttgatatgaaagcctgatgtattgggtgatgaaaatttgaaccactatatcatgtcggataaactattaagcattggtacttgtaaa

SEQ ID NO: 80199 - DNA, 1491 bp, Oryza sativa
  Clone ID: PAT_MRT4530_79847C.1
atggcaattaaggaccggttcacgggaaaccctgggagactcaccgtgcttaccacaagcgggagtggggatttaatgcacattcaacttagaaattctggtttgagaatttctgggcgtgacatcaaggcgggggtgatcgaagagatcgaccacccggagtggttggcgaacccggtcttggtgagtaaaatgaacggcaagtggcgcatgtgcgttgattttacaatcctcaaaaaggtgtgcccgaaagatgacttccccctgccgcagatcgaccagcttgtcgattcgacagctggctgtgagctcatgagctttttcgatgcatattccggctatcaccagatccacatgaatccggctgacatccccaagaccgccttcatcacgccgttcggcactttctgccacctcaggatgcctttcggcctgagaaacgccggagcaacattcgccaggctggtgtacaaggcagccgaaacaggtttgcccttcttcaagaccctccggggcgcgggaaagtttagttggacacccaaatgccaagtagcgttcgacgagctaaagcagtatctgcaaagcccacctgccctgatcagcccagcaccgggaagcgaactgctgctctatctagcagcttcgccggtggcagtcagtgcagctcttgtccaagagacagagtcaggccagaaaccagtgtatttcatctccaaagctctgcaaggggcgaagacacgatacattgaaatggaaaagctggcctacgccctagtgatggcttcgcgcaagcttaagcactactttcaggcccacaaagtcattgtgccatcgcagtatcctttgggcgaagtgctacggggcaaagaaatcactggccgactcaggaagtgggcggcggagttatctcccttcgacctacattttgtcgcccgcaccgccatcaaatcccaagtcctagctaacttcgtggccgagtggacaccgacattcgtccctgaacccgagctcatcgaacagccttggataatgcatttcgacggctcgtggtcgcacagggggccgggcgccgcggcagtactcacttcgctagggggtgtgccgatttggtacgccgcaaggctgcagttcgactcgaccaacaacacggccgaatacgaagctgtactgttgggtttaatgaaggcgaaagcattgggggttcggcgcttgctcatcgtaacagactccaaacttgtggcaagtcatgttgacaagtccttcgaggcaaaagaagaaggaatgaagaagtgcttcgccagcataatggtcgaacatttacctagaggccagaataaggaagcagataccctggcgaaatctactgcctgtggaggcctgcattcaccaggcatcttttttgaagtcttgtacgcaccaagcatgcccgcggaaagtctggacatcatggcaatcgaccaggcagaactgggcgaagaccaagaggactga

SEQ ID NO: 80200 - DNA, 878 bp, Oryza sativa
  Clone ID: PAT_MRT4530_79848C.1
cccccctcaatattaagcctaaaatcaccaagtgttgtaatcgttgcttcaggcataaagatgtcagagtcccttccttcaacaccacccctactaacaagtgcagatccttcatcctctagaagtcgttctcttaacgtcgatgaaaattcaacgacgaaagcacatcgatcaccaggtcatcaactatgtaggcaaaatttggacaataaagtcctctctttcaagtcattcaatgagagttatttggaagaaggaaggccattgagctccatgccttctgtctacagcaaagatatcattgcaggaggatcacatggtgagtcatctcagaggattttctgaatcaatggcttcaacttaaagagagaggtggtcggttgacaatgatctccttggccatgttaccactaatagaacaagatcaaatgctccacattccacttctcttgcccctggccaggaggaggtatgcaagctatgttcaaagcaattaaaggagcaatctacatggaatgctcatgagctggcaattgttgctgttttattctgtggtcattcctaccatgcaagctgtttggatggaatatctgtagaaagtgaaaaatatgatcctccgtgtcctatacgcacccatggtgagaaatatttcacaaatctatatggtaagcaggattcaaagattaagaagaacaaggtgtccaagagtgttattacagatattgatatagataggagctctaagcaccgtcataaaagtttgagagaacccagacttgacacaagttctagctagcatgaaggattcatagaccatttttgaaaaggcattttttaattggttctcaaccaccaagattagttttgaggagtgggtc

SEQ ID NO: 80201 - DNA, 325 bp, Oryza sativa
  Clone ID: PAT_MRT4530_79849C.1
tcgatttggcggccaactccatctctatctccgcagggtctccttcaaatcgccgaccaaatcactcccccatcgccgcaaaaaagccacgcgatctccctgcgccggcggcggcaacgacctgcggcatggcgcagacgccgaaccctagccggaggtcgttggtgggggccgtcaccacaccctttcctgactccgcgggcggagcggttccagctggagctgtgctggtaggacgggggctcgcagagctcctcgcgccgcaacgggggcgggttaaccagaggaggcagcagcattggctgccttagccagatgaaagact

SEQ ID NO: 80202 - DNA, 639 bp, Oryza sativa
  unsure (1)..(639): unsure at all n locations
  Clone ID: PAT_MRT4530_7984C.1
atgaagcttcggaggatccctacgcttactaccaggagggtgatgaagacgatggcgctctctagtgtatcctgggagtggtgctatatcacaggacttcctaaccccttttataaaaataatcctgattattattattattttccatttacatggccgaaaaccacattggtgccggaatcggacgaagacaaacaagagaagtttctccaggggttaaaagatgagcttgcagtgcaactacttctaggggattatgaagattttgagaaacttgtggacaaagccatgcaactcgaaagtgagcataatcggatgacgaattgcaagagaaggatggttaacaacccagtatttccaggtggtnaccaaagacagcgcactgagccacttcagatcaccggatcttctgttgtgtatccagagttcctgcccccagaagatgaacgcaatgcngacaacaacaatagcaatactaatgctgatgatnccacccacaaccatggttcttgccccattattgacccctcgaataaagcgtgcattgtcagtttcccttccccaagatgtcaccgattgtctcaatgttggaacccaaatgaccaccctacaattttgactctgagaaagactccaacg

SEQ ID NO: 80203 - DNA, 242 bp, Oryza sativa
  Clone ID: PAT_MRT4530_79850C.1
atggagctgtggtggagacgtggagtggatgcagccgtggcggaatggatgcagcaggcgccaaaaggacatgggagtggatcgaggcgatggcggtggagtggatcgagtggattcagtaagtttaagtctgaaaattattcccctttcaacgcagcagcaaccttcaataggtgcggcggcatcgatcttggcaagggagagcggggggtcggtggtgcacccgatcttggggacggcga

SEQ ID NO: 80204 - DNA, 1104 bp, Oryza sativa
  Clone ID: PAT_MRT4530_79851C.1
atgctccgcgccggcgcacgcccggacggctacacgctcccgctcctcaaccgcgccgcagcctccctccccgccagccgcggcgaggccgagctcgtcggcgccgcccacgccgtcggcgtcagggcggagttcgccgccaacgtctacttctgcaacacgctggtggatgcctacgcgcggcgcggggatggtcgcgtgcgccaggaagctgttcgacgaaatgcccacgcgcgacgtggtttcttggacgtcgctggtctcttcgcatgccggtgtctgggacgtccgggaggtgtcccgggtgttgtactacatgcggctggacggctgccagccaagcgccgtgactctcgccgtggtgctccgcgtgtgcacggccaaatagaacgtcggcggcggggggcagctgcactgctacgcggtgaagatcttgacgcacttgtgcaggatggcagcctcggacgacgcggtggcgctgttccagcagtctccgagaagagatgcaatttcttggaacattatgatctcagagtattcttcggaagggaacatttccaaagttgccgaaatgtatcaaaggatgagaagagaggaggctctggaaatctggcattgttccacatgatgctagacgaaggaggaaggccaaatggggtgactttcctgagcttgttgtcagcatgtagtcactccgggcttgttaatgaagttcaagagttttttgattgcatgacaagaacgtttggcatcacacctgagcttggccatcacacctgcatggtggatgttcttggacgatcaggcaacctagatgatgctttgcaagttatcagtgatatgaatgttaagccagatgggagaatttggggtgctctccttgcttcatgcaggacatactcgaacagtaagcttgcttcttatgtggctcagaaacttatgaaattggaaccaggtaatgttggctaccatgtggtgttcagcaatacccaagctagtagtgatcagtgggatgaagttgaaagcattagaagctctatggtagagatggacctgcaaaagctgcctgcatggacttgtgttgctgagactggtagcccttga

SEQ ID NO: 80205 - DNA, 1242 bp, Oryza sativa
  Clone ID: PAT_MRT4530_79852C.1
caaaccctttatcgccagagcaaagaagggggaacatcgccaggaaaagatcggtggcgagagaaggcggaaagcgaaggaaagcgaggggagcaaaaggagagagagagagagtcttttcaattttcttttgtttttcttttctccctgcaagaggcagctcggcgttgctgcgaattccatccatgtcgctcgccgtcctcaggatgaggttttgatgcccgaatccggccttttctctgtctatttcagcacctcatcgattttttttggctcttgtgatgccctctgtcgtagagctccccaatcagggcttcctcacttgtgccatgtttgttgctcactcctttcttgattattagttggtagctcaccagtttttgcaggggttttggcagatcatgtagtctgcctgctcaatccctggtcagttaatctagaaacctcattgaataaacaagttcagaggttcttgattccttttgttgcaattgcaattgcaactttgttgtgcaaattgtccattgacccatacaaaggagattgttcttggcgcattctgcggcaatggacgatgtcccaagtcaattgctcttctcccatccggaggtgcctgatagcttcgatgatttcttgaacaacatcacaacctgcacccacacccacacctgcaatcctcctggtccgtcggcaaccatgcacacccacacatgcttgcacacgcacacccaggtcttcgcctccggcagtggcgaagatgacatcaaggaggacctgacgaagacccggaggccgctggggaacagggaagccgtgcgcaagtatcgggagaagaagaaggcgcatgcggctttcttggaggaggaggtcaagaagctccgcgccgccaatcagcagctgctgaagcgattgcagggccatgctgcgctcgaggctgaggtgatcaggttaaggagcatcctactcgatgtccggggcaagattgatatggagatcggcacattcccttaccagaagccgtgcagtgttggctctgtggcatgcactgatccaggtatgtgcttcaatggcaattctgagattggaggggtctgggaggagtgctctagaccagtgggtgcagatcgcatgatcgacaaagatggtagcatgtcacaggaaattgatatcccaggaccggtgcattccatttccatggatgttgtcggaagcttggtgacttctgcttctctatctgagtga

SEQ ID NO: 80206 - DNA, 380 bp, Oryza sativa
  Clone ID: PAT_MRT4530_79853C.1
gcgccagccctcaacgctaccgctcctccccggtgccgacaccaccgcccgtgcctctcctccccggcgctgatgcggccagccgccgacgccgccgcccgcgccgctcctccccgatgtcgacgctgccgcccgcgcctctcctccccggcgccgacaccaccgcccgcgcctctcctccccggcgccgatgccgccgtggacgccgtcacccgcgccgctcctccctggcactgacgcggccagccgtggacgctgccgcccgcgccgctcctcctaacgacggccgctcctcccgacgacggccgctcctcccggcgcccctcctcggctcctccccttaccgagccgagccgagccagctcgacatccagccctag

SEQ ID NO: 80207 - DNA, 150 bp, Oryza sativa
  Clone ID: PAT_MRT4530_79854C.1
atggcgccgctcttcctccccctttgccaatgccaccccctcaacggtgaagtcatgatttttccagagattcgattgtttaatgggattttaggatatgttcgtggtgccagtgagattgatgatatgtctgtccaagatcttgtttag

SEQ ID NO: 80208 - DNA, 401 bp, Oryza sativa
  Clone ID: PAT_MRT4530_79855C.1
tcggggctactgtcatggttacggataaggcatatctcctatcctatgacttatgtaatatgcggatacggtacaccatcgaagatatgatctatttccgtatacgataaaggaaatcacaagataatatggaaaatatccttataggcaagtgactaatgacgtcttacttggaattctacttggagactaagttgatccacggtataaaaggcgtaccccctggagggttcaaggcatcgaatctcaccggcagcatacccaccatagtctacgaagccggagcacgtgaagccaacttgccgggagatcttgtctaatcccacgactacgatctcatcctcgtaccaatgtaccccaataccctatttatccggtctacgggtatctcccctcaatag

SEQ ID NO: 80209 - DNA, 873 bp, Oryza sativa
  Clone ID: PAT_MRT4530_79856C.1
atgcgattccgcttcgcaccccgccgctgcgccgccgccgccgccgcctccgactccaaggggggcggcggcggcggcgactgcgactgctctgtattcctgcgttggctgcgcagcaagtctggaacccacatttcttctgtattatctctcggaacctcctctgcctttggaaggtcattatttgcatcggagcccattcaagagggggactgtataatgcaagttccttaccatgttcagcttacccttgataaacttcctcaaaagtttaacaccttacttgaccatgctgttggagatacatctaagcttgctgcgctcctcatcatggagcaacacttgggaaatgtgctctgggatctaaatgagctccatgcggtccaaaacagctcaatttatgatgaagccattgaacacaaggaacaagctaaaaaggaatttttggcactgaagccagctcttgaccatttcccacatttgtttggagaagttaaattgggggatttcatgcatgcttctgcattggatttcctcaaccatgatggtgtttttggttctgttttgatatatgatgagcagaaagatgtttgtgagatcattgctgacagaaattatgctgttggtgaacaggtgatgataaggtatgggaaatactcaaatgctacactggcactcaactttggatttacactcgccagaaacatatatgaccaggcacttattcgaatagatatgccagtccaagatccactatacaagaagaagcttgacatatggcaaaagcataggctcccaatatttgaagatatgtgcaatttaagctctgctacttcttttgtcataaacatgctgaaccttgaaattgagtag

SEQ ID NO: 80210 - DNA, 389 bp, Oryza sativa
  Clone ID: PAT_MRT4530_79857C.1
gggaaatttcgctcatgggggttcatgaatcgcacaacgggcagtccagcgttgggttttcacacttctggcacaattcacgatcacgaatgatgatgctggcacttggagcctgggagccaagcactggctgtgatggcaaagtgactgtggtgctgcacagttgttggttcaagatgcaaccatgcaactggagaagaccaagatggcaagtgccttgcaccacactggaagatgttgggaattggaatggtggggtgatttgggtgtgtgaaaatggttccagtcagcgtgtcatgtattcggcctgatggcaagatgatgatatctttgacgatcatcgtactttgcaggacataataatgcccgctttaataaaaaaaaaaaaa

SEQ ID NO: 80211 - DNA, 1095 bp, Oryza sativa
  Clone ID: PAT_MRT4530_79858C.1
atgaagctcctacgcgtcgtcttggttctcctcctgcccgccgtctcctcctgcctcccctgccggcggcgcgacgactacgactacgactccatctttagcttcggcgactcgttcgccgacaccggcaacggcgccgtcgtcttcgccgagcactcgctgttcagcccggcgacgaagcctccctatggcatgaccttcttcggccaacccaccgggcgtaattccaacggccgcctcatcatcgacttcatcgcggagaagctcgggctgccgttcgtcccgccgtacctggcgcacaacggcagcttccggcaaggcgccaacttcgccgtcgccggcgccacgagtctcgacgccagcttcttcagcgacatccccggcgtcggcaagttcgttctcaacaccagctccagcgtgcagctaggctggttcgactcgttgaagccgttgctgtgcagccctgcccaagagtgcaagggcttcttccataagtccctcttcttcatgggagaatttggcgtcaacgactacagcttctccgtcttcgggaagaccccgctggaagtgagatcgatggttccagacgtggtgaaaaccatctcgtcagccactgagaggataatcaagcgggatggggcaaaggcagtggtcgttccagggataccaccattgggatgcatgccgcccaacttagcgatgtttcccagcaccgatccagcgggctacgaaccaggcaccggatgcctgaggcaattcaacgagatcgcagtgtatcacaacacgctgctacaggatgccatcaagaatgtccagaaaaaccacccagatgtccgagttatctatgcagatttcttcaccccggtcattcgaatcgtccagtcccctggcacatttggttttaccagcgatattttgagatgttgctgcggtggaggtgggaagtacaacttcaacatgagtgctggatgtggcatgccaggcgcgacggtgtgcgaggatccatccacccatttgttctgggatggccacatgacagaggcagcctaccacttcattgctgatggctggctaaacagcataaatgaatcctag

SEQ ID NO: 80212 - DNA, 303 bp, Oryza sativa
  Clone ID: PAT_MRT4530_79859C.1
atggacgagtacctgccccagcagaagaaggtcgacgaggagcaggcggcggcggtggacaccggcaagacgaacgggaaagaggcggcgaagcagcacggccacatccgcatagacgacgacttggtggagtacgtcaactttggcgccgtcgctcaggctggaacggcctatttcgaaaagaagtacgaggcggcaaccggggagaaggcggcggacaaggtggtgaggttgatcggcaaggaggagaccaaggatcgggaccaggaggagaagaacaagggcgtcgtctaccagttctga

SEQ ID NO: 80213 - DNA, 195 bp, Oryza sativa
  Clone ID: PAT_MRT4530_7985C.1
gctcaattagaaatataaataggtgggattaacggaataaaacgggtaattgggaggccatatgggtttcctgctccaaaattgtttctcaagttcttacatgatgcagcattggtcaacctagaagccatcatcttgcctgggtgattctaccacttccattggacttgacatggttatgggatttccctgtat

SEQ ID NO: 80214 - DNA, 1368 bp, Oryza sativa
  Clone ID: PAT_MRT4530_79860C.1
atggcggaccggctcagcgagctacctgacgacgtcctgctctccatcctgaaacgtgtcgacctacgcgacgcagtaagaacagcgatactcgctaaacggtggaggcatctcccggccgcgctgcccgatatcgtactggacgtcctctccttcagaaagaagcaggatgatgatcatcaggatggtttcactttcacgtcgagactgtcccgagaagctcgagccaacctcgccgtggcgcacgccgcgaaagccatcctcgcgcgtcgcagcggcgagcacgccatcgaccgcctcctcgtgcggttctacctgagggcggagtccatcggcatcgtccgctccgtcgacgacgccatcgcgagcggccgcgcccgcttccgcgaggcggcgttcgacgtgaggggcgagaagcgcgccctcgagtgcacgggcagggacacgcttgcgaacgggaggcggctcgcgtcgctcgtcggcgggtgcccccgcgcgttcgcggggctcacgcggctgcgcgtcgagagcgtgacgctgcgcgggtccaacgacgtggcgaacgtgctcgccgcctgcgagaacctggagatcctctccttgcacagctgcgacgcatcagctggctcgaacgtggcggcgttggagatggagcacccgcggctcgttcgcctcgacgttgacgcgtgcgacttcgagaccgtagatctcaagtggctcccgaggctggttcaggtctccaacaacatctggttcccttcacggactctacctccgcttgtttttggccatgttccacagctccggacagtactctccactgtcggtacagttaactacagaactctcaagctaagcgggcttcttgtcaatgccaccggcatacgtacactgcaaatgatttttgagagtgaaaagatctggttccaacctgaaagcccgaaacatctggctccacttctccgcaatctgaggattgcatgtttggacaagattcacaaggaatgtgacctcatttggacgatgtttgtgttagaagctgcacccctcttaaaggagcttcgcatatcggtaacagagcactcttgtggcagcttggcagcagcggatgtcatgaggaagctactgtactgcaagaaaaacaatatagagtggcacattgattctgatttcaggcactacaatctgctgttggtcactgttgttggttttgagatcaaggataaatttgtgaaactcataaaacgtctagcacacgcggctgtcaatttggaagatatacatctggaggatgaagtcaaatgtgagaattgtcagtattacccaactacgtggtatccaagtacagacaaagagagagagagttaa

SEQ ID NO: 80215 - DNA, 2252 bp, Oryza sativa
  Clone ID: PAT_MRT4530_79861C.1
ttgggtttttttattttttgggggaaacaaaaagtatctccaaattaatcatgctcaaatttaagttatgctcaaacaatacattatgacaccggcagagaattaacaatacagcttgggattttatagctggatattaatctggccccatcataacacacacggagatactcctatatatcaaccgagcgaagaagcacacacaagatcacacaatcaggccaggttgcttcgatccggccaccggccggtcacagcccgccacggccatcatgggtgatgccggggtggtggtggtcgtcgtatggccggaatccccgtgccagcgccgcgctccacgccttctgcacgccggtgaccctgccgccgcactcgtgcccgtcccacttctccagcgcgtgaacgatccccgccgcccgccacgcgctcatcaccctcctcggcaaccaattctcgcaaacgtgaaggttttcgaaggattcagggacgagtagagccggggtgcagtggtagacgcagtcgttgcgggccttgttgggagggaactgcgagtacggcacgaaatgggatcctttctgggctttcatctgctcctcatccgtcaccccgtcgcccacgagccacaccttgctgctgtaactgcatgacaaaaccagatgctcctgcatttcaggctgcagctgctgcttcaggcattcatacagctccttatttaccatcctcacctggatctcccgcttgcagagggacagggtaagaacgagagagatcttgttcgcgtttcccaggaggagcacatctttggtgccctgagggatcatgttgagaacggcagcaacagcgaggcttgttccatcgacgatcttcgtcttcaggcttggcttcctgacgacatataactccccgttcctgttcagatcgtacccctggttgaggaggccgagcgtgaggactctcgcgccacttgcttctgcgtctgacaccgctttctctatcaaacggctgaccttgtacccatcactcttcgacgtatagtgggaggtgaaccttgggatgacccaggtctcgatgttgagcttgtcgaggcggttggcctccgacctgaaggtggaggcgaagagggagaggagaggggaggcgacggcggaggcggcacggaggaggtggccggaggctgcggcgccaagcgggttggacgcgacggcggcgaagccgaggcggttgtggaagacggactccggcgtggtgaggtgcgtgaggtgcaccacgtccggccgccacgccgcctcgtccctcccctgcagcgtcctctcgtacagctcgtcgcttgacttgtccgtcgtcccgtagatgtagtcgtacaccggcatgaacagcgagtagttcgtcctgaactgcgtgtggtgcaacgaatgaaacgatggggtgtagaggagatatttgagaggggggaagacgtggaagaggcacttggggacgagctcgaagttgcagtggccgaggtagttcatgaagtcgatgtagacgaggtagccgttggccgtgacgacagagacggtgccggtggcgacggtgctgaggatggggatggcgaggaggacgaagtagacgacctcctcggcgaaggggtggatgacggaggtgatgggctcagtgacgatggaggcgtggtggtgcgagtggtaccgcgcgtacagccagtggtggtgcagcgccctgtgcagccagtagtagaggaactccactggccccgcgtgcagcaccgccgtcaccaccatcccctttgtgctccaccacggtgccacctgcgcctgcggcatcgtcgcgctcaccaagtagaacaccagcgccgtcaggattatctggtcatcccagtttctttccctgtcgatttgttcgaagtcgaggctcttgttgacgatcttgtgcttgctccgggcagtctggtggcgggagacggtgatccagagctggccgtagagaagacggaggagcagcatggggaacaccatgaagttgaggaggtctcgctccgccgcgctgctcgccgtcacgaacctgtacgtgctgtacgccgccgacggcgccaccagcgcgtacttgtagtttccaaggttattccacggccactgagtgagaggccctggcttagaggccatgatagctagctgtgtgtggtttggttgcaggtgcgagaccggtcgagctgataccgggcacgcacttgagattgacagtagagagcctcgtgc

SEQ ID NO: 80216 - DNA, 164 bp, Oryza sativa
  Clone ID: PAT_MRT4530_79862C.1
agaagagaatattggaacaccaggtaaggtggcaccagaatctacaatgaagatgttgccagtcacatatgatgatgtttcatggatcagaaaacgaaccagcgacgtcaatgctggatcaacttggaagctgcgtatccagtggagccaggcagatgaccacg

SEQ ID NO: 80217 - DNA, 553 bp, Oryza sativa
  Clone ID: PAT_MRT4530_79863C.1
tcagttttcattttgacaaatcctgggcaattgaatttttatgatggtggtgctctattttctgttccaaaatcagaagagggaaaagctcagattgaagcacaaaaatttccagtcacagttccaacaactgatcccaacataacagtcactaatctttattcactaaatggaagggaatctcaaagtattccacttaagaaatttgttgttaagcaaaatgccgcacctttcatgcaacggaacatgaaatggcctttgactggtggagttcctagtgaaatgtcaatgaacgagaattacaccgtggaaagaatatacattgcagggtatcaagatagttctgtgagaatatgggatgcaacctttccagttctgacgccaatgtttgtcttggatggaaaggtggttggtgtaaatatggatggagaaaattccgctgtatcatcacttgctttttgctcattaaacatgacattggcctgtggcacaacaagtggcctgtatctctaatgttattggaggttcgcatctataagcttcgtgacacact

SEQ ID NO: 80218 - DNA, 309 bp, Oryza sativa
  Clone ID: PAT_MRT4530_79864C.1
ctgatgaaatagtacacagctattactggagtatgaatgtgatggctatcgagaggtatacatactcattcaattactacaaaattgatcccaaaataattcaagagaaaataccataaaagtccaattgagtgtacaaaattgcatggctgtgcatacagctaagaaaaatgagtgatgggaagtgcatatatgcataccaagagaggtgctaaggccaccaataatggacagagcgagagcaacagcaactttgggatccatgtgtgtatctgttgattgatggatttatctctccctgtatattgt

SEQ ID NO: 80219 - DNA, 336 bp, Oryza sativa
  Clone ID: PAT_MRT4530_79865C.1
atggacacgaggagggagacgggtgacggcctgacgggacttgaagatgaagatgaaggactgaggagtgaggactactctcgccgcatccaccgcgttgatctctctccagataagatgctctccggccggaaggggatctggcggtggtcgttgggcacctcctcctggtctccaccacatccgtggcagcgtcttggggcgatgccttactacttcttcgtcagcgccgataccccttcccggcctcgcatcctcgacggcacggacgaagcctactcctcggagaaaccttcatctgacacatactcgagctctggggttgggaaaaaatag

SEQ ID NO: 80220 - DNA, 783 bp, Oryza sativa
  Clone ID: PAT_MRT4530_79866C.1
atgaagcaattgtctgggagatcatcatcgtcttcaccacctttgacaattgaacctaggatgtacgaagtcatatttcgtgtcaaatcagacacttgcttgggctttcgggaggagttgaaaggtaagcatgcgacgctcgtcgcccagttccccgccgccggcgccgctggccctacgcccgccgccctcgctgcttcgtcgaccccaagtcgccgcgccgtccgcggggccatccgggccgctgccctctgcatccccgccgtcgtccaggctgctccaaagcgccttgtggtgatcccgcttgccaccctccgtgcgctccttcaaggatgtggtcgcgaccgcttcgccgccgattttcaaattcggtccgcgcctccaaccaccgcgtcgcactttgaaggtggcaattactccgcctcccaggccaagtcaaagtgcgccattggtggcgacgcgcagcgcattcaactgctccccaaccaccagcttcaaggagatgggacgagccttcaatccgctctcctcctcgccaccgcgctcctgctgaagcgtcagcctccctccgcctctttcagcaagcaacaagtggaagatgcttcgtttgcctctcgagagaccaccgcgcctcccactgccgtgacccggtcaggtgcttcctctgccggaggacgggacacagggccagatcctgccgagctcacgctcatctggctctgctccgcctggagcgtcgccagctccacggtcaccgtaactccacgccgccacctccgttga

SEQ ID NO: 80221 - DNA, 2442 bp, Oryza sativa
  Clone ID: PAT_MRT4530_79867C.1
atgggagacgcctcccggatagacccaagctgcggatctgggtggcggtggcggggggattcacaccacaaggcgctttggagcagcctggacgacggcggggatgcagagggcagcggcccggatggccccgcggacggcgcggcgacttggggtcgacgaagcagcgagggcggcgggcgtagggccagcggcgccggcggcggggaactgggcgacgagcgtcgcatgcttacctttcaactcctgaagttggtgaaaaggatcccagagacgttcacttcatcgtcaaattactttaactcatttacctacccattacttgaagaaacacatgttgatgtcttttcatcgttggatggttattctcaccaaaacttcatatcagtagcccgaatgaaggaactgctgcatgacgatgagaccacgttcttctgttttgaggttgcaaatccagcaaaggatgagaaatccaaggaaacatatgcgccatgtgagggtgatataatagtccttacctcccgaaagcccaagcaagtgtctgatttgacacgaaatatgacttcgtacatcctaggttcaattgtcaaaggtggtgaagacgatgatgatctcccagacaattgcttcattgctagattgtcatcagtgcttccagtggaaactgattcttcaacaaatgaaccaaaggagccattgttcgcggtaatcctcataaatatgaagacatacgatcggatttgggattgtcttcacaagggaaacagccatattgttgatacagtctggcggtacaagtcaaagtttcaactacctattgctctgactgttgcttttgcaactaaagaagtggatgaggctatgtcatcaagctcccaattatctcaacggttcgctgctagatcagccgttgatcttaatcttgagaagtacatgctcaacaattcacaactgaatgctgttgcagattgtgttctggtctcagaaaaaatctcttctcctattaaactaatatggggacctcctaggacgggacaccggacacttacttgtgcccctactaatactgctgtcctagaggttgcatctcgaattgtcaagctcgttcatgagtctcctgctagcagtggccaatatctaagcgacatcgttttgtttggaaacaagaagaggatgaagatagggcatggggacagtgatccactcaagtggccagatctgctagcctcagtgcacacggatgtgtgcaacaaatcaaagatcagaaaggcaagattactctgtgttcgaatattaagatatctgaagatcaacttgaagcttcctgattgggatcgcttgagcctttctgatgatgaccgcaagagagaaattcgagtctacctgttgcaaagaacaaaatgcattctctgcactgtttctagttcttatgtgttgcacaatgtgtccatggatgacaggtctgagtgcttgaaacctctggaactgttggttgtagatgaagctgcacagttaaaagagtgtgagaccttaattcccatgcagttgcctggcataaagcaagctgtttttatcggagacgaatgccagctacctgctctggttaaaagcaaaatttctgataatgctgatttcggaagaagtgtttttgagaggttaagttccttgggctacaacaagcacctcctgaacattcagtacaggatgcgaccagagataagcaagtttccagttgccagtttttatgatggcaagatctcagatggtccaaatgttgtcagcaagaactacaagaggaacattttgccaggcaaaatgtttggaccttactcgtttataaatgtagatggtggccatgaaacaactgaaaaacatggccggagccttaaaaataccatagaagttgctgctgtgctgtggatcgtgcggagactatttgaagaatcggtttttttgggaagcaagctcactgttggtgtagtgtcaccgtacaatgctcaagttagagctatccaagagaaaattggtaagacttacgatatgtatgatgatttctctgtgaaggtaaaatcggtggatggtttccaaggtgcggaggaggatgtcatcatcatatctactgtcagaagtaatagagctggttcagttgggtttctcacaaacctgcagcggacaaatatggctctgacaagggctaagcactgtttgtggatagtaggaaatgggacgactttgtccaacagtagatctgtttggcagaaagtggtgaatgatgcaaagcatcgaggttgctttttcgaggcaagcgagtataaacatttatccaatgcaattgtcaatgctgttattgagctcgatgatgctgagaatttagtaaaaatggactcgctccagatcaccaatcccaggtttcagagagccgggtcgaggtaccgtgcatga

SEQ ID NO: 80222 - DNA, 1619 bp, Oryza sativa
  Clone ID: PAT_MRT4530_79868C.1
gagagagagagagagagtggagtggaggtatatatgagaggagaggagaaaaggggagagctgagggtgaagcacaagctgcccacctcccattcgcatctcgctatcctatggatagagccgccgcgacagccatagatatcgtcgtcatgatcccgtcctcgccttcgccttcgccttttgtagcaccacctccatctccacctcctccgtgcagctgagacccaaccaaaagctgcttccttttcttcttcttgggattgggatcccccccccctcccttcctcggctccgtttcttgccatggccgaaatggcagtcaccgccgccctccggccctgctccggcgtctcgccggcggtgtccgggaccagccaccgccgccgccgccccgccgcgtggcgggctctcgcgccgccgccgccgcacgctgggctgaggctgtcctctcctgctgtcagggttcctagagctgcttcctctgcggctgtcgaggatgggagctctagcaacactgacacagttcctaccccgaaagttataatagatcaagactcagatccggatgcgaccattgtagagataactttgggtgaccgtctcggtgatcttcttgataccatgaatgccctgaagaatttagggctaaatgttgtgaaagctagcgtctgcctcgattctactggcaagcatattaagttagctataacaaaattgtcgactggtcgcaaaattggtgaaccagagttgttagaagcagtacggctgacaattataaacaacatgattcagtaccacccagaagctagcagccaattggctctgggtgcaacttttggtccagagccccctacagaactggttgatgtggacatagcaacccacatagacatatatgatgatggccctgacagaagcttacttgtagtggaaacagctgaccgaccaggtttgttggttgaccttgttaagatcattgatgacatcaacatcaccgtccaatctggagaatttgacactgagggcctactggctaaagcaaaattccatgtcagttataggggtaaaccattgatcaaagccttgcagcaggttcttgctaatagcttgcgctatttcttgaggaggccgacgacagaggagggcagttactaggcagataaatacaggaagccccccaccttcagatactttgtgatacatggatttgataccatcatcaaaattattcttgaaatatgcaaacaatttatcaaaagcttggaggtatacttgatcttatggcttatacaaatttaagctgttcccatttgaaggtaggacatctgctgtattaactgcagaagccttccaagattacatgctagtgcgattctcaagcatgtgacacttgataattttggtatttaggatgcatgtttgatggtaaataagaaagcaagttggggggccatgcatcaactgttctggtgaaatgtagctgtattgttctctccattatctgattaataaagattaccaataaataaatgtggtgaaagatttgacaatttaaagaaaaaaaaaaaaaaattttgctcggttcctaactgaactttaaaccattcgagggggaaaaa

SEQ ID NO: 80223 - DNA, 351 bp, Oryza sativa
  Clone ID: PAT_MRT4530_79869C.1
atggacaagatgaacactagtgcccggagcgagaagatcgatcagtcgctgcagaagtatgatcacccacgctgccgttggcacatattatttggtacgaagtcagaactacacaacttatatcatgcacgcacagcaagtgattttgaagatacttggacggccctagtcaatgagtatggtcttcaagaggagaatgcatatctccaaaaggcgcagatgttaatagacgatgaaacgaagcccaatgattcacaggagatagatacagaccgtaaagatgtcaagagggaggtggaggctcctaagttgatcatttctcgtcatagtgatgataaattctcatcctag

SEQ ID NO: 80224 - DNA, 500 bp, Oryza sativa
  Clone ID: PAT_MRT4530_7986C.1
ccatggaagtacagtgttcaactggcgagtgttcgccgcggacagctggcttattataccacacactatgcagttggtaaagaaggcaccaagagaaggatgtgcttacatgtgcattcaagacccaatcctaactctatgggtaagcccccttggcaggagaagagtgtccatcttgccgtgctgctccccaatgatgtgttgtagcaaatgcattatcgcattctgcaagagaagagggctcagaggctcaagcatgaaccacgagggagatgagttcggtggcattcactgcccatgcccatgacgccaggagctacccagacgtgttatgaatggcggcagaatccttcttaggtgcggcttggcggatgaaagaatgagactgagaataaatgaaattggcacagccattggttttgctgctatgtactgtcccagtctttcgactaatgatgataaaccctctctttatcccttaaaaaaaaaaaaaaaaaaaa

SEQ ID NO: 80225 - DNA, 754 bp, Oryza sativa
  Clone ID: PAT_MRT4530_79870C.1
tcatgcccgactgccatcaaccgggttccggatccggtgcgatcgcgccccgtcggagtcgggagcgggagcgggtcggcctccgcctccgataagtgcacgcatctcgcccgctaccccaccgtgcgcgccgcgcttggccagcccggccgcggcccccctcaccgtcaccgaccaggtagggagggctggagcgcagccattccggagagtcgtcgcctcctcgcaccgagcgagcaggaaggtagcgggggcgccgtgcgcggcgaccaggcagggacggacgcgggcatccatcgcctcgtcgggcccctccactccctccccacctcgcgccgcacggttgacgcggcgcagccggagcccccccagagcgcgcgctgcatcaccttcgccggcgttcgtttcgcccgacctgcggagggcgggtacgccgacaccgaacgcctccgtcgacgcgacgccgcggcctgtctgctagtactcctccttttgccacaaggtacaaaatagcaaacatatgctcagcatttaaccttcatatgcttctatttttgggaatacttttgatttctttaagataaaccaagttttatccatgttaaacagttacatcaagataatacaattactatggaggcaattacgcttttgactctgttataaagtctaagccaatctaaccttggtttctcaactttgctcatttaaccctatggacatgaccttattatgtgaaacaaacgtaatggtg

SEQ ID NO: 80226 - DNA, 356 bp, Oryza sativa
  Clone ID: PAT_MRT4530_79871C.1
gatgatgtaacaacttacaatatttcttgtttcctgcttcttatctatgatattcagatgctgattaaatcaattgtttggcaggaattatcaagtcaccatggtgttttacaatgtcaaatggcagatgtccaaaaacttctcagaaacctgacaagatctcaggaactaacaaaagaaaatccagtctttacgcaccgacgttgggtgttcagtgagcagggcgttgcagagctaccagggctacttcagcatgaggaagcagtcagccaacagcgtcggcagcaagcacaggctgaaaatgagaatgttaatctaattaaatcaaaaaattagttcatgttatgccattcatt

SEQ ID NO: 80227 - DNA, 387 bp, Oryza sativa
  Clone ID: PAT_MRT4530_79872C.1
atgagcatgagcaacacagcgcctgggtgtgaccaatccgggggcgtggtctcgttggccacggcgagtagctgccacccaaggacagcgggcagcgggtggtggggtgccacggtgaagatgatccaccaaaaagggaggcgcaacgccaggagcggcgatgattggtcctcatcggagtcaatggcccgcaagcgcgagcctcgcggcggtgcaacccgcgaggtttgtttcaccgacgatgaggcccgggaggtgccgttgctaatgtactctaatgggaagcccttccaagctgcgacgacgatgatgtccacgcagcgccggcggcacaccaccaccagcacaccaagctacggcgggggcgggctcgaacatggcgacgac

SEQ ID NO: 80228 - DNA, 417 bp, Oryza sativa
  Clone ID: PAT_MRT4530_79873C.1
gcacgagggtaagggggcaaatccaacgactgaggaacaggtgaatggagagcagccttctcgtgggtgtatcagcatgtgatgcaaagatatatagtcttgttgtaaagatcaagataatcagattattaattggaccgtagacagtagcatcaagaacttcctcttatctaaagctctagttaggccttgtaactaatttgcttgcactaggaacttttatgggcattcagagcttgtttggttgctgcgctggcctgggggctgtcgctcaggcatgtcgatccagccgtaggcgtacaaaatcggacgcctgagagttgcgcctgagtcaggcgagttttccaggacacgaagcaaacaggctctcagtgacaaggaagctgaaatcagatggcaattaatgtggatacgata

SEQ ID NO: 80229 - DNA, 313 bp, Oryza sativa
  Clone ID: PAT_MRT4530_79874C.1
ggtggactggagctcgatcaaggtgagactccccctcgaaaggacgcgggctgctgcctcccgcatcccgcgtgcctgtcggattacaagtgctgttattgatgagatggctgtcctgagcgtcattcctgagatcgctaccaggatgtacctatgccacagtgctcttatgtctgcacagtggagctttgttgctcataggctgatctatctgattgctgggcaagctctctttctcttcgttagtaacactctaacgactgcagctgacgtggtgctctctctatatcaagagaacatcgttgcggaccgt

SEQ ID NO: 80230 - DNA, 2391 bp, Oryza sativa
  Clone ID: PAT_MRT4530_79875C.1
tcactgagacaagtagccctggatggcagatatagccctctgcctaatttgttctacttcttcaatggcttgggcgtcttgggcgtcggttccagggataacttttaaggatttggtcataacagcgacattcttgatagccgatttcaaccttgccttttgttcttcgacagcctgtgagagatcggctagcttgagcttcaaaccgatcaatactagacttgatcgggctctcagatagttgattaagcttggatttttcttcatgcacgagttgccgattggcctggatggtagcttcaatctctttgtgttcttggcgttcggacagtctttgctggctttctccagtttgaattgatgctgttcaagataagcagctggagtgaggacatcggctagttcttcaggaatcaaagcttgaacttcgtgtagccgagtcctaattgatccacaatctaccaccaagccatctagagaagatgcctctagccaatgagagatatcttcaagagtcttcttcacatcatcggataagggagctaaggccttgcttgtggtgtcctcttctgtctcatcaaagtagtccttcatgtcaaaagagaatagatcggctaaggctgggatagcaggagcggctggttgttcttctccttcaatatgatgactccctgtagccgatggagtttggtcacttcgtgattgctgtacaggggaaggaggaggaggaggaggtggtggagccggtttgagaattgttgctgccgatttctttttcacagcaattttcttcttctgcaaccttgaaaaatggactggagcagaaggagtcgggggagtttgtttgtgtgaagtcgatggtgttctttcagtatcgcttatcccagctgcagcctgatcaacatcttctccaatctcttcttcatccagggcttgttcaatggatggatctagggcaggcagatcatcggttggcttggtcttctttgacttagctttcttctttggtgccggagccgatggatatatagccgatgctttggtttttctctttttaccagcattggctggttctctaatgagcccttgtagaagatttgaagtcttgggggcatgatagccgatgacagggcgagatggcccacctccatttggaattagacctggggcatattcgatgtctctaccactattgctttgatgaggaggggggaattctgttgtctgagtgatgatgtctggaaagagatctgccatgtacatagaagccgattgatggaacagatgcagcttccattcaccccaccatctgtcaaatgctttgctcctgaaagctgctagttctatattttcaatactacccaaaggaggtccttggatattcagcagccgatccatcatcaaggttgatgagatttctcctcggcattggattttatcggcaaagaacaggccgattggtaattgacccatcccaagttgtctggcagagctcatcaggtgataaaattcataagaaacttgaatgttcctcccttgatgaatgctgacaggaagaatgcatgggctaatcacagctaagaagacttctctagatttttgatatctttcatggttgatatcctcgaatctgaagtctgatgggagatcaagatgcactgaatcttcataaggaaaccaaactcgagcatctttttgaaagccctcataaaagctgcagaaacaatctttgagcagctcagctgataactttgctccagcatcggctgctccaactactgagccgacagctatcttagccaatgcattgttcagcatttggtacagatagccgaggaggatttttcctaaggggaattgcctttttgattctaaggcttcggctacaaactgccaattggttatggggccacaacttgatccacagaaaagaaatttctccagccacatcagtagaaaggctacatgctctcgaggagtgacagatccttggcccatgtatgctgccacataactagaccaaccacctatgctcttggtcctgaagtcatactgattcttggtgttcagactcatagggttagccgatgaggtcacatccagaccagtgatcatggtgatatctatcagggttggtgtcatcggcccttggttgaacaaaaaggcgttgatggtattggaccagaaataggtggcggcagctattaggggttcatccttaaccgaattcgctatagtgagggcaagtgcttggccgattccaatctcatcccaatgtgtttgcttgctagccgatacacgcttataccatgtggtccagcttttctcgggtgaagttttctccgcgtactctgctgaagatgtggcggatggactggcggagatcgacat

SEQ ID NO: 80231 - DNA, 1715 bp, Oryza sativa
  Clone ID: PAT_MRT4530_79876C.1
gccggcagcgtttcatgaagccaccaccgcggctcgcgcccccaccccctaccgcaccgccccaccatcctcctctttgcttcccgcgccgtgtgccctcgctactcccgtcgcggcgtcgattcccgccccacggcacaaaaccctagtagccactggccgctcctcgtcgctcattcgtctacttcctccggtggaggagcccaactctcccgagccgccccctcgtctctaccgccgctcgcccacgcatcgcccgcggcggccccatgtccaccgcaccggcggcgtccgccgccgcgaaggcgaccatctccgtcgagtacgccaagtccggtcggtcctcctgcaaagtatgcagcgagggcatcgccaagggcgcgctccgcctgggcgcctccgcccgcgacccccgcggcttcgacagcaccaagtggtaccacgtcgcttgcttcccctcctcgtcgcacccgattgaccccgtcgagaaggtcaaggggttcgactccatcaaggaggaggatcgcgaggaggtgcgtgagctaaacaagacgtgtaagagagaccatactgcagtagggacaactgaagagtcaagcccaaagaaagtaaaagccagcccaggagtggcagaaaatgttagtatctcagttgagtatgccaagtctggccgctccacctgcaagggttgcagtgagagtattgcggcaggtgccctccgtcttggcgcctctattcgtgatccccgtggttttgacagtacaaaatggtaccatattgcctgcttcccttcatcaacttacccagcattccctgtggagaaccttaaggggtttgattctatcgagaattgtaagagagatggcaatgtgactgatcaattgaatgaacagaatctgaagaaggaagtggttcacagcatggaagactctaagggcactggaaataatatcgaaggtgttaagtctgtttataaggcagagatgctggcaggggacaaaagagctggtccagtgatacccttttcggtttctgatataaagcaaaattataaggatgctacccttccagcgcattggaaggttttcaatacagttatatttcgtgagcaggatgatggccttcagtcttcagctaagattgctgcatttgattttgatggatgcctcgccaaaacctcagtgaggattgttggtgcagacaagtggtctttactgtatgaatcgattccagaaaagctgcaaatcctgtacaatgatggctataaattggtcatattcaccaatgagtcgaacattgaacgatggaacaaaaagcggcagcaagctgttgactccaaaattgggcgtcttgacaagttcattgaacgtgtaaaagtccctattcaggttttcatagcatgtggtttagggaaaggaaaaacctttccagatgatccatttcgaaaaccaaacactggaatgtggtggttgatgagagagcatttcaattcgggagttacagttgacatggacaaatctttctatgttggtgatgccgctgggagagagaatgatcatagtgatgcagataaagaattcgctaagatgaatagcttgggcttggcttatttgaggactgagagttgggtacattgtgggaatgggatgaagcaagccattggtctgaagtttcacgttcctgaagaatactttggcgaagctgcaaatatctag

SEQ ID NO: 80232 - DNA, 332 bp, Oryza sativa
  unsure (1)..(332): unsure at all n locations
  Clone ID: PAT_MRT4530_79877C.1
ctgcttctntccgtctggtcgtnntcgccgacgccgtcgcgatctccctccggggcgccgncgccacggggtgnaccgtggaggacgcgtgccggcacacgaggcacgaggcgtactgcttnaaggcnctgtcggcnannccggagagcagggcggcggcgttggacatgccggcnctggcggaggcggcgntgtcnatggcggcggagagcgnngcggcggcgangtctttcgtaaggaacctggcgaagatttccggcggcatgccgcggatttgcctggaagnntgcttggcgaagttccaggaggcggtggcggacttaaggcggtcc

SEQ ID NO: 80233 - DNA, 114 bp, Oryza sativa
  Clone ID: PAT_MRT4530_79878C.1
ggcgagttggtgcggtgggcagatggtggtgttgataaatgcgcaaaggcgagcgttagaggaaggcgtgcaaaggaaagagggcggagctataggatcaaggaggccgactag

SEQ ID NO: 80234 - DNA, 1780 bp, Oryza sativa
  Clone ID: PAT_MRT4530_79879C.1
atggacgggctcgcggcgccctcgccgtcccactccggcgcgacgtccggcggcggcgcctcccaccgcaagcggaagctcccgccgtcgtccctctccgacgccaccgccgacgaggacgacgacaccaccgcgccgtcgtcgccgtccacctccccgtcgtcgccctcacgcccgtcctccccgtcctcctcccactccgacgatgacgacgacgactccctccacaccttcaccgccgcccgcctcgacggcgcgcccccgtcctcatccggccgcccgccgaagcccgagtcctcgaccgtgtctgccgccgccgcggccgcggctgcagcggccgctcccaagcccgattccgcttccgctgccgccggcgacggcaaggaggacccgaaggggttgttcactgacaacattcagaccagtggcgcgtatagcgctcgagaggagggcctcaagcgtgaggaagaagcagggaggctgaaatttctatgctattctaatgatggagttgatgaacatatgatttggttggtaggcttgaagaatatctttgctcggcagcttcctaacatgcccaaagagtacattgtccgtcttgttatggatagaactcacaaatcaatgatggttatcaggaataatattgttgtaggaggcattacttaccggccttatacaagccagaagtttggagaaatagcattttgtgcaattacagctgatgagcaagttaaaggctatgggacacggttaatgaatcacctgaagcaacatgcccgagatgctgatgggctcactcatttcttaacttatgcagataacaatgccgttggctattttgtaaagcagggtttcacaaaggagatcacattggacaaagaaagatggcaagggtacattaaagactatgatggaggaatattgatggagtgcagaattgatcaaaagttgccatatgttgatctggcaacgatgattaggcgtcaaagacaggcaattgatgagaaaatcagagagctttcaaactgccatattgtttattctggaattgacttccaaaagaaagaagctggtattccaagaagaacgatgaaaccagaagacatccaaggcttgagggaagctgggtggacgccagatcagtgggggcattccaaatcaagatcagccttttctcctgattacagtacttacaggcaacaacttactaatctaatgcgttcattgttgaaggcaagtcttttatcttcgcaaatctttttatatgacatgcaaccatttggtttgacctcactggataaacctgtactttgcttgctcccttttgaattttttgcaccctttctgtttcaagcatattttctaaagccagaccagctggatggtctgttcaatggttcaatgattgaaatggccacattttataagtttaatattcaaatatttctgaatatgaatgagcatcctgatgcttggccattcaaagagccagtggattcacgtgatgttcctgactattatgacattatcaaagatcctattgatttgaagacaatgtcaaaaagagttgagtctgagcagtattatgtgacgctagagatgtttgtagctgacatgaagagaatgttcagcaatgcaaaaacttataactctcccgatacaatctattacaagtgtgcctcacggctcgagagcttcttctcaaacaaagtagcatctcagcttgcccaagcctcaacgaagaactgacatggtctttggtacatctgatatagtc

SEQ ID NO: 80235 - DNA, 269 bp, Oryza sativa
  Clone ID: PAT_MRT4530_7987C.1
ctacaaacttcaacgccttaatttggaaggcttgggcaccacgaaaatataaaatttttgcttggctaatcatctaaaatagagtctggacctccgaccggctacaaacgagaggctggccaaacggctccatttaccccttatgtcgtcaaacccaggagatggcaattcacctacttgcagagtgtcggtacacaagaaggatttggaagacccttgcgggctaggttgcgtgcgatcaactgcaccccaatcaatggcaacaagca

SEQ ID NO: 80236 - DNA, 587 bp, Oryza sativa
  Clone ID: PAT_MRT4530_79880C.1
cacgtcccaccacccacccgccagatagaaccacaaacccaccccccccccccccctccccacccaccaacacaccaaaaccaccacaacaaaaccaccaacaaccaacacccccggataacatcattacaccgactcctacacacctaccacccttcaactgaccaccaacccacccacacgcctcccagcccccctgtcatgctccccgcactacacgaccaacaacccccagccccctaattctccccccacccaaccccacgcacccccccgccacccgccccaacgcccaactccaccccactccctccaaccagtaccccacgccccatccagccacgcccccgctccccaccaccccacccccgccaacacccatccacagcccaccccgcccccatccaggccgccacaccccattcccatcccccgtgccaccatcccctatgctgccgccccaatcctagccatacccatatgccctgcctccaaagacaccagagatcaagctcctctggcgaccaaagccaccgaatccggcaaacgggtccctcccaccaaagaagtcatctcttccatttcgc

SEQ ID NO: 80237 - DNA, 404 bp, Oryza sativa
  Clone ID: PAT_MRT4530_79881C.1
tttgggggttttttttttttttctttttttttttgcaagcaaaacttcatcctttaatggctcaaaaaaactggtatgaccatggggccaacagaacatgctctatgtcctaacccaaaaatacaaacaggatttcgccgaaagattcacttgggggaaacaaacaggatgcgaccacagccttaacaacgaaattacgaggataaactctataaacccccttatgaaacccccagaccacattaatcgttttttcccctatattcatcccggcctttagtttctataagggcggggaaagtccccccacctacaaaaaaatgggtaaaaggaaagttgtcctttaaccttttacgtgacccgaggggcttgttgtagccccgtggccaccctcacgccccttg

SEQ ID NO: 80238 - DNA, 258 bp, Oryza sativa
  Clone ID: PAT_MRT4530_79882C.1
atgacgagaacaacatgtcactggcatcatcgtcgggacacaaccgacacagaggtggaggcggcgaggaggaaccgcggtgggctccgagcgtggctcgcgaggttggttccacacttgtgcgcctggtcgctcactgccactgctctccccactgcacactctctcgtcgggcgatttaaggaccaggtcactgtcagtcgtgaaatttatgatggcgtgccaccccaacgagtatggggtcaagcgggatggtga

SEQ ID NO: 80239 - DNA, 454 bp, Oryza sativa
  Clone ID: PAT_MRT4530_79883C.1
atgaaacttttgaagagaatggattacccagccaggcggtcaagcgaagaaagaaaaagttttgccgtcgaggttggcggcgaaagaggtgcgccgccgcccagcagtggcggctctgccgtctcgcggaggggacgttgtggccccacgcgcggctgcagccggcgtccggcggcaacgccgggcacgcacgagagacatcagccatcaggttgggccggatctcgtgcggcggcgcatcccagatgtgagcgaagacggaggaaggtcgtgggtgtatcgctggcgtatctcgatttatttatttttttggaaatcgcaaaaatatggggatacgtatgggatacgtatcagagcgtatccgatacgtatccgtaaccgttgccgtatccgatacggatacgcaactatgcaggcgtatcaggtcggctgcgatatatatactcctactagg

SEQ ID NO: 80240 - DNA, 360 bp, Oryza sativa
  Clone ID: PAT_MRT4530_79884C.1
atggcgtccaccgagcgccgcccctcctcgacgcgcgcccatgcggcctcgagctccgctcgttctgcacgcagggcctccacctgggtgttgaacccatccagcaccgcggtgtttgcggcggccaaggcctgcataatgggctcggcgctcaccggggcgacggaagatgaggaaaaaagccgccttggagaaaaggcgacgcgcctggcgagcccgggcggcctcctcccgggcagcttctgcggcttggcgggcccgggcggcctcctcccgagcagcttcctccgcttggcgaacccgggcggcctcccgggcggcctcttcagcttcccgaaggcgggctgcggctttacgccg

SEQ ID NO: 80241 - DNA, 797 bp, Oryza sativa
  Clone ID: PAT_MRT4530_79885C.1
agaagaaacaagaatgattgatactacagaaatgtctcactagtctgtctgattcaatacaaaaaaattagaggagatatggataacaggtgtggagaacacttatttgagaaactactacactaggctggaaacacctaatcatgaacttatcaaaccagaaatcaatatcagcagcagccatcatgccatgcgtgccactagtggccattggcatagccattggtggcatgtccattactgtacttggctttggctgcagcgatctcctcgtcggccttcctctcatagaatcttcggtacatggagtcaaccctggtgaggtagaacgtcccaggaggcaacaagctcgtgtctttgcacgtctcgaaatcttttgcgccgtatcggtgctccatcagcttcagcgtctccacaaatttctcgggcaaggtcatatgtcttgactcaagcttctccgtggcattaagcactgaagcaatgtttgataaactgaaggggtcctggccattgttaagtttcaacgaaaacatagtggatgtcaagccactgccgtacgagaacataacaattcgttggtcatccagactagcatgcttgttatagagtacagacgccaacgcagcataaagagatgctgtgtacatgttaccaatttgttttggaagcaaagttgatggttgaactttgatgtcatacaagggctttgctacttgttgtgaagccttttccaagtcacgactttggtagctctcctcgccagtcgaatttgagaaaggaaggagcatatctttagc

SEQ ID NO: 80242 - DNA, 438 bp, Oryza sativa
  Clone ID: PAT_MRT4530_79886C.1
atggcacggggctccgctccgcttgatggtagcgtgctgccgccatcccgcatcgtgagcgagaggcaggccgggctgccgcgtcacttcatgccggaatctgccaccggccgggagatagtcacgctaggcgagttccctcccgggaccgaggacggcgcgcgcgcgcaggtccgggatgccgccgaccatatcgtccacagcttcgagggttcggcccctcggctcgcgttcgccctcaactccgacgaggagggcgatgacggcggtgtgggcgacagtggcgacgaggctggcgacccgggtgcatcggacttgactaagggctcgtgcccaggtcccagtcctcaaaaggcgcgggtcggggctagtgcctggggagatccacgtgtcgagactggccaggccgggagcgtggtgaccgagggttatgggtga

SEQ ID NO: 80243 - DNA, 3195 bp, Oryza sativa
  Clone ID: PAT_MRT4530_79887C.1
atgggttctgtctccggcatcgacgacttcgccttccctcccgggcaggcgttccggttcggcagcctcaacttcatcaccaacgacttcggcaagatctctctccttaacttggattcgaaccagtcaggaagagatcaggtccccgtgccgttcggcattccgaactcggccgaggcctactccaagatcatctctcctgagtcggcttcaaaccactcggacgagatccaatctactcctccgcgaccagatcaagacgacgggtcctatccctcaatcctgatgaaacttcctgatgatttggccgctatcttcacagccaagacatctcccactcgaagatcttggcgagctccggcttcggccccgatccaatctagatccagggaggttggcgttatactccaacctcttgggacagtcttgacggaagagttggatggctacctcagctcccccggcgtcagttctcgaccaaccgagatcctcgactacgacgacttcggctaccactatgaccacggcgaccacgacaacttcgacgacagctatgaggataactacacgcccctcttcttcggcgtattcatggctgacaacgaaacggaggaacagcgccgagcccaagaagcggaccaagatcgcgcacggcaagaagctgaaccaatcactctcctcgacaccctcctcaaggaagacgcactcaaccaagctgatcatgttgtcaacatcttgaaccagacgaagaccatgatcgctgcctcggttccagccaactccgcaagcacccgcaccccgactggtagccgagtccctcatcttcgatctcaagactatcaccagccaagcctcagcattgccggtgccggatctagtcgcaggagcaggggacatgatgaacggtctgttcgttcgcctcccgaacgatatagggagcgtcgagttgaacgaccacactccccacatcgaaggcgccccatcgatcttcgcgacaccatcaaccagcgccgcgcagcaagaggctatcattcaccggatcgctacgacgacgatgtggacggagttgctgccttcacaagcgatctgcgtcgagtggattgcccagccggctttaagccgactggaatcgagaaatatgacggcaccaccaaccctgagtcttggctcaccgtctatgagctacgcgaccacttcatcgccaacttccaaggcacttttgaacggcctggtacacacttcgatctctacaacatcattcagaagtctggagagtctcttcgagattacattcgacgcttctctgagcaacgcaacaagatctccgacataaccaacgacgtcatcattgccgcctttactaaaggcattcgccacgaggacctagtcggtaagttcggacgcaaacctcccaagacggtcaagcagatgtttgaaaaagccaatgagtatgccaaagccgaagatgctatcacggcgtccaagcagtcaggcaccacttggaagtcaaagaaggatgcgccgacagcataccatgctatactaggacgaccggctctagccaaattcatggccgtcccacactacacctacatgatgatgaagatgcctggtcctcgaggggtcatatcactacggagcgacatcaagcaagccgtcacatgtgacaaagaaagttgcgagatggcccaaacccacgagatcactctcgctcgtgaagagatccgactggctgccaccacggcaagcgaaggagaggtgcctgcgaccaagctgtcaaagatcgaaaaaggcgacgacaaaactaagaagatttcactagatccctctgatcctaccaaaactgctgtaataggcaccgagttagattgtattcctagagaggtgattgagcactctttacatgtcaaggaagacgccaaacccatcaagcaacgactccgccgttttgcacaggacaggaaggatgcgatcaaggaggaattaaccaagctattagcagcgggcttcatcaaggaggtccttcatcccgactggatggctaacccagtcctggttcggaaaaagacggggcaatggcacatgaaattatctcactactttcaaagtcactcggtcacggtggtcacatcgtttccactcggggatatacttcataaccgcgaagcaaacggacggattgcgaagtgggccttagaattgatgtctttggacatatcgttcaagccacgaacttcgatcaagtcacaagctttagctgatttccttgccgagtggaccgagtgccaagaagacatgccagaggaaaagatggaatattggactatgcattttgatgggtcaaagaggcttataggcactggagctggggttgttttaatttccccgactggagaaagattgagctacgtattgtggatacatttttctgcgtcccataacgtggcagaatacgaggcgctactccatggattaaggattgctatctctctaggcattcgccgattaatcgtccgtggagactctcagttggttgttaatcaagtcatgaaagagtggtcctgtttagatgataatatgaccgcttatcgacaagagattgtgcggacatgcgaaggttgtcaattttttgccagacaaattcatctgccagcccaagagttgcaaaccatcccattgtcctggccatttgcggtctgggggcttgacatggtcggcccgtttaaaaaggcagtcggcggttacacgcatatctttgtggctatcgacaaattctccaagtggattgaggctaaaccggtcatcacgatcacagcagataaagctagagattttttcatcaacattgtgcatcggtttggagtacctaatcggatcatcactgataatggcactcaattcactggcggagtatttaaagacttttgtgaagacttcggcattaaaatttgctatgcctccgtggcacaccccatgagtaatggacaagttgagcgcgccaatggcatggtacttaaagggataaaagcacaagttttcgaccgactacgtccctatgttggcaagtgggtagatcagctgccgtccatactttggtcgttacgcactactcccagtcgggctaccggccagtcgccgttctttttggtctatggtgcagaagcaatgttgccaagtgaagtggaattcgaatga

SEQ ID NO: 80244 - DNA, 514 bp, Oryza sativa
  Clone ID: PAT_MRT4530_79888C.1
aaagctatgattgtgccgttaaaccaaacaactgtagttacaataagcaaaatcacgtacaattcaaccaagttgagaaagttcagcatggattttgccattttggacaccacagtccaggaagaccatcacccaggctacaacaatttcagtattttttggctacaccaaaatccagtaacatacatcgggataaaagccaacattttagttgcgcattcatagttggtgcagacgctaagagtgttaatttttgttacgaaaaataattttaaaaaaaggaggaagatcacactgatgtagccagaagtctctactggttgagagcaatccactccagctccaggtccacctctccgcactccacattctgcagcctcagggagacctcctgcttcaccctgccgccgacgacgctcaccgcgctgtccctggcgagcgcattgtcgcgcgacatgagccaccggccgatctgcatgtccgacagcagcccggggtcaccgaacgccatagc

SEQ ID NO: 80245 - DNA, 402 bp, Oryza sativa
  Clone ID: PAT_MRT4530_79889C.1
atggcacggggctccgctccgcttgacggtagcgtgctgccgccttcccgcatcgtgagcgagagacaggccgggctgccgcgccacttcatgccggaatctgccaccggccgggagataatctcgctgggcgagggacgcccggcgccacactacccggggcggtccgtcttcttcctccctttcgcaatggcagggctggttccgccattttcttctttcttcatggatgttctggagttttacgatctccagatggcgcacctcacccctaacgcggtagtgacattggccatcttcgcgcgcgcggatccgggatgccgccgatcatatcgtccacagcttcgagggttcggcccctcggctcgcgttcgccctcgactccgacgaggagggcgatga

SEQ ID NO: 80246 - DNA, 231 bp, Oryza sativa
  Clone ID: PAT_MRT4530_7988C.1
ctacatcgttgctggcttgctgcacaggtcgaggccctgttcctcccattgcctgctgcggtgctgccgcttctgctttcttccacctattccttcaccagagtctttaccttcatcaccaataaccccatcaccatcgcctatacctccttctgtaccttcaccaacatatgtaccacctccaccaccttccccttcaccctcacctgtatcgcctccaccatcacacat

SEQ ID NO: 80247 - DNA, 3945 bp, Oryza sativa
  Clone ID: PAT_MRT4530_79890C.1
atgggttccgtctccggcatcgacgacttcgtcttccctcccgggcaggcgttccgatttggcagcctcaacttcatcaccaacgaccttggcaagatctctctccttgactcggattcaaaccagtcggggagagaccaggtctccgcgccgttcggtattccgaactcggccgaagcctactccaagatcatctctcccgagtcggcttcaaaccactcggacgagatccaatctactcctccgcgaccaaatcaagatgacgggtcctatccctcaatcctgatgagacttcccgatgatttggccgctgtcttcactgccaagacatctcccacccggaggtctaggcgagctccggcttcgatcccggtccaatctagatccagagagattggcgttatactccaacctcttgggacagtctcgacggaagagttggatggctaccttagctccccgggcgtcagttctcgaccaaccgagatcctcgactacgacgacttcggttaccactgcgaccacggcgacttcaacgacttcgatgacagctataaggataactacacgcccctctttttcggcaacgcggttgcaacaatcactctcctcgacaccctcctcaaggaagacagactcaatcaagctgatcatgttttcaacatcttgaaccagacgaagactatgatcgctgcctcggttccggccaactctgcaagtacccgcaccccgactggaagccgagtccctcatcttcgatctcaagattatcatcagccaagcctcagcatcatcggcacaggatccagtcgcaggagcaggggccacgacgaacgatctgttcactcgcctcccgaacgtcacagggagcgccgagccgaacggcctcgctctccacctcgccagcgtcccgtcgatcttcgcgacatgatcaaccagcgccgtgcagcacgaggtcaccgctattcaccagatcactacgacgacgacgtggatggagtggctgccttcactaacgacctgcgtcaagtggattggccagtcagcttcaagtcgactggaatcgagaagtataacggcaccactaatccggagtcttggctcaccgtctacggactcgcaatccgcgcagcaggaggagacagcaaggccatggcaaactatctacctgtggccctagcagattccgcccgatcctggctccatggtctaccccgtggcacgattggatcatgggcggaacttcgtgatcacttcatcgccaacttccagggcacctttgaacgccccgacacacagtttgatctctacaacatcgttcagaagtctggagaatccctccgagattacatccgacgtttctccgagcaacgcaacaagatctccgacatcaccgatgacgtcatcatcgccgcctttactaaacgcatttgccacgacgacctagtcgacaagttcggacgcaaacctcccaagacggttaagcagatgtttgaaaaagccaacgagtatgccaaagccgaagatgcaattactgcgtccaagcagtcgggcaccgcttggaagtcaaagaaggacacaccgactgcaggagggagtggaagtaacaaccacaaggatcgcaagcataagcccgaagaacttgtggcaacaacctctccatcttcccgacaacgttcctgcgtcaacaccttcgacaagataatgaactcccaatgtccgcatcatcccaattccaaccacgtggccaaagactgcttcgtctacaagcaatttgcagaacaatatgccaagaccgcatgtaagccttcagacggagatcaaggcacatcaaagaagaaggacgatgaagacgatgccccgactggttttcaagaccatcgcaaagaactcaatcacatcttcggcggacctctggcttatgaatctaagagaaagcagaagctaacagaacgggagatcaatgtggttcaacctaacacgccccaatatcttcggtggtcagagatagtaatcaagttcgaccgctcggatcatcccgaccgagtggtccacccggggcagtaccccctggtactagacccagtggttcgcaatgtcaagctccgaagaactctcatcgatggtggcagcgcactcaacatccttttcgctaagatcctggacgatatgcagattcctcgcacggaattaaagccgagtaatgcacccttccacggtgtcatcccaggattatcagctacaccaatcggccagatcactcttccggttaccttcagcactcgggagaattttcgcacagaaaacgtttgtttcgaagttgctgatttcgagacagcgtaccatgctatactcagacgaccggctctagccaaattcatggccgtcccacactacacctacatgatgatgaagatgcctggtcctcgaggagtcatatcactacggagcgacatcaagcaggccgtcacatgtgacaaagaaagttgcgagatggcccaaacccgcgagatcacactcgcccgagaagagatccgactggctacgaccacggcaagcgagggagaagaaagcgcgctcatcacctttcttcaaaataataaagatatctttgcatggaaactatccaatatgcctggtattcctagagaggtgattgagcactctttacatgttaaggaagacgccaaacccatcaagcaacgactccgccgttttgcacaggacaggaaggatgcgatcaaggaggaattaaccaagctgttagcagcgggcttcattaaagaagtccttcatcccgactggctggctaacccaatcctggtagttgactcaatggccggctgcgagctacttagtttcttggactgctactcgggatatcatcagatccgactaaaagaatccgactgcttgaagacctcgtttattacgccctttggggcctactgctacatcaccatgccctttggattgaagaacgcaggagaaacctatcaacgcatgattcaaagatgtttatcaactcagatcggccgcaatgttgaagcttatgttgatgatgtagtcgtcaagaccaagcagaaggatgacctgatcgcggatttagaagaaacttttgcaagcattcgtgctttcaggatgaaactaaaccctgaaaagtgcatcttcggagtaccgtcagggaagttgctcggatttatggtatctcaaagaagcatacaggccaacccggagaaaatcaacgccatcctcaacatgaaaccgccaagctcccaaaaagacgtccaaaagctgactggttgcatggcggcgctcagccggttcgtctcacgactaggtgagcgggggatgcccttcttcaagcttctgaagaagacagacaatttccagtggggacccgaagcacaaaaagcctttgaagacttcaagaaacttctcactactccaccagttttggcctcgccacatccgcaagagccgctactgttatatgtgtcggcgacctcccaggttgtgagcatggtcctggttgtcgagcgtgaagaggagggccatattcacaaagtccaacgaccaatttatttcgttagcgaggttttggccgactccaagacaagatatcctcaggttcaaaacactcaatttaccggcggagtatttaaagacttttgtgaagactttggcattaaaatctgttatgcctccgtggcacaccccatgagtaacggacaagtcgagcgtgccaatggcatgatacttcaaggaatcaaagcacgagttttcgaccgactgcgtccctatgctggcaagtgggcagaacagctgccgtctgtactttggtctttgcgcaccactcccagtcgggctactggccagacgccgttcttcttggtttacggtgcagaagcaatgctgccgagtgagtcggcgacctggttctga

SEQ ID NO: 80248 - DNA, 371 bp, Oryza sativa
  Clone ID: PAT_MRT4530_79891C.1
acgacaaaccgccaagttggaaccaaacgttcgcccacagaagggggacgacgtaaagaaacagaggccggggtggaggggtacaaacaaaccctgaaggaggcgaaaggcaaaggtttttcagggccaatttcaacaattggttaaaagggcgccgacaggggcagatgaaagccctgaaacggatgagaaggggggccaaatgaaccaaggaagaagcctaaaagaagctggaacctgaaaaccttaaggggggggtgaccctcccggaaaccggagccgaccggccgaaaacccttaaacagagcggcaaggaacttccgggccaaggagaacttgccctgaaaaatgcgctagacggagtacccggg

SEQ ID NO: 80249 - DNA, 1707 bp, Oryza sativa
  Clone ID: PAT_MRT4530_79892C.1
atgcctggtattcccagagaggtgattgagcactctttacatgttaaggaagacgccaaacccatcaagcaacgactccgccgttttgcacaggacaggaaggatgcgatcaaggaggagttaaccaagctgttagcagcaggcttcattaaggaagtccttcatcccgactggctggctaacccagtcctggttcggaaaaagacggggcaatggcgcatgtgtgtcgattataccgacctcaacaaatcttgtcccaaagacccttttgggttacctcgcattgaccaggtggttgacttaacggccggctgcgagttactcagcttcttggactgttactcgggatatcatcagatccgactaaaagaatccgactgcttgaagacctcgtttattacgccctttggggcctactgctacatcaccatgccctttggattgaagaacgcaggagcaacctatcaacgcatgattcaaagatgtttttcaattcagatcggtcacaatattgaagcttatgttgatgatgtagtcgtcaagaccaagcagaaggatgatctgattgcggatttagaagaaacttttacaagcattcgtgctttcaagatgaaactaaacccggaaaagtgcatcttcggagtaccgtcagggaagttgctcggatttatggtatctcaaagaggcatacaggccaacccggagaaaatcaacgccatcctcaacatgaaaccgccaagctcccaaaaagacgtccaaaagctgactggttgcatggcggcactcagccggttcgtctcacgactcggcgagtgggggatgcccttcttcaagctgatgaagaagagtgacaatttccagtggggacccgaagcacaaaaagcctttgaagacttcaagaaacttctcaccactccaccagttttggcctcgccacctgtgtctgatgctgataagattgtgcggatatgcgaaggttatcaattttttgccagacaaattcatctgccagcccaagagttgcaaaccatcccgttgtcctggccgtttgcggtctgggggcttgacatggtcggcccgtttaaaagggcaatcggcggttacacgcatctctttgtggttatcgacaaattctccaagtggattgaggctaaaccagtcatcacgatcacagcagataaagctagagattttttcatcaacattgtgcatcggtttggggtacctaatcggatcattactgataatgacactcaattcactagcggagcatttaaagacttttgtgaagacttcagcattaaaatttgttacgcttccgtggcacaccccatgagtaacggacaagtcgaacgcgctaacggcatgatacttcaagggatcaaagcacgagtttttgaccgactacatccctacgctggcaagtgggtagatcagctgccgtccgtactttggtctttacgcactactcctagtcgggctaccggccagtcgccgttctttttggtttatggcgcagaagcaatgttgccaagtgaagtggaatttgaatcactacgatttcggaacttcaacgaggagggctatgaagagggccgagtagacgacatcaatcgactagaagaggcccgagaagcagctttgattcagtcgactcgatatttgcaagggttgcaccgttatcataatcggaatgttcgatcgtga

SEQ ID NO: 80250 - DNA, 194 bp, Oryza sativa
  Clone ID: PAT_MRT4530_79893C.1
atgcaatcgatgatgatgactcagagagatgaagaaatagaagatttcaaatccaggtggcgccgccgttgtctgtccatctgctgcggctatggcgagcggcggcaactgcggcaggacgccaggccggtgacgggcgttgcgggggcggtgatggcgcgcggcgcggcccacgacggcgactacggcgagcg

SEQ ID NO: 80251 - DNA, 204 bp, Oryza sativa
  Clone ID: PAT_MRT4530_79894C.1
atgaacttgggtaacgccaggcgtctgagtatagcttggtacgctgtctcaaagtcagcaacttcgaagcaaatgttctctgtgcgaaagttctcccgagtgccaaaggtgactggcaagagtcttggcaaaaaggatattgagtgcactgccaccatcgatgagggatcgtcggagcttgacgttgcgaaccacagggtctag

SEQ ID NO: 80252 - DNA, 816 bp, Oryza sativa
  Clone ID: PAT_MRT4530_79895C.1
atgctcctttgcctgcgcctcgaggtcagcggcccgctggttcagtgcggctctctcggcgcgaacaccttccagattacggcgcgcctgctcctcccgcgctgcctcgcggagggacaggctgtccgccagccgttgcgccgcggcctcggcctcctcgagagctcgctcccgctcggtaagcgcgtcctcgcggaggcggagtgcggactcctcttcggagcaggcgggctcgtgcgccgcaacgccgcgggatgcacttcggcggagggtgtcctgcgcctcgttcatcacagtggtggcgatgagggcagcccccgctcctcctccacctccttggcgatctccgccagcaccttccgacgggcttcaagctctgagacgtgccggcgggcctccacctgggcacttaacccgtccaacaccgtggtgttagcgatggccaaggcctgcagaaggggctctgcgttcagtggggcaacggaaggcgtggggaagagccgcctcggagaagatgccgcgcggctcgggccgccgatggacgtgccggactcggggataagtcgtcgtcgcctcggcctggcgacgtctggcctcctcccgagcggcttcttcagcctggcgagctcggacggccatctgggcagcttcctcggcttcccgaaggcgatccgcggcctcttgccggtcagtttcacgggtcgtctcggaggatgtcgtcgcctcggcctggcggggtccggcctcctcccgagcggcttcctcggcctggcgagcccgggcggcctcccgagcggcctcctcggcttcccgtag

SEQ ID NO: 80253 - DNA, 558 bp, Oryza sativa
  Clone ID: PAT_MRT4530_79896C.1
atggctgctgcagcccgtaattaccttaatctggattttgacgtttccgatacgaaacctctccctgactactgcttctcagaggcttcggaggtgtggagagctcattctgatcgatcggatgaggaaagggaacaggaacaggctgttttgaggttctacgaagagaaggaaaaagagctggaggcaattgacgattgttctgaagccctaggcgacgtggattgtgatgatgaggaggaggaggaagatgaaggaacatgtgagctatgcatgaatgaagggttggcaccaagcccgagaaaccatggcgagcacttgtgcccagtgtacctggagatggtaaatcagcaaattctggaggaaataaaggatcaagaccttcacaatgaggacaacaatatttttgaacgttttggagtcatggttgactgggaggatgaggacgaggacgatgatggtgaggaatttgaagaaatcaacaagaagtttattcagcttctgggtcatggaaatgaacttgctcgtgaaataatggatggcgcccccgctgcttga

SEQ ID NO: 80254 - DNA, 648 bp, Oryza sativa
  Clone ID: PAT_MRT4530_79897C.1
atggcgtggctcacgggcggtggcgacctcctctccgccagatctggcaggaggggaggcagcggcggcggtggagccctcccctacgccagatccggcggggggaagaaattggtcgatagttcaatcaccgagcatttcaacgtgaagctctacgcgtgtccaaatcttgcttttagcctcgacttcatcaccaacgacttcggcaagatttctctcctcgactcgggttcgaaccagtcgggaagaggccaggtctccatcccgttcggtatcccgaactcggccgagatctactccaagatcatctcaaccgagtcggcccaaaaccactcggacgagatccaatctactccaacacgatctgatcaagacgatggagcctatccgccaatcctgatgaaactccccaatgatttggttgccgtcttcaccacaagggcgtcttctccccgtagtgtcaagcccgagaagcagaagaacaacgcgtgcgacaagaagccgaacgacgccgactggaggaggagcgccaagcacaagagcgagaacggctacagcgtgagcaagaggagcgcgagcaggctgcaaaggaggctgaggatcggcaacagcgcgccttggaggccgggcagcgagcacgagaactga

SEQ ID NO: 80255 - DNA, 1063 bp, Oryza sativa
  Clone ID: PAT_MRT4530_79898C.1
cgggctgcaggaatcggcacgaggcccgcacgcgtgttttctttttttttttttttttttttttttttttttttttttttttgcatgatgcatggctgatattatcgaaaattcatttttcttgtatacagaaatgttgcgattgctacagcttccaaggagaaaaaggtcggaaaaacaagaggtagacatattcaattactactttacaatgtctctgacaatgaaatgaagacgacgagctttcatgttatgatggcaagcgctgtcaagccaggtaattgtagatctgggggttactcctgtctctctccaggtactccctgtcgattaggctctctattcttttcttgatatccgatggcttgattgggaacttgagctgctgaaaaagctcagttattagaagcgtgtggctgagggttttacgtgtcttcattattcgaactatggcagcatccacctgatactgtctgtcctggaatactctctcagttgtgcttgtgttttcttcaaccgtctccttcatctgaatagcattcacctttatgcgatagagaggggcactaaattcttcattaaatacaaattcgtccttatcttctacgtctcgcccttttggcatcttttggagaacccgaactttaccgcatgcaagtgattgcagcgttcttcgcaattctttatcctcaataccagtcgattccttgatatcgaggaagcttagtttttgtgcatcattgaacaacatcaaaaccacactctgaaatagtgacaccgcaagttcctttttaccttttgggaactctgcttttaatacacagtgacccaatgagttttgccacatcaaacgccttccactatacttgctcaaatagaattctttaaatatatcctgatagacattaagttcatgggggagtttcacatccattggtggatatgttggccaatagcctgttgtaagcacgtgaacactcatttcaatgccagatggaagctttgtccttgcttgagatgattgcttgaaagactcatttatttctttggataattcaatgtc

SEQ ID NO: 80256 - DNA, 1707 bp, Oryza sativa
  Clone ID: PAT_MRT4530_79899C.1
acgccaacacctcccagccacttgagttcttgttgtacgtgttaccgacctcatccccctgcaccgcttgcttccaagcatgctcatgtgctattggttagccacctccctccgaaccaacctcaccggtcacctctcccctccctcttccaccggtgcctccccctccctcctaggctcgccgaccgtctctccccactttcccgccggtgcggccgaccgcctctctccctctctccctccaaggctcaccaacctcctatcctcttctctcccttctagactcgccgacctcctctccccgctctcccgccggcgcatttggtctctctccctccctcccaggctcaccgacctcctcctccccccctcccgccgccgccgccgccgccgcccggcccgcgccgccaccgcccggactgcaccgtcgccgctccatgccgccgccgccgcccggacagcgccgtcgccgccgccgccggcctcccccctccctcctccgccgccgccgccgcccggacagcgccgtcaccgccgccgccgctgccgctccacaccgttgccgccaccggcggcctcccccctccctcctccggccagatctgggagggaggggggaggggagccgacgccgccgcccgaacttcggccgcaccgccctcctcggctgcgcctcctcgctgccactgccgggagcacagccaccgcgccgcctcgcctcctccgccgggagcacacgccgccgcctccatcgccgtcgcccgcggccgccccgccgctgcgcgccctcgcgtccagctccttcgcccgcgcctcgagctcagcggcccgctgatccagtgcggccctctcggcgcgggcgccttccagattacggcgcgcctgctcctcccgcgctgcctcgtggagggacaggctgtccgccagccgctgcgccgcggcctcggcctcctcgagagctcgctcccgctcggtgagcgcgtcctcgcggaggcggagtgcggactcctcttcggcgcaggcggcctcgtgcgccgccagcgttgcctcccggatagcgatggcggtctcgcggtccgccaggtccctctccctcgcgcgggcgcgctcttccagcgccgtggcgcgagcctcaagggccacttcgcgccgccgggacgccgcctcgttctccgtcgcccgccgttccctctcccgctcctcctccacctccctggcgatctccgccagctcccaccgacgggcctcgagctctgaggcgtgccggcggtatgccttgcggcccgcctccaccatggcctccaccgagcgccgcccctcttcgacgcgcgcccacgccgcgtcgagttccgcccgctctgcttgcaggacctccatctgggcacctaacccgtccagcaccgccgcctggcgtgcgcgtgtcgcctctgcctcccgggctgacttcccggcccggcggagtctggcctcctcctgagcggcctcctcagcctggcgaacccggacggcttcctgggcagcctcctccccccgggcccccatcacggggcccagaagcacgaccccctcccggggtagattgttcccccctgcggctcccgcccgcgccatcgtggcctcgaggagcccgctcccctgacgccctgacctcctgcatgatagtcaggatgttggcgcctgaatttcatgtctcgatcaaggaggttt

SEQ ID NO: 80257 - DNA, 129 bp, Oryza sativa
  Clone ID: PAT_MRT4530_7989C.1
ctgcatacattggcttggacaagtgcccgcacgcgctgattccagtgcatggccgaatcaacctatctcccaaagataggctctgtggatacctaaggcacctaacggcaagggtaggggccattctac

SEQ ID NO: 80258 - DNA, 2278 bp, Oryza sativa
  Clone ID: PAT_MRT4530_798C.1
gcacgaggctcgcactctcgtctcgtctcacccaccgccccaaatctcgccgcctccatttctccccagatccaactccgaccatgtcatcctccgaccaggacgaccacgacgaggacgccccgctcttccgcgccagctccggcgacgacgacgaccacccgcacccgcgccgccgctcctccccggtcggcgaggtccccgtcgcgcagtcgatcatcaaggcggcgagcaacgtctgcttctcgctcttcgtcctcgccgtcctcgtcgtcaccgtcgtcgccgtcacctaccagccgcccgacccctggctccagtcctccgccgccatcaccacctccctctcccgcgtcctccccaactccaccttcctcctccccgacgactccctcctccccaccggcgaggacttcaactcctcctcctcgaccccctccgccccgcgccgcgacgacccagaccaggccaccgccaccgccaccgccgccgcggttaacggcacctgcgacccggacgcgccgctcaactgctccgacccacgcgtcctcgccgccgtcaaggcgttcaatgccaaggccttcttccgcaagtccatcgtcttcctcagctacgaggcgccggtgccgggacccaagcccggggagtgcgacgtcgcctggcggttcaggaaccggagggagaaatcttggcgcaggtacagggactaccgccgcttcgtccttgtccccggcgatggatgcgctctcgacattaaccgcgtcggcaagttccgatccgggaccaatgcggctcgcccgcctcgtcagaagggttccaagaaccggaacccgcgcgtcgcgccgccgccagtggacgctgagatcaacgacaccatcccaattgttggttcagaggcagagttcaggagaggcaagtacttgtactacatgagaggtggtgaccattgcaagagcatgaaccagttcatatggagcttcttgtgtggccttggtgaggccaagttcttgaaccggactttcgtgatggatttgaacatgtgtctgtccggggcgcacacgaacaatgggaaggatgaggatgggaaggattttaggtactattttgatttcgagcacttgaaggagtcggtgtctgtggtggaggaaggggacttcttgaaagattggaagcgctgggacaagaagaagggtcctggccggatctcggtgcggaaggtaccgtcgtacaaggtgactccaatgcagcttaagagggacaagagcaacatcatttggaggctgtttgatgggcaggagcctgagaattactggtacagggtgtgtgaggggcgagccgctaaggtcatccagcggccttggtatgctatttggaagtcgaagaggctgatgaacattgtcactgagattgctggtaggatggactgggattatgatggtctgcatgtcatccgagggtggaaggcacagaacaagcaaatgtatccaaacctagatgccgatacatcacccgaggcacttgtagataaggttccaaaacttattaagcagccgatgagaaacctctacattgcgaccaatgagccgttctataactactttgataagctcaggtcatactttcatgtgcacttgcttgatgattacaaggagctttggtcgaatacaagtgagtggtacaatgaaacgacaacgctaagtggtgggaggccagtgccgttcgatgcatatatgagggtgattgtggacacagaggtattctatagagcaaagactcaagttgaaactttcaacaacttgacgagggattgcaaggatggaatcaatacatgcaacttgtgacacatgagttcgtgttgtgataattagcgatgtccatatactcttccttggctggcgcattggaattcagaggaacttcatccagggtttgtcattaggcatatcatcttaatgtatttcctgccgtaccatgttcaattcattacacgttgatctggattatgtgccatccattctttttgtgtaatttatgtattactcttgagaagtttcttgtaacttgttactggccccttcgcaaaatgttgccatctttattcccttggagttagccgggaacatctgttttgccacttatctgctattatacatgtatttctcatgccaaatgttttcaagtaagaaatgcagtcgtaatttacaaaaaaagaaaaaaagaaaaaaacagaggggggcggaagcttattcccttttagtggagggttaaattttagctt

SEQ ID NO: 80259 - DNA, 1041 bp, Oryza sativa
  Clone ID: PAT_MRT4530_79900C.1
atggcgacccacgcgctgcgagcggctgaggcgcgggtgtggcgcggcggcctgcgagcgacggagacgtgggagtggcggcggcaggcactggagcggcgacggcggcgggcgacaacaggcgacagcagcaagggagctgggccacgacagaaagccacacaccaccattggccggggcatctagcagcgcccccacgcgacaggacaaccccatctccctcgacggtcgccggaatcgtactcagggcacgcagctgcacctcgtcgccacaccggttgaatccgcgtagctcaagcggtagcggcgtctacgggagcggcggcggagggaggacccatgtcgagaagcgagcagtaaggaccacatctccgcctcaccctcctgctcacggtcatcgtcacgacactgatgcgaccgccggtctcaagggcaacccttacgcggttggagtcgatgccgtcatggagttccccggcaacccgtggtacggccccgaccgcgtcatctacctccgcccgctctccgaaagcgggtatagatggccatatggcccgacgcccgacgggctggcccaaggcacgacaatttggcccgtgccggcccggtcgtgtctgggctgctccctcggcacgattgcatttatattggaacgagtgaagcacaaaaattttcggtgccactccaaaacatatacccaaaatcgtctgcggttagtcatgagctcgtgtcaaaaggtcgtgcacgtcaaaatcgacgtttggagtctggacagtgaatcaaaatctagaatagttcgttttcatgacgcaagttcattgccaaacaatccattgaccggagacactggtactctacgatctcgttgtttcgacatgtttgctctacatgttgcccttgcccaaccaaacgcacagccagtggcgaagccaggggtgcaccactcaacttttcctcagtatgcgggaaagacaatcattgatttcatcggatttggaacggtgaattcacgtccagtaacaactcgcttaatatctcgt

SEQ ID NO: 80260 - DNA, 3906 bp, Oryza sativa
  Clone ID: PAT_MRT4530_79901C.1
atgggtttcgtttccgacatcgacgacttcgtcttccctcctaggcaggcgttccggttcggcagcctcgacttcatcaccaacgacctcgtcaagatttctctcctcgactcggattcgaaccagtcgggaagaagccagatctccgccccgttcggtatcccaaactcggccaagatctaccccaagatcgtctccaccgagtcggcttcaaaccactcgaacgagatccaatctactccaacacgactcgatcaagacgatggggcctatccgccaatcctgatgaaactccccgatgatttggctgctgtcttcaccacaagggcatcttctccccgtagatctaggcgggatccggcctctaccccgatccagcttagcaccagagaagtcggcatcatactccagcctctcagcacggtttcgacggaacaactggatggctacctcagctcccccggcgtcgactcacggccaacggagatcattgagtacaacgacttcggctgccgctacgactaccgcaacctcgacgacttcgacgaagactttgaagataactacacgcctctctacttcggcatcttcatggctgacaacgagatggaagaacagcttgcaacgatcaccctcctcgacaccctcctcaaggaagacgcactcaatcaagccaatcacgtcgtcaacatcttgaaccagaccaagatcatgatcgccgtctcggtcccggttaactctgcaagcgtccgcacgccgactggcagccgagttccccctcttcgatctcaagactatcaccaaccaagcctcagtgtcgtcggcgcgggatctagtcgcaggagcaggggtcacgacgagcgatctgtccactcgcctcctgaacgacacagggagcgtcgagttgaacgacctcgctccccacatcgcaggcgccctgtcgatcttcgcgatattatcaaccagcgccgcgcggcaagaggatacgttccccaccattcaccagatcgctacgacgacgacgtggatggagttgctgccttcacaagtgaactgcgtcgagtggattggccagccggcttcaagccgactggaatcgagaagtatgacggcaccactaacccggaatcttggctcaccgtctatggtctcgcaattcacgcagcaggaggagacagcaaagccatgacaaactatttgcctgtggccctagcggactctgcccgatcctggcttcacgagttaccccgtggcacaatcggatcttgggcggaacttcgcgaccacttcatcgccaacttccagggtatctttgaacgccctagtacacagtttgatctctacaatgttgttcagaagtctagagaatcccttcgagattacatcagacgcttttccgagcaacgcaacaagatctccgacatcaccgacgacgtcatcatcgctgccttcaccaagggcattcgccacgatgacctagtcggcaagttcgggcgcaagcctcccaggacggtcaagcagatgttcgaaaaagccaatgagtacgccaaagccgaagatgccattaccgcgtccaagcagtcgggcaccacttggaagccgaagaaagatacgccgactacaggggggagtggaagtaccaatcacaaggatcgcaagcccgaggaacttgtggcaactactacaccatcctcccggcaacattcacgggtcaacacttttgacaagatcatgaactcccaatgtccgcatcatccaaactccaatcacgcggccaaagattgcttcgtctatcaacagttcgcagaacaatacgccaagaatgcacgcaaggcctctgacggagatcaaagcacgtcaaagaagaaggatgatgaagacaacgccccgactggttttcaagaccatcgcaaggaactcaaccacatctttggcggacccctggcttatgaatccaagagaaagcaaaagctaaccgaacgggagatcaacgctgttcagcccgacacgccccaatatcttcggtggtcagagacaacaattaagtttgaccgctcggatcatcctgaccgagtggtccacccggggcggtaccccctggtactagacccagtggttcgcaacgtcaagcttcgcagatccctcatcgatggtggcagtgcactcaacatccttttcgccaagactctggacgacatgcagatccctcgcacggaattaaagccgagtaatgtgccctttcacggagtcatcccagggctatctactacaccactcggccagatcattcttccggttactttcggcactcgggagaacttccgcacagagaacatttgtttcaaggtcgctgatttcgagacagcgtatcacgccatactcggacgcccagcgttagccaagttcatggctgtcccgcattatacctacatgatgatgaagatgcctggtcctcgaggagtcatatccctgcggagtgacatcaagcaagccgtcacgtgtgacaaggaaagctgcgagatggcccagacctgcgagatcacgctcgcccgagaagaaatccaactggctgcgtccacagcaagcgaaggagaagaaagcgcgctcatcacctttcttcaaaataataaagatatctttgtgtggaaaccatctgatatgcctggtattcctagagaggataggaaggatgcgatcaaggaagaattgaccaagctgttagcagcgggcttcatcaaggaagtccttcatcccgactggctagccaacccagttctggttcggaagaagacggggcaatggcgcatgtgtgttgattacaccgacctcaacaagtcttgtcccaaagatccatttgggttacctcgcgttgaccagccgcgaacttcgatcaagtctcaagctttagctgacttcgtcgccgagtggactgagtgccaagaagacatgcccgtggagaagatggagtattggactatgcattttgacgggtcgaagaggctttcaggcactggagcgggagttattctaatttccccgactggagagaggctgagctacgtattgtggatacatttttctgcgtttcacaacgtggcggaatatgaggcgcttcttcacggactaaggattgcaatctccttgggaattcggcgtctgatagtttgtggagattctcagtcggttattaatcaagtcatgaaagagtggtcctgccttgatgataacatgactgcttaccggcaggaggtacgcaagttggaagacaaattcgatggacttgagctcacccatgttcttcgacacaataatgaggcaaccgatagactggctaattttggttcaaaacgagaagcagctccttccgacgtgtttgttgaacatctctacgagccatccgtaccaaggaaagaaacaatcgaggccacggacactcaagacataagcatgattgaagtcgactggagagagcccctcataagatttttgacaaaacaagaactccctcaagataaagatgaagccgagaggatctccaggtgcagcagactttatgcatctgtggcaatcacgctaccgcacgaaccatcgttggcaaggcttaccggcaaggagttgcaaaccatcccgttgtcttggccgttcgcggtttgggggctcgacatggtcggcccgtttaaaaaggtagtcggtggttatactcatctctttgtagctgttgacaagttttccaagtggattgaagccaaaccggttatcacaatcacgacagacaaggctagagatttcttcatcaacattgtgcaccagtttggggtacccaatcggatcattactgataacgacactcaattcacgggcggagtatttaaagatttctgtgaggacttcggcatcaaaatttga

SEQ ID NO: 80261 - DNA, 1104 bp, Oryza sativa
  Clone ID: PAT_MRT4530_79902C.1
atggggaaggtgccgcacgccatgcgcgccgccaagctccccctcgccgtccttgccaagcccacccatgcttcggcttcccagccccctgcgccgccgaggcccagcaatcccaggcaccggaaaaccccagccaaggcttccaaaaccccggctccggccacggccgccgcgccgccgccggtagagaagaggccgatcaagactgcctccgacctcgccgcagccatccgcgcggcggccgacgccgacgtcgacgcggcggtcgacctcgcgcggtccgcggcccgcaccatcccgctcccgccgcactccctctcgctgctcctccgccgcctcgcccgccaccgctccgtcgccgcggcgaggggcctcctcgcggagctccacccctcgcccgcctccccgccgccacgccccgcgctgctcgcgctgtccgacgccgtctgccgccgcggggagccccgggagatcgcgcagctcctccccgtcctcgccgaccacggcgtcaaggccgacgcccccgtctacaacgccctcatgaaggcgcactgcgccgcctccgaccccgcgggtgtcctcggcgtcctccgccgcatgaaggacgacggcgtcgagcccgacctcgtcacctacaacaccctcgtcttcggcctcgcgcgcgccgggatggtcaccaaggcaagaacctatctcgacgccatggccgccgctggccacttcccggacgtcatcacatacacctcgctgatgaacgggatgtgcgtcaagggcgacgccatgggagcgcttgctctcctcgaggagatggaggccaagggatgcgagccgaatgagcgaacatacaacactctgctcatggggctctgcaagaacaagaagctcgacaaggccgtcgatgtttacaaatccatggttggtgccgcgatgaagcttgaagctccagcttatgcgacattcgtcagggcgttgtgtcgtgcagggagaataccggatgcatacgaggtgttcgactacgggatcgagagcaagagctttgcggaggtgacgttgtatactgagctcgagaactcgctcaagtggctgcaccggatgaaatcataa

SEQ ID NO: 80262 - DNA, 240 bp, Oryza sativa
  Clone ID: PAT_MRT4530_79903C.1
atgcaagggatgtgggaccaggttctgttattggagttaagcggtgtaggagccgtgccgttcctgtgtattagctcattgttagcagccgcgaagggcgtaaagggggtaaaagaagataaatatttctcggaagcagctcttcgcctgtgggaacttgctcttttcttttgtttgaaaatggattggattgtagcaaagacccgttttgagcccttggaaagggtattatgggttgag

SEQ ID NO: 80263 - DNA, 2532 bp, Oryza sativa
  Clone ID: PAT_MRT4530_79904C.1
atgccaacccgctgcgcacacccatcttcggcacatacaatatctcctcgtcactttccatccctgtcgaacagaaccatcacgatctcaagctgctcaattcagcaacaagcaaacaaattggcacgcatatgtgcatatgcacatatcaagaagcaccacaactcccccgccgccaccaccatgaaaaagaaatggatgagagggaggacccacgtcgagcagcgagcagtaaggaccccatctccgcctcaccctcctgctcatggccatcgtcgcggcactgatgcggccgccggtctcaagggtgacccttacgcggttggagtcaatgccgtcatggagttccccggcaacccgtggtacagtcccgaccgcgtcatctacctccgcctgctctccgcctttacgcttactttactcgtaaataagcccaattccaagacgccggccgtcaaccttctccacgccagtcgccaccactacgccggcataagagcagtgcgccactgctctgtctacacggcgctttctcaagatcagatatgcacaaatccacctgacagcaacacgtttggcctgaccgcggcgccgagcgtccgtccgtctgcacgccggaggagaagacacacggcgatgagctcctgcgaggcgaggcgggcgcacgcggtgctcatcccgcagccggcgcagggccacgtcacgcccatgctgcacctcgccaaggcgctgcacgccagggggttcttcgtcacctacgtcaactccgagtacaaccaccgccgcctgctccggtccagcggccctggcgcgctggccggcgccgcgggcttccgtttcgaggccgtgccggacggcatgccggagtccggcaacgacgacgtcacgcaggacatcgccgcgctctgcgtgtccaccaccaggcacagcgccgagccgttcagggagctgttggtgaggctgaacagcacgcccgggacgccgccggtgagctgcgtcatagccgacggcgtgatgagcttcgcgcagagggtcgccgaggagatgggcatcctggccttggtgttctggactacgagcgcttgcggcttcatgggttacctccacttcgccgagctcatcagacgaggctatgtgccactcaaaggtacaaaacttttgatgactattaccacttcacctatgcttgatgcagctgagattttcccttgcttaaacgagagtgacctgacgaacggatacctggacactccgatcgactggatccccgggatgcgaggcatccgtctcaaggacgtgccaagtttcatcagaacgaccgatccggacgacgtcatgctcaatttcgacggcggcgaggctcagaacgcgcgcaaggcccgggggctcatcctcaacacgtacgacgcgctggagcaagacgtcgtcgacgcgctgcgccgcgagttcccgcgtgtgtacaccgtcggcccgctcccggcgttcgccaaggccgccgccggcgaggtgggcgcgatcggcggcaacctctggaaggaggacacgggctgcctccggtggctggacgcccagcagcctggctccgtcgtgtacgtcaacttcggcagcatcaccgtcatgtcgccggctcatctggccgagttcgcgtggggcctagcttgctgcggccggccgttcttgtgggtcatcaggccggacctcgtctccggcgagaaggccatgctgccggaggagttcgtcggcgagaccaaagagaggggcgttctggcgagttggtgcccgcaagagctcgtcctctcgcacccgtccgtcggcctgttcctgacgcactgcgggtggaactcgacgctggagagcatatgcgccggcgttccgatgatctgctggccgttcttcgccgagcagccgacgaactgccggtacgtgtgcgacaagtggggggttgggatggagatcgacagcaacgtgagcagaacggaggtggcgcggctcgtgcgcgaggcgatggagggggagagaggcaaggccatgcgagtgaacgccatggtgtggaaggagaaagccaaggaggcgacagaggaaggagagccggcagctagctatattattatccttgctccgggtgatctccgatactcggccactacaccagtggatacgcacgagcagctagcagtgacagtttcgacgcacgcggctgtggtagcgaaggaacggctcggccgcttggatggctacacacacctggtgcggatgcgtacatgcacggacatcacgggcttctacagaaaaagttactttcaaaattatgaaaaatccagcacgttccaccctggctgctatcaaccgggaggcttcgatgatggagcggtgattggttgttcttcacttgttctgggcttatccagcggaaattggttgattgcgaacttcgtggactttaaccaaactccatataaaagattccctccgtggtataccgtcaggataatacaggtaaattgcatcggtgtatacaaaattgtcgtatga

SEQ ID NO: 80264 - DNA, 1923 bp, Oryza sativa
  Clone ID: PAT_MRT4530_79905C.1
ttatctggggccggagagctcgacggcctggacgaggagggaggagtcgtcggtgaggtcggagaagcagcggccgaaggcggcggcgaagtcggcggcgggcggcgccgggtctgaggtgcggtgggagtgggagagggagtcggcggcggcggtggagtggccggaggccttctcccagcggtcggcgaggccgtcgccctcgagcatgcggacgacgtcggacatgcgggggcggtgggcggggaggtactgggtgcagaggagagccacctgcaccatctcctccacctccacccggtcgtaccctccgcctaaccccttgtccaccagcacctccaccttcttctccgactgcatcttcttcacccagtccagcatggcgcccttgtggttggacgacttgccgaactcgagcgccgtctggccggtgacgagctccagcagcaggatgccgaagccgaagacgtcggtccggtccgacgactgccccgtggacaggtactccggcgcgatgtggccgacggtgccccgcaccgccgtggtgacgtgcgactcccggtggtccagcagcttggccagcccgaagtcgccgacgacggcctcgcacgcctcgtccagcagcacgttggcggccttgacgtcgcggtggatgatcttggggtcgcactgctcgtgcaggtacaccaggcccctcgccgcccccaccgcgatcctcctcctcgtcccccactccaacgccggcttcgctttgaggcgggaggcgacgctgccgttggacatgaaggggtagactaggaggcgctcggtggcggtcatgcagaagccgtagaggcggaggaggttgcggtggagggcgaggctgatcatctccacctccgtctggaactgggcctcgccgccggccgcgttgccgtccttgagccgcttcaccgccaccagcgtcccgtcggggagctgccccctgtacacgttcccgaaccctcctttccccaggatgttcttcccgctgaacccctccgtcgccgcctgcagctccctgaagctgaacctcttcacgttccccaggttcacgttctcaatctgctgctcgtcgacgtcaaagaggatctgccggttgcggcggtggcgccaccagaagaggaaaccggcggcgaggaggaggaggcccatgcagccggcggtggagccgaacgcgacggcgaacttgtgccccctgtccctcgccgccggcggcagcgcgccgccccgcgagccgttcaggctgtagctcatcggcatcggcgccgtcccgtagcaatcctgctccctgttggcgtcgcagatgaggggattccccactatgttgtaagttcttgccaatgattctggaatcgggccactcaggttgttatatgacaaatctaggaaaacaaggtgtgacaggttagctgatgcagaagggaatggaccagacagggtgttgttgttgagcctcaagtactggaggctctcgaggtggcccacagagctggggatttcgccatagaagctgttgctggagagatcaagcgtcttgaggttctccagcctgccaatctctgctgggattggcccggttatgttgttgttctgcaggagaacagtctcaagattggtcaggttgccgatgcttggtgagagcaggccagagagatgctggcttggagcttccaggccagtgacgaggaaatccggggagcaggtgatcatggcccagctgcaggggtcgacggagttctggtcccagctcttgagcacgccatgggggtccttgagcaggttcttgatcacaatcagagcttgcacttcgttgttgacgcccttggcggagaggagggcggcggaaggggaggaggaggagaccacgagcagcagcaggaggaggaagaagggcggctccat

SEQ ID NO: 80265 - DNA, 2064 bp, Oryza sativa
  Clone ID: PAT_MRT4530_79906C.1
aaagatcgcgtcaacccaagcatagcatatactacctctgcttccctctcacctcgccgcgccatgctgatcatgctggggctggggctggtgccggccggcgcggcggcggcgttggccgttgcgctggtgtgcctggccgcggcggcgtggtggacggtggagcgcgcgccgcggcggctggagcgggcgctgcgggcgcagggcgtcgggggcggccggtaccagctcctcctcggcggcgacgtggccgagaacgggcggctcaaccgggaggcatggtccaggccgctgccgctcggctgccaccgcatcgcgccccgcgtgctgcccttgctctggaacgccgtcagggaccacggtatcgctgcgaactatttaggagtgccgggagatgctacacattttacacttctgtctagtggtttcataccggagaaaggtggtacttctgctccatctactcaggtgatggtggtgcctgagtcaaatggattgacattgtctgatgaggagtatgatggtttagtggaacagagcaagaggagggcaagtgatagtgatcagccaattttacaaagggctgagaagatgaaagctgagaggaacctggataatcagaagactacagtgccaagagtgatgattcccgaccctgaattagtaagagaggttttcaataagtttgaccaatttggcaaaccaaagatgatccgtgtcggaaagttgctagcgacaggagttgtgagctacgaaggcgagaaatgggctaagcaccggagaattctaaaccatgccttccaccatgagaaaataaaggtaacaatgattctatatgaggttcttaggttgtaccctccagtggtgcttctgaacaggcgaacattcaaggaaacgaatctcggtggcatcaaatttccagctgatatgaacctcatactgcccattctgtttattcaccatgatcctgaaatttggggcaaggatgcaagtgaattcaatccaggtaggtttgctgatggcatctccaatgcaagcaagtatcatgatgcctctttcttcccatttggatggggtcctcgtatctgcattggccagagcttcgcacttctggaagccaagatggctctcagcatgatcctccagcgattctcattggaactttcgccgtcctacatccacgcaccctatatatttattgtcacctgtgacaattctgcaagatcccgatgcctcggcatgcatgctgatgccaagcaaaggtgcatgtcaatgggcaagaacatacctctcgtgggaaatgatgataggcactggagcgacgacggcggcggcactcgggctgagctccacggccttctcgccgatggcgacccacgcgtggcgagcggcggaggcgcaggtgtggcgcggcggcctgcgagcgacggagacgcgggagtggcggcggcaggcactggagcggcgacggcggcgggcggcaacaggcgacagcagcaagggagctgggccacgacagaaagccgcgcaccaccgttggccgcggcatctagcagcgcccccacgcgatgggacagccccatctccctcgacggtcgcctcgccggaatcgtactaagggcacgcagccgcacctcgtcgccgcaccggttgaatccgcgtagctcgagcggtagcggcgtctacgggagcggcggcggaggtgggcgagccatcacaatctcaagctgctcaattcagcaacaagcaaacaaattggcatgcatacgtgcatatgcacatatcaagaagcaccacaactccgccgccgccaccaccacgaaaaaaaaatggatgagagggaggacccatgtcgagcagcgagcagtaaggaccacatctctgcctcaccctcctgctcacggccatcgtcacggcgctgatgagaccgcctgtctcaagggcaacgcttacgcggttggagtcgatgccgtcatggagttccccggcaacccgtcgtacggccccgaccgcgtcatctacctccgcccgctctccggtgagttccccggctactacggctga

SEQ ID NO: 80266 - DNA, 807 bp, Oryza sativa
  unsure (1)..(807): unsure at all n locations
  Clone ID: PAT_MRT4530_79907C.1
cctagttatgtatggaaggcagacattacctggattgattaaagatggcatgagtgctctttcacgatattatttgaataattttcatgacggagtgagacaagatgctctagaccttatcagcggttactatacagtcagcaaaggcatctcttctccttttcaaaatggtggatttgaatctgcaacgtatcttcctgtggcttcagcaatcatagttggtgggattactgccaccacattcactcttagtcaagttggacggaatgcacaacacttcatcacctccattatctgtgcgggtttgacggctggagtggtagccttggtgaaagcaaatgggaagcagttttgctctaagcctcgtttgtgtggtctcatataattctttgtttataccaatgacactaacatgaaccacccccccccctaaatttgtaatccttctcagaactcaacggaaaaaagaacctcagcaagtagtacatctataagagcctacttgccctgtagaatgtatcctcaaattgagcagccccaagttccttttttttttcagtacacattctcagtagatcttgtgatgagccatggatacatggttggtaatcattctcaataggtaatgaacggcagttggccttctgatcctgtaaactgaagttaatctgtaacgccagatttcttcctattagtaattgactgcttggatgatagtatgcaaaactgcagatgtatgttctaaatgagtagcttacacgagccagaggttttgctatngggacgtagtatgggggtgcaggctta

SEQ ID NO: 80267 - DNA, 252 bp, Oryza sativa
  Clone ID: PAT_MRT4530_79908C.1
atggctttagctggtagggcgactggaaattcggggggatcatgtattcatgtggatgtgtacactttcttctcgtctcatgggttcaaggcttcaagtaatggtgatgttgatgtggcatgcttgaagcgatcggcaaaagctcccaggccagtgccatcaattggttcccccatcatgcagtgcagtactaatacgtctgccttcatgcactgcgcctgcaacatcagcatggtgggctccaagcactga

SEQ ID NO: 80268 - DNA, 225 bp, Oryza sativa
  Clone ID: PAT_MRT4530_79909C.1
atgtgggacacgacaggggcggagggcgcgcacgtgaaggcggcatcggtggctagaagccgcaacgtcgctagcacgaggggagggagagtggtccgaggcgggcggccgtacacggcggcgtccgtcgaggtgggagccgtcacgtcgtcggtgccgcatttcaccgccgattctgtgcggcggcaggatggaccgatcacgctcacgctcacgccggcgtaa

SEQ ID NO: 80269 - DNA, 955 bp, Oryza sativa
  Clone ID: PAT_MRT4530_7990C.1
cttgtatctcactgtctacgcttagcgcctcagtcatgcataagctaagaccgcagccagcgtgggatcgtacgtgcaccgcagcagcagcttctggcctcctctgggaattggatatgcggtccgagctcggtgcctttgagctgggaaagcaggctgaagctgtggagtgttcagtggatgtcttgcttgatgctctcacggcacgacggcttcgcctgggacgatctataacccgaaaacagaggcataataggaactgcatatagttgcatgcctggaagcctgggttcatttttttgcagaataggaaagctgattagatagttaaagcgtattccttcactcttttgaggtcactagcaactgctgaaatatggaaaacattccttttggcgggaaattaatatggagaaatcttttcagctgtgatgttagcaaaaaactgaaacagcatattcaaaggttggaaaacatttctttttggccaggaaattaatactggagaatgcctaaaaaaaaaaaaaaaagcaatcggacgccgcgtcacgcccgtcggtgaagctgcattcctcacagggcatgcccccgcggcagaaaaggaggttcttggggggggggccgggcccaaatttggccttaagggaggggtttacaccccccccattgggcgggtttaaaaacagggaaagggggaaacctgggggtcccaatttttcgcttggaaacacacccttgcgcggcggggaaaaagaaaaggggcgcgaagagcgttttaaataggagtgcctgaggaaaggagacgcccgtagtgcgtttacaaggggagggggggtcccaacgggcccatttgataggtcaccccacgctttgtttttctagttttgagcgaaacggttccgcaaatttaatgggtctcttaggtggtatgtgtaaatcacacgaaaatggagag

SEQ ID NO: 80270 - DNA, 1708 bp, Oryza sativa
  Clone ID: PAT_MRT4530_79910C.1
ggatccccgggctgcaggaatcggcacgaggccccaatccatcatcccgtctcgtcctcgcccgccgccgccgccgccgccgatctcgatcctgcgaggtggcgccggcttccgccgcatcatcgctcaccgttgagcatcctaatccatcccatccgccctcctcgcccgccgcttccgccgatccccatcctagccatcaccatcacgcacgccacgccatccgcctccatcgctcgccgccgccgtgcaccaccgccgtcatccgcctcttcctcttcttcttgctccacaagtaatctcatctccctcgatctcctcttctctccatttctctccgtgtagagaaagacccttctcccctactcattgtcggctgacctggaggttgcgttgagatgggaaggaggttctatcacagagatgatggctgtgacaaatggagtaatccatgcatcttctagggaacccttattttccttcggtgtcattgctgatgtccagtacgctgatattccagatggtcgctcattccttggtgtcccacgctactaccgtcatagcatcagcgtcctccaaagggctgtcagcacatggaacaaacaacacaacatcaagttttcaatcaactttggtgacatcattgatggatattgcccaaaggacaaatcgttgtgggcagtgcagaaggtccttgatgagtttgagaaatttgatggcccaacttaccacatgtttgggaaccattgcctctataaccttcctcgtggcaagctagtatcgttgctgaagatgccaaccgattctgatcgtgcatactatgacttctctccatgtcccgagtacagatttgttgtcctggacgcttatgacttcagtgcacttggctggccccgtgaccatccagtgactgccgaagcaatgaagttcctggaagaaaagaacccaaactctgacaagaacagccctgacggtctggttggcgttgaccggcggtttgtgatgtttaatggtggagttggtaaagagcagttgtcatggctcaatgatgtcctccaggatgcatcagcacgccggcaaaatgtcatcctatgcagtcatctcccaatggatcctggctcagcttcttttgcagctctcatgtggaactacgatgaggtgatggctattgttcgccagtacaaatgtgttaaggcatgctttgccgggcacgaccacaagggaggtcactctgtggactcgcatggcgtacatcaccggactcttgaggctgcattggagtgtcctcctggtactagtgcattcgggcacatcgaagtgtatccagacaagttgttgcttgtgggttctgataaaatggctgatactgagatgtgttttgagccctagagtgaactgtgtagcggagggaaattcatccaacttcattgttttgattaatattcagaaacatgtgacttcattatactcattttctggtagcataatccacatgtatgtaatagcatggaaactggaggtggcagcagctgctatgcttgccgcttaatctcccctcctctctcccaagaggaaagaggcagcaagatgaaaagcaaccgaaaggtaaataaagtaggatactttctccatgataatatcacaattagaacatgcttgtttcttgaatattggaccctcgtgccgattcctgcagcccgggggatcc

SEQ ID NO: 80271 - DNA, 705 bp, Oryza sativa
  unsure (1)..(705): unsure at all n locations
  Clone ID: PAT_MRT4530_79911C.1
ccggccgggatcatcccgtctccgtcctcgcccgccgccgccgccgccgccgatctccatcctgcgaggtggcgccggcttccgccgcatcatcgctcaccgttgagcatcctaatccatcccatccgccctcctcgcccgccgcttccgccgatccccatcctagccatcaccatcacgcacgccacgccatccgcctccatccctcgccgccgccgtgcaccaccgccgtcatccgcctcttcctcttcttcttgctccacaagtaatctcatctccctcgatctcctcttctctccatttctctccgtgtagagaaaggaggtggagacaggggttggggaacaccgccgcgtagataaggcccttcttccattcggttctatcacagagatgatggctgtgacaaatggagtaatccatgcatcttctagggaacccttattttccttcggtgtcattgctgatgtccagtacgctgatattccagatggtcgctcattccttggtgtcccacgctactaccgtcatagcatcagcgtcctccaaagggctgtcagcacatggaacaaacaatacaacatcaagttttcaatcaactttggtgacatcattgatggatattgccaaaggacaatcgttgtgngcagtgcagaaggtccttgatgagtttgagaaatttgatggnccaactttacacatgtt

SEQ ID NO: 80272 - DNA, 290 bp, Oryza sativa
  unsure (1)..(290): unsure at all n locations
  Clone ID: PAT_MRT4530_79912C.1
tggtggcacgancngcagaacgcggcacgcgaacaccgcgacatggcgtgaactacaactcggcgtttcatattgtaaaattcttaattgttgcctgtncttttgaacaattttttgctgnctgtagttacttgttagccatgtttataacacacaggttgaaattgtaggctgttagtatgccttntacacacaggtcgatataattcatgccagaatgcaacataaacacagcattcagtaaaacagctcttaatcaaaaaaaaaaaaaaaaaaaaaaaaaaaaaaaa

SEQ ID NO: 80273 - DNA, 518 bp, Oryza sativa
  Clone ID: PAT_MRT4530_79913C.1
ggctgacgtcatcaaaagggggggcgccgacaggcgggctccgcgtgtcagcggctcaaaaaaaagggagggggccccggcaagtgggccccatgggtcagcggcacaaggcggccggtccaccgtggaccgggaccacgcggggtgtccaccgccggtccacgagaccgatgatccagatcggtcgggaggccgatcggacggtgcgggcggtggctaggcatagctcggcccggcacaaagcacggcgtcggacggcgcacaagccggcggcgaacggccggagcggcggcacggccaaagccggcggcgcacgcgtgaaggggagaaaagggaggggggaggcgtcagccgggctcggctcggccccaaggccgaccggccgaccgaggcgaggcggcggcgaggcacggccaccgacggcggtgaccggcggcgcgcgaagcggcggcgacggccgaatggtggcggcgcatggccgaagcgcggcgacgcacgtgcggagggcggcggcgtgc

SEQ ID NO: 80274 - DNA, 445 bp, Oryza sativa
  Clone ID: PAT_MRT4530_79914C.1
tgctaattcagctcaaaattcgatctcctcagcttgcatcgagacttgatggatgcttggtcggtcggagctggccgggaggatacggagctgcagaaagatcctcgaggccatcagatcggcgccgtcgccgtcgccgccaagcgatggatcggtgtcagacaaagggctcgactgcggcggcggcggcgatggtgccatgccgccgccggcgaagctcggcggctggtggtggcggcggcggcttgggcgcagagacccgccctgtccatcctcgtcgacttgcttcggccactgattatattccaaattggagtatttctttttagttcattgttttatacttttgatatgtataatcgctgcagcgaacgagatgtatatatggatcatggatgagattattcgagatctcttatagataaaaaaaaataaaaaaaaaaaa

SEQ ID NO: 80275 - DNA, 6978 bp, Oryza sativa
  Clone ID: PAT_MRT4530_79915C.1
atggtggcggttggcgtatcctacgtttctttgttgaacgctgttgcttcccattgccgtttaccttgggtgtcatacctttgggaggtagatggtgacggagtgctgttagcaggtgttgaacttagtcttcctgacgagcagttaggctgcggtacagtaagcaagttcttttgggttgctgcagtacagccgtcggccgtttcccatgaaatggttgcacagcaggctgttaggtttctccaagtcaagtatggtttcgctgtgcacaattataacttccacatgttgctttcatacagaaagatagccgcgtctgcggttgacgtagctataacagcggctgcacaccttgctaggttagaggcgcgctatggtcctacagatctgccttgtgagaatgtactaaagcagtgtaactctctatggttcacctttgttagggaggaccattttttctgcgagtggctccctgtatgtgtccccattttctttgcaatgtctggtaaagcaaaatcgtgtgtccaacgggcgcgtgagagtcgattaaggcgtcatgcttcattaggccagggatttctgcaagctccggtatttggttcagtaggttctgttcctttgcgcctcagctcagatgctgtgcacactggaccaagtagcatacatgcagatgtcgcgcaaggaagcgttccatcaggtccttcccagcaagccacatcccatcgttctaatgccaataggcaactgcccattgaaatcaacacaatcagtggaaacccaataggcaatgtgaaaagcccaaaacctactcttgaggacatcttacctttgcctaaggattatattgcatccttaaaagcgctataccctgaacgatcctactatggcgggccatcccatgaatgcccatactgtggagctgtattttcgttccaagagagggtcaaaaaagggaccgtgctgtcacagcgaaagatcatttacaacctgtgttgtagaagtggtaagattagccttccagagctgaaaaaaccacctgatttcctagccagactattaaaatttgatggtgatgcacgatcgaagcgatttataaggcagatccgatcatacaactctatgtttgcttttacttcgctaggagctaatgttgataagacgataaataataggtctgcaccttgtgtgtttaaaatcaatggggttgtacaccaccgtattggcagcctcttgccacgacatggtgctgcacctaaatttgctcagttgtatatatatgaccctgaaaatgagacatcaaatagaatgaatatatttgagagagattctaatgccgtggatgatccagacccagaaattgttatcgagctgacttctatgcttgacagccataatgatctggtcaaagcatttcgctttgctagagatcggttaaaagaccatggtgatgagaaaatttcccttagattgctggggtgtgatgcaagggatgaaattcagtacaatcttccaacgagtggtgagatcgcaggaatagttgtaggtgactattcaaacgggaagaagtatgtcttgcctaccagttttactggaggcaggcgatacatggtacaaaattaccaagatgcgatggcaatatgtcgtgtgtttggagtgcctgatttgtttgtgactttcacttgcaattcaaagtggcaagaaatatacgatgctttgctgtttgaactaggccaagtaccaagtgaccgctctgatatgattgtgagggtttttaacatgaaagtaaatgagtttatctcagacattagggaaggaaaaacatttggcccagtccttgctggcagcactgaatttagcgctcctattgttgatggctttatatccgctgaaatacctgatgtttttactgatccattgggttatgctttggtcgatgagtttatgatccatggcccttgtggcaaccagaacaaatcatgcccgtgcatgaagaaaggggagtgttctaaacatttccctaagtcttttcaggatgagacaataatggatgattttggttttactatctacaaacgcagaaacaatggtcgatatgttcttaaaaatggagtgaaacttgataatcgatgggttgtgccttataatatggaactccttaaaaaataccaagcccatattaatgtcaaatggtgcaacaagtctaacatgattaaataccttttcaagtatgtcacaaaaggagctgatagatctaaagcatactttgaggtcaataataagccaactggtcaattatctgatagtaatggtgcagccaaagatgatacgttaaacaaaacaactaattctaatcacacacctcgaaatgaaatacaggagtacattgatgcacggtttctatctacctgcgagtctctttggcgtgcttttgaattcgatatccactatagagttccttcagtagagcgactaactgtgcatcttccaaatcaaaactttgttcgatacaaaaagggtgctcagtcatatgttgatgttaggacatacgaaggcattgtttatgcgacatttagagaagcgtgtgaattaagaggtttactcgagagtgataacgagtggctactgtcgctattgatgaaagaaatgcaaaccactttttcaaatagcggcggtaacatagatgactatgatttaccgcgcccagcgatttactcagatgacatagtacggaatagaatgattgaggaagagcttgctcttgacagcgccatactggccactgaagctaattcaataattccaaaattgaacgctgatcagagaactattttcgatacagttatgaagcatgtgaatagctcaaaacctggttttttctttgtctatgggcatggtggcacagggaaaacatttttgtggaatgcattgatttcaaaaataaggtctgaaaaaaagattgttcttgctattgcctcctcgggggttgcttcccttctccttcctcggggacgcactgctcattcgaggtttaaaataccaattgacattgatgagaacagtatttgcactattaaaagaggtaccatgcttgctgagctcattcaaaagacatcacttattatatgggacgaggctccaatgactcatagaaaatgttttgaggctttagatcgaagtttgcgtgatctgctttccgagcacacaccttctaacagcagactaccattcggtggtaaggtggttgtacttggaggtgattttcgccaaatactaccagtgataagaaaaggctcgcgtgcttccatagttgatgcgtccataacaaatttgcctctctggcaccatgttactcttctgaagctgaacattaatatgagactccttcaaagtgacctttgtgaacagaaccgacaagaccttgaaacttttgctaattggatcctatgtcttggtgatggtaaggtacctgcaacaaaaaaaattgatgaaactgaagcaacatgggtcgatattcctgaagatttactaataaaaacatccggcgacaaaataaaggcaataatagatgaggttttcctagatttccccaacaaatcaacttcaagagcaggccttagaatccttatagaggatgaggatgagatggtaaccacgctaatcagtaagcttgagcctggtcttggcaacccaactattcgtcttcgtgtatcaaggttctgggaattccgcgaccaaaatgatgaaaatattctgtatcatcttggcctggttctggttgatggcacgggggccagcattgcagctcagattatgcctccattggatgagctctttgcccctgcaatcactgaaggcaaagtgtatgacctcacgttctatcgtgtaaggcagtgtaccagccagtataggccagttggcaatatgcagtcgattgccctcacaaagtggtctacactggaagagtgtactgatgtgccagagaatttccctaactatgtttactctctaacgccatatgaccagctaaggggacgagtgaacaggaaggactctttcacagatgccattggaatcattactgagataacatcagtgacacctatccaaacgcgcaccaaggatggtgaaagtctgaagaggagcatctacattcgcgatgccgaggaatgtttctttgtcagcatccaaggaaactatgagccaataaaatatactgatctacccgccccatctcaggctgcaaacaatgcagaacagaagacggtcattgagattaaagacctacacccttttaagttcaagatgaataggattcttggaggtgctaacaatcacacccttgccctgttacaatccccatctgcatctcaagcatcttctctcccagcttccatggctctatcaccaactccatcagttgggcttagtgatgcacagactggaccagctagcccatccactgctatatcaaaacacaaagacctggaaatagagtctgcttcaaagaccactacagaggttcaggatgaagaggaaatagaagatgaggatgtcgatcacctcagcctcacacagaaagctccttcttctagcactaaacaaagcacttctaagagctacaaaaaaaggcctaggccatctcctggcacaggtgctgcgaagaagctattcaaagacaatcctggcaacgatgctggtggcagagacaagacaggctttggcttagacgtcgtggagaacaacgccttacttctatttctccccaactcatattcccctcctcctcttcctgtgagcaagaacaagttctacagccttcttcgtctccctctccagaaaagaatggaagcccagcaaggtagacgccctaacagaacacagccagagccatcatcctatggaactaaacgtctgttgttagcgacaaagttctcaagccgtgaagagatttcacagctgcttgccgatgtcatttaccaagatgctgtagttgtcaaggtgcttggggctggcaatccgaacacaaccaaggtatcagctatggtaggcttcgtctgtgactgccaagtcgatgattttgcgttactgccattcagacatagaatgtacatcgtcatattcatggactctgataaacagtacgaaagatctcaaaaggcatttagccagaaaagcttcacattccaaacaactcggctagcatttgaacctttcaagatgaatctacatagtgttccaaacccactgcgtcaaagagtcatacttgcattggaaggagtaccaccagaatcatggaacaaatcagctatgaaagaattactcgatggcagttgtatggttgaggagctatatgcagagcaccatatagaagatctttctgttttcaaattggctgcatggacaacagattgcaatcttatccccaagctaatggattggaatattgaggcagttgagaaggatcagcaatcatcggagtatgcttggaaacacaatgcagatttatcaaccatattaattcacattgagaaacactttgactacactgatgaagacagtgaaagtgagaccgatggagagattctaaaacaatatgagagaaacaaccctcgcttgccaattgtaaagacattccagtgggtatctcgccagatagacactgatactggacctcttgagggtggatcgccagcaatgccaccacgtcgtctgcctactgagcttggaatcttttggaattgtgatgggttcaaggacccgaaaaaacataagtttgtttctgatttaaccaaagaacatcaacttgattttattgctttatctgagactgttaacaaagaattttctatagctgctcttaataatctttgtgctggtaaagattttttgtggcattgtaaacctcctagaggcagatctggtggtcttctattgggtattaatttattaaattctgacattggtttgattgatgagggggatatttatattaagtttcatttgcgaaataaagctgataattttaagtgggccttagtgttggtgtatggacctgcacaaaatgagtttaaggaacaattccttgcagaattagttaacatgtgcagtcatgagaccttaccaattcttattggtggtgattttaacattattcgtagtcctaatgaaaaaaataataataattatgatgatagatggcccttcttgtttaatgctattattgatgggttgtgccttagggagatacaaatgactgtaacgatcaacatagttgaacttagttggctgttacgtgatggatttgttgatatggtaaaagaagtttggtctggggttgatgagggcaatactcctatggagcgttggcaagcgaaaattcaccgcctaagacaacatcttaggggatgggctaaacataccagcggtttatacaaaaaagagaaaaagcagatattagataagttagaggcgctggataaaaaggcagagactgttctccggtctcaagaggaagttgatattagatggtttttcaggagtaggttatctgtcattctaagggaagaagaaattaaatggtatcagcgggctaagactaaggatatttcggagggtgactctaatacaaagtattttcatttagtggcaaatggaaaacataggaaaactagaatttatcaactacaggagggtgatcatttaataagtggtgatgccaatttaaagtcgcatattaccacttattataaaggtctttttggccctcctgatgagtctgaccttcagtttgatgagaattatgttgctgacattcctcaagtttcatatttagagaatgaagccttaactaaggaattttctgaaaatgaggttaaggatgctattttccaaatggaacataacaaagctccgggtccagatggatttcctgctgagttttacaagttttctggaatgtcattaaatttgaccttttag

SEQ ID NO: 80276 - DNA, 2457 bp, Oryza sativa
  Clone ID: PAT_MRT4530_79916C.1
atggagctgtcttttaaagtggagtcagatattggtgctggggatcctgttcctttggatatggataattttggggatggtgatgggaagagaaatgacgatggggaaaatgagaaggacatgggaaataagtctggaccgggtgtctctgattcagaaggtttgactgcgtctgacgaagattttgacgggttggatgaggagaccgtgttggttgagcaagaaaatctggttgaaaaaatctctgctattcccgaggcgttaatttctccatccaggaaaagccagaggagagcttctgacagtgatcagcttgtccttgaaagagctgaaaggttgaaggcggaaaagaacttggagaaaccccatgctaaaggtgagttagacgatcagttcgatgataatactctactacaacatttatgtggtgaaattatggaggaggtgatggatttaagtgggaatagtggtaatattcagtccactttggattccatggtaccttcttctaatagtatttctaatgttaacatgtgcagtcatgagaccttaccaattcttattggtggtgattttaacattattcgtagtcctaatgaaaaaaataatgataattatgatgatagatggcccttcttgtttaatgctattattgatgagttgtgccttagggagatacaaatgactggtaggaattttacttgggcaaataatttggcacacccaacctatgagaaactggatagagttttagtgtccacggaatgggagcaaaaataccctttatcctctgttgttgctctcgatagagatatttcagaccatactcctttgctcctaaatacaaaatcttcctcttttagtaacgctcaacatagttttaagtttgaacttggttggctgttacgtgatggatttgttgatatggtaaaagaagtttggtctggggttgatgagggcaatactcctatggagcgttggcaagcgaaaattcgccgcctaagacagcatcttaggggatgggctaaacataccagcggtttatacaaaaaagagaaaaagcagattttagataagttggaggcactggataaaaaggcagagactgttctcctgtctcaagaggaagttgatattagatggtttttcaggagtaggttatctgtcattctaagggaagaagaaattaaatggtatcagcgggctaagactaaggatattttggagggtgactctaatacaaagtattttcatttagtggcaaatggaaaacataggaaaactagaatttatcaactacaggagggtgatcatttaataaggggtgatgccaatttaaagtcgcatattaccacttattataaaggtctttttggccctcctgatgagtctgaccttcagtttgatgagaattatgttgctgacattcctcaagtttcatatttagagaatgaagccttaactaaagaattttctgaaaatgaggttaaggatgctattttccagatggaacataacaaagctccgggtccagatggatttcctgctgagttttaccatgttttctggaatgtcattaaatttgaccttttagaactatttaaggactttcattctgggagtttgcctttatattcgcttaactttggtactatcattcttttgcctaagtgtgctaaggctttaaagattcaacaatatagacctatatgcctacttaatgttagctttaagatttttaccaaagttgctacaaatagaataatggatgttgcccaaaaggtaattagtccttctcaaacagcgttcattcctgggagaaatattatggaaggggtggttattttacatgagactttacatgaattacatcgcaaagataaaagtggtgtaatttttaagattgattttgagaaagcttatgataaagttaaatggccttttgtacaacaaactttgagaatgaaaggcttttctcctagatggtgtgaatggatagcttcttttgttcaaggtggtcatgttggtataaaagttaacgatcaaattggtaattgttttcaaacttacaaaggtcttaggcaaggggatcctttatctcctattctttttaatatagtagctgacatgcttactctattgattaagagggctaaagaggcgggactcttgaatggggttattcctcattttgttgatgatggtttgtctatcttgcaatacgcaaatgatactattatcttcttggaacatgacttgcaacaggcaaagaatttgaaactgattttatcggtatttgaaaagttatctggcctaaaaataaattttcacaagagtgaattattttgctttggtcagacaaaggaatgttatgaacaatattatgatatttttggttgtcattttcagggcaactcattggctccggttttgggcacaactacaaagctcttttga

SEQ ID NO: 80277 - DNA, 873 bp, Oryza sativa
  Clone ID: PAT_MRT4530_79917C.1
atggccaccgccaccctccacatcgacggcgacgacgtcatcctcgacgtgggccatctggccgggcaggcgagcggcgacaatggcgacgcggtggacaatgcgttgatgaggctcccgtgtgctctcaacgcggtcggcgtcctcaccggcacgatggccgctgcggctgccaggagtggtggaggtgtgggccgcgatgtggatggccggggattgccgacagccagaggggagctcgacggtgctcggctgccgggagtgatgatgcatcatgataacccggtccacaggggtacacagggtgaccactcctcttcccctctctgcatatgcgtcagccgccaggcgacggcggacggccaccgacagccgccgcatgcagctagggtcgtgcccgtgcgtgccggctttggcggtggcgtgtggcgatcaccggcgtcctcggaacgagcaagccaacgacgcgaggatgggacgggaccaggggaggagggcagtgccgcggcctgcagcggttgcgtgcaatttgcaaagcagtctggagcttggttgcgctggagattggagcagccgggtgggaaggagacgatcgagggtggatcatcggatcctgtttccgacaccaccacagtaaaggaaggctcgttcccaaatcccatttttatctgttgctgggatcacatgatgcagaaatatccaactttggtcttgtgttatgctacaataagattcaagatgatagatgatagacttaggctgtgttctttcccccattttcccaacccacctctctcgttttccacgcgcacgcttttcaaactcctaaacggtctgtttgctgctggaactttctatatgaaagttgtttaa

SEQ ID NO: 80278 - DNA, 2043 bp, Oryza sativa
  Clone ID: PAT_MRT4530_79918C.1
gtttaatccatatccaattgagaggaagcagagggggagagaggaaggaggcaggaggctgccataactccgcccgcaacctccgctctctgtctcgcggtgacctcgtacgtacccccgcgctagctgttaatggaaacgccgcgccctctcctcctcccttcccatcatcctcccgcggcctcgccctcctcttcttcttcttcctcctccttcccctacagatagcgaagcgagatggattgttgtagataggatacgcatactgtggctcttcccccctagcttcttccatctcctcgatcgtgttcagtttgattttggttttcgcttgtcactgtgtgggtggtggtgttgttggccatggcgaggagtggtggggagttggtggtggtggaggaagacgatgagtacgccaagctggtcaggaggatgaacccacccagtgttgtgatagacaatgactcgtgcgacagtgcaactgtcatccgggttgatagggtcaagaagcatggcattttactggaggctgttcaagtacttgtggacctcaacctcgtcatcaccaaggcttacatttcttcagacggcaactggttcatggacgtgttcaatgtgaccgatcaggacggcaacaaggtgcagaacaaggaggtcactgactgcattaagaaatgcttggagtcggaggattacctcgtgctgccggcgagctcgccggccggcggcgctgcgccgtcggaggagaccacctgcatcgagctcaccggcaccgaccggccggggctcctctccgaggtgtgcgccgtgctggcttcgctgaggtgcaacatcgtgaacgccgaggtgtggacgcacgaccgccgcgccgccgccgtcatccagatcaccgacgaggccaccggcctccccgtccgcgacggcgggcggctgtcccagctgcaggagctcctcggcaacgtcatgcagggagacggcgacggcggcggtgacagcaggaagggcagcacggccgtgtcgctgggcgccgcgaacgccgagcggcgcctgcacaggctcatgctcgacgacggcgacgccggccgatgcggcgaggagcggggcggcgtggcggcggcgaaggcgaaggcgaaggtggtggtgatggactgcacggagcggcggtacacggtggtgatcctccggtgcagggaccggccgcggctgctgttcgacacgctgtgcgcgctcaccgacctgcactacgtcgtcttccacggcaccgtcgacgccgagggcggcagcgccaaggaggcctaccaggagtactatgtccggcacgtcgacggccacccggtgcgctgcgacgccgagcgcctccgcctcgtccgctgcctcgaggccgccgtcgagcgccgcgcctccgacgggctggagctggaggtgaagacggaggacagggcggggctcctgtcggagatcacgcgtgtgttccgggagaacagcctgtcgatcatccgggcggtgatcaccaccaaggacggcgaggccgacgataccttctacgtctccgacgcctacggcaaccccgtcgacggcaaggccatggaggcgctcggcgagcagctcggccacgccgtgctgcgcgtcaagagcaacggccgcgccgccatcaaccgcgccgaggacagcggcggcggcggcgcggcggccatcattggcaacctgctcaagggctcgttccaggggttcaggctcatcagatcctactcctgaaaaaaaaaattgctcattttctcaccaagaagatcagaaacacgaccttgttcatacataagaatctgacgactttagcttaggaaataaatggagaatggggtgatgtaaatagtcttgtggatatctgaaaacgccattgcttcttcagcatcatacacttaggttaaggttaacttgcattgtacatataatttgtaaagtggttctcatctaaaatttgtggttaaaccccagtctgagtgaggaatccatatatcaaatcatacacacagcccaaaaaaaaaa

SEQ ID NO: 80279 - DNA, 2289 bp, Oryza sativa
  Clone ID: PAT_MRT4530_79919C.1
atggcgcaggagagctgtgatctcaacaaggacgaggctgagatcttgaagccatcatcatcatcctcaccttctccttccccaaccacagcctccccatcgccaccaacagcacaaatgacagaaccaccgcctccgcaatcgacaccaccaacaccaccggcagcagcagcagcggcatcggcagcagcagctcctcaattctcagccaagaactgcgaaggtattctcatagaggtttccaagaagaggaaactagccgaagccaccgccaccgatgctaatgccgtggtcgtggcggcggtagccgagccattatctccggtgctgtttgttaaccggtgcaacgtgtgccgcaagagggtcgttttggtgtatgggcctgcacagaatgagcttaaagatcaattccttgaagaattagttaacatgtgcagtcatgagactataccaattcttattggtggtgattttaatattcttcgtagtcctaatgataagagtaataacaattatgatgatagatggccctttttgtttaatgctgttattgatgggttgtgccttagggagatacagttgtctggaggtttggtctgggttgatgaaggcaatactcctatggagcgttggcaggcaaaaattcgccgcttaagacaacatcttaggggctgggctaaacacactagtggtttatgcaaaaaagagaaaaagcagatcttaaataagttggatgcgctagataaaaaggctgagactgttgttttgtctcaagaggaggttgatcttagatggtttttaaggaataggttatctgcgatcttaagggaagaagaaattaaatggtatcagcgggctaagactaaggatattatggacggtgactctaatacaaagtattttcatttaatggcaaatggaaaacacaggaaaactagaatttatcaattacaggatggtgatcaattaataagaggtgatgccaatttaaagtcgcatattaccacttattataaaggtctttttggccctcctaatgaatctgatcttcagtttgatgataattatattgctggcattcctcaagtttcacatttggagaatgaagctttaactaaggaattttctgaaaatgagattaaggaggctattttccaaatggaacataacaaaactccaggtccagatggatttcctgctgagttttaccaagtgttctggaatgtaattaaatttgactttttacaactttttaaggattttcattctgggagtttgcctttatattcacttaactttggtactattattcttttgcctaagtgtgctgaggccatgaagattcaacagtatagacctatatgcctacttaatgtcagctttaagatttttaccaaagttgctacaaatagattaatggattttgctcaaaaggtaattagtcctactcaaacagcgttcattcctgggaggaatattatggaaggagtggttattttacatgagactttgcatgaattacatcgcaaagataaaagtggtgtaatttttaagatcgattttgagaaagcttatgacaaagttaaatggtcttttctacaacaaactttgagaatgaaaggcttttctcctagatggtgtgagtggatagcatcttttgttcaaggtgggcatgttggtataaaagttaatgatcaaattggtaattgttttcaaactttcaaaggtcttaggaaaggggaccctttatctcctattctttttaatatagtagctgacatgctcactttattgattaagagggctaaagaggctggtcttttgaatggggtaattccgcatcttgttgatgatggtttgtccattttgcaatacgcagacgatacaatcatctttttggagcacgacttacaacaggcaaagaatttgaaactgattttatcggtctttgaaaagctatctggcctaaaaataaattttcacaagagtgaattattttgttttggtcaggctaaggagtgttatgagcaatattcggacatttttggttgtaagttaggtgctttcccttttaaataccttggaattccgatgcattttagaaagctttctaataaagattggaaacttattgaagagagaatagagaaaaagcttagtagttggaaaggcaagcatttatcggttgggggagatgatcataagaaaaaatacaggctcactaggtgggatgttgtctgtcaacccaaggaccaggggggtcttgggattcataatctggaggaataa

SEQ ID NO: 80280 - DNA, 1256 bp, Oryza sativa
  Clone ID: PAT_MRT4530_7991C.1
atgggcccacgtgccagtcagagagtggcttgcgcactgtcgatgtgctgggcccaccagttttctttgatgggcctagatgtaattgggccttggtggatagagaggaggaggagagagaaggagagggagaagaggaggaggaggaggtcgccggcggcgaggagggggacgagatcgccggagatggacatcatctcgcagctgcaggagcagctgaacgagatggcgatggtggcggtgaacaccttcgggacgctgcagcgggacgcgccgccggtccgcctctccaacaactacccggacccgctcaaccccgccgccgccgcagcagcaaaccctaaccccgacgaccccgcccagccgcagcctggagcggcggcggcggcggcggcgggagctccggctgcgcaggcacaggctccgccggcgcaggcccagccgcccgcgctcgacctcgccgagcatcccaaggccatgagccacgcgctcgtcctcgccgccaagaagtttgatgctcttgtttctgcgttgccactatcatctgaagaggatcagctgaaaagaattaaagagctacaggcagagaatgaagttgtaggcacagagcttcagaaacaactggaagctgctgagctggagctgaagcaagttgaggctctttttaatgaagctacagatcattgtataaacttgaagaagccagagtaatagggatcaatggaacggaacccatgttggagtcatgaacagatgaaggtggagatgtgaatgccagctgccggggctacaatgtagactcaggtggaggatcaagggagccggtgctcaaccattgtccaggaggcctgggcggatgaggaatgaagcctagcgctgtgaggggcactgactggaatgggtgcagccgggggcctcgatgctgaacggtttggggcctggcttcctcttggagaggggtcgagttgttagtcgatatatgaccgcggttagctgtccgacggtgcttaatcgtacgatatagaccattctagttacacaacatctggctcaccttttcacagcacatatactacacacagacgtaaaacggataacacgaggaactctctatgacaatgtgagtcatcggcgcgcaacgacttgagggacgcgtgcgccgtactgacgtatgaacgtaactgaaacgacgatctacatacacagcagcgataatcatagaacgtacgtaggaagtgcttcagcccaccactctg

SEQ ID NO: 80281 - DNA, 1411 bp, Oryza sativa
  Clone ID: PAT_MRT4530_79920C.1
ttcaagtttatttgtgaatctctatccatagtttgcaaggagttgcatgaccgttgtctcaagcctacgacatgcaaccttcaataagctcgcgatcatcttcacacatttgtagttgtgcccaaaaccgaagccaatgggttactctgaaaatgacctttccaactactaagctttttctcaattctctcttcaataagtttccaatctttattagaaagcttctcttgtgaaaatttatttttaggccagataacttttcaaataccgataaaatcagtttcaaattctttgcctgttgcaagtcatgttccaagaagataatagtatcatttgcgtattgcaagatagacaaaccatcatcaacaaaatgaggaataaccccattcaagagtcccgcctctttagccctcttaatcaatagagtaagcatgtcagctactatattaaaaagaataggagataaaggatccccttgcctaagacctttgtaagtttgaaaacaattaccaatttgatcgttaacttttataccaacatgaccaccttgaacaaaagaagctatccattcacaccatctaggagaaaagcctttcattctcaaagttttttgttgtacaaaaggccatttaactttgtcataagctttctcaaaatcaatcttaaaaattacaccgcttttatctttgcgatgtaattcatgtaaagtctcatgtaaaataagcaccccttccataatatttctcccaggaatgaacgctgtttgagtaggactaattaccttttgagcgatatccattgttctatttgtagcaattttggtaaaaatcttaaagctaacattaagtaagcatataggtctatactgttgaatcttcatagccttaacacacttaggcaaaagaatgatagtaccaaagttcagcgaatataagggaaaactcccagaatgaaagtccttaaacagttctaagaggtcgaatttaatgacattccagaaaacttggtaaaactcagcaggaaatccatctggacccggagctttgttgtgttccatttggaaaatagcatccttaacctcattttcagtaaaatccttagttaaggcttcattctccaattgtgaaacttgaggaatgtcagtaacataattctcatcaaactgaaggtcagactcatcaagagggccaaaaagacctttataataagtggtaatatgtgactttaaattggcatcaccacttatgcgactggtgaaatagctcttcaaatagaatgaaatcaggactctttctacaacaaattgaactcgattcaacgattccaatttccaagcaaaagaaatgccatcattgtgtcgaatagctttctcaacatggacacatatgtcggcaatctggaaaagcctcat

SEQ ID NO: 80282 - DNA, 1467 bp, Oryza sativa
  Clone ID: PAT_MRT4530_79921C.1
cgcgatcgcacagccggagaccgaatcggataagctcgccggagtaatcgccgccgatgccaccgccgccgccgccgctcctcttggccgcggccgttctcgcttcggcggcggcggcactcgctgaccctcctccccctccgtccccgacgccgtggccggagcggttccacgcggtgcttttcacgaacctgacccagacgagcggcggcgggaagctgcagatgaccgacctctactacgactggcctggggggcgcaacctcaacctcgtcgccggccagctctccggcgacccggtctacgacgtcgagtggaccaacggcacctcctactacttcgactccgcctcctgccgcaccttgctgttccccgtcggcatcctgccccccgactggctcgccgccggcgccgcctacctcggccgcgaggccgttgacggcttcgactgccacgtctggaccaaggtcgacttcatctggtactacgaggacgtcgtcacccaccgccccgtccgctggaacttctacaccgggatgcagcagcatgtgatgagctttgaggtgggtggagccctagaggattccaagtggcaggcaccggcatactgcttcaacgatcaagaagccgccacaaattccgacaccgccaacgacaatgaagacggtgaggtcgatgcgatgagcagcctcctcaagttcttcagggctcagcaaacagccgtggcagcagtatgaccggccgggagacttatcacttatgagaatcttacttcctccgtttcatattataagactttctagcattatctacattcgtatatatgttaatattaacatctacatgaatatgggtaatgctagaaagttaggggctgtttggatgacttccctagtttaccacaaaatatttggcaaagtgtggcatgccatacattgtatagctaagaatttgttggccacaatcgtggcaagttatggcaaaaaaaaattactcaatgacaagtgggctagcttgctaaaaaattgtggcataactcacttgtggcatgaaacaaccactaggcttaattggtcaaacttgattgccacaactttggcaaaggttggcactcaaccaaacaaccccttataacctgaaacggaggtagtagcaattatccattggcggtctggtccagtctgttcttggatcatgttgtaataatgcataaaaagcgtttatgtatatactccccttttatgtaaccaagctcatatattaaaggataaaaaaaaatgcggccaaactgaaactttcttgtgaatataagatcataaggacatgaattagcccagtgcatgtaatcttctcctgtatggttgtgtaggtaatccagcaattggggtttcagagtactcattacatggctttaaattcctatttatgcgacagaatggcctattcatatttcatagtgcagttacg

SEQ ID NO: 80283 - DNA, 713 bp, Oryza sativa
  Clone ID: PAT_MRT4530_79922C.1
acgggccagagtcacaccagcgtcagcgggcgaggcccaataagccccgtggcaaacaacgccacgtcactgcctgacactgtccaccacactaattcgctgatccaaggccgtcgtccactcgccatcccaccggccaccgcctccgccgcctctcaccggcgccaccgcctcttaccagcgtcaccgctgctctgcctccaccgccttcttcctctccacaagccccggtcgcccagtacgcatcccacccgtcgcagtcgacctagctgcatggtggaggtggaggcgagggggattgactcggctccggtgctccgattgagcccgcaggcgaccgatctggagacggtccgctccgcttctcgccggaggctgtcacgaacccagccaatttagactaggaagcatgaggaggcgaccgggaatcgcgggtttacagaacgcggcggctactcgcatgagtgtgctcttggaaaatttaaggaccaattccggctggttggggaaaatgtggccaaggtcaggaccgatgtaatgaaggagcagcttgccacatttcggacacaactcgaagaatttgcactcaagcataaggtgattcttactcctgtattctagttgagtttgacagaaaatcttatcgtcgctattcgtatgtcccaaattgaattacacatagtgttgtgacctttagtcactaacaagatcag

SEQ ID NO: 80284 - DNA, 4900 bp, Oryza sativa
  Clone ID: PAT_MRT4530_79923C.1
ttgaagtctatttgtaaatctccaaccatatttggtaaaaagttgcataaccgtagtctccaacttgcgacatgcaactttcagaaactcttcatcttcatcacacctttataattgtgcccaaaactggagtcaatgagttgccctgaaaattaactttccaactactaagctttttctcaattctctcttcagtaactttccaatgtttattagaaagcttcttttgtgaaaatttatttttaggctagataacttttcaaatacatataaaatcaatttcagattctttgccagttgcaagtcatggtccaaaaagatgatagtatcatctgcatattgcaagatagacaaaccatcatcaacaagatggggaataaccccattcaaaagtcccgccttcttagccctcttaatcaatagagtaaacatgtcagctactatattaaaaagaatatgagataaagggtccccttgcctaagaccattgtaagtttgaaaacaattaccaatttgatcattaacttttataccaacatgaccaccttgaataaaagatgctatccactcacaccatctaggagaaaagcctttcattctcaatgtttgttgtacaaaaggccatttaactttgtcataagctttctcaaaatcaatcttaaaaattacactgtttttatctttacgatgtaattcatgcaatgtctcatgtaaaataaccacccctttcataatatttctcccaggaatgaacgctatttaagtgggagtaattaccttttgagcgacatccataattatattaatagcaactttggtaaaaatcttaaagctaacaataagtaagcatataggtctatattgttgaatcttcatagcctctacacacttaggcaaaagaatcatagtaccaaagttcagagaatataaaggcaaactcccagaatgaaagtctttaaacagttctaataggttaaatttaatgacattccaaaaaatttggtaaaactcagcaggaaatccatctggacccggagctttgttgtgctccatttggaaaatagcatccttaacctcattttcagtaaattccttagttaatgcttcattctcgaaatgtgagacttgaggaatgtcagcaatattattctcatctaactgaaggtcagactcattaggagggccaaaaagacctttataacaagtggtaatatgcgactttaaattggcatcaccacttattaaatgatcaccctcctgtaattgataaattctagttttcctatgttttccatttgccactaaatgaaaatactttgtattagagtcaccctctaaaatatccttagtcttagcccgctgataccatttaatttcttcttcccttagaatgacagataacctactcctgaaaaaccatctaatatcaacttcctcttgagacaggagaacagtctctgcctttttatccagcgcctccaacttatctaaaatatgctttttctcttttttatataaaccactggtatgtttagcccatcccctaagatgctgtcttagacggcgaattttcgcttgccaacgctccataggagtattgccctcatcaaccccagaccaaacttcttttaccatatcaacaaatccatcacgtaacaaccaaccaagttcaaacttaaaactatgttgagcgttactaaaagaggaagattttgtatttaggagcaaaggagtatggtctgaaatatctctattgagagcaacaacagaggataaagggtatttttgctcccattccgtcgacactaaaactctatccagtttctcataggttgggtgtcccagattatttgcccaagtaaaattcctaccagtcatttgtatctccctaaggcacaacccatcaataatagcattaaataagaagggccatctatcatcataattatcattatttttttcattaggactacgaataatgttaaaatcaccaccaataagaattggtaaggtctcatgactgcacatgttaactaattctgcaagaaattggtccttaaactcattttgtgcaggtccatacaccaacactaaggcccacttaaaattatcagctttatttcgcaaatgaaacttaatataaaaaaccccctcatcaatcaaaccaatgtcagaatttaataaattaatacccaacagaagaccaccagatctgcctctaggaggtttacaatgccacaaaaaatctttaccagcacaaagattattaagagcagctgtagaaaattctttcttaacagtctcagataaagcaataaaatcaagttgatgttctttggttaaatcagaaacaaacttatgttttttcgggtccttgaacccatcacaattccaaaagattccttcaacaattacatgaggaatttggttaacagaggaactaatatgttcactcaacctatttttctctacacactttaaatcttctataacattattgagaataacatttttatttgaaggaatcacacctttagcatggggtttctccaagttcttttccgccttcaacctttcagctctttcaaggacaagctgatcactatcagaagctctccttttgcttttcctggatggagaaattaacgcctcgggaatagcagagatttttccaaccagtttttcttgctcaaccaacacggtctcctcatccaacccgtcaaaatcttcgtcagacgcagtcaaaccttctgactccggtatcaaactcaactgagaagaggtaaaagaaggaccacccctctcagtaagattactatcagtagccatactcacatcagagacacccagtccagacttctttcccatgtccttgtcattttccccatcgtcatttctcttcccatcaccatccccaaaattatccatatccaaaggaacaggatccccagcaccaatatctgactccactttaaaagacagctcatacaaatgatcaccaatggccacatcaacaacatcagggattagagatgggtcaaggaccaaaacttgtaaacgagctatctcataccttctagtaaataacatatcaacagctttagtaatcccaagaatagaaccaactgcccaaataattaaatattccctcaacccagaaggaagccccttacactgaacccaaacttttggaatgacatatttcacctcattcccaacacctctttctatgatctccatctgagcctcaccaactttagtgtgcacctttccccattccaccatgcgattcagctcagcagcagaaggaaagatggtatgaaaagtgttatcaccattgtcatgtaccacccacctccatttaccaggaattaacctctccaattcagatacaacagctttaactgtcatctgaccattagatattttaaccaaggccgccctagggtcatgcctaatcctttgtccagctgggagggggatatgaaaaaatcccaaaccatcacccccataaccacataactgagcagtaggtttcacagctgatctaaaaacaggacaccgggtagcaatgtgatccacactttcacaaatttcacaataaaattttgatgaacactcctgaagagtatgccccttagtcaaacacctatagcagtaaggtttacccaatcccttagtgtctgcctttgatttacctttctctgaatcagtggcgcaaacaagcaacccttgttgtacgggttcagcacccaccgccggggtaacagatgcgatgacatcacccgttttagcagcagcaacaagagtaccacccacagcaaccgatccactaactgacccagaggtatttgcagctaaacccgtagaaccactagccgaagttcttccaaaactcggtatcacaccaactgaattaactgcagaagtcccaacaatcttacccacatgtccactcggcgtcaaacctgcaggtagcactagcgatgctgacacagaggtagcagtggctccctgaccaccaccacccagcggaagaccagctgcaggaactccacccgggtataaaccacccggcggcccaaaagcacctgccggcggcgccataccacctgccggcacaccactagatccacccgtcgctgcaaattgaccaccaaacgacggcacaccgaagaactgtgacccagatgcatcacttgccggccggccaaaagagcccaaagggaaccctaaaccggaattgaagccagttggcccagcattctgtccaaacccaccgttccaaccttgtcctcctccaaagttgccatgccatctaccactgttgccgtgagagaagtcatggcgattgttgtgaccgccaaactttccacgaccccgtccccttcctcctctaccatctctgccttgctgtggaaaaccacctccggaacccggatgaaaaccccgagcaaagccaccgccatgcccgccagcaccgaaaccctagccgccgaggccgccgcgacctcagccaccccctccccaaccgccgccgcgcctccctcctcgccctccccagcaaccgccgctgcgcctccctcctctcccttcccagctgctaccaccgctgccgctttctcccgcgagatttggatgtggggagccacggtgctgcctcctactcccagcccagcgcgtcggcggctcggcgagcaacgcgcggatccgtcgtcgccgccggcatcgtctccaggtcatcgccggcttcgtctccctctccctctcgccgccaactctcacctctctctccctccctctctctctctctccctcgccgccgccgctggcctctctctcccgtcaccggcggccccacaagccacgctcgcgtccaacgtgccccctcggctgcgtt

SEQ ID NO: 80285 - DNA, 2098 bp, Oryza sativa
  Clone ID: PAT_MRT4530_79924C.1
atcggcacgaggcactctttcccccctcccgggctcagcacagagcagagagagagagagagagagagagcgctgcggaggagaccgatgccgccgccgccgccggagccggagccggagccggtggtgatccacgcgtggtcggcgccgcgctccctcagcaccagcctcatgtactccttcgcccagagggatgacatggaggtgctcgacgagccgctctacgctaatttcctgcgcgtcaccggcgtcgacaggccgtatcgcgaggagcttctgtctaacatggatcctgatggtaacaaagttatcagtgaagtcatttttgggccagggaagagaaaatatcgttactgcaagcacattgcaaagcagcgcctccctaacctgtcaagtgacctgatgaaaaagggaaaacatttcatattgatacgcaaccctctaaatatcctgccatcatttgacaaagtcgtcccaccatcattctttgagctcggcatagcggaacttgtctcgatatacagtgaattgtgtgagcttgggagccctccgcctgtgatagatgcagacgatctacaacgggatcctgaggctgtcttgagtggactatgtgaggatctaggtattccttatcagccacaaatgctccaatgggaagctggccccaaggactttgatggtatttgggctccctggtggtataggagtgtacacaagtctactggtttctctatgccacgccgttatcctttgatcatcccatctaattttttgcaagtagtttttttcaccattgtattgaatatgttatggttcttgcagacttttccatttgctttgtatgatctacttgaacaaagcttgccattttacaacgtgctgaaacgccatgtaagcaaaaccataggatccccgcaaccaacattacctgatcctcctcttccagtacctgaaaataaaaaaattcttgtttgggttggagatgagcttttgccccgtgatagtgcaaaggtttcagtatttgattcagttgtacaaggaggggatgctgtgtgggaaggattacgtatatacgatgggaaagtgttcaaacttgatgaacacttggataggttgtttgattctgcaaaagctatggccttcagcaatgtgcctagtcgtgattggattaaggatgccatctttaggactctcaatgcaaatggaatgttcaataatgctcatataaggcttacactcacccgtgggaagaaggtgacatctggaatgagtccagctttcaacctctatggatgcaccttgataggagtggaaaccaccagtttatgataactcgcatggaataaagttggtaactgccaccacgcggcgtaattctccgaatagcatagattcaaagatacatcacaacaatcttatcaacaatattctggcgaagatagagggtaaccttgcacaggctgaggatgccatcatgctagataaagatggttttgtatcagaaacaaatgcaacaaacatttttatggttaagaagggcattgtgttgacacctcatgctgagtactgccttccaggcattacgcgtgcaactgtcatggatcttgtggtaaaagagagcctggtgttacatgaacgtcgcattagtttatcagaatttcatgctgcagacgaggtatggactactggaacgatgggtgaaatcacaccggtcgtaatgattgatggtcgtgaaattggtgacgggaaaataggtccggtcacaagacaaatccagaatgcatacaaagtcataactgcaggttctggagtaacaatacccagaaatgccgatgaataacaggtgtatatgccttcctggtctacctgccggaaccagtataaagcaaacttgattgttagagaaataaatgtgaaaagatgcatcactaaattgtcgtgccaattggaaaatgtgtatgaagcatgtactctgtttttcttagactcagtaggggttttcgccaaaattgcagatttcatttgtggacgattatgaattcaataaacatgtccaatgctagtagctcagtttggcactgtggtggcctttctaaaa

SEQ ID NO: 80286 - DNA, 2369 bp, Oryza sativa
  Clone ID: PAT_MRT4530_79925C.1
gaacaattgagcactcgagtaggatgtggttgagtacaccccattatcgagaacattctcaaaaaaagctgagttgtcgcacccaacctaccaacgaaaaccgacgacctatctcatgtatagcgacagctacagctggactatttgggaataggttggactcaatctatcgtgtcaaagactccatgtctctacggtcttacactgggatcgactcaggcatcacaacagtcaagttgggaggctttgtcacagactttgctccttctcgattactcgagaacggttgatggagctcaacaaggaatatggaatgaagcgatggtagggatctagcactatctctgatcccaccgactgcgtattcaaggaggaagactaccctgtcgtcgactacgagttgattatttagccgccaagtcgacgacagttgaattctgtatgtgaacctccatccaaaattgacaaaaagttgcataaccattgtctcaagaatacggcatgcagcctttaaaagctcactatcttcataacactccacaaaaagatgttgaatagtttcattttttaatacaaaagcaccatcttaagctaccattccaaattccttctcaccaaattgtccttagttaacacaacccctttaagcaagtaccacataaagatcttgatcttaagcggcatcttaagtttccaaattaacttatttctgtcaatgtaaccattattaattaaggcttaaggctagatacattgaccgaacaaaaaaaattggccattgtaatgatagttccatctaaaacagtcagaagaaagaatttaattgaatatgtccaatagaagccccacaattcatgccaatttgctagattctgaccaactaaagctctcctaaaagaaacatttagcgggacagagcccataacactagcaataggggcactcttcctcctaacaatagcatataaagatagatacttatctttaaaagctaagttacctaaccatttatcttctcagaatctaacttattccctattattcaaaatctaggaacccatatttaataaagtattcttaacttttttttatgaggcctaacaaaaataagaatctccttgtttcctaccaacttgggtaatagatttattatagagatattttcttttcaataagtattgccaaaccccttactaatttattaatttataaacaacaatttactcaaaagacacttattgtgtatttccaaattatgtatccaaagaccccccctcccccttggtgctcgggttggcaaataatatcccacctagtgagcctgtacttttttcttatgatcatccccttgccaaaaagaaacgagatctataataatcaattttttgaagaacccctttacgtatctcaaaaaatgatatcataaacatagctagacttgaaagcacagagttaatcaaaaccagtctacccccaacagataaatgttttcctttccaactactaagttttttttctcaattctttgctcaataactttccaatctttgttactcaacttcctaaaatgcattgaaatcccaagatatttaaaaagaaaaaaccccagcttacaaccaaagatgttaagagtactggtcataatattcctttgcctggccaaaacaaaatagttcactcttgtgaaaatttattttcaagccagacaatttttcaaacacggataaaatcagtttcaaattctttgcctgttgcaagtcatgctccaaaaagatgatagtatcatctgcgtattgcaagatagacaaaccatcatcaacaagatgaggaataaccccattcaagagtcccgcttctttagccctcttttgagagacatccattattctatttgtagcaactttggtaaaaatcttaaagctaacattaagtaggcatataggtctatactgttgaatctttaaagcctcagcacacttaggcaaaagaatgatagtaccaaagttaagcaaatataaaggcaaactcccagaatgaaagtccttaaacagttctaaaaggtcaaatttaatgacattccagaaaacttggtaaaactcagcaggaaatccatctggacccggagttttgttatgttccatttggaaaatagcatccttaacctcattttcagaaaattccttagttaaggcttcattctctaaatatgaaacttgaggaatgtcagcaacataattctcatcaaactgaaggtcagactcatcaggagagccaaaaggaccggtttttcgtcccgcttcgtcgcccccctctcccaaaatcccaatccgaatccaatcaaaccccgccgacgccgcccacaccgccat

SEQ ID NO: 80287 - DNA, 1185 bp, Oryza sativa
  Clone ID: PAT_MRT4530_79926C.1
cccaagttggaggcgctggataaaaaggcagagactgttctcctgtctcaagaggaagttgatattagatggtttttcaggagtaggttatctgtcattctaagggaagaagaaattaaatggtatcagcgggctaagactaaggatattttagagggtgactctaatacaaagtattttcatttagtggcaaatggaaaacataggaaaactagaatttatcaattacaggagggtgatcatttaataagtggtgatgccaatttaaagtcgcatattaccacttgttataaaggtctttttggccctcctgatgagtctgaccttcagtttgatgagaattatgttgctgacattcctcaagtttcatatttagagaatgaagccttaactaaggaattttctgaaaatgaggttaaggatgctattttccaaatggaacataacaaagctccgggcccagatggatttcctgctgagttttaccaagttttctggaatgtcattaaatttgaccttttagagctatttaaggactttcattctgggagtttgcctttatattcgcttaactttggtactatcattcttttgcctaagtgtgctgaggctttaaagattcaacagtatagacctatatgcctacttaatgttagctttaagatttttaccaaagttgctacaaatagaataatggatgtcgctcaaaagattaagagggctaaagaggcgggactcttgaatggggttattcctcatcttgttgatgatggtttgtctatcttgcaatacgcagatgatactatcatctttttggagcatgacttgcaacaggcaaagaatttgaaactgattttatcagtctttgaaaagttatctggcctaaaaataaattttcacaagagtgaattattttgctttggtcaggcaaaggaatgttatgagcaatattatgatatttttggttgtcattttcagggcaactcattggctccggttttggcacaactacaaaggtgtgatgaagatgaagagtttctgaaagttgcatttatggaaaacatgagcaagttgccaagttggtgggggtatgtgtatgcgtctttgttgttgatacatacgctgtatgttgactgggcctttagtaccaaccagaagtcacttggcaagttggttaatggttaa

SEQ ID NO: 80288 - DNA, 1696 bp, Oryza sativa
  Clone ID: PAT_MRT4530_79927C.1
atgaggagcttccatttcgtcgtcgtcctcgcgctggcggtggcgatctcgtcgccattggcggcggcgcacctgaggcagaactactacgccagcatctgcccgaacctcgagaacatcgtgcgcgggtccgtgcagaggtcgatgcagcagtcgccgatcgcggcgccggcgacgctgaggctcttcttccacgactgcgccgtccgcgggtgcgacgcgtcggtcatgatcatcaacccgaacggcgacgacgagtggaggaaccccgacgaccagacgctgaagccggaggggttcacgacggtgatagccgccaaggccgccgtcgacagcgacccccagtgccggaacagggtgtcctgcgccgacatcttggccctcgccaccagagactccgtcttcctgagtggagggccggactacgcggtggagctcggcaggttcgacggcagggtgtcgaccaggaacagcgtcaacctgcctcatggcaacttcaacctcgaccagctcaccggctacttcggcagcctcggcctcagccccaccgacatggtcgccctctccgggggtcacaccatcggggcggcgtcctgcagcttcttcggctacaggctcggcggcgacccgaccatggaccccaacttcgcggcgatgctgcgcggcagctgcggctccagcggcttcgcgttcctcgacgccgcgacgccgctccggttcgacaacgccttctaccagaacctccgcgccggccgcggcctcctcggctccgaccagacgctctactccgacccgaggtcccgcggcctcgtcgaccgctacgccgccaaccagggcgccttcttcaacgacttcgtcgccgccatgaccaagctcggcagggtcggcgtcaagtcgccggccaccggcggcgagatccgccgcgactgcaggttccccagctggttttgtctcacgtggtatatttgaccttgttgattggctgaatcagcttgcaggaccccacatgttaatgacaaagattaaaaaacggtgggcccactgtcactgcccactgccgtcggacacgatccccacgcattgcctgcgccgccttaaccgcatcgccttcgccatgtttccctcttccaatccaccaccgatgtcgccggctgatgccctctcctcccccaacgtcatcgccaccgccaccgcagtcgaggatgaggccgcggtagcagcgggcagcgccaagaccttagcggtgcccctcagcagcaagagtcccccccccccgccaccatggcaaccccaacctagggattggctttgcctcctccgatcacatggtagcaccgccacctcctccttcacgccgcgccctgcgtttgcccaagcggtgccacgcaggggtcacctcctcgtcccgctcctaccagccaccaccggcgtctctcgttgtggctccgtggaatcagttcagccacctccatcgcacgtgtcgcccccgccatgccgtgggccgttaccggccatccatttgcgttgctgtgtagacgaaggtgcggaaggaggagggaaaagcgcgccgtcgtactccgcctgccgctcggatgtcctgctcctgcaccgtgagccgcccggcacggacccacggatccaacaccgccttcacctccgggttgacgccgccggcgtcatggaagacgagacgtag

SEQ ID NO: 80289 - DNA, 8958 bp, Oryza sativa
  Clone ID: PAT_MRT4530_79928C.1
atgttcgaagctggaggaggaaactacatccatgcatgtcaggaggtggcaaggattgccataggagagctccgcgatcgctacagtgatcagttggccgacactgagtatcgctaccatcctcgccaaccccagggaagtgaccgtggcagctaccttgagactgagaggattgagaatgatgctaccacaaggcatttggttgagatgctgtgggctatggatgagacccgcgcggagactgtgttagcagctcaagatcgtgaagaccggaatcgtggtaagatttgcaagctagaggacaaggtggatcgtttggagaaggaactagccgcgttgaagggagaagcaccaccgcagaaggccaggattcgtcttacggcaaggaagagagctctatttgtccctcgctaccaaatggcgccaaaggtccgtgtggcggagaaagaagttaccctagccctagcggatcctccggtcgtcaatatggtgctcactcgcagcaacgggaatagccccaacatcaacaataacaacaacaacaatggagagaatcccacacttgcccaagtcctggctcaacaggcacagcttatgaacatgatgatgcagcaactccagaaccagcagaaccagggaaataaccatgcacctccccagaacaagttagcagaatttcttcgtgtgaggccgcccactttctctagcaccactagtcctgttgaacctggtgattggctgcatgccatagagaagaagttggatttgcttcagtgcactgatcaggagaaggtctcatttgcatcacaccaactgcatggccctgcctctgagtggtgggaccacttccgccttaacaggactactgttgaacctatcacttggcttgaattcaccgctgctttccggaagatgcatataccatcgggagtgttgtctctcaagaagaaggaattcaggtcgctcactcaggggtctcgctctgttactgagtatctgcacgagttcaatcgtctggctcgttatgctccggaagatgtgcgcactgataaacagcgccaggagaggttcttggaaggacttaatgatgagctttcttacccactcatgactggggattatcatgatttccagaagttagtggataaggctattcgtcaggaggacaatcagaggccgcatcttactttaggaccccagtccctgccacagggaggttcttcgtctgttgttcgtccgcagcgtcagttcttcaacaacaatgctggcaacaacatccgcaatcaagctccacgccctgttgcagctccaacacagcaacagcctgccaagagggagcaaggcagcaagcccggggtgtgcttcaactgtggagacccaggacattactctgacaagtgtccgaagccccgacgcgtgaaggttgtccctgcccagagcaactctaccgcaccagcattaaaggcccgtgtcaatcatgttgccgctgcagaagctcaaggtgctccagatgtgattttggaatccaaagaccttgatgtcatcctagggatggactggttagccagatataaaggtgtgatagactgtgccaacagaaaagtaactctcaccagcaatgatggtcaagttgtaattgttcatgcattgtcttctgagtctttaaggtcaagtctgaaccaaatgactttggaagagattcctatagtccgggagtatcccgatgtgttcccagacgatttacctggtatgccacctaaaagggatatagagttcagaatagatttagtactaggaacaattccgatccataagagaccttatagaatggcagccaatgagttggcagaagtcaagaggcaagtagacgatttgcttcagaaaggatacatcagaccaagttcatctccatggggagctccggttatttttgtggaaaagaaagatcatacccagaggatgtgtgtggactatcgtgcactaaatgacgtgactatcaagaataagtacccgctgcccagaattgatgatttgtttgatcagcttaaaggtgccaccgttttctccaagatagatcttcgatcagggtatcaccagttgagaatcaaagaggaagatatacctaagacagcttttaccactaggtatgggttgtttgaatgtactgttatatcttttggacttaccaatgcccccgctttcttcatgaacttgatgaataaggtgtttatggaatacctagacaagtgcgtggtggtctttattgatgacattcttatctactcccgaaccaaagaagagcatgaagaacatcttcgccttgcactaaagaagctacgagaacatcaactgtatgccaagtttagcaagtgtgaattttggttgtctgaagtaaagttccttggtcacgtcatctcagcaggaggagttgctgtcgatcctagtaatgtggaatccgtaaccaactggaaacaaccaaagacagtttcagagattcgcagtttcctaggcctcgcaggatattatcggaggtttatagagaatttttccaagattgctaagcccatgacacggttacttcaaaaggacgtaaagtacaagtggtcagaagaatatgagcagagttttcaagagttgaagaatcgcttaatattagctcctattttgattttacctgatccaaagaagagtttccaagtgtattgcgatgcatccaaaattgggttaggttgtgttctgatgcaagatgggaaggtggttgcctatgcatctcgtcagttacgtccgcatgagaagaactaccctactcatgatcttgagttaactgcagtggttcatgcgttgaaaatttggcgtcactatcttttcggtactcgtacagaggtgtacaccgatcacaagagtttaaagtatatctttactcagccagatctgaacatgagacaacggagatggttggaattaattaaggattatgatatgggaattcattatcacccgggaaaggctaatgttgtagcagatgctcttagcaggaaaggctattgcaatgctacggaaggacgactgccattggagttatgcaaggaatttgaaagattaaatttgggaattgtcagtagaggtttcgttgcagccttagaagcaaagcccactctaatcgatcaggttagagaagcccaaattaatgatcctgatattcaagaaatcaagaagaatatgagaagaggaaaagctatcggtttcttggaagatgagcaaggaactgtatggttgggcgagagaatctgcgtccccgacaacaaagatttaaaagatgcaattctgagagaagctcatgatactttatactccattcaccctggtagtaccaagatgtaccaggatctcaaggaaagattttggtgggcaagtatgaagcgtgaaatcgcagaatacgtagcagtatgtgatgtttgtcagcgagtcaaggcagaacatcagaaacccgcaggtttgctgcagcctttgaagattcctgaatggaagtgggaggaaatcgacggacaaaccgaaagggtaaataagattttggaagacatgttgagagcttgtgctttagacttcggtggaagttgggataagaatctaccttatgcggaattctcgtacaacaacagttatcaagctagtcttcagatggctccttacgaagcactgtatggtcggaagtgccgcactccgcttttgtgggatcaaacgggagaacgtcaggttttcgggatggatatcctgagggaagcagaagaaaaggtgaaaatcattcaagaaagattgcgtgtggcccagtctcgtcataagagttatgccgacaatcgtcgtagagatctaagttttgaagaaggagatcatgtgtaccttcgtgtcacgcctcttcgaggagttcatcgttttcacaccaaaggaaaattggcaccgcgttttgtgggaccttataagattgtcagtagaagaggagaggttgcttatcagttggagttacctcaatctttggcaggagtccataatgtgttccatgtgtcgcaattgaaaaagtgtttaagggtacctaccgaagaagctaatcttgaatagatagaagtccaagaggatttaacctatgttgagaacccaatccgtatcttggaaatagatgagagaagacccaggaatcgagttatccatttttgcaaagtccaatggagtaatctctcggaagaagaatcaacttgggaacgagaaggggaattgaaccgtggattcgagttcgattcggatcgatctctctcctccgaaccctaaaccttcctttccgtcgccggtcaccgtgggccttcgccgccgcctccttgcccctataaaaggacccccgagcttccctctacccgtcgccacccttgccttcgtctctcgtcgtccgtagcgccctagccccgtgagacctcgtgccgctgtcgtcgcagccgctccagccgtgtgccgccgtcgctccagtcgtcgccatcgctcggggaggtcgccatcgtggtcgccgtcgcgtcgccgccctcgtccacccctccgtcgttgctgtagatcgccggagcaccgccgtcgtcatcaagccgatcttctccgccgccttttcctcgacgccgtcgccgtccgttgatcttccgccgccgttttggtcaccggtgagttcgccgcgtcgctctctacgtgctggtgccctccgttcgtgccgtcgcgccgtcgttcgccggcgagcttgcgccgtccgagccgccgccggtggtgacgtcaccgctgacgtcatcgtcgtcgtccatccgtgagccgcggtggatccgatggatcttggccgtccgttttggatggatcaatctcggccgttcgtttccgtgagccgcttttgtataatatggttcattgcggagcaccagactgagaagtggcggagataagcccacgggggtcgctggggagtccatgcctctggtttttgagggggtgattatgatccaggaatggtgcactgtgtggtacacctctggccagagtaaaactattcgaatagccatgcccgcggttatgggcgagttgagcaataccgcaacctcgacgacttcgactaagactttgaagataactacacgcctctctacttcggcatcttcatggctgaaaacgagacggaagaacagcgtaaagcccgagaagcagaagaacaacgcgtgcaacaggaagccgaacgaccctgactggaagaggagcgccaagcacaagagcgagaacggctgcagcgtgagcaacaggagtgcgaacgggctgcaaaagaggctgaggaccggcgacagcacgccttggatgtcgggcgacgagcacgagaacttatcgggcagcaagacgttgagggaacggctgtttttcgcacccctcaacagaacgcggttgcagcgatcaccctcctcgacaccctcctcaaggaagacgcgccccgtcgatcttcgcgatactatcaaccagcgctgcgcggcaagagaatacgcttcccaccattcactagatcgctacgacaacgacgtggatggagttgctgccttcacaagcaaattgcgtcgagtggattggccagccggcttcaagccgactggaatcgagaagtatgacggcaccactaacccggagtcttggctcaccatctacggtctcgctattcgcgcagcaggacgagatagcaaagtcatggcaaactatttgcctgtggccctagcggactctgcccggtcctggcttcacggcttaccccgtggcacaatcggatcttgggcagaacttcgcgaccacttcatcgccaacttccagggtacctttgaatgccctgcctcccaggacggtcaagcagaagatgtcattaccgcgtccaagcagtcgggcaccacttggaagccgaagaaagatacgccaactacaggggggagtggaagtaccaatcacaaggatcgcaagcgtaaacccaaggaacttgtggcaactactacaccatcctcccgacaacgttcacgggtcaacacttctgacaagatcatgaactcccaatgtccgcatcatccaaactccaatcacgcggccaaagattgcttcgtctataaacagtttgcagaacaatacgccaagaatgcacgcaaggcctctgacggagatcaaagcacgttaaagaaggatgatgaagttgacgccccgactggttttcaagaccatcgcaaggaactcaaccacatctttggcggacccctgtcctatgaatccaagagaaagcaaaagctaaccgaacgggagatcaacgctattcagcccgacacgccccaatatcttcggtggtcagagacaacaattatgtttgaccgcttggatcatccttaccgtgtggtccacccagggcggtaccccctggtactagacccagtggttcgcaacgtcaagcttcgcagatccctcatcgatggtggcagtgcactcaacatccttttcgtcaagactctggacgacatgcagatccctcgcatggaattaaagccgagtaatgcgccctttcacggagtcatctcagggctatctgctacaccactcagccagatcactcttcccattactttcggcacttgggagaacttccacacagagaacatttgttttgaggacagcgtatcacgccatactcggacgcccgatatgcctggtcctcaaggagtcatatccctgcggagtgacatcaagcaagccgtcacgtgtgacaaggaaagctgcgagatggcccagttccgcgagatcacgctcgaccgagaagaaatccgactggctgcgtccacagcaagcgaaggagaagtgcctgcgaccaagatgccaaagagcggggcaagcgacaccaagaccaagaagattcctctagatccttctgatcctactaagactgctgataggaaggatgcgatcaaggtagaattgaccaagctgttagcagcgggcttcatcaaggaagtccttcatcccgactggctggccaacccagtcctggttcagaagaagacggggcaatggcgcatgtgtgttgattacaccgacctcaacaagtcttgtcccaaagatccttttgggttacctcgcattgaccaggtagttgactcaacggccggctatcggccgcaacgtgaagcttatgtggatgacatagtcgtcaagacaaagcagaaggatgatttgattgtggatctagaagagacctttgagagcatccgcgctttcaggatgaaattaaaccctgaaaagtgcatcttcggagtaccgtcagggaagctgcttggatttatggtgtcccatagaggcatacaagccaacccggagaaaatcaatgccatcctcaaaatgaaactgccgagctcccagaaagacgtccaaaagttaactggctgcatggcggcgctcagccgtggggacccacgaaaagcctttgaagacttcaaaaaacttctcactactccaccagtcttagcttcaccacatccgcaagagcaactgttgttatacgtgtcggcaacttcccaggttgtaagcacagtcctggttgttgaacgtgaagaagaaggccatgttcaaaaagtccaacgaccaatctacttcgttagcgagattttggctgactccaagacaagataccctcaggttcaaaagctattatatggtgttttagttaccgtaaggaaattatctcactacttccaagtcatgaaagagtggtcctgccttgatgataacataaccgcttaccggcaagaggtacgcaagttggaagacaaattcgatagacttgagctcacccatgttcttcgacacaataatgaggcagccgatagactggctaattttggttcaaaacgagaagcagctccttccgacgtgttttgtgaacatctctacgagccaaccgtaccaaggaaagaaacaatcgaggccatggacactcaagacataagcatgattgaagccgactggagagagcccctcataagatttttgacaaaacaagaactccctcaagataaagatgaagccgagcggatctccaggcgcagcagactttatgtcatacatgagaccgagctgtacaaaaaaagtccatcaggaatcctacaacgctgtatgtctttggaggagggaagacaattggtaaaggatatacactcaggaatctgcgacaatcacgctgccacacgaaccatcgttggcaaggcttaccagcaaggttttttctggcccacagccgtgtctgacgctgacaaaattgtgcgaacatgtgagggttgtcaatttttcgcccgacaaactcatctaccggctcaggagttgcaaaccatcccgttgtcttggccgttcgcggtttgggggctcgacatggtcggcccatttaaaaaggcagtaggtggttatactcatctctttgtagctgttgacaagttttccaagtggattgaagccaaacaagttataacaatcgcggcagacaaggctagagatttcttcatcaacattgtgcaccggtttggggtacccaatcggatcatcactgataacggcactcaattcacaggcagagtatttaaagatttatgtgaggactttggcatcaaaatttgttatgcctccgtagcgcatcccatgagtaatggacaagttgaacgcgccaatggtatggtacttcaaggaataaaagcacgagtttttgatcgactgcgtccctatgctggcaaatgcgtagaacagttgccatctgtactttggtccctgcgcaccactccgagtcgggctacgggccagtcgccgtttttcctagtctatggagtggaagcgatgttgccaagtgaggtggaatttgaatcgctacggagaagaccgagtagatga

SEQ ID NO: 80290 - DNA, 345 bp, Oryza sativa
  Clone ID: PAT_MRT4530_79929C.1
atggcgcccgttatcagcagcgtcgtggcagccactcccgtttctgcaggcggcgacgctgctgctgcttctgctccgccggccgtcgagcctccggccgctccagcttgtcaactgaaactaacacccgttctagtagaacatcccgggttaagcatagagctgacgatccgcgccgtggtccgtcccatatcacccaactgcgagtccaagcctcctccagttggtccgctcgaacctgagtctgatcctcatgacacatttcaagatcctaaaaacgaccctcgaggaggtaacaaacgcttgcctgtacgcactatctatttcatccgtctcataatataa

SEQ ID NO: 80291 - DNA, 273 bp, Oryza sativa
  Clone ID: PAT_MRT4530_7992C.1
tcccccctcccccccttttttagagtctaccctagcttccgcgagcgcacggtgccgccgtgcgctcacgggagccagtgtgacggcgccacatacactaaggaggttgtcaccgtcatcgttcaaatgctgtggcgaggagttgctcgagagatgaaggtgtctggcatcaaagcaagtgacgtatgctcctgttgggctgacgcgtggttgaggtttatctgggaacatgccgtgaacacaattcaggatataacgaaaacacgtctttcc

SEQ ID NO: 80292 - DNA, 2462 bp, Oryza sativa
  Clone ID: PAT_MRT4530_79930C.1
atggcacggggttccgctctgctcgacggaagcgtacttccgccttctcgcatcgtgagcgagaggcatgccgggctgccgcgccgctttatgccggaatctgccaccggccgggagatagtgatgctgggcgagggacgcccggcaccagactacccggggcggtccgtcttcttcctccccttcgcaatggcagggctggttccgccattttcttctttctttatggatgttctggatttctacgatctccagatggcgcacctcacccccaatgcagtgatgacattggccatcttcgcgcacctatgcgagatgttcattggggtgcgcccatctcttcggctgttccggtggttcttcaccgtgcagtcggtgtcgccgccgtcggtggttggtggctgctacttccagccgcgggggccggtgttgaaccgctacatcccctgcgccctccgcaagaagtgggacgactggaagagcgactggttctacacccccctcgccaacgaagcgcgcctccgacttccaagtcagcccccggcgcaggtctccagctggcgggcaccggtagatctgggggatgactatgacgccgtcctcgaccgcctggcgggcctgcgatcccaggggctcacaggggccatggtgtacggcgactacctccgtcgccggattgcgccgctccaacggcgcgcccggggcgcctgggagtacaccgggtccgaagactacatgcggacccaccagggagtcagatgggattgggctcccgaggacttcaagatcgtggtccaacgggtgctgaatctcagctccgtggaggcgtctctcattcctcaaggaatcctccccctctgcagcgatcccgaccgcgcctccattctgaccattatgatgggggtcggggcctcagaggaggaaactcctaagggccacgacggcgcgggcgagagccgccggggggaacaatctaccccaggagggggtcgtgcttctgggccccgcgccgggggctcggggagcagccgccctgccgacgcccaggggaagaggaagctgggaggaacacctcccccatctcctccccgagggggcggggcggtgcgtgccagcagtcggcacccggagggggccgcgccgacatcgcagcccgagggggagcgcaagaagaagcggctccgcaagatgggggagacggaaccatcccggggaaacctgatttcccctccaaggtggtcatttaaccgaccccctcgcaggttcgtcccactctcattgcgaccgtctttcttttatcccaaaagcaagttttctcttacccatcttgttcgtcttctggttttttcttttgcttcaacgatgtcccgtcacgttcctcccgccatcccaagtccggccagtccgaggccgaagatccggcggccgcagaggaacggaggcgagaatctgaccggcgagaggccgcagatcgccttcgggaagctgaagaggccgcccgggaggccgctcgggctcgccatgcagaggataccgctcgggaagaggccgcccgggctcgccaagccgaagaggctgctaaggaggaggccgcccgggctcgtcaggctgaggcgatggcgtcttccgaggcagctcacgacaaagctgcgggcgcgtcgcttgggcccactccctcgggcgacgctcaggcgacagcctccagggcggctcgcgacgaggccgcgggcggatcgcctgggatcggatctggagaaggccttgtgtccaaaagtccccccctatctaagtgggcaaggtcctccttttatatctcaagggcataccacatgcccctttctcagaagggcacccggagagcaaccgtaccgatctccgtccatttatgaagagaagaacagtccagtttggagagggagagatggtgcatgtggtatccccttaagatataaaaggaggaccttgcccaactgagaggggggctggactcttccaaattcggaacccagaagaggggagaggctggctcatactttggagctccttcatacacagatccaccaaaacacacaggagtagggtattacgcttctcagtggcccgaacctgtatacatcgcccgtgtcttgtgtgtttcctgtctcgcgagccggcaaaggggggcctgcgcggtctcccggtgaggagccccacgctccgtcatctggcgcgccaggtagggggctctgcgagggattttctgagctctcgcactctttcgtgtgcgccaagcttttcttgttcagcccaatggccgagccagcaaaggcgcccgacctcttccccagtatgacggtgcgcgggagccaaacccacgccgtcgagctcgtactcccacgccccctccacgccaaagtcctaggcgggagaaggcgctcgagagggccgaaggatccgcgacttcgacacccacaggaggtgga

SEQ ID NO: 80293 - DNA, 462 bp, Oryza sativa
  Clone ID: PAT_MRT4530_79931C.1
atgccgggccctacttcgctcgccaagcgaagggcctcgacctccccggcggacgagtccagcgcgccctgcagctcggcgatgcttcttcgcccgcgcctcgagctcagcggcccgctgatccagtgcggccctctcggcgcggacgccttccagattgcggtgcgcctgctcctcccgcgctgcctcgcggaggaacaggctatccgccagccgctgcgccacggcctcggcctccttgagagctcgcccccgctcggtgagcgcgttctcgcggaagcggagtgcggactcctcttcggcgcaggcggcctcggcgcgggcgcgctcctccagcgccgtggcgcgagcctcaagggcctcttcgcgctgccgggacgccgcctcgttctccgccgcgcgccgttcccgggcagcggcggcgtcaaggactccccgggcggcgtcgagcttctcctctag

SEQ ID NO: 80294 - DNA, 4020 bp, Oryza sativa
  Clone ID: PAT_MRT4530_79932C.1
atgaaactccctgatgatttggctgctgtcttcaccacaagggcgtcttctccccgtaggtctaggcgggatccggcctcggccccaacccagcctagctccagggaagtcggcgtcatactccagcctctcgacatggtttcaacggaacaactggatggctacctcagctcccccggcgtcgactcacggccaacggagatcattgaatttttgaagatagctacacgcctctctacttcggcatcttcatggctgacaacgagacggaagaacaacgtaaagcccgagaagcggaagaacaacgcatgcaacaagaagccgaacgacgtcgactggaagaggagcgccaagcacaagagcgagaacggttacagcgtgagcaacaggagcgcgaacgggctgcaaaagaggctgaggaccggcgacagcgcgccttggatgccgggcgatgagcacgagaacttatcgggcagcaagacatcgagggaacggcggcgccctgtcgatcttcgcgatactatcaaccagcgccgcgcggcaagaggctacgttccccaccattcaccagatcgctacgacaacgacgtggatggagttgctgccttcacaagcgacctacgtcgagtggattggcctgccagcttcaagccgactggaatcgagaagtatgacggcaccactaacccggagtcttggctcaccatctacggtctcgcaattcacgcaggtatctttgaacgccctggtacacagtttgacctctacaacgttgttcagaagtctagagaatcccttcgagattacatccgacgcttttccgagcaacacaacaagatctccgacatcaccaacaacgtcatcatcgctgccttcaccaagggcattcgccacaagctcttagtcggcaagtttggacgcaagcctcccaggacggtcaagcagatgttcgaaaaagccaatgagtatgcaaaagccgaagatgccgtcaccgcatctaagcagtcgggcaccacttggaagccgaagaaagatacgccgaccacgggagggagtggaagtaccaatcacaaggatcgcaagcgtaagcctgaggaacttgtggcaaccactataccatcctcccgacaacgttcgtgcgtcaataccttcgacaagatcatgaactcccaaagtccgcatcatccaaattccaatcatgcagccaaagattgcttcgtttacaaacagtttgcagaacaatacgccaagaacgcatgcaagaccactgacggagatcaaggcacgtcaaagaagaaggatgatgaagatgatgccccgactgattttcaagatcatcgcaaggaactcaaccacatctttggcggacccctggcttatgaatccaagagaaagcaaaagctgatcgaacgggagatcaatgctgttcagcctaacacgccccaatatcttcagtggtcagagacaacaattaagtttgaccgctcggatcatcctgaccgagtggtccacccagggcggtacccccaggtactacacccaatggatcgcaacgtcaagcttcgccgatccctcattgatggtggcaatgcactcaacattcttttcaccaagactctagacgacatgcagatccctcgcacggaattaaagccgagtaatgcgccctttcacggagtcatcctcgggctatctgctacaccactcggccagatcactcttccggttactttcggcactcgagagaacttccgcacagagaacatttgtttcgaagtcgctgatttcgagacagcgtattatgccatactcggacgcccggcgttagccaagttcatggccgtcccgcactacacctacatgatgatgaagatgccgggtcctcgaggagtcatatccctgtggagtgacatcaagcaagccgtcacgtgtgacaaggaaagctgcgagatggcccagacccgtgagatcacgctcgcccgagaagaaacccgactggctgcgtccacagcaagcgaaggagaagtgcctgcaaccaagatgccaaagagcggagaaaacgacgccaagaccaagaagattcctctagatccctctgatcctactaagactgctataataggcactgagttagattatatctttgcatggaaaccatctgatatgcctggtattcctagagaggataggaaggatgcgatcaaggaggaattgaccaagctattagctgcaggcttcatcaaggaagtccttcaccctgactggctggccaacccagtcctggttcggaagaagacggggcaatggcgcatgtgtgttgattacaccgacctcaacaagtcttgtcccaaatatccctttgggttacctcgcattgaccaggtagttgactcaacggccgactgcgagctactcagttttttggattgctactcaggatatcatcagatccgactaaagatatctgactgcttaaagacttcattcatcacgcccttcggggcctattgccacatcaccatgccttttggattaaagaacgcaggagcaacttatcaacgcatgatccagagatgtttttcaactcagatcggccgcaacgttgaagcttatgtggatgacgtagtcgtcaagaccaagcagaaggatgatttgattacggatctagaagagacctttgcgagcatctgtgctttcaggatgaaattaaaccctgaaaagtgcatcttcggagtaccgtcagggaagctgcttggatttatggtgtcccatagaggcatacaagccaacccggagaaaatcaacgccatcctgaacatgaaaccaccgagctcccagaaagatgttcaaaagttaactggctgcatgacggcgctcagctggttcgtttcacaactcggcgagcgggggatgcctttcttcaagctgttaaagaaaaccgataatttccagtggggacccgaagcacaaaaagcctttgaagacttcaaaaaacttctcactactccaccagtcttagcttcaccacatccgcaagagccactgttgttatacgtgtcggcaacttcccaggttgtcatgaaagagtggtcctaccttgatgataacatgaccgcttatctgcaggaggtacgcaagttagaagataaattcgatggacttgagctaacccatgtccttcgacataataatgaggcagccaacagactggctaattttggttcaaagcgagaagcagctccttcttacgtgttcgttgagcatctttatgagccaaccgtaccaaggaaagaaataatcgaggccacggacactcaagatgtaagcatgattgaagctgactggagagagcccctcataagatttttgaccaaacaggaactccctcaagataaagacgaagccgagcggatctccaggcgcagcagactttatgtcatacatgagaccgagctgtacaagaaaagtccgtcaggaatcctgcaacgctttgttgacaaattttccaagtggatcgaagctaaaccggtcattacaatcacggcagacaaggctagagatttcttcatcaacattgtgcaccggtttggggtacccaatcggatcatcactgataacggcactcaattcactagaggagtatttaaagacttctatgaggacttcggcatcaagatttgttatgcctccgtagcgcaccccatgagcaatggacaagtcgaacgcgcccatggtatggtacttcaagaaataaaagcacgagtttttgaccgactgcatccctatgccggccagtgggtagaacagctgccgtctgtactttggtccctgcgcaccactcctagtcgggctacgggccagtcgccgtttttcctagtctatggagcggaagcgatgttgccaagtgaggtggaatttgaatctctacgatttcgtaacttcagagaggagcgctacggagaagaccgagtagatgatctcaaccgactggaagaagcccgtgaagcagccttaatttag

SEQ ID NO: 80295 - DNA, 2883 bp, Oryza sativa
  Clone ID: PAT_MRT4530_79933C.1
atggcagaaattatcgttctttttgtcataaaaaagataggaatagctgtggcaggtgaaacactgaagctagctaaacccttgcttgcaaacaaaaccgagttaaagaaagctgagctagtaacagcacttccagttaacatgaaactgataaaagatgaacttgaggttatcaatgcatttctgaaggaacttggcatgaatggatgcaaaggtgaagttgtagaaacttgggtaaggcaagtacggaggttggcgcatgatatggaagatgttgtggatgagtttatgtatgttattggcaaaaacaaagagagagagtcacgagcttatgtgaagaaaattatcaagaaacctaaacctttattttcacttgatgaaattgctactaaagcagataggataaacagacagcttatggagctttctaaaagactaggacgttggacccaaccgatattgagtgggggtagtattcctgcaacaaaatatgacactgaacaacaacagttgtatctacctggacatgattattcaattactgatgctgagcttgtaggaattgataaaaatagacaaaccttgattgaatcattgtgtttggaagattgttctcttcggatcattgctgtctggggcatgggtggccttgggaaaagcactcttgtcaacaatgtctacaaaaaagaagcaacagtatccaatttcaattaccgtgcatggctttctatctctcagtcatgtagagtacttgatatttggcgaaacatgctgaaagagctctgtggaaaagaaagcagagagtttgatgctgaaaatatgagcagtacagaactaaaagtggaattaactaaaattctggatcaaaagcggtacttgatcatattggatgatgtctggttggctacagattttttaaagattagagaggttcttgttgataatggcctaggaagcagagtaataatcacaacaagaattgaggaagttgcttccatagctgagaatggttgtaagatcagtttagagcctctagataaccatgatgcatggcttctcttctgtaggaaagcatttccaaaaattgaagatcatatatgccctccagaattagagcagtgtggtatggacattatcgataaatgtgacggtttgcctttagctcttgtggcaatagggagtttattgtccttcaaatcaaagaataataaagattggaggcttttctacaatcaacttatttcagaggtacacaataatgagaacttaaaccgggtggagaaaattctaaatctaagctacaagcacctgccaaaccatctgaagtattgtttcttatattgtgctatgttcccagaagattatctgattcacagaaagagattaattagactgtggatcagtgaaggatttatagaacaaaaaggagcatgcagcttagaagatgtcgctgaaggttacctagcagagcttgtccaacgaagcatgcttcaagttgtagcatgtaacagttttgatagggttcagtgtcttcgaatgcatgacattgtgcgtgaattagccattttccaattgaagaaagaaagtttctgtacaatttatgatgacactcatggagtggcacaagtgggattagactctcgtcgtgtctcggtgcttcgatgcaacaatgatattagatcaagcatagatccatccaggcttcacaccttcatagcatttgacaccaccatggcattatcttcatggtcttctttcattttctcagaatctaagtaccttaatgtattagacttgtcaggcttgcctattgagactattccatattcagttggggagctgtttaaccttcggtttttgtgtctcaacgacaccaatgtgaaggaattcccaaaatctgttacgaagcttagcaatttacaaacattgagccttgaacgtacccagttgttgaatttcccacgagggttttcaaatctaaagaaattgcgccatctgcttgtttggaagttagtagatgctacatacaaaagtctgaataactgggaatctatggagccatttgagggcttgtgggacttgaaggaattgcattatttgaatgaggttcgtgcaactaaagcctttgtttcaaatctaggaaatttatcccagctgaggagcctctgcattacttatgtaaggagtagtcactgtgtgcaattgtgcaactctttatcaaagatgcaacatctcacaagattaaacataagagcacgcaatgaagatgagctgctcttgctggatgatttcacattgtcaaaccctctcgaaaagcttgaactggtaggccagttgtcagaaggaaccttggaatctccctttttctctattcatggatataaactcctgcaaattgaactttcatggtgtaagctcacagtgaatccagtggcccgccttgcagagttctcggatttaaccgagttacgtcttacaagggtgtacactgggccttggctgtactttcctgcaaactggttcccgaaattaaagaaagccgtcttgtgggatttgcagcaagtgaagcaaatatttatacaggagggagctctggccaacctgcattatcttcacatcgatagcctcatggaactacgtgacatccctgtcggtattgagtttctcagttcagtgaaagaggcatattttaccaggatgcattctgattttgtaaggaatttacgaacaggaaagataagccatatcccgaaggtccactggtcaacacaaggggtgtccacggatctcactggacttgctaatctgcctggagcatccaacatgaccaacacaaacccagaatggcgcatcttaggtggatcaggctgggttttcatctaa

SEQ ID NO: 80296 - DNA, 339 bp, Oryza sativa
  unsure (1)..(339): unsure at all n locations
  Clone ID: PAT_MRT4530_79934C.1
attttttttttggggttttttttttttgggggttttttttttttttttttttttttttttttttttnntnggggaaactaaagggaaacccctttttttggatttgtaatttcccaaggggttttttgcaaaacctgggggggggctttaaaactttttggctttttgggaaaacaaccttttgtcccctaaaaaattttttgggacccacccaagtccgggggggccccacgtgagcacccagtttggattccaattaagcgccgggggttttttacctggggaagcttttttaaaaaacaaaaggggttcccagggggttggttttgggccaccttt

SEQ ID NO: 80297 - DNA, 3420 bp, Oryza sativa
  Clone ID: PAT_MRT4530_79935C.1
atggctaattatctaccagtggccctagcagactctgcctggtcctggcttcacgggttaccccatggcacgattcgatcttgggcagtgcttcgcgaccacttcatcgccaacttccagggcacttttgaatgccctgacatcaccgacgacattatcatcgccaccttcactaagggtatttgccatgaactcttagtcggcaagtttggacacaagcctctcaagacagtcaagcaaatgtttgaaaaggccaatgagtacgccaaagcagaagacgctgtcactgcatccaagcagtcgggcagcacctggaaaccaaagaaagatgcgccgactacaggggggagtggaagtgccaatcgcaaggatcgcaagcagcaatatgccaagaacgcacggaagctgactgacggagatcaaagcacgtcgaagaagaaggatgatgaagacgatgccccgactgagacagctatcaagtttgaccgctcggttcatcctgaccgagtggtccatccggggtggtaccccctggtactagacccagtggttcgcaacgtcaagctccaacgatctctcatcgatggtggcagcgcactcaatatccttttcgccatgactctggatgacatgcagatcccttggaccgagctgaagccgagtactgcgccctttcacagagtcatccccgggctatcttctactccgctcggccagatcactttgccggttaccttcggcactcgggagaactttcgcacagagaacatttgcttcgaagttgctgatttcgagacagcgtaccttgctatactcggatggccggcgttagccaagtttatggccgtcccacactatacctacatgatgattaagattctaggacctcgaggagtcatatctctgcggagcgacatcaagcaggtcgtcagctgcgataaggaaagctacgagatggcccaaacacgcgagatcacgctcgctcaagaggagatccgactggctgcatcaacagcaaccgaaggagaagtgcctgcacccaagaaagcgctcatcacctttcttcaaaataataaagatatttttgcgtggaaaccatctgatatgcctggtattcctagggaggataggaaggatgccatcaaggaggaattgaccaagctgctagcagcaggcttcatcaaggaagtcctacatcccgactggctggtaaacccagtcctggttcggaagaagacaggacaatgtcggtatcatcagatccgcttaaatgagttcgactgcttgaagacttcattcatcacgcctttcggggcttactgctacatcaccataccttttggattgaagaacgcaggagcaacttatcaacacatgatccagaggaaattatcccactattttcaaggtcacttggtcacggtggtcacaccgttcccactcagtgacatacttcataatcgcgaagcaaatggacggattgcaaagtggaccttcactaaaaggacgtcttctccccgtaggcctaggcagaattcggcttcaacaccgatccagcctagctccaaggaagtcagcgtcatactccagccactcggcacggtttcgacggatcaattggaaagctacttcagctcccccggcgtcgactcacgaccaacagagatcatagagtatgacgaattcggctaccgctacgacaaccgcgacctcgacgacttcgacgaaagctttgaagataactacacccctctctatttcgacgtcttcatggccgataacgagacggaagaacaacgccaagcccgagaaacagaagcacgacgcgtacaacaggaggccgagcgacgccgactggaagaggagcgccaagcacaagagcaagaacggctgcagtgtgagcaacaggaacacgaacgggctacaaaggaggccgaggaccgacgacaacgagccttggacgcagggcgacgagcgcgagatctcatcgggcagcaagacgttgaggggacggcggtcttctgtagccctcaacagaacgctgttgcggcgatcaccctcctcgacaccatcctcaaggaagacgcactcaaccaagctgaccacgtcgtcaacatcttgaaccagaccaagaccatgattgctgcctcggtcccggttaactccagaagcgtccgcacgccgactggcagccgggtcccccatcttcgatctcaagattatcaccagccaagcctcagcatcgccggcgcaggatccaatcgcaggagcaggggccacaacgagcgatcgcccggcttcaagccgactggaatcaagaagtatgacggcaccactaatccggagtcttggcttaccgtctacggtctcgcaatccgcgcagcaggaggagacagcaaggccatggcaaactacttacctgtggccctagcggattctgcccggtcctggcttcattggttaccctgtggcacaatcggatcatgggcggaacttcatgaccacttcatcgccaacttccagggcacctttgaacgccctggcacacagtttgatctctacaacgggattcgtcacgaagatctagtcggtaagttcgggcgcaagcctcccaagacggtcaaacagatgtttgaaaaagccaacgagtatgccaaagccgaagacgccattatcgcatccaagcagtcgggtcccacctggaagccaaagaaagatgcgccgactatgggagggggtggaagtaacaatcacaaggaccgcaagagtaagcccgaggaacttggtgcgactactacacacacctcccgacaacgttcgcgcgtcaacacttttgacaagatcatgaactcccaatgtccgcatcatcccaactccaatcatacagctaaagattgcttcgtctacaaacagtttgcggagcaatatgccaagaatgcacggaagacctccgatggagatcaaagcacgtcgaaaaagaaggatgataatgatgatgcctcgacaggttttcaagaccatcgcaaggaactcaatcacatctttggtggccctctggcttacgagtctaaaagaaagcaaaagctgactgaatgggagatcaacgctgttcagcccgatacgccccaatatcttcggtggtcagagacaacaatcaagtttgaccgctcggatcgtccagaccgagtggtccacccgggggggtaccccctggtactagacccagtggttcgcaatgtcaagcttcgcagatccctcatcgatggcggcagcgcactcaatatcctcttcgacaagaccctggacgacatgctgatgaaccctgagttcctctcaacactcaagggcgcaccccacatgggccccacctgggtcggggtcccaaatgaagttacaagcccacaggctcatgacaggtga

SEQ ID NO: 80298 - DNA, 397 bp, Oryza sativa
  Clone ID: PAT_MRT4530_79936C.1
atctagttgaccgcccataaccgtaggcataactattcgaatagttttactctaatcagatgtgtacaactgtacccacaagacacagccccacgacatgtttctgtgcgctgtcatgccaccatggcataccagaaagaggccatgacagggccattcgcataacctcctctaaccaagcgcaccacacctcaggtttcgcccccactcctcaacaggcagcgggcagccccctctcgtgcctaggtgaattcggaagcagcaaaggccgtcacaggtcccactctatcacgccactcttgcctggatgcgtcagctagaggaaagctacaatacaagtacagccgttgcctacgctggcttgtggtaactatgataggttcttacaggtcatcct

SEQ ID NO: 80299 - DNA, 347 bp, Oryza sativa
  Clone ID: PAT_MRT4530_79937C.1
caagtgaaggagaagtgcctgcaaccaagatcccaaagagtggagaaagcgaagccaagaccaagaaaattcctctagatccctctaatcctactaagactgctgataggaaggatacgatcaaggaagaactccctaagctgttagcagcaggcttcatcaaggaagtccttcatcccgactggctggccaactcaatcctgattggtcgcaacgttgaagcttatttggatgatgtagtcgtcaagaccaagcagaaagatgatttgatcacggacctagaagaaacctttgcaagcatccgcgctttcaggatgaaattaaaccctgaaaagtgcatcttcgga

SEQ ID NO: 80300 - DNA, 4455 bp, Oryza sativa
  Clone ID: PAT_MRT4530_79938C.1
atgggtttcgtctccggcatcgacgacttcgtcttccctcccgagcaggcgttccagttcggcagcctcgacttcatcaccaacgacatcggcaggatttctctcctcgactcggaatcgaaccagtcaggaagaggccagatcgtagagcacgatgacttcggctaccactacgactaccgcaacctcgacaacttcgccgaaggctttgaagataactacatgcccctctacttcggcattttcatggccgacaacgagacggaagaaaagcgtcaagcccaagaagtagaagaacagcgccagaacgcggttgcagcgatcaccctcctcgacaccctcctcaaggaagacgcactcaatcaggccaatcacgtcgtcaacatcttgaaccagaccaagaccatgatcgcagcttcggtcccgattaactccgcaagcgtccgcacgccgactggcagccgagttcctcctcttcgatctcgagactatcaccaaccgagcctcagcgtcgtcgacgccggaaccagtcgcaggagcagggatcacgacgagcgatccgttcactcgcctcctgaccgacacagggagcgtcgagctgaacgtccccgctccccatatcgcaggcatcccatcgatctttgcgaaactatcaaccagcgccgcgcggcaagaggctacaacccccaccattcaccagatcgttacgacgacggcgtggatggagttgctaccttcacaagtgacctgcatcgagtggattgggcagccggcttcaagccgactggaatcgagaagtatgacggcaccactaatcctgagtcttggcttaccgtctacagtctcgcaattcgcgcagcaggaggagacagcaaagctatggcaaactatctgctcgtagccctagcggattctgcccggtcctggcttcacgggctaccccgtggcatgatcggatcttgggcggaacttcgcgaccacttcatcgccaatttccaaggcacctttgaacgccctggcacccagttcgatctttacaacgttgtccagaagtccggagaatcccttcgagattacattcgatgtttttctgagcaacgcaacaagatctccgatatcaccgacgacgtcatcatcaccgccttcaccaagggcattcgccacgatctcttagtcggcaagtttggacgcaagcctcccaggacagtcaagcagatgttcgagaaagccaatgagtacgcaaaagctgaagatgctgtcaccgtatccaagcagtcgggcactacttggaagccgaagaaagatacactgaccacaggagggagtggaagtaccaatcacaaggatcgcaagcgtaaacctgaggaacttgtggcaaccactacaccatcctcccgacaacattcgcgcgtcaacactttcgacaagatcatgaactctcaatgtccgcatcctccaaattccaaccacgcagccaaagactgctttgtctataaacacgcactcaacatccttttcaccaagactctggacaacatgcaaatccctcgcacggaattgaagccaagtaatgcgcccattcacggagtcatccccaggctgtcttctactccactcggccagatcactctaccggttacttttggcactcgggagaactttcgcacagagaatatttgcttcgaagttgctgattttgagacagcgtaccataccatactcggacgcccggcattagccaagttcatgactgtcccgcactacacctacatgatgatgaagatgccaggtcccagaggagtcatatccctgcggagcgacatcaagcaagctgtcacttgcaacaaggaaagctgtgagatagcccaaacccgcgagatcacactcgctcgagaagaaatccgactggctgcgtccacagcaaccgaaggagaagtgcctacgaccaagatgtcaaagggcggagaaggcgacgccaagaccaagaagattcccctagatccctttgaccctactaagactgctgaaagcgcgctcatcacctttcttcaaaataataaagatatctttgcgtggaaaccatctgatatgcctcgtattcctagagaggtgaagcactctttacatgttaaggaagatgctaaacctatcaagcaacgactccgccgtttctcacaggataggaaagatgcgatcaaggaggaattgaccaagctgttagcagcaggcttcatcaaggaagtcctacatcccgactggctggccaacccagtcctggtttggaagaagacggggcaatggcgcatgtgtgttgattacaccaacctcaataaatcttgtcccaaagatcccttcggggtacctcgcattgaccaggtagttaattcaacggccggctgcgagttactcagttttttggattgctacacaggatatcatcagatccgactaaaggagtccgactgtttaaagacttcgttcatcacgcccttcggggcctactgctacatcaccatgccttttggattaaagaatgcaggagcaacttatcaacgcatgatccagagatgcttttcaactcagattggtcgcaacgttgaagcttatgttgatgatgtagttgtcaagaccaagcagaaggatgatttgattacggatctagaagagacctttgcgggcatccgtgctttcaggatgaaattaaaccctgaaaagtgcatcttcggagtatcgtcagggaagctgcttggctttatgaaagatgttcaaaagttaactagatgcatggcggcgctcagtcggtttgtctcacgacttggcgagcgggggaagccctttttcaagttgttaaagaaaaccgacaacttccagaggggacccgaagcacaaaaagcctttgaagacttcaacaaacttctcactactccaccagtcttagcttcaccagatccgcaagagccgttgttgttatacgtgtcagcgacttcccaggttgtgagcacagtcctggttgtcgagcgtgaggaagaaggccatgttcaaaaagtccaacgaccaatctatttcgtcagcgaggttttggccgacttcaagataagatatcctcaggtcactcggttcggggatatacttcacacccgcgaagcaaatgggcggatcgcaaagtgggccttagagttgatgtctttggatctatccttcaagccgcgaacttcgatcaagtcccaagctttagcagacttcatcgccaagtggaccgagtgccaagaagacacgcctacagagaagatggagtattggactatgcattttgacgggtcaaagaggctttcaggcaccggagcgggggttgttctaatctccatgactggagagaggttgaactacgtattatggatacatttttctgcgtcccataacgtggcggaatatgaggcactacttcacggattaaggattgcgatctccttgggaattcggcgtctgatagttcgtggagattctcagttgattgttaatcaagtcatgaaagagtggtcctgccttgatgataacatgaccgcctatcgtcaggaggagggaagacaattgctaagagatatacattcaggcatctgtggcaattacgctgccgcacgacccatcgttggcaaggcttatcggcaaggtttcttctggccaacagctgtatctgacgcggacaaaattgtgcgaacatgtgaatgttgtcaatttttcgctcgacaaactcatctaccggctcaggagttgcaaaccatcccgttatcttggctgttcgcggtttgggggctcgacatggttggcccgtacaaaaaggctatcggtggttatactcatctctttgtagctgttgacaaattttccaagtggatcgaagccaaaccggtcgtcacaatcacggcaaacaaggctagagatttttttatcaacattgtgcaccgtttttcggtacccaatcggataataactaataacggcactcaattcactggcggagtatttaaagatttttgcgaggacttcggcatcaaaatttgttatgcctccgtagcgcaccccatgagcaatggacaagttgaacgtgccaatggtatggtacttcaagggataaaagcacaagtttttgaccaactgcatccctatgttggcaaatgggtagaacagttgccatccgtcctttggtccctgcgcaccacacccagtcgggctacgcgacagtcaccattctttctagtatatggtgcggaagcaatgttgccaagtgaggtagaattcgaatctttgcgatttcgtaatttcagcgaggagtgctatggagaagaccgagtagatgatctcaaccgactagaagaagcccgtgaagcatcgctaattcagtcggctcggtatttacaagggatgcgtcgttatcacaatcgcaatgttcgatcatga

SEQ ID NO: 80301 - DNA, 1059 bp, Oryza sativa
  Clone ID: PAT_MRT4530_79939C.1
atggccggatgtctcgagcacgcagctcatcatgatactaacatgtctaatactgcaattatcccatctactgagctagtgaattattatcgatttattgcacaattaaatcctttatggcatcagccgagaggaaggggtggcgccgacaagcgggccccacccgtcggtgattcacgggaggcgggtgcaccgtggaccaagtccacgcacgcgctggtccgcgggcgcaccacgtggcagacacgtggcaccacgagggcacccacgcggggcggcacagggaggccacgtggacggcctagatcggctagggcggccgatcgggcggccacgggcaggcgcggcgcggcaaaggggtcgggcggccgcgggcgagcagggcggcggcggccgaccggaaagcggcggcgctcgacccgatggtcgccggctgcgggcggcagcagcgctggatgcggtggcacacacgggaggcggcagggatgggagaggggctcactgagagggcggggacggcgaggcgaaggcgggaaggcggccgacgacgaggattggcggcggcgcttctcgggttggggtcggggacggcgctccgacgactcccgaccgcggcggaggtacggccgagggccagcaggacctggggaaggggatggcaggattaggagggcacgagaagactcccggcggcgtgaatcaccggccgaaagaaagaaaaacagcgggtgctcaccggtgtgcgatggaggtggagttccagcaggattagggcgacggggagcggtggccgaggaactccttgtccttgcagagccgagggaggcgacggcgtgggttggcgatgaccaaagcagcgggacgacgtggctgcagtcggcacacggaggtggtggctcgggtcgatggtggaggggtggttgcggtggcgatttagggaaacaaagcggatgccggtgtgcggctaggcacagcgaacctttcggcggtggtggcgcagcgcggcagcgacgggggtggcggtggcaagcgactggaggcgacgagaggcggctgtga

SEQ ID NO: 80302 - DNA, 606 bp, Oryza sativa
  Clone ID: PAT_MRT4530_7993C.1
gcacgaggaaatagatattactcaatctaatcttaactctgaaatagatacctaaaattgctgtacaggaaatccgaggctgtgttcatgcacatgaaattttacacatgaattgtaattcctgtaagcgacacttaatgtgctgaatgaatggagatccaattcaagatttttattttagcattgtactgatttgtttacatatggcttcttagttgttaggttgtagatgatatcactatcttttatttaatatttatgcaaacaaactaacacttttttccttcaatgcatgttccatttttagttatgattatctcccaaaaaaagttatgatatgtattctagtgaggtattgacgcatgatagaaagggtgattggtgggcatatcgcaagaggcctcattcaacttttccttctcacagggtgtatattggctatgaattaccaggctaaagtttattagtcaaaccaatgctgttgactaagtcaaatgatctcttagtagtttacataaaatgtggcaaaatagcttaggacatataagctaaatgatagtaatatatatacacatgataccgtattcaactattccttcttctcac

SEQ ID NO: 80303 - DNA, 4380 bp, Oryza sativa
  Clone ID: PAT_MRT4530_79940C.1
atgggttccgtctccggcatcgacgacttcgtcttccctcccgggcaggcgtttcggttcggcaacctcgacttcatcaacaacgtcttcggcaagatcttctctcttgactcagattcgaaccagtcagggagagaccaggtctcagccccgttcggtattccgaactcggccaagatctaccccaagcttatcttgatcgagtcggcttcaaaccactcggacgagatcccatctactccaacaacaccagatcgagatgatggggcctacccgccaatcctgatgaaactccccgacgatttggctgcgtcttcactacaagggcgtctcctccccgtaggcctaggcggaactcagcttcaacaccgatcctgcctagctccagggaagtcggcgtcatactccagccactcggcacggtttcgacggatcaattggaaggctacttcagttccccttgcgtcgactcacgaccaacagagatcgtggagtacgacgaattcagctatcgatacgacaaccgcgacctcgacgactttgacgaaagctttgaagataattacacccctctctatttcagcgttttcatggccgacaacgagacggaagaacaacgccaagcccgagaaacggaagcacgacgcgtacaacaggaggctgagcgacgccgactggaagaggagcgccaagcacaagagcaagaacggctgcagcgtgagcaacaagaacgcgaatgggctgcaaaggaggccgaggaccgacgacaacgagccttggacgcagggcgatgagcgcgagatctcatcgggcagcaagacgttgaggggacagcggtcttccgtacccctcaacagaacgttgtcgcagaaaatcaccctcctcgacaccctcctcaaggaagacgcactcaatcaagctgatcaagtcgtcaacatcttgaaccagaccaagaccatgattgccacttcggtcccggttaactccggaagcgtccgcatgtcgactggcagccgggttccccatctccgatctcatgattatcaccagccaagcctcagcatcgccggcgcaggatccaatcgcaggagcaggggccacgacgagcgatctgttcactcgcctcctgagcgacacaacaggaggagacagcaaggccgtggcaacctacttacctgtggccctagcggattctgcccggtcctggcttcatgggttaccacgtggcacgatcggatcatgggcggaacttcgcgaccacttcatcgccaacttccagggcaccttcgccccggcacacagtttgatctctacaacgtcattcagaagtctggagaatcccttcgagattacatccgacacttctctgaacaacgtaacaagatctctgacattaccgacgacgtcatcatcgccgctttcaccaaggggattcgtcacgaagatctagtcggcaagttcggacgcaagcctcccaagacggtcaaacagatgtttgaaaaagccaacgagtatgccaaagccgaagactccattatcgcatccaagcagtcgggtcctacttggaagccaaagaaagatgtgccgactacgggaggggttggaagtaacaatcacaaggaccgcaagcacccagtggttcgcaacatcaagcttcgcagatccctcatcgatggcggcagcgcactcaatatcctcttcgccaagaccttggacgacatgcagatccctcgcaccgagttgaagccgagtaatgcgcccttccacggagtcatcctagggttatctgccacaccactcggccggattactcttccggttacctttggtactcgggagaacttccgcacagagaacgtctgcttcgaagttgctgatttcgagacagcgtatcacgccatactcggacgcccggcgttagctaaatttatggctgtcccgcactacacctacatgatgatgcagatgcctggtcctcgaggagtcatatccctgcggagcgacatcaaacaagccgtcacatgcgataaggaaagcggcgagatggcccaaacccgcgagatcgcggtcgcccgagaagacatccgactggccgcaaccacggcaagcgaaggagaagtggctacgaccaagatctccaagactggagaaagcgaagccaagaccaagaaaattcccctagatccttctgatcctactaaaactgctgtaataggcgccgagttagattatatctttgcgtggaaaccatccgatatgcctggtaatcctagagaggtgattgagcactctttgcatgttaaggaagacgctaaacccatcaaacaacgacttcgccgctttgcacaagacaggaaggacacgatcaaggaggaattgaccaagctattagcagcgggcttcatcaaagatgtccttcatcccgattggctggctaacccagtcctagttcggaagaagactgggcaatggcgcatgtgtgtcgattacaccgacctcaacaagtcttgccccaaatatcctttcgggttgcctcgcatggaccagatccgattgaaggaatccgactgcttgaagacttcgttcatcacgccctttggggcctactgctacatcaccatgcctttcggattaaagaacgcaggagcaacttatcaacgcatgatccagagacgtttctcaactcaaatcggtcgcaatgttgaagcctatgtggatgatgtagtcgtcaagactaagcagaaggatgatttgatcacggacctggaagaaacctttgcgagcatccgcgctttcaggatgaaactaaaccctaaaaaatgcaccttcagagtaccgtcagggaagctgcttggatttatggtgtctcatagaggcatacaggccaacctggagaaagtcaacgccatcctcaacatgaaaccgccgagttcccagaaagatgttcaaaagctgactggatgcatggcggcgctcagccggtttgtttcacgactcggcgagcgggggatgcccttcttcaagctgttaaagaaaacagacaatttccagtggggacccgaagcacagaaagcctttgaagacttcaagaaacttctcactactccaccagttctggcctcaccacacccacaagagccgctattactgtacgtatcggcaacttctcaagtcgtgagcacagttctggttatcgagcgtgaagaagaaggccatgttcagaaagtccagcgaccaatctactttgtcagcgaggttttggccgactccaagacgagatatcctcaagttcagaagctgttatatggtgttctaattaccgtcaggaaattatctcactacttccaagctgacttcgtcgccgagtggaccgagtgccaagaggacacgctcgaggagaagatggagtattggactatgcactttgacgggtcaaagagactttcgggcactggggccggggttgttttaatttccccgactggagaaagactgagctacgtgctatggatacatttctctacatctcacaacgtggcagaatacgaggcgctccttcacggactatggatcgcaatctctttgggaatcaggcgtttgatagttcgcggagattcacagttagttgttaatcaagttatgaaagagtggtcctgccttgacgacaatatgatcgcttatcgacaagaggtacgcaagttggaggataagttcgatggactcaaactcacccacgttcttcggcacaataatgaagcagccgacagactagcaaattttggatccaaacgcgaagcggctccttctgacgtgttcgtcgaacatctttacgaaccaaccgtaccaaggagagaaacagctgaggccacggacactcaagacatagccatggttgaagccgactggagagagcccctcatacaatttctgaccaaccaagaactcccccaagataaagatgaagccgagcggatttccaggcgcagcaggctttatattattcatgagactgagctgtacaagaaaagtccatcaggaatcgtgcaacgctgttgtcaatttttcgcccaacaaactcatctgctagcccaagagttgcaaaccatcccgctgtcttggccgtttgcggtttgggggcttgacatggtcggcccgtttataaaggcagttggcggttacacacatctctttgtggctatcgacaaattctccaagtggattgaagctaaactggtcatcacaatcacggcagataaagctagagattttttcatcaacattgtgcatcggtttggggtacccaatcggatcaattcacaggcggagtatttaaagatttttctgaaaacttcggcattaaaatttgttatgcctccgtag

SEQ ID NO: 80304 - DNA, 532 bp, Oryza sativa
  Clone ID: PAT_MRT4530_79941C.1
ctaccagaaaagatattggcccccgtgtctttctgcttggggcaacaatggtggtgattcaggctgccacaacaccacccgcctccttgcctcctcctccctctctaccgcctgagcgggccattggaaatcgtgtggttgcgtggatggtagcggcagggtcttctccctctcttgttgggcaaccgacaagcagcgagctgcgggagccgacccggttgcgttggcttccccagtggtggcgaaggcagaggcagctgcgcaggagcccaggatggtggcggtgacagaggcgatgaggtgtggtggtggtgggacgccggttgcgctggcttccccagtggtggcgaaggcagaggcggctgcgcgggagcccaggatggtggcggtgacagaggcgatgaggcggtgtggtggccgcgcgcccggcctcgacggtggtggaggcggctgcatcaaagggccctgcaccttgatccccgttggggactacacaggccccatcctcggcaaggtaaatggtgcgatgtga

SEQ ID NO: 80305 - DNA, 11902 bp, Oryza sativa
  Clone ID: PAT_MRT4530_79942C.1
tcactccgatgcacccgggtcgccagcctcgtcgccactgtcgcccactccgccgtcatcgtcctcctcgtcggagttgagggcgaacacgagccgaggggccgaatcctcgaagctgtggacgatatggtcggcggcgtcccggacgagctccaccgctcctcgggcgaggtccctcgaggatgccttaatcgtcccctcgagctcctcggggagccgctggagagtcccggccatctccgagaggcgctgggcgaggcccccctggttggcggcgtacttcacagtccgcccgccccagagacccgcctgccgcccggcgcggtctaaacgggacacggcgtcgcgaagcatgctgggccctatctcgcctgccaggcaaagggcctcgacctccccggtggacgaatccagcgcgccctgcagatccgcgatggtgtgttcggcagctgcgaggcgggcggctaagtcgctatcgcccgtggccgccccgccgctacgcgcccttgcatccagctcccttgcctgcgcctcgagttcagcggcccgctggttcagtgcggccctctcggcgcgggcactttccagattgcgacgcgcttgttcctcttgcgcagcctcgcgaagggacaggctgtccgccagccgttgcgccacggcctcggcctcctcgagagctcgctcccgctcggtgagcgcgtcctcgcggaggcagagcgcggactcctctttggcgcaggcggcctcgtgcgcagtcagcgttgcctcccggatggcaacggcggcctcgcgatccgccaggtccctctccacggcgcaagcacgctcttccagcgccatggcacgggcctcaagggcttcttcgcgccgccgggatgccacctcggtctccgccgcccgccgttctcgggtagcggcagcgtcaaggaccccccgggcggcgtcgagcttcttccctagctccgcctcccagctcccgtattgaaggcggagggtgtcctgcgcctcgttcatcacggtggtggcgatgagggcagccccccgctcctcctccacctccttggcgatctcccccagcaccttccgacgggcttcgagctttgagacgtgccggcggtgtgccttgcggcccacctccaccatggcctccaccgagcgtcgcccctcttcgacacgcgcccatgcggcgtcgagctccgcccgctctgcttgcagggcctccacctgggcacttaacccgtccaacaccgtggtgtttgcgacggccaaggcctgcagaaggggctctgcgctcagtggagcaacggaaggcgtggggaagagccgcctcggtgaggatgccgcgcggctcggcccgccgatggacgtgccggactcagggatgtcccccggacctggcttgtcctgagcgtcgcccgagggagtgggcccaagcgatgcgcccgcggcctcgtcgcgagctgcctcggaagtcgtcgccgcctcggcctggcgaagtctggcctcctcccgagcggcttcttcagcttggcgagctcggacggccacctgggcggcctcctcggcttcccgtaggcgatccgcggcttctcgccggtcagattcccgcctccgagcctccgtggtcgccgcattctcggcctcagattggccggacttgaattggcaagaaggacgcaacgggatctcgctgcgagggggtcggttaaacgaccaccttggaggggaaatgaggtttccccgggatggttctgtcccccccatcttgcggagccgtttcttcttccgctccccctcgggctgcgacgtcggcgtggccccctccgggcgcctgctgctggcacgcgccgccccgccccctcggggaggagatgggggaggggttccttcctgcttcctcttcccccgggcgtcggcagggcggccgctccccgggcccccgtcgcggggcccagaagcacgaccccctcccggggtagattgttcccccctgcggctcccacccgcgccatcgtggcctcgaggagcccgctcctccaacgccccgactacctgcatgatggtcaggatggaggcgcggtctggatcgctgcagagggggaggactccttgaggaatgagggatgcctccacggagctgagattcagcacccgttggaccactatcttgaagtcctcaggagcccagtcccatctgaccccctggtgggtcctcatacagtcctcggacccggtgtactcccaggcgccccgggcgcgccgctggagcggcgcaatccggcgacgaaggtagtcgccgaacaccatggcccctgtgagcccctgggatcgcaggcccgccaagcggtcgaggacggcgtcatagccaatcctgcctacggccggaacccccgggacaggcaggcaagactgagcccctagcagcagggcaccaaccctctgccatgacatctcgactaccgggccgcagctcgtgtagccttcatttgccccactagacatgtggaagtacggtagtgctttgcaacagaggcccgaagaccggtccttatatggccgaggtgcgggagcacgcggctggcggcggccggcgccgtgggtcccatgcgtcagccgcacccgcgggcgcgggcggctgacggccgggcccaccggcgcccgccagctggaggcctgcgctggaggctggctcggaagtcggaggcgcgcttcgtcggcgaggggggtgtagaaccagtcgctcttccagtcatcccacttcttgcggaggacgcagggaatgtagcggttcagcaccggcccccgcggctggaagtagcaaccaccaaccaccgacggcggcgacaccggctgtacggtgaagaaccaccggaacagccgaagggatgggcgcaccccgatgaacatctcgcataggtgcgcgaagatggccaatgtcattaccgcgttggggatgaggtgcgccatctggagatcgtaaaactccataacatccatgaagaaagaagaaaatggcggaaccagccctgccatagcaaaagggaggaagaagacggaccaccccgagtagcgtggcgccgggcatctctcgcccagcgagactatctcccggccggtggcagattccggcatgaagcggcgcggcagcccggcctgtctctcgctcacgatgcgggaaggcggcagcacgctaccgtcaagcggagcggagccccgtgccatgacggcctcgccccatcccatcaggatgagagcctccaagcactcgtccctagccagagccggcgtgttagctcctggagatggcacgttggtcccggtcagatatataccaggcttcatccgatttgtgaccggtctgacactggtcatgtcgtcagcagacagccatgttcccacgtcgcgcctgcttccggcggaagtggaggtagagactaggagcttaaaatctcacccagggcccccggccgaaccggcaaagggggacctgcacggtctcccggtgaggagccccacgctccgtcatctggcgcgccagcttttcctgttcagcccaatggccgaacaagcaaaggcgcacaacctctctccgagtgttagcggtgacaacggggagccgaacccacgccgtcgagctcgtactccatcgccccctccacgccaaagtcctaggcgggaggaggcgctcgagagggtcgaaggatccgcgacttcaacatccacgggtgatggggaagggcggcgagatggggagcgtcgcctcctcgtctacggcgacggcagcacgcctcagggcgcgctccaagctgcgggcgcgctcctacgtcacccgcccattgtccctgacccggagtctccagcccaacgttggctggacgacgtggccaacttggtcatgacggtacggcagcgcctaggtgctggtgggcggtcctccgccaccaagacctctggcgctgctaccaccggctccatatcgtcaaggcggagggcgcggcgagcggcggctgttgctcgccatttggccgccactccttcgtcagcgcctccgacctaggaagatctgcgtggggggccggatgcccgcatcagtatcgagcgccggcgtaatggccgacgtgctgcccacgcaacggagggcgcctcctcgtccggagtgtcacatcaacacggacgcggggatcagccctccgtgcccccggttggtggtgtcagctgtagagcctttgtggcgagccttcggaacatccgttggcccccaaggttccagcccaccatcgccgaaaaatatgacgggagcgtcaaccccgccgagtttctccaggtctacacgaccgggatcgaggccgccgggggtgacgacagggtcatggcgaatttctttcccatggccctgaaggaacaggcacggggttggctaatgaacttgccacccgcgtccgtccactcttgggaggatttgtgccaacagttcaccatgaactttcaaggcacatatccgcgcccaggtgaagaagcggacttacatgcagtccagcaaagggatgatgagtcacttcgctcatacattcagcggttctgtcaagtccgcaacaccataccatgcatccctgcacacgcggtgatctacgcgttcagggggggtgtgcggcacaaccgcatgctcgaaaatatcgcctccaaagagccccacttcggccgcccccgggtccgccgctcggtcagggcggcgggacaggaggaggaagaagaggtcggctcattccgacgacgagggtcatgtcctcgccgtcgaaggcgtttcgctggccacccgaaaggggaggcctgcgagcgacaaaaagaaggaagccgacgctccctgacctcggctacttggaagagcgaaggtggcgcgcggcccttcgagccgcgcgctaccagcagagcctgcggcgctaccatcagcgctacgtccgggcccgatcactctgcgtcgacgacctcgtcctacgccgtgtccaaacacgtgctggactgagcaaactctcaccaatgtgggagggtccgtatcgagtgatcggcgtcccccggccgggctccgttcggctggccacgggcgacggcacagagctgcctaacccgtggaacatcgaacaccttcgtcgcttctacccctacctcgccgtcactgtcgtccgcaccgtcgtcaccgcactccttgtcggagttgaaggcaaacgcgaagccgaggggccgctcattattgtcggtcggttttcccttgctgatgcgcgcgacttgcgaccgccgggattctgcccgaagagagagagagcagggaggagaggcccccgagccgaacggtggcccaaggcccccgacggccggagctggccctccgcctgcttgtccgacggtgccaggcgcccccgacccccaggatggccccgaggccactgcgggaaggccgcgcctgtcgccctctgaccccgaggtcgtcggcacagaagccgagtgcgccccgcgtggcctctcggatggagagcgccctggagatgtggcccctgacgaagaagatcagccccgccgaaaggtgcagcggcccgtctacttcgttagcgaggccctccgggacgctgagacccgataccttcaggcccagaagatgctttacgctatcctgataacttcgaggaagttgcgccattatttccaggcgcatcggcggggctcacctaaccatatttattgcgcaggcttcatcctaaccattacaagcaagacattgtatgaagaggggcgaacatgcagattgataaactgacgcgtggtggacaagaatgaccgatttgtgaccggtctgacactggtcatgtcgtcagcagacagccatgttcccacgtcgcgcctgcttccggcggaagtggagatccaccaaaacacaggagtagggtattacgcttctcagcggcccgaacccagggcccccggccgaaccggcaaaggggggcctgcgcggtctcccggtgaggagcctcacgctccacgtgtgtcgctgattttgctccgccttctccatttgtgcgctaaggacacgctgcacaatgaggctctcatagtgatccgcaaatgcagccccaatgtgctcttccggtggctcattatctgcatggtcagccgcaagcaaagcaagtgtatcatcatcgaaatcactagcagaggagtactcaccatcgttttttactaccaaaactcgcttgctagggcagtcacgctcgcgtcggcggcgaccacccatacctcgtcgattgttgtgtagccgtcgacgatctcgagcatctcgatcatcttgttcagtgtcagcaatatattcatcctccaaattatcctcgacgtactctccgtcaatgtcatcatcattacccccaccattgcctccagcattgagagcatcaaaatgcctcacaagagcagcaaggctagtgtcaatgcgggcgaccgctatctccagccctgtaagcttagtgttggtggagatctgcgcggtctccaattgtccaatcttctcatttgtcacctgcaaatctgtatcaagtccttctgtgtgctgcttcacttgccttgtaaagtattggatgatgcctttggtgcgtggggaatgagatgcaccctcctcatctttatcctctagaccttgcccacaggagggggacagcaacccacaagttagcaaccgtggaacgaggtgtatcggtgctgtagcaacaagacctgtcaagctgtagtcgggtttgtagtggagctgttggtgggcgtctccaatggtcgccgcgaacttgtggtgcgcgtcaacccggccacgagggcactcgtccccaaaccgagcagtgatgcccctgatgaatttaagcgcggagtgcttatcgatcttgatgaccggataagcctcgggccacttagtgaacttgtcgacagcgacatacagatactcgaacccgcccggggcccgcctgaacggacccaggatatcgagcccccagacagcaaacggccacgaaagaggtatggtctgcagggcctgggccggctgatgggtttgcttggcgtggaactggcacgccctgcaccgccggaccaggtcaaccgcatcgttgagagccgtcggccaatagaaaccctggcgaaaggccttgccaaccaaggtgcgtgaggcggagtgggctccgcactcgccttcatggatatcggcaagaagctcgacaccttgttcccgaggaatgcacttcaggaggactccgttagccgcgcgccgatagagggtcccttccaccagcacgtagcgcttggagatgcgctggacgcgttcactcccttcgcggtcctcgggtagagtcttatctgcgaggtacgcctggatttcagtgatccaagcaatcaatctaggggaactgggagcgctcccctcgggtcccgaggcctggactccgacgggcctcgggggccgttcaggcgcgtccgtctcccctagggggtcgggtcgcgccgacggctgggcaagcctttcttcaaaggcgcccggtggggtctgggctcgcgaggaagcgagccttgagagttcgtcggcgaccgcgttatcccgtctgggcacgtgccgaagctctatcccgtcgaaatggcgctccatacgccgcacctggcgcacgtaagcgtccatctgcgggtcagagcatcggtactccttacagacctggttaacgaccaactgggagtcgcctaacaccaggaggcggcggatccccagtccagctgccactctgagtcccgcaaggagtccctcatactccgccatattgttggtcgcccgaaagtcgaggcggaccaggtatctgaggacgtctccgcttggcgaggtcaacgtgacccccgcaccggcgccctgaagagatagggagccgtcgaactgcatcacccagtaggcggtgtgaggcagctgcgaggggcccgagctggcctcggggacggagatgggctcaggggctggggtccactccgccacaaagtcggcgagggcctggctcttgatcgcgtggcgtggttcaaagcgcaaatcgaattcagagagttcgattgcccatttcaccacccgtccagtaccctctcggttatgcaagatttggccgagggggtaagacgtgaccaccgtgacccgatgagcctggaaataatggcgcaacttcctcgaagccatcagaatagcgtaaagcatcttctgggcctgagggtatcgggtcttggcgtcccggagggcctcactaacgaagtagacgggccgctgcacctttcggcggggccgatcctcttcgccaggggccgcatctccagggcgctcttcgtccgagaggccacgcggggcgcactcggcttctgtgtcgacgacctcggggtcagagggcgacaggcgcggccttcccgcagtggccccggggccatccacctgcggggttgccgcaaggtagagtagcaacggctcatctggctccggggcgaccaggactgggggagaactgaggtacgccttcaactgagtgagggcccgctcagcctcctccgtccaggtaaacggcccggagcgtttgaggagcttaaataggggcagtgcatccctaagcttgctgggggggcgcatccgctctatagctcgtatcttctcggggttggcctcgatgcctcgggcagagaccaagaacccgagaagcttgcccacaggcacgccgaacacgcacttatcggggttcagctttatgcgggcggagcggagactttcaaaagtttccgctagatctgagagtaaggtctcttggttgcgcgtcttcacaaccaagtcatcaacataggcctcaacattgcgtcctatctggcccgcggtggagtcgacaatctgatctatgcgtggcagggggtaagggtccttaggacatgccttgttaaggtcggtgtagtcgatgcacatccgaagcttgccgttcgccttgggaacgacgaccgggttcgccagccactccggatggataacctctcggatgaatccggcctccagaagtcgcgccacctcctcgcggatgaaggcttgacgttccggggcctgccgccgcactttctgccggaccggccttgcgcccggccgcacggcgagacggtgctcaatcacctccctgaggaccccgggcatgtccgccggtctccaggcgaagatgtcggcgtttgcccgcaggaaggagacgagcgcgtcttcctccttgaccgggacctcgtcgcacgtgatcatccgctgcctcggggcggctgggacggaggtgctgagcctctcgttgccaccctcgggcttggatgcggcggcgaggtggtccgcgcgctgctccatacaagcaagcgcgactttgaggtcgccatggacggtgatggggccaccggggcccggcatcttcatctggagataggcgtagtggaccgccgccatgaacttcaccaacgcgggcctccctaggaccgcgttgtagggcagactgaggtccgccacgtcgaagtccacccgctccgtgcggaagttggcggaaccaccgaaggtgaccgggaggtcaatatgacccagcggccaggtgtgccccggcgtcacaccgatgatcggctgggacggccggagcaccatccccggggccttaatggcgtcaaaggccgcgggggaaaggatgttgagggctgcacccccgtctatgaggacacgccccaacttcacattgcaaacagtgggggaaaccaccatcgcgatctgtcctccccgggcaacgcacggcgggtggtcggtctggtcgaaggtgagggcaacctctgaccaccgcgcccgccgcgtcgcctcatgggtaggggccgcggccagaagctctcgcttcatggccttgaggctccgacgagaagcgtgagcgcacgctcccccatcgacggtggcgatggtggccccaggctcctggaacccttggtcatcgtcgccatcgtcgatgtcctcggcgggggccttctgcttggcctcacttcgccggttgccggagggagccgccggggccttgccctcacggcgctcctgcctcctctcctcctcccacttcctcgtccgctcagccaaacttttgaccgcgcggcagtccgcgaggtcgtggagggaggtgttgtgcacggtgcaccacttgccggtcgggcgctccctgctgggagcgccggcctccttctttttgtcgctcgcaggcctcccctttcgggtggcccgcgaagcgccctcgacggcgaggacgtgaccctcgtcgtcggaatgggccgacttcttcttcctcctcctgtcccgccgccctaaccgagcgacggatccgggagcggccgaagctgccacaccggaaccggtggagttccaggtccaggcctcctccttgcgagccacacggtccgcgagctgaaaaagctccgcggtggtctggggctccttggaggcgatcttttcgagcatgcggttgtgtcgcacgccccccaagcgaagagactcatcttcccttcgctgtaccgcatgcaagtccgcttcttcacctgggcgcggatatgtgccttggaagttcatggtgaactgctggcacaaatcctcccaagagtggaccgacgcgggcggcaagttcattagccaaccccgcgcctgtcccttcagggccatggggaagaaattcgccatgaccttgtcgtcacccccggcggcctcgatcccggtcatgtagacctggagaaactcggcggggttgacgcttccgtcatatttttcggtgatggtgggccggaaccttgggggccaacggacgttccgaaggctcgccacaaaggctcgacagccgacaccaccaaccgggggcacggggggctggcccccgcgcccgaaccgaagtggcgctccggacgaggaagcgccttccgttgcgtgggcagcacgacgaccattgcgccggcgctcgatactgaggcgggcatccggccccctacgcacatcttcttgggtcggaggcgttgacgagggaatggcagacgaacggcgggtaacggccgccgctcgccgcgccttccgcctcgacgacacgaagccggcggtagcagcgccagaggtcttggtggcggaggaccgcccaccggcgcctaggcgctgctgcgccgtcatgaccaagtcggccacgtcgtccagccaacgtcgggctggagtctctggatcggggacgacgggcgggtgacgcaagagcgcgcccgcagcttggagcacgccctggggcgtgctgccatcgccgtagacgaggaggcgacgctccccgtctcgccatccttctccatcgctcgtgggcggcgaagtcgcggatctttcgaccccctcgagcgcctcctcccgcctaagacttcggcgagaggggggcggtggagtacgagctcgacggcgcgggttctgctccccgtcgtcaccgctagcgctcggagagaggttgtgtgtcactgcccgttcggccattgggctgagcgggagaagcttggcgcacacgaaagaggacgagggcctatcttccaaaaaaaagactggcttgcgccttcgcctggaagctaaatcacagcttgtctttgagtgaggaccagcgtcatcactcgcctgacacccggggatctccctccactccgccggaagcaggcgcaacgtgggatcacggttgtctgccgatgacgtgaccggcgtcagaccagtcacaaaccggtcatccttgtctggtatgaatctagccgggactgacgtgctaactccaggagttcccacgccggctccggctagggacgagtgcctagaggctctcatcat

SEQ ID NO: 80306 - DNA, 207 bp, Oryza sativa
  Clone ID: PAT_MRT4530_79943C.1
atggaaacaagagttcgagtggatccaaagccctcaaccaattttaggagatcgagaaagattcgatcaaatttgatgggaaggatcggctcctggattgtacgggcatgggactaccttccggaggttgaaggcggcaatgtgcgaggtgggcctacaactccacatgtgagctgggtcgaagagaggcaggccgagcggagggag

SEQ ID NO: 80307 - DNA, 4764 bp, Oryza sativa
  Clone ID: PAT_MRT4530_79944C.1
atgggtttcgtttccggcatcaacgacttcgtcttccctcctgggcaggcgtcccggttcggcagcctcgacttcatcaccaacgacttcggcaagatttctctcctcgactcggattcgaaccagtcgggaagaggccagatctccgccccgttcggtatcccgaactcggccgaggtctaccccaagatcatctccaccgagttggcttcaaaccactcggacaagatccaatctacttcaacacgacccgatcaagatgatggggcctattcgccaatcctgatgaaactccccgatgatttggctgctgtcttcaccacaagggcatcttctcctcgcaagcctgggcggaatccggcttcagccccggcccagcctagctccagggaagtcggcgtcatactccagcctctcggcacggtttcgatggaacaactggacggctacctcagctccccaggcgtcgactcacgaccaacggagatcatggagtacgacgacttcggctaccgctacgactaccgcaacctcgacgacttcgacgaaggctttgaagacaactacacgcctctctacttcggcatcttcatggttgacaatgagacggaagaacagtgtaaagcccgagaagcagaagaattacgcgtacaacaggaagccgaaagacgccgactggaagaggagcgccaagcacaagagcgagaacggctacagcgtgagcaacaggaacgcgaacgggctgcaaaagaggctgaggaccggcgacaacgtgccttggatgccgggcgacgagcacgggaacttatcgggcaacaagacgttgagggaacaacggttttccgcaccccccaacagaacgcggttgcagcgatcaccctcctcgacaccctcctcaaggaagacgcgctcaatcaagccaatcacgtcgtcaacatcttgaaccagaccaagaccatgatcgccgcctcagtcccggttaactttgcagcgtccgcacgccgactggcagccgaattccccctcttcgatctcaagaccatcaccaaccaagcctcagcgtcgtcggcgcgggatccagtcgcaggagcagggcgccgtgcggcaagaggctacgctccccaccattcaccagatcgcgacgacgacgacatggatggagttgctgccttcacaagtgacctgcgtcgagtggattggccgggcggcttcaagccgactggaatcgagaagtatgatggcaccactaacccggagtcttggctcaccgtctacggtctcgcaattcacgcagcgggaggagacagcaaagccatgggtacctttgaacgccctggtacacaatttgatctctacaacgtcattcagaagacggtcaagcagatgttcgaaaaagccaatgagtatgccaaagccgaagatgccattaccgcgtccaagcattcgggcaccacttggaagccgaagaaagatatgccaactacaggggggagtggaagtaccaatcacaaggatcgcaagcgtaagcctaaggaacttgtggcaactactacaccatcctcccgacaacaacaatacgccaagaacacatgcaaaacttctgacggagatcaaagcacgtcaaagaaaaaggatgatgaagatgatgccccgactggttttcaagaccaccgcaaggaactcaaccacatctttggcggacccctggcttatgaatccaagagaaagcaaaagttgaccgaacgggagatcaacgttgttcagcccgacacgccccaatatcttcggtggtcagagacaacgattaagtttgaccgctcggatcatcctgaccgagtggtccacccggggcggtacccctgtgcactcaacatcctttttgccaagactctggatgacatgcagatccctcggacagaattaaagccgagtaacgcgccctttcacggagtcatcccggggctatctgctacaccacttggccagatcactcttccggttactttcggcactcgggagaacttccgtacaaagaacatttgttttgaggtcgctgattttgagacagcatatcatgccatactcagatgcccgacgttagccaagttcatggcagtcccgcacaatacctacataatgatgaagatgcctagtcctcgaggagtcatatccctgcggagtgacatcaagcaagccgtcacatgcgacaaggaaagctgcgagatggcccagacccgcgagatcactctcgcccgagaagaaatccgactggctgcgtccacatcaagcgaaggagaagtgcctgcaaccaagatgtcaaagagcggagaaagcgacgccaagaccaagaagatccccctagatccctctgatcctactaagactgctgataggaaggatgcgatcaaggaggaattgaccaagctgttaacagcaagcttcatcaaggaagtccttcatgccgactggctggccaacccagtcctggttcagaagaagacgggacaatggcgcatgtgcgtcgattataccgacctcaacaagtcttgtcctaaagatccctttgggttgcctcgcattgaacaggaatccgactgcttgaagacttcattcgtcacgcccttcggggcctactgctacatcaccataccttttggattgaagaacgcaggagcaacttatcaacgcatgatccagagatgtttttcaactcagatcggccgcaaagttgaagcttacgtggatgacgtagtcatcaagaccaagcagaaggatgatttgattatggatctagaagagacctttgcgagcatccgtgctttcaggatgaaattaaaccctgaaaaaggcatacaagctaacccggagaaaatcaacgccatcctcaacatgaaaccgccgagctcccagaaagatgttcaaaagttaactggttgcatggcggtgctcagccggttcgtctcacgactcggcgagcgggggatgccttttttcaagctgttaaagaaaactgacaatttccagtgcggacccgaagcacaaaaagcctttgaagacttcaaaacacttctcactactccaccagttttagcttcaccacatccgcaagagccgctgttgttatacgtgtcggcaacttcccaggttgtaagcacagtcctggtggctgagcgtgaagaagaaggccatgttcaaaaagtccaacgaccaatctacttcgttagcgaggttttggctgactccaagacaagataccctcaggcgcttgacggcaggcacgagctagacaccaaagccttcatcttccaggaactcctcttctgggtttgggaaaaattgagcaagactgagtacaaccaccccgaggggagggggcgcgtggaccgggtccacgggagtggggcccacgcggcagcctcacggtccacggtggaccgggcacacccgggctcacaccggccggcgccgtgggccccacgcgtcagccgcacccgagggcgcgggtggctgacggctgggccccacgtggcggccacgacggtgcagccggcgggaggcggcgcccgcgcccctatggttgccggcggcggccataggcacggcggagcggcggccgagagaggggaagggaagggggaaaagaggcggcggtccacggctcaccccgagtcgacggcgacgacaaaggaggcggccggagcggaggaaggcggcggcgcggctcgggtggatggggacgacggcgctctggcggtcggcgagctcggcgaggtggtggacggggtcggcggcgatgcggagaagccgaagaaggcgacgccgaggcgggagacggtcccggcgagcggagagggccggccggaggtcgtcggcgacggaggagagagagggcgacggcgcgagctcgattccggcgggaagacggtgcggcaagtggcggaaacgggacgtgacattgatgataacatgaccgcttaccggcaggaggtgcgcaagttggaagataaattcgatggacttgagctcacccatgttcttcgacacaataatgaggcagccgacatattggctaatttttgttcaaaacgggaagtagccccttctgacatgtttgttgaacatctctacgagccaaccgtaccaaggaaagaaacaatcgaggccgcggacactcaagacgtaagcgtgattgaagccaactggagagagcccctcataagatttttgacaaatcaagaacttcctcaagataaagatgaagccgagcggatctccaggcaatgcagactttatgtatctgtggcaatcacgctgccgcacgaaccattgttggaaaggattaccggcaaggagttgcaaaccatcccgttgtcttggccgtttgcggtttggggcctcgacatggtcggcccgtttaaaaaggcagtcggtggttatacttatctctttgtggctattgacaaattttccaagtggattgaagccaaactggtcatcacaatcacggcaaacaaggctagagatttcttcatcaacattatgcaccagtttggggtatccaacaggatcattactgataacggcactcaattcacgggcggagtatttaaagatttctgtgaggacttcggcaacaaaatttgttatgcctccgtagcgcaccccatgagtaatggacaagtcgaacgtgccaatggcatgtcgggctacgggccagtcgccgtttttcctagtctatggagcggaagcgatgttgccaagtga

SEQ ID NO: 80308 - DNA, 657 bp, Oryza sativa
  Clone ID: PAT_MRT4530_79945C.1
atggcgtgcgatgtcgggatgaaaacgacatcctcgagggggcgtgtctccgggtcgcccagttgcgccatcacaccggagggaggtggcggtggtgcgcttgctggcgctctctgcgtggtggaggattgtcgtggcggtcactcaaggcatgtcggcggtgggggcaaggagtgcgagatctgcttgttcttggtgaggcacgagcagctctggtggagtggtgcgacgagggggaagctgcccttggcaagcgagctgatctggtgggtgggtgcggcgggcggtgggcgaggcgaggggaagtgcaatggcgcgccctgtgtccagtacgattacagggagagagcgccccttcttccaggcgcatgtccggcgccgtcttgtcgccttgaatcgggccgttggctctggcttgaatgccccttctctctccaccagcgccgaggctttaccttcgtccatccttgctcggccggcatgaaagcaggacgcggcttgaatgcagggctcggcgtcgcgccgccgttggatcttggcgcgctgaaggtcggggctgcgacggccgacggccaggaggccgctgagggggacgttgggaactgcgggcggcggagtagcatgggcgccgctggctggggcgccggcggcagctga

SEQ ID NO: 80309 - DNA, 704 bp, Oryza sativa
  unsure (1)..(704): unsure at all n locations
  Clone ID: PAT_MRT4530_79946C.1
ccggccgggatataccctcatcttatatacacctatacatcatgtctgtccccgacaagttccagggcttccagtcccccagcgccgagcactggaccgacttccagaagaactcattcgagcctcgtccctttggtgatacgatgtcgacatcaaggtgagtgctgcggtgtttgcgccagtgatcgccacaccatcagcggagactggggtgcctgcccttaccctcttgctgtcggccacgaggttgtcggcaaggtcctccgtgtaggcgacaaggtcactctcgccaaggttggagaccgtgtcggcgccggtgcccaggtttggtcctgtatggactgccgtcagtgcaagaatgacaacgagacctactgcaaggaccagattgacgcctatggcgctgattaccttgacaccggattcaagacccagggtggttactctccccacagccgagtgcatgagtactgggtctaccccatccccgaggctctgtcaagcacccaagctgctcccatgctctgcgccggtatcaccgtatacagccctctgaagcgtctcggcgccggtcctgganagaaggtcggtatcgtcgggtatcgggtggtctcggggcactacggtgtcatcttcgccaaggctttgggggtgccgaagtctgggccatctcccgctcgcgagcccaaggaggaggatgcccg

SEQ ID NO: 80310 - DNA, 2115 bp, Oryza sativa
  Clone ID: PAT_MRT4530_79947C.1
atggcagacctttaccagtcttcctccgacgctgctgcattgaagaagctgcacaccgaggaggccgtccctccgaaacagatcatggcgagggaggcaggaggcctacatcggggtagtgcctttcttagaccttttccgcttttctatgaactccggtggatggagcccaatcgggtttcgggatgttgcggattccgccttcgtgatggcatgaaggcgaagtacatccctctccaatgccactcatctcggagccaatggagatcgagatggttctacctcgagataaaagaactcgacccagttcttgtcgtgcccgaggtccaaccggagcgttccgaggactggacctcgaaacccccaattacaccctccctccaagcctttgtcgatgccgtctttctcgtgatgcagcgggtgaaggaggtcttgatcagcgctgcctccacggccgacgaaccgccggccccgctctgcgacaagttggcagccgagaaggcggccgctatcaatgccttgccattgacggatgttgtcggtcttcttgttgaccaccaggccttcgcctcgctcaaggacaaggtcgccgacgaggttgccaacatttcctctgttcccgccgtcgcaggaggcagcgggaccaagcgaaagccctgggcgaggtcgagcgctccttctagttctcggcagaagtttgccggctccgagaatgaggtcatagttcgccatcttacgcaggacttgggcagcctcgctcctcctctgaagaggagggtgttaaagctgcccgccggcaagaaagcattggcggtctccgtgcaaagcgggagtgagacggcgatgagtggatctccagccgctatcattccccgcgtggaggtcgcccctgttgtcgttgagtccgtggggcctaccaccgctcctgtggccgcgtcgccgcccggagtggccaattggtccgatatagtggccgaatgccaccgccttctcgagagcacttctcgggcggtgggagcccagatggaccatgtggtggcccgcgggacggcagcggacggaagggtggttcaactggaggcgcaactcgaggttgcccatgaagatcttcagaagatgaaggaaatcgtggccggcaacgagatgcaacgccagggcctagagaagaagatgaacgatacacatgacatcctcttctccctccgtgactccctccgcaggagcttcaccagcctgcatcaactggcgttgtcgtgcggcatggagtcctccatcccgacacatcccgacgagacgtccctgacatcggcgttgtcggagctggcgggcgagatggaggccatcccatcgcggcacgctgcccatgttgcggaggagatctccaatggaatccacacgggggcatgttacgtcctcgcgtgcgtgaagctagctctccctggcgtcgacctcaaggagatcttgtcgaagggggctgtcgatgccacgcgggagaacgtgatgtccagcgtgtcggatctcggggaaagcatcctcccctttacaaggagtaaactttctccgtcttgtattgtgatttttgtacaaacacttttgttgtcttatgggcagagcgacttcctttacttcgcaccatttgttgatttgccgcgtttctttgtctttcgtagctgcgtagattctgaggacgtccagcaaggcggatgtcctgatgtcgcgaggatcgacctaccttcctcgagcgatgcgcctgcccctgccattgttaacgatggggagcatcccttacatcctctcccctttgtagatctcgacgacgtcctcgctgaacgagataggcgtatcgcgtactggaggacgaagttcgaggtcgccgaactcgagcggtcgctcgtggtcgtgaagaaggaccaggccgtggaggctctccgaggctgcgaggtttggctgaactcgtaccttaagagctgctacagtgccatggccgacgtttgtcgtcagctaaaggttaatcgcgcggagcccgaggagagtacggcgggctacttgtcctggatgaggggggcatgtgctcagcttgagggcataggacagcagatcgacatcagcctctaa

SEQ ID NO: 80311 - DNA, 570 bp, Oryza sativa
  Clone ID: PAT_MRT4530_79948C.1
atggaggacgccaaagctctgcgacgtctcctgaacgacaccgacctcgatcttgtcagtgatcgggaaagacaagcctactacatgctgagtgaccgggagtatgctcacatgcgagaatacgctccggagctgctgaaaaagataggtatggatggttattttcgtgctatttggaaagctattggttggcagagatttgctatgaccaaagaagaatctcgtgcaggtggagcatacagggacacgcgcagcatggcaagaaatgaacgagaaagttcatcatcatcaacacccatgcaaatatatgaggtaggttgggaaccaattggggatgcacccggatggacccaagctccacgccacagcatcgaggtctcaagctgggcaagcaccagagaggaccggtggcatgcacctcatgacatacaatggggggacaaccaacctcccagatcaagtggaataccttcatctccaagtgtatggcgctcgagttcctcttgttggaacttgggtgaaatcacaaggagaatgaacacccttgatgtgcagacgggagagatgtag

SEQ ID NO: 80312 - DNA, 445 bp, Oryza sativa
  Clone ID: PAT_MRT4530_79949C.1
acacaagtgggccaccatctcattctcatctcaaatcactagcttggctagatgccaatggccgtatggtatatacatttggcccgttcttcacacatcctgctgattcaaatcatccatttcatgggcaacatctcacattttcatttcatttcatttcatatattcttcttcttcaacacctacgtactactaatttgctgctacaagagtcttgtatgcatatacaaaacctcaaggctgtggaacctcttccttcaacttctccactgaacagttctcacagatgaatacagacaacgtccgtccatctcaataatacagtcttcttcatcagccttgttccgtcttgtgttccaacaagctgtcccagcggcttttcaggatctcgtatgcgtctgaacatggaagtgcgattacacgggagccgccgtcagttggcagc

SEQ ID NO: 80313 - DNA, 441 bp, Oryza sativa
  unsure (1)..(441): unsure at all n locations
  Clone ID: PAT_MRT4530_7994C.1
ctcaatctgtctcactcttcctctctctctcaccggtgggtcggcggcggcgggggacacggagcagcgtgtgacgcggaggcggcggcggcggcgggtgacgccgcgctnctnacccccgctctctctctctctctctctctctctctctctctctctctctctctctggacatagccacgcaggaggcaacgggcgggcggcggtcgaggagccgaggccggcgacaggcgggggcggagaaggcagtgggcggcgggtgggcgcggcgaggagccgaggccggaggtgacttncatgcggcgggcagtgtcagaggccgcacagagggcaactgtggcgagcanctcttccanttctctctcttcttctctcttcttctgtgcggaagttcttcccgcggcgttngcttccccgggatnaagaagaaaccgcgggaaa

SEQ ID NO: 80314 - DNA, 450 bp, Oryza sativa
  unsure (1)..(450): unsure at all n locations
  Clone ID: PAT_MRT4530_79950C.1
gtttttttttntgggnttnggggggnnacnatttnanacngggaacactntggcccnggtaacccccncgctngngattaacccncnctaaaggggaacaaaagtggggtccncccncggtggcggccgctttagnaatagtggatcccccgggctgcaggaattcggcacgaggtcaattggacctggtcctatcatttttggcaacctatccactcactaatgttaggtggttnttgcaantaggatggtcattntgttaatgatagccagggcaaatccacttacattacgatgcgtagattgtggtgcaagatatgtggcggttgggtntgtatgactgagtaaaggcgaatttgancctacttgtaaagacnaaaaaagaaaaaaaaaaaaaaaaaaaaaaaaaaaaaaaaaaaaaaaaaaagaaaaaaaaaaaaaaaaaaaaaa

SEQ ID NO: 80315 - DNA, 4772 bp, Oryza sativa
  unsure (1)..(4772): unsure at all n locations
  Clone ID: PAT_MRT4530_79951C.1
atgcccctccttctactgcgtgccggcgccggcgccaagccaccactctccttctccgtgcctccgcctcctggggatgtccgaataagcagcagaccacccaccacggccacgcgctgctcctcttcctcttccccaaagctctcctccgccaccgtccaattccgctccgactccgacccatggaaccaacccactgttgatgacgacggcgacttcgacttgaaggggaggaaggccatccccggcatccacgtcccgcgccaacgctacatcgccgtctccaagcccgccctcctcgacgctctcctctccctcttcccatcccaacctcccactccctctcccacctctgctgcggctgctgacttcaagcgctttgcaagatgcctggacgccctcctccacgcagagcacaaggagatgctcgaggaaatgcgaacctattacatgctcacccacaaccatcaccaacacaccgctgccgctgatgacgatgacgatgaccaatccgtgctcaacggcaacgccaacaccactgctggtttttttggcattacagacaacggaaccttgcttcttaccagaagcttgggtctcagaacactcctgggattgtcaccagaccctgattcacacaacagaattgcttttgcaactcatttccagcgctccttcatgaaccttctgcgcaatgctcaatttgaagagctctctgcgcaagacctgctcttgacatacgccctaaacaccgattacctcttgactttgcccatttatgtcgattggaaaaaggcagctgagtccaatgctatcatattcaggcgtgggtatgcaacggagaggcagaagggcctactgttggttgaaaagcttgattacctacagtctaaactcttgcaaaatatcttctttggcttctccaagcccttgaggaagctggggaaatggctcaatgaggcattgaaaagatcaacagggaatgagggatttcagatctggattgaaaaacttaaagtctggcttaaagagcaaacctatgcggagaattcgctttcgttgattgagaactcttcatgggataaacttagatctgatcaattaccggatgctgatcttcctatttggattgctgctcaaagggcagtctctcgttacgaaggaatcctgtcaccagttggtcctcgtggcagacttctaagaagattgcttgcttggactggtttaatcccttctctgccagaagcaacaataaagtcagatatcgatacaaaagatcttgaaggctatgtgaggccaaattttctgccaagaataacacttgcaaatatatgggcgccagcaagcagagaatcttgtaacaacaatctctgggagataacaaaagcttcttttggtgttttatttgggaagtctactcttcaggaaccagcattccaagaactgatcctactttatactgatgaggctgatcaaagcaaagagagagaaaaatcagacatgatgccattgcaactgaaaatttttgaaaggatccccatccctgatctgccagtggtttttcctcacaagaagttgtccttccgcatcctagatacagtaaggttggatattgctaccgtaataggtttgttggcttatgtcgtgaactacaaatttgagagtttagcctcatctccatcggcttttcttcttgatatagttgcctttactgcactagcaatacttgtgttccgtgtggcgctgggttacaaacaaactagggatagataccagcttctggtcaataaaacgctctatgagaagacattagcaagtggatttggttcagtttattttctccttgacgcttctgagcaacaacagctttttcagaaagggttctcccttaatgagtgttttgttcagtataaagaagcgcttttggcatatggtatgttactgtgcaggaaaaagtatcaggtgtcatctcgtgtaagcatcagagatacatgtgagcagtttatgtacgagaaatttaaggcgaagatcgaaatgcctattgacaaagctatggagacactattgcgtctggggctggtgattgagctgccaactgacggcggctcccgtgtaatcgcacttccatgttcagacgcatacgagatcctgaaaagccgctgggacagcttgttggaacacaagacggaacaagatattgttatatctcgatattgttacgagggagctgatgaagaagactgtattattgagatggacggacgttgtctgtattcatctatagagctcttgatcgaaagtgctggctgcagcagcgtagctgcagtcggtgtaatggcaaaagagcagagtggatcccctaagcccaggcagccagtgttccaaaggatgcgagtaacgttaaccataggtgttattggcctctgtgttgcatcatacattcttggtgcttggcaaggcacttcaactactagtatacacccatccataatctacactaaaagccaatgtggtgaatccattttgcgcacctccagcaattcgtctggacggtcatcatcagacgctcgtcttgatttccaagcccaccatcaggtgagcttcaatgaatcttcacttgtcgccgaaaaattcccaccttgtcagctgaaatacagcgagtataccccttgccaagatccaaggagagccaggaaattcccaaagacaatgatgcagtacagggagagacactgccctcggaaagaagagcttttccggtgcttgattcctgcaccaccaaagtataagaatcccttcaagtggccacaatgtcgggattttgcttggtacgataacattcctcatcgggagcttagtatcgagaaagctgtccagaactggattcaagttgaggggaaacggtttagattccctggaggcggcacaatgttcccacatggtgctgatgcctatatcgatgacatcaacgctctcatatcattaacggacggcaacatcagaactgcgcttgatactggatgtggggtggcaagttggggcgcttatcttattaagaggaacatcatcactatgtcatttgcacctagagattcacatgaggcacaagtgcagtttgcattggagcggggagtgccggccatgattggagtgatatccacggaaagaatcccataccctgctagatcatttgacatggcacactgctctagatgtttgatcccatggaataagtttgatggtatctatctaattgaagtagacagagtaattagaccaggaggctactggatcctctctgggcctccaatccattggaagaagtacttcaagggctgggaaagaacagaagaagacctgaagcaagagcaagatgagattgaggatttggcaaagcgtctctgctggaagaaggtggtagagaaagatgatcttgctatatggcagaaacctatcaaccacatagagtgtgttaatagtcggaagatctatgaaacccctcagatttgcaagagcaatgatgttgactctgcttggtacaagaagatggagacatgcatatcacctcttccggatgtgaatagtgaagacgaggttgctggtggagctcttgagaaatggccaaaaagagcatttgctgtgcctccaagaataagtcgtggatcagtttcaggcctcaccacggagaaattccaagaagataataaggtgtgggcagagagagcggattactacaagaaattgattcctccactaaccaaggggcgatataggaacgtgatggatatgaatgcagggatggggggattcgcagctgcattgatgaagtatccactttgggtgatgaacgtggtaccttcaggctctgctcatgacacccttggtattatctatgagaggggattcattggaacctaccaagactggtgtgaggctttctcaacgtatccgaggacatatgacttcatccatgctgataaaatattcagcttttatcaggacaggtgtgacgtaacatacattctcctggagatggaccggattctaaggcctgaagggacagtgattttcagggacacggtggaggtgttagtgaagatacaatcaattacagaaggcatgcggtggaagagccaaataatggatcacgaatctggtccattcaaccctgagaagatacttgtggctgtcaagacttactggactggacaacccactcaaaagcagtagtggcttttcttttcagcagcagatgttcccttttggtttttccaattttcgtttagctccaggttcaggttgtgtgtaaatatgaggcgatgtgattgggatagtatcaccacgatcttgtggccttggttcattggctgcattgcattcttgtgagttgtgatgcttacatttctataataggcagataaaatgttctttttcttcagtaaaaagaacagggcaagcctgaccttgttattttccttgccacagccttaaggttttgtatatgcatacaagactcttgtagcagcaaattagtagtacgtaggtgttgaagaagaagaatatatgaaatgaaatgaaatgaaaatgtgagatgttgcccatgaaatggatgatttgaatcagcaggatgtgtgaagaacgggccaaatgtatataccatacggccattggcatctagccaagctagtgatttgagatgagaatgagatgctggtgcacttgtctcaacccacattttgntactacatttattatagcgaaaataatggtat

SEQ ID NO: 80316 - DNA, 672 bp, Oryza sativa
  Clone ID: PAT_MRT4530_79952C.1
atggaaaatgaggtgggttgcgagtgccagctgtgcggtgggcggcgtggcgtggtgttctgcggcgcccacggcgggcgcctctgcctccaatgcgaccgagccctgcaccaagcccacggcggggccggcgatcacccccgcgcgccgctctgcgactcgtgcaacgccgccgccgccgagctgcgcctcaacgacggggccacgctgtgcgggccgtgcgcctacccctacgcctacgcctacccctacacatacacctacgtctacaccggctgccccaccccgctggagatgatgcgcctcctccatgccgccccgccgccgccgccagctacctgcagtttacaacaacgaggagaaggagaagagctacttccaactctcttatctgcgactgcgactcctaatactgctactgctgcgccaatggcaatgccacccccaccactacaacaccacaccaccacctccctcatcatgatgataaggaacattcacaagcgggaggagaggaacagagccaagctcaggttcagcaagcagatcaagtatgcctgccgcaaggccggagccgacgcacgaaagcgggtcaaaggccgattcgcaaaggcctcttcctcctcctcctcctcctcctcctcttcttcttccatcgatcatcgattatga

SEQ ID NO: 80317 - DNA, 846 bp, Oryza sativa
  Clone ID: PAT_MRT4530_79953C.1
gcacgaggctagtctcgagtttttttttttttttttttttttttttttttttttttttttttttttttttttttttggggagaaaaattttagccgtttcacattacaactcccccaagctggtgcaagttaagtttttaaccctgcccccaaatttccaaaggttttgcccgccctttcccaattttcggaacccctttttcaggttatccccattaccaccagtcctataatgattaaaacttcttgtgaaaagataactggggtttttttttcacttatcccctagccgggaagttattgaaaacttccaagaacacattgccgccggtgcctttcctactccttgggggccttgttgaatagggactttgggatttgcgggatgaccccccccccggctatggggcccttgatggggggggaaacgcccttgtccccccggtttggaaccatcaagtggggccgggggaatctcctcaccctttgggcctttttggattttccggcgggcttcaggacctctgctgttatgttcctccagggttcccgccgtgtacaccgggattggatttccccacgcgggcctttcggtataaccctttccctttagttggggtgtgggttcccgcccccccgggacttggtttccctcccgggaaggtaccggtataccggccccctttttttggtctctttgtacttttttaggggggggggtcttttttctcgcctttttttttttccctggggggagccccgtttgctttttctttttcctggggtccaaaattttttggggacaatcccagggtccccccttatctgggctttttttttggggct

SEQ ID NO: 80318 - DNA, 2914 bp, Oryza sativa
  Clone ID: PAT_MRT4530_79954C.1
atggcatgttcagaggataatgatgaggagggtgcgtttcattccccacgcaccaaaggcatcataaaatattttacaaggcaagttaagtagcacaaagaaggacttgatgctgatttgcaggtgacaaatgagaagaatggacaattggagtccacacagatcgccaccaacatcaagcttacagggttggagacatcgatcgcttgcattaacactagccttgctgctcttgtgaggcattttgatgatctcaatgctagaggtaatggtcgacgtaatgaagacggcattgaggatgaatatacgctgacactaaacaagatgatcgagatgctcttgatcgttgacaactacgcaataatcatagaggtatgggtggtcaccgccaacgcaaggtacgcaataatgatgatgtttttttttctaaaattaaatttaagatacctcctattgatggaaaatatgatcccgatgcgtacctttcttgggagattgttgttgaccaaaaatttgcatggcatgattttcctgagaattctaaagttactagttagttcactgatttttcttcggtttggtgaatagaacatggcaagaaaaatcctaataacatgccacaaacttgggatgcttttaaacgggtcatgcgggcatgatctgctccttactttgcgtgtgatttgttgaataggttgcaacaattgagacagggtgtgaaaagtataggggaatattatcaggaattacaaatgggcatgcttcgttgtaatttagaggaaactgaggacgctgctatggctagatttttgggtggtttaaatggtgagatttatgacatcgtagactacaaagattacactaatatgactcgattgtttcatcttgcttgtaaagctgaaagggaagtgcaggtaaatctacattatgataggcaggcaccacttctccggccggccgtactccttcctcatcttccacacccacacccagtcgagcagcacctcctccatccagtaacaagccacgtggccctcctgcaagttcaacgacaaaggctgtttagctagccgcgagtgcttcttcaattgcatccacgggtaaaacaagagatgttcagtgtcaccattgcaagggctttgggcacatgcagcgtgactaccctagcaagcatgttttggtagtcaaaaatgatggtgaatatttgtctactagtgatttcgatgaggatacacttgctttgcttgcagctgaccatgcaaataatgaggagccgccagaagagcatattagggctaatgatgcagagcactatgagaacctcattgtgcagcgtgtcctcagtgcacaaatggagaaggcggagcaaaatcactgacacacattgtccaaacaatgtacgtcatcaaagagcgttcttgctgcatgatcattgatggaggtaactgccacaattgctagcagcgagatggtggagaagcttgcacatagcaccaaacctcacccacatccatagtacatccaatggttgaacaacagtggtaaggcaaaggtaacaaaactggtgcgcgttaattttgcaattggaaattaccatgatgttgttgaatgtgatgttgtgcctatgcaagcatgtaggggtgaaatcgggtcaggttgggtcggatctcacccttcccgtatcctaacccacattttgcaatcggaatcgggtcaaatacgaatagtgtcgaatacggatacaaactcggataatatctggcacaaatatgaaatggatttgtaccaaaacatatatacgctatcggttacgaatgtttatttggatatctagtcaaaaaaacatccctatatatccctatatattcataacgtgactatattaggccattagtatcttacaatcaacgagcttctaatgtgatattgagaaagggaaatgaatcatcggcatccgtctttaactgtcctgtgtgaagtgactagtagttgtctggctgctaaccaatgaagtggggggggggggggtggagacgaggggtatgcagcgcaacgagctcatgagtcacgacggtttccagcggacttccgactgcgggtgcattggggtgtggtgaaccgacgggtgcagtggcaatggcggagactcgacggggcgtgcaggcgacggaggatcgacgtcacgagcgttgtggagcttcaatggacgcggcagcggcatggcgacaacggtgcgtagcggcagcggagctgtgtggctatgctacctatgtgttctgtgcatgcttgggttaggctgcctggctggtggctcgtgggccatttgggcctggtggctggctctattgtgttttcgaaagttgatttgcgtagtcgatgccaccaaattcacatgaaactaggggatgaatggaaaactgctttcaaaaccaagttcaggtgatatgagtggttagtcatgccttttgggttaactaatgcacctagtactttcataagattaacaaatgaggttttgcgtgctttcattgggaaatttgtggtggtatactttgatgatttattgatttacaacaagtctatgggtgaacatcttcatcatttacgtgatgtttttaatactcttcgtgatgcacgtttatttggtaaccttgagaagtgcaccttttgcacagatcgagtttctttgcttgtctatgttgtcactttgcaggggattgaggttgatcaagccaaggtggaagccatacaagaatgccctgttccaataactatcacacaagtgcgaagtttttttaggccttgctagatcttaccattgctttgtgaaggatttcagcaccattgttgcgccattgaatgagcttactaagaagaatgttgccaccatctggaattaaaatactgccaatga

SEQ ID NO: 80319 - DNA, 657 bp, Oryza sativa
  Clone ID: PAT_MRT4530_79955C.1
atgtcgtccaccgggctttcccgcggccgccggtgcaccatcgcgtcgcggctaaacgcgtcggctgaggcggcggttgcggccaccagcagcagcaggggggagaagcagaaggcggcggtggcgagacgggtggagtactacgacgaggaggatgcgcggggggaggcgcgctacgacgttttcatcaaccacaggggcgtggacaccaagaggacggtggcgcggcttttctacgaccgcctcgtcgccgcgggcgtccgcgccttcctggacaaccagtcaatgcgccccggcgatcgcctcgacgagcggatcagcgaggccatcagccagtgcggcgtcgcggtggccatcttctcgccgcactactgcgactccgagtattgcctccgcgagctcgccctcctcgtcgagtcacggaaaaagatcatcccggtgttttacaacatcaaaccctcggatctcgtcctcccgcaggccgtcgtcgagtccgtcgctcaccatccccgcgacattgaacgcttcaaattcgcgctacgcgaggtcaagaacacagtcggcctcacctacgacacagccacaggagatcttgcagagctcgtaacatcggcggctaccgcagttttggagaacatagacaagcatgaggattga

SEQ ID NO: 80320 - DNA, 248 bp, Oryza sativa
  unsure (1)..(248): unsure at all n locations
  Clone ID: PAT_MRT4530_79956C.1
gcgtccgcccacgcgtccgcccacgcgtcctgcctctgcaccatcgcccccatcgccatcgggggcatgggcnncacgaacatccggggcggcggctctttctactgctcctccattaacccggccgtctccttcagcccnnccctcggcaggtgggcctgggagtcccattgggtgtactgggttgggccactcatctgcagggggctggcctgcgtcatctacgaggtcctgtgtatcttccacac

SEQ ID NO: 80321 - DNA, 3765 bp, Oryza sativa
  Clone ID: PAT_MRT4530_79957C.1
atggcagggcttagcaccggagcaggtgctccagttgtgaagttataccatgagaaatccatgatcatgcctgatgtgtccagagtgcttgcatgcctgtatgagaaaaacatcgagtttgagactgtcaaggattcttacaaggacatcctcaggctccaggcatcgaggagtgttccagttccattctacgatggacccacatttctacaagaatcaagagcaatttgccgctacatagcagaaacctatgaacagcgtgggtatcctttcctgctgggaaaggatgttctggagagggcttccattgaacaatggctccgtcatgaggagcatgcgtttgatcctccgagccgggcattgttttgccacctggcctttcctgtgcaggatgacgacgatgatgatatcaacacagagaaaagaaaactggaagaagtccttgaagtctatgaacaaaggcttggtgagagtgagttccttgctgggaacaagttcacccttgctgaccttgttcacttgccaaacacccaccaccttgtgacatctgaatttgcctacctgtatgactcaaggaagaatgtgcagaggtggtgggatacaatctccaaccgccaatcttggaagcaggtgctgaaggatatgaacagagtggaggaggaataccaaatggaactagagcagcaggaggagcagtggcagacagagcttccccaaacatctgttggccacaccattcgcttagaccctcggcagacgactagcactgagtcacggacagtactagtcccacctcccagtgctggtatgatctcaacctcattttcatcacaaagagagcaacctctgccctctgaaacaatccgccaagataaaccctcacctagaaaagaaagcaacttctttactaccacagagaaaactccatcaaccccaaggtctagagctcctacaactcagaaacagcctagcagtaccttcttcaccccatctaccacccccaaaattcctcagagaacagatactgatatatccagctccaaagatgccccataccaaaccaaacctagtgaaacaacatcgaaagaagctcatgataaatcccatctctctggcttttttaaggctaggagccataccgatgaaacagcaactcctacaaaacatagtccacaagaagactcgaaaacttctaccaagatacccaaaacacgtgatatcagtgaggcagtcggtcctaatagtccaatatcaaccaaagctccccatgaaattgatgaacgtgccagtgttgatccccgctttgacaagccagctccatataccaagcctaccacaaacataccacaaacttcttctggaaggccttctgcacagagagatctaggcacttctcctggcactgaggcagacaaaacatcttctgatctgggaggtggtgttcagtctccttatgcacagggacgtgctgagcaagtgaagaaaacctcatctgatcagagaggttctgaaactgcacaaccagctcaaccccgtggcatccagcaattcaccaaggatgctagacaggctgatcaaaacaggatagctgcatcaccacgtcaacaaccatcagagtctcaagaagacactcataacatcatgagtgaagatgaaagattctctaccaagaggctccggaagatgatggaggaaagtgaaaaggaagcacaagaagttaaatcacagcctacagattttcgaccttcaaaggaggaaacaccatctatctataagaatccctcagatgtgcaagacagaaccattttggatgatagaaaaagtggtagatctccgtcagctggcacacgagctcctgactatccaacaagtgctgctgaaagaagagttgcttcacaaccaaaagaaggaatgccatatgatgatcgtggtgccactaaaccacaaaaatcaccatccatcaatgagcaagaaaaaattccagtagtgccaagccaagcgccaccagccagttcagggaaagcttccgaatcattaaaggaagtttcccctgatgatggcttggctcaagtatccaccatcaatcaatggagacaaacctctgcacctcctccaaccaaactagcagctcctgatgctcctagaaatgttgggttggccaaaacagaaggtgttgacaagaggacacagccaagcacaacaaaggaaaccccaaggaatgatagaaatgttttagcaacagggcaaggagctgatcgtggagttggtaatgaacaatatgacaagaattccatcgatgaaagagcaccacaaatgacaccaaggcaagcagcaccttctgtcactcagcgtgcttcagcatcaatccaagaaagaattagtggtgcccgtggcgctagtgatgatatgtttggaaaaacatcaagtgctgatcaaagcaacactccagccataccaaagcaaacaacagttcaaggagcaacccctgatgttcgtggtactagttatgctgacagagagatgaaacttcctgctgatgaaaaggcaacagcaaacaagcagaagccagtttcaagttcccaacagacaattgaaccaattagaggaggaactcctacctcatatggcagtactgatgatgacttggccaagacatcaagagctaatgaaagacaaacgccaccttcaaaggcgcaagcaccagcatccaacagacagagtgcttctacagctctccaaggaggcacacctgatgctcgtggggaaaatacagcagtcaaaccatcagtcacttctccaacaggtatgcctacttcatcaagaagacaagaaccaactccatcagtcacttctccaacaggcgtgcctacttcaccaagaagacaagaaccaactcctgacactcaacgtcgtcgcgcagcagatcaaatgccatcccaagctccacttccgtcttccttcagtacaaggaacaaggagaatggtatttctgaagctggtcaaaccaacacagtagcacctgatgggctgccaggtccgggagttcccaaagatgctggaccacaggttgcaggaccttcagtcgtgaaatcacagaagaacatgaatgaagcatacaacgatggaccatccacacagcagttgccaaatgatcagtataggtctcagccaagagaagccaaggaagagcaaggagctgatgcagcactaatcaatgaaattggcaaggcccaaaaggatgatttgttggcaaatccaaatcaaagtagcactggaagagttcaaccaacatcaactgaagaaacatccaagcagcaactgcaatccgggctgaacaagcctatatcatctaaagatggcaaagaaacagtaagctatggcagctcagcaacgtccagagaaatgctaccttctattcctgataagagcatgagagtgcagcaaccgcaaggtgacaagtccagctactccagtatatcacaagaagacaatgtgaagcaagggtctcaagctgcactgcagggatctggaaatgagcagcctaagaaaagggacctccttgcaaatgctgatgagaaaatcagaggaactacaggagaagccttacaaaagtctgatgaagggcggatctcctctaatactgagcaaatgaaaagcaacagaaataacagcaaaccagatggctcaactgaacccacttcatttgatggcaatgaaggtaatcttcctgagtcacagaggcgtggctcatcaagcaacccgtaa

SEQ ID NO: 80322 - DNA, 387 bp, Oryza sativa
  Clone ID: PAT_MRT4530_79958C.1
atgtaggttctagatggtttcccaatagcgattgagggtaaactccggaaggagtgcccagaaatatcggagttcctcaaagaattttatggaggagtgccgaactgtgttcgactcgggccttacctggctgaaggcctagtgctgcacatctgggcagcgaccgtgccgcgcacgaccgggagggtgcgcgaccggtgcgccctcccggtcgtctcgcgccgtacaccgcaccatacgccgtgccacgccagcatgggggccctagcagcggaagccgcccctggccatgctgctacatgcactagcatcatcgctgtctccatcgcgcgtcgcctctcaatactgaggggtaacggccgccacgccacccgtcgtcacccctag

SEQ ID NO: 80323 - DNA, 338 bp, Oryza sativa
  Clone ID: PAT_MRT4530_79959C.1
atttgggcagctttttgacgaaaagtagtgctagcacatgttcccctcatccaagtccaagtacccacggtgatgatgcgcctgtagaatccatcgccgaggaagtgcttgaagagcctgttcagtgtcttgagactgtgatcgaaaatacacaagaacaaccagaacttgaaggtattgaacttattagggaatttgactcagaagttcatgttgttgttgatccgactcttcgaatcccaatagagaaattccatccggacattagatcagaagttagaagagcttatttgttgaagggacctacccaacctaaaattacatttccccgtaaataa

SEQ ID NO: 80324 - DNA, 915 bp, Oryza sativa
  Clone ID: PAT_MRT4530_7995C.1
atgccggctgggcgcgggcggcggctggcggcgttgcggctccgtagggcggcgctggcttgggagaagcgcggagagatgtctggcggcgcgggggtgtctcatccgcccctcctcatctttctatcctgcaacacaataacaccctcatcagcacagcccagcaacagatcagagaccgatttacaagctctactctgcttcaagcaaagcataaccaacgaccccaccggtgctttcagctcatggaacatatcgctacacttctgcagatggaatggggtcacatgtggcaggacatctccagctcatgttgtctccataaaccttacctccatgaagctcagtggagttctgccagcttgcatgggcaacctcacctcgttgcaaactctggttcttgacagaaacaatcttgaaggtaccatccctgaatccttagcaagaagtttatcactcattgagctaaatctttcgcgtaacttcctatctggacagatccctgctagtttgttcaatggctcatccaaacttgtcatccacgaatatctacacggcaatactatttgggctggatataggataccgaatatgtatagaatatcttatttgtatctcgggtttgtttcttaacttgtacaacaaggaaacaccttgagacttagtcggttacgactgtattttgtctgtgtttgcatattccgttagggatatgtattatcttttgtaatacggactccttcccatatataaggggggtccgagtgcctctaggggcagatgttgattttctctaaatcatacaatcaataatacactcggcggattcatccccggacaggagtagggtattacttcttttataagaaggcctgaacctgttttaaaaaaaaaaaaaaaaaaaaaaaaaaaaaa

SEQ ID NO: 80325 - DNA, 981 bp, Oryza sativa
  Clone ID: PAT_MRT4530_79960C.1
atggagacagcgatgatgctagtgcatgtagcagcatggccaggggcggcttccgctgctagggcccccatgctggcgtggcacggcgtatggtgcggtgtacggcgcgagacgaccgggagggcgcaccggtcgcgcaccctcccggtcgtgcgcggcacggtcgctgcccagatgtgcagcactaggccttcagccaggtcaacaggtcccatgtctcgactggttgccactttttctttcttctgcgcttcttctttacccaaatcgaagccgagcatcatagcggatgactctgggtcccactcatggtaccacgctagggttagcccacagtcatcatcgagtcctaccatcgtcctccactggctcaatgttggccatgaactccctccacttggcatctattgggccaaagctagcgtcgttgtcgaggaagaactaaagtggaggtggagatggagatggtggcatcttcatcgtggtcacaaccggctttatcgggttatcaaccgcaccgtactcattctcattgcagtaggattcgacgatcgctgcatccttcaagggcagctacgagcagaatttcgcaagggcgcatgccagcgtgacgcccctgtggagccctcttgtcagactcttcttcctcctccggctgagctcgagctgcaccacggacccgcggcggcgacgggcttctggtattccaactccggtgccgaccgcgcgctctacgccacccccatcacgctcctcgacggcttctccacccagttcaccttcaccgttaccacgctcaacaccgactccatcggcggggggctcgccttcgtccttgcctccgtacatcgggtctccgccacctccgatgtcgccgtcgagtttgacacccttatggatgtgcagttcgggaatgccaatggaaatcatgtgggattggatcttgggagcatggtatcgtcggccgcggctgcatggtag

SEQ ID NO: 80326 - DNA, 2368 bp, Oryza sativa
  Clone ID: PAT_MRT4530_79961C.1
gtctcggatgcttcgctccttgcgccatggggcggttgaacaggggaggtggcgagcagagcaggggaggggaggggatcctgcaggttctatagtatattatatacttgatgactggttaatcccattggtctggtggggagatcttgagagatagatatttatctacagtaaatcatcagcacagcagaaaatgccggcaattatgttatgcagttgtagcggggaccaatccaagtttgaagaaatgcctcgatcgcctgaatctcttgcgacgcgggattactcagcaactggttcttcttcaaggataggaaatcgagaatcaactcctgatgacaaccaagaagcccgggcattgctgggtagactggaacatcagagaggaaactttgatgcagcattgcaagttcttcagggaattgatataagaagcctgatgccacgaatgactactgctattgctgacagtgtcaagcctagaggtcctccacgttcacgaaagaaaacctcacaagtgaatggaatgctgatgcatatgtctatgcactctgtaagtttgcttctcgaggccatattgcttaaagcgaagtctttggaaggtcttggtagagtgacagatgctgcagaagaatgcagaaccatcatagacattgtcgagtctgcatggccatatggtgtccccgaaggtacttctgaagagtgtaagttgatagacattttccactccgccctagaatatcttcctaagctttggatgaggagtggttgttgtgaggaagccatcatcgcatataggagggctcttgcaaagccatggaatttggattctcaaaggtctgcaaatttacaaaaagatttagcagtgactctgctgtattgtggtgctcaagtgaagtttactcaagaatttgatcaacacaagccagcaactcctaggaacaacatggaggaagcaattttgttgttgctgatacttacaaaaaagttagcccttcaagaaataaagtgggatcctgaccttgtgaaccatttgatgtttgcactctcattatcaggccattatgaaatcttggctagccatctggaaatgttgttgcctggaacctataaccgatcagaaagatggtatattcttgcgctctgctacagtgcagctggcatggatgatagcgccttaaacattataaggaacggtttcaacgtattagaaaggaaagggaagcctcatattccatctcttcttttaggagccaaactatgttgtaagaacccaaagcgtgcttctgaaggaataaaatttgcagataaagccatgaagtctttcagaaagcatgatttccattttgtcagtgttgtaaaccatcttcttggtgtttgctatggaccttttgctagatcctccacttctcatgcagaaaaattgagattacaagatgaagcactgaggttgctacaggatgctgctgcaatggcaaagtatagccctgaaattatgtatagccttgcttgggaaaatgcaatgcagcgtaaactgaatgcagctgttgaaagtgcaacagaatgcgttgagatggtgatgggaagtttagttagtgcctggaagttactgattcttgtgttatctgctcagcaaaatttaaaagaggccgaagcagtagcaaatattgcaatagatgaggctgagaaagaggatcagatgggaattttgaggctaaaagcacacattcaggcctcacgtggacagttcaagtctgcagtagaatcatttcggagtttgcttgcaataatccaagcaaagaaagaaatctggaagcagaccccttatgacaaggttaaatccctacagaatttagagatggaagcatggttagatttggcgtcaatatacacgaagcttgaatcatggcatgactcaaatgtctgtcttgacaaagccaaatctatcagttctttctctcccaagtgctgccatgtcagaggccttatattgcaggctcagtccttgcaccaggaagccctgacggcgttctcgctctccctctccatcgatccagactatgtcccaagcatggtttgcatggcaggaattctaaccattcttggagggaaatcattgtcgatcgcaagaacgttcctccgtaatgccctccgtttggaacccacaagccatcaagcctggctgcgccttggactcgtcttgaaatctgaaggatcactgcttgaagcggccgactgcttccaggcagcctacgagctccaggagttatcgccgatacaggacttctcagagcacctccccatcatgctgcaataggaacgcaatagcccaagattccttgtagaaattacctctcactttttaaac

SEQ ID NO: 80327 - DNA, 414 bp, Oryza sativa
  Clone ID: PAT_MRT4530_79962C.1
acagtcattggccgaagattcgagcgtgcctcatgaagatgacacgaccggtgattcaggacaccaagaataggcatcttcttgaccccaaggtcattatgatggcaaaactgaggctttcaaaatggatgattaacgatgcatgtacatgcctatatgatagaagaaatattgagcagttgatcgctgagcttgagaaggattcgtcattcccagtcagtgattgtcttgacagtgaagttgccctgagtttgacacatacatatatgtagttccagctgttgtaaacgctgatgcaatagaatgatagtttcgttaagtgtatctaacatcctctggaataattacagaattctcaggtccctaatcacaaggcaccacaaacgtgccctatttcgtaaaaaaaaaaaaaaa

SEQ ID NO: 80328 - DNA, 189 bp, Oryza sativa
  Clone ID: PAT_MRT4530_79963C.1
atgggggtttgcaaaataagctgctacgatttaccccctcaactatcgcaaaatcctggcttcgacaccaacacgtgcacactgccatatttcgtgacctccgagcttccgcacactcctacggacctcccgctcaacctcctgacacctcaaccaattccaccaatgggaacacaactgctagaataa

SEQ ID NO: 80329 - DNA, 2214 bp, Oryza sativa
  Clone ID: PAT_MRT4530_79964C.1
atgttggagaagatcaaagggcagttgatgagtaggttttataacaagcagaaggaagcagagaaatgggaagggccattctgtcctaaaattgatgtcatcagcaagcactgtgattgcagaagatgggaccttactggtattccctgttgtcatgccatagattgcattagagaggagaggctgtctgaacaagactttctgccattctgctactcaattgaggctttcaagagtgtatatgccaacaacatcatgccatgcagtgacagggccaactgggagaagatgaatgggccacaagttctgcctccagtgtatgagaagaaagttggcagacccaagaaaacaagaaggaagcaccctacagaagtgcaaggcaaaaatggcctaaaactcaacaagcatggtgtaatcatccattgcagttactgccatgagccaaatcacaacaaaaagggttgtccaatgaggaagaaagggatcaagcccaagatacagatcagaaagaagaaggatgtagctccaggaagtcaagtgcccagtataactcaggaaatgatgggcacacaacctggaacaagtactggattgctaaatgaggttaatgacaacatgctcagtgtgataatggcagagtcttcacagcccagtcagatcactcaacagcaaggtccattgccagattctgctttcattcagcaaaaccaaccttccacaagacctgttgttctgaccactgcaaccaaagaaggaagagcaaagattacaagacaaagaagaaggcatgaagtactacaaagaagaaggcagatctcactgagcaagaagaagttttattctcacatgatgggcacaagatcaacggtaccttattccggcgagtacaagcggaggccgagcttgaagaagccatgggggccgcgaccagtccttggctaccacccgtcatggcctcgccgctgcacttggttgcctcccaccatcgccttgccgctgcagttggttgcctcccgccgtcgcctcgccgccgtggagctcactgccgagcgtccaaaccctagacgaattggggattttgggggattcggcgatgtagcccgggacgccacgttggcgactattcctcttacttggccgttctcgtgctgggggctcgacatactcagaccattcccacgaggacagggtggctacaaattcctattcatggcgatcgacaagttcaccaagtggattgaagtgacgcccacaggggaaatcaaggccgataatgccatcaagtttatcaaagggatattctgcagatatggattgactcaccacatcataacagacgacgactcccagttcaccagtgccaacttccaggattactgcattggattgggagtcaagatttactttgcctcggtttctcaccctcaaagcaatggacaggtcgaaagggcaaacggcatagtactacaagggatcaagacccgcgtctacgatagactcatgtcacacgacaagaagtgggtcgaagaactcccttctgttctatgggccgtgcgtaccacaccgacatcatccaataaggagacacccttcttcctcgtgtatggctcagaggctatgctccctacggagttacaacatcagagcacacgagtacagaagtactccgacgaggaacagaaggagcagcgaagcgacgatgcccttcgccgataccacgagaagcgcatcagagcacacacactttcgattggtgattacatcctccgacgggttcaaagtcaagtagggcgcaacaagctctcatccaagtgggaaggaccatacacgatcacacaagtcttgcggccgggtgcattcaagattgcagacgatcgcttaccacgacgacacctagagttgaaacctatcctcatgtcactttacgccatcttggcaaggcctctgaggaacctaagggaacttcggcttgggacgcccagagcggataaggccttgttggatcatgcagagacaaacgaccatgtcaagggtacaagagtcttatcctccgagaacgattctccgacgacaaggctgggggctagggagagtgtatggctcaggatacaaaaaccaccgggacggccaacgccaatctatggagtggaaaaccttctcggcaagcggcgccatcaactgcacaagaccgtcgatctccgcggtgtcctctga

SEQ ID NO: 80330 - DNA, 531 bp, Oryza sativa
  Clone ID: PAT_MRT4530_79965C.1
atggcggcagagactgggatccagctagactcattttccctaggtggaccggcggagtaccttgctagtgacggggaacgggacgttctcatggtgaggtttctgcggtccatcgccgccttcttggccgatgggacatgccagatgcaagtcaacgatgggctgcgtagcgtcgttgacctcgtcggcggcggcggcgggggaaggtcgatgcagcggctggccacaccgtcggcaaccatctccaccacgcgccaagggttccacgcgatgtgcccgatcatccggctcgccgctgccgtgtccaacctgtccatcaccaaggtgatggatgccaagcggggcgtcatccacgtcgtcgacctcagcggcgaggcccagcgcctggacgccaacttgcagttccatccgacgcaatctagcatcatggcactctccggcatcggatcccgcctcagcgtcatcgccggccaacccctcgccgcgggtgaatctatcgcctgcaatgatggagatgtcgcctgcgagtga

SEQ ID NO: 80331 - DNA, 1073 bp, Oryza sativa
  Clone ID: PAT_MRT4530_79966C.1
atgtctttcgtgattagtcccacacttctcaccatagtaaatgatgctataattggtaataatttgattagctcctggtttggaatggtatattcctggtttggagatataactgtgcagccgggatggttgttcagaatggttgggcctatacaacaggaaattccgggcgtgacaactaccagcgcaagcactccagactatccctcttgcttggtcgttctcgtgctgggggctcgacatactcggtccattcccatgaggacaacggctacaagttcctattcatcatggtcgacaagttcaccaagtggattgaagcgacacccacgggggaaatcaaggccgacaatgccatcaagtttatcaaagggatattctgcagatatggattgcctcaccgcatcataacagacaacgactcccagtttatcagtgccgacttcctggattactgcattggattgggagtcaagatttgctttgcctcggtttcttaccctcagagcaatggacaggtcgaaagggcaaacggcatagtactacaagggatcaagacccgcgtctacgacagactcatgtcacacgataagaagtgggtcgaagaactcccctctgttctatgggccgtgcgtaccacaccgacaacatccaataaggagacacccttcttcctcgtgtatggctcagaggctatgctccccacggagctacaacatcaaagcacacgagtacagaagtactccgacaaggaacaggaggagcagcgaagtgacgatgtgaatctactcgaggaacatcgagaaagagttaccgtcagagcagccagctaccagcaggcccttcgccgataccacgagaagcgcatcagagcactcacactttcgatcggcgattacgtcctccgatgggttcaaagtcaagcagggcgtaataagctctcacccaagtgggaaggaccatacacgatcacgcaagtcttgtggccatgtgcattcaagattgcagacgacgatggtcgcgagttagcaaattcctggaacattgatcaattacgtaaattttatgtataa

SEQ ID NO: 80332 - DNA, 2760 bp, Oryza sativa
  Clone ID: PAT_MRT4530_79967C.1
tcgggaagaagccagatctccgccccgttcggtatcccaaactcggccaagatctaccccaagatcgtctccaccgagtcggcttcaaaccactcgaacgagatccaatctactccaacacgactcgatcaagacgatggggcctatccgccaatcctgatgaaactccccgatgatttggctgctgtcttcaccacaagggcatcttctccccgtagatctaggcgggatccggcctctaccccgatccagcttagcaccagagaagtcggcatcatactccagcctctcagcacggtttcgacggaacaactggatggctacctcagctcccccggcgtcgactcacggccaacggagatcattgagtacaacgacttcggctgccgctacgactaccgcaacctcgacgacttcgacgaagactttgaagataactacacgcctctctacttcggcatcttcatggctgacaacgagatggaagaacagcttgcaacgatcaccctcctcgacaccctcctcaaggaagacgcactcaatcaagccaatcacgtcgtcaacatcttgaaccagaccaagatcatgatcgccgtctcggtcccggttaactctgcaagcgtccgcacgccgactggcagccgagttccccctcttcgatctcaagactatcaccaaccaagcctcagtgtcgtcggcgcgggatctagtcgcaggagcaggggtcacgacgagcgatctgtccactcgcctcctgaacgacacagggagcgtcgagttgaacgacctcgctccccacatcgcaggcgccctgtcgatcttcgcgatattatcaaccagcgccgcgcggcaagaggatacgttccccaccattcaccagatcgctacgacgacgacgtggatggagttgctgccttcacaagtgaactgcgtcgagtggattggccagccggcttcaagccgactggaatcgagaagtatgacggcaccactaacccggaatcttggctcaccgtctatgcggactctgcccgatcctggcttcacgagttaccccgtggcacaatcggatcttgggcggaacttcgcgaccacttcatcgccaacttccagggtatctttgaacgccctagtacacagtttgatctctacaatgttgttcagaagtctagagaatcccttcgagattacatcagacgcttttccgagcaacgcaacaagatctccgacatcaccgacgacgtcatcatcgctgccttcaccaagggcattcgccacgatgacctagtcggcaagttcgggcgcaagcctcccaggacggtcaagcagatgttcgaaaaagccaatgagtacgccaaagccgaagatgccattaccgcgtccaagcagtcgggcaccacttggaagccgaagaaagatacgccgactacaggggggagtggaagtaccaatcacaaggatcgcaagcccgaggaacttgtggcaactactacaccatcctcccggcaacattcacgggtcaacacttttgacaagatcatgaactcccaatgtccgcatcatccaaactccaatcacgcggccaaagattgcttcgtctatcaacagttcgcagaacaatacgccaagaatgcacgcaaggcctctgacggagatcaaagcacgtcaaagaagaaggatgatgaagacaacgccccgactggttttcaagaccatcgcaaggaactcaaccacatctttggcggacccctggcttatgaatccaagagaaagcaaaagctaaccgaacgggagatcaacgctgttcagcccgacacgccccaatatcttcggtggtcagagacaacaattaagtttgaccgctcggatcatcctgaccgagtggtccacccggggcggtaccccctggtactagacccagtggttcgcaacgtcaagcttcgcagatccctcatcgatggtggcagtgcactcaacatccttttcgccaagactctggacgacatgcagatccctcgcacggaattaaagccgagtaatgtgccctttcacggagtcatcccagggctatctactacaccactcggccagatcattcttccggttactttcggcactcgggagaacttccgcacagagaacatttgtttcaaggtcgctgatttcgagacagcgtatcacgccatactcggacgcccagcgttagccaagttcatggctgtcccgcattatacctacatgatgatgaagatgcctggtcctcgaggagtcatatccctgcggagtgacatcaagcaagccgtcacgtgtgacaaggaaagctgcgagatggcccagacctgcgagatcacgctcgcccgagaagaaatccaactggctgcgtccacagcaagcgaaggagaagtgcctgcgaccaagatgccaaagagcggggaaagcgacaccaagaccaagaagattcctctagatccctctgatcctactaagacagctgataggaaggatgcgatcaaggaagaattgaccaagctgttagcagcgggcttcatcaaggaagtccttcatcccgactggctagccaacccagttctggttcggaagaagacggggcaatggcgcatgatgaaattaaatcctgaaaagtgcatcttcggagtaccgtcagggaagctgcttggatttatggtgtcccatagaggcatacaagctaacccggagaaaatcaatgccatcctcaacatgaaaccgctgagctcctag

SEQ ID NO: 80333 - DNA, 3427 bp, Oryza sativa
  Clone ID: PAT_MRT4530_79968C.1
taaataatctaagctaggtggaaagaaaagcaccaaccctgaggagttcattcaggtctattccatagtactctatgctgccggagcagacgacaacacattggcgaattatttgccggcggcgttgaaaggatatgcacgttcatggctagtccatctcccagcatactcgatttcttcatgggtagatctgtggcagcaattcatcgctaacttcaaaggaacatacaagcgccacgcgatcgaagacgacctacacgcattgacacagaatccgggcgaatcattaagggactgcgttcggcgctttaatgagtgcagaaatacgatccccaagatcaccgacgcttccgtgatctacgcttttaagactggtgtcagagatcgctacaccacccaggagttggcgacaagacgaatcatgactgctcgcaagctattcgggattgtcgatcgttgcgctcacgcagacgatgccctgagacgcaagaacgataagcccaagacagggggagagaaaaaactagccaaggacgcacctgagtcaagcaagaagaagagtcgcaggagtgggaaacggaaagctcaaatggagatcctcgcagcagaatatgcggacccacccaaacacccagacccacaaggcgacgacacaaagaaaatatggtgccctatacacaagtcggacaagcactccctagagacttgtttcgtcttcaaaaaggcactcgccaagcaactggcattggaaaagggcaaacgagtatgtgtagtcgagaaggccgctgaagcagctactcaggactcggactcagcatacccagattccgatctccatgtttcgcacatcttcggaggttccacggcatactcctaaaagcgagagtacaataaagtggagcgtgtagtttgtttgacatggcagggggctgcacccaagatgaagtggtcagagtagaagatcgaattctcagaggcagaccaccccaagattgctgtcaccctagggcgatatccaatcgtggtcgagcccactattcggaatatcaaggttgcacgggttctcatcgacggtggcagctccatcaacctactgatcaaccattccatggaattacccctcagtcgtcgtccaagccattgggtatgatcacgcttcctgtgacttccagccaagcaaacaacttccgaacagagcagatcacctttgatgttgctgagtttgacacagcatataacgccatcatcgggaggactgcactcgcgaagtttatggccgcatctcactacacatatcaagtgctcaagatgccggagccgaagggaacaatcactattcaagggaacacgaagctggcggtacagtgtgacaagcggagcctcgacatggtcgagaacacccccaacccacccaccatagctgagccaccgaagaaagtgagcaaaacaaacaagacgccgaagccagacggcgcaatcaagatcgttccgctctccagtgccaaccccgacaagaccatcaacaattcagacgtgttcgcttggtagccgtccgacatgcggggggtccctagggaggtgattgagcacaaactcatggtgcgacccgatgccaagccagtaaaacaaaaactgcagagaattgcaccagaccggaaacaagccatacgagaagagctcgataagcttctcaaagctggcttcatcagagaggtactccatccagagtggctagccaatctagtcatggtgcgcaaggccaacgggaagtggaggatgtgtgtcaacttcaccgaccttaacaaggcgtgtccgaaggatcacttccctcttcctcgaatagaccaattagtggactcaacagccggttgtgagttgttaagctttcttgacacttactccggctaccacagatcagcatggcaaaagaggacgaggagaagacagcattcatcacgccgttcggtgtattctgctatgttaagatgccgtttggactaataaccgtaggaaatactttccaacgcacggtccaaggggcacttaacgatcagcttgggaacaatgtcgaggcctacgtcgatgacattgttgtcaagaccaagacaagcgactcattgatcgatgatctccgggaaacattaacaacctccgacgatatcgcctcatgctcaatccagaaaagtgcacattcggagtaccatcgggcaagctactcggattcctcgtctctggaagagggatcgaagaaaatcccaagaagatcaaggcaatcgagaacatgaagttgcccacaagactaaaggaagtccaaaagctaactcgatgcatggcggcattgagcagatttgtcgctaggatgggagaacaaggacaacccttcttcgctctgctgaagaaacaagaaaaatttgtgtggacacaggaagccgaagatgctttcattgcactcaaacgctacctgtcaaatccccctgcacttgttgccccccaacctaatgaagaattattcctctatattgccgccacaaggctaccagcgcaagcgctccaaactatcacccttacttggccattctcgtgctgggggctcgacataatcggaccattcccacgaggacagggcggctacaggttcctatttgtggcgatcgacaagttcaccaagtggattgaagcgacgcccacgggggaaatcaaggccgacaacgccatcaaatttatcaaagggatattctgcagatatggattgcctgatcgcatcataacaaacaacggctcctagttcatcagtgctgacttccaggattactgcattggattgtgtgtcaagatctgctttgcctcagtttctcaccctcagagcaacggataggtcgagagggcaaacggcatagtactacaagggatcaagacccgtgtctgtgacagactcatgtcacacgacaagaagtgggtcgaagaactcccctctgtcctatgggccgtgcgtaccacaccgacaacgtccaacaaggagacacccttcttcctcgtgtatggctcagaagccatgctccctacggagctacgacatcagagcacacgagtacaaaagtactcagacgaggatcaagaggagcagcgaagcgacgatgtgaatctactcaaggagcatcgagaaagagttgccatcagagcagccaactaccaacatgcccttcgccgataccacgagaagcgcatcagagcatgcacgctttcgatcggcgattacgtcctccgacgggttcaaagccaagcagggcgtatcaagctctcacccaagtgggaaggaccatacacgatcacgcaagtcttgcagccaggtgcattcaggattgcagacgacgatggtcgcgagttagcaaattcttggaatattgatcaactatgtaaattttatgta

SEQ ID NO: 80334 - DNA, 4650 bp, Oryza sativa
  Clone ID: PAT_MRT4530_79969C.1
atgggtttcgtctccggcatcgacgacttcgtcttccctcccgagcaggcgttccagttcggcagcctcgacttcatcaccaacgacatcggcaggatttctctcctcgactcggaatcgaaccagtctaggcgggatccggccccggccccgatcctgtctagctccagggaagtcggcgtcatactccaacctctcggcacggtttcgacggaacaattggacggctacctcagctcccccggtgtcgactcacgaccaatcgagatcgtagagcacgatgacttcggctaccactacgactaccgcaacctcgacaacttcgccgaaggctttgaagataactacatgcccctctacttcggcattttcatggccgacaacgagacggaagaaaagcgtcaagcccaagaagtagaagaacagcgcgtgcgacaagaagccgaacgtcgccgactagaggaggagcgtcaagcacaagagcgagacggctgcagccagaacgcggttgcagcgatcaccctcctcgacaccctcctcaaggaagacgcactcaatcaggccaatcacgtcgtcaacatcttgaaccagaccaagaccatgatcgcagcttcggtcccgattaactccgcaagcgtccgcacgccgactggcagccgagttcctcctcttcgatctcgagactatcaccaaccgagcctcagcgtcgtcgacgccggaaccagtcgcaggagcagggatcacgacgagcgatccgttcactcgcctcctgaccgacacagggagcgtcgagctgaacgtccccgctccccatatcgcaggcatcccatcgatctttgcgaaactatcaaccagcgccgcgcggcaagaggctacaacccccaccattcaccagatcgttacgacgacggcgtggatggagttgctaccttcacaagtgacctgcatcgagtggattgggcagccggcttcaagccgactggaatcgagaagtatgacggcaccactaatcctgagtcttggcttaccgtctacagtctcgcaattcgcgcagcaggaggagacagcaaagctatggcaaactatctgctcgtagccctagcggattctgcccggtcctggcttcacgggctaccccgtggcatgatcggatcttgggcggaacttcgcgaccacttcatcgccaatttccaaggcacctttgaacgccctggcacccagttcgatctttacaacgttgtccagaagtccggagaatcccttcgagattacattcgatgtttttctgagcaacgcaacaagatctccgatatcaccgacgacgtcatcatcaccgccttcaccaagggcattcgccacgatctcttagtcggcaagtttggacgcaagcctcccaggacagtcaagcagatgttcgagaaagccaatgagtacgcaaaagctgaagatgctgtcaccgtatccaagcagtcgggcactacttggaagccgaagaaagatacactgaccacaggagggagtggaagtaccaatcacaaggatcgcaagcgtaaacctgaggaacttgtggcaaccactacaccatcctcccgacaacattcgcgcgtcaacactttcgacaagatcatgaactctcaatgtccgcatcctccaaattccaaccacgcagccaaagactgctttgtctataaacacgcactcaacatccttttcaccaagactctggacaacatgcaaatccctcgcacggaattgaagccaagtaatgcgcccattcacggagtcatccccaggctgtcttctactccactcggccagatcactctaccggttacttttggcactcgggagaactttcgcacagagaatatttgcttcgaagttgctgattttgagacagcgtaccataccatactcggacgcccggcattagccaagttcatgactgtcccgcactacacctacatgatgatgaagatgccaggtcccagaggagtcatatccctgcggagcgacatcaagcaagctgtcacttgcaacaaggaaagctgtgagatagcccaaacccgcgagatcacactcgctcgagaagaaatccgactggctgcgtccacagcaaccgaaggagaagtgcctacgaccaagatgtcaaagggcggagaaggcgacgccaagaccaagaagattcccctagatccctttgaccctactaagactgctgaaagcgcgctcatcacctttcttcaaaataataaagatatctttgcgtggaaaccatctgatatgcctcgtattcctagagaggtgaagcactctttacatgttaaggaagatgctaaacctatcaagcaacgactccgccgtttctcacaggataggaaagatgcgatcaaggaggaattgaccaagctgttagcagcaggcttcatcaaggaagtcctacatcccgactggctggccaacccagtcctggtttggaagaagacggggcaatggcgcatgtgtgttgattacaccaacctcaataaatcttgtcccaaagatcccttcggggtacctcgcattgaccaggtagttaattcaacggccggctgcgagttactcagttttttggattgctacacaggatatcatcagatccgactaaaggagtccgactgtttaaagacttcgttcatcacgcccttcggggcctactgctacatcaccatgccttttggattaaagaatgcaggagcaacttatcaacgcatgatccagagatgcttttcaactcagattggtcgcaacgttgaagcttatgttgatgatgtagttgtcaagaccaagcagaaggatgatttgattacggatctagaagagacctttgcgggcatccgtgctttcaggatgaaattaaaccctgaaaagtgcatcttcggagtatcgtcagggaagctgcttggctttatgaaagatgttcaaaagttaactagatgcatggcggcgctcagtcggtttgtctcacgacttggcgagcgggggaagccctttttcaagttgttaaagaaaaccgacaacttccagaggggacccgaagcacaaaaagcctttgaagacttcaacaaacttctcactactccaccagtcttagcttcaccagatccgcaagagccgttgttgttatacgtgtcagcgacttcccaggttgtgagcacagtcctggttgtcgagcgtgaggaagaaggccatgttcaaaaagtccaacgaccaatctatttcgtcagcgaggttttggccgacttcaagataagatatcctcaggtcactcggttcggggatatacttcacacccgcgaagcaaatgggcggatcgcaaagtgggccttagagttgatgtctttggatctatccttcaagccgcgaacttcgatcaagtcccaagctttagcagacttcatcgccaagtggaccgagtgccaagaagacacgcctacagagaagatggagtattggactatgcattttgacgggtcaaagaggctttcaggcaccggagcgggggttgttctaatctccatgactggagagaggttgaactacgtattatggatacatttttctgcgtcccataacgtggcggaatatgaggcactacttcacggattaaggattgcgatctccttgggaattcggcgtctgatagttcgtggagattctcagttgattgttaatcaagtcatgaaagagtggtcctgccttgatgataacatgaccgcctatcgtcaggaggagggaagacaattgctaagagatatacattcaggcatctgtggcaattacgctgccgcacgacccatcgttggcaaggcttatcggcaaggtttcttctggccaacagctgtatctgacgcggacaaaattgtgcgaacatgtgaatgttgtcaatttttcgctcgacaaactcatctaccggctcaggagttgcaaaccatcccgttatcttggctgttcgcggtttgggggctcgacatggttggcccgtacaaaaaggctatcggtggttatactcatctctttgtagctgttgacaaattttccaagtggatcgaagccaaaccggtcgtcacaatcacggcaaacaaggctagagatttttttatcaacattgtgcaccgtttttcggtacccaatcggataataactaataacggcactcaattcactggcggagtatttaaagatttttgcgaggacttcggcatcaaaatttgttatgcctccgtagcgcaccccatgagcaatggacaagttgaacgtgccaatggtatggtacttcaagggataaaagcacaagtttttgaccaactgcatccctatgttggcaaatgggtagaacagttgccatccgtcctttggtccctgcgcaccacacccagtcgggctacgcgacagtcaccattctttctagtatatggtgcggaagcaatgttgccaagtgaggtagaattcgaatctttgcgatttcgtaatttcagcgaggagtgctatggagaagaccgagtagatgatctcaaccgactagaagaagcccgtgaagcatcgctaattcagtcggctcggtatttacaagggatgcgtcgttatcacaatcgcaatgttcgatcatga

SEQ ID NO: 80335 - DNA, 130 bp, Oryza sativa
  Clone ID: PAT_MRT4530_7996C.1
ggaagtattgcatttgtactatattaataccatgatggatcttaatacaggtagtggcacagaattttgttacagcactgatttttttacttggaataataggattattgggaactattaactgtaaata

SEQ ID NO: 80336 - DNA, 1168 bp, Oryza sativa
  Clone ID: PAT_MRT4530_79970C.1
atgtctttcgtgattagtttcacacttctcaccatagttaatgatgctataattggtaataatttgattagctcctggtttggaatggtacattcctggtttggagatagaactgtgcagccgggatggttgttcagaatggttgggcctatacaacagggaagccgaagaggcgttcatcgcactcaagcgctacctgtcaaatccccctatacttgttgctccccaacctaatgaagaattattcctctatatcgctgccacgccatattctgtcctcgccaatttcgtagctgactggactatgcctgaaaacaggctggacagtcaaaccgacagcgaaacatggacaatggcgttcgacggtgcactctacagccaaggagcaggggaagggttcatcttgacatcaccttcgggagaccagttcaagcatgcaattcacctcaacttgaaggcgaccaacaacacagccgagtacgaaggactactcgctgggataagagcagcagccgcactaggagtcaagcgactaatcgtgaaaggagattccgaactagtcgtaaaccaggtgcacaaagactacaagtgctctagccccgagttatccaagtaccttgcaggagaaaagcggtgtgaagcctgccaattccacagtaaacacacaaggctaccagcacaggcgctccagactatccctcttacttggccgttctcgtgctgggggctcgacatactcggaccattcccacgaggacagggcggatataggttcctattctgcattaaagggatattctgcatcataacagacaacggctcccagttcatcagtgtcgacttccaggattactgcattggattaggcgtcaatatctgctttgcctcggtttctcaccctcagagcaacggacaggtcgagagggcaaacggcatagtactacaagggatcaagacccgtgtctacgacagactcatgtcacacgacaagaagtgggtcgaagaactcccctctgtcttatgggtcgtgcgtaccacaccgataacgtccaacaacgagacacccttcttcctcgtgtatggctcagaagccatgcttcccacggagctacgacatcagagcacacgagtacagaagtactccgacaaggatcaagaggggcagtga

SEQ ID NO: 80337 - DNA, 1323 bp, Oryza sativa
  Clone ID: PAT_MRT4530_79971C.1
atggcggccgggagcgagggggggatttttatggggaaggaggcaaggtcggtttggggagcggaatgtcggtccgcggaggcggtggagcgcggcgaggggaccgcgcgggcgctccccgcgctagcggccaagcgcggcagcggtggaaagggggctttgccccttccacattggggcggtgtggccggcaaggcgcgcagggccggcgtcagcggctcggcgtgcacggcacaagaagccaagcggcggccgagggggaatgggcccaggggagaatgggccgagggcggcccgatgaagaggggaaggaaaggaagcaggccgagtgggaatcagcccgaggggaagggaggaagcatcattgaagggtacacgacggaggaggttattgagttctgcatcgattacatggccgagactgatcctattggagttcctgcgtctcaccacgaaggaaggttggcaggccttggcacaacaggcagaaaaagaattgtacctgatcaggcatcgtatgcgcaggctcatttcgctgtgctacaacatatggccgaagaaactccatactttgaggagcatctagcgaaggtccgacaggagaacatgggtcgatcagatatgtggatcaacagagaacatagtactcgcttcaacgaatggttcaagaatcatatcgcacggtcgaccgatggcccaagtgagataatacgatatcaatgtgtggcaagctgcccaagctgggatgttgacacatggcaagggtacgatatcaatagatacacattctacaccgtcaaacaagatgacaaaagcacaatgcagaacagtggagtccgtatagatgcatatcaggatcaagctggatcgaacacatactatggccgcatagaggagatctgggagatgaactacaggagcttcaaagtccctttgtttcgttgcagctgggtgaatatccgcactggtgttaaagtcgacagggaaggattcactttagtggacttggccaaggttggatacgcggacgaaccattcgtcctagcgaagcaggtcgagcagattttctatatacaagaccccgcaaataagaagctgcacgtcgttagggatggcaaacgaagaattgttggggttgacaacgttgtcgatgaggaagaatataaccagaatcttcataccgccgccgccgcctcctccctctcactctcaatctctgtcccgactgccgcctcctcctcctggatgctgccgcctcctggacgtcgccgcctcctcctcctggacgtcgccgcctcctcctccgccgccgcctacccctag

SEQ ID NO: 80338 - DNA, 4746 bp, Oryza sativa
  Clone ID: PAT_MRT4530_79972C.1
ttacaaatatcgagtcgactgaattaaagctgcttctcgagcttcttctagtcgattgatgtcgtctactcggccctcttcatagccctcctcgttgaagttccgaaatcgtagtgattcaaattccacttcactcggcaacattgcttctgcacaataaaccaaaaagaacggcgactggtcggtggcccgactaggagtagtgcgtaaagaccaaagtacggacggcagctgatctacccacttgccagcgtagggacgtagtcggtcaaaaactcgtgctttgatcccttgaagtatcatgccgttagcacgttcgacttgtccgttactcatggggtgtgccacggaggcgtaacaaattttgatgccaaagtcttcacaaaagtctttaaatgctccgccagtgaattgagtgccattatcagtgatgatccgattaggtaccccaaaccgatgcacaatgttgatgaaaaaatctctagctttatctgctgtgatcgtgatgaccggtttagcctcaatccacttggagaatttgttgatagccacaaagagatgcgtgtaaccgccgactgcccttttaaacgagccgaccatgtcaagcccccagaccgcaaacggccaggacaacgggatggtttgcaactcttgggctggcaaatgagtttgtctggcaaaaaattgacaaccttcgcatgtccgcacaaacttgtcagcatcagacacagctgtaggccagaaaaaaccttgccagtaagctttgctgacaatggtccgtgcggcggcatgattaccacaaataccagaatgtatatccttcaacaattgtctcgcttcttccaaagacacacagcgctgcagtattcctgatggacttttcttgtacaactcagcctcttgtcgataagcggtcatattatcatctaggcatgaccactctttcatgacttgattgacaaccaactgagagtctccacggacgattagtcggcgaatacctagagataatgcaatccttagtccatgaagtagcgcctcatattccgccacgttatgggacgcagaaaaatgtatccacaatacgtagctcaatctttctccagtcggggaaatcaagacgaccccagctccagtgcctgtaagcctctttgacccatcaaaatgcatagtccaatattccatctttttctctagcatgttttcttggcactcggtccactcggcaaggaaatcagctaaagcttgagacttgatcgaagttcgtggaacctgagaggtcgctgacacatataacagtagcggctcttgtggatgcggcgaggccaaaactggtggagtagtgagaagtctcttgaagtcttcaaaggctttttgtgcttcgggtccccactggaaattgtcagttttcttcagcagcttgaagaagagcatcccccgctcgccgagtcgtgagacgaaccggctgagcgccgccatgcaaccagtcagcttttggacgtctttttgggagcttggcggtttcatgttgaggatggcgttgattttctccgggttggcctgtatgcctctttgagataccataaatccgagcaacttccctgacggtactccgaagatgcacttttccgggtttagtttcatcttgaaagcacgaatgcttgtaaaagtttcttctaaatccgcaatcaggtcatccttctgcttggtcttgacaactacatcatcaacataggcttcaacattgcgaccgatctgagttgaaaaacatctttgaatcatgcgttgataggttgctcctgcgttcttcaatccaaagggcatggtgatgtagcagtaggccccaaagggcgtaataaacgaagtcttcaagcagtcggattcttttagtcggatctgatgatatcccgagtaacagtccaagaagctgagtaactcacagccggccgttgaatcgaccacctggtcaatgcgaggtaaccgaaaagggtctttgggacaagatttgttgaggtcggtataatcgacacacatgcgccattgccccgtctttttccgaaccaggactgggttagccagccagtcgggatgaaggacttccttaatgaagcctgctgctaatagcttggttaattcctccttgatcgcatccttcctgtcagcagtcttatcaggatcggagggatctaagggaatctttttcgtcttggcatcactttcttcggtcttcgtcagcttggttgcaggcacttctccttcgcttgccgtggtcgcagccagtcggatctcttcgcgggcgagagtagtctcgtgggtttgggccatcttgcaactttctttgtcgcatgtgacggcctgcttgatgtcgctccgttgtgatatgactcctcgaggaccaggcatcttcatcatcatgtaggtgtagtgtgggacggccataaatttagctaaagccggtcgtccgagtatagcatggtatgctgtctcgaaatcagcaacttcgaaacaaacattttctgtgcggaaattctctcgagtgccgaaggtaactggaagagtgatctggccgagtggtgtagctgacaatcctgggataacaccgtggaagggtgcattactcggttttaattccgtgcgaggaatctgcatatcgtccagggtcttagcgaaaaggatgttgagtgcgctgccaccatcgatgagagtccgtcggagcttgacattgcgaaccactgggtctagtaccagggggtaccgccccgggtggaccacttggtcgggatgatccgagcggtcgaacttaagtgctatctctgaccaccgaagatattggggtgtgttaagctgaaccgcattgatctcccgttctgttagcttctgttttctcttagactcataagccaggggtccgccgaagatgtgattaagttctttgcgatgatcttgaaaaccagtcggggcatcgtcttcatcgtctttcttctttgatgtgccttgatctccgtctgaaggtttacgtgcgttcttgacgtattgctccgtgaactgtttgtagacgaagcaatctttggccacgtggttggagttgggatgatgcggacattgggagttcattatcttgtcgaaggtgttgacgcgggaacgttgtcgggaagatggagagatggtcgccacaagttcttcgggcttacgcttgcgatccttgtagttgttacttccactccctcgaagttccgcccatgatccgatcgtgccacggggtagtccgtggagccaggatcgggcggagtccgctagggccactggtagatagtttgccatggccttgctgtctcctcctgctgcgcggattgcgagtccgtagacggtgagccaagactctggattagtggtgtcgtcatacttctcgtttccagtcggcttaaagccggctggccaatccactcgacgcaggtcattagtgaaggcagctactctatccacgtcgtcgtcgtggcgatttggtgaatgacggtgacctcgtgctgcacggcgctggttgatcgtgtcgcgaaggtcgacgggacgctggtggggtggagagcgaggccgttcgactcggcgctccctgtgacgttcgggaggcgtgtgaacagatcgttcgtcgtgacccctgctcctgcgactagaacctgtgccggtgatgctgaggcttggctgataataatcatgagatcggaagtgaaggattcggctaccagtcagggtgcgggtgcttgcggagttggctggaaccgaggcagcgatcatggtcttcgtctggttcaagatgttgacaacatgatcagcttggttgagtgcgtcttccttgaggagggtgtcgaggagagtgattgctgcaaccacgttctgctggggggtgcgaaagaccgctgttccatcgacgtcttgttgcccaatgagttctctcgctcggcgcccagattccaaggcgcgttgccgtcgatcttcagcctcctttgcaatccgttcgtgatcttgctgctcacgttgtagtcgttctcgctcctgtcgctgtcgctcttcctccagtcggcgacgttcagcttcttggcgtgcacgatcttggtctacttctcgggcttggcgttgttcctccgtttcattgtcagccatgaatacgccgaagaagaggggcatgtagttatcctcatagctgtcgtcgaagttgtcgaggtcgccgtggtcgtagtggtagccgaaatcgtcgtagtcgaggatctcggttagtcgagaactaacgccgggggagctaaggtaaccatccaactctttcgtcgagactgtcccaagaggttggagtataacgccaacctctctggatctagattggatcggggccgaagccggagctcgcctagatcttcgaatgggagatgtcttggcagtgaagacagcggccaaatcatcaggaagtttcatcaggattgagggataggacccatcgtcttgatctggtcgcggaagagtagattggatctcgcccgagtggtttgaagccgactcgggagagatgatcttggagtaggcctcggccgagttcggaataccgaagggcacggggacctggtctctccccgactggtttgaatccgagtcaaggagagagatcttgccgaagtcgttggtgatgaagttgaggctgccgaactgaaacgcctgcccgggggggaaggcgaagtcgtcgatgccagaaatgaaacccat

SEQ ID NO: 80339 - DNA, 1208 bp, Oryza sativa
  Clone ID: PAT_MRT4530_79973C.1
ctcattttgactaaataacatgttataaaaataataagggatagagaaataccagaggacgacacagaagctgagaagataacccgacaagccaagatctattcgccaaacggagtacttctcaaatgcatctcgtccaatgacggcaaacatctcctcctgaacatacacgaagagatctgtgggtcacacgccggcggatggacgctggtaggaaaagcttttcgacaagggtttttctggccgacaacactcaaagatgcctgcgatatggtgcagcggtgtgaagcctatcaatttcacagcaaacacacaaaattccagcgcaagcgctccagactatccctctcacttggccgttctcgtgctgagggctcgatatactcggaccattcccacgaggacagggtggctacaagttcctattcgtggcgatcgacaagttcactaagtggattgaagcgacgcccacaggggaaattaaggccgacaatgccatcaagtttatcaaagggatgttctgcagatatagattgcctcacctcatcataacaaacaacagctcccagttcatcagtgccgaattccaggattactgcattggattgggagtcaagatttgctttgcctcggtttctcaccctcagagcaatggataggtcgaaagggcaaacggaagagtactacacaggatcaagacccgtgtctacgacagactcatgtcacacgacaagaagtgggtcgaagaactcccctctgttctatgggccgtgcgtaccacaccgacaacatccaataaggagacacccttcttcctcgtgtatggcttagaggccatgctccccacggagctacaacatcagagcacacgagtacataagtactccgacgaggaacaggagcagcgaagcgacgatgtgaatctactcgaggaacatcgagaaagagttgccgttagagcagccagctaccatcaggcccttcgccgataccacgagaagcacatcagagcacgcacactttcgatctgcgattacgtcctccgacgggttcaaagtcaagtagggcgcaacaagctctcacccaagtgggaaggaccatacacaatcacgcaagtcttgcagccaggtgcattcaagattgcagacggcgatggtcgcgagttagtaaattcctggaacattgatcaattacgtaaattttattta

SEQ ID NO: 80340 - DNA, 722 bp, Oryza sativa
  Clone ID: PAT_MRT4530_79974C.1
tcacagcccagtcagatcactcaacagcaaggtccattgccagattctgctttcattcagcaaaaccaaccttccacaagacctgttgttctgaccaatgttcttcagtaccactactaattctcttccaatggacactgcagtaatcaatgtctgctttaattcatcatcatcttccctcggaacttcggtttcatccaattgtcctgcattcttcaaacttgcagcaacttgtgcattcacatctgcagcctcttctccagcaattaacccattcttcttcaaatatttcatgtatccttcctcccaaaaccagaagttatacccagatccatctttctcgtggtcagggcaagtgtagaaaatgcgatccaggttactaactgtcttcgatgtgcgcttcacgacagttttattctcacatgatgggcacaagatcaacggtaccttattccggcgagtacaagcggaggccgagcttgaagaagccatgggggccgcgaccagtccttggctaccacccgtcatggcctcgccgctgcacttggttgcctcccaccatcgccttgccgctgcagttggttgcctcccgccgtcgcctcgccgccgtggagctcactgccgagcgtccaaaccctagacgaattggggattttgggggattcggcgatgtagcccgggacgccacgttggcggtaaggcacggaggggggaaaatgtaa

SEQ ID NO: 80341 - DNA, 2712 bp, Oryza sativa
  Clone ID: PAT_MRT4530_79975C.1
atggcggggctggtcccgccattctctatttttttcatggatattctggagttttatgatctccagatggcgcacctcacccccaacgcgataatgacgttggccatcttcgcgcacctgtgcgagatgtttatcggggtgcgcccatctctccggctattccggtggttcttcaccgtacagccggtgtcaccgccgacggtagtcggtggctgctacttccagccgcgggggcaggtgctgaaccgctacattccctgcgtcctccgcaaaaagtgggacgactggaagagcgattggttctacacccccctcgccgacgaagcgcgcctccgacttccgagccagcccccggcgcaggcctccagctggcgggcggcggtagatctgggagacggctacgacgccgttcttgaccgcctggcgggtctgcgatcccaggggctcacgggggccatggtgttcggcgactaccttcgtcgccggatcgcgccgctccagcggcgcgcccggggcgcctgggagtacaccgggcccgaggactacatgaggacccaccaggggcgcaaatgggactgggaccctgaggacttcaggatggtggtccaacgggtgctgaatctcagctccgtggaggcatccctcatcccccaaggggtcctccccctctgctgcgatccagagcgcgccaagatcctggccatcatgcaggtggtcggggcgtcgggggagcgggccccccggggccacgatggcgcgggcgggagccgcaggggggaacaatctaccccgggagggggtcgtgcttctgggccccgcgacgggggcccggggggcagccgccctgccgacgcccgggggaagaggaagcaggaggcgagatcccgtcgcgcccccccccgccattccaagtccggtcggtctgaggccgaggagacggcgaccgcggaggcccggaggcgggaagctgaccggcgagaagccgcggaccgcctccgggaagccgaggaggctgcccaggaggccgtccgggttcgccaggctgaggaggccgctcgggaggaggccagactccgccgggcctgggagtccgtccgggaggcagaggcggcgcgcgcacaccaggcggcctgccaaacccccgacccgactccgcccgaggcgacgatgacttccgaggccacccacgacgaggccgcgggcgcaccgctcgggcccgacccctcgggcgacgcttgggacgagccagcttcgggggacgcccccgagtccggcacgtcgatcggcgggccgagccgcgcggcacccacaccgagggggctctcccctctgccttccgctgccccactgagcgcggagcccctcctgcaggccttggccgccgcgaacagtacggtgctggacgggttaagtgcccagatggaggccctgcaggcggagcgggcggagctcgacgcggcgtgggcgcgcgtcgaggaggggcggcgctcggtggaggccatggtggaggcgggccgcaaggcacaccgccggcacgcctcacagctcgaggcccgtcgtagggacctggcggagatcgccagggaggtggaggaggagcgggagactgccctcatcgccaccgccgtgctcgacgaggcgcgggacgacctccgcctccaatacgggagccgggcggcggagctagaggagaagctcgacgccgcccggggagtccttgacgccgccgctgcccgagaacggcgggcggcggagaacgaggcggcgtcccggcagcgcgaagaggcccttgaggctcgcgccacggcgctggaggagcgcgcccgcgccctggacgcgaaggagagagacctggcggaccgcgaggccgccgtcgccacccgggaggcaacactggcggcgcacgaggccgcctgcgccgaagaggagtccgcactccgcctccgcgaggacgcgctcaccgagcgggggcgagctctcgaggaggccgaggccacggcgcagcggctggcggacagcctgttcctccgcgaggcagcgcgggaggagcaggcgcgccgcaatctggaaggcgcccgcgccgagagggccgcactggatcagcgggccgctgagctcgaggcgcgggcgaaggagctggacgcgagagcgcacagcggcggggcggccgcgggccacggcgacctagccgcccgcctcgcagccgccgaacacaccatcgccgagctgcagggcgcgctggactcgtccgccggggaggtcgaggccctccgcttggcgagcgaggtagggcccggcatgcttcgggacgccgtgtcccgtctagaccgcgccgggcggcaggcgggcctctggggcgggcggtacgcgaagtacgccgccaaccaggggggcctcgcccagcgcctctcagagatggccggggccctcgagcggctccccgaggagctcgaggagacgatcaagtcatcctcgagggacctcacccggggggcggtggagctcgtactggcaagctaccaggccagggaccctgacttctccccgtgggcagcgctggaagagttccctcccggaaccgaggacggcgcgcgcgcagggctcgtgcccaggtcccagcctcaaacggcgcgggtcggggctagtgcctggggagatcctcgtgtcgagactggccaggccgggagcacggtgaccgagggttatggatga

SEQ ID NO: 80342 - DNA, 1065 bp, Oryza sativa
  Clone ID: PAT_MRT4530_79976C.1
atgcggttccgaagccggttcataccctatttctgttatcgatttcctcccaaatccgcttcggccttaacactaaatccgataaatgatttaccgaatttcgtcgttaacaacggcgcagaagttgagaagataacccgacaagccaagatttattgtatgattggcaacgatctgtacaaaaaggcgccaaacggagtacttctcaaatgcatctcgttcgacgacggcaaacatctcctcttggacatacatgaagggatctgtgggtcacacaccagcggtcggacgttggtaggaaaagctttccgacaagggtttttctggccgaccgcgctcaaagacgcctgtgacatggtgcagcggtgtgaagcctgtcaatttcacagcaaacacacaaaactgccagtgcaagcgctccagactattcctcttacttggccgttctcgtgctgggggctcgacatactcagaccattcccacgaggacagggtggctacaaattcctattcatggcgatcgacaagttcaccaagtggattgaagtgacgcccacaggggaaatcaaggccgataatgccatcaagtttatcaaagggatattctgcagatatggattgactcaccacatcataacagacgacgactcccagttcaccagtgccaacttccaggattactgcattggattgggagtcaagatttactttgcctcggtttctcaccctcaaagcaatggacaggtcgaaagggcaaacggcatagtactacaagggatcaagacccgcgtctacgatagactcatgtcacacgacaagaagtgggtcgaagaactcccttctgttctatgggccgtgcgtaccacaccgacatcatccaataaggagacacccttcttcctcgtgtatggctcagaggctatgctccctacggagttacaacatcagagcacacgagtacagaagtactccgacgaggaacagaaggagcagcgaagcgacgatgtgaatctactcgaggaacatcgagaaagagttgccatcagagcagccagctaccagtag

SEQ ID NO: 80343 - DNA, 2970 bp, Oryza sativa
  Clone ID: PAT_MRT4530_79977C.1
atggcacggggctccgcaccgctcgagggtagcgtgctgccgccttcccgcatcgtgagcgagaggcaggccgggctgccgcgccgattcatgccggaatctgccaccggccgggaggtggtcgcgctgggcgagggacgcccggcccgcattacccggggcgatgttctggagctttatgatctccagatggcgcacctcacccccaacgcggtaatgacgttggccatcttcgcgcacctatgcgagatgttcatcggggtgcgcccatctctccggttgttccggtggttcttcaccgtacaaccggtgtcgccaccgtcggtagtcggtggctgctacttccagccgcgggggccggtgctgaaccgctacattccctgcgtccttcgcaagaagtgggacgactggaagagcgactggttctacacccctctcgccgacgaagcacgcctccgacttccgagccagcccccggcgcaagcctccagctggcgggcgccggtagatctgggagacggctacaacgccgttcttgaccgcctggcaggtctgcgatcccaggggctcacgggggccatggtgttcggcgactaccttcgtcgccggatcgcgccgctccagcggtgcgcccggggcgcctgggagtacaccgggcccgaggacatcatgaggacccaccaggggcgtaaatgggactgggaccctgaggatttcaggatggtggtccaacgggtgctgaatctcagctccatggaggcatccctcatcccccaaggggtcctccccctctgctgcgatccagagcgcgccaacatcctgaccatcatgcaggaggtcggggcgtcgggggagcgggccccccgaggccacgatggcgcgggcgggagccgcaggggggaacaacctaccccaggagggggtcgtgcttctgggccccgtgataggggcccggggggcagccgccctgccgacgcccgggggaagaggaaacaggaggataccccctccccatctcctccccgagggggcggggcggtgcgtgccaacagcaggcgcccggagggtgctgtgccgacgtcgcagcccgagggggagcgaaaaaagaagcggctccgcaagatggggggggaccgaaccatgccgaggaaacctcatctccccccaaggtggtcgtttagccgacctcctcgcagcgagatcccgtcgcgcccttcccgccattccaagtccggccggtctgaggccgaggagacggcgaccgcggaggcccggaggcggggagttgaccggcgagaagccgcagactgcctccgggaagccgaagaagctgcccaggaggcggtccgggctcgccaggctgaggaagccgcttgggaggaggccagactccgccgggccgaggagtccgtccgggagacggaggcggcgcgcgaacgccgggcggcctgccaagcccccgactcgactccgcccgaggcgacgacgacttccgaggccgcccacgacaaggccgcgggcgcgccgctcgggcccgacccttcgggcgatgcttggggcgagccagcttcggggaacgcccccgagtccggcacgtccatcggcgggccgagccgcgcggcgcccacaccgaggcggctctcccctctgccttccgctgccccactgagcgctgaacccctcctgcaggccttggccgctgcgaacaccacggtgttggacgggttaagcgcccagatggaggtcctgcaggcagagcgggcggaggtcgatgcggcgtgggcgcgcgtcgaagaggggcggcgctcggtggaagccatggtggaggcgggccgcaaggcacaccgccggcacgcctcagagctcgaggcccgtcgtagggacctggcagagatcgccagggaggtgaaggaggagcgggagactgccctcatcgccaccgccgtgttcaacgcggcgcgagacgacctctgcctccaatacgggagccgggcggcggagctagagaagaagctcgacgcgtcccggcagcgcgaagaggcccttgaggctcgcgccacggtgctggaggagcgcgcccgcgccctggacacgaaggaaagggaactggcgggtcgcgaggccgccgtcgccatccgggaggcaacgctggcggcgcacgaggccgcctgcgccgaagaggagtccgcactccgcctccgcgaggacgagctcactgggcgggagcgagctctcgaggaggccgaggccgcgacgcagcggcgggaggagcaggcgcgcctcaatctggaaggcgcccgcgccgagagggccgcactggatcagcgggccgctgaattcgaggcgcgggcgaaggagctggacgcgagagcgcgcagcggcggggcggccgcgggcgatggcgacctagccgcccgcctcgcagccaccgaacacactatcaccgagctgcagggcgcgctggactcgtccgccggggaggtcgaagccctccgcttggcgggcgaggtagggcccggcatgcttcgggacgccgtctcccgtctagaccgtgccgggcggcaggcgggcctctggggcgggcggaccgcgaaatacgccgccaaccaggggggcctcgcccagcgcctctcagagatggccgggaccctccagcggctccccgaggagctcgaggagacgatcaagtcatcctcgagggacctcgcccggggggcggtggagctcgtactggcaagctaccaggccagggaccctgacttctccccgtgggcagcgctggaagagttccctcccggaaccgaggatggcgcacgcgcgagggtccgggacgccgccgaccacatcgtccacagcttcgagggtacggcccctcggctcgcgttcgcgctcgactccgacgaggagggcggtgacgacggtgcggacgacagcgacgacgaggccgacggcccgggggcgtcggagtga

SEQ ID NO: 80344 - DNA, 581 bp, Oryza sativa
  Clone ID: PAT_MRT4530_79978C.1
ctaaactttggtttcatccaattgtcctgcattcttcaagcttgcagcaacttgtgcattcacatgtgcagcctcttctccagcaattaacccattcttcttcaaatatttcatgtatctttcctcccaaaaccaaaagttacacccagatccatctttctcgtggtcagggcaagtgtagaaaatgcgatctggattactagctgtcttcgatgtgcgcttcacgacggttttattctcgcacgatgggcacaggatcaatggtaccttcttccggcgagtacaagcggaggccgggcttgaagaagccatgggggccgcgaccagtccttggctaccacccgtcatggcctccccgccgcacttggttgcctcctgccgtcgcctcgccaccgcagttgcttgcctcccgccgtcgcctcgccgccgcggagctcaccgctgccgagcgtccaaaccctagacgaattggggattttgggggattcggcgatgtacatcgggacgacacgttggcgtcagacgcggtcaatccccgattggacccgccctggtacattaaaccaagattacggacctaa

SEQ ID NO: 80345 - DNA, 1847 bp, Oryza sativa
  Clone ID: PAT_MRT4530_79979C.1
gcagcagctagtaatccaagctgcgtgcacgggcccgctagtagtagcaacgctaaacaagtcgatgatggtagttgggagaacgagattgaatatgatccaggcttgagaaaagagattgatgattaccatcctagtaagagggatatagtcagaaggaaatacttgcagaaagggccttgccaaccatgtctattcacttttccggttacaaagatctcaggtaaagacagaaagtttattgaggaatggtttgatgaatttggaagttggcttgaatataacaaggcaaaagacagagaatgttgttttagagatcgcaataagaaagaggatgggtataaagcctttgtggttgatggttggaatggttggcatagaaaaagtaggctaaaagagcatgttagtggtgttggtagcttacataatcaagccatgaaaaattgtgatgctttgttgcaaagagcccaacacatcgatatacatatgcaagtgcaaagcgaagctactaaaaatgcatattttgttcgattaaatggatcaattaatgttgctaggaggttgttaagctaggtttgccttttcggggccatgatgaatcaagtgattcatacaacaaaggcaatttcttagagtttcgtgatttcttagcagagcatgatgttgctttaggcaaggtagtggagaaaaaaatgcatcgaagaattgtcttatgatagctcctgagattcaaaaggatattgttgactgctttgccaaagaaatattacattccattttggaagaacttggccatgatgtgttttgcttgctaattgatgagtcaatagatagttcttgtaaagagcaaatggccgtggtgttgaggtacgttgataaatgtggaattgtgaaagaaaggtttgttgctgttgttcatgtgagggaaacaacggcctcatacctcaaggcttctattgatgctctaatggcagattttaatctaagcttgagtcaagtaagaggccaaggatatgatggggctagtaatatgcgaggtgaatataatgggctacaatcactagtcatgagagagtacttcagcttattatgtccattgcttcgcccaccaacttcagttagtagttgtggctattgtgagtatgatttctaccttgttaaatgtggttggtggttcagctaagagacaggacatggttagagacatcaatgatgagcatgtgagcaaagcattaggttgtgggctacttcaaagtggaaaagggttgaaccaagagcaatgtcttcaaaggccatgagatactcgttggagttctccttacaaaactctcaaaattttggtagatatgttcccaacaattgttgaagtgttagaatttgtagaagaggatgatagggatagagcaaacagagatcaagcggcgggtcttttagtatatttctagtcttttgactttgtcttttatttgcatctcatgttgactgtcctaataatcacaaacaccttgtcattagcactacaatggaaggatcaagatattgtgaatgcggttaaatgtgtgagatctacaagaggtcatttggatgaccttagaagacatggatgggaaaaattagagagtgatgtgtataacttctgtgacaaatatgatcttaccaaactggagatgggagaagtatacattaatccaaagaagccaaggcaaaaaacaggaattacaaacaagcatcattatgaagtggattgttttaataatgttattgattggttacttcaagagctagacaatcgctttaatgagacaacatctgaattgcttgtttgcattgctaagctttccaagttc

SEQ ID NO: 80346 - DNA, 270 bp, Oryza sativa
  Clone ID: PAT_MRT4530_7997C.1
atgcggaggaggaagagagggggggggggggggcgtggcttacttaccagcttgcttgcggcggacgccgacgccgactccggcggagggagagttgcggcggcgaaggcgaaggcgaaggcgaaggcggcggcggtggagagagtgagagctgcgcgaggggatcgcctgattgcggctttcggcggcgtgcgagatacttggggttggggacgaggcgaagtcggaggtagcgaggcaggtgggacccaacgcctctcgccgggataa

SEQ ID NO: 80347 - DNA, 289 bp, Oryza sativa
  Clone ID: PAT_MRT4530_79980C.1
tcgttgaggcatcagtgcaggggccggaatgggggttgatctcatgttttgtggactagttgagggatcgtgttaccgcgcgcggtgtgtactcgtcttgggcgatgctggcctaccttctattatggctggcctataagtaggacgacgattacttatcccgatgcgctgtgcttgggatggtgggcgtagcgacggatttgggaggggtgaactgtggaacctgccaacggggcctacatgcaggtggagaacgagtctgggaagtccaagacgaacattgagcttt

SEQ ID NO: 80348 - DNA, 1269 bp, Oryza sativa
  Clone ID: PAT_MRT4530_79981C.1
atggcccagacccgcgggatcacgctcgcccgagaagaaatccgactggctacgtccacggcaagcgaaaaagaagtgcctgcaaccaagatatcaaagagcggagaaagtgacgccaagaccaagaaaatccctctagatccctctgatcctactaagactgctgaagacgctaaaccaatcaagcaacgactccgccgcttcgcgcaggataggaaggatgtgatcaaggaggaactgaccaagctgttagcagcaggctttatcaaggaagtccttcatcccgactggctggctaacccagtcctggttcggaaaaagacgggacaatggcgtatgtgtgttgactacaccgacttcaacaagtcctgtcccaaagatccttttgggtttcctcgcattgaccaggtagttgactcaaccgccggctgcgagctactcagctttttggattgctattcagggtatcatcagatccgactaaaggaatccgactgcttaaagacttcatttatcacgcccttcggagcatactgctacatcacgatgccctttggattaaagaacgcaggagcaacttatcaacgcatgatccagagatgtttttcaactcagatcggccgcaatgttgaagcttatgtcgatgatgtagtcgttaagaccaagcagaaggatgatctgattacggatctagaagagacctttgcaagcatccgcgctttcaggatgaaactaaaccctgaaaaatgcatcttcggagtaccgtcagggaagctgcttggattcatggtgtcccatagaggcatacaagccaacccggagaaactcaatgccatcctcaacatgaaaccgccgagctcccagaaagatgttcaaaagctgactggttgcatggcggcgcttagccggaaactatcacactacttccaaggtcactcggtcacggtggtcacatcattcccactcggggatatacttcataatcgcgaagaaaatgggcggatcgcaaagtgggccctagaattgatgtccttggacatatctttcaagccgcagacttcgatcaagtcccaagctttacctgacttcgtcgccgagtggactgagtgccaagaagacatgcccgaggagaagatagagtattggaccatgcattttgacgagtcgaagaggctttcaggcactggagccgggctgtggccgacgccgacaaaattgtgcgaacatgtgagggttgtcaatttttcgcccaacaaactcatctactag

SEQ ID NO: 80349 - DNA, 915 bp, Oryza sativa
  Clone ID: PAT_MRT4530_79982C.1
tcacttgagccattcactctccctagccccagccttgtcggagaatcgttctcggaggataaggctcctagacccttgacgtaattgatccatgttccaggaatttgctaactcgtgaccatcgctgtctgcaatcttgaatgcgcccggccgcaagacttgcgtgatcgtgtatggtccttcccacttgggtgagagcttgttgcaccctgcttggctttgaacccgttggaggacgtaatcgccgatcgaaagtgtgtgtgctctgatgcgcttctcatggtatcggcgaagggcctgctggtagctggctgatctgatggcaactctttctcgatgttcctcaagtagattcacatcgtcgcttcgctgctcctcctgctcctcgttggaatacttctgaactcgtgtgctctgatgtcgtagctccgtggggagcatagcctctgagccatacacgaggaagaagggtttctccttattggatgttgtcggtgtggtacgcatggcccatagaacagaggggagttcttcgacccacttcttgtcatgtgacatgagtctgtcgtggacgcgggtcttgatcccttgtagtactatgttgtctgccctttcgacttgtccattgctccgagggtgagaaaccgtggcgaagcaaatcttcctgacgcacaacgactcaagctcaacaatgaagacgccatcttcttccgtgccaaccaagatggcgctgggaccttcggcaactgctggaccaagcatggagagcaagaggcgcctgatgtcgcagctgaagaagtgttggatcaggatgtagagaacaccgccgcagctcgagaaggcatgttcgtaccttctccaggaattctcaaatgacccaagaaacatgcgtttcgcaatgtgtacggacggcat

SEQ ID NO: 80350 - DNA, 3090 bp, Oryza sativa
  Clone ID: PAT_MRT4530_79983C.1
atggggaagccggaggcgaggagtgggtggaggaacgcggcggcggcggcgtgggtgctggtggccgtggcgtgcgcggcgtacatgcactggcacctgcggcgggagaccatggaccgcgccgaggagcggctcgtcagcatgtgcgaggagcgggcgaggatgctgcaggagcagttcggcgtcaccgtcaaccacgtccacgccctcgccatcctcatctccaccttccatttcgagaagttcccgtccgccatcgaccaggatacatttgcaaagtacacggcaaggacatcgtttgagcgcccactgctgaatggagtggcatatgcgcagcgtatcttccatcacgagagggaaatgtttgagaaccagcagggatggattatgaagacgatgaagcgacaggctgcgcctccacaggatgagtatgccccagtgattttttcacaggatacggtttcctaccttgcacgtatcgacatgatgtctggggaggaggaccgggaaaacatcttacgtgcaagggctaccggcaaagctgtgttgacaaacccattcaggttgcttgggtcaaaccacttgggggtagttctcacttttgctgtgtatcgccctggtctagctgctgatgcatcagttgaggagcgtgtggaagcaactgctggttgtttggttgttgtggtctcatcaaatcaaatccctactaacagatatcttggtggagcttttgatgtggagtcactcgtggaaaatttgctgagtaaacttgctggcaatcaggatattgtagtgaatgtgtatgatgtcacaaatgcttctgaacctatggccatgtatggtcctcaaagtccagatggtaaagtgtccctcttccatgtgagcacgcttgactttggtgatcctttcagggcgcatgaaatgaggtgcaggttggtagcttctttctcatggcataaatttgttggttgcttcttacttggctcttgcactaattctggcaacctgagcaggtataggcaaaagcctcctctgccatggtctgctatcactaatcctttgggaacttttgttatatggatgcttgtggggtatataatttgtgccgcatggtctcgctatgataaagtttcagaggattgtagaaagatggaagagctcaaaactcaagcggaagctgctgatgttgctaagtcccagtttctggcaactgtatcccatgagatcagaacacctatgaatggcgtccttgtcgtccagcgatctaaaattctaccttttgatgtaggaatgctcgacatgctcttggggacagatctgagtatgactcagaaggattatgctcagacagcccagatgtgtggcagagcattgataacactgataaatgatgtacttgatcgggctaagattgaagcagggaaattggagcttgaggcagtgccatttgacctgcggtctctcatggatgatgtgatctccttattttcttcaaaatcaagagagaagtgcattgagcttgcagtgtttgtatgtgatgatgttccaaaagttgttattggagatccatggagatatcgacaaatactgacaaatttggtgggaaatgcagtcaaattcacagaacggggccatgtatttgtgcgagtctgcctggctgagaactcaaaagtggaagctaatcaagtccttaatggaaccatgaatgggaaagacggcaaagttgagactacagctaatggcgccttcaatactttgagtggttttcaagccgcagatgagcgcaataactgggattattttaagctgctgctatctgataaagagccccatatggatgagcttgagtgcgacagatcttatcaaaatgattgtgactgtgtgaccttgatgataagtattgaggatacaggtgttgggatcccattacatgcacaagatcgtgtttttacgcctttcatgcaggctgatagttcaacttcaaggaactatggtggaactggcattggtttaagcatcagcaaatgtttagctgaacttatgggcggtcaaataagtttcactagccgtccatttgttgggagtacatttacattctcagctgtcctcaagcgctcatgcaaagatacttcaagtgattcaaagaggagcttatctgaggcactaccaactgcctttaagggaatgaaggctattttagtagatgggagacctgtacgtggagctgtcacacgatatcaccttaacaggttgggaatagttgttaaagttgtgaataatttgagtatggggcttcagactttagctggacaaaatggtgtgaaagagtccagggagaaactgtctatgctttttatagagagtgacatctggaggcctgagacagatatcctattattgaatcgtctgcatgagctaaagaataatggtcaggtgcatgagttgccgaagctagttcttttggtaacatcagaagctgacaaggacagatatggatccgcatttgatattgtgatgtataaacctataagggcaagcacaattgcttcttgccttcaacagttgctaaaagtagtgatgcctgaaaggaaagacaatcaaaataggccctcatttctccgcagcttgctgattgggaagaatatattgattgtagatgataataaagtcaatctcagggttgctgcagctgcgctcaagaaatatggtgccaaagttcattgtgttgaaagcggcaaagatgcagtctccttacttcaacaaccacactgctttgatgcatgctttatggatgttcagatgccagagatggatgggtttgaggcaactagacaaataaggcaaatggaggtaaaagcaaacgaggaaaggaaggcgttggatttaatggagggttcaacattcgtcgagtcccatttgcctgttctggcaatgaccgcggatgtcattcaggcgacatatgaagaatgtataaaatcgggaatggatggttatgtgtccaaacctttcgacgaggagcagttataccaagctgtctccagattagtggtgggaacgaaggaatcagcggtatgatgatgggctggctag

SEQ ID NO: 80351 - DNA, 1689 bp, Oryza sativa
  Clone ID: PAT_MRT4530_79984C.1
atgggtttcgtttctggcatcgacgacttcgcctttcctcccgggcaggcgttccggttcggcagcctcaacttcatcaccaacgacttcggcaagatctctctccttgactcggactcaaaccagtcggggagaaaccaggtcctcgtgccattcggtattccgaactcggccgaggcctactccaagatcatctctcccgagtcggctctaaaccactcggacgagatccaatctactcttccgcgaccggatcaagacgacgggtcctatccctcaatcctgatgaaacttcctgatgatttggccgttgtcttcactgccaagacatctcccactcgaagatctaggcgagctccggcttcggccccgatccaatctagatccagagaggttgacattatactccaacctcttgggacagtctcgacgaaagatttggatggctacctcagctcccccggcgtcagttctcgaccaaccgagatcctcgactacgacgatttcggctaccactatgaccacggcgacctcgacaacttcgacgacagttatgaggataactacacgcccctcttcttcggcgtattcatggctgacaacgaaacggaggaacatcgccaagcccgagaagcggaccaagatcgcgcacggcaagaagctgaaccggtctttcgcaccccccagcagaacgcggttacagcaatcactctcctcgacaccctcctcaaggaagacgcactcaaccaagccgatcatgttgtcaacatcttgaaccagacgaagaccatgatcgctgcctcggttccagccaactccgcaagcacccgcaccccgactggtagccgagtccctcacttccgatctcatgattatcatcagccaaccctcagtatcatcggcacaggatctagtcacaggagcaggggtcacgacgaacgatttgttcactcgcctcccgaacgtcacagggagcgccgggtcgaacggcctcgctctccacctcaccagcgtcccgtcgacctttgcaacacgatcaaccagcgccgtgcagcacgagccggctttaagccaactggaatcaagaagtatgacggcaccaccaaccctgagtcttggctcaccgtctatggtctcgcaatccgcgcagcaggaggagacagcaaagccatggtaaactatctacctgtggccctagcggactccgcccgatcctggctccacggactatcccgtggcacgatcggatcatgggcggaacttcgtgatcacttcatcgccaacttccagggcacctttgaacgccccggcacacagttcgatctctacaacgtcgttcagaagtctggagaatcccttcgagattacatccgacgcttttccgaacaacgcaacaagatctccgacatcactgacgacgtcatcattgcccatttaaaagggcagtcggtggttacacgcatctctttgtggctatcaacaaattctccaagtggattgaggctaaaccggtcatcacgatcacagcagataaagctagagattttttcatcaatattgtgcatcggtttggggtacctaatcggatcattactgataatggcactcaattcactagcggagcatttaaagacttttgtgaagacttcggcattaaaatttgttatgcctccatggcacaccctatga

SEQ ID NO: 80352 - DNA, 2103 bp, Oryza sativa
  Clone ID: PAT_MRT4530_79985C.1
atgggttttgtctccggcatcgacgacttcgtcttccctcccgggcaggcgttctggttcggcagcctcgacttcattaccaacgacttcggcaaaattgtcgcgaccgggaaaattgccttttcccgaacgctagtgcggcacccgcgggggcgggcggctgacggccgggcccacttggcagccgcgagggcgcgcccgaaggcggccatcgcgggcacggccgacgggaggcggcacgaccgcgccccgatggtcaccgccggcgaccaccggcgcggcggagcggcgcccgagagagcggagaggagagggaagcgaaagggacggtccacggctcaccccgagacacgaggacggcggagacgacgaacggagcggaggaacgcggcggcgcggttcgggatgacgagggcgacggtgctccggcggtcggcgggcgaagcggagcggcggacggggcgggatgcggcggaatccgcggcggcggcggcgctagggcacgggcgcggcggcgggcgcggcgggaggaaggcgatgacagttatactccaacctctcgggacggtctcgacggaagaattggatggctacctcagctcccccggcgtcagttctcgaccaacggagatcctcgaatacgatgacttcggctatcgttacgactacgctaacttcgatgacagctacaagaacgactacagcgtgaacaacaagatcgcgaacgggctgcaaatgaggctgaggatcgacgacagcgcgccttggaatccgggcaacgagcacgagacctcattgggcaacaagaagtcgacgggacaacgcgtcatcggcgcgggatccactcgcaggagcaggggtcacgacgagcgatctatccattcgcctctcgaacgacacagggagcgtcgagttgaacgaccacgctccccacatcccggcttcaagccgactggaatcgagaagtatggcggcaccactaacccggagtcctggctcaccatctacgttctcgcaattcgcgcagcgggaggagacaacaaagccatggcgaattatttgcctgtggccctagcggattctgcccggtcctggctccacaagctaccctgtggcacaatcggatcatgggcagaactacgcgaccacttcatcaccaacttccagtgtacctttgaatgccctggtacacagtttgatctctacaactcgggcaccacttggaagccaaagaaagacacgccgactacaggggggagtggaagtaccaatcacaaggatcgcaagcgtaagcccgagaaacttgtggcaactactacaccatcctcccgacaacgttcccgcgtcaacacttttgacaagatcatgaactcccaatgtccgcatcatccaaattccaatcacgcggctaaagattgcttcgtctacaaacagtttgcagaacaatacaccaagaacgcacgcaagaccattgacggagatcaaagcacgtcaaagaagaaggatgatgaagatgatgccccgactggttttcaggaccatcgcaaggaactcaaccacatctttggcggacccctggcttatgaatccaagagagagcaaaagctgactaaacgggagatcaatgctgtccagcccgacacgccccaatatcttcggtggtcagatacaacaatcaagtttgaccactcggatcatcctgaccgacaggtccacccaaggcggtaccccctggtactagacccagtggttcgcaacgtcaagcttcgcagatccctcatcgatggtggcaggctatctgctacaccactcggccagatcactcttccggttactttcggctctcaggagaacttccgaacagaaaacgtttgtttcgaagttgctgattttgtgacagcatatcatgccatactcggacgcccggcgttagccaagttcatggccatcccgcactatacctacatgatgatgaagatgctgggtcctcgaggagtcatatccctgcggagcgacatcaagcaagccgtcacgtgtgacaaggaaagctgcgagatggcccagacccgtgaaatcacgctctccaagaagaaatccgactag

SEQ ID NO: 80353 - DNA, 1005 bp, Oryza sativa
  Clone ID: PAT_MRT4530_79986C.1
atggagcacgagcagctagtgcaagccagcacggagctgatgcaccacagcctgggctacgtcaggtccatggccctcgggtgcgccgccaagctcggcgtcgccgacgccatccaccgcgccggcggccgcgccaccctccacgacctgcacgccgcgctgtccctccacccgaccaagctccccttcctgcgccgcgtcatgcgcgtgctggtcgcctcgggcgtcttcgcgcaggtcaaggaggaggaggaccactaccgcctcacgcccgtgtcgtccctgctcgtcaccgccggcaggacgcttctgccgttcgtgctcctccagcactcgccgctctgcgtgacgcccgccacgagcatggccgagtggctcaagaccggcgaggaggagacggcgttcgagatggcgcacggcgctggattgtggggcgcctgcaggcgcgccccggagctcggcgatttcttcaacgatgccatggcggccgactcggcgttcatcatggacgcggccatccgtggcgcacgccaggtgttcgacaagatcacctcccttgtggatgtcgcaggcggcactggcgcggcggcgagggcggtggctgctgcgttcccgcatatcaagtgcacggtgctggaccttcctcactttgtcgcaggcgatatgatggattttatcccccaagcagatgccctcctgcttaagtttgtcctacacgactggagtgatgaggactgcgtaaagatattaaaacgatgcaaggaggcaattccttctaaagataaaggagggaaagtcattatcattgatgttgtggttggatcctcctcccaagcaatgtgctatggaacccaactgctgtttgatctaaccatttctatgctaacaccaggcatggagagggatgagaaagagtggttcaagatattcaacgaggccgggttcactgagtacaagattagtcctgtgttaggcattcgatccattatcgaggtctttccataa

SEQ ID NO: 80354 - DNA, 390 bp, Oryza sativa
  Clone ID: PAT_MRT4530_79987C.1
atgattcccccagcggaacagcatgaagcaaaacggctcaaaacctgccgactcaaaattcacggcgctcacgtcacgagttccgacggtcgacggatagcacagtcatcacagagttcgtcaacagtctcaaacaaaatgctcgttaacaacagcggattgggccaaaatcgccggtcaccaaccgagccaaccaagcacatgcaacgctgtatccccagcactccagcagcgtttctcatcgatcggttagcgcgctacactaaattaaaccttccacgcgtgcagcatcgcgctcgttttaccctaagcgtgaacgcctcaagggaagggataatcgagcccctggctgcggttggacacgccgaattcaatggacttaaaccgagg

SEQ ID NO: 80355 - DNA, 4837 bp, Oryza sativa
  unsure (1)..(4837): unsure at all n locations
  Clone ID: PAT_MRT4530_79988C.1
atggcacggggctccgctctgctcgacggtagcgtactaccgccttctcgcatcgtgagcgagaggcatgccgggctgccgcgccgcttcatgccggaatctgccaccggccgggagatagtgatgctgggcgagggacgcccggcaccagactacccggggcggtccgtcttcttcctccccttcgcaatggcagggctggttccgccattttcttctttctttatggacgttctggagttctacgatctccagatggcgcacctcacccccaacgcggtgatgacattggccatcttcgcgcacctgtgcgagatgttcattggggtgcgcccaactcttcggttgttccggtggttcttcaccgtgcagtcggtgtcgccgccgtcggtggttggtggctgctatttccagccgcgggggccggtgttgaaccgctacatcccctgcgccctccgcaagaagtgggacgactggaaaagcgactggtgctacacccccctcgccaacgaagcgcgcctccgacttccaagccagcccccggcgcaagtctccagctggcgggcgccggtagatctgggggatggctatgacgccgtccttgatcgcctggcgggcctgcgatcccaggggctcactggggccatggtgtacggcgactacctccgtcgccggattgcgccgctccagcgacgagcccggggcgcctgggagtacttcgggtccgaagactacatgcggacccatcagggagccagatgggattgggctcctgaggacttcaagattgtagtccaacgggtgctgaatctcagctccgtggaggcgtctctcattcctcaaggaatcctccccctctgcagcgatcccgaccgcgcctccattctgaccattatgatgggggtcggggcctcagaggaggaaactcctaagggccacgacggcgcgggcgagagccgccggggggatcaatctaccccaggagggggtcgtgcttctgggccccgcgtcgggggctcggggagcagccgccctgccgacgcccaggggaagaggaagctgggaggaacacctcccccatctcctccccgagggggcggggcggtgcgtgccagcagtcggcgcccggagggggccgcgccgacatcgcagcccgagggggagcgcaagaagaagcggctccgcaagatgggggagacggaaccatcccggggaaacctgatttcccctcccaagtggtcatttaaccgaccccctcgcagcgatgtcccgtcgcgttcctcccgccatcccaagtccggccagtccgaggccgaagatccagcggccgcagaggcgcggaggcgagaatctgaccggcgagaagccgcagatcgccttcgggaagctgaagaggccgcccgggaggccgcccgggctcgtcaagcggaggataccgctcgggaggaggccgcccgggctcgccaagccgaagaagctgctaaggaggaggccgcccgggttcgccaggctgaggcgatggcgtcttccgaggcagctcacgacaaagctgctggcgcgtcgcttgggcccactccctcgggcgacgctcaggcgacagcctccggggcggctcgcgacgaggccgcgggcgcatcgcctgggcccacttccccgggcgatgcccaggaccaaacgggtccgggggacatccccgagcccagcgcgtcctccggcgggccgagccgcgtcgcattctctccaaggcggctcttctcctcgtcttctgtcgccccgctgagcgccgagccccttctgcaggccttggccgccgcaaatactgcggtgctagatgggttcaacgcccaagtggaggccctgcgagcggagcgagcggagctcgaggccgcatgggcgcgtgtcgaggaggggcggcgctcggtggacgtcatggtggaggtgggccgtaaggctcatcgccgtcacgtctcggagcttgaagcccgcaaagcggcgctggcggagatcgcccgagaggtggaggaggagcggggggccgccctcatcgccaccaccgtgatgatcgaggcgcaggacaccctccgtcttcaacacgggagctgggaggcggagctgaagaaaaagctcgacgccgcccagggggtccttgacgccgccgccgcccgagagcggttggcaacggagatcgaagcggcgtcacggcggcgcgaggaggcccttgaggcccgagccatggcgctgaaagaacacgccggcgccgtggagaagggcttgacggtccgcgaggccgccgctgctatccgggaggcaacgctggcggtgcacgaggccgcctgcgccgaagaggagtccgcactccgcctccacgaggacgcactcgctgagcgggagcgagctctcgaggaggccgaggccgcggcgcaacggctggcggacagcctgtccctccgcgaggcggcgcaggaggagcaggcgcgccgcaatctggaatgcgtccgcgccgagagagccgcactggagcagcgggctgctgacctcgaggcgcgggaaaaagagttggacgcgagggcgcgcatcggtggggcggctgcgggcgaaagcgacttagccgcccgcctcgcagctgccgaacacaccgtcgccgacatgcagcgcgccctagactcatccgccggggaggccgaggccctccgtttggcgggcgagatagggcccggcatgctttgggatgcggtctcccgcctggatcgcgccggtcggcaagcgggcctctggaaaggccagacaatgacgcatcccaccaacctggaaggcctcgctccgcacctcacgaagatggcctgggctctccaacaactccccgaggagctcgagaagaccatcaagtcatcctcgagggacctcgcccaagaagcggtcgaactcgtactagcgagttaccaggccagggaccccaacttctctccatggatggcgctggatgagttccttcccgggaccgaggacgacgcgcgcgcgcgggtccgggatgccgccgaccacatcgtccacagcttcgagggctcggcccctcggctcgcgttcgcccccaactccgacgaggagggcgacgccagcggtgcagacgacggtgacgacgaggccggcgacccgggcgcatcggaatgagcccccaggcccccgccaatcttcagttttttctttttctttcttctaaaggcctttggncctctttttgtatagatcaacttaatctgtaatcaaaaacgatgaagaaatttttgtgttaatttcatcttgctgtgagtatgagatgaggatgatctgtgccgtggtccttttgtgtcttagcttgaataagggcttgtgcccaggttctggtcctcaaaaggcgcgggtcggggctagttcctggggagatccacatgtcgagactggccaggccgggaacgtggtgaccgagggttatgggtgacccgattgtgggtttttgccgattcccccccggagttcaccacgcctcggggcacggctcggttctgggccccgtttggcgattttagccgacccgagcccccgagggcaggattgagcacgagtgacctatttcaagccaagattcttcaaaaggaaataacagcacagatacagcctttaagaaatcgaaaatgtaggggtagaagcgatgaaggtgttcgatgttccacgggttaggcagctctgtgccgtcgcccgtggccagccgaacggagcccggccgggggacgccgatcactcgatacggaccctcccacattggtgagagcttgctcaatccagcacgcgtttggacgcggcgtaggacgaggtcgtcgacgcagagtgatcgggcccggacgtggcgctgatggtagcgccgcaggctctgctggtagcgcgcggctcggaggccgcgcgccgcatgaccctcgtcgtcggaatgggccaacctcttcttcctcctcctgtcccgccgccctgaccgagcggcggacccgggggcggccgaagctgccataccggaaccgggggggttccaagtccaggcctcctccttgcgagccactcggtccgcgagctgaaaaagctccgcggtagtctggggctctttggaggcgatcttttcgagcatgcggttgtgccgcacacccctcctgaacgcgtagatcaccgcgtgtgcagggatgcatggtatggtgttgcggactgggcgcggatatgtgccctgaaagttcatggtgaactgttggcacaaatcctcccaggagtggactgacgcgggtggcaagttcattagccaaccccgcgcctgccccttcagggccatgggaaagaaattcgccatgaccctgtcgtcacccccggcggcctcaatcccggtcgtgtagacctggagaaactcggcggggttgacgctgccatcatatttttcggcgatggtgggccggaaccttgggggccaacggacattccgaagactcgccacaaaggctctacagccgacaccaccaaccgggggcacggagggctggtccctgcgtccgtgtcgaggtgacactctggacgaggaagcaccctccgttgcgtgggcagcacgtcggtcattacgccggcgctcgatgctggcgcgggcgtccggccccctacgcagatcttcccgggtcgaaggagtcgacgaaggagtggcggccgaatggcgaacagcggctgccactcgtcgtgcccttcgtcttgacgacgcggagccggtggtagcagcaccagaggccttggtggcggaagaccgcccaccagcatctaggcgctgccgtgcagtcat

SEQ ID NO: 80356 - DNA, 3491 bp, Oryza sativa
  Clone ID: PAT_MRT4530_79989C.1
gcacgaggccaccactcatcacctcccccctctcatcctctcctcctcctccaatggccttctcctccaccgccgccgccgcctccaccgccttcgtctctgggcaccgccgacgcggcggcgcgtgccacctgctgtcctcctctttcctcatcgcgttcccgcgccccgtcgcggcgcgggggtccgccggggcggccgcggcgccgaggagggtgggcgcggtgaccgtgcgcgcgcaggcggcggcgggggcggggaagaagagcgtgctgatcgtgaacacgaatggcggcgggcacgccgtgatcgggttctacctcgccaaggacctgctcgccgcgggccacgccgtcaccgtgctcaccgtcggcgacgagggctccgacaagatgaagaagccgcccttctcccgcttctcggagctgacgagtgccggggcgacgacggtgtggggcgacccggcggacgtcggcgcggcggtcggcggcggcgcctcgttcgacgtcgtcctcgacaacaacggcaaggacctcgacgccgtcaagccggtggtggactgggcgaaggcggccggcgtggcgcaattcctcttcgtcagcagcgccggcatctacacgcccagcgacgagccgccgcacgtcgagggggacgcggtgaaggagaacgccgggcatgtcagcgtggagaagtacatcgcggagcagttcggcagctgggcgtcgttccggccgcagtacatgatcggctccggcaacaacaaggactgcgaggagtggttcttcgacagttgcgggtgcccgcaacccgccccacctgcacccttacccggtgcaaagcggcgcacggctcggctcggcctgttggcgtggagcaacgcggcgcacagcgcggagcatgggaggaggttggtgtggtgcagcggacgggattggcatggggtgcgacacagctggggcatggggcggctcggtggaggtgggagatccctcaaaaaacccagccgaagatcctccactacgaccccgccaacgtcgtcgtcggactccaagaaggccttccccttccgcaacatgcacttctacgcggagccgagggtcggcgaaggaggtgcttggatggaggagttcgacgaacctgccggaggacctcaaggagaaggttcgcggagtacgccaacaacggcagtgagctggggtggagctggacttggtctcggcagcggatcagcgaagacgctagctgctctatcggcctcctggaccaggtgcacggttagatccgtcctcgctaacccaacgccgacgagaagtttgcagtgctctacattggaggaggtgtgcgcccgcctttcgcttggtctcccagtaactgagatgtggacagcactctccagcgtgttcaacatggccggcctcccaatggacctggccgtcaagcgtgtcctctttgcccgtctcattgcactccctgtcatcagcctcgtggttgagggggtgctcgcccacccgccacggatggacatggaggaggctgagcgatatggcgcacgactgcttgcgagccgtcctctcagggacaacttccttgggatttatgaccacaggtgctctgcttccaagctgagtgacatccagaggaagacgttagaattgatcggggcaagcaggacttctggtctcacacaacgcagtctaagcaaagaggccgagataaaaggaaacaacttccattatgttgtgaagacacttaagtcgcaagggttaattgttggaaaacaagcaattgcaaagattaatacccaagctaaaaggaaagctgtttcacaggataaacatgtcatcagcacaaactcattatatctctcaagatatgcgaaaaacttgaatatgaactcataccaaagaattgagattacaaagcccaaacttgagtgcaatgaagaaactaacatagatgccttacaagaagatgagactcttagtgttgattacaagaacgatgtgtccattcatgattatcttccagcaatgaaagccatatgcgacaaacttgaagaagctagtggaaaggttcttgctgtatcagatataaaaaaggatctcagttacaggatgcaacctgggcacagagcatggagaaatattgttcactgcttacgtcttctgaagagatttaatccagatgagtttaagccaaaaggtacaatctcaaactacaaacttggcaagaaaggcctggaaactgatcaagtcatggagcttccattagacaactgtatatatgatatgatcgatgctcaagggccaaaaggcataacccttattgaggttgtgactgagaggttggacacaattgcaacaacgactgggactgggtgtggcggtaggtcgaggcttggcaaacgtcttgggggaaagtacaacaattcgaaagagctccatgatcgagtatcatctatgcatgatagattcaatctgactgtggaggttgaagtcgttggcaaaagtaaacagggcagagtttggacttcaaaaaatttttcgctgtacaatgctactctgcgaaattgtgatgtgccagatgatcatgactattgttcagtatggcctctcattccttctgaagaaccgacttctgttagcccatatggttttgtggttaataacaaactcttgtttgaagaagattgtcatgatgaaccacccgtacatcgtctcctgaatagccatgaagcttgtgttggagtttctcaaccagttgaacaaggtatgcagatatctgcaagtggtatctgtgcattaaccctccactttataggagcaccttacatacttccaattgcattctctattcatactagtacgaaacatagttttgtactgatggtggagttgcataaatggttagagagagttgaaaaggaaaatcggaaaatatttgacaggaagacattgattcacactttggataagcttcagcaagagggtacttcagctataaagaaaatgcctcttgaactctttctacaagttgtgggatcagcaaaggttcataccttgataaaaaagtgttctcttggaaaaacactttcagagattcctaccgacatatacaatcagctcatggatactcatgccaagggccgactctcgcgcctaataaatattttagataaactcaagttgatcggacttctaaatggatacatagaggattctaatgtgcaaccagatgatttgcctactcattcgctggagctcaggccttacatcgaagaacctactccaaggatcattctgtcatcacacgttaatggaaaccattgtccaaaatttcgacatgattttcagctttcaaagctggaatctgtcgatacttactgggaaacattaaagtacagttatgtaacagcaggcttggctgagacaagtgccttccctggctgctgcatccctgagaaaattgcattctgtaatgagcatatatag

SEQ ID NO: 80357 - DNA, 897 bp, Oryza sativa
  Clone ID: PAT_MRT4530_7998C.1
caaaaacacacagccgcacacgcacgctcgccgcgctccccatctccacatgtcaaacacatatcaagaagcacaagaatcggcgccatggctatgattatgctgcccgcggcctcggccgccgccgctgcctccgttttggcgctcctcgtgctcacctcgctgcagccgcgcgcggcgcgggcgcaggtagcgtcctcgccgtgggcggcgccggcgccctggcccggcgagctcgactgcacgggcgcgctgctgaacctctcctcgtgcctcacctacgtggagtaccggagcacgctgacccggccggacaagggctgctgcggcgcgctcgcgggcgtcgtcgacggcgaggccgcctgcctgtgcggactcgtcggcgggtacggcgcgtacggggtccgcgtcgacgccgtccgcgccctcgcgctgcccaccatctgccgcgtcgacgcgcccccgcccaggctctgcgccgcgctcggtgtgcccgtcgccgagccgccgggcggcgccgtgccggaggagtcagggttgtccggcggcatgccggccaacgcaccgtcaacggcggccaccggcagcagcggcggcggcgaattcttccgtgacattgcccacggcttagatcgcgtcatcgccgcgagcagcgtccgccatgcccgatgccaccctcgtccgcgatcggttgctgcggtgcgcgtgtgccatgccatcggcagccagcgatgcgtgtacaatacacacacggcctcgcggggaacagcgtggtacggtggggctgcgccggcggctggtggaccgtcgttgtcgacgcgaggtggccaacagggcgaccgtttggttggtctctccagttttgtctgcttcttctcctacctgccaggaaactag

SEQ ID NO: 80358 - DNA, 2073 bp, Oryza sativa
  Clone ID: PAT_MRT4530_79990C.1
atgccggcgccgcccccgctccctgcgctcctgaccggcctcgcccgccgcggcgcgacgtccccggcggcggcggcggcgaggcagctgcacgcgcacctcctcatccgcggcctcccgctgcccgcccgcgccgccgtcgcgctcgtcgcgtcgtcgtcctcgccgcgccacgcccgcgccgtcttcgacagcgtacccgccgcctcggccaacgtgtacctatggacggccaccatctccgcctacgcgaggcacgcctcgtcgtcctcctcgcacgccctcgaggtcgcgggagaggcggtcgcgctgttcgcgctcatgctctggtcgggcccgcggccgaacgccttcaccgtgacctccgtgatcaagtgctgctcgaaggtgcgagccgtccatgagggtctccaggtgcacgcgttcttggcgaaggccgggctgggctgctcctccgtgcacgtgggcgctgcgttgctcgatctgtacgggaatattggcctggtgggagatgcaaggagggtgttcgacgaaatgcccgtgaagaacgtggtggtcgggaacactatggtggcgtgcaatgtaagggccggtgatatgggagccgcgcgagaggtgtttgatgggatggcagagagggacccaatctcgtggaatacactcatgtccggttatctgcatttgggggatactgccactgtgagggaattgtttgatgagatgacagtgaggaatgtgaatagctggaacacgatgattgccgcatgttcggaggaaggatcgttggctgatacagtcaaggttttcaataggatgcgtgcgacagggttcgagcctgatgctgcgacgatggctgttttgatgtctgcgtgcgcacagcttggttctttgacaattgcagggcaagtgcatggacttttacagaagagttgtgttgagatgaattgccatgtccagaattcgttgattgacatgtatgccaagtgcggttgcatcagccaagctcaattcttgtttactgagacatatccaaaggatacagtgtcttataatgtgatgatcattgcttttgcgcaacatggacatgcaagagatgcattggatcttttcaatgcgatggttgactctgggttgcaacctgatgccgtcacatttcttggcgtactatcagcttgtgctcatgccgggctagtggaatacggaaagaactactttgaattgatgaaaaccacatatgcagttcagcaatccccagaccactacgcttgtgtggttgatctatatggtcgagctgggctcattgaagaagcgcactgtttcgtgaagacaatgccagtgaaaccacatgcaggtgtgtggggagcattgctcaatgcctgcaggaagcattgccatgttgatgtcggtgagattgcagcgaaggaactcatcaggattgaacccaagaatcctggcaactatgttctcctcagaaacaccctagctcgaggccagcaatgggatgctgttgaggatgtgcagctatcgatgaggagaaaggttattgacaaaacagcagggtgcagctgggttgaagtggatagtgttgttcatgagttcttagcaggagacttctaccatcccaaatttgatgagatttatactatcctggagcacctacttccagtcatttgcatcttaacggattgtgtgctgaggatgttcaggggtgcccggtttcctcattgctacatttggaaggaaaggcattacttgatagttccagaatggtgtgatgatattcttgttactaacagctgttgctgtcagattgtcacattggatgtcaaaagaatatcaaatctgctttcaagcctctgctctgccgctttcctgggtcaccaagccagcctctccaactattctgcttctggactggacgactttggttcctttgacttgttcacacagacatgcgacacgttttggatacccatcttcgatgtaggctcaggcatttcatccgaggcactcctcaatgtagtcgagaacaaggaaaaatatcgaaaatcaagacagaaggagaaagcatga

SEQ ID NO: 80359 - DNA, 2484 bp, Oryza sativa
  Clone ID: PAT_MRT4530_79991C.1
atggcacggggctccgctccgcttgacggtagcgtgctgccgccttcccgcatcgtgagcgagagacaggccggactgccgcgccgcttcatgccggaatctgccaccggccgggagatagtctcgctgggcgagggacgcccggcgccacgctacccggggcggtctgtcttcttcctcccttttgctatggcagggctggttccgccattttcttctttcttcatggatgttctggagttttacgatctccagatggcgcacctcacccccaacgcggtaatgacattggccatcttcgcgcacctgtgcgagatgttcatcggggtgcgcccatcccttcggctgttccggtggttcttcaccgtacagccggtgtcgccgccgtcggtggttggtggttgctacttccagccgcgggggccggtgttgaaccgctacattccctgcgtccttcgcaagaagtgggatgactggaagagcgactggttctacacccccctcgccgacgaagcgcgcctccgacttccgagccagcctccagcgcaggcctccaactggcgggcgccggtagatctgggagatggctacgacgccattctcgaccgcctggcgggcctgcgatcccaggggctcacaggggccatggtgttcggcgactatcttcgtcgccggatcgcgccactccagcggcgcgcccggggcgcctgggagtacaccgggtccgaggactgtatgaggacccaccagggggtcagatgggactgggctcctgaggacttcaagatagtggtccaacgggtgctgaatctcagctccgtggaggcatccctcattcctcaaggagtcctccccctctgctgcgatccagaccgcgcctccatcctgaccatcatgcaggcggtcggggcgtcggaggagcgggctcctcgaggccacgatggcgcgggcgggagccgcaggggggaacaatctaccccgggagggggtcgtgcttctgggccccgcgtcgggggcccggggagcggccgccctgccgacgcccggggaaagaggaagcaggaaggaacccctcccccatctcctccccgagggggcggggcggcgcgtgccagcagcaggcgcccggagggggccacgccgacgtcgcagcccgagggagagcggaagaagaaacggccccgcaagatgggggggacagaaccatcccggggaaaccttatttcccctccaaggtggtcgtttaaccgaccccctcgcagcgagatcccgtcgcgtccctcccgccattccaagtccggccagtctgaggccgaggacccggcgaccacagaggcccggaggcgggaatctgaccggcgagaagccgcggatcgccttcgggaagccgaggaggccgctcgggaggccgcccgggctcgccagaccgaggaagccgttcgggaggaggccggactccgccaggccgaggcgacgacatcctccgaggcgacccgtgaaactgaccggcaagaggccgcggatcgccttcgagaagccgaggaagctgcccaggtggccgtccgagctcgccaagctgaagaagccgctcgggaagaggccagacttcgccaggccgaggcggcgacgacttccgaggcagctcgcgacgaggccgcgggcgcatcgcttgggcccaatccctcgggcgacgctcaggacaagcccggtcggggggacatccctgagtccggcacgtccatcggcgggccgagccgcgcggcatcctcaccgaggcggctcttccccacgccttccgttgctccactgagcgcagaaccccttctgcaggccttggccgtcgcaaacaccacggccaaaaactatttatttgaggacgcgagggcgcgcagcggcggggcggccgcgggcgaaagcgacttaaccgcccgcctcgcagctgccgaacacaccatcgccgatctgcagggcgcgctagactcgtccgccggggaggtcgaggccctccgcttggcaggcgaggtagggcccggcatgcttcgggacgccgtctcccgtctagaccgcgccggccggcaggtgggcctctggggcgggcggactgcgaagtacgccgccaaccaggggggcctcgcccagcgcctctcggagatagccgggactctccaacggctccccgaggagcttgagaggacgattaagtcatcctcgagggacctcgcccgaggagcggtggagctcgtactggcgagttaccaagctagggatcccgacttctccccatggacggcgctggacgagttccctcccgggaccgaggatggcgcgcgcgcgcaggtccgggacgccgccgaccatatcgtccatagcttcgaggatttggcccctcggctcgcgttcgccctcaactccgacgaggaggacgatgacggcggagtgggcgacagtggcgacgaggctggcgacccgggtgcatcggagtga

SEQ ID NO: 80360 - DNA, 567 bp, Oryza sativa
  unsure (1)..(567): unsure at all n locations
  Clone ID: PAT_MRT4530_79992C.1
ggcctctcatttcttctttgaaccgacttctgttagcccatatggttttgtggttaataacaaactcttgtttgaagaagattgtcatgatgaaccacccgtacatcgtctcctgaatagccatgaagcttgtgttggagtttctcaaccagttgaacaagataaagttgcctttcagaggaagaggcattgctggcccacgtcaatttctgatgatcgaagacagaaaaggattattcacatattaaagaaacatagttttgtactgatggtggagttgcataaatggttagagagagttgaaaaggaaaatcggaaaatatttgacaggaagacattgattcacactttggataagcttcagcaagagggtacttgtaagtgtattaaagttaatgtccctgtggttacaaactacgctggcagccgttccatattgatgtaatactgaattcttctgttaaagtcatgtcacccggaactcatggatcaaattaggaacagantaagaaattttgattctaaaagtcgttcaggtgcaacagcttaactgaagcaaaagcaaga

SEQ ID NO: 80361 - DNA, 1470 bp, Oryza sativa
  Clone ID: PAT_MRT4530_79993C.1
atggccttctcctccaccgccgccgccgcctccaccgccttcgtctctgggcaccgccgacgcggcggcgcgtgccacctgctgtcctcctctttcctcatcgcgttcccgcgcgccgtcgcggcgaggaggtgcggcgaggcggccgcggcgccgaggagggtgggcgcggtgaccgtgcgcgcgcaggcggcggcgggggcggggaagaagagcgtgctgatcgtgaacacgaatggcggcgggcacgccgtgatcgggttctacctcgccaaggacctgctcgccgcgggccacgccgtcaccgtgctcaccgtcggcgacgagggctccgacaagatgaagaagccgcccttctcccgcttctcggtaggtaacattatgggggttcgagggctcacggcggcgatggtgaatgaatggatgcaattaataatgcaggagctgacgagtgccggggcgacgacggtgtggggcgacccggcggacgtcggcgcggcggtcggcggcggcgcctcgttcgacgtcgtcctcgacaacaacggcaaggacctcgacgccgtcaagccggtggtggactgggcgaaggcggccggcgtggcgcaattcctcttcgtcagcagcgccggcatctacacgcccagcgacgagccgccgcacgtcgagggggacgcggtgaaggagagcgcggggcatgtgggcgtggagaagtacatcgcggagcagttcggcagctgggcgtcgttccggccgcagtacatgatcggctccggcaacaacaaggactgcgaggagtggttcttcgacaggattgtgagggggaggccggtgccgatcccggggtcggggatgcaggtgacgaacatatcgcacgtgcgcgacctggcgagcatggtggcgctcgccgtggagagccccggcgcggcggcggggaggatcttcaactgcgtctccgaccgcgccgtcaccttcaacggcctcgtcaagatgtgcgccgccgccgccggcgcccagccggagatcctccactacgaccccgccgccgtcggcgtcgacgccaagaaggccttccccttccgcaacatgcacttctacgcggagccgagggcggcgaaggaggtgcttggatggaggagctcgacgaacctgccggaggacctcaaggagaggttcgcggagtacgccagcagcggcagagggcagaaggagatgagcttcgacctcgacgacaagatcatcgccgccgcctaacaacacccatctcatctcacctcgtcatggtcaaatacaaatacaaagtgctcggggatctcttcttctcgtgatttattttcttctccctctgtttctttggttcctcttctcataccggaagcatagagaaatgcaaaactgaacaattatatatgtaaatgctaggaaaatgctgttacaaataagtgaataagatgagttttcgcttttcgtttt

SEQ ID NO: 80362 - DNA, 1938 bp, Oryza sativa
  Clone ID: PAT_MRT4530_79994C.1
atgtcaacctctgccaacccatcggacgcacctgctgctgagtacatcgagcatctctctcaccaggttgcaattcctaatataactgatgaataccagtttttccttggcccaatcggcaacttagaccccatagagtttattaatggtgaaaccaaccgaatcccctttagattcaccaatcccaacttaggtctttggaagaacactttcaaatcttggccatcgcctaaaaagagctggcctgcctggagcataggtggctggacaagctatgttgcaaagaacatgggtactgggccgatttatacacgagaacatgtagccttcctcatgatgtggcttgaaaaatttctgttctgtggtccgagctgtgatcctattgcaaattggcaacacatagccgaaattttggtagagaagaaacaattcccccttgggaaatatctacttggatatatgtatcagactctgaataccacaataaccaagatggcatctggattatcaatcggtacaggaggtccttggtggctacttcaaatttggttaaacttgcacacctggatgattgccaatcggccactactaacagatgtcagcttcccaagaggagaaatcacattggcactcatgatggatcggctgctaaatatacctggaccacctctgggcactattgatcagatcaagctaaggatgttgaggagcacaacctttgaccgatggtggattgaatggaagaaacacttgtttcaccaatcggcttcgatgtaccttatagatctgttccccaaagctgtccctcaagcaacagaatcttctcctccccatcacagcaaaagtggtgtagaaattaaatatgcaccaggttttcttgcaaacagcggcggcttaagtcctccagttatcggctaccatgcccccaagacctctactctattgcatggtctgctgcgtctgccgattgcacctgatgctggcaaaaagaggaagactaaatcggctgctgcaccatcgattaacccagatgtggaagaattcctggagggtgaagaactggaagaagctgtgaatgaagcagctgaaaatctgagtgaaataggagagaaaacacctctagccgatcctcctgctcctcagataacaccatcaccaccagtacgccatacttacaaaccaaggaagaagttagcttctaagaaaccaccagcaccagctccatcgcctcctcgtcctgcaactcctattcccaaatcgagtgtacacaccccattgactgcaggaagccatcatgtggaggaagaagaagaagtagcatcggctccagctatcccttttctagatcaggaagaagacaccacgagcaaagctttggcacccttagccgatgacgtcaagtccatcctgctggacatctcgaccatgcttgaaggttctctagaaaccctagtggccagttgtgggtctgtcagagacaggtttcttaagatccatgacagaattccagatgagctagccgatgccataactccagcagcatatcttgaacaacatcggctcaagcttgagaaggctaaacaaaggattgctgatcgtcgtgagagaaaggatcttgaggccacaattcgagccagtagaacttcgatcaatgaagagaaagctaaacttaatggactagaagctggtccaagttctattcaggccaatattgatcggctacaggccagaaaaatagaactcttggctgaactagaacaatgtaatgcccagattgcaattgaggaacaaaaaattgtcgatatgccaaaagctacagaagatcaaagatccaagttgaaggcatccatcaagcatttagccaatctgacaaaatctctgaaaataatccctggaatagatgcagccgacgctcaaatcattgacgaggtagattga

SEQ ID NO: 80363 - DNA, 787 bp, Oryza sativa
  unsure (1)..(787): unsure at all n locations
  Clone ID: PAT_MRT4530_79995C.1
gctaggaatactatggtattaacactcagtaatatangtangcaatacagcaatagagcagcatacaccagacaagnatactatatagccctagtaaatagcctaaaatatagctactatatactagcaaaagtagcccaactaaactaggcaaatacaacccaactaatagacaagtaatataaacaccaaacaaacatatnancacatagagagacacacatagagaataccgtagatanaagcagatcaacaatagaatagccaaaaacagataagagagccaatngggagataaagcctacccaccaagacnccatngatatccaatagatacaaccangacacaaaatagagcaacaacacaagacaaaacaagacaaatagtaagcatagcaagctacaaagagcatagatagcctcaagatagccacatgtgagcaaccaaattagcacaagaatagaatagccaagaagacaatagccaaaacaaaaagatataaatatttgggttgccctggggaaacatcccgagaggccaagacaaaccaaagaatagaatagaaaagaataggccgaatagcacgatagccatacatgtgcaacatggcccctgatcaacattccaactctcttcctgtggttgttgttgatcaaacgttggttacatgtactctaataataaggtgttgcatactatcgtgtgcaaacactagaaataagaccattgaataaaatatcatcatttcagctgcaaaaaaaaaaaaaaaccgtcgcgcgccccggg

SEQ ID NO: 80364 - DNA, 1278 bp, Oryza sativa
  Clone ID: PAT_MRT4530_79996C.1
cccatttctcacttactccggcgatcaccgtggttgagcgtcggcggcggaggaggaggcgatgattaccatggatctgatgggtgggtacgggcgggtggacgagcaggtggccatccaggaggcggcggcggcggggctaagggggatggagcatcttattctgcagctgtcccagactgggacgagcgagaggtcgccggcgccggcgcaggagcagcagcaacaggtggactgcagggagatcacggacatgacggtgtccaagttcaagaaggtgatctccatgctgaaccgcaccggccacgcgcggttccggcggggcccggtggtggcgcagtcgtcgggcccggcggcgtccgagccggcgccggtgaggtcgtccccgtcggcggtgtcgaggcccatgacgctcgacttcaccaaggcggcgtccgggtacggcaaggacgccgggttcagcgtctccggcatctccgccgcgagctcgtccttcctctcgtcggtcaccggcgacggcagcgtgtccaacgggcgcggcggcgggtcatcctccctgatgcttcccccgccgccggcgaccagctgcggcaagccaccgctgtcctccgccgccgccgccatgtcagccggcgcaggccacaagcgcaagtgccacgaccacgcgcactccgagaacgtcgccggcggcaagtacggatccaccggcggccgctgccactgctccaagcgccggaagcatcgggtgaagaggacgatccgcgtgccggcgataagctcgaaggtggcggacatccccgccgacgacttctcgtggcggaagtacgggcagaagcccatcaagggctcccccttcccacgaggatactacaagtgtagcacgctgcgcggttgcccggcgaggaagcacgtggagcgcgacccgaccgacccgtccatgctcatcgtcacctacgagggcgagcaccgccactccccctccgccgccggccaggaccacccgccggcgccgcctccgccgctggcgctgccgctcgcctgagatacccccggtgaagaagagtgagaattagcttgtcggtcatcataattaccgttagaaattatttttttcgtttttctctctttttttttcttttttttactgcatcattgtagaactagcgtgtaaaacaattttaggagactttgagactgagcttttactgaagaaaaaataaagcagaacaaaaaaaaaaaaaaaaaaacctgcagcccgggggatccaaaaaaaaaaaa

SEQ ID NO: 80365 - DNA, 799 bp, Oryza sativa
  Clone ID: PAT_MRT4530_79997C.1
ttttttttttttttttttcttaaaaatttccaatccaatgtgaaatgccaatttactatacatttcctttgtgggcagtatttatccttgtcaacagtatttgaactaattacaatgtagggaggcccctaaagtccaacaaaaagaaactatatgaaattacaggcagcaggagcatcatagtcggcaatgcagtaggttcgagatgcccaggacactaaaatttatcctgctgctgaaacgatcatgtacaccaatccaaaatgcaagaccgactaacctcctgcctccagttactctcaacaacagatcaactggccatgcatcatgcgtcatcgcaagctcttccatgtctatccatgaatcactgtttgtatcctcttcacagataaatatcgaacggggaccctatggttcttcagtcttcagttctttgtgtatttacagagtctacctctttgcatatatacatacatgctcagatgggcatgtccaccgaatgataatgtgggaagtcatttgttgtgtgtgctaactgatggacggcagagtgggttgactgaagccaaggccagacaccccatccaaagaaccaggcactacatgtttcacttgcccatatcgcctgatatgacgaaggagcctcgccaggaaggtgctgtgacagatagtagaggtgtcacataccacggtggcatgccgcctcgcccttgtaatagccacattcatgcgcctgctgtcaccaaggaaacctactgctcccagcctcgtgccgaatgtcctgcagcccggggatcca

SEQ ID NO: 80366 - DNA, 398 bp, Oryza sativa
  Clone ID: PAT_MRT4530_79998C.1
cgggcctcttcgctattacgccagctggcgaaagggggatgtgctgcaaggcgattaaaactgagaaaatattatgggagtcttctcttaattgctgccccaggcagcaaggcatatggatatgccattaaccaactcaagaattgcactgtaaaatgtcaaaaactaaatggaaagtatttgtgttcttatcaaggtctttctgttgagttttaaggttcagagttatgatcccttgatggtccatttgtgttggtttggatcaacaacatgccatgggctgctgatagtatcatggcggctcttggggccaaggtaattgaattcttcgctgtaacaattgtttctccagtaatgttttgtccatatagtatactttgtatttcaaacctatcttc

SEQ ID NO: 80367 - DNA, 387 bp, Oryza sativa
  Clone ID: PAT_MRT4530_79999C.1
agatgccatttatccttcaatatattacagctgggcacctcaattcgcaagcaatctgtgccactcataaatagttttgttctctgaatgaccaaaagattaagcatcacgacgaatatattacacatcttgctaggcttgacaaagcccaagaagcctaatctaaaaataagctgagtagtttgcactgtgacacaacagtacagccaatagcagtagttgacagtccttcttcaggccttaatacagcactggaagtagctcagaaacgtcctccttcccgtcggcgagccgtggcggccatggagttgccggtggcggtggtcgtcggccggccggccgaggttggccttggcgggcttctgctgcggctgcggctgctgctgc

SEQ ID NO: 80368 - DNA, 2486 bp, Oryza sativa
  Clone ID: PAT_MRT4530_7999C.1
atgtgctgcaaggcgattaagtttgggtaacgccagggttttcccagtcacgacgttgtaaaacgacggccagtgaattgtaatacgactcactatagggcgaattgggtaccgggccccccctcgaggtcgacggtatcgataagcttgatatcgaattcggcacgagtttggttcatgggacccagtttgtataattgtatgtgcagtttatcaattactcaaactggtcccatgaaccaaagaatcgtgcaaggccttgcaaggcaagaaacaatttttttttttgtacaagcattcgttgtgcgtgggaaaaaaaatcgaaattttatctgctcctatgaattaatcaatgtggccgtggtggaatttcacgacgctgtaatggccgtcgtcgtgacgtcggaggtggcggggtactccgcggtttgctccgccgcggcccaacgccggcatgccctgccgagcgacgcggccttgcgccgcgcgcgctccgtgccggtggccatcagctcccatatcgcccactccacgccggagaccgacatcacctgcgccaccacggcggcgcccacgcggcggcagagcagcaccagcgcggcggccgcgcactcccttgaccactccgtgccgcgccgcagctcggccacgaggcgcaccaccgcgccgtcgatgttcacgatcgcctccgcgccgccgcgcttggccagcgacgccagcaccgccacggcggtctcctcctcgctgatcgccgacagcgccgcctccgcggcgccggcttccacgagcttcccgacgttctccctctcgccggacaggcacaggagcgcggcgatcgcgtccttcttggtgctggaggggccggtgcgcacgaggtgcacgaccctctcgacgacgcgtgggttccggccaagccggcggcggtaggaatggacggacgccaggctgagcacggtggccgccgcgttctccttggcgcgccacgtcgcgccggagcccatggcgtggcagatcgcctcgacggcgccctcggcgtgcatgatgcgcttcttgttggcgtcgaggatggacaggttgagcagcgccgtgacggcgttgagctgggtggcggtgtcgtcggagtggagcagcggcacgaggagcgggacggcgccggcctccccgatgaaggcgcgcgtgtcgttgccggacctggcgagctgccggatctcgtgcaccacgcggttggccgcggcgggggagaaggagacggagagcttcttgacgaggaacgacgccgtcatgcgcgccgcctccaacgccgccttgttcgcggtcaccaccggcgctggctcgggcttgcttggctcggagctctccatggcgacgccgttctcccggcaccaccgcgagatcaagttcttgagcgccttgttggggacaagctccagattggccagcacctgcccagtcttggggcacgtcgacttgccggagccgaaccaccgggtgatggactcccggtcgtacgtctggccgctcgccgacacaaccgggtcgcgcatcagatcgagagagatggggcaccggaagtccggcggcggcgacggcggctcggcgtcgtcgtcatcgtcatcgtcgtcaacatccaccttggtgtccatcggccgcggcgtggccgcggtgaagaggacgcacttggcgtaccggaggagcccaacgagcgcaatcatggccgacgtccacctctccgccacgcggtcgccgatctcccgctccagtgtctcgatctcgtcgctgcagcacgccgggtcgttgatgccaacctcctcgaggatgccctccagcctctccctctccggcacgatctccctctccacctcctggatcagcgccagcaccccggtcttcagctcgtgctccgcggcgtccgccgacggcgagctccgccggcactgccgggacgcgagcgcgaggaggtccaccacgtcgtcggcgagcccgagctcgggaacggggagaagatccagcagcgtggccaggtcatgctgcagctcacgcacccgcgccgccacctcgtcggcctgcagtagcagccgcatccggctgcgcgccgagcagtcggccaccaccgccttgaaccgctgcagcacgagcagcacctcgcgcaggcacagcgacgccgaccgcggcagcctcccgcaccggagcaggtcgtcgaacaccgcggcgagaagcttcgcgcgcctggacaccgccgcgaacaccgtctccaagaacggcgccggcgcctccgccgcagccagatccctcgccaggcggtgcagcgatcggaggatctccccgtcggacgccgacgaggaatacgaagaagacgacgacggcggcggcggcgacgcggcagccgcgttcctcgcgttggccattttgttgctgactttcttttgcagtaaccgaacgaacaaatcgaattggaactcagaaaaaaataaaacgctgggtcgacc

SEQ ID NO: 80369 - DNA, 309 bp, Oryza sativa
  unsure (1)..(309): unsure at all n locations
  Clone ID: PAT_MRT4530_799C.1
gtaacagcgagttgattttatggactggggtccaggtgctcactgtggtgaataatcatggtttttcaagggatgattttaacatcgagcataaaatccatcaaaggacgttaattcgggaatgctacaatgagttttttatcttctaaaatttgttttaaagttcttcgaaatggtctagaaaagccttccattgattttgcagattntcttacatacgcagagccagaaactgtcgtccttcttctcaagttttccaattctggtgctgtcttgaatgttacaattgagaagatccaaggaggcaat

SEQ ID NO: 80370 - DNA, 1146 bp, Oryza sativa
  Clone ID: PAT_MRT4530_79C.1
ggctttcttctcctccttttttcttcaattcctctcgctttactttgcactgttcgattcattcgtcacggcacaagaaaccattcttaatcactcgccctttcttcctccatcagtccatctcactttggttccttcaagaaacgaagcatcaagaaagaggagaggagaggaaaagcaagtgaggtttcagacttcagaggtgctctggaggagtttggtctcgatcatcatctctctgaagcctgagagagtttcagctccgattaccacttgaccatggcgagcaaatacagaggctactaccacgacgaggcatcgtcggccgccggcggcggcggcggcggcggcggcggcgacgggtacaggagggagaagcaggtgaggaagaagcggctgacggcgcagaagaggaaggagatcaaggaggcgttcgacctcttcgacaccgatggatcaggtaccattgatccaaaggagctcaacgtcgccatgagagcactggggtttgagatgacaccagagcaaatacaccagatgatcgcggaggtggacaaggacgggagcgggacgatcgacttcgacgagttcgtgcacatgatgaccgacaagatgggcgagcgcgacgccagggaggagctcaacaaggccttcaagatcatcgacaaggacaacaacgggaagatctcggacgtggacatccagcggctggccatcgagaccggcgagcccttcacgctggacgaggtcagggagatgatcgaagccgccgacgagaacggtgatggcgaggtcgaccacgaggagtttctcaagatgatgaagaggataggatttggggccgggtttttttagctcagcaagcagctaattaatcactagtgcttcagtaaacacaaaataatgtttggggaggtttaggcatgatgtaccgactggatggcatactatcactatgtacatatgtaggttaagttggtaccataccgccttatgttttgcaactggtgttttggtgactgagacgatgtacataattgtacagcagtacagataccaaggtagatcaaataaacacgagattgttattactcgaagaaaacattggtttgatctgctatatcctactacaaaaaaaaaaaaaaa

SEQ ID NO: 80371 - DNA, 1083 bp, Oryza sativa
  Clone ID: PAT_MRT4530_7C.1
atgggcgagaagcgatctgctgcggatagtggcatcgccgacgccgacgagcacgccggcggcggcggcggcggcaagcggagctgcatcgagagcaccgacaattacgaggtcacgtgctggctcaggaagggcgcgttcggcgccgtcatcagggcgcgccaccgcgcgacgggcagggacgtcgcgatcaagttcctccgccgccaccgctgcggcatgggtggtaaggccgtcggcgaggacgcgctgctgcgggaggcgctctacctcgcgcgctgcagccaccacccctccatcgtccactaccacggcctcgcgctcgagccgcgctccgggatgtggggcctcgtcatggagcacgtcggccctagcctgagcagcgtcctgcgcgagcgccacggcggcggcggcgggccgccgttcacggaggaggaggtgcgccgcgtcatgcggcagctgctgagcggggtgcagaggctccacgaccgccacgtcgtccaccgggacatcaagcccgggaacatcctcgtcggcgacggcggcgtcgtgaagctgtgcgacctcgggctggccatggacacggcggcgcggaagccgccgtaccagaaggccggatcgcccgggtacaaggcgccggagatgctcctcgggaagccggactacggcgagctcgtggacgcctggtcggccggctgcgtgatgggcgagctcctcgccggcgtgccgctgttccgggggcacagcgagaccgacgagctgctgagaatcttccgcctgctcggcgcgccgtgccgccagacatggccgagctacccgtcgctgccgctcttcggcgcggagcgcctgtcgcgcgacgggttcgaggtcttgaacggcctcctcacctgcaaccccgacgcgcggctgtcggcggcggaggcgcttcggcttccgtggttcaacgccaccgtcgacggcatagcagcagctgatgagacgaagatcggtcagccggcggcgtccccgaggcaggagccgccgccgctggcgagcttcgccgctatcccttgtggtgattatggcaccggctttgccgggtag

SEQ ID NO: 80372 - DNA, 183 bp, Oryza sativa
  Clone ID: PAT_MRT4530_80000C.1
atgggattcaagctcctttcgttgtccagggcaaggcggcaagcggatacaaacgttgggtatgagcgaatgcaaatgcatgtggtgggactggccgggaccgtgtgcatccggtcacagccaggcacagcgaagcggccgcggcgatctccctttgacgaggagtgcgaggcggcgagatag

SEQ ID NO: 80373 - DNA, 2187 bp, Oryza sativa
  Clone ID: PAT_MRT4530_80001C.1
atggcgcctggcgatgggtggggagaaggctggcagccaacaagatgcttggcagcggcgagcgacggggagaagggcgcatgcatcggggacgatgcgaccgcaatgtgcagatgtaatttggttactgaatctcatccaaacacccttagaatagttgcattagaacggaaaatgttatcaggaggcgaaagaaggagaattattgatcaatcaattcagaacgaacggctcagatattggggaggaagacacgaagcggacctatgcatgctctctccggccgccaccgctgtagccgccgtccgtgccacggcggggtcgccggcggccgtgcgcggcatgcacgcgcgcatcctcaaggaaggtctggcccaccaccctccgaaccccgcggcgctcgtctccgcctatgccaagtcccgcctcctccctgacgccctccacctgttcgacgaaaccccgcgccgggacatctacatctactcctcgctcctcactgccgtctcccactccgcgtcccccgagctcgcgctgccgatcctccgctgcatgctctccgccgacgccctccaccccgaccacttcgtgatcagctccgttgccagcgtcttcgccaggctccgtagccgccgccttggcaggcagctgcacgcgcatttcgtggtatccccatacaacggggatgacgtcgtcaagtcctctctggtcgacatgtactgcaagtgtggctccccggacgatggcaggaaggtgttcgacagtatgagtgccaagaacagcgttgtgtggactgccctggtttctgggtacgcgtccaacggccgcagtgaggaggcgctgcagctattccgtagcatgcctgggcgcaatctgtttgcatggactgcgctcatctcggggctagtgaacaccggtgagagtgtcggcgcagtggagctttttgttgagatgaggcgggatggtgttaggattgatgatgcattcgtgctgtcgatcgtcattggcggttctgcagacctggctgcttttgtgctgggtaggcagttgcatggttccacaatgaggcttgggttcctgtccaacatgattgttgggaatgcgttgattgacatgtactcgaaatgcagtgatatactctctgctagagaagtatttgaggggattacattccgtgatgtaatctcgtggacgacaatggttgttggagaggcacagcatggtcgagctgaggaggcattggctctttatgacaggatggttcttgcaggagcgaagcccaacgaggtgacctttgtcgggttgatctatgcttgtagccatgctggtcttgttcagaaagggcgacagctttttgagtcaatgaagaatgagtatggcatcactcctagattgcagcactacacgtgttatctggatcttcttagtcgctcaggccatttattggaagctgaagagctaatgactacaatgccatatgagcctgatgaagctacttggggggccctgttgagcgcatgtacgaagtacaaggatgctgaaatgtgtatcaggatttccgataaactattagagctacgaccaaaagattcttccacatatatcttgttatctaatgtttatgcagtgaacggaaagtgggattccgtagccaaggttagaaagtgcatgattggattggagataagaaaagagccagggtatagctggattgaagctggaagagaattccgtttgtttcatgctggggaagtgccacttgatgttagagaagaaattatggtttttcttgaggaaatggtattggagatgcgcaaaaggggttatgttcctgatactagttctgtgatgcatgacttggaagaaagcgaaaaggagcaccatctcttcttgcacagcgagagattggctgttgcttttggattaatcaagtctcctccagggtctgtgatccgggtggtgaagaaccttcgggtggaaaatgctcttgtagtgaattctggtagaaggtctgctgatgtccagttgtgcttccagtcttctagaactctagaggctacaatggacagagtgtcatctatactcttatcttgggaagatctttcatccgggagggaggacatactgttagtttatgttgttctggcgttatggacttatggtaatgctattgctattcatgcttag

SEQ ID NO: 80374 - DNA, 883 bp, Oryza sativa
  Clone ID: PAT_MRT4530_80002C.1
cgggctgcaggctctctccggccgccaccgctgtagccgccgtccgtgccacggcggggtcgccggcggccgtgcgcggcatgcacgcgcgcatcctcaaggaaggtctggcccaccaccctccgaaccccgcggcgctcgtctccgcctacgccaagtcccgcctcctccccgacgccctccacctgttcgacgaaaccccgcgccgggacatctacatctactcctctctcctcactgccgtctcccactccgcgtcccctgagctcgcgctgccgatcctccgctgcatgctctccgccgacgccctccaccccgaccacttcgtgatcagctccgttgccagcgtcttcgccaggctccgtagccgccgccttggcaggcagctgcacgcgcatttcgtggcatccccatacaacggggatgatgtcgtcaagtcctctctggtcgacatgtactgcaagtgtggctccccggacgatggcaggaaggtgttcgacagtatgagtgccaagaacagcgttgtgtggactgccctggtttctgggtacgcgtccaacggccgcagtgaggaggcgctgcagctattccgtagcatgcctgggcgcaatctgtttgcatggactgcgctcatctcggggctagtgaacaccggtgagagtgtcggcgcagtggagctttttgttgagatgaggcgggatggtgttaggattgatgatgcattcgtgctgtcgatcgtcattggcgcttctgcagacctggctgcttttgtgctgggtaggcagttgcatggttccgcaatgaggcttgggttcctgtccaacatgattgttgggaatgcgttgattgacatgtactcgaaatgcagtgatatactctctgc

SEQ ID NO: 80375 - DNA, 207 bp, Oryza sativa
  Clone ID: PAT_MRT4530_80003C.1
atggtggcgtgcagcctccggcgcgcggcggagacgctggcggaggagatggtgacgagcggcgcacggtgggtttccttctctttctccgatgtgcgggcggcgggcttcggccatgggggcgggacgtcgccggcggtgagcttgggcagtgcgggcgtcggcagcacgaacgactcacttgtgacagccggaggggtattttag

SEQ ID NO: 80376 - DNA, 709 bp, Oryza sativa
  Clone ID: PAT_MRT4530_80004C.1
gcacgagggattccgtagccaaggttagaaagtgcatgattggattggagatagaaaagagccagggtatagctggattgaagctggaagagaattccgtttgtttcatgctggggaagtgccacttgatgttagagaagaaattatggtttttcttgaggaaatggtattggagatgcgcaaaaggggttatgttcctgatactagttctgtgatgcatgacttggaagaaagcgaaaaggagcaccatctcttcttgcacagcgagagattggctgttgcttttggattaatcaagtctcctccagggtctgtgatccgggtggtgaagaaccttcgggtctgtgtggactgccatacagtaatgaagttaattagtgaaataacccatcggaagatcgttgtgcgagattctagtcgttttcaccattttgaaaggtggaaaatgctcttgtagtgaattctggtaaaaggtctgctgatgtccagttgtgcttccagtcttctagaactctaggtatgacataagctattgcttttgggggtcgacttctttgcaatgcctactaacttattaaggtctgccacaagttggttataccaaatggatagtcattttcctttataacttatttgttgtttcagtcctagaaaacaatacagccatcctgtttcaaagaaaaaggaattcatccatattcttctgttt

SEQ ID NO: 80377 - DNA, 158 bp, Oryza sativa
  Clone ID: PAT_MRT4530_80005C.1
cccacccgtccgggtctcagatgcggttcaggaagagataccatccgcatctatgctctggttgttgcgggactagaccgcatcggcgagggaaaagacagggcatgacccctcccactcatacttaaggcggatgaacatatatctcgcctatgtct

SEQ ID NO: 80378 - DNA, 461 bp, Oryza sativa
  Clone ID: PAT_MRT4530_80006C.1
attacattccgtgatgtaatctcgtggacgacaatggttgttggagaggcacagcatggtcgagctgaggaggcattggctctttatgacaggatggttcttgcaggagcgaagcccaacgaggtgacctttgtcgggttgatctatgcttgtagccatgctggtcttgttcagaaagggcgacagctttttgagtcaatgaagaatgagtatggcatcactcctagattgcagcactacacgtgttatctggatcttcttagtcgctcaggccatttattggaagctgaagagctaatgactacaatgccatatgagcctgatgaagctacttggggggccctgttgagcgcatgtacgaagtacaaggatgctgaaatgtgtatcaggatttccgataaactattagagctacgaccaaaagattcttccacatatatcttggtatctaatgtttatgc

SEQ ID NO: 80379 - DNA, 267 bp, Oryza sativa
  Clone ID: PAT_MRT4530_80007C.1
gggaaaacatggctgcaattgggggggagtacaaatcacggttttgagccctggtacatgtaacaacatttggcttttatgccatgcaaaaatctcaaattagcgtgaatgtcaaatacaaccaatggtaaaaaaaaagtcatgattaagccgtacaaaatctgtgaaacaacggatcgctgtttggattttatttacccatcttattaaacaatcatacctaggggtatgatttcttttgcaagaagatcaagttgattttactct

SEQ ID NO: 80380 - DNA, 2047 bp, Oryza sativa
  Clone ID: PAT_MRT4530_80008C.1
ttttttttttttttttttttttttttttttggagtaaatcaattcattaatctcagaaatttaatctagcgcatagccatcataatatacaggtcatggcaagaacatctgaaaaatggcatgtttatggccatagcgtacagtctcacaacataaaaaaaaaaagatcattcactgaaaacagagctgattttgcgacaataaattccacccacatggcccttgaagatgtcaatagcataatactttacagtatggtagctttttaaggatcttggggagaaaatgccgcctggggttgggaaatgttttcgctattaaaaggaaaacgcttcacttccgaaaagttcccttggtcaaacaaaccatacaaactaattctttggtggcaatgcttttcatgcctttttcttggcttcttgttcagttggtgatattgctcatcatccaattcctggaatgaaattgaactactttaacgaatttgtgactgccttttaaccctcttcccagtcaatttcatcttcttcatcaccagattcttgggcttcaacattcaaatctgccagtttgtatgtctcagctgtattccctgcaggttgctcttcttcccattcaacaccctcatcatcatcctctcgtttggatttcatgcccacctgccgttcagaatgagacgcagaagcaaatgtatccccttcctgctgtatcttccttttcgcttcttcttcgtcctgtcttttccttaaggcctcataataagcctttatgtattcatcctgtatactcttctcatcttcttttgagtcctgttttttctcatccttgacttctgatttttcatctagatttgatgagttactggtctctcctctttgttcttttgtaagattcataccttgtttgatcatccatggaggcaagactttcagcccgttaccatttgtacctgattcagcaccttcatcttttacaccggtgccagacaatgcaacttcaacctttgtctctccgaggtatggcattggtgtaccatactgcccttgtgggttcctagacgagtcagcagcactagggtcagcagttccaaaagcaccaatgttagctctttcccatgattgtaagctcccaaactcaggagcaggaagatccttcaccctattaagttgtgcttgcaatggcttcaattgttcatcgatcctttgctgcatatcctttagtttctcacgccggcgttttcttgcattatcatcaccatctcccatttcctcagaagcaagcttgtcactctctgcaactagctcaccattgcaattttcgcaatggaagtactcatcggtgtagcttataagctgtaatgcatcgaaggctgaataccttttcttacagttagggcatatatagtgttggattgtatttctgctgtccaattcatctttcaactttttcttcatgcgatgtatccgataccttacaacatcacagatctgtgcatagtccaagcaacagtacgagtgggtatgcatctttactttctcttctccctccttggtaattgattgaccatcaccagcagctgcagctgctgcactgtatatttttgctccttttgctgactccttccggtgatctcgtgtcactagtttctcttcttcaaagaatcggaggatacggcgcaattgctttgagtggagtttcaatgccttagccaaatcctcctctcgaacccattggcgtctggtgagcgcgtcgaggacgacgacagccatcccccggttgtccccgcgggaggtcttgggctggttgtcgcccttcatcgagatgtcgtcgtagaaggcgcgcgccgccagcctcaccagccggttgaacggctccatggagcccatcgctgcggaggaggaggaggagaaggccgcctggggaggttagcgcgtgggggcggggaggcccctccccgccggatcgggacggagctcgctctcccgccggtcgccgccgccgccgccggcggttggatcggagggggggagaaaggccagcctcctgc

SEQ ID NO: 80381 - DNA, 958 bp, Oryza sativa
  unsure (1)..(958): unsure at all n locations
  Clone ID: PAT_MRT4530_80009C.1
cggcacgagggaaagaataaacctgacctggcgtttactcagggnggcattttatgatttcccttgcttaagccttgtactagaaaaatcatcagcacgccagttggcgtgcttcaaaatttatagcctgtgacatgatcagattaattttgcaagtctttacataattaatttaattatcaaaggttgagagtggaaatacaatagtaatatatgccttattatgttacctacttgttatttaaaaatgcatgttcagtaagaaattacgtgtagctttcataaattggaaaattttgtttgcgagctgttggattttcaatccccggcctgctcgatcgccccccgcgggcatctgaaatcgtcagagctatacagtgcaactgatatccatgggtgctttctttgtcttttacattgtgatttttttaaggaacacagtagaggaggctccgctgttaaattttacatttcggatttcggtttgtttctctattttttagctcccttttttttacatattttgattttcagttgtgttatctttttttgtggagcttcaattttagagatctgtttttttttttttacattttaattttccattgttttctctatttattttttgagctccagtttcaaagacccgctcaaaattggggtgcaagcgggtcacccgcgaacccacttataggtcaaaataagcgagttcgcaggttagtttagcctataagtgggtttttgtgggtagccgcttgtacccttagctcaaaagcatctagactctagacttgagttgttgatttttctcaaaagaaagtcttggccttattatttcttttgacaactattttttcactagtacatgtcattattcattttccaatttatggtatttctcctagtttttcctaaattttgtgctgtattgtttttcgctgtgtaatgtttattctag

SEQ ID NO: 80382 - DNA, 142 bp, Oryza sativa
  Clone ID: PAT_MRT4530_8000C.1
cttaggggtattttggcgacgattcttgcgtggaacagggcatatcgacgtcgatacgagggcccacaacagaagaaccacccgacatggaccaagacgcgaagaaggctcccgacctaatatcggtgagctctacgtctac

SEQ ID NO: 80383 - DNA, 377 bp, Oryza sativa
  Clone ID: PAT_MRT4530_80010C.1
ttttataaatttttagttccatccaaacagcccgtgagggtgacttttttttacagccatgcaatgatttagattaaacattaaataagatcatgtcacagttgttttattgtttagaaaatgaaaggtggcccaaactgccactaactccccttttttttttgttgatatccttcaggaaaaaccccatgttagtttgaagatttgaacttagacatatgtataattggtgaaaaaaaaaaattctagaagaaacttctataccggggccaaaacttcgtagatattcttactttcatggacgtatgtgtgcaagtcaactaactatttatgtgtgctactatgcacaaatgcagtgtgaaggaaactattgagag

SEQ ID NO: 80384 - DNA, 1441 bp, Oryza sativa
  Clone ID: PAT_MRT4530_80011C.1
gcacgaggccctcctcctgcctcttcttcctcttcctccagccaccgaactcaccaacaacgagacgactcaggggagatcaacctgctctccactactgtggactgcagtggagtccgtggtgagtgaggcatacacacgcgtccttctccggcgaacgatggggtggggtgagccgccggcgccgcagcagaggaaggcggcagggggcggcgggctgaagctgctgctgtccgtgctcctcgtcggcctcgccctgcgcctgctcgtcaacccctccgcgtacctcctcctttcgtcgtcgtcgacgacgaccaccgccgccgtcgcgctagggcaaggggacgacgcggtcctcgccggcggcggctcgctgccttccaacggaagttgtgatttattccatggtaaatgggtccctgattcatctggccctgattacactaacaacagctgccgcttcatcgagactccgcagaactgtatgacaaatggaaggcctgacagtggctatctttattggagatggaagccctatggctgcgagatgtcgcggtttgagggcgagaagtttttggaggccatgcggggaaaacattgggctcttattggtgattcaatcctccgaaatcacgttcaatcgttgctttgccttcttgctaaggttgaagagcctactcaggtctaccatgacaagacattcaaatcaaggaagtggcactttgctttgcacaacatcacagtctctcttatctgggcaccgttccttgtcgaagctgaaatatttgaggatgatgatggagtatcaacttctgagctccaactgcaccttgacattcttgactcaaactggacaaggcaatggaacagcttcgactatgtcgtgatatcgacaggccaatggttcccgaaaaccgcagtctactgggagaatggagctgtgaccggctgccactattgccaggacaagagtgtagcggaactgacttttgagtatgccttccgcaagtcactcagaaaaaccttccaattcatcacgtcctcacctcacaagccagtggtcttctacagaacatggtcaccgtcgcattttgagaatggtgagtggtccagtggcgggacttgcaagaggacagttccattcaagccaggggaaaccggcgatcgagaatcggacatgaagatgtggaggatcgagagagaagagtttgccaaggcagttgtgcacgacaggcacaacaacgccggccgtctgaagctgctcgacacatttgagctctcactgcaaaggcctgacggccaccctgggccttaccggacgtatcatcctttcgagaaggcaacatcggccaaagttcagaacgactgcctgcactggtgcttgcccggtcctattgatgcgtggaacgatataatcatgcagatgttggcaataaactga

SEQ ID NO: 80385 - DNA, 563 bp, Oryza sativa
  Clone ID: PAT_MRT4530_80012C.1
gggggaggaaaccaatttttcttttgtcaatctggctgacccccgggggggatttgcaattataacactggtgcaacaaattttttatttactttacatggggggggacccccccccctggccaggaaattattatacaatccgggcaaaaaactggacaaattcaagccggggcccatgaacaaaatgccagacgatctttccaaattcccaaggggttcatcccattgggtaggttgatgccccctccccctaaaagggcccttgtttttttttcagctgaagcaattccccccccctaattaaaaatcacaaactttttttccctaaaaaaccatcgaccggtgcacattaaaaaatcaatattttttgttctcatgccaaaaactatgttggcaatgcaatcatgccctgggaccatggaccatataaggggattaacaaaaaccatgtccccctttttcccaaccttcagggaaccttttttattgtcccacaaaactgtttttgccccattaataggagccatttttaatacagtttttgcaagaaaaacacttggg

SEQ ID NO: 80386 - DNA, 918 bp, Oryza sativa
  Clone ID: PAT_MRT4530_80013C.1
atggccgtggacctcggcgtgatgaagagtccccggagtggaggagtcgacgatagtgaggccagcgctcggcgagatgggacctgcgtgctggacatcaggctggccaacgccgacatgcacgctggcaacatcctcacctgcagagacgaacaaggccatggcctctccctggttacaatcgacaatggatactgtcttcctgagagttgtaggcagccattcagcgaggagatggtggagtacataaggtcactggacgccgaggaggacatcgccattctgaggttccatggctgggacatgtcaggcaagtgtgagcgcatcctgtgcgtcaccaccatgctactcaagaaaggcgtggacacgggcctcgccgcgttccacatgaggagcatcttgtgcagggatggggccagacggtccccggacgtcatcgacggccgacgatggaggctgaggtcgaaggcggcggcccacacactggcctcgctcgtcggccgacacagaggcgccaatgctgaccttgttcgccgccgccgccgccgctccggattcagcttgggggcagtgcggccggcaagggcagtgcggcctccaggacgtcccctcctccacgcgctgagctgcagatcacagaagaaaaatgaggccggtccgccacggctgcagatcaccacgactgcctggactggctcggcagcctccatccgcagccgccaccgcacgaggggccactgcggccatctcgacacgcgcgcgcggcggcccacggcggcggccccactggagtcccgcgacgacagcccccttccgagcggcggcaccggcccccttccaagcggcggcggtggtggttctgggggattcgcgagcagcacgctcgggcaggaaacggagcaatgcggggtgaaaaac

SEQ ID NO: 80387 - DNA, 5133 bp, Oryza sativa
  unsure (1)..(5133): unsure at all n locations
  Clone ID: PAT_MRT4530_80014C.1
atggcacggggctctgctctgctcgacggcagtgtactaccgccttcccgcatcgtgagcgagaggcacgccggactgccgcgccgcttcatgccggagtccgccaccggtcgggagatagtgatgctgggcgaggggcgcccggcaccagactacccggggcggtccatcttcttcctccccttcgcaatggctgggctggtcccgccattttcttctttcttcatggatgtcctggagttctacgatctccagatggcgcacctcacccccaatgcggtgatgacattggccatcttcgcgcacctgtgcgagatgttcattggggcgggcccgcccgccgccctcgctgacgggtggggcccacctgtcatcgccttcctcccgccgcgcccgccgccgcgcccgtgccctagcgccgccgccgccgcgaatcccgccgctcccgtccgccccgcgtgcaatcaagaggggggaattattccccgcaatcccctctcccgtttccccctcttttccctctctctctccctcggattcgttcgaatcaagcccgtaatcgtcgccggcgcaatcaatggcggccgagatcttcgcgcgcggtttcctctctccccggccgccctctctccctcccggcgctataaaaacgttgcccgagctccgctctttcgtttccgccgctcgccgctcgctctcgccgtcggaatcgtgctcgcgccgtgctcctctctctccgccgtcgccgccgtgctccggttcgccgccgccgtcgctccggacttcctccccactcggcgacacctccctcggcatcgccgcatcgccgtcgaccccgtccgcgcctccacttcgcccgccgaccgccggagcaccgtcgtcatcgtcttcccgaaccgcgccgccgccttcttccgcttcggccgccattctcgtcgtcgtcgttgccccggggtgagccgaagaccgccgttcgccttccccctttcctcctctctctcgggtgccactccgccgcgccgttggtcgccggcggcgaccatcggggcgcgggtgcgcgccgctcccgtcggccgcgccggcgaggccgccctcgggcgcgccctcgcggctgccaagtgggcccggccgtcagccgcccgcgcccgcggggcaaatgaaggctacacgagctgcggctcggtagtcgagatgtcatacggcggagggttggtgcccaatgctaggggctcagttctgcctgcctgtcccgggtatcccggccgtagtgaagccagctgtgaagcaggagtgaaggtcttggagaacccgtcgcagaacctaagccaccctctaaattggaacaacccagcaggggcaaccaacgttcaagtgcctacagtccagcaacagtgcaagttatcagaatttctcaaaactgagtctcccacctttgccattgccgtcgatcctaaggaagccagtgagtggttgcgcaccatcgagaagaagctagggttgattcagtgcaccgaccaggagcgggttggcttcgcaactcatcagctggttggaccggcttcagagtggtgggatagctacgaagcatcaaggccagaaggacataccatcacctggaacgagttttcatctgtattcaggagatcacatgttcccgcaggaatgatcacactaagaaaacgagagtttcgctacctgaagcaaggggatttgaccgtcacagagtacctgcacgagttctatcgtttggctcgctatgcaccagaagatgtggaaacggatgaagaaaaacaagagaagtttctccaggggttaaaagatgagcttgcagtgcaactactcctagaggattatgaaaattttgagaaacttgtggacaaagccatgcaacttgaaagtgagcataatcggatgacgaactgcaagagaaggattgtcaacatcccagtatttccaggtggtaaccaaagacagcgcactgagccacttcagatcaccggatcttctgttgtgcatcaagagttcctgccccaagaagatgaacgcaatgtagacaacaacaacatcattcaccaagatatcgacgatagtatcaatgaaggcacccagaatggcaaccctagcaattttgactctgagaaagactccaagggtgatagcaataatggtaccactgatgccaatgttagcaaggatttccaaccaccaattccaactcctaagattgtccacagccgaagcgtaacctgcgtcaccactccggccattatgcaagaagaagacaagtcactcgtcttgtggtcactggagcaaacgccatacctgcgggcccncccgcncctcgctgacgggtggggcccacctgtcatcgccttcctcccgcgcgccgccggcgcgccgtccctagcgccgccgccgccgcgaatcccgcgctcccgtcgcccgcgtgcaatcaagaggggggaattattcccgnaatcccctnttaacgcgcgggacccacggcgccgaccgccgccagccgcgtgcgcccggtccaccgtggaccgagcggctgacgcgtgggcccccacccccgtggacccgctgttccggtggttcttcaccgtgcagtcggtgtcaccgccgtcggtggttggcggctgctacttccagccgcgggggccggtgttgaaccgctacatcccctacgtcctccgcaagaagtgggacgactggaagagcgactggttctacacccccctcgccaacgaagcgcgcctccgacttccaagccagcccccggcgcaggtctccagctggcgggcgccggtagatctgggggaggactacgacgccgtcctcgaccgcctggcgggcctgcgatcccaggggctcaccggggccatggtgtacggcgattacctccgtcgccggattgcgccgctccaacggcgcgcccggtgcgcctgggagtacactgggcctgaagactacatgcggacccaccagggagccagatgggattgggctcccgaggacttcaagatcgtggtccaaagggtgctgaatcttagctccgtggaggcgtctcgcattcctcaggagatcctccccctctgcagcgatcccgaccgcgcctccattctaaccattatgatgggggtcggggcctcagaggagagagcccctaatggccacgacggcgcgggcgagcgccgccggggggaacaatctgccccaggagggggtcgtgcttctgggccccgcgtcgggggctcggggagcagccgccctgccgacgcccaggggaagaggaagttgggaggaacacctcccccatctcctccccgagggggcggggcggcgcgtgccagcagtcggcgcccggagggggccgcgccgacgtcgcagcccgagagggagcgcaagaagaaacggctccgcaagacgggggagacggaaccatgccggggaaacctgatttcccctccaaggtggtcattcaaccgaccccctcgcagcgatgtcccgtcgcattcctcccgccaccccaagtccggccagtccgaggccgaagatcctgcggccgcggaggagcggaggcgagaatctgaccggcgtgaagccgcagaccgccttcgggaagctgaagaggccgcccgggaggccgcccggattcgccaagcggaggaagccgctcgggaggaggccgcccgggctcgccaggctgaggcaacagctgctgctggcgcgtcaactgggcccactccttcgggcaaccctcaggcgacagcctccggggaggctcgcgacgaggccgcgggcacatcgcctgggcccacctccccgggcgacgcccaggatcaaacgggtccgggggacatccccgagcccagcacgtcctccggggggccgagccgcatcgccttctctccaaggcggctcttctcctcatcttccgtcgccccgctgagcgccgagcccattctgcaggccttggccgccgcaaacaccgcggtgctagatgggttcagcgcccaagtggaggccctgcgcgcggaacgagcggagctcgaggccgcatgggcacgcgttgaggaggggcggcgctcggtggacgccatggtggaggtgggccgtaaagctcaccgccgtcacgtctcagagcttgaagcccggaaggcggcgctgacggagatcgctcgtgaggtggaggaggagcgagcggccgccctcatcgctaccaccacgatgattgaggcgcaagacgccctccgccttcaaaacgccagccgggaggcggagctgaaagaaaagctcgacgccgcccagggagtccttgactccgccgctgcccgagagcggcgggtaacagaggctgaggcggcgtcccggcggcgcgaggagtcccttgaggcccgtgctatggcgctggaagaacacgccggcgccatggagaaaggcttgacggaccgcgaggccgccgctgctctccgggaggcgacgctggcggcgcacgaggccgcctgcgccgaggaggagtgcgcgctccgcctccgcgaggacgcactcgctgagcgggagcgagctctcgaggaggctgaggccacgaccaaacggctggcggacagcctgtcccttcgcgaggcggcgcaggaggagcaggcgcgccgcaatcttgaatgcgtccgcgccgagagagccgcactggaacagcgggctgctgacctcgaggcgcaggaaaaggagctggacgcgagggcgcatatcggtggggcggccgcgggcgaaagcgacttagccgcccgcctcgcagctgccgaacacaccgtcgccgacatgcagcgcgcactagattcctccatcggggaggccgaggccctccgcttggcgggcgagatggggccctccgcatggatcgcgccggcccgggaccccaatttctctccctggatggcgctggaggagttccctcccgggaccgaggacgacgcgcgcgcgcgcgtccgggatgccgccgaccacatcgtcaacggcttcgagggctcggcccctcggctcgcgttcgcccccaactccgacgaggagggcaacaccagcagtgcagacgatggtggtgacgaggccgtcgactcgggcgcgtcggaatga

SEQ ID NO: 80388 - DNA, 768 bp, Oryza sativa
  Clone ID: PAT_MRT4530_80015C.1
tcagtcctcccttcttcctcctccctctctcccttctctctcgttctctcccttcttccccttcggcaggcggcggggcatgggccacggtgtggtggcggcggcggtgggctggagctgatacgggttctggagcagggagctcatcctcccggtcgacggcgacggcgatgatgtagacaagggagcggatgaggctgggtagtcggtgccgcgatggggctgaggctgaggctgcggggggagctcgtccggcgggtctatggccgtggatctcggctcgatgaagaggcggtcgccacccccctctggcggtggtgccacggtccccggagtggagtcgacgatgctgaggccagcgctcggcgagatgggatctgcgtgttggacatcaggttggccaacgccggcaggcacgccggcaacatcctcacctgcagagacgaacaaggccatggcctctccctggttccaatcgaccatggatactgtcttcctgagagttttgaggattgcacattcgagtggctctgctggccgcagtgtaggcagccattcagcgaggagatggtggagtacataaggtcactggacgccgaggaggacatcgccattctgaggttccatggctgggacatgtcaggcaagtgtgagcgcatcctgtgcgtcaccaccatgctactcaagaaaggcgtggacacgggcctcgccgcgttccacatgaggagcatcttgtgcagggatggggccagacggtccccggagtga

SEQ ID NO: 80389 - DNA, 3825 bp, Oryza sativa
  Clone ID: PAT_MRT4530_80016C.1
atgggttccgtctccggcatcgacgatttcgccttccctcccgggcaggcgttccggttcggcagcctcaacttcatgaccaacgacctcggcaggatctctctccttgactcggattcgaaccagtcggggagagaccaggtccccgcgctgttcggtattccgaactctgccgaggcctactccaagatcatctctcccaagtcggcttcaaaccactcggacgagatccaatctactcctccgcgaccagatcaagaagacgggcatctccccacccgacgatctaggcgagatccggcttcggccccgatccaatctagctctagggaggttggcgttatactccaacctcttgggacagtctcgacggaagaattggatggctacctcagctcccctggcgtcagttcacgaccaaccgagatcctcgactacgacgacttcggctaccactacgaccacggcaacttcgacgacttcgacgacagctacgaagataactacacgcctctctttttcggcatattcatggctgacaacgaaacggaggaacagcgccgagcccgagaagtggaggaagagcgcacacggcaagaaactgaacgtcgccgattggaagaagaacgacaacgacaggagcgagaacgactacagccgagagaactcatcgggcaaaaagaggttgaggggacagcggtcttccgcaccccccaacagaacgctgtcgctgcgatcacccttctcgacaccctcctcaaggaagacgcactcaatcaagccgatcacgtcgtcaacatcttgaaccagaccaagaccatgatcgccgcttcagttctggttaactccggcagcgttcgcatgccgactggtagccgggttccccatctccgatctcatgattatcatcagccaagcctcagcatcatcggcacaggatccagtcgcaggagcaggggccacgacgaacgatctgttcactcgcctcccgaatgtcacagggaacgccgagttgaacagcctcgctctccacctcgccagcgtcccgtcgatcttcgcgacatgatcaaccagcgccgtgcagcacgaggtcaccgccattcaccagatcgctacgacgacgacgtggatggagtagttgccttcactaatgacctgcgtcgagtggaatcaagaaaacttcgtgatcacttcatcgccaacttccagggcacctttgaacgccccgacacacagtttgatctctacaacgtcattcagaagtctggagaatcccttcgagattacatccgatgcttctccgagcaacgcaacaagatctccgacataaccgacgatgtcatcatcgccgcctttactaaaggcattcgccacgaggacctagtcgacaagttcggacgcaaatctcccaggacaggaaggatatctttgcatggaaaccatccgatatgcctggtattcctagagaggaaggatgcgatcaaggaggaattaaccaagctgttagcagcgggcttcattaaagaagttcttcatcccgactggctggctaacccagtcctggttcggaaaaagacggggcaatggcgcatgtgtgtcgattataccgacctcaacaagtcttgtcccaaagatccttttgggttacctcgcattgagcaggtagttgactcaacggccggctgcgagctactcagttttttggactgctactcgggatatcatcagatccgactaaaagaatccgactgcatgaagacctcatttattacgccttttggggcctactgctacatcaccatgccctttggactaaagaacgcaggagcaacctaccaatgcatgattcagaggtgtttttcaactcagatcggccgcaatgttgaagcttatgttgatgatgtagtcgtcaagaccaagcagaaggatgatctgattgcggacttagaagaaatttttgcgagcatccgcgctttcaggatgaaactaaaccctgaaaagtgcatcttcggagtaccgtcagggaagctgcttggatttatggtgtctcgtagaggcatacaggccaacccggagaaaatcaacgccatcctcaacatgaaaccgccaagctcccagaaagacgtccaaaagctgattggttgcatggcggcgctcagccggttcgtctcacgactcggcgagcgggggatgccctttttcaagctgctgaagaaaaccgacaatttccagtggggacccgaagcacaaaaagccttagaagactttaagaaacttctcactactccaccagttttggcctcgccacatccgcaagagccgctactgttatatgtgtcagcgacctcccaggttgttttggccgactccaagacaatatatcctcaggttcaaaagttactatatggtgtcttaattaccgtcaggaaattatctcactactttcaaagtcactcggtcatggtggtcacatcgtttctactcggggatatacttcataaccgcgaagcaaacggacggattgcaaagtgggccttagaattgatgtctttggacatatctttcaagccacgaacttcgatcaagtcacaagctttagctgatttcctcgccgagtggaacgagtgccaagaagacatgccagagaaaaagatggaatattggactatgcattttgatgggtcgaggaggcttacaggcactggagctggggttgttttaatttccccgactggagaaagattgagctacgtattgtggatacatttttctgcgtcccataacatggcggaatacgaggcgctgctccatggattaaggattgccatctctctaggcattcgccgattaatcgtccgtggagactctcagttggttgttaatcaagtcatgaaagagtggtcttgtctagatgataatatgaccgcttatcgacaagaggagctgcaaaccatcccgttgtcttggccgttcgcagtttgggggcttgatatggtcggcccattcaaaaaggcggtcggtggttatactcatctctttgtagctgtggataaattttccaagtggattgaagctaaactggtcattacaatcaccgcagaaaaagctaaagatttcttcatcaatattgtacatcggtttggagtaccaaatcgtatcatcactgataatgacactcaattcactggcggagtatttaaagacttttgtgaagattttggcattaaaatttgttacgcctccgtggcacaccccatgagtaacggacaagttgagcgcgctaatggcgtggtacttcaagggatcaaagcacgagttttcgaccgactgcgtccctatgctggcatgtgggtagaacagctgccgtccatactttggtctttgcgcactactcccagttgggctaccggccagtcgccgttcttcttggtttatggcgcagaagcaatgttgccaagtaaggtagagtttgaatcccttcgatttcgcaacttccgggaggagcgctatgaggaagatcaagcggacgatatcaaccgactggaagaagcccgcgaagccgccctaatccagtcagctcggtacttacaagggttgtgccgttatcataatcgcaatgttcgatcacgagcctttttagtcggcgatctggttctgaggaaaattcaaaccacacaggatcggcataaattatctcccttgtgggaaggaccgttcataattgctgaagtcactcggccaggttcttatcgactcaagcgcgaagatggtactcttatcaacaattcttggaatattgaacatcttcatcatttttatgcttag

SEQ ID NO: 80390 - DNA, 2004 bp, Oryza sativa
  Clone ID: PAT_MRT4530_80017C.1
atggccttgttcgtctctgcaggtgaggatgttgccagcgtgcatgtcggcgttggccagcctgatgtccagcacgcaggtcccatctcgccgagcgctggcctcactatcgtcgactcctccactccggggactgccgccaccgccggaggaggggtggcgaccacctcttcatcacgccgaggttttgcacaaggtagtagtgtgtggcagcaaaggatccgagccaagaggagagattctaacaattggtatcagagccaatttatgcccaagatcctgcgcttcaacaagatggccatcgtcgagcactccgcatcgcgatcgatgagggagggcatcgtgtcgctcccatatccagtgctcacctccaccaactactccacctgggcgatcaagatggaggctaacatggaggcgcaaggcatctgggatgccatcgagcccgcggccgatgaggccgtggacattaagaaggacaagcaggcacgtgcgtgtctcttcggggccgtccccgaagacgtgttgcagcagatcgcgaagaagaagactgccaaggaggtctgggaaagcctcaagacgaggttccttggcgttgagcgtgtgaagaaggcgcgagtgcaaaccttgaagagcgatttcaaggcattgcacatgaaggacaccgagtcaatcgacgagtttgccggcaaaatcagtggcctggcaaacaagttgagcgatcttggtgtaaccatggacgatgatgagcaagtcaagaaactactcgattctgtgccagataagtttctgcatgtcatcgctgcaattgagcagttctctgacttggacagcatgccatttgatgaggcaattggtcgcctcaaggcatacgaggaaaggatacgcaagcgtgatgacaagaatggcgagcatctacttttcacgtccggcgacacaagcggtggccgcagccgcgtcaagaagccggacaggtccaagacaatgtgctactactgtcaagaacttggacactttgcgtatgagtgccctgagaaaaagaagaagaaggagatagcgctccttgccgcagcgtcaagttttgcacaaggtagtagtgtgtggcagcaaaggatccgagccaagaggagagattctaacaattggtatcagagccaatttatgcccaagatcctgcgcttcaacaagatggccatcgtcgagcactccgcgtcgcgatcgatgagggagggcggcgtgtcgctgccatacccggtgctcacctccaccaactactccacctgggcgatcaagatggaggccaacatggaggcgcaaggcatctgggatgccatcgagcccgcggccgatgaggccgtggagaagaagaaggacaagcaggcgcgggcgtgtctcttcggggccgtccccgaagaggtgctgcagcagatcgcgaagaagaagacggcgaaggaggcctgggagagcctcaagacgaggttccttggcgttgagcgagtgaagaaggcgcgggtgcaaaccttgaagagcgaattcaaggcactgcgcatgaaggacaccgagaccatcgacgagtttgccggcaaaatcagtggcctggcaaacgcgatgagcggtcttggtgcaaccatgacggacgatgagctcgtcaagaagctacttgactcagtgcctgaaaagtttttgcacataattgcagcgatagagcaattctgcgatttggacaccatgccatttgaggaggctattggccgcctcaaagctttcgaggagaggatacggaagcacagtgacaattatggggagcagcttcttctcaccacacgcaacactgatgatggtgctggtcgagcccgcagcaagaggtttgataaatccaaggtgatgtgctatcactgccaagagctcggtcattttgcgtttgagtgtccagcaaaaaagaagaacaaggagatagcgcttcttgccacagcatcaagtgatgatgaaccaactctcttgtga

SEQ ID NO: 80391 - DNA, 627 bp, Oryza sativa
  Clone ID: PAT_MRT4530_80018C.1
atgagcggcggcggcgcgccgcctggggcgccggggatgatgacgccgggcgacggcaactccgtcggcatgttcagctccgaccgcatcggcgggttcggctacggcgtcggcgtgtccgtcgggatcctcctcctcatcaccaccatcacgctcgcgtcctacttctgcacgcgcgcgcccgtcaccgcggccgatgcagcggcggcggcgggatcgtcgcggcggcaccgcggtgggggtgggggcggcggcggcggcggcggcggggccgggcacgaacacgacgacgtcgagctcggcatcgacgaggcgacgctcaaggggtacccggaggtggtgtacggccagccgaggaaggaggcggcgaaggcggcgtcggcggcggcgacgaagaagggcggcgcaaccacgtgcagctgctgctcgatctgcctcgacaactacggcgacggcgacgtgctccggatgctgccggagtgcggccacctgttccaccgggagtgcgtcgacccgtggctccggcagcatccgacctgccccgtctgccggacgtcgccgctgccgagccccttgccgacgccgctcgccgaggtcacgccgctggcaatggcgaggccgtcatga

SEQ ID NO: 80392 - DNA, 2574 bp, Oryza sativa
  Clone ID: PAT_MRT4530_80019C.1
atggcacggggctccgcaccgctcgagggtagcgtgctgccgccttcccgcatcgtgagcgagaggcaggccgggctgccgcgccgattcatgccggaatctgccaccggccgggaggtggtcgcgctgggcgagggacgcccggcgccgcattacccggggcggtccgtcttcttcctctctttcgcaatggcagggctggtcccgctattctcttctttcttcatggatgttctggagctttatgatctccagatggcgcacctcacccccaacgcggtaatgacgttggctatcttcgcgcacctatgcgagatgttcatcggggtgcgcccatctctccggctgttccggtggttcttcaccgtacagccggtgtcgccaccgtcggtggtcggtggctgctacttccagccgcgggggccggtgctgaaccgctacattccctgcgtccttcgcaagaagtgggacgactggaagagcgactggttctacacccctctcgccgacgaagcgcgcctccgacttccgagccagcccccggcgcaggcctccagctggcgggcgccggtagatctgggagatggctacgacgccgttcttgaccgcctggcgggtctgcgatcccaggggctcacgggggccatggtgttcggcgactaccttcgtcgccggatcgcgccactccagcggcgcgcccggggcgcctgggagtacaccgggtccgaggactacatgaggacccaccaggggggcagatgggactgggcccctgaggatttcaagatggtggtccaacgggtgctgaatctcagctccgtggaggcatccctcatcccccaaggtgtcctccccctctgcagcgatccagagcgcgccaacatcctgaccatcatgcaggcggtcggggcgtcaggggagcgggctcctcgaggccacgatggcgcgggcgggagccgcaggggggaacaatctaccccgggagggggtcgtgcttctgggccccgtgacgggggcccggggggcagccgccctgccgacgcccgggggaagaggaaacaggaggataccccctccccatctcctccccgagggggcggggcggtgcgtgccagcagcaggcgcccggagggtgctgtgccgacgtcgcagcccgagggggagcgaaaaaagaagcggctccgcaagatgggggggaccgaaccatgccggggaaacctcatctcccccccaaggtggtcgtttagccgacctccacgcagcgagattccgtcgcgcccccctcgccattccaagtccgaccggtctgaggccgaggagacagcgaccgcggaggcccggaggcgggaagctgtccggcgagaagccgcggaccacctccgggaagctgaggaggctgcccaggaagccgtccgggttcgccaggttgaggaggccactcgggaggaggccagtctccaccgggccgggaagtcagcccgggaggcagaggcgacgcgcgcacgccaggcggcctgccaagcccccgacccgactccgcccgaggcgacgacgacttccgaggccacccacgacgaggccgcgggcgcaccgctcggacccgacccttcgggcgacgttcgggacgagccagcctcgggggacgcccctgagtccggcacgtcgattggcgggccgagccgcacagcgcccacaccgaggcggctctcccctctgccttccgccgctccactgaacacagagcccctcttgcaggccctggccgccgtgaacacgacggtgctggacgggttaggtgcccagatggaggtcctgcaagcagagcgggcggagctcgacgcggcgtgggcgcgcgtcgaagaggggcgacgctcggtggaggccatggtggaggcgggccgcaaggcataccgccggcacgcctcagagctcgaggcccgtcggagggagctggcggagatcgccagggaggtggaggaggagcgggagactgccctcatcgccaccgtcgtgctcaacgaggcgcgggacgatctccgccttcaatacgggagccggggcgcgctagactcatcggccggggaggtcgaggccctccgcttggcgggcgaggtagggcccggcatgcttcgggacgccgtctcccgtctagaccgcgccgggcggcaagcgggcctctggggcgagcggaccgcaaagtacgccgccaaccaggggggcctcgcccagcgcctctcagagatggccgggactctccagcggctccccgaggacctcgaggacacgatcaagtcatcctcgagagacctcgcccggggggcagtggagcttgtactggcaagctaccaggccagggacccggacttctccccgtgggcagcgctggacgagttccctcccggaaccgaggacgacgcgcgcgcgcaggtccgggacgccgccgaccacatcgtccacagcttcgagggtacggcccctcggctcgcgtttgccctcgactccgacgaggagggcggcgacggtgctgtggacgacagcgaccacgaggccggcgacccgggagcctcgaagtga

SEQ ID NO: 80393 - DNA, 409 bp, Oryza sativa
  Clone ID: PAT_MRT4530_8001C.1
ccgggctgcaggaattcggcacgagggcagttttgcccgtgtgtctgatgatggcctctctctccaccccacctgctaccgccggcgtctccccgtcgccccgcccttccctcctcgcgtacaagaaggctgctgggctcaccccatctccatggtgcgggtggaggagggcggcggtggccaccgcagccacgagctccaatcggaccgccgcaccagccgagaccattgtcactggaaatgatgtccctctcttgtcttttgctgagtgttgcagaaaggcttgatgaattccatgcatctggaaccagaaatcaaaattacatggccatgtactctagtatttatggtggaattaccacaaatccttctgcaatggtgataccaatcgatgatcacatggtccaca

SEQ ID NO: 80394 - DNA, 495 bp, Oryza sativa
  Clone ID: PAT_MRT4530_80020C.1
atgatgcacacaagaaagcagccgccgacctccctctacatgcagcagccacctccgtcgaagccacaccccgccgctggcctccttctacacgccgcagccgtcgccatccccaaagccacacacagtaccccctgccaccctacctttgcacgcagccgccaccgtcgacctctctctacacgcaatggccgccatcgccccggaagccacgcgcagcagtcatcgctgctctaccacgcgacaacgccgccaccgacctcccactacacgcagttgctccccccccccccccccccccaaaggcatgccccgcagtcgccactgccgaccaccctctgcacgccgcagccgtcgctgtctccaaagccatacgcagccgccactgccgccctccctgtgcgcgtaggcgccgtcactccctccctaagcgaaccaccatcgaccaccctttacacgccacagccgccactgccgccctccctcagcgcatag

SEQ ID NO: 80395 - DNA, 1083 bp, Oryza sativa
  Clone ID: PAT_MRT4530_80021C.1
atgcaccaaaagagacagcgggacgaaaaagaattgttcgcattaggggaagaaaaaaataagagtggtagcgaggagacggccattatttgctatccacactggagctcagcaggtggtcgcgctgggcaagggacgcccggcgccacactacccggggcggtccgtcttcttcctctctttcgcaatggcggggctggtcctgccgtcgccacccgggaggcaacactggcggcgcacgaggccgcctgcgccgaagaggagtccgcactccgcctccgcgaggacgagctcaccgagcgggggcgagctctcgaggaggccgaggccgcggcgcagcggctggcggacagcctgttcctccgcgaggcagcgcgggaggagcaggcgcgccgcaatctggaaggcgcccgtgccgagagggccgcactggatcagcgggccgctgagctcgaggcgcgggcgaaggagctggacgcgagagcgcatagcggcggggcggccgcgggcgacggcgacctagccgcccgcctcgcagccgccgaacacaccatcgccgagctgcagggcgcgctggactcgtccgccggggaggtcgaggccctccgcttggcgggcgaggtagggcccgacatacttcgggatgccgtctcccgtctagaccgcgccgggcggcaggcgggcctctggggcgggcggtgcgcgaagtacgccgccaatcaggggggcctcgcccagcgcctctcagagatggccggggtcctcgagcggctccccgaggagctcgaggagacgatcaagttgtcttcgagggacctcgcccggggggcggtggagctcgtgctggcaagctaccaggccagggaccctgacttctccccttgggcagcgctggaagagttccctcccggaaccgaggacggcgcgcgcgcgcaggtccgggacgccgccgaccacatcgtccacagcttcgagggtacggcccctcggctcgcgttcgccctcgactccgacgaggagggcggtgacgacggtgcggatgacagcgacgacgaggccggcgacccgggcgcgtcggaatga

SEQ ID NO: 80396 - DNA, 861 bp, Oryza sativa
  Clone ID: PAT_MRT4530_80022C.1
ggatccccgggctgcaggaattcggcacgagggagaactagtctcgagttttttttttttttttttttttttttttttttttttcttgtagttagccattaaattaacaacagcaaaacaaggtctgtacatcttgtcttttgctgtattctcccttggcacgctgtcccctccattcttctttttttttgttttctctctggtttttggcttctggttttttggcatataataacagttagattaacaagaatgttttctgaacatgaaggggcttgtacaagatgttacattttatgtatatgacacacacaactctacaactgatattccacatgctgagattctactgatatttacattacaaaaaaagtaattcccgtgctgtcgcggaataagtccgttttacgaactccgcgagatcttgatttttctgttcattttttcctctatgtttttgctatgatctcatgggtgatcggttcttcaggttcatctcaagcttctgcctttctccctcaacttcagcaaactgcacactgagctctgagtacctgccctgcatgtctttcagctcactttctactgccacttgccttctcttcagctcaatcgtatcctgtatcagttcattgatgtccctgaagctctggaatactgctgcttcatcattatgttgcttcaggaatgaactctggaaaaggatgtctgttttcttctttgcttggagtgcttctgctagttcgagttccaaagcaagtactctttccaaggcattgccagaaccaggaagctctttaaatgaaggaaaaatgctccttaaatgttcatttgccatatcagctgtgataatgccctctc

SEQ ID NO: 80397 - DNA, 4350 bp, Oryza sativa
  Clone ID: PAT_MRT4530_80023C.1
atgggttctgtctccggcatcgacgacttcgtcttccctcccgggcaggtgttccgattcggcagcctcgacttcatcaccaacgactttggcaagatttctctcctcgactcggattcaaaccagtcgggaagaggtcggatctccgctccgttcggtatcccgaactcagccgaggtctaccccaagatcatctctcccaagttggctccaaaccactcggacgagatccaatctacttcaacacgaccagatcaagatgatgggtcctatcccccaatcctgatgagactccccgatgatctagctgctgtcttcacgaccaaggcgtctccaacccgaagacctagacggggtccggcttcggcacagatccaatctagctctagggaggtcggcgtcatactccaacccctcgggacagtcttgacggaagaattggatggctacctcagctcccccgctacgaggacgactacacaccccttttctttggcgtattcatggctgacaatgagacggcagaatagcgccgagcccgagaagcagaagaagagcgcacccgacaagaagctgaacgtcgccgactggaggaagaacaacaacgacaagagcaagaatgactacagcgtgaacaacaagatcgtgaacgggctgcaaaggaggctgaggatcgacgacagcgcgccttggaatctgggcgacgagcaccgcaataagatctccgacatcaccgatgacgtcatcatcgccgccttcaccaagggcattcgccacgaagacctagtcggcaagttcgggcataagcctccgaggacagtcaagcagatgtttgaaaaagctattgagtatgccaaagccgaagatgctatttctgcgtccaagcagtcgggcaccacctggaagccgaagaaagatacgccgactactggagggagtggaagtaccagtcacaaggaccgcaagcgtaagcccgaggaactcgtggcaactactgcaccatcctcccgacaacgttcgcgcatcaacaccttcgataagatcatgaactcccaatgtccgcaccatccaaattctaatcacgtagccaaagattgcttcgtctacaaacaatttgcagagcagtatgccgagaatacacacaaaagtattgacggagatcaaagtacgtcaaagaagaaggatgacgaagatgatgcctcgactggttttcaggactattgcaaggaactcaaccacatctttggcggacccctggcatatgaatccaagagaaaacaaaagttgactgaacgagagatcaatgctgtccagcccaacacgccccaatatcttcggtggtcagaaacgacaatcaagtttgaccgctcggatcatcccgaccgagtggtccacccggggcggaaccccctggtactagacccagtgattcgcaacgtcaagctccgcagatccctcatcgatggtggcagcgcagtcaacatcctttttgccaagaccttggacgacatgcagatccctcgtgaagaactatctgctacactactcggccagatcactcttccggttacttttggcactcgggagaactaccgcacggaaaacatttgttttgaggttgctgatttcgagacggcgtatcatgccatacttggtcgaccagcgctagccaaatgccgggtcctcgaggagtcatatcccttcggagtgacatcaaacaagccgtcacgtgtcatatcccagacccatgagatcgcgctctcccgagaagaaatccgactggccgcgtccacagcaggcgaaggagaagtgcccgcaaccaagatgcccaagagcggagaaagcgatgccaagaccaaaaagattcctttagatccctctgatccaactaagactgctgtaataggcgctgagttagattgtatctttgcgtggaaaccatctgatatgcctggtattcctagagaggtgaatgagcactctttacacgttaaggaagacgttaaacccatcaagcaacgactccgccgttttgcacaggataggaaggatgcgatcaaggaggaattgaccaagctgttagcagcgggcttcattaaagaagtccttcatcccgactggctggctaacctagtcctggttcggaaaaagacggggcaatggcgcatgtgtgtcgattataccgacctcaacaagtcttgtcccaaagatccttttgggttacctcgcattgaccagttttttcgactaaaagaatccaattgcttgaagaccccatttattacgccttttggggcctactgctacatcaccatgccctttggattgaaaaacgcgggagccacctatcaacgcatgattcagagatgtttttcaactcagatcggcctcaatgttgaagcttacgttgatgatgtagtcgtcaagaccaagcagaaggatgatctgattgcggatttagaagaaacctttgctagcatccgcgctttcaagatgaaactaaaccctgaaaagtgcatcttcggagtaccgtcagggaagctgcttggattcatggtgtctcatagaggcatacaggccaacccagagaaaatcaacgacattctcaacatgaaaccgccgagctcccagaaagatgtccaaaagctgactggttgcatggcggcgctcagccggttcgtttcacgactcggagagcgggggatgcccttttttaagctgttgaaaaaagccgacaatttccagtggggacccgaagcaaaaaaagcctttgaagatttcaagaaacttctcactactccaccagttttggcctcaccacatccgcaagagccgctgttgttatacgtgtcggcgacttcccaagttgtgagcacagtcctggttgtagagcgtgaagaagaaggccatgttcaaaaagtccaacgaccaatctacttcgttagtgaggttttggccgactccaatgcaagatatcctcaagttcaaaagctattatatggtgccttaattaccgttaggaaattatctcactacttccaaggtcactcggtcacggtggtcacatcattcccacttggggatatacttcataatcgcgaagcaaatggacgaattgcaaagtgggccttagaattgatgtccctggatatatccttcaagccacgaacttcgatcaaatcccaagctttagccgactttgtcgccgagtggaccgagtgccaagaagacatacccgaggagaaggtggagtattggactatgcattttgacgggttgaagaggctttcaggcagtggagcgggggtcgtcttaatctccccgattggagaaagattcagctatgtattgtggatacatttttctgcatcccataacgtggcagagtatgaggtgcttcttcatggattaagtattgcgatctctttgggcattcggcgtttgatcgtacgtggagactctcagttggttgtcaatcaagtcatgaaggaatggccctgccttgatgataatatggctgcttatcggcaggaagtacgcaagttggaagacaaattcgatggacttgagctcacccatgttcttcaacacaacaacgaagcagctgacagattggctaatttcggttcaaaccgagaagcagctccttctgacgtattcgtcgaacatctttatgagccgactgtacgaaggaaagaaataatcgaggctacggacacccaagatgtaagcatgattgaagccgactggagagagcccctcataagatttttgaccatgcaagaactcccttcggataaagacgaagccgagcggatctcctggtgcagcagactttatgtcatacatgaaaccgagttatacaagaaaagtccatcaggaatcctgcaacgctgcgtgtctttggaagaaggaagacaattgttaaaggatatacattcaggcatttgtggcaatcacgctgccgcgcgaaccatcgttggcaaggcttatcggcagggttttttctggtctacagctgtatccgacgccgacaaaattgtgcgaacatgcgaggtttgggggcttgatatggttggcccgttcaaaaaggcagtcggcggttatactcatctctttgtggctgtcgacaaattttccaagtggatcgaagctaaaccggtcattaaaattacggcagacaaagctagagatttcttcattaacattgtacaccggttcggggtacccaatcggatcatcactgagaacggcacccaatttacgggcggagtattcaaagatttttgtgaggacttcggcatcaaagtttgttatgcctctgtagcgcatcccatgagcaatggatag

SEQ ID NO: 80398 - DNA, 2757 bp, Oryza sativa
  Clone ID: PAT_MRT4530_80024C.1
atgggtttcgtttccggcatcgacgactttgtcttccctcccgggcaggcgttccaattcggcagcctcgacttcatcaccaacgacttcggcaagatttctctcctcgactcggattcaaaccagtcgggaagaggccagatctccacctactcccccggcatcgactcgcgaccatcggagatcgtggagtacgacgacttcggctaccgctacgactacgccacctcgacgacttcgacgaagggtttgaaagacaactacacacccctttattcggcattttcatggctgacaatgagacggaagaagagcgtaaagcccgagaagcagaagaactacgtgtacaacaggaagccgaacgacgccgactggaagaggagcgccaagcataagagcgagaacggctacaatgtgagccacaggaacgcgaacgggctgcaaaagaggctgaggactggcgacaacgtgccctggatgccgggcgacaagcataggaacttattgggcaacaagacgtcgaggggacagcggcgccccgtcgatcttcgcgatactatcaaccagcgccgcgcggcaagaggctacgctccccaccattctccagatcgctacgacgacgacgtggatggagttgctgccttcacaagcgacctgcgtcgagtggattggccagccggcttcaagccgattggaatcgagaagtatgacggcaccactaacccggagtcttggctcaccgtctacggtctcgcaattggcgaattatttgcctgtggccctagcggattctgcccggtcctggcttcacggggtacctttgaacgccctggtacacagtttgatctctacaacgtcattcagaagtctagagaatcccttcgagattacatccgacgcttttccgagcaacgcaacaagatctccgacatcaccgacgacgtcatcatcgccgccttcaccaagggcgttcgccacacagacctagtcggcaagttcgggcgcaagcctcccaggacggtcaagcagatgttcgaaaaagccaatgagtatgccaaagccgaagatgccattaccacgtccaagcagtcgggcaccacttggaagccgaagaaagatacaccgactacaggggggagtggaagtaccaatcacaaggatcgcaagcgtaagcccgaggaacttgtggcaactactacaccatcctcccgacaacgttcgcacgtcaacacctttgacaagattatgaactcccaatgtccgcatcatcccaattccaatcacgcggccaaagattgcttcgtctacaaacagtttgcagaacaatacgccaagaacgcacataaagcctccgacggagatcaaagcacgtcaaagaagaaggatgagaaagcaaaagctgaccgaacggagatcaacgctgctcaacctgacacgccccaatatcttcggtggtcagagacaacgattaagtttgaccgctcggatcatccagaccgagtggtccacccgggacggtaccccctgcactcgggagaatttccgtacagagaacatcatgtcatactcggacgcccggcgttagccaagttcatggctgtcccgcactatacctacatgatgatgaagatgcctggtcctcgaggagacatatccctgcggagtgacatcaagcaagccgtcacatgcgacaaggaaagctgtgagatggcccagacccgcgagatcacgctcgcccgagaagaaatccgactggctacgtccacagcaagcgaaggagaagtgcccgcaaccaagatgccaaagagcggagaaggcgacgccaagaccaagaagattcccctagattcctctgatcctactaagactgctgtaataggcgctgagttagatttggtgattgagcactctttacttgttaaggaagacgctaaaccaatcaagcaacgactccgccgttttgcacaggataggaaggatgcgatcaaggaggaattgaccaagctgttagcagcaggcttcatcaaggaagtccttcatcccgactggctggccaacccagtcctagttcggaagaagacgggacaatggcgcatgtgtgttgattacaccgacctcaacaagtcttgccccaaagatccctttgcgttacctcgcattgaccaggttgtaagcacagtcctagttgttgagcgtgaagaagaaggccatgttcaaaaagtccaacgaccaatctacttcgttagcaaggttttggctgactccaagacaagatatcctcaggttcaaaagctgttatatggtgttttaatgaccgtcagcaaattacctcactacttccaaggtcactcggtcacggtggtcacatcgtttccactcggggatatacttcataatcgtgaagcaaatgggcggatagcaaagtgggccttagaattgatgtccctggatatatccttcatgccgcgaacttcgatcaagtcccaagctttagccgacttcgtcactgagtggactgagtgccaagaagacatgtgtcatgcccagaaattcacgaaccagaatttcgaagctgaatgtgcattaaatccctgtctaggaccagccagggtaatccttgacgacagcgacgaaatcaacttcggtaagacacttcccactaggaagatcttcagctctggtgtgggggaaaagagagcaagactgagtactaccaactgtattcagcaagtcataccggaagaggagttgaactaa

SEQ ID NO: 80399 - DNA, 345 bp, Oryza sativa
  Clone ID: PAT_MRT4530_80025C.1
atgggggcaaaagcgcaatccaatgcccagatctggcgcggagaaacgaggaaaaggcacaatggtgcattggcgaggagtcttggtgcggtggatagggtcaccaaagtggagcagtggcgtgttggggcagctgagatagagcgcgacggaaggcatggagatcatcaaggagtaacagtggccggaggtggccgcaagaagtgggaggtggcacctgttgggtcgcacggggagacaaccgtcgggctgaacgatgaggaggtgatgggtgatgtgacttcaactcaagatggcagctcgatcagtcgtcacaacaggcacaattggtggatcagatggtga

SEQ ID NO: 80400 - DNA, 5650 bp, Oryza sativa
  Clone ID: PAT_MRT4530_80026C.1
ctaagcataaaatcgacgaaggtgttcaatattccaagaattgttgatgagagtaccgtcttcgcgcttgagtcgataagaacctggccgagtgacttcagcaattatgaacggtccttcccataagggagataatttatgccgatcctgtgttgtttgaattttcctcagaaccaggtcgccgactaaaaaggctcgcgatcgaacattccgattatgataacggcgcaacccttgcaaatatcgagtcgaccgaattaaaactgcttctcgggcttcttctagtcgattgatgtcgtctactcggccctcttcatagccctcctcgttgaagttccgaaatcgtaatgattcaaattccacttcactcggcaacattgcttctgcgccataaaccaaaaagaacggcgactggacggtagcccgactaggagtagtgcgtaaagaccaaagtacggactgcagctgatctacccacttgccagcatatggacgtagtcggtcaaaaacttgtgctttgatcccttgcagtatcatgccgttagcacgctcgacttgtccgttactcatagggtgtgccacggaggcgtaacaaattttaatgccaaagtcttcacaaaagtctttaaattctccgccagtgaattgagtgccattatcagtgatgatccgattaggtactccaaaccgatgcacaatgttgatgaaaaaatctctagctttatctgctgtgatcgtgatgaccggtttagcctcaatccacttggagaatttatcgatagccacaaagagatgcgtgtaaccgccgactgcccttttaaacgggccgaccatgtcaagcccccagaccgcaaacgggccttgaatatccatggcttcgactgtctcttttctgggcacgatcggttcgtaaagatgttcgacgaacacatctgaaggagctgcttcctgttttgaaccaaaattggccagtctatcggctgcctcattgttatgtcggaggacatgggtgagctcgagtccattgaatttattttccaacttgcgtacctcttgtcgataagcggtcatattatcatctagacatgaccactctttcatgacttgattaacaaccaactgagagtctccacggacgattaatctgcgaatacctagagagatggcaatccttaatccatggagcagcgcctcatattccgccatgttatgggacgcagaaaaatgtatccacaatgcgtagctcaatctttctccagtcggagaaatcaagacgaccctagctccagtgcctgtaagcctcttcgacccatcaaaatgcatagtccaatattccatcttttcctctggcatgtcttcttggcactcggtccactcggcaaggaaatcagctaaagcttgtgacttgatcgaagttcgtggcttgaatgatatgtccaaagacatcaactctaaaacccacttcgcagtccgtccgtttgcttcgcgattgtgaagtatatctccgagtggaaacgatgtgactaccgtgaccgagtgactttgaaaatagtgagataatttcctgacggtaattaagacaccatataataacttttgaacctgaggataccttgtcttggagtcggctaaaacctcgctgacaaaataaattggtcgttggactttttgaatatggcattcctcttcacgctcaacaaccaggaccgtgctcacaacctgggaggtcgccgacacatataacagtagcggctcttgtggatgtggcgaggccaaaactggtggagtggtgagaagtttcttgaagtcttcaaaggctttctgtgcttcgggtccccactggaaattgtcagtcttcttcagcaacttgaagaagggcatccccctctcgccgagtcgtgagacgaaccggctgagcgccgccatgcaaccagtcagcttttggacgtctttttgggagcttggcggtttcatgttgaggatggcattgattttctccgggttggcctgtatgcctctttgagataccatgaatccgagcaacttccctgacggtactccgaagatacacttttccaggtttagtttcatcttgaaagcacgaatgcttgcaaaagtttcttctaaatccgtgatcaggtcacccttctgcttggtcttgacgactacatcatcaacataagcttcaacgttgcggccgatctgagctgaaaaacatctctgaatcatgcgttgataggttgctcctgcgttctggtcaatgcgaggtaaaccaaaaggatcttgagggcaagacttgttgaggtcggtgtaatcgacacacatgcgccattgcccggtcttcttccaaactagaattgggttagccagccagtcgggatggaggacttctttgatgaagcccgctgctaacagcttggttaattcctctttgatcgcgtccttcctatcctgtgcaaaacggcagaagtcgttgcttgaagggtttggcgtcttccttaacatgtaaagagtgctcgatcacctctctaggaataccaggcatatcagatggtttccatgcaaagatataatctaactcagcgcctattacagcagtcttagtaggatcagagggatctagtggaatcttcttagttttgtcgtcgccttcttcggtctttgacagcttggtcgcaggcacttctccttcgcttgccatggtcgcagccagtcggatgtctttgcgagcgagagtgatctcgcgggtctgggccatctcgcaactttctttgtcacatgtgacggcttgcttgatgtcgctccgtagtgatatgacacctcgaggaccaggcatgaccgtcaacaatgagtcagctacggtcttcaacataggtaaatttgggatgcaagttacggggttcaagtttcgtgacttaaaatatgcatgcaactcaatttcacgaaggctagcagcaaccttatcacattctacaaggagctccgaaagaccaagtttcctatgaaatcttttcttgaagacgttattcatactttcgcaactttgagtcgaggtcatatcagttgtaaaagagtcacggaacacaatagcccacttcttccttgcatcccaaatctgcattgttcttttcaaagtttctgtgtttcttgattttgggcgtagagtgtctgttgcaccaatttcagttatgacacccataatatcaacatagaaagcatttctgtccacaagagacggggcgtcttgaaaaggtgtcaatgaaaaagttatggcaggaaaatcatcaaaagcatcaatgcattcttctaaggttgtccatttagtgaatgagatcatcaaagggttcgtaactggcctatatgttctgtttgcatatctgacagagaaggagtcaaagtagtaaaccttcccttcctgtagaagagtcctaagcttaatcatggcaggtggatagatttgaacatggatgctattgcccttttcatccagcaagacaagatcagtgtggtagatctttgtttcatcattcagatcatggtagtcccattgcctagataccctcgctttgatccgtttatcagtgtccccatacataaggtctgaaataagcacgtacgccattggaaggaggtcgaaatctggaatttgctctgagcattttgagattgtatcacagctaagatatattcttgattctcctgggagtaaatcaatagtataattgtttatttcatcaactactgcattcgcagggcaaacaatggcacgagaagatagatatgtagggtttttatatgatgcaagaaagtctggatacacttcgttgacaatagcaacgattttgtcaccatctgttacaacaagaagatcatcgggaattataatccatgagggttgagcttcaccttcttttgcaatcataggcaatgttccgttaccaacagctagaacccatgtactgaattcatgcaattcaattattgtgttttctggtagggttggatttaacagtctcatgtttatattcatggataacaacgtcacatgtttccataggtctaaatttgtaattgatgcattaataacagcgaggcgtgaacctttaggaacaacaggtaagatttgtctaaagtcaccacccaaaacaacaggttttcctccaaaaggtatgattgaatttgtaggacaagtttcagaaagaatgttacgtaatgtgcgatccaatgcttcaaaacagtgcctacgtgtcatcggagcctcatcccatataataagtgcactttcaatgaggaggtcaggcaacatagttcctcgttttatattgcaaatgctagtttcatcaatgtcaattggaattttaaatcgggagtgagctgttctacctctaggtagtaggagagatgctacacctgatgaggcaacagcgagcacaatcttattttgtgatctaagttttgcaatcatagcgttccatagaaatgttttcctagtcccaccatgtccactcacaaagaaaaatccaggtttgtttgcactgattgaggaggttatggtgtcaaaaatctttttctggtcgatatttagctgtgctattaaagaattaaccaattcatatcctagacgatctgtgtcatagtcaggtatctcagcacagatgaagccatctattacagatgtttctctaatatcagtgataaaatcatttactttcatgttaaatactcgcacaattacatcagctctatctgatggttgttggccaggttcaaatcgaatagtttctgcaatttcttgccacttaaagttacaagtgaatgtgacaaataaatcaggcgagccatacacacgacagattgccatcgcatcctgataattcatcaccatatatcttctaccgccggtaaagctagcaggaagtatctgacgtttgccaacagaatctccattagtaacacctctatcaatcgcatctacgattccttcatgttcagagaggcggtctctagcatatctgaaatttttaacaagttcattattggtatcaaacatgcgtgttaaggcgctaacaatttcagggtctggtctatcagcattgtcgcaatcattttcgaaaatatttaatcgattttggatttcattgtcagaatcatagatatatagctgcgcaaatttaggtggtgcacctcgtgatggcagaagagtacaaattctgtgatgcacaacaccattgattttgaaaacataaggcgcattcccattattaattgacttgtcaatagcctttaaagattgaatgtaatccttatctgtctgggatgaactaccactggctttcctatttgcaacctctgaaccctgtttataccctgttgtgacatctggggagtatatcccagcaacacactgttgttgaggacctgaactgaagatgaggagaataaaaccaagtctgcttgcaccaattcttccacctgcttgattgaaccagcagcccgaacattccttggcaaaatcaatcaagaacccttgaagcaccgcttcagcccgtgcaaatccggcccaggattgcagccgtgggtcgtggccaatgtgcgaggactcagcagcatccacgccggcggcaaacatcaacgctttgacctcctccat

SEQ ID NO: 80401 - DNA, 400 bp, Oryza sativa
  unsure (1)..(400): unsure at all n locations
  Clone ID: PAT_MRT4530_80027C.1
gcgaacggcctaaatcttctccttggagggcctcccatggattccctgggggccttcgccatacccatggctctcatggcggttcaacctggcccgcaaatgactgccttagctgctgcgacgtcaacggcgatggctgcctaagcgccctggcctaccgacatgcccggatcttctataccagacgccatctgaaatctcctacaccatgagcacagtgttgctagcgccaccttcaaagccaacagtggaagagtactgtctccgncgacaatgaacttcaactactacgactacaggaccctgactcgaatcgacgccccttccctggatgcatttaaccgcttgacccccgcacagaacgccctcaaaaacagaatgctctctccgacttcaacgg

SEQ ID NO: 80402 - DNA, 3924 bp, Oryza sativa
  Clone ID: PAT_MRT4530_80028C.1
ctatttctttcctcggtacagttggttcataaaaatgttcaacaacacgtcggaaggagctgcttctcgttttgaaccaaaattagccagtctgtcggctgcctcattattatgtcgaagaacatgggtcagctcaaggccatcaaatttatcttctaacttgcgtacctcctgccgataggcggtcatattatcatcaaggcaggaccactctttcatgacttgattaacaaccaactgagaatctccacaaactatcagacgccgaattcccaaggagatcgcaatccttaatccgtgaagtagcgcctcatattccgccacgttatgggacgcagaaaaatgtatccacaatatgtagctcaacctctctccagtcggggagattagaacaacccccgctctggtgcctgaaagcctctttgacccataaaaatgcatagtccaatactcgatcttctctgcaggcgtgtcttcttggcacttggtccactcggcaacgaagtctgctaaagcttgggactgaggatatcttgtcttggagtcggccaaaacctcgttgacgaaatagattggtcgttggactttttgaagatggccttcttcctcacactcgacaaccaggaccgtgctcacaaccttggaagtcgccgacacgtataacaacaacggctcttgcggatgtggtgaagctaagactggtggagtagtgagaagtttcttgaagttttcaaaggctttttgtgcttcaggtccccactggaagttgtcggttttctttaacaacttgaaaaagggcatcccccgctcgccgagtcgtgagacaaatcgagtgaacgccgccatacatccagttaacgtttgaacatctttctgggaactcgatggtttcatgttgatgatggcgttgattttctccgggttggctcgtatgcctctatgggacaccataaagccaagtagcttccctaactgtactccgaagatgcacttttcagggtttaatttcatcctgaaagcgcggatgctcgcaaaggtctcttctagatccgtaatcaaatcatccttctgcttggtcttgacaactacatcatcaacataagcttcaacgttgcgaccaatctgagttgaaaagcatctctgtatcatgcgttgataagttgctcctgcattctttaatccaaaaggcatggcgatgtagcagtaggccccgaagggcgtgatgaacgaagtcttcaagcagtcggactcctttagtcggatctgatgatatcctgagtagcaatccaaaaaactgagtaactcgcagccagccgttgaatcaactacctggtcaatgcgaggtaacccaaagggatctttgggacaagatttattgaggtcggtgtaatcaacacacatgcgccattgccccgtcttcttccgaaccaggactggattggccagccagtcaggatgtaggacttccttgatgaagcctgctgctaacagcttggtcaattcctccttgatcgcatccttcctatcctgtgcgaaatggcggagtcgttgctcgataggtttagcatcttccttaacatgtaaagagtgctcaatcacctctttagcgcctattacagcagtcttagtagggtcagagggatctagaggaatcttctcggtcttggcgtcgccttctccgccttttgacatcttggttgcagacacttctccttcggttgcagtggacgcagccagtcggatttcttctcgagcgagcgcaatctcgcgggtctgggctatctcgcagctttccttgtcgcaagtgacagcttgcttgatgtcactccgcagggatatgactcctcggggacctggcattttcatcatcatgtaggtgtagtgcgggacagccatgaacttggctaacgccgggcgtccgagtatggcatggtacgttggcttcaattccgtgcgagggatttgcatgtcgtccagagtcttggcgaaaaggatattgagtgcagtgccaccatcgatcagggatcttcggagcttgatgttgcaaaccactgggtctagtaccagggggtaccgccctgggtggaccactcggtcagggtgatccgagcggtcaaacttgatagttgtttctgaccaccgaagatattggggcgtgtcgggctgaacagcattgatctcccgttcagtcagcttttgctttggcttggattcataagccaggggtccgccaaagatatggttgagctccttgcgggggtcttggaaaccagtcggggcatcatcttcatcatccttcttctttgatgtgctttgatctctgtaagtcgacttgcgtgcgttcttggcgtattgctctgcgaactgtttgtaaacgaagcagtctttggccgcatggttggaatttggatgatgcggacattgagagttcatgatcttgtcgaaagtgttgacgcgcgaacattgtcgggaggatggtgtagtggttgccacaagttcctcgggcttacgcttgcgatccttgtgattggtacttccactccctcctgtggtcggcgtatctttcttcggcttccaagtggtgcccgactgcttagatgcggtgacggcatcttcggcttttgcgtactcattggctttctcgaacatctgcttgactgtcctgggaggcttgcgtccaaacttgccaactaagagatcatggtgaatgcccttggtgaaggcggcgatgatgacgtcgtcggtgatatcggagatcttgttgcgttgctcggaaaaacgtcggatgtaatctcgaagggattctccggacttctggacaatgttgtaaagatcgaactgggtgccagggcgttcaaaggtgccttgaaaattggcaatgaagtggtcgcgaagttccgcccaagatccgatcgtgccacggggtagcccgtgaagccaggaccgggcagaatccgctagggccacgggcagatagtttgccatagctttgatgtctcctcctgctgcgcgaattgcgagactgtagacggtgagccaagtctcagggttagtggtgccgtcatacttctcgattccagtcggcttgaagccggctggccaatccactcgacgcaggtcgcttgtgaaggcagcaactccatccacgtcgtcgtcgtaacgatctggtgaatggtgggggatgtagcctcttgccgcacggcgctgattgatagtttcgcgaagatcgatgggacgcctgcgatgtggggagcggggacattcagctcgacgctccctgtgtcggtcaggaggcgagtgaacggattgctcgtcgtgatccctgctcctacgactggttccggcgccgacgacgctgaggctcggttggtgatagtcttgagattgaagaggcggaactcggctgccagttggcgtgcggacactcgcggagttaaccgggaccgaagctgcgatcatggtcttggtctggttcaagatgttgacgacgtgattggcctgattgagtgcgtcttccttgaggagggtgtcgaggagggtgatcggcgttgttcttcttcttctcgggcttgacgctgtttttccgtctcgttgtcggccatgaaaatgccgaagtagagggggcgtgtagttatcttcatagccttcgtcgaagtcgtcgaggttgcggtagtcgtagcggtagccgaagtcgtcgtactctacgatctccgttggtcgtgagtcgacaccgggggagctgaggtagccgtccaactgtttcgtcgaaaccgtgccgagaggctggtctcttcccgactggttcgaatccgagtcaagaagagaaatcttgccgaagtcgttggtgaagaagttgaggctgccgaaccggaacgcctgcccgggagggaagacgaagtcgtcgatgccggagacgaaacccat

SEQ ID NO: 80403 - DNA, 1473 bp, Oryza sativa
  Clone ID: PAT_MRT4530_80029C.1
atgtttatggccgtcccgcactatacctacatgatgatgaagatgcctggtcctcgaggagtcatatccctacggagcgacatcaagcaagccgtcacatgcgacaaggaaagctacgagatggcccagacccgatatcatcagattcgactaaaggaatccgactacttaaagacttcattcatcacacccttcggggcttactgctacatcaccatgccttttggattaaagaacgcaggagcaacttatcaacgcatgatccagagatgtttttcaactcagatcggccgcaacattgaagcttatgtggatgatgtagtcgccaagaccaagcagaaggatgatttgatcacggatctagaagagacctttgcgagcatccgcgcttttaggatgaaactaaaccctgaaaagtgcatcttcggagtaccgtcagggaagctgcttggatttatggtgtcccacagaggcatacaagccaacccggagaaaatcaatgccatcctcaacatgaaaccgccgagctcccagaaagatgttcaaaagttaaccggctacatggcggcgctcagccggttcgtttcacgactcggcgagcgagggatgccttttttcaagctgttgaagaaaaccgacaatttccagtggggacccgaagcacaaaaagcctttgaagacttcaaaaatcttctcactactccgctagtcttagcttcaccacatccgcaagagccgctgttgttatacgtgtcagcaacttcccaggttgtaagcacagtcctggttgttgagcgtgaagaggaaggccatgttcaaaaagtccaacgaccaatctacttcgttagcgaggttttggctgactccaagacaagatatcttcagccgcgaacttcgatcaagtcccaagctttagccgacttcgtcgccgagtggactgagtgccaagaagacatgcctgaggagaagatggagtattggaccatgcattttgacgagtcgaagaggctttcaggcactggagcgggggttgttcaaatttccccgactggagaaagattgagctacatattgtggatacatttttctgcgtcccacaacgtggcagaatacgaggcgcttcttcacggactaaggattgcaatctctttgggaattctgcgtctgatagttcgtggagattctcagttggttgttaatcaagtcatgaaagagtggtcctaccttgatgataacatgaccgcctactggcaggaagtacgcaagttggaagacaaattcgatggacttgagctcacccatgttcttcgacataataatgaggcagccgacagactggctaattttggttcaaagcgagaagcagctccttccgacgtgtttgttgaacatctctacgaaccaactgtaccaaggaaagaaacaattcaggctacggacactcaagacgtaagtatgattgaagccgactag

SEQ ID NO: 80404 - DNA, 142 bp, Oryza sativa
  Clone ID: PAT_MRT4530_8002C.1
atggagatcggcgcgacggcagtggcaggcgacggacgaagggggtctggtgcccgaccgaccgacggatgtggtgagtcgagggaggccaaggccgtaagcggtatgcacgtgtttggtgcggccaatattaattcctcgg

SEQ ID NO: 80405 - DNA, 3411 bp, Oryza sativa
  Clone ID: PAT_MRT4530_80030C.1
atgggtttcgtttctggcatcgacgacttcgccttccctcccgggcaggcgttccggttcggcagcctcaacttcatcaccaatgacttcggcaagatctctctccttgattcggattcaaaccagtcagggagagaccaggtcgtcgtgccgttcggtattccgaactcggccaaggcctactccaagatcatccctcccaagtcggcttcaaaccactcggacgagatccaatctactcttccgcgatcagatcaagacgacgggtcctatcccccaatcctgatgaaacttcctgatgatttggccgctatcttcacagtcaagacatctcctactcgaagatctaggcgagctccggcttcggccccgatccgatctagatccagggagtctcgacggaagagttggatggctacctcagctcccccggtgtcagttctcgaccaaccgagatcctcgactatgatgacttcggccaccactacgaccacggcgacctcgacaacttcgacgatagctatgaggataactacacgcccctcttcttcggcgtattcatggctgacaacgaaacggaggaacagcaccaagcctgagaagcggaccaagatcgcgcacggcaagaagctgaacgtcgccgactggaggaagagcgacagcgacaagagcgagaacgactacagcgaggctgaagatcgacgacagcgcgccttggaatctgggtggcgagtgagagagctcattgggcaacaagacgtcgatgggacagcggtctttcgcaccccccagcagaacgtggttgcagcaatcactctcctcgacaccgtcctcaaggaagacgcattcaaccaagctgatcatgtagtcaacatcttgaaccagacgaagaccatgatcgctgcatcggttccagccaactccgcaagcactcgcaccccgactggtagccgagtccctcatattcgatctcaagactatcaccagccaagcctcagcattgccggcgccggatctagtcgcaggagcaggggacatgatgaacggtctgttcgttcgcctcccgaacgatatagggagcgccgagttgaactaccacactccccacatcgaaggcgccccatcgatcttcgcgacaccatcaaccagcgtcgcgcagcaagaggccatcattcaccggatcgctacgacgacgatgtggacggagttgctgccttcacaagtgatctgcgtcgagtggattggccagccggctttaagccggctggaatcgagaaatatgacggcaccaccaaccctgagtcttggctcaccgtctatggtcttgcaatctgcgcagcaggaggagacagcaaagccatggcgaattatctacctatggccctagcggattctgctcggtcatggctccacgggctaccccgcggaacgatcggatcatgggcagaactacgcgaccacttcatcgccaacttccagggtacctttgaacgccccggcacacagttcgatctctacaacgtcattcagaagcctggagaatcccttcgagattacatccgacgcttctccgataaacgcaacaagatctccgacatcaccgacgacgtcatcatcgccgcctttaccaaaggcattcgccacgacgacctagtcggcaagttcggacgcaaacctcccaggacggtcaagcagatgtttgaaaaagccaacgagtatgccaaaggcgaagatgctattaccgcgtccaagcagtcgggcaccacttggaagccaaagaaggacacgccgactgcaggagggagtggaagtaacaaccacaaggatcgcaagcagatagcaattaagttcgaccgctcggatcatcccgaccgagtggtccacccggggcggtaccccctggtactagacccagtggttcgcaatgtcaagctccgacggactctcatcgacggtggtagcgcactcaacatccttttcgctaagaccctggatgatatgcagattgctcgcacggaattaaagctgagtaatacacccttccacggtgttatcccaggattgtcagctacaccactcggccagatcacccttccagttaccttcggcactcgggagaactttcgcacagaaaatgtttgtttcgaagttgctgatttcgagacagcatatcatgctatactcggacgaccggctctagccaaattcatggccgtcccacactacacctacatgatgatgaagatgcccggtcctcgagggccacgaacttcgatcaagtcacaagctttagctgatttccttgccgagtggaccgagtgccaagaagacatgctagagaaaaagatggaatattggactatgcattttgatgggtcaaaaaggcttataggcactggagctggggttgttttaatctccccgactggagaaagattgagctacgtattgtggatacatttttctgcgtcccataacgtggcggaatacgaggcgctactccatggactaaggattgcaatatctctagttattcgccgactaatcgtccgtggagactctcagttggttgtcaatcaagtcatgaaagagtggtcatgcctagatgataatatgaccgcttatcgacaagaggtacgcaagttggaaaataaatttgatggactcgagctcacccatgtcctccgacataacaatgaggcagccgacaaactggccaattttggttcaaaacgggaagcagccccttctgatgtgttcgtagaacatctttacgaaccaaccgtacccagaaaagaaacaattgaagccatggatactcaaggcgtaagcatgatcgaaaccgactggagagaacctttcataaaatttttgaccaaacaagaactccctcaagacaaaaatgaagccgagcggatttccagacgcagcagactttacattattcatgaggctgagttgtacaagaaaagtccatcaggaatactgcagcgctgcgtgcctttggaagaggggagacaattgttgaaggatatacattctggtatttgtggtaatcatgccgccgcacggaccattgtcggcaaagcttaccggcaaggctttttctggcctacagctgtgtctgatgctgacaagattgtgtggacgtgcgaaggatgtcaattttttgccagacaaattcatctgccagcccaagagttgcaaaccatcccgttgtcctggccgtttgcggtctgggggcttgacatggtcggcccatttaaaaggatagtcggcggttacacgcatctctttgtggctatcgacaaattctccaagtggattgaggctaaacaagtcatcacgatcacaacagataaagctagagatttttttcatcaacattgtgcatcggtttggggtacctaa

SEQ ID NO: 80406 - DNA, 261 bp, Oryza sativa
  Clone ID: PAT_MRT4530_80031C.1
atggaggaggcagggaggctgacaagctcctccaagtccaaatccgttgttgccgacaccacctccactgcgcttgtcgtagcctccaagcatgggagaggagtaagacagcggcttcgaggtcaggcagtcgccggcgagcaggatgccgcacggccgcagcggcagcgcgcagccgccggctgcctcgggcctcagcgtggaacggcggacgccgacctgcaggctgcagctgtgcagcgcctgctcctgctcggctga

SEQ ID NO: 80407 - DNA, 2743 bp, Oryza sativa
  Clone ID: PAT_MRT4530_80032C.1
ttttagtatttttattctgttcaaatctccaacaaaacatgcctattatttcagtactcccatgaggaaaatcatgattcgtgcaaaagaatagcatcaactgatcaaccaaattttgactagaaataggcgtgacaccctattattgggctggaaattacatatctagaagctaccacccaacagtgcaaggtttccaattatgcagcacaatcttgaatttgctacttcactctcccagatcagcaccaaaatttggtgcaacaagcagcatctgagagggtgacactctgacagggaggttcctctgcaacagagctataacatgagaaaagtgcttcttgatcgggtaggtcagcaggtgcccaggaaggtcatcgttaagctcatcgctcgcgtagaggtcccagtacttgtcagccatcttgttcaccctctgaacacactccaggctctctgggttcaggaagttgtcatgcagcatgccaaggtgctcataccacaacgacatccggaaaccgtggatttgtcctcttgcaaccaggcccttggtgttcaggtggcatggctggaatgcacccatggcgatctcggagtctctgcccccatccatggacctctggttgatgttggcagatccaacaatgatgtactcgtcgtcaactatcatcatcttggagtgaacatagatcatgaaccggcgtgccttctgtgccttagcatagtctgtgccatccaaagggcgacctgcaggttcatactcaccattcaactttacttccctgttccctaagcagaagaaggtaaggtaatccctcgggtcagcattgatcctcttcgcctcaagtgcaacggcaatatcatagtacatcatctccattgtcctcctctgccaatccagtattgcctgcactgatccactagcaggaggtccttcaggccacattggcagcacaacatagactgcaaaacgctcaccagcttcaatcttgttcacaatcttcagagaaatctctctgggaatcagatgcaacgcctcaatgtcttctggtctgatgccatcggctttccatgcaaatgagctgccaaggaagtactgattctcgatgtagatgaagttcttggcgcggcgaattgcgtggatgtatgcatcttggatgctcctgtcaatggtgttgttcttgccactgacaaggcctgatcttgcagcagcctctggagtgctagggaagccaaagcaggcgccgccatcgatggaccggaacaactgaacactccaggcctcaccgtcatcggggaacatcaccggagacggcggaataatgaggtcggccatggctttgaggtctaggaggaggtccttgtcaccgccttgcttcctccaccgctgctcgaagttgtagagcacatcccaagccgcggggccttcgatcttggagtggatgtcgtgccatggctccctcggcccgcccttggtgacggccgcgccgtcgaggttgggctggtggaagtcgctgtggtgcgccgtgtcgagcgtccggaagagggagtggaactgcgtgtcgtagcggccgtcgcagaggtcgaggccgccgacgaagctgacgatgcggcggctgccaccgccacgcggcactggcatgtcgtggtcgacgatgacggtcttctggtggtgggtgatcatgtaggcgatctgcgcgcccatgatggcgctccggccggcgtcggggttccgcgggcagaggacgcagcgcacgtcggtgccgcggaagtagtccgccgtctcggcgtcgtgcgtcgacatgaacccccacttcatgccgagcgactcgacggaggtgcggtcgtcccagaccagcaacagcacgcgcacgccctcgctggccttgcgcttgaggagctcgccgagggtggcgtcgccgccggggcgctgccgggtgccgtcacggatgagcgtgatctcggtgtacacggaccagccggtgaggtatatgaggtgcttggcgttgctgatggcgtcgaacacgtcctcccagcaccgcccctgccggtagtacccgccgccggcgagcgggatcctgggcgcgaacgcgtcgggcacgtgcgcgtcctggtacagggtgaccctgcacccggggcgctgcgagaagaaggtgtacggcacgccggggtaccgcgcgccggagacgcccctgccccacccatggcggtcgccggcgacgtcgcggaactgcagccgcacgtgtatcgtcggcccgtgcgagatcctcctcctgccggcgtcgaggatgtcgaggcggcgctcgatggcctcgccggacaggagctccctgacggggaggtaggcgcggccgatgagcgtggcgccgatgggctgcgccgccttgacggagaacaccacgtcggcggcgaagtgggcgcagtagatgtggaacacctcgtaccaccgcgggttcaccggctcgtcgtcgacgacccgcgtccgccccacccgcgcccggccgaggtcgatcgtcgcgtacagccgcgtcgcccccttcccgagccccagcgagtcctcgaacccttccacgaacttgcggaagatcccgggggcggcgccggtggcgcgggtggggttggagaggtggtcggcctcgaggatggtggcctcgagcgtgccgtgcagcagcaggtgagccatcacccctgctctttaagattccccccgtggctgtgtgcacttgacaaggctagaaaacgt

SEQ ID NO: 80408 - DNA, 252 bp, Oryza sativa
  unsure (1)..(252): unsure at all n locations
  Clone ID: PAT_MRT4530_80033C.1
cacctttngataaatcaccccccaaaaaacaccacccaccgggacaattttaaaaaatttttgcggttcccacccaaacaacctaaaacaattccagcttacaaacttttaactccacaaactatattcctaaccgtccaaaatctcaaaaattcctcaccttgaacaacacacctcttttttcatacaacaaatactgacataaaccaccacacccaccgacgcttcccaacacacaacaatctcctaccc

SEQ ID NO: 80409 - DNA, 831 bp, Oryza sativa
  unsure (1)..(831): unsure at all n locations
  Clone ID: PAT_MRT4530_80034C.1
acaagtctgctctgtcttgtccaattcaaagattggaaaggagatatacagttcatgcagaaaaaatttctccagacaggcacattgaccatgtgtagctgacaaccaccactcaaagctgtcttgaatcccacaggtaaaacctactctactaaagtacgtaccaagcttttgacacaatgtgccacaacaccaagttgtccaagacttcagtagtatgtatattcaggtcaaatctccaacaaaacatgcctattatttcagtactcccatgaggaaaatcatgattcgtgcaaaagaatagcatcaactgatcaaccaaattttgactagaaataggcgtgacaccctattattgggctggaaattacatatctagaagcaccacccaacagtgcaaggtttccaattatgcagcacaatctgaatcttgctactctatgtggtgagaaagggaggcaggttccccttcgtgccgatcactggagcctgagtgtcagggaagaatttcgctcctgggagctctgtcaccgtgccttccttcgtaacacgtaccgggtaggtcagcaggtgcccaggaaggtcatcgttaagctcatcgctcgcgtagaggtcccagtacttgtcagccatcttgttcaccctctgaacacactccaggctctctgggttcaggaaagttgtcatgcagcatgccaaggtgctcataccacaacgacatccggaaaccgtgggatttgtcctcttgcaaccaggccctttggtgttcagggtggcatggnctggaatgcacccatggcgatcttcggagtctctgcccccatccatgga

SEQ ID NO: 80410 - DNA, 777 bp, Oryza sativa
  unsure (1)..(777): unsure at all n locations
  Clone ID: PAT_MRT4530_80035C.1
atgggtaagcttgtggctcttagcttcgttgtcctcctaagcgttggactagccaatgctagcagggtagctagatatgctagtgctgggggtggcggtagcggcgagggaggaggtggtgggtcggacggtggttccggctggggatctggctctggctcaggatatggccaggcgggcggtgatggatcatatgctagtggaggtggagaaggaggcggtggaggcggtggagagaatggtggttccggatatggttccggttctgggtctgggtatgggcaagctggtgggtctggaccatatggtggtgggtatgctcagggaggaggtggtggccagggtggcggtggtggacaaaatggtggatctggatatggttccggctctggttcagggtacggtcaagccggagggtatggaccgtatggcggtggatatgctcaggctggtggccaaggtggcggcggcggtggtggacagagtggtccaggcggcagcggatatggtagtggctcaggaagtggttcgggaagtgcctacggtggacatccatagaagtgcttcacctaanattacctatgcagtactgtacactatgtgcttgcctggtttagagaaggtnttgtttattagtntggcgtgaataataaccaatttaaagggcctctctcggttgggatactgataattgaannggggtctttttntaccancnacanaatgttaagctcatcagtgttantttaaattgtttcgatcantgaagctanttgt

SEQ ID NO: 80411 - DNA, 599 bp, Oryza sativa
  unsure (1)..(599): unsure at all n locations
  Clone ID: PAT_MRT4530_80036C.1
atggaggcggccgggaccaagcgcatgcgcaccgccgccgccgccgccgccgccgccatgagcaacggaggagaaggagaaagagagggagaggaagagatggcgagccaggggagcgcgggagggggagcggcggcttcctccggggtcgccgtcaccatcaccaccgcgcccatgacggagacggaggacgacatggccgtcgccgaggaggaggaggtggcggcggcgtcggcggagacggaggagcacgtgcagcgcatcctcctcgccatcgacgccttcactcgccagcaggtgtcggagatgctggaggcggggcgtgcgctgttcaagaacctcgccgccgacttcgaggaccgcctctgctcgatccacaaggagagggtggagaggtgggaggaggagatccgggagctgcgcgcccgcgacgccgccaacgagcaggcacgctccctcctccacaacgcccagctccacctcctcgccaccgtccgccacgaccacacctgaaccttgctctgctccctccagctccacccaagtcaatagcagcagcagtctcatctcagttagtagtntagtaaccaatttcacat

SEQ ID NO: 80412 - DNA, 430 bp, Oryza sativa
  Clone ID: PAT_MRT4530_80037C.1
caaaggggaaaaaaaaaaaaaaaaatcctgtttacaaaatccccgggttacaatcaacacttcaaacaaatcttatccctttgccaccctcatgaaaaggggggggaccccgtattaacagggtttttgattccattaacaacggcttaaaaaactatacataccatgggatctatgcacaccttttttttttgggctgggaaaaaaaaaagtaacactggcttacaacaaaaaactttgcacaccaaaaaacccaaacctggctttgggaaaactttgacataaggggctaggcttttttttaggcatcctgaatcctgcgaaacaaaagccaacttttagcgtgggacctagttttcaaaggggaaaaaaggggtaggacggacccattatgcattttctgttttttaagggaaccaccttatgattt

SEQ ID NO: 80413 - DNA, 455 bp, Oryza sativa
  Clone ID: PAT_MRT4530_80038C.1
tttaataattttttttttttttttttttttttttgggggttttttttttttttttttctgttaaccccccaaaaaaatacaattcttaacagagaaaaaaattccaactcgaaaggggaggaaaaaaagaaacccatttcctccttgggggggagagacaagaggagttttccaaaaccagtgccgctggttttggggacggttgccaccagggctggcaacccaatttaggggccaagcattgcttaaacgaacaagatccttccctacaaaggggggcccgcccccactgaggtaacagagggaaaacggacctggggtgaagagagagggcacctccttggcgacggaacatttgaaaggtcagtaggggggttgaacgaacgcggccggtttgtggccacctcccccggaggtggccaaaggtgggtgaggaaccccgggggggggccaaa

SEQ ID NO: 80414 - DNA, 453 bp, Oryza sativa
  Clone ID: PAT_MRT4530_80039C.1
atggcacggccggaggtggagactgcagttcagcttggggcggtggatccggtgcctctgtggccggatctggcctcccggccaaccagcacattcgaccggcgcggtgggcggcgcgacggaggtgaatcgggcggtgaaaggtgcgatgcgtgtgccccggtcggcgtgggttggggccgctgcggcgacggcgccggctcctgctctgcctcgtgcccccgcccggcggtgcttgggatggcacgtaggaggaaggcgaggccggcggccagtgcgaggtggtgttggccgcacacgcagccatggcccgatggcaggcggcgtgaggcggtggaggtgctgcacgaggaggaagccagtggtggtgaccgggttgtcagcggtggtggctggccgccaatggtgacctcagtggcttacggcagcacgcaggaagcggttaggcagtga

SEQ ID NO: 80415 - DNA, 3066 bp, Oryza sativa
  Clone ID: PAT_MRT4530_8003C.1
atgaagacgccacctcctaaggtacagcagtcacgcatccccatcagggataaggacaaggaacaaggagtgacgccgatttcagatcgatttgttggggtaatcgacatcgatccccacgaaccatcagtcttgcacctgatcgaagactatggatcatcaacaacgagtacgccgcgtgaggtattggctatcgacgatgtcggcacgtcagcgcgcaccaatgcggaagcggagaatcaagtgactactccggcccagcacatcagagccgtcaacgcaatactgagggaaaccccttacgatcccattctgaacgacgatctcgcacattggacagaacgactacgggaatcaatgaccaacctcagcaacgcattcgaagaggccgctgccgcagcgcacccagaacagccaccaactagcgttgctaatggtgaaaaccctgaacgccgggaatcgcctcatcgagccacccctccacctcgcggcaccggcgatctccgcgatcacctgaacggccgccgagaggcacgacgcacacgagacaacgagaaccgttcccggcgtcatgtctcttcacagcgtcacgataacgaagatcgaggaggccgttcaagcgaagaccaagaccgtgataaacgacgatcgagaacggcagacagacatccacgaaggacgtatgatagccgacaatccaccgcccccagcgctgggtgtagagctttcggtcgttcacttcgggatgcccgatggcctgaaagattccgacctggagcaatagagaaatacgatgggagcactgacctcagaagagttccttcaagtttactccacggtactctacgctgccggagcgggcgacaacgcgttggtgaattacttaccaaccgcattgaaaggctctgcacgttcatggctgatgcatctctcccctactcgatctcttcatgggcagacttgtggcacaagtttgtagccaacttccaaggaacttacaagcgccatgcgatcgaagacgacctacatgcgttgacacagaacccaggtgaatccttgagggattatgttcggcgctttaacgagtgcagaaacacaatccccgagatcaccgatgcttctgtaattcgcgctttcaaatccggtgtcagagatcgctatactactcaagagttggcaacaaggcgcgtcacgactactcggagattattcgaaattgtcaatcaatgcgctcatgcggatgatgcactgagacgcaagaacgacaaaccaaagaccggaggagagaagaaaccagccaagtacgcacctgagtcaagcaagaagaaaaatcgcaagagtgggaaaaggaaagctcaatcggaagttctcgcaacagaatacgcggaccctcctaagcgcccagacccacaaggcagcgacacgaagaaagcatggtgccctatacacaagtcggacagacactctctagaagattgcctcgtcttcaaaaagtcgcttgcaaaacacatggcatcggaaaaatgcaagcgagtacgcgtggttgagaaggacattgaggtgcctactcaggaatcggactcagcatacccagattccgatctccatgtctcacacatcttcgaaggttccacggcatactcctcaaagcgagattacaagaaagcggaacgtgaagtctgttcgacgtggcagggggctgcgcccaagatgaagtgctcaatcaacattctcttcgccagcactttggacgcaatggggatcctacgaagcgagttgatgcccaccgatcaacccttccatggaatcactcctcagtcatcgtccaaaccattgggtaaaattacgttgcctgtgactttcagccaagcaaacaacttccaaacggaacaaatcacctttgatgtcgctgaattcgatacagcatacaatgccatcatcgggagaactgcactcgcgaagttcattgccgcatctcactatgcgtatcaagtgctcaagatgacaggactgaagggaacaatcactattcaagggaacgctaagctggtagtacaatgttacaagcggagcctcgacatggtcgagcatacgcccagcccgcctgccacagcagagccacccaagaaacagtctgacatgctgggggtacccagggaggtgattgagcacaaactcatggtgcgacccgatgccaagccagtaaaacaaaaactgcggagatttacaccagaccgaaaacaagccatacgagaagagctcgacaagcttctcaaagctggtttcatcagagaggtactccatccagagtggctagccaatccagtcagggtgcggaaggccaacgaaaaatggagaatgtgtgtcgatttcaccgacctcaacaaggcgtgtcccaaggatcactttcctcttcctcgaatagaccaactggtggactcaacagccggttgcgagttgttgagctttctcgacgcttactccgattaccaccaaatcagcatggcgaaagaggacgaggagaagacaacattcatcacgccgttcggggtaatctgctacattaagatgccgttcggactaataaccgcaggaaacactttccagcacacggtccaaggtgcacttagcgaccagctcggaaacaatgttgaggcatacgtcgatgacattgttgtcaagaccaagacaagcgactcattaattgacgatctgcgggaaacgttcgacaacctccgacgatatcgcctcatggtcaatccagagaagtgcacgttcggagtaccatcgggcaagctactcggcttcctcgtctctagcaaaggaatagaagcaaatcccgagaagatcaaagcaatcgaggacatggagtcgcctacaagactcaaagaagtacagaagctaaccggatgcatggcagcactaagcaggttcgtcgctaggatgggagagcgaggacaacctttcttcgctctgctgaaaaagcaagacaaatttgtatggacacaggaggccgaagaggcatttattgcactcaattcaagcatgcaattcacctcaacttga

SEQ ID NO: 80416 - DNA, 519 bp, Oryza sativa
  Clone ID: PAT_MRT4530_80040C.1
atggcggcgtacatgggcgggtggtgggcggcagccgcgaggcaaggaggtagcattgcccgcagtagggatggcgacggggagaacgggccgagcgcggccgtcgaggtggaggctgcggcggaggggggcagcgagaagccgaaggcagagcgtgtcatttgcgccaactgcccgcatcgtccttccagatccgcgcggcctccgcccccgtccgctaatgtccggtctcggggaggatggaagggaggtggcgccatcgtgagatacaaccacggaggaggcggggacgacgtcaacgtgagaggcggagacagcagtgccgcgatgaagggggacagacgccagcgatggtccactgatccggcgaagcggccgaccgctcgaggggacgtaatgtcggcgcggggcttgctggtggtgacggagctgagcgtggtgctcggcaccgtggtcacgctccttggacccgtcaaccttccctccaccagcgggcggcgctcagccagacattggtga

SEQ ID NO: 80417 - DNA, 588 bp, Oryza sativa
  Clone ID: PAT_MRT4530_80041C.1
atggcggcgtacatgggcgggtggtgggcggcagccgcgaggcaaggaggtagcattgcccgcagtagggatggcgacggggagaacgggccgagcgcggccgtcgaggacacctcctgcatgacgaccggcgatggaggcggtgagttcgggcggtcggtggtggaggcggaggcagagcgtgtcatttgcgccaactgcccgcatcgtccttccagatccgcgcggcctccgcccccgtccgctaatgtccggtctcggggaggatggaagggaggtggcgccatcgtgagatacaaccacggaggaggcggggacgacgtcaacgtgagaggcggagacagcagtgccgcgatgaagcagaacgacaacctcgctaagccaaactgccggttccctccgaatcaagtgctagcaggccagttcaagcgatatgccgatacgttgtctcctgtctacagtctccacgcagcccctcaccatctttcatcgcgccaacgccagcaacgaagggacaagagaggaatgaggatggtcgatggcagcatgaggaatgaggatgcaaggggagaaagggagctagcgtga

SEQ ID NO: 80418 - DNA, 273 bp, Oryza sativa
  Clone ID: PAT_MRT4530_80042C.1
taggcagatatcaacaagactactccgtacatcagcattcagcactatggtcgtaaaacatcagcaggttgtgacatgcggaattgcagacgaattctcagtccttccgcgtacagagatcgcaatctcgcattcgcattggctgttgatttgtcgcgagtgccaaccaccaaactatttcccggacaacttcagagagagagtccaggtgatctgtacgtgcttgtccctgaagggatgaaccgtgaacgaacgagatgttccaaggtatac

SEQ ID NO: 80419 - DNA, 653 bp, Oryza sativa
  Clone ID: PAT_MRT4530_80043C.1
gcacgagggtagctagaaactgtcatgactcatgagaaaattttctattatggatgaactgatagatttttgtgtcccgccagataagtttcaagggccgtatctgttcattagaggggccgatgcctattattggtgatcctttggctcctgctactattccaaatgagaagcatgagttagtagatgttagcccttgccagcttagcactgtggatgttgaggctgcaatccttaacataaggaaaaaactgaaggagaagttatcgcccaactcagctagcaagctgggtagggagctgatatacttggctgacatggcgaaattgctccgtcttgaagatgattgaggggtaggtaatgggtgaatgcctgatcaagagggatgctaggggaatgctgcctgatcaagagagctgttaagatgtcctgtaggggtaggtactaggtgaatgcctgatcaagagagctgttaagatgtgattactttcaatgatactttctgatgttttggagattggtaaaacaaacaaaatttagtgatactttgtggtgttattgccctttttgaaacatgtaatttcaatgatactgagatgttatttggttgataaaaagtaataattgtgatggttcttaaaaaaaaaaaaaaa

SEQ ID NO: 80420 - DNA, 324 bp, Oryza sativa
  Clone ID: PAT_MRT4530_80044C.1
atgatcttcccgtacctccgcggctcatccttgccatggaacggcagcgtagcgtcgtcgacctcgtgccattactcctgtgcttcgcagatgccaagcaagaagaagccagcagcagaaacgcgactctctagggcggcagcgccggcggtgacggggacacggctctctctccccccttctccccggtctcattttcttcttcgcggaggacagcaagggagcgtggggcggcgaccggtggtggacggcgacggcagcgggacggagtccggcgagggagcttcagtggacaccacgtcgagctcgtcagggacatcttag

SEQ ID NO: 80421 - DNA, 273 bp, Oryza sativa
  unsure (1)..(273): unsure at all n locations
  Clone ID: PAT_MRT4530_80045C.1
agaagcgtcccacgcttacgaaaaatagacgcgcgagaagtagttacgcatcatgaaatatgccattgaggcgcacgtcacggaacatgtgaaaatgccctggagagcacataactcagacgatatatctgctctacatgccctggaatcaagatgcaatgaggcatgggcatgccttgtggtcaagtacaatgtgacgggggtttgagtnaaaaaaaaataannnaaaaaattataaaaaaataaaaaaaaaaaaaaaaaaaaaaatttatt

SEQ ID NO: 80422 - DNA, 477 bp, Oryza sativa
  Clone ID: PAT_MRT4530_80046C.1
atggcgccgccgtcgctaccgattctcctcgtcttgctctcgctgtcgtcgtcgctgtcctcctcctcggcggcggcggccggccgctggaccgacgcccacgccaccttctacggcggcgccgacgcctccggcaccatgggtggcgcgtgcgggtacgggaacacgtacgggcaggggtacggcacggacacggcggcgctgagcgcgatcatttccatcagaggtgagctttttgagacattcaaaaacagaggattctgtcctcgtcctcaagataccaagatgatgcttgaattttgtcagcaaacttcaaatgagaagctgccacaagatatatcagatcaagcacttatggagaatttcatggagagtgttaggccaaatgttgcaagttcaaaaggcacctgtaatatttttttctcaagaattttactgtattttccttatgctgaagaaagtaattcttcatcttga

SEQ ID NO: 80423 - DNA, 1725 bp, Oryza sativa
  Clone ID: PAT_MRT4530_80047C.1
atggcgccgccgtcgctaccgattctcctcgtcttgctctcgctgtcgtcgtcgctgtcctcctcctcggcggcggcggccggccgctggaccgacgcccacgccaccttctacggcggcgccgacgcctccggcaccatgggtggcgcgtgcgggtacgggaacacgtacgggcaggggtacggcacggacacggcggcgctgagcgcggtgatgttcggggacgggctgagctgcggcgcctgcttcgagctgcggtgcggcggcggcggcggcggcgaccggcgggggtgcctgccgccggcggccggcaagtccatcgtggtgacggccaccgacctgtgcccggccaaccacgcgctccccggcgaccgcggcggctggtgcaacccgccgctccaccacttcgacctctcccagcccgccttcctccgcatcgcccgcttccagtccggcatcgtccccgtttattgcgaagttgacaaattcaaagaaggattaactgaaaattcagataaatcgcttcacacactgtttgctgttttgaatactgtcttctccaaattggaggtatcactccaaaatgtttgtgaggggcatactctactgttcgcactcgatggaagcccatctgaacttctctttgaaagattaccagaaattgattatgataactcagagtggacagaggcctcctcaacagatgctatatgttttatctaccaaaacctccagaagctagataaccttgtttgctctcagctctcaaggcataaaaaaccaagacatatgaccatatactggttgccctacacatgtggagcgttgggtctctcggcatgttctctgtggcttttgcgacacagtagcttgatgggaagttctgacatcgacaactgggttcaaagtgccaaagagtcaatagctggattttgggatgtgcatgttgagaaacctgtaggatactttctatttatgtccttctattatttatcttatgcatttttaaatgatgctagtatcatttccatcagaggtgagctttttgagacattcaaaaacagaggattctgtcctcgtcctcaagataccaagatgatgcttgaattttgtcagcaaacttcaaatgagaagctgccacaagatatatcagatcaagcacttatggagaatttcatggagagatatgagaaggaatggacccatcctgttaagaatcttttcggtggagagttagcatatgccatgcttatccagcttcagaagcgcacagtggatatcaagcaggcaatgctggaactggatcagattcttaaaggaaatgcgataaacttcgctattcttgcagctttacctgcatttggtgtttcgcttttgctcctcactgtggtgcaagcatggattatgaatgaccaaggcgccgagggaagaggcaggattgcacggcgccaaagaaggctgctgcttcttgatgcagagagaaaacttatggagtttaaaaattgcatgattaatggaatggaggaagaggcatgctgtaagttcggattaacactgtacaaccttgatagattatacagagctgttgaatcacatgcagaagaaacaggcgagtggtcaagattaagagaagacattttggatctggcgaaacctaagatgagtatgacagacaagctggtggttctttcacgactgaagggaacgtatgactgctttccatag

SEQ ID NO: 80424 - DNA, 472 bp, Oryza sativa
  Clone ID: PAT_MRT4530_80048C.1
atgagcaatagtggcaaggagcagcggcggatggaccggttcatcgtgatcctcttctcctccacctgccgcaatggatccagcgtggacgtcgtcgatggaggcggcaagagcggcaagaagccccaaggcggcggcggcgagggtggcggcgcggcggaccaccaccgccagcacgtggcgcacatcggctgggatggcagcacaaacaccaccaccagcctccgctcatggaaccgcgccgcgccgcggtcctcctcctcctccaccaccaccgcgtccacctcctcagccttggcggcgccggcgacatcaagaaggagtcggcgccggcggggcctcggttgtgcagctcctgtcctgccgtctgccgcagctagggccaactcccaccgccccttcctcttacgcccacagctgccggagccgtgcctccaccgccgcgccgctcccttctctcccgccggccgcc

SEQ ID NO: 80425 - DNA, 486 bp, Oryza sativa
  unsure (1)..(486): unsure at all n locations
  Clone ID: PAT_MRT4530_80049C.1
cctccgtcccataaaaaccaaccctagggaaccaaacctagggacgtcctagggatgaatccgtccagattcatccctaggttgggttgttatgggacgaagggagtataaattaagactgtcattttactgcagttggcctgcattcatattgaaagatttaacaccatcttacccttaggatctgtcgagtgactgatgaattacgatgaggtgttgttcatagataagagagatgtcttgtgtggtaccactctgttgtgccatcctgccgagggacccatctagctttgtcctcactcttaagcatggtatgtactatgcaatattcaatcgataatctccttgtgaaatttgtcaacaatattagatgcactactagaccccaacaatttncttctttttttttgtttttaactacaacccagtgattccttttattgctttcatgtagtatggnggaagaatattctttcatgcagtaag

SEQ ID NO: 80426 - DNA, 403 bp, Oryza sativa
  Clone ID: PAT_MRT4530_8004C.1
atctggttgaccgcccataaccgcgggcacggctattcgaatagttttactctgatcagaggtgtacaactgtacccacaagacacagccctacgacacgtttccatgcgccgacatgccaccacgacataccggaaagaggccgtgacaggaccattcgcataaccccctctagccaagcacaccacacctcaggtttcacccccgtccccagcgggcgacgggcagtccctgctcgtgcctaggtgaatccggaagccgcataggccgtcgcagggcccatccaaactccatcacgcccacccttgcctggatgcgtcagctagagaaaagctacactacaagcctagccgttgcccacgctggcttgtggtaagtacgaggaattcttctagggtttccc

SEQ ID NO: 80427 - DNA, 220 bp, Oryza sativa
  Clone ID: PAT_MRT4530_80050C.1
ggcacgagcacaaacatcaaaacgttataagattcctctagcatccatcacatagccatgaagacctctgtcacccactcgttcctcgccctcgcagcgagcagcgacgcggcacatttcgatgtttgaccctatgggcaacgccagcagcagccgtttatgcaaccgataatgaacccgtgcaatgagtacgtgaggcaacagttgcagccctgtaagc

SEQ ID NO: 80428 - DNA, 144 bp, Oryza sativa
  Clone ID: PAT_MRT4530_80051C.1
cagacattatacttgttctatgataatactccaacaaacacctgtgttcatatatatctgactaaaactggtatatgttgcactgtagtgtgcgcttgtggtttgtggtgtatgtgtgtgtaatcgagaaagaacagtttttaa

SEQ ID NO: 80429 - DNA, 4266 bp, Oryza sativa
  Clone ID: PAT_MRT4530_80052C.1
atgggttccgtctctggcatcgacgacttcgccttccctcccgagcaggcattcaagttcggcagcctcaacttcatcaccaacgacttcggcaagatctctctccttgactcggattcaaaccagtcggggagagaccaggcccccgtgccgttcggtattccgaactcggtcgaggcctactccaagatcatctctcccgagtcggcttcaaaccactcggacgagatccaatctactcttccgcgaccagatcaagacgacgggtcctatccctcaatcctgatgaaacttcatgatgacttggccgctgtcttcacagtcaagacatctcccactcgaagatctaggcgagctccggctttggccccgatccgatctagatccagggaggttggcgttatactctgtcacgcccagaaattcactagcccaaccatcctgaacaaccatacccggctgtacagatctaactccaaaccaggagctaagcaaattattaccagaggcatggactccccagcgacccccacggacttctcgccgcttctcagtctggtgccccgcaatgaatcatgctatacagaaggatgtgacatactccaacccctcgggacagtctcgacggaagagttggatggctacctcagctcccccggcgtcagttctcgaccaaccgagatcctcgactacgacgatttcggctaccactacgaccacggcgacctcgacaacttcgacgacagctatgaggataactacacgcccctcttcttcggcgtattcatggctgacaacgaaacggaggaacagcgccaagcccgagaagcggaccaagatcgtgcacggcaagaagctgaacgtcgccgactagaggaagagcgacagcgacaggagcgagaacgactacagcgtgagcaacaagatcgcgaacggattgcaaaggaggctgaagatcgacgacaacgcgccttagaatctgggcggcgagcgagagagctcattgggcaacaagacgtcgatgggacagcggtctttcgcaccccccagcagaacacggttgcagcaatcactctcctcaacaccctcctcaaggaagacgcactcaaccaagctgatcatgttgtcaacatcttgaaccagacaaagaccatgatcgccgcctcggttccagccaactccgcaagcacccgcaccccgactggtagccgagtccctcatcttcgatctcaagactatcaccagccaagcctcagcattgccggcgccggatctagtcgcaggagcaggggacatgatgaacgggagcgtcgagttgaacgaccacactccccacatcgaaggcgccccatcgatcttcgcgacaccatcaaccagcgccacgcagcaagaggccatcattcaccagatcgcgatgacgacgacgtggacggagttgctgccttcacaagcgacctgcgtcgagtggattggccagccggctttaagccgtctggaattgagaaatatgacggcaccaccaaccttgagtcttggctcaccgtctatggtctcgcaatccgcgcagcaagaggagacagcaaagccatggcgaactatctgcctgtggccctagcagattctgcctggtcatggcttcacgggctaccccgcggcacgatcggatcatgggcagagctacgcgaccacttcatcgccaacttccaaggcacttttgaacggcctggtacacacttcgatctctacaatatcgttcagaagtctggagaatctcttcgagattacattcgacgcttctccgagcaaggcaacaagatctccgacatcaccgacgacgttatcatcgccgcctttactaaaggcattcgacacgaggacctagtcggcaagttcggatgcaaacctcccaagacagtcaagcagatatttgaaaaagccaacgagtatgccaaagccgaagatgctattacggtgtccaagcagtcgggcaccacttggaaaccaaagaaggatacgccgaccggaggagggagtggaagtaacaaccacaaggaccgcaagcgtaagcccgaagaacttgtggccacaacctctccatcttcccgacaacgttcccgcgtcaacaccttcgacaagataatgaactcccaatgtccgcatcatcccaactccaaccacgtggccaaagattgcttcgtcaacaaacagtttgcggagcaatacgtcaagaacgcacgtaagccctcaaacggagatcaaggcacatcaaagaagaaagatgatgaagacgatgccccgactggttttcaagatcatcgcaaagaactcaatcacatcttcggcggacccctagcttatgaatctaagagaaagcagaagctaacagaatgggagatcaatgcgaataataaagatatttttgcgtggaaaccatctgatatgcctggtatccccagagaggtgattgagcactctttacatgttaaggaagacgccaaacccatcaagcaacgactccgccgttttgcacaggacaggaaggatgcaatcaaggaggaattaaccaagctgttagcagcaggcttcattaaggaagtccttcatcccgactggctggctaatccagtcctggttcggaaaaagacggggcaatggcgcatgtgtgtcgattataccgacctcaacaaatcctgtcccaaagacccttttgggttacctcgcattaaccaggtggttgactcaacggccagctgcgagttactcagcttcttggactgttactcgggatatcatcagatccgactaaaagaatccgactgcttgaagacctcgtttattatgccctttggggcctactgctacatcactatgccctttggattgaagaatgcaggagcgacctatcaacgcatgattcaaagatgtttttcaactcagatcggtcgcaatgttgaagcttatgttgatgatgtagtcgtcaagaccaagcagaaggatgacctgattgtggatttagaagaaacttttacaagcattcgtgctttcaagatgaaactaaacccggaaaagtgcatcttcggagtaccgtcagggaaattgcttggatttatggtatctcaaagaggcatacaggccaacccggagaaaatcaacgccatcctcaacatgaaaccgccaagctcccaaaaagacgtccaaaagctgactggttgcatggtggcgctcagccggttcgtctcacgactcggcgagcgggggatgcccttcttcaagctgttgaagaagactgacaatttccagtggggacccgaagcacagaaagcctttgaagacttcaagaaacttctcaccactccaccagttttggcctcgccacatccgcaagagccgctactgttatatgtgtcggcgacctcccaggttccacgaacttcgatcaagtcacaagctttagctgatttccttgccgagtggaccgagtgccaagaagacatgccagaggaaaagatggaatattggactatgcattttgatgggtcgaagaggcttataggcactggagctggggttgttttaatctccccgactggagaaagattgagctacgtattgtggatacatttttctgcgtcccataacatggcggaatacgaggcgctactccatggactaaggattgcaatatctctagaggtacgcaagttggaagataaattcgatggactcgagctcacccatatcctccgacataacaatgaggaagctgacagactggccaattttggttccaaacgggaggcagccccttctgatgtgttcgtcgaacatctttacgaaccaaccgtacccagaaaagaaacaatcggagccatggatactcaaggcgtaagcataatcgaaaccgattggagagaacctcacataaaatttttgagcaaacaagaactacctcaagataaaaatgaagccgagcggatttccaggcgcagcagactttacattattcataagacggagttgtacaagaaaagtccatcaggaatactgcagcgctgcgtgtctttggaagaagggagacaattgttgaaggatatacattctagtatttgtggtaatcatgctgctacacggactattgtcggcaaagcttaccggcaaggttttttctggcctacagctgtgtctgacgctgacaagattgtgcggacatgcgaaggttgtcaattttttgccagacaaattcatctgccagcccaagagttgtaa

SEQ ID NO: 80430 - DNA, 534 bp, Oryza sativa
  Clone ID: PAT_MRT4530_80053C.1
atggtggggcccacctttcagcgcttgttgtttctctccttctctgcccctctctctcctcctcctttgcccctctctctctcagtgaacagaaggcggctgcgagcggcgggcaaggagccgaggccggcggtgggcgggggcggaggcggctgtgggcggcgggcgaggagccgaggacgcggcgtactagacgtcggggtagcgctcggtcggctccgatggcagcggcggcagagagggcgagggcggcgggacgtggagcgagatggcggcaggatcctccttcccaccgtccaggcgctcatgatgagctcgtgcggcccggcgacaccgggggcgtacacggcgtcgcggaagcccgacttccgccttctcatcggcgtgctcacccgcgccgacaactacgagcttcggcacctcctccgtatggtgtacgacctctagctcgccgccggcgacctgagcgcacacgtcgacgtccacggggatgccacggccggcatccaaggtctcgttgtagtacacgagcat

SEQ ID NO: 80431 - DNA, 625 bp, Oryza sativa
  Clone ID: PAT_MRT4530_80054C.1
acttgttcagtttttgggcccggtttcccttattaactgggccatttctcttcttctataaattccggcagaagaaacttctgccgtcggttcctcgaaaaaaaatatcgggttagatgattaaggattgttttcctttttttttagaaagctcttttccgcagccattgtttttccaggctttgctattcatttgtatatcaattttcctaaattttaggtaacaaatgaaagccctcagatcctacagttcaaccttatgcggttcttcctccagtgaagtgaccggattgggaaactaggagcgatgtgggtggaagggtgggatgggctggttcccggtgatgccctcaaatataatgtgatgtggaaaaagcttaagattgggttctttgattcactctcgtataatgggtagcagggcatgactgccgatgatcatgagtgagggggtttattagctgtgcacaaattgaaagcattcctaccagttaagaaatgaccgatagataggggagaaaaatacagaactgataaatagacagcccaaatcattgacagtgcaaatatattgcaataactagagatataacccatttacgagttggtatgtacacctctaaat

SEQ ID NO: 80432 - DNA, 342 bp, Oryza sativa
  Clone ID: PAT_MRT4530_80055C.1
atggcggcggcggcggaggacgtggagttcgtcgactacgaccgcgacgaggaggaggaggaggacgccatggacgaggacgatcggggcggtggccgcggcgggcgcgcgctacccgtaccccacatcgtctcccagggcgtgatgcgctcgcgcggccgcctcctcggccgcagcacctccgtgctcgcctccaaccgcgaccgcttcgactccctcgccgatgccggcaaccccggccacggcccacagcgctgtttcgtagttgtgtgcctttggcaggcatgccttttctccccaatgtccttgatggcgttggaggaaattagaccattgtattga

SEQ ID NO: 80433 - DNA, 404 bp, Oryza sativa
  Clone ID: PAT_MRT4530_80056C.1
aaaaaaaaaatttttttttttaaaaaaagtttttacaggggggccaaatttcaattttaaagggccccctcccaaaaaaaatatttttttaaacccgggaaaggggttttggcatctttttttgggaaggggtttaacccgggggaacaaaaaaaattttttccccaaaattttaagccctgggggtccatttttcccaaaatttttttttgaaggcgtttcccaaattttaagggacaaccacccttttttaaggggaaaatttatttcccccccaaaagggggcccccttttcaaaaaaaaaaaaaggtggccccctttatcaaaattttttgtttaaaaactaaaacaaagttggggcaatttgtttccttgactaaaaaaacggttggatggcctcccaa

SEQ ID NO: 80434 - DNA, 2118 bp, Oryza sativa
  Clone ID: PAT_MRT4530_80057C.1
ttaaggctgcttcacgggcttcctccagtcggttgagatcatccactcggtcttctccatagcgctcctcgcgttggtgcgttcgacttgtccattgctcataggatgcactatggaggcataataaattttgatgccaaagtcttcacagaaatgtttaaatactccgccagtgaattgagtgccgttgtcagtgatgatccgattaggtaccccaaaccaatgcacaatgttgatgaaaaaatctccagccttgtctgttgtgattgtgatgacgggtttggcttcgatccacttggagaatttgtcaacagctacaaagagatgagtgtaaccaccgatagcctttttgaacgggccaaccatgtcgagcccccaaaccgcgaacggccaggataatgggatggtttgcaactcctgagctggtaaatgagtctcctgccgataagcaatcatattatcatcaaggcaggaccactctttcatgactcctgctccggtgcccgaaagcctctttgacccgtcaaaatgcatagtccaatactccatcttctctgcagacgtgtcttcctggcactcggtccacttggcgacgaagtcatataacaacttttgaacctgaggatatcttgtcttggagtcggccaaaacctcgcggctgagcgccgccatgcagccagttaacttttgaacatcttcctgggagctcggcagtttcatgttgaggatggcattgattttctccgggttggcttgtatgcctttttcagggtttaatttcatcctgaaggcgcggatgctcgcaaaggtctcttctagatccgtaatcaaattatccttctgcttggtcttgacgactacatcattaacataagcttcaacgttgtgaccaatatgagttgaaaagcatctctggatcatgtgttgataagttgctcctgcattctttaatccaaaaggcatggtgatgtagcagtaggccccgaagggtgtgatgaacgaagtcttcaagcagtcggactcctggtcaatgcgaggtaacccgaagggatccttgggacaagatttgttgaggtcggtgcaatcaacacacatacaccattgccccgtcttcttccgaaccaggactgggttggccagccagtcgggatgtaggacttccttgatgaagcaatctaactcagcgcctattacagcagtcttagtaaggtcagagggatctagaggaattttcttggtcttggcatcgccttctccgctctttggcatcttggttgcaggcacttctccttcggttgctgtggacgcagccagtcggatttcttctcgggcaagcgtgatctcgcgggtctgggccatctcgcagctttccttgtcgcatgtgacggcttgcttgatgtcgctccacagggatatgactcctcggggacctggcatcttcatcatcatgtaggtatagtgtgggacagccatgaacttggctaacgccgggcgtccgagtatagcatggtacgctatctcgaaatcagcgacttcgaagcaaatattttctgtgcgaaagttctcccgagtgccgaaagtaaccggcagagtgatttggccgagtggagtagaagatagcctggggatgactccatgaaagagcgcattactcggctttaattctgcgcgagggatctgcatgtcgtccagagtcttggcaaaaaggatattgagtgcgctgccaccgtcgatgagggatcttcgaagcttgacattgcgaaccactgggtctagtaccagggggtaccgccccgggtggaccactcggtcgggatgatccgagcggtcaaacttgataactgtctctgaccaccgaagatattggggcgtatcgggctgaacagcattgatctccatccaagtcgtcgtcgtaacaatctggtgaatggtgggggatgtagcctcttgccgcacggcgctggttgatagtttcgcgaagattgatgggatgcatgcgacgtggggagcggggatgttcagcccgacgctccctgtgccggtcaggaggcgagtggacagatcattcgccgtgatccctgctcctgcggctggatccgggaccgaagcggtgatcat

SEQ ID NO: 80435 - DNA, 3684 bp, Oryza sativa
  Clone ID: PAT_MRT4530_80058C.1
atgggtttcgtctccggcatcgacgacttcgtcttccctcccgggcaggcgttccggttcggcagcctcgacttcatcaccaacaacttcggcaagatttctctcctcgactcggattcgaaccagtcgggaagaggtcaggtcaccgccccgttcggtatcccgaactcggccgagatctaccccaagatcatctcaaccgagttggccacaaaccactcgaacgagatccaatatactccaacacgacccgatcaagacgatggagcctatccgccaatcctgatgaaactccccgatgacttggctgccgtgttcaccacaagggcgtcctctccccgtaggcctaggcgggatccggccccggccccgatccagtctagctccagggaagtcggcgtcataatccagcctctcggcacggtttcgacggaacaattggacggctacctcagctcccctggtgtcgactcacgaccaaccgagatcgtagagtacgacgacttcggctaccgctacgactaccacaacctcgatgacttcgatgaaggctttgaagataactacacgcgcctctactttggcattttcatggccgacaacgagacggaagaacagcgtcaagcccgagaagcagaagagcagcgcgtgcgacaggaagccgaacgtcgccgactggaggaggagcgccaagcacaagagcgagaacggctgcagcgtgagcaacaggagcgcgagcgagctgcaaaggaggctgaggaccggcgacagcgtgccttggaggccgagcgacgagcacgagaactcatagggcagcaagacgtcgaggggagggcggtttttcgcacccccaagcagaacgcggttgcaacgatcaccctcgtcgacaccctcctcaaggaagacgcactcaatcaggccaatcacgtcatcaacatcttgaaccagaccaagaccatgatcgctgcttcggtcccagtcaactccgcaagcgtccgcacgccgactggcagccgagttccgcctcttcgatctcaagactatcaccaaccaagcttcagcgtcgtcggcgcgggatccagtcgcaggagcagggatcatggcgagcgatgttcaaaaaagccaatgagtatgcaaaggtctaaaatgccgtcaccgcatccaagcagtcgggcaccacttggaagccgaagaaagatacgccgactacaggaggcagtggaagtaccaatcacaaggatcgcaagcgataggaaggatgcaatcaaggaggaattaactaagctgttagcagcaggcttcatcaaggaagccctacatcccgactggctggctaacccagtactggtttggaagaagacggggcaatggcgcatatgtgtcgattacaccggcctcaacaagtctcgtcccaaagaccccttcggtttacctcgcattgaccaggtagtttactcgacggccggctgcgagctactcagttttttggactgctactcaagatatcatcagatccgactaaaggagtccgactgcttgaagacttcattcatcacgcccttcggggcctactgctacatcaccatgccttttggattaaagaacgcaggagcaacttatcaacgcatgatccagagatgtttttcgactcagattggccgcaacgttgaagcttatgtggatgacatagttgtcaaaaccaagcagaaggatgatttgattacggatctagaagagacctttgcaagcatccgcacttttaggatgaaattaaaccctaaaaagtgcatcttcggagtaccgtcagggaagctgcttggttttatggtgtcccatagaggcatacaagccaacccggagaaaatcaacgccatcctcaacatgaaaccaccgagctcccagaaagatgttcaaaagttaactggctgcatggcggcactcagccggttcgtttcacgactcagcgagcgggggatgccttttttcaagctgctaaagaaaactgataatttccagtggggtcccgaagcacaaaaagcctttgaagacttcaagaaacttcttactactccaccagtcttagcttcgccacatctgcaagagccgctattgttatacgtgtcggcaactttccaggttgtaagcacagtcctggttgttgagcgtgaagaagaaggccatgttcaaaaagtccaacgaccaatctacttcgttagcgaggttttggccgactccaagacaagatatcctcaggttcagaagctgttatatggtgttttaattaccgttaggaaattatcccactactttcaaggtcactcggtcacggtggtcacattgtttccacccggggatatacttcataatcacgaagcaaatgggcggatcgcaaagtgggccttagagttgatgtctttggatatatccttcaagccgcgaacttctatcaagtcccaagctttagctgacttcgtcgccgagtggaccgagttccaagaggacacgcctgctgagaagatggagtattggactatgcattttgacgggtcaaagaggctttcaggcaccggagcaggggttgttctaatttccccgactggagagaggctgagctacgtattgtggatacatttttctgcgtcccataacgtggcggaatatgaggcgcttcttcgtggattaaagattgcgatttctttgggaattcggcgtctgattgttcgtggagattctcagttggtggttaatcaagtcatgaaagagtggtcctgtcttgatgataatatgactgcttatcggcatgaggtacgcaagttagaagataaatttgacggccttgagctaacccatgttcttcgacataacaatgaggcagccgacagactggccaattttggttcaaaacgagaagcagctccttccgatgtgtttgtcgaacatctctacgaaccaactgtaccgaggaaagaaatagtcgaggctacggacactcaagaagcctatcggcagggttttttctggcccacagctgtgtccgatgctgacaaaatcatgcgaacatgtgagggttgtcagttcttggcccgacagactcatctaccggctcaggagttgcaaaccatcccgctatcttggccgtttgcggtatgggggctcgacatgatcggcccgtttaaaaaggctatcagtggttatactcatctctttgtagctattgacaaattctccaagtggatcgaagccaaaccggtcgccacaatcacggcagacaaggctagagattttttcatcaacattgtgctttggtttggggtacccaatcggatcatcactaataacggtactcaattcactggcggagtatttaaagatttttgtgaagacttcggcatcaaaatttgttatgcctccgtagcccatcctatgagtaatggacaagttgaacgcgccaatggtatggtacttcaaggaataaaagcacgagtttttgaccgactgcatccctatgctgccaaatgggtagaacagctaccgtccgtactttggtccctgcgcaccacacctagtcgggccacgggccagtcatcatttttcctagtctatggtgcggaagcaatgttgccgagcgaggtagaattcgaatctttgcgattttgtaacttcagcgaggagcactatgggtaa

SEQ ID NO: 80436 - DNA, 4257 bp, Oryza sativa
  Clone ID: PAT_MRT4530_80059C.1
agcataaaaacgacgaagatgttcaatattccaagagttgtcaatatgagtaccgtcttcacgcttgagtcggtatgaacctggccgagtaacttcagaaattatgaacggtccttcccataaaggagataacttgtgccgatctcgtgtagtttgaattttccttaaaaccaggtctccgactaaaaaagctcgtgattgaacgttgcggttgtgataacgtcgcatcccttgtaaataccgagccgactggatcaaagctgtttcacgggcttcctccaatcggttgagatcatccactcggttttcttcgtagcgctcctctctgaagttacgaaatcgtaaagactcgaattctacctcgcttggcaacattgcttccgcaccataaaccagaaagaatgatgactggcccgtagcccgaccgggcgtagtgcgcaaggaccaaagtacagatggcagttgatccacccgtttgacagcgtagggacgcagtcggtcgaaaattcgtgcttttattccttggagtaccataccagtggcgcgtttgacttgtccattgctcatgggatgcgctacggaggcgtaacagatcttgataccaaagtcttcacagaaatctttaaatactccgccagtgaactgagtactattatcggtgatgatccgattgggtactccaaacctgtgcacaatgttgatgaaaaaatctctagccttgtctgctgtgatcgtgatgactggtttggctttgatccacttggagaatttatctatggccacaaagagatgagtataaccaccggtagcctttttgaacggtctgaccatatcgagcccccaaaccgcgaacggccaggataacgggatggtctgcaactcctgagctggtagatgagtctcttgagtgtctgtggcctcggtcgtttcttttcttggtacggtcggctcataaagatgttcaacgaacacatcggaaggagctgcttctcgttttgaaccgaagttggctagtcggtcggctgcctcattattgtgtcggagaacatgagttagctcaaggccatcaaacttatcttctaatttgcgtacctcttgtcgataggcagtcatattatcatcaaagcaggaccactctttcatgacttgattaacaaccaattgagaatctccgcgaactatcagacgtcgaattcccaaggaaatcgcgatccttaatccatgaagaagcgcctcataatccgccacgtcatgggacgcagaaaaatgtatccacaacatgtagctcagcctttctccagtcggggaaatcaggacgactcctgctccggtgcctgaaagcctttttgacccatcaaaatgcatagtccagtattccatcttttccgcaggcgtgtcttcctggcactcggtccactcggcgacaaaatctgctaaggcttgggacttgattgaagttcgtggcataaagccaagcagcttccctgacggtactccgaagatgcatttttcaggattcatcttcatcctgaaagcgcggatgctcgcaaaggtctcttctagatccgcaatcagattatccttctgcttggtcttgacaactacatcatcaacataagcttcaacgttgcgaccaatctgacttgaaaagcatctctggatcatgcgttgataagtcgctcctgcgttctttaatccaaaaggcatggtgatgtagcagtaggccccgaagggtgtgatgaatgaagtcttcaagcagtcggactcctttagtcggatctgatgatatcccgagtagcaatccaaaaagctgagtaactcgcagccggccattgaatcaaccacctggtcaatgcgaggtaatccgaagggatctttgggataggatttgttgaggtcggtataatcgacacacatgcgccattgcccggtcttcttccgaactagtactaggttagccagccagtcgggatggaggacttctttgatgaagcctgctactaacagcttggttaattcctctttgatcgcatccttcctatcttgtgcaaaacggcggagtcgttgtttgatgggtttggcgtcttccttgacatgtaaagagtgctcaatcacctctctgggaataccaggcatatcggatggtttccacgcaaaaatatctttattattcggaagagtgatctggctgagtggtgtagctgataatcctgggataacaccgtggaagggtgcattactcggctttaattccgtgcaaggaatctgcatatcgtccagggtcttagcgaaaaggatgttgagtgcactgccaccatcgatgagagttcttcggagcttgacattgcgaaccattgggtctagtaccagggggaaccgccccgggtggaccactcggtcgggatgatccgagcggtcgaacttaattgctatctctgaccaccgaaggtattggggcgtgttaggctgaaccgcattgatctcccgttctgttagcttctgctttctcttagattcataagccaggggtccgccgaagatgtgattgagttctttgcgatgatcttgaaaaccagtcggggcatcgttttcatcatctttcttctttgatgtgacttgatctccgtctgagggcttacgtgcattcttgacgtattgctccgcaaactgtttgtagacgaagcaatctttggccacgtggttggagttgggatgatgcggacattgggagttcattatcttgtcgaaggtgttgacgcgggaacgttgtagggaaaatggagaggttgttgccacaagttcttcgggcttacgcttgcgatccttgtggttgttacttccactccctcctacggtcggtgtatccttctttggcttccaagtggtgcccgactgcttggatgccgtaatagcatcttcggctttggcatactcattggctttttcaaacatctgtttgaccgtcttgggaggtttgcgtccgaacttgccgactaggtcctcgtggcgaatgcctttaataaaggcggcaatgataacgtcgtcggtgatgtcggagatcttgttgcgttgctcgaagaagcgtcggatgtaatctcgaagggattctccagacttgagaccatagactgtgagccaggactcagatcgttcatcatgtcccctgctcctgcgactagatccggcgccggctatgctgaggcttggctggtgatagtcctgagatcgaaggtgagggactcggctaccagtcagggtgcgggtgcttgcggagttggctggaaccgaggcagcaatcatggtcttcgtctggttcaagatgttgacaacatgatcagcttgattgagtgcgtcttccttgaggagggtgtcgaggagagtgattgctgcaaccgagttctgctggggggtgcgaaaaaccgctgttccattgacgtcttgttgcccgatgagctctctcgctcgtcgcccagattccaaggcgcgctgccgtcgatcttcagcctcctttgcaactcgctcgcgatcttgttgctcacgctgtagtcgttctcgctcttgtcgctgtcgttcttcctccaatcggcgacgttcagtttcttgtcgtgtgcgctcttcctccgcttctcgggctcggcgttgttcctccatttcgttgtcagccatgaatacgccgaaaaagataggcgtgtaattatcctcatagctgtcgtcaaagttgtcgaagtcgccgtagtcatagtggtagccgaagtcgtcatagtcgaggacctcgattagtcgagaactgacaccaggggagctgaggtagccatccaactcttctgtcgagactgtcccaagaggttggagtataacgccaacctccctggatctagattggatcggggccgaagccggggcttgtctagatcttcgagtgggagatgctttggctgtgaagacagcggccaaatcatcaggaagtctcatcaggattgagggataggacccgtcatcttgatctggtcgctgaggagtagattggatctcgtccgagtggtttgaaaccaactcgggagagatggtcttggagtaggcctcggccgagttcggaataccgaacggcgcggggacctggtctctccccgactggttcgaatccgagtcaaggagagagatcttgccgaagtcattggtgatgaagttgaggctgccgaaccggaacgcctgcccgggaggaaaggcgaagtcgtcgatgccggagacagaacccat

SEQ ID NO: 80437 - DNA, 958 bp, Oryza sativa
  Clone ID: PAT_MRT4530_8005C.1
tcacacgaacggacggccgagatcgacttgatccaaaacggacggccgagatcgatcggtccacgaccggtctacgacgaacggccccgatgacgtcagcggtgatgtcaccaccggcggcggcggctcggcggctcggacggcgcacgctcgccggcgaacggcggcactacggcacgaacggagggcaccaacgggtagcggacggcacgacggactcaccggcgaccaaagcgacggcggaagatcaacggacggcgacggcgacgaggaggaagcggcgaagctcttcgggtcgacggcggcgacgatgctccggcggtctccgacggtggcgaagcggcagacgaggacggcgacgacttggcgaccacgatgacgtccttcccgagcgacggcgacgtctggaacggcggcggcgcacggctggagcgacggcggcgacgacggcgctagggcacacggcgctagggcatttccgacgacgagaggcgaaggcaagggtggcggcgggtagagaagagctcggggtccttttaaaggggctcggaggcggcgacgaaggcccacggcggccggcgacgaggaggaaacttcgtggcttgaaggaaagaggccgatccgaatcgaactcgattccacgaacttccaaaacgatttagccgatgtttccaaaggagaaaaggtagaggagatcccgaggatcatttcccctctatcaattcggccggagaaggaaaggggcggccggatttggaaaggaacggcggcggcgcggcgctagggtttcgggcggcggctgcgcgaggaagacgacgactgacaagcgggacccacctgtcagcggcagcgagggcgcgcgcgggcggctcggctgcggactgggccgacttgggccggggagagagagagagaaggttttgggccgactttcggcccaaagccaaaagaagacttt

SEQ ID NO: 80438 - DNA, 368 bp, Oryza sativa
  Clone ID: PAT_MRT4530_80060C.1
tttttaaattagctagcaccctagttctctggctggttcctttcaaaaaaatctttggctactggctgattcttaatctgtgtgattagatagggcactccatgacggttcaatcaacgtgcatgcagctagctagataggcctaaaaattagcataaatagtcactaggatgtagataatggtaagaggtggagacagaaccagaattgcagtgctggctagttatccttactgctcttctgaccatgtgagacaatgtctgctgtagccccgttgcactagagttatagatatacatcctaaggggcgcaaggaagatgatgggacgctgcaggctttgagggcggggtctggggatgaggcttgc

SEQ ID NO: 80439 - DNA, 273 bp, Oryza sativa
  Clone ID: PAT_MRT4530_80061C.1
atggagatacaatatgagtttaattcggatagggatccaagtaggagttctacgggctttggaggcccgagtgatggatcctatatatttgtgaggggtgtgaccggcggaggtattgcatcaccgtgggagtacagcgagaagaacgcacgaggaggagaaggtcgagccggtgcgatcgactacttcctctacatcgatgcgcgctactttgtgagaattccttcgacttcttagcgcctttttccgctgcgcagcgcgtcgagtgataac

SEQ ID NO: 80440 - DNA, 4626 bp, Oryza sativa
  Clone ID: PAT_MRT4530_80062C.1
atgggttccgtctccggcatcgacgacttcgtcttccctcccgggcaggcgtttcggttcggcagcctcgacttcatcaccaacgacttcggcaagatttctctccttgactcggattcaaaccagtcagggagagaccgggtctcagccccgttcggtattccgaactcggccgagatctaccccaagcttatctcgatcgagtcggctccaaaacactcggacgagatcccatctacttcaacaccaccagatcaagacgatggggcttactcgccaatcctgatgaaactccccgacgatctggctgccgtcttcactacaaggacgtcttctccctgtaggcctaggcgggatccggcttcagcaccgattcggcctagctccaaggaagtcggcgtcatactccagccactcggtacggtttcgacggatcaattggaaggctacttcagctcccccggcgtcaactcacgactgacagagatcgtagagtatgatgaatttggctaccgctacgacaaccgcgacctcgacgacttcgacgaaagctttgaagataactacacccctctctacttcggcgtcttcatggccgataacgagacggaagaacaacgccaagcccgagaagcagaagcacgacgcaacgcggttgcggcgatcactctcctcgacaccctcctcaaggaagacgcactcaaccaagctgatcacgtcgtcaacatcttgaaccagaccaagaccatgattgctgcctcggtcccgcttcatgggttaccccgtggcacgatcggatcatgggcggaacttcgcgaccacttcatcgccaactaccagggcacctttgaacgccctgacacacagtttgatctctacaacgtcattcagaagtctggagaatcccttcgagattatatccggcgcttttctgaacaacgcaacaagatctccgacattaccgacgacgtcatcattgccgctttcaccaaggggattcgtcacgaagatctagtcgacaagttcaggtgcaagcctcccaggacggttaagcagatgttcgacaaagccaacgagtataccaaagctgaagatgccatcatcgtgtccaggcagtcgggtaccacttggaagccaaagaaagatgcgccgactacgggagagggtggaagtaacaatcacaaggaccataagcgtaaacccgaggaaccttttgcgactactacacaatcctcccgacaacgttcgcgcgtcaacacctttgacaagattatgaactcccaatgtccgcatcaccccaactccaatcatgcagccaaagattgcttcgtctacagacagtttgcagaacaatacgccaagaatgcacggaaggcctctgccggagatcaaagcacgtcaaaaaagaagaacgacgacgatgatgccctgacaggttttcaagaccatcgcaaggagctcaaccacatctttggcggacctctggcttatgaatctaaaagaaaacaaaagctgaccgaacgggagattaatgctgttcagcctgatacgccccaatatcttcggtggtcggagacaacaatcaagtttgaccgctcggatcatctagaccgagtggtccacccgaggcggtaccccctggtactggacccagtggttcgcaacatcaagcttcgcagatccctcatcgatggcgggagtgcactcaacatcctcttcgccaaaaccctggacgacatgcagatccctcgcacagaattgaaaccgagtaatgcgccctttcacggagtcattccagggttatccgctacgccactcggccagatcactcttccggtcaccttcggtactcgggagaacttccgcacagaaaacatctgcttcgaagtcgctgatttcgagacggcgtatcatgccatactcgggcgcccggcgttagccaaatttatggctgtcccgcactatacctacatgatgatgaagatgcccggtcctcgaggaatcatatccctacggagcgacatcaaacaagccgtcacatgcgacaaggaaagctgtgagatggcccaaacccacgagatcgcgatcgcccgagaagacatccgactggctgcaaccacggcaagcgaaggggaagtgcctacaaccaagatctcaaagagtggagaaagtgaagccaagaccaagaaaattcctctagatccttttgatcctactaaaactgctgaaagcgcgctcatcacctttcttcaaaataataaagatatctttgcgtggaaaccatccgatatgcctggtattcctagagaggtgattgagcactctttgcttgttaaggaagacgctaaacccatcaaacaacgactccgccgctttgcacaagacaggaaggacgcgatcaaggaggaattgaccaagctgttagcagcaggcttcatcaaagaagtccttcatcccgactggctggctaacccagtcctggttcggaagaagaccgggcaatggtgcatgtgtgttgattacaccgacctcaacaagtcttgccccaaagatccttttgggttgcctcgcattgaccagatagtcgactcgaccgccggctgcgagctactcagttttttggattgctactcaggatatcatcagatccgattgaaggaatccgactgcttgaagacttcattcatcacgccctttggggcctactgctatatcactatgccttttggattgaagaacgcaggagcaacttaccaacgcatgatccagagatgtttttcaactcagatcggtcgcaacgttgaagcttatgtggatgatgtagtcgtcaagaccaagcagaaagatcatttgatcacggacctagaagaaacctttgcgagcatccgcgctttcaggataaaattaaaccctgaaaaatgcaccttcggagtaccgtcagggaagctgcttggatttatggtgtctcatagaggcatacaagccaacctggagaaaatcaacgccatcctcaacatgaaaccgccgagctcccagaaagatgtccaaaagctgactggttgcatggcggcgctcagccggcgtttgatagttcatggatattcacagttggttgttaatcaagttatgaaagagtggtcctgccttgacgacaacatgaccacttatcgacaagaggtacgcaagttggaggataagttcgatggactcgaactcacccatgttcttcggcacaataacgaaacagccgacagattagctaattttggatcaaaacacgaagcagctccttccgacgtgttcgtcgaacatctttatgaaccgaccataccaagaaaagaaacggttgaggccacggacgctcaagacatagctatgattgaagccgactggagagagccccttatacaatttctgaccaaacaagaactcccccaagataaggatgaagctgagcggatctccaggcgtagcaggctctatattattcatgaggccgagcagtacaagaaaagtccatcaggaatcctgcaacgctgtgtgtctttggaggaagggagacaattgttgaaggatatacattctggtatctgtggcaatcacgcttctgcacggaccattgtcggcaaggcttaccggcaaggttttttctggcctacagctgtgtccgatgctgacaagattgtgcggacatgtgaaggttgtcaatttttcgctagacaaactcatctgccagcccaagagttgcaaaccatcccattgtcctggccgtttgcggtttgggggcgtgacatggtcggcccgtttaaaaaggcagtcggcggttatactcatctctttgtggctgtcgacaaattctccaagtggattgaagctaaaccggtcatcacaatcacggcagacaaggctagagatttcttcatcaacattgtgcgtcggtttggggtacctaatcggatcatcactgataatggcactcaattcactggcggagtatttaaagacttctgtgaagacttcgacattaaaatctgttacgcctccgtagcgcaccctatgagcaatggacaagtcgaacgagccaatggcatggtactccaaggaataaaggcacgagttttcgaccgactgaatccctatgccggcaagtgggtagaacagctgccatctatactttggtccttgtgtaccactctcagtcgggccacgggccagtcgcctttcttcctagtttatggagcagaagcaatgttgcctagtgaggtggaatttgaatctttacgttttcgcaactttcgcgaggagcgctacggagaagaccgagtagatgatctaaaccaactggaagaggcccgcgaagcagccttaattcagtctgcccgatacttgcaagggttgcgtcgttatcataatcgtaacgttcgatcacgagccttcttagtcggcgacctggttctgagaaaaattcaaactacacgagatcggcacaagttatccctcttatgggaagggtcatttataatctccgaagtcactcggccaggttcctaccgactcaagtgtgaagacggtactcctatcgacaactcctggaatatcaaacatcttcgtcgtttttatgcttaa

SEQ ID NO: 80441 - DNA, 3633 bp, Oryza sativa
  Clone ID: PAT_MRT4530_80063C.1
atgggtttcgtttctggcatcgatgacttcgccttccctcccgggcaggcgttccggttcggcagcctcaacttcatcaccgacgacttcggcaagatctctctccttgactcggattcaaaccagtcggggagagaccaggtccccgtgccattcgttatgaggataactacacgcccctcttcttcggcgtattcatggctgacaacgaaacggaggaacagcgccaagcccgagaagcggaccaagatcgcgcacggcaagaagctgaacgtcgccgactggaggaagagcgacagcgacaggagcgagaacgattacagcgtgagcaacaagatcgcgaacggattgcaaaggaggctgaagatcgacggcaacgcgccttggaatctgggcgccgagcgagagagctcattgggctacaagacgtcgatggaacagcgccaactccgcaagcacccgcaccccgactgggagcgccgagtcgaacggcctcgctctccacctcaccagcgtcccgtcgaccttcgcgacacgatcaaccagcgccgtgcagcacgaggtcaccgccattcaccaaatcgctacgacgacgacgtggatggagtagctgccttcactaatgacctgcgtggagtggattggccagccagctttaagccgactggaatcgagaagtatgacggcaccactaatccagagtcttggctcaccatctacggactcgcaatccgcgcagcaggaggagacaacaaggccatggcaaactatctacctgtggccctagcggactctgcccgatcctggctccacggactaccccgtggcacgatcggatcatgggcggaacttcgtgatcacttcatcgccaacttccagggcacctttgaacgccccagcacacagtttgatctctacaacgtcgttcagaagacggttaagcaaatgttcgaaaaagccaacgagtatgccaaagccgaagatgctattaccgcgtccaaacagtcgggcactacttggaagccaaagaaggacacgccgaccgcaggagggagtggaagcaacaaccacaaggatcgcaagcgtaagcccgaagaacttgtggcgaccacctctccatcttcccgacaacgttcccgcgtcaacaccttcgacaagataatgaactcccaatgtccgcatcatcccaactccaaccacgtggccaaagattgcttcgtctacaaacagttagcggagcaatacgtcaaaaacgcacgtaaaccttcagacggagatcaaggcacatcaaagaagaaagatgatgaagacgatgccccgactggttttcaagatcatcgcaaagaacttaatcacatcctcggcggacccctggcttatgagtctaagagaaaacagaagctaacagaacgggagatcaatgcggttcagcctaacacgccccaatatcttcggtggtcagagatagcaattaagttcgaccgctcggatcatcccgaccgagtggtccacccggggcggtaccccctggtactagacccagtggttcgcaatgtcaagctccgacggactctcatcgatggtggcagcgcactcaacatccttttcgttaagaccctggacgatatgcagattcctcgcacggaattaaagccgagtaatgcacccttccacggtgttatcccaggattgtcagctacaccactcggccagatcactcttccagttacctttggcactcgggagaattttcgcacagaaaatgtttgtttcgaagttgctgatttcgagacagcatatcatgctatacttggaggaccggctttagctaaatttatggccgtcccacactacacctacatgatgattaagatgcctggtcctcgaggagtcatatcactacggagtgacatcaagcaggccgtcacatgcgacaaagaaagttgcgagatggcccaaacccacgagactactctcgcccgcgaagagatccgactggctgcgaccatgggaagcgaggaagaagtgcctgcaaccaagctgacgaagaccgaagaaagtgatgccaagatgaaaaagattcccttagatccctccgatcctgataagactgctgtaataggcgttgagttagattacgccaaacctatcaagcaacgactccgccgttttgcacaggacaggaaggatgcgatcaaggaggaattaaccaagctgttagcagcaggcttcattaaggaagtccttcatcccgactggctggctaacccagtcctgatcggtcgcaatgtcgaagcttatgttgatgatgtagtcgtcaagaccaagcagaacgatgacctgattgcagatttggaagaaacttttgcaagcattcgagcttccaggatgaaactaaaccctgaaaagtgcatcttcggagtaccgtcagggaagttgctcggatttatggtatctcagagaggcatacaggccaacccggagaaaatcaacgccatcctcaacatgaaaccgccaagctcccaaaaagacgtccaaaagctgactggttgcatggcggtgctcagccaattcgtctcacaactcggcgagcgggggatgcccttcttcaagttgctgaagaagactgacaatttccagtggggacccgaagcacaaaaagccttcgaagacttcaagaaacttctcaccactccaccagttttggcctcgccacatccacaagagcctctactgttatatgtgtcggcgacctcccagtttgtgagcacggtcctggttgtcgagcgtgaagaggaaggccatattcaaaaagtccaacgaccaatttacttcgttagcgaggttttagccgactccaagacaagatatcctcaggtcatgaaagagtggtcctgtctagatgataatatgactgcttatcgacaagagcgctgtgtgtctttggaagaagggagacagttgttgaaggatatacattctggtatttgtggtaatcatgctgctgcacggaccattgtcggcaaagcttaccggcaaggttttttctggcctacagctgtgtccgatgcggacaagattgtgcggacatgcgaaggttgtcaattctttgccggacaaactcatttgccagctcaagagttgcaaaccatcccgttgtcctggccgtttgcggtctggggacttgacatggtcggcccgtttaaaagggcagtcggcggttacacgcatctctttgtggctattgacaaattctccaagtggattgaggctaaaccggtcatcacgatcacagtagataaagctagagattttttcatcaacattgtgcatcggtttggggtacctaatcggatcatcactgataatggcactcaattcactggcagagcatttaaagacttttgtgaagacttcggcattaaaatttgttacgcctccgtggcacaccctatgagtaacggacaagtcgagcgcgctaacggcatgatacttcaagggatcaaagcacgagtttgcgaccgactacgtccctatgctggcaagtggaagcaatgttgccaagtgaagtggaatttgaatcactacaatttcggaacttcaacgaggagggctatgaagagggccgagtag

SEQ ID NO: 80442 - DNA, 2022 bp, Oryza sativa
  Clone ID: PAT_MRT4530_80064C.1
atgggcagaaggagctatatagaaggtcagaacccgaggtgctgccacaacctcctcgctgccaaatctggaggccatgacaccaccatcacaccgcttgagctgtcaccaaggcatcaagttgcggccatcatcaacccttcgccctccaacctcctccttcccggcgtctgtcgtgaaaccaggccatgcccgctatctcctcctacttggccctcccttctcccccttacggtggaggcggcagcacaagggacagatcctatggcccctgaggtcaaaccttccaaatcttatgagtaccaccagaataacattttgagatacttgccaaaatgcactcttgattacattgtggatgctgctgaggaatttagcatgccacatgtctgcccttcttcatacaatgacttccttgcaatggttgcgatgaagcctggccgcctgttgccacctaacccgcgatccgaccggtctgtgaccggtcaccactgcgaccggtcacggaccggcgtgctgccgccttcccgcatcgtgagcgagaggcaggccgggctgccgcgccgattcatgccggaatctgccaccagccgggaggtggtcgtgctgggcgaaggacgcccggcgccacactacccggggcggtccgtcttcttcctctctttcgcaatggcagggctggtcccgccattctcttcttttttcatggatattctggagttttatgatctccagatggcgcacctcacccccaacgcggtaatgacgttggccatcttcccacacctgtgcgagatgttcatcggggtgcgcccatctctccggctgttccggtggttcttcaccgtacagccggtgccgccgccgtcggtagtcggtggctgctacttccagccgcgggggcaggtgctgcaccgctacattccctgcgtcctccgcaagaagtgggacgactggaagagcgattggttctacacccccctcgccgacgaagcgcgcctccgacttccgagccagcccccggcgcaggcctccagctggcgggcgacggtagatctgggagacggctacgacgccgttcttgaccgcctggcgggtctgcgatccgagggactcactggcgccatggtgttcggcgactaccttcgtcgccggatcgcgccgctccaacggcgcgcccggggcgcctgggagtactccgggccggaggacttcatgaggacccaccaggggcgcacatgggactgggaccctgaggacttcaagatggtggtccaacgggtgctgaatctcagctccgtggaggcatccctcatcccccaaggagtcctccccctctgctgcgatccagagcgcgccaacatcctgaccatcatgcaggcggtcggggcgtcgggggagcaggccctccgtggccacgatggcgcgggcgggagctgcagggggaacaatctaccccgggagggggtcgtgcttctgggccccacgacgggggcctggggggcagctgtcacgcccagaaattcccgaatagaatttcaagcagaatgtgcattaaaatccccgtccaggaccggccggggtgaatccggaagccgcataggccgtcgcagggcccatccaaactccatcacgcccacccttgcctggatgcgtcggctagagaaaagctacactacaagcccagccgttgcccacgctggcttgtgggctgacgtcagcacggagggggtgcggcaccgacatgcggggcccactggtcagcggcccgggagagggcggtccacggcggatcggatccacggaccggggaggagcggtgccgacatgcggggcccaccggtcagcggcgcgggagaggggaaaaagggcggcggcacgcggctcggcttggctcaaggccggccgaccgaccgcggcgacggcgacgacgcgcgcgcgaacgcgttgccggcgacgcatgcgaccgacggcgaatgcgacggcgcaaacggcgacgcggaggcggctgcgcggcactag

SEQ ID NO: 80443 - DNA, 528 bp, Oryza sativa
  Clone ID: PAT_MRT4530_80065C.1
atggccaagtcgacccccgtggcggcggcgcccgaggaggcgacggccgtgatggccggcggcgtaggcggagggaaggaggcattcgacgaggcggcggcggcgctcgcggcgctgagagacgcggagctgggcccgcggcggaaggacagcggcgaggtccaggcggagaggaggaggagggggcatgcggaggaacgcctcgtcatcgtcgtcgcagcgctgctcccatcatcgtcgtcatcgcaacgccgccgtcgccggccatcgtcgcagcgccgccgctgttgtcgtcgtcgcgcagcaccaccccgtcgtcgtcgtcgcgcagcgccgccccgtcgtcgtcgtcgcggcgccgcccccgtcgtcgtcgcagcgtcgtcacgtgttgctcgtgggaggaggaaccggtggagttggacaaaaacgcggcggccaacggcgccgtggtggatgccgggaggagctgcagctcaggcggcggcggcggatgctgatgatgatgccgcagcgccatttggctag

SEQ ID NO: 80444 - DNA, 4191 bp, Oryza sativa
  Clone ID: PAT_MRT4530_80066C.1
atgggtttcgtttctggcatcgacgacttcgccttccctcccgggcaggcgttcaggttcggcagcctcaacttcatcaccaacgacttcggcaagatctctctccttgactcggattcaaaccagttggggagagaccagggcacctttgaacgccccggcacacagtttgacctctacaacgtcgttcagaagtctggagaatcccttcgagattacatccgacgcttctccgaacaacgcaacaaaatctccgacatcaccgacgacgtcatcatcgccgccttcactaaaggcattcgccacgaggatctagtcggcaagttcggacgtaaacctcccaggacggttaagcagatgttcgaaaaagccaacgagtatgccaaagccgaagatgttatcaccgcgtccaaacagtcgggcaccacttggaagccaaagaaggacacgccgaccgcaggggggagtggaagtaacaaccacaaggatcgcaagcgtaagcccgaagaacttgtggcgaccacctctccatcttcccgacaacatccccgcgtcaacaccttcgacaagataatgaactcccaatgtccgcatcatcccaactccaaccacgtggccaaagattgcttcatctacaaacagttcgcagagcaatacgttaaaaacgcacggaaacctgcagacggagatcagggcacatcaaagaagaaagatgatgaaaacgatgccccgactgattttcaagatcatcgcaaagaacttaaccacatcttcggcggacccctggcttatgagtctaagagaaaacagaagctaacagaacgggagatcaatgcggtccagcctaacatgccccaatatcttcggtggtcagagacagcaattaagttcgaccgctcggatcatcccgaccgagtggtccacccggggcggtaccccctggtactagacccagtggttcgcaatgtcaagctccgacggactctcatcgatggtggcagcgctctcaacatcctttttgctaagaccctggacgatatgcagattcctcgcacggaattaaagccgagtaatacacccttccatggtgttattccaggattgtcagctacaccactcggccagatcactcttcgagttaccttcggcactcgggagaattttcgcacagaaaatgtttgtttcgaagtcgctgatttcgagacagcatatcatgctatactcggacgaccggctctagccaagttcatggccgtcccgcactacacctacatgatgatgaagatgcctggtcctcgagggatcatatcactacggagcgacatcaagcaagccgtcacatgtgacaaagaaagttgcgagatggctcaaacccacgagaccactctcgcccacgaagagatccgactggctgcgaccacggcaagcgagggagaagtgcctgcaaccaagctgacaaagaccgaagaaagtgatgccaagacgaaaaagattcccttagatccctccgatcctgacaagactactaataataaagatatttttgcgtggaaaccatccgatatgcctggtatccccagagaggtgattgagcactctttacatgttaaggaagacgccaaacccatcaagcaacgactccgccgttttgcacaggacatgaaggatgcaattaaggaggaattaaccaagctattagcagcaggcttcattaaggaagtccttcatcccgactggctggctaacccagtcctggttcggaaaaagacggggcaatggcgcatgtgtgtcgattatacggacctcaacaaatcttgtcccaaagacccttttgggttacctcgtattgaccagatcggtcgcaatgtcgaagcatatgtggatgatgtagtcgtcaagaccaagcagaaggatgacctgattgcggatttggaagaaaattttgcaagcattcgagctttcaagatgaaactaaacccggaaaagtgcatcttcggagtaccgtcagggaagttgcttggatttatcgtatctcagagaggcatacaggccaacccggagaaaatcaacgccatcctcaacatgaaaccgccaaactcccaaaaagacgtccaaaagctgactggttgcatggcggcgctcagccggttcgtctcacgactcggcgagcgggggatgcccttcttcaagctgctaaagaaaactgacaatttccagtggggatccgaagcacaaaaagccttcgaagacttcaagaaatctctcaccactccaccagttttggcctcgccacatccacaagagccgctactgttgtatgtgtcggcgacctcccaagttgtgagtacggtcctggttgtcgagcgtgaagaggaaggccatattcaaaaagtccaacgaccaatttattttgtcagcgaggttttagccgactccaagacaaggtatcctcaggttcaaaagttattatatggtgtcttaattaccgtcaggaaattatctcactattttcaaagtcacccggtcacggtagtcacatcgtttccactcggggatatacttcacaatcgcgaagcaaatggacggattgcgaagtgggccttagaattgatgtctttggacatatctttcaaaccacgaacttcgatcaagtcacaagctttagctgatttccttgctgagtggaccgagtgccaagaagacatgccagaggaaaagatggaatattggaccatgcattttgatgggtcgaagaggcttacaggcactagagctggggtcgtcttaatttccccgactggagaaagattgagctacgtattgtggatacatttttctgcgtcccataacgtggcggaatacgaggcgctactccatggattaaggattgcaatttctttaggcattcgccgattaatcgtccgtggagactcccagttggttgttaatcaagtacgcaagctggaagataaattcgatggactcgagctcacccatgtccttcgacataacaatgaggcagccgacagactggccaattttggttcaaaacgggaagcagccccttctgatgtgttcgttgagcatctttatgaaccaaccgtgcccataaaagaagcaattgaagccatggatactcaaggcgtaagcgtgattgaagccgactggagaaaacctctcataaaatttttaaccaaacaagaactccctcaagacaaaaatgaagccgagcggatttccagacgcagcagactttacattattcatgaagctgaactgtacaagaaaagtccatcaggaatactgcagcgctgcgtatctttggaggaagggagacaattgttgaaggatatacattctggtatttgtggtaatcatgctgctgcacggaccattgtcggcaaagcttaccggcaaggttttttctggcctacagctgtgtccgatgcggacaagattgtgcggacatgcgaaggttgtcaattttttgccagacaaactcatttgccagcccaagagttgcaaaccatcccgttgtcctggccgttcgcggtctgggggcttgacatggtcggcccgtttaaaagggcagttggcggttacacgcatctctttgtggctatcgacaaattctccaaatggattgaggctaaaccggtcatcacgatcacagcagataaagctagagattttttcatcaatattgtgcatcggtttggggtacctaatcggatcatcactgataatggcactcaattcactggcggagcatttaaagacttttgtgaatacttcggcatcaaaatttgttatgcctccgtggcacaacccatgagtaacgaacaagttgagcgcgctaacggcatgatactgcaagggatcaaagcacgagtttttgaccgactacgtccctatgctggcaagtgggtagatcagctgccgtccgtactttggtctttacgcactactcctagtcgggctaccggccagtcgccgttctttttggtttatggtgcagaagcaatgttgctaagtgaagtggaatttgaatcactacgatttcggaacttcaacgaggagagccatgaagagggccgagtagacgacatcaaccgactagaagaagcccgagaagcagctttaattcaatcgactcgatatttgcaagggttgcgtcgttatcataattga

SEQ ID NO: 80445 - DNA, 3471 bp, Oryza sativa
  Clone ID: PAT_MRT4530_80067C.1
atggatcggcaatggatgtacgctgaccggcggtccaaagagtttattgacgacgtgcactattttttgagagtggccgaagctaacaggcaaaggggttttatttgttgtccatgcaataagtgtaagaatcagaaggagtattctgcatcgaggactattcatttccacttgtttgagtcggggttcatgccaagctataattgttggacatcccacggagagcaaggtgttgaaatggaagaagataaactggaagacgacaatattccggactttgctcagtatgttggatttgaaggaaatcaaacgggtgaggaggaaagagatgcaaattctggttcgagaatttctgggtgtgacaatgctgatggtaacgctaaggaggactgcgaaagtgaaaagggggcccataaattggacaagatgttagaggaccacagaacatcgttgtacccaggttgcgagcaggggcacaaaaagttggataccactctggagttcttgcaatggaaggcaaaaaatagggttagtgacaaggcatttggcaatttattgaaactcgtcaagaacattcttccggagggaaacaaattgcccgagacaacgtacgaggctaagaagatagtctgcccgctaggactagaagttcagaagattcacgcatgtccgaatgattgtatcctatatcgcggtgaggagtacgagaatctagaagcatgccctgtttgcaaagcactacgatacaagattagacgagacaatccagaagaagttgacgggcagctaacaaagaagagaattcctgctaaggtgatgtggtatttccctataatactacggctaaggcgtttgttcaggaacaaacggaatgctagaatgatgcgatggcacgctgaagagcgtcaacaggacgggatgctgagacaccccgccgatggttcgcagtggcgaaacatcgacagaaaatttaaagactttggaaaggacgcacgaaacatacggtttggtttgagtacagatggcatgaatccttttggagagatgagcagcggccatagcacttggcccgttacgatgtgtatctacaacctccccctggctatgcatgaagagtaagtacataatgatgccgattattattcaaggccccaagcaacctggtaacgacatcgatgtgtacctaagaccactggtcgaagatcttaaactgttgtggaagaaagaaggtgtccccatgtgggacgaggacaaacaggaggagtttaacctacgagcgctgctgttcataactatcaacgattggcctgcacttagcaacctatccggacagtccaacaaggagtacaaggcttgcactcactgtatggatgaaacagaaagtacgtatcttaagcactgtaggaaggttgtatacatgggtcatcgtcgattccttgcagcaaaccacccggtatggaagaaaggtaagcacttcgaacataaggctgaccaccgtacgaagcctaaacatcgcagcgggaaaacagtgtttgctatggttaaagatcttaaagtagtgttcggaaaggggcctggaagccagcctatagagagcgaagatggtcacgcgctgatgtggaaacagaactctatattttgggagttaccctattgggaattcttggacgtccgccacgcaatcgacgtgatgcacctcactaagaacctttgcgtaaaccttcttggcttcctaggtgtatacggaaagtcaaaagatacactggaagcacgtaatgatctgaagcatatggaacaacgcggcgaccttcacccggaaccaaaggagaaaggaagccattacttgagtccagccagctacactcttagcaaggcagagaaggaaagtatgtttgaatgcttggagagcataaaggtaccgtctggatactccacgaatatcaagcgaataataagcacgaaggagaagaagttcacaaaccaaaagtgtcatgactgtcacgtgttgatgacacaactgctaccagttataataaggggtatccttccagacaatgtccgggaaacaataacaaagctatgtacattcatgaacgcaatttcgcagaaggtcatcgatccagatatattagaagcccttcagaatgatgtggtgcaatgtctcgtcagttttgagttgatatttctaccttcatttttcaatataatgacgcatctgctttgtcaccttgtcaaagagatcagtattctcggacctgtgtacatacacaacatgtttcctttcgagaggtacatgggcgttctgaagaagtatgttcataaccgtgcttgtccagaggcaagcatcgccaagggttatggaacagaggaggtcatcgaattttgcgtagaatttatcgaagacattcacccaatcagggtacctgaatcacggcatgaagggagactacggggaaagggaactctcggaaggaaagcaataatgacggtagacaacaatttattctgtaaagcccatttcacggttctgcaacaatcttcattggtagctccttacatcgaggagcacttggctctagttcgcgccaggaacatcggtaagtccgatgcatggattacaaggcatcacattgatactttccccgcgtggctacgacaacatctcatgggtaacgagtcgatcaaccaacaacttgccttcctggcgaggggaccgtctgggtcgatcgcgacattccagggatatgagatcaatgggtacacattctacacgagagcccaagacatgaagagcacgaaccaaaacagcgttgttcgtgtcaatgccatgggacacgatggaacaattggcacgtattacggtgccatcgaggacatatgggaacttgactatggtcctctcaaggtccctctgttccggtgccaatgggttaggttgactggtgaaggcgtaatgattgatgacagtgggatgacaacggttgaccttaacaaggttggatactcggacgaaccttttgtccttgctaatgatgtaacgcaagtcttttacgtgaaggacatgtctagcaaaggaaagaagggcagagggcctgacgagcctaagcgtcacgtggttctcccaggcaaaagaaaaatcgtcggagttgaggacaagactgacgaggattacgatcagttggatgggcaaccccctttcacggtgacgattgaccctagcatcctcctatcaaatgaagacaccccttactcacgtagcgatcacaaggagggaacaatagtgaggagaaaccgtgcgccgccgtcgctccagtcgtcgccgtcgctcggggaggtcgccatcgtggtcgcccctccgccgttgctgtcgaccgccagaacaccgccgtcgtcgtcaagccgaaggtcgccgccgcttcttcctcgacgccgtcgccgtccgttgatcttccgtcgccgctttggtcaccg

SEQ ID NO: 80446 - DNA, 1884 bp, Oryza sativa
  Clone ID: PAT_MRT4530_80068C.1
atggacatctctaggacaaatgaaggctacacgagctgcggcccggtagtcgagatgtcatggcacagggctggtgtcctgctgctaggggctcaatcctgcctgcctgtcccggaggttccggccgtaggagcaacttatcaacgcatgatccagagatgtttcccaactcagatcggccgcaatgttgtagcttatgtggatgatgtagtcatccagaccaagcagaaggatgatttgatcacggatctagaagaaacctttgcgagcatctatgctttcaggatgaaactaaaccctgaaaagtgcatcttcggagtaccgtcagggaagctgcttggatttatggtgtcccatagaggcatacaagccaacccggagaaaatcaatgccatcctcaacatgaaaccgccaagctctcagaaagatgttcaaaagctgactggttgcatggcggcgctcagccggcacaataatgaggcagccgacagactggcaaattttggttcaaaacgagaagcagctccttccgacgtgttcgttgaacatctctacaaaccaactgtaccaaggaaagaaacaattgaggccacggacactcaagacataactgtgtccgacgccgacaaaattgtgcgaacatgtgaagtttgtcaatttttcgcccgacaaactcatctgccggctgttaacaaattttccaagtggatcgaagccaaaccagtcattacaatcacggcagacaaagctagagattttttcatcaacattgtgcaccggtttggggtacctaatcggatcatcactgataacgacactcaattcatcggcggagtatttaaagacttttgtgaagacttcggcatcaaaatttgttatgcctccgtagcgcaccccatgagcaatggacaagtcgaacatgccaatgcggaagcaatgttgccaagtgaggtggaatttgaatccctacgattttgtaacttcagcgagaagcgctacggagaagaccgagtagacgacctcaaccgactagaagaagcccgtgaagcagccttaattcagtcggctcgttggccgaaggtcgttgtcctggaatctctcaactacatcaacggctatcttatcggcagctttttgcgcgtcattgatgaggtcaagggtggcttcttcgctcgtcccgtccgcaaagccatcaacggcgtcaatgtcaatcttcggttcaaagttggagtcttgaagctcggcgatccggtccctcagatcatgctcagttttcctggcaagctccttagcttcgtacagctggtttctggtggcctcaagggtgctcggcgtggttcccctagccctagcccctcctctgccacgctgcctcgcgcccggcgcgccgcgcgccgcgcgccactctgcctgccctctgccgtcgccgctgcgccgcgcgccgtcgccgcccgtcgcgtcgccgctgtcgccgtcgccgtcgacgtcctgtcgccgctcgcgcgtcccatcgccgcctcgcgccccgagccgccgcgcgccgtcgccatcgtcgcttgccgccgtgcgccgccgtcccattgccgctgccgcaccgcgtcgccgtcgcgtcctgtcgccctcgagccccgcgccgcgcgccgtcgcccgcgcctcgagcccgcgccgtcgccgtcgtgtcgccgtcaccctcgagccctgcaccgccccgtcgccatcacgtcgcccgtcgccattgtgtcgccgtcgccgcgcgccaagccccgcgccgtcccgtcgtcgccccgcgtgtcacgccgctcccacgccacccgtcgtgtcgcccgtctcaagccccgcaccgccgcccgtcgcatagccgctccgagccccgcgccgccatag

SEQ ID NO: 80447 - DNA, 3198 bp, Oryza sativa
  Clone ID: PAT_MRT4530_80069C.1
aggggaggtcatgccaaaatttctattgaatttattttggtgattacatacaaatcggaggtgcctaaaaggtttatggatcggcaatggatgtacgctgatcggcggtccaaagagtttattgatggcgtgcactattttttgagagtggccgaagctaacaggcaaaggggttttatttgttgtccatgcaataagtgtaagaatcagaaggagtattctgcatccaggactattcatttccacttgtttgagtcggggttcatgccaagctataattgttggacatcccacggagagcaaggtgttgaaatggaagaagatgaagtggaagacgacaatattccggactttgcttagtatgttggatttgaaggaaatcaaacgggcgaggaggaaatagctgctgatggtaacgacgttgcggatgatcttggtcagatgttgcaggatgccagggaagactgcgaaagtgaaaaggaggcccataaattggacaagatgttggaggaccatagaacttcgttgtacctaggttgcgagcaggggcacaaaaagttggataccactctggagttgttgcaatggaaggcaaaaaatggggttagtgacaaggcatttggcgatttattgaaactcgtcaagaacattcttccggggggaaacaaattgcccgagacaacgtacgaggctaagaagatagtctgcccgttaggactggaagttcataagattcacgcatgtccgaacgattgtatcctatatcgcggtgaggagtatgagaacctagaagcatgccctgtttgcaaagcactacgatacaagattagacgggacgatccaggagaagttgacgggcagctaacaaagaagagaattcctgctaaggtgatgtggtattttcctataataccacggctaaggcgtttgttcaggaacaaggggaatgctagaatgttgcgatggcacgctgaagagcatcaacaggacgggatgctgagacaccccgccgatggttcgcagtggcgaaacatcgacagaaaatttaaagaatttggaaaggacgcacgaaacatacggtttggccccaagcaacctggtaacgacatcgacgtgtacctaagaccactggtcgaagatcttaaacagttgtggaagaaggaaggtgtccccgtgtgggacgaggacaaacaggaggagtttaacctacgagcgctgttgttcgtaaccatcaacgattggcctgcacttagcaacctatccggacagtccaacaaggggtacaaggcttgcactcactgtatggatgaaacagaaagtacgtatcttaagcactgtaggaaggttgtatacatgggtcatcgtcgattccttgcagcaaaccacccggtacggaagaaaggcaagcacttcgaacataaggccgaccaccgtacgaatcctaaacatcgcagcgggaaaacagtgtttgctatggttaaagatcttaaagtagtgttcggaaaggggcctggaagccagcatatagagagcgaagatggtcacgcggcgatgtggaaaaagaactctattttgggagttaccatattgggaattcttggacgtgtatacggaaagtcgaaagatacactggaagcacgtaatgatctgaagcatatggaacaacgcggcgaccttcacctggaaccaaaggagaaaggaagccattacttgagtccagccagctacactcttagcaaggcagagaaggaaagtatgtttgaatgcttggagagcataaaggtaccgtctggatactccacgaatatcaagcgaataataagcacgaaggagaagaagttcataaacctaaagtctcatgactgtcacgtgttgatgacacaactgctaccagttgtaataaggggtatccttccagacaatgtccgggcaacaataacaaagctatgtgcattcatgaacgcaatttcgcagaaggtcatcgatccggatagattagaagcccttcagaatgaagtggtgcaatgtctcgtcagttttgagttgatatttccaccttcatttttcaatataatgacgcatctgctttgtcaccttgtgaaagagatccgtattctcgggcctatgtacctacacaacatgtttcctttcgagaggtacatgggcgttctgaagaagtatgttcgtaaccgtgctcgtccagaggcaagcatcgccaagggttatggaacagaggaggtcatcgaattttacgtagaatttatcgaagaccttcgcccaatcggggtacctgaatcacgccatgaagggagactacggggaaagggaactctcggaaggaaagcaataatgacggtagacaacaatttattccgtaaagcccatttcactgttctgcaacactcttcattggtagctccttacatcgaggagcacttggctctagttcgcgccaggaacatcggtaagtccgatgcatggattacacggcatcacattgatactttccccgcgtggctacgacaacatctcatgggtaacgagtcgatcaaccaacaacttgccttcctggcgaggggaccgtctgggtctatcgcgacattccagggatatgagatcaatgggtacacattctacacgagagcccaagacatgaagagcacgaaccaaaacagcgctgttcgtgtcgatgccatgggacacgatggaacaactgccacgtattatggtgccatcgaggacatatgggaacttgactatggtcctctcaaggttcctctgttccggtgccaatgggttaggttgactggtggaggcgtaatgattgatgacagtgggatgacaactgttgaccttaacaaggttggatactcggacgaaccttttgtccttgccaatgatgtaacgcaagtctttttcgtgaaggacatgtctagcaaaggaaagaagggcagagggcctgatgagcctaagcgtcaagtggttctcccaggcaaaagaaaaatcgtcggagttgaggacaagactgacgagcattacgatcagttggatgggcaaccccctttcacagtgacgattgaccctagcatcctcctatcaaatgaagacaccccttactcacgcagcgatcacaaggagggaacaatagtgaggagaaagtacgtgcggtcaaccgtcaccgccgatgtaatgccgtaa

SEQ ID NO: 80448 - DNA, 465 bp, Oryza sativa
  Clone ID: PAT_MRT4530_8006C.1
cgtctccctgccggaggcgagctcgcgccgtcgccctctctctccttcgtcgccgacgacctccggctggccttctccgcttgccgggaccgtctcccgccccggcgtcgcctcctctggctgcgccgcaccgccgtcgaccccgtccaccccctcgccgagtccgccgaccgccagaacaccgtcgaccccgtcgacccgagccgcgccgctgccttcctccgctccggccgcctttttggtcgtcgccgtcgacctagggtgagccgtggaccgccgcctcttttccccctttccttcccctctatcggccgccggtccgccgtgcctatggccgccgctggcgaccataggggcgcgggcgccgcctcccgccggtcgcgccgagtggccgccttcgggcgcgccgagtggccgctgcgtggggcccggccgtcagccgcccgctccctcgggtgcggctga

SEQ ID NO: 80449 - DNA, 1513 bp, Oryza sativa
  Clone ID: PAT_MRT4530_80070C.1
aatctttttttttttttttttttttttttttttttttggaagaaaattacccttgttatgtacatcaatgctctagattgtactacagcattttttacgtcaaacaaaaattgtagagctatatactgtatgcgaagctacaaacctcttcatgagaacatatacacaccttgcagcagcggtagcagctagcagcagcagcatcatcatatctatcctaattaagtacgagagcatgacatcatctgaagtacacccctgaagcaaacaggcaaccagtacacagagtaggcagaggcggatcggatcggccatatcaacaatgcttgggcgaattcctccgcggcgagaagaggcggcgcggcgagagcatggtgaggaacctcggcgaggcgatgccgttgagcgaccggtagtccgacatgaggaggccctccgtgttctcgtgcaccctggtgcgcccgggcgtcatcctcgccgtgaaggtgctgtacttgaccagcttgggcagccacgccttcttcttcctcttgccgtcgccgccgttcatcctcgcggtgaggtaggcgcgcatggcgtccaggccctgctccacgacgtccatgggcggggacaccagcgggttgccgacggcgctgaacctggcgagcttggtgaggcagcccatggagtccgggagcgcggcgatggagttgtagctgacgtcgagctcccggagcgaggcgaggaggccgacggcgtaggggagctcccggaggaactggaagttctggctgacgttgagcgcctcgaggttggcgaggttctcgagcccgtcggggagcgcgcggaggcagttgagccgggcgtccagcgccctgagcgccgtcatgtgcgacgtcgaggaggggagctgcgccagcttgttggagttcaccgacagcttccggaggctgtgcagctcgaaccccagcgtgtccggcagcttcgtcagctcgttgaagttggcgtgcagctcctccagcgcacggcactcctcgatggtgttggggagggactcgagcaggttgccggagacgttgaggaccttgagcttggagaggcagccgatggagttgggcagcgatttcagctggttggaccgcacgtccagcaccaccacgttcagcagccgagcgattattgactccgggatgctctcaagattgttgttagagagatccaagatggtgacttgaccaagagacatggtgaggtgtgggagggcatccatggacatgccactcatgtctagcttatgctcctcgttcttcttctcctcatgatcatgcaaccctcctgcaaaaccagcagggttaaggtgtccacgcctcctcttctctcccatttccctcatgcttccaatcttcttctccacttctgatatacctggtcaggctcaagagagttcttcaattcagagcatgcagcacgcaacacggcttgaggcaacgaggtctcggcaaagctgaggaggaaggaggcgacgcgtggg

SEQ ID NO: 80450 - DNA, 612 bp, Oryza sativa
  Clone ID: PAT_MRT4530_80071C.1
cgacagaagcgagaacgaatacagcgtgagcaacaagatcgcgaacgggttgcaaaggaggctgaagatcgacggcaacgcgctttggaatccggcaatcactcttctcgacaccctcctcaaagaagacgcactcaaccaagctgatcatgtcgtcaacatcttgaaccagacgaagaccatgatcgctgcctcggttccagccaactccgcaagcacccgtaccccgactggggtcacgacgaacgatctattcactcgcctcccgaacgtcacagggagcgccgagtcgaacggcctcgctctccacctcaccagcgccccgtcgatcttcgcgacacaatcaactagcgccgtgcagcacgagccgactggaatcgagaagtatgacggcaccactaatccagagtcttggctcaccgtctacggactcgcgatccacgcagcaggaggagacagcaaggccatggcaaactatctacttgtggccctagcggactccgcccgatcctgtctccacggactaccccgtggcacgatcggatcatgggtggaacttcgtgatcacttcatcgccaacttccagggcaccttcgaacgccccggaacaca

SEQ ID NO: 80451 - DNA, 3272 bp, Oryza sativa
  Clone ID: PAT_MRT4530_80072C.1
atgtggcggcggcgggcgcgcctcgcgatccccacgtgcctccccgcaccggggagccgggccattgcgaggcgtgctatgttttgcacacttttttgtctccaaaatttaattatggatcggcaatggatgtacgctgaccggcggtccaaagagtttattgacggcgtgcactattttttgagagtggccgaaactaacaggcaaaggggttttatttattgtccatgcaataagtgtaagaatcagaagaagtattctgcatccaggactattcatttccacttgtttgagtcggggttcatgccaagctataattgttggacatcccacggagagcaaggtgttgaaatggaagaagatgaagtggaagacgacaatattccggactttgctcagtacgttggatttgaaggaaatcaaacgggcgaggatgaaagggatgctgatggtaacgacgttgcggataatcttggtcagatgttgcaggacgccaaggaggattgcgaaagtgaaaagggggcccataaattggacaagatgttagaagaccatagaacttcgttgtacccaggttgcgagcaggggcacaaaaagttggataccactctggagttcttgcaatggaaggcaaaaaatggggttagtgacaaggcatttggcgatttattgaaactcgtcaagaacattcttccggagggaaacaaattgcccgagacaacatacgaggctaagaagatagtctgcccgctaggactggaagttcagaagattcacgcatgtccgaatgattgtatcctatatcgcggtgaggagtatgagaacctagaagcatgccctgtttgcaaagcactacgatacaagattagacaagacgattcaggagaagttgacgggcagctaacaaagaagagaattcctgctaaggtgatgaacaaggggaatgctagaatgatgcgatggcacgctgaagagcgtcaacaggacgggatgctgagacaccccgccgatggttcgcagtggcgaaacatcgacagaaaatttaaagaatttggaaaggacgcacgaaacatacggtttggtttgagtacggatggcatgaatccttttggagagatgagcagcggccatagcccttggcccgttccgatgtgtatctacaccctccccccctgtctatgcgtgaagaggaagtacataatgatgccgattattattcaaggccccaagcaacctggtaacgacatcgacgtgtacctaagatcactggtcgaagatcttaaacagttgtggaagaaggaaggtgtccccgtgtgggacgaggacaaacaggaggagtttaacctacgagcgctgctgttcgtaaccatcaacgattggcctgcacttagcaacctattcggacagtccaacaaggggtacaaggcttgcactcactatatggatgaaacagaaagtacgtatcttaagcactataggaaggttgtatacatgggtcatcgtcgattccttgcagcaaaccacccggtacggaagaaaggcaagcacttcgaacataaggctgaccaccgtacgaagcctaaacatcgcaacgggaaaacagtgtttgctatggttaaagatcttaaagtagtgttcggaaaggggcctggaagccagcctatagagagcgaaaatggtgtatacggaaagtcgaaagatacactggaagcacgtaatgatctaaagcatatggaacaacgcgacgaccttcacccggaaccaaaggagaaaggaagccattacttgagtccagccagctacactcttagcaaggcagagaaggaaagtatgtttgaatgcttggagagcataaaggtaccgtctggatactccacgaatatcaagcgaataataagcacgaaggagaagaagttcacaaacctaagtctcatgactgtcacgtgttgatgacacaactgctaccagttgtaataaggggtatccttccagacaatgtctgggcaacaataacaaagctatgtgcattcatgaacgcaatttcgcagaaggtcatcgatccggatagattagaagcccttcagaatgatgtggtgcaatgtctcgtcagttttgagttgatatttccacctttatttttcaatataatgacgcatctgctttgtcaccttgtgaaagagatcagtattctcgggcctgtgtacctacacaacatgtttcctttcgagaggtacatgggcgttctgaagaagtatgttcgtaaccgtgctcgtccagaggcaagcatcgccaagggttatggaacagaggaggtcatcgaattttgcgtagaatttatcgaagatcttcacccaatcggggtacctgaatcacgccatgaagggagactacggggaaagggaactctcggaaggaaagcaataatgacagtagacaacaatttattccgtaaagcccatttcacggttctgcaaaaatcttcattcgtagctccttacatcgaggagcacttggctctagttcgcgccaggaacatcggtaagtccgatgcatggattacatggcatgacattgatactttccccgcgtggctacgacaacatctcatgggtaacgagtcaatcaaccaacaacttgccttcctggcgaggggaccgtctgggtcgatcgcgacattccagggatatgagatcaatgggtacacattctacacgagagcccaagacatgaagagcatgaaccaaaacagcgttgttcgtgtcgatgccatgggacacgatggaacaactggcacgtattacggtaccatcgaggacatatgggaacttgactatggtcctctcaaggtccctctgttccggtgccaatgggttaggttgactggtggaggcgtaatgattgatgacagtgggatgacaacggttgaccttaacaaggttggatactcggacgaaccttttgtccttgccaatgatgtaacgcaagtctttttcgtgaaggacatgtctagcaaaggaaagaagggcagagggcctgacgagcctaagcgtcacgtggttctcccaggcaaaagaaaaatcgtcggagttgaggacaagactgatgaggattacgatcagttggatgggcaaccccctttcacggtgacgattgaccctagcatcctcctatcaaatgaagacaccccttactcacgtagcgatcacaaggagggaacaatagtgaggagaaagtacgtgcggtcaaccgtcaccgccgatgtattgccgtaa

SEQ ID NO: 80452 - DNA, 3105 bp, Oryza sativa
  Clone ID: PAT_MRT4530_80073C.1
atgaatcggcaatggatgtacgctgaccagcggtccaaagagtttattgacggcgtgcactattttttgagggtggccgaagctaacaggcaaaggggttttatttgttgtccatgcaataagtgtaagaatcagaaggagtattctgcatccaggactattcatttccacttgtttgagtcggggttcatgccaagctataattgttgggcatcccacggagagcaaggtgttgaaatagaagaagatgaagtggaagacgacaatattccggactttgctcagtatgttggatttgaagaaaatcaaacgggcgaggaggaaatagctgctgatggtaacgatgttgcggatgatcttggtcagatgttgcatgacgccaaggaggactgcgaaagtgaaaaggaggcccataaattggacaagatgttggagggccacggaacttcgttgtacctaggttgcgagcaggggcacaaaaagttggataccactctggagttcttgcaatggaaggcaaaatatggggttagtgacaaggcatttggcgatttattgaaactcgtcaagaacattcttccggggggaaacaaattgcccgagacaacgtacgaggctaagaagatagtctacccgttaggactggaagttcataagattcacgcatgtccgaatgattgtatcctatatcgcggtgaggagtatgagaacctagaagcatgccctgtttgcaaagcactacgatacaagattagacgagacgatctaggagaagttgacgggcagctaacaaagaagagaattcctgctaaggtgatgtggtatttccctataataccacggctaaggcgtttgttcaggaacaaggggaatgctagaatgttgcgatggcacgctgaagagcgtcaacaggacgggatgctgagacaccccgccgatggttcgcagtggcgaaacattgacagcaaatttaaagaatttagaaaggacgcacgaaacatacggtttggccccaagcaacctggtaacgacatcgatgtgtacctaagaccactggtaaaagatcttaaacaattgtggaagaagaaaggtgtccccgtgtgggatgaggacaaacaggaggagtttaacctacgagcgctgctattggtaatcatcaacgattggcctgcacttagcaacctatccggacagtccaacaagtggtacaaggcttgcactcactgtatggatgaaacagaaagtatgtatcttaagcactgtaggaaggttgtatacatgggtcatcgtcgattccttgcagcaaaccacctggtacggaagaaaggcaagcacttcgaacataaggccgaccaccgtacgaagcctaaacatcgcagcgggaaaacagtgtttgctatggttaaaaatcttaaagtagtgttcggaaaggggcctgaaagccagcctatagagagcgaagatggtcacgcggcgatgtggaaaaagaactctatattttgggagttaccatattgggaattcttggacgtacgccacgcaatcgacgtgatgcacctcactaagaacctttgcgtaaaccttcttggcttcctaggtgtatacgcaaagtcaaaagatacactggaagcacgtaatgatctgaagcatatggaacaacgcggcgaccttcacccggaaccaaaggagaaaggaagccattacttgagtccagccagctacactcttagcaaggcagagaaggaaagtatgtttgaatgcttggagagcataaaggtaccgtctggatactccacgaatatcaagcgaataataagcatgaaggagaagaagttcacaaacctaaagtctcatgactgtcacgtgttgatgacacaactgctaccagttgtaataaggggtatccttccagacaatgtccgggcaacaataacaaagctatgtgcattcatgaacgcaatttcgcagaaggtcatcgatccggatagattagaagcccttcagaatgaagtgatccgtattctcgggcctgtgtacctacacaacatgtttcctctcgagaggtacatggacgttctgaagaagtatgttcgtaacggtgctcgtccagaggcaagcatcgccaagggttatggaatagaggaggtcatcgaattttgcgtagaatttatcgaagaccttcgcccaatcggggtacttgaatcactccatgaagggagactacggggaaagggaactctcgaaaggaaagcaataatgagggtagacaacaatttattccgtaaagcccatttcactgttctgcaacactcttcattggtagctccttacatcgaggagcacttggctctagttcgcgccaggaacatcggtaagtccgatgcatggattacacggcatcacattgatactttccccacgtggctacgacaacatctcatgggtaacgagtcgatcaaccaacaacttgccttccaggcgaggggaccgtctgggtcgatcgcgacattccagggatatgagatcaatgggtacacattctacacgagagcccaagacatgaagagcacgaaccaaaacagcgttgttcttgtcgatgccatgggacatgatggaacaactgccacgtattacggtgccatcgaggatatatgggaacttgactatggtcctctcaaggttcctctattccggtaccaatgggttaggttgactggtggaggcgtaatgattgatgacagtggtatgacaactgttgaccttaacaaggttggatactcggacgaaccttttatccttgccaatgatgtaacgcaagtctttttcgtgaaggacatgtctagcaaaggaaagaagggcagagggcctaaagagcctaagcgtcaagtggttctcccaggcaaaagaaaaatcgtcggagttgaggacaagactgacgaggattacgatcagttggatgggcaaccccctttcacggtgatgattgaccctagcatcctcctatcaaatgaagacaccccttactcacgcagcgatcacaaggagggaacaatagtgaggagaaagtacgtgcggtcaaccgtcaccgccgatgtaatgccgtaa

SEQ ID NO: 80453 - DNA, 2911 bp, Oryza sativa
  Clone ID: PAT_MRT4530_80074C.1
atgggtgacatgctcaagtcggtgatgagatgcaaacgagcggagtggtcaggatggagtgttccagatctacgatgccatcatcaccttcttgaggtcaccgacttgagatatggtggagtgcggctacccaatcggcggcgcggatctggccgtcacggggccggcagcggccgattgggaggcctcgtcgtcattgttgtcgtcggcggttgcaccgttgagtgcagaggggcggcagcgggcggaggggcggtgccggagcagtcatctcctcgccggtctcgccggactcccttccttcaactgcctcgccccggtggacggcgggggaaaggagtggcgtgcggcggcgggggagaagaggagcggcggtgggtcatgggcggagcagaggggcggagtggcgatgggccgcaagtggagtggggcgggcggatgagaaggacgtcgctggggtcgtccgcctcgcaggggctgcgggcgcagtggagcggatggtcgtcgtcaaccgttgcagcgctcgccggcaacctcttcctccgccgcccgcggcttgcctctgccggcatgctctggccgctgcactccgcccgccctgctctccagctgctactgctccatgggttcatgccaagctataattgttggacatcccacggagagcaaggtgttgaaatggaagaagatgaagtggaagacgacaatattccggactttgctcagtacgttggatttgaaggaaatcaaacgggcgaggaggaaagggatgctgatggtaacgacgttgcggatgatcttggtcagatgttgcaggacgccaaggaggactgcgaaagtgaaaagggggcccataaattggacaagatgttagaggaccacagaacttcgttgtacccaggttgcgagcaggggcacaaaaagttggataccactctggagttcttgcaatggaaggcaaaaaatggtgttagtgacaaggcatttggcgatttattgaaactcgtcaagaacattcttccggagggaaacaaattgcccgagacaacgtacgaggctaagaagatagtctgctctctaggactggaagttcagaagattcacgcatgtccgaatgattgtatcctatatcgcggtgaggagtacgagaacctagaagcatgccctgtttgcaaagcactacgatacaagattagacgagacgatccaggagaagttgacgggcagctaacaaagaagagaattcctgctaaggtgatgtggtatttccctataataccacggctaaggtgtttgttcaggaataaggggaatgctagaatgatgcgatggcacgctgaagagcgtcaacaggacgggatgctgagacaccccgccgatggttcgcagtggcgaaacatcgacagaaaatttaaagaatttggaaaggacgcacgaaacatacggtttgatttgagtacggatggcatgaatccttttggagagatgagcagcggccatagcacttggcccgttacgatgtgtatctataaccttcccccctggctatgcatgaagaggaagtacataatgatgccgattattattcaaggccccaagcaacctggtaacgacatcgatgtgtacctaagaccactggtcgaagatcttaaactgttgtggaagaaggaaggtgtccccgtgtgggacaacgacaaacaggaggagtttaacctacgagcgctgctgttcgtaaccagcaacgattggcctgcacttagcaacctatccggacagtccaacaaggggtacaaggcttgcactcactgtatggatgaaacagaaagtacgtatcttaagcactgtaggaaggttgtttacatgggtcatcgtcgattccttgtagcaaaccatccggtacggaagaaaggcaagcacttcgaacataaggctaaccaccgtacgaagcctaaacatcgcagcgggaaaacagtgtttgctatggttaaagatcttaaagtagtgttcggaaaggggcctggaagccagcctatagagagcgaagatggtcacgcggcgatgtggaaaaagaactctatattttgggagttacccaattgggaattcttggacgtacgccacgcaatcgacgtgatgcacctcactaagaacctttgcgtaaaccttcttggcttcctaggtgtacacggaaagtcgaaagatacactggaagcacgtaatgatctgaagcatatggaagaacgcggcgaccttcagccggaaccaaaggagaaaggaagccattacttgagtccagccagctacactcttagtatggcagagaaggaaagtatgtttgaatgcttggagagcataaaggtaccgtctggataccccacgaatatcaagcgaataataagcacgaaggaaaagaagttcacaaacctaaagtctcatgactgtcacgtgttgatgacacaactgctaccagttgtaataaggggtatccttccagacaatgtccgggcaacgataacaaagatatgtgcattcatgaacgcaatttcgcagaagagatcagtattctcgggcctgtgtacctacacaacatgtcctttcgagaggtacatgggcattctgaagaagtatgttcgtaaccgtgctcgtccagaggcaagcatcgccaagggttatggaacagaggaggtcatcgaattttgcgtagaatttatcgaagatcttcgctcaatcggggtacctgaatcacgccatgaaggaagactacggggaaagggaactctcggaaggaaagcaataatgacggtagacaacgatttattccgtaaagcccatttcacggttctgcaacaatcttcattggtagctccttatgtcgaggagcacttggctctagttcgcgccaggaacatcg

SEQ ID NO: 80454 - DNA, 7653 bp, Oryza sativa
  unsure (1)..(7653): unsure at all n locations
  Clone ID: PAT_MRT4530_80075C.1
atggcaccgcccacggtgctcaactccggcgagcccgacgcccgacgccgcgagcggccgcacgtcgtcttcatcccgagcgccggcatgggccacctcctcccgttcttccgcttcatcggcgcgctgtcctcccacgacgtcgacatctccgtcgtcaccgtcctccccaccgtgtcggccgccgaggccgaccacttcgcccgcctcttccacgacttccccagcatccgccgcgtcgacttcaacctgctgccgctcgacgcctccgagttccccggcgccgacccgttcctgctccggtgggaggccctgcgccgctccatgcacctcctcgccccggccatcgccggcgtcgccccgcgcgccacggccgtcgtcaccgacgtcacgctggtgtcccacgtgaaccccatcgccaaggaccttcgcctccagtgccacgtgctgttcatctcatccgtgaccatgcactggtggagaaaccatctttcgtcgatggatcggcaatggatgtacgctgaccggcggtccaaagagtttattgacggcgtgcactattttttgagagtggccgaagctaacaggaaaaggggttttatttgttgtccatgcaataagtgtaagaatcagaaggagtattctgcatccaggactattcatttccacttgtttgagtcggggttcatgccaagctataattgttggacatcccacggagagcaaggtgttgaaatggaagaagatgaagtggaagacgacaatattccggactttgctcaatttgttggatttgaaggaaatcaaacgggcgaggaggaaatagctgctgatggtaacgacgttgcggatgatcttggtcaaatgttgcaggacgccagggaggactgcgaaagtgaaaaggaggcccataaattggacaagatgttggaggaccacagaacttcgttgtacccaggttgcgagcaggggcacaaaaagttggataccactctggagttgttgcaatggaaggcaaaaaatggggttagtgacaaggcatttggcgatttattgaaactcgtcaagaacattcttccggggggaaacaaattgcccgagacaacgtacgaggctaagaagatagtctgcccgttaggactggaagttcataagattcacgcatgtccgaacgattgtatcctatatcgcggtgaggagtacgagaacctagaagcatgccctgtttgcaaagcactacgatacaagattagacgggacgatccaggagaagttgacgggcagctaacaaagaagagaattcctgctaaggtgatgtggtatttccctataataccacggctaaggcgtttgttcaggaacaaggggaatgctagaatgttgcgatggcacgctgaagagcgtcaacaggacgggatgctgagacaccccgccgatggttcgcagtggcgaaacatcgatagaaaatttaaagaatttggaaaggacgcacgaaacatacggtttggtttgagtacggatggcatgaatccttttggagagatgagcagcggccatagcacttggcccgttacgatgtgtatctacaacctccccccctggctatgcatgaagaggaagtacataatgatgccgattattattcaaggccccaagcaacctggtaacgacatcgacgtgtacctaagaccactggtcgaggatcttaaacagttgtggaagaaggaaggtgtccccgtgtgggacgaggacaaacaggaggagtttaacctacgagcgctgctgttcgtaaccatcaacgattggcctgcacttagcaacctatccggacagtccaacaaggggtacaaggcttgcactcactgtatggatgaaacagaaagtacgtatcttaagcactgtaggaaggttgtatacatgggtcatcgtcgattccttgcagcaaaccacccggtacggaagaaaggcaagcacttcgaacataaggccgaccaccgtacgaagcctaaacatcgcagcgggaaaacagtgtttgctatggttaaagatcttaaagtagtgttcggaaagggccctggaagccagcatatagagagcgaagatggtcacgcggcgatgtggaaaaagaactctatattttgggagttaccatattgggaattcttggacgtacgccacgcaatcgacgtgatgcacctcactaagaacctttgcgtaaaccttcttggcttcctaggtgtatacggaaagtcgaaagatacactggaagcacgtaatgatctgaagcatatggaacaacgcggcgaccttcacccggaaccaaaggagaaaggaagccattacttgagtccagccagctacactcttagcaaggcagagaaggaaagtatgtttgaatgcttggagagcataaaggtaccgtctggatactccacgaatatcaagcgaataataagcacgaaggagaagaagttcacaaacctaaagtctcatgactgtcacgtgttgatgacacaactgctaccagttgtaataaggggtatccttccagacaatgtccgggcaacaataacaaagctatgtgcattcatgaacgcaatttcgcagaaggtcatcgatccggatagattagatgcccttcagaatgaagtggtgcaatgtctcgtcagttttgagttgatatttccaccttcatttttcaatataatgacacatctgctttgtcaccttgtgaaagagatccgtattctcgggcctatgtacctacacaacatgtttcctttcgagaggtacatgggcgttctgaagaagtatgttcgtaaccgtgctcgtccagaggcaagcatcgccaagggttatggaacagaggaggtcatcgaattttgcgtagaatttatcgaagaccttcgcccaatcggggtaccggaatcacgccatgaagggagactacggggaaagggaactctcggaaggaaagcaattatgacggtagacaacaatttattccgtaaagcccatttcactgttctgcaacactcttcattggtagctccttacatcgaggagcacttggctctagttcgcgccaggaacatcggtaagtccgatgtatggattacacggcatcacattgatactttccccgcgtggctacgacaacatctcatgggtaacgagtcgatcaaccaacaacttgccttcctggcgaggggaccgtctgggtcgatcgcgacattccagggatatgagatcaatgggtacacattctacacgagagcccaagacatgaagagcacgaaccaaaacagcgctgttcgtgtcgatgccatgggacacgatggaacaactgccacgtattacggtgccatcgaggacatatgggaacttgactatggtcctctcaaggttcctctgttccggtgccaatgggttaggttgactggtggaggcgtaatgattgatgacagtgggatgacaactgttgaccttaacaaggttggatactcggacgaaccttttgtccttgccaatgatgtaacgcaagtctttttcgtgaaggacatgtctagcaaaggaaagaagggcagagggcctgatgagcctaagcgtcaagtggttctcccaggcaaaagaaaaatcgtcggagttgaggacaagactgacgaggattacgatcagttggatgggcaaccccctttcacggtgacgattgaccctagcatcctcctatcaaatgaagacaccccttactcacgcagcgatcacaaggagggaacaatagtgaggagaaaatggctgaccgcgatgaggaacagatatttacttaccgaggaagggaacgtggagagggatgcggaggggaaccagcaggggcacgtggaaagggatgtggaggggaaccaggaggaggaggctagtggtagtcaaccctccgttggacagaagagggcacgcgggcaacgaggtgcagcgaagaagcttgagggtcggcacatcataacggaagtggaagaagatggacgtcctagtgccccggccgaagccgccaagaactatgtacgtcacagcggttgggttgtgcgggataacgtgcctgtcagtacggtgtactggcgaagaacaagggcacgaggagatcatgagagctttgtcccagattcggagaaagagatgctgtggaccacaatgctcgagacattcacccttcctgcgggtacagaggacaaagtgaaaaggtggactctgaagaaaatggcagaacagtttcagagcttcaagggagatctgtacaagaagtatatactgaaggggcagacaccgaacttcgacacattcccaaagctaagggatcactgggacgagttcgttgcatataagacaggtgaacaagggcaggcgatgatggaaagaaacaaagaaaatgccgccaagaagaagtaccatcaccacttggggtcaggaggctatagcgtcgcgatgccgaagtgggaggagatggaggctagcttgattgagaggggtatcgaaccggcaacagccaattggccggaacgatcgaagttctggtactatgctcacggtggaacgctcaacccagctgatggctcactggtattcggcgttcagatacgagaggctgcgcaacgactaacagatgcagtggaagcctcctctcagggcacgttccgacccgacagagatagggacgagctgacactcgccctgcagactccagagcatccaggacgaacacgagggaaaggggtgattccttggaagattggtttcaaggaggacatccacacgtacaggagtcggatgaggagcaagagagataccgaggcgaagattgcagacctagagttccgggtatcgagctacgaactcaacatgcaagaggaggtggcaaggaaggttgatgaacgcatggccgcacatcggtcccatgatccccagccgaccattcctcctgcaatggtgagcccgtcaggaaaccgtagcagctgcgcctcaacggggcaggtaggatcgcagagcatggacgccatgcaaacacaggacgaatcgacctgtcccgttgatgacatcactcagcggacaccatgtgagctgcatattcctttcaagaacttatcaataaaggtggcgtcgggcatggccatcccaacggacccttcaggtacttaccactgcaggccgattccagcaggatactcgaaggtcgaagttgagttggtcgaaggcgcgtacgaggacctcgagctggattaccctggaggagacggtgagacgcatctacgagacacaagccatgccattattctatggcgcaggcggtacatcatcctccctgggcgacaagcggcgtctcgtgcaccatctcctccggctccgccatctcctcctcatgatcctgcaccgtctcctcctcatgctccgccagcaccgtctccacctcaggctccagcatcgactcctcctcaggatcctgcactgactcctcctcgtgctcctacacctactcccccgcaagctcctcttccggcaccttcaaagtcaagggcccccccagctgcaccgcctgcccacacaagggcaacgaagaaggcgaaagttgacgccgacaagaacaaggacccggggtacgattgcacgcaagaggagcttgacgcttacgttgcatcagaagtcaagagacaattcaagcctcgaagtccagaaaagaagattcctatagaccccagtgtcaggaacttcttcaggggtatgtctgcatctgccaaggaggccatcaagctatcgaactatgagcgaacgctgaagaaagcatcttctggaaagtccaaaccagtccctcagcttggagagcaaccaaaacaggagatcgagccgttggttaccggtaaagaaatgacgatagaacaatttattactgacaccggtctaactacggatcaattgctaggagtcgcaccaatcgaaaaggcggaagtgaaatacatgtacgaactcggtaaaccgcttgtcaagcctgagctgctgcagtccctacccacacaaatgtacaaattccatcagctgtacatggagatgagcgccgccggtagagagatgatcggagcgaggatcagggacacggacttcttgcaaggagatgacattctctggatcaatttcaagggaatctacgaactataccagctggacgccctcgacgtctctattatgagttgctggattttaatggagattcaaagggcccgacggcggagggttttcgatactggattcatcgaccctcggagagtaaacgtcgcattgctcgaccaatatccacaagaaacagaggacaatctcgtccatctcctgaaggcgcagcattacaagacgttcatactgttgccatacaacacagaattccactgggtgcttttactcttcgacctggaggcctgcaccgtcaacgtatatgactcaatggataaaaaagagtctacgtttgacaaggttttcgaacttatagacagggcttggtatcggttccgtcatttggtccgcggcaaatggagagaaagacttaggcggaagttcaaatttccttgcgcaaagcaaaagcagggaaataacttgtgcggctattacgtgtgcgagtattgccactgccttgcaaaccaaatcatcaccacaagagagctcgattttattcgcatgagggataacctgaccacacacaaggaatttatcacggcggttcaagaacaactcatgggattcatcaacgaagaaatccttaatcccaagggtgaattctactacgacggaaacacaattcaccggaatgcccaggccgacgtcggcgacgtcgacgtccccggtgttcgtcacctgcagaggtcctggctgccgcagccgctgctcgacctggacatgctcttcacgaagcagttcatcgagaacggccgcgaggtggtcaagaccgacggcgttctgatcaacacgttcgacgcgctggagccggtggcgctcgccgccctgcgggacggcaccgtcgtccgcgggttcccgccggtgttcgccgtcggcccgtacagctcgctcgcgagcgagaagaaggccgccgacgcagatcagagctcggcgctcgcctggctcgaccagcagccggcgcggtcagtggtgtacgtcgccttcggcaaccgttgcaccgtgagcaacgaccagctccgagagatcgcggcggggctggaggcgagcggctgccgattcctgtggatcctcaagaccacggtggtggaccgcgacgaggccgccgcgggcggcgtccgcgacgtgctcggcgacgggttcatggagcgcgggccggcggccggggttccngtgctggggtggccggggggcggcgacccccgtggggcggcgacgttgttggcaaccagcggcgtcggggtgggaatggaccagtggagctgggacgggagggaggggttggttaccggggaggagatagggggaaaggtgaaggagattatggccgacgacgccgtgcgggagagggcggccaaggtcggcgaggaggcggccaaggccgtcgcggagggcggcacgagccacacgagcatgctggagtttgttgcaaagctcaaggctgcttaa

SEQ ID NO: 80455 - DNA, 433 bp, Oryza sativa
  Clone ID: PAT_MRT4530_80076C.1
gacgccgtggtctggctcaggaggttctccgacggcgtcaattgcgattgccagcggctcgagggggttctcgggatgatcccgggcgccaagaggatgataatggggcacacgattcagaccgaggggatcaatgcggtgtgcggtgcgcaggcggtgagggtggatgtgggattgtctagaggatgcggtaatgggctgccagaggtgctcgagatcaatggtggcggcaccaatgtgagggtgatcacgacggatcccgcggaggcctggcagtaccggaagcagggggcggagaaggccgccatcgctaccgcggtgaaggagaagaagggggaggtaaaggaagggcttgcattgttggtaagggagagccatgggttgaaagaggtacaagctaaggcggtttaattagctcagtgcggtcacttca

SEQ ID NO: 80456 - DNA, 1257 bp, Oryza sativa
  Clone ID: PAT_MRT4530_80077C.1
ttagtagggcttgacgccgacgtagttgccgggcggccagtagctgcagaccatgatggtgtcgccggaggtgcagacgacgcggccgcagccgacggcggtggtgttcttccagacgatggcggtgtagtgggtgcacatggcgccggccttgcagctgttggatttgtagtcgtagctcttcttctcgtcgctccactcgtccaccgtcttcttccacgtccactgcttccccgtcccgaacatcatgttctccccgtaggggccatgagagtgctccagctggcaatcccctctcctcaaatccgcgtactcctgcgcgtacttcgccagcgtcgcgttccacactatgggtggcacgtgctccctcgtgcggaacatgttgtgctccctcacgatgtcgctgatcgccttctcgttcagcccgtccttctgctcctccgccgccggagtgttgctggtcgccggggcgtacgggtcattggaaggaggctttggcaccgccgtcgccggggaagaaggctgcaccggcgccggcaccacgcctgctggcgccgccggggaagaaggctgcaccggcgccggcaccacgcctgctggcgccgccggggaagaaggctggttcaccggcaccacgcctggcgccgccggagcatactccttattcgaaggaggagacgtcgacggcgtcgccggaacagctggcttgggcgccgccggcgggacgcaattgtccttttggaccgccgcgaccgtcggcggctcctccggcttcttcggctgggtcgtcgcgtagtaatccacctgcacctccttcgacggcggcgatgatcctgccgcgccagcgccgcccttggccggcaggacctgcgccgccggcagagacttgggaggattcccctcgtcgttgggatccggaatccatggcacgtcctggtagaattgcccggcgtccgccttctccggccgcggcttcatgacggcagtcacccccggcgcggagttcgccgcgccggcggtgaagccggtgaccagagcggccgcggcgtcctcctcctcggcggcgtcctccgcctcggcagccgccgtctccgccgccaaggccttgttgacgtcttcccccgccgccggctgcttcggcgccacggtcgccgttgcgccgccgtaggattgttccggtgcggtggtggccgtgtgggccgcggcgaggaggccgaccacgacggcggcgatcaccgtgcgcatcatcttgtccat

SEQ ID NO: 80457 - DNA, 436 bp, Oryza sativa
  Clone ID: PAT_MRT4530_80078C.1
tttggccgcaatccatcggagatcaagggagttttaaatgtggagctgacagtcggcagcaagactgtccctacaacattttttgtcatcgatgggaagggttcctatagcctgttgcttggaagggattggattcatgctaattgttgtattccttcgaccatgcaccagtacttgattcaatggcaaggtaacaagattgagatcgtgccagccgacaggtcagttaaagttgctagtgccgatttagctctttgggagatggatgggattgattgactgtctggaaaagtttgggatggagattttctaaaagtgtccaattgtgatatacagccaaaccaaggacatggtcatgtcggctaatgaattagaagagattgacataggcccaggagataggccaaggcagacatttatcaataaaaaattatcg

SEQ ID NO: 80458 - DNA, 1817 bp, Oryza sativa
  Clone ID: PAT_MRT4530_80079C.1
aaggggaatgcatttcgatagcagcttccccaaggggaaaacgtcacatattccttgattattaatttaaaataacccacagaactaatgcaaagattaggagggggaccctttcgatgccaaaagacaatctaactaacatgtgccgtccattttttgtccggaatgagttgggtggaaagagagccacgaatcttgcattcttgctacttaggaccaacctagcgagcttatagtaacttactagtacacagttgtcactctcatcaaagagacggatcatcgatgtgcggcacattctacggttcatgttatgggaattaattagatttcacccacagctgtcacacaagatagataattgttgaacaccgcacaagaaataccagatttttagcgatctagacgtccactattttcttcatcatactccaggagttaattctttctggacaaaacagaaaatatgccatatcggtcgatttgacatgatcaggtcttcaaggtggcagacaatgtgaatatgcatccaaccaacacggcaatcagtagaactacaaacgccattagaatgctgaaactgctgccatgcgtcttcctcgagccattctgtccagagttcatctctttcagaccaggctctgaaggcgcttttgacaaagctccagggaccacatcccaaaacgatcctagcgtcgcagccgatgcactttctggttctacgatcgaatagtttcccatatctgcttcaagcgacatcacttccttgcagcgctccatggcatcctccattgtttctgattgttgcaagtagtcacaaatataggagccagccaaccaaggtatcagaattcttctagggaatggaaaactgtaaggtgctctcaactcatgaaaaacaacttgagtggccttctgagacagtgaattctccaaattgttagtagtagagtcatcatctgcctcatctagtatgatgtccaatctgcttctcaggcttgtgatgatgtccagctttagatcagatataacttctgcaatggactcttttgggcccaggtatgccaaggcgctgacagatccagcaaagagaagtagcccagcaacaccttctaaactgcattctttagtgcaagcatttaccataaggctcccataatgacataaagagaaacttatctcaaaattatatgtgcatctgaaagtttgaagagaagctaatagtttactatacttgaagtcacatggccttaaacgtcctgagctcatatcacatatacgacaggcccaccttcttgggctgtaagaaatatgaatgagcagcctctcatcaacaccagtgccatacaaaggagctacctgagaaacagctctaagaacctgtgataaaacagcaggggaagtcgctttgaatgaagcttctgacgcccatatgtaaatacctatgacggtcattcctccaagaagcatcctcgagacctggcgcgcgtgctcggcgagccagtcgacatcgaagtcgagcgacgaggacgcgccggaagaggcagctttggcggcgggcttggcgcggaggagggagcaagcgggagcgccggaatcggtgggcggcgtggggatgagggagtaggcgagggcacggtcggaagaggcgctgagcttgccgacgacgagccccacctgagctggagaggtggaagctgagagggtttcctccgatgccttgacctgcgcctcgtcgccgaccaccgtcttcaccatcctcgatctccacaatccagatcccgcctcttctcttctaatctgccgtcgccttttcc

SEQ ID NO: 80459 - DNA, 1771 bp, Oryza sativa
  Clone ID: PAT_MRT4530_8007C.1
agtgctaatattacggagtatttttgcaaagggagtaatcaaagttccaatacgaaatcgcggtcgtagtagtacaatacaaagacgagttcacggagcgcgtaaactaataaggaaaaattaaacgtcgcggagaaataatagccgaactggatgaagatgagcagcactgcctcttgcctagcctagcccatcatggcgaggccgacggccccgaccagcaggcccatcaccgaacgggcctcgctgccgctggccccgccggtgctgcccgtcgacttcgtcgtcgtcggccggccgccgggatcacaaaacacataaaactatatcatcatcttccatagctgtacacatcctatattttcattcatggcgatgacaccgcagctagcattttctcgcatgcctccagggtttcggttccagccgacggacgagcagcttgtcgtcgactacttgcagaggcgtaccgctgcgcagccatgcgttactcccgacatcaccgatatcgacgtttacaacgtcgacccgtggcagcttccagccatggcgatgtatggatcggatcatgaccggtacttcttcacgatggcggcccgagaggcgcaggccagacgaacgacaccgtcgggtttgctggaagcccaccggcacaaagaagacgatcttcgtcgtcgccggtgggcatgaggtgcccaccgccgtcaagaggaggttcgtcttctacctcggccaccaccaaccatcgggcagcaacaacaacaacaaaacatcatggatcatgcatgagtaccgtctcatgaactctccaagagcggcagtgccgtcgtcttcttcggtgaatcgtcttcccactgatgatctcacggaagagatggtgctgtgtaggatctccaacaaggacctgcctaaaccacccttcatccacaacagcttgttgcagttctcttcagtggggttgaatggtgatgggtataattacttgatccttgatcaccttgagcctccagcaatggagtatcctaatgttggcattggtaatgttgatgatgctgctgctggtactgatgatccgggtgaccttgatgaggagattgatgatagcatgcaaagaaaccatggtggctagaattaaccagtagcatcatgagtgaatggttttgcgggaaatttgagttaaatatcagataataaaataataatcggaaaaaaaaaaaaaaaaaacccgcggcccggaagagatggtgctgtgtaggatctccaacaaggacctgcctaaaccacccttcatccacaacagcttgttgcagttctcttcagtggggttgaatggtgatgggtataattacttgatccttgatcaccttgagcctccagcaatggagtatcctaatgttggcattggtaatgttgatgatgctgctgctggtactgatgatccgggtgaccttgatgaggagattgatgatagcatgcaaagaaaccatggtggctagaattaaccagtagcatcatgagtgaatggttttgcgggagatttgagttaaatatcagataataaaataataatacaaagaataaaaagaaaaacaaacctgtatagttagcaggttttgattcatttcgttgaactttgtgtgcttgttagctagcctatataccaaacatgccttggcgaggctttctatttgtatatagctttttttcttttttctattgtaaggttcgaactctattgagttgattgaataaacattatgcaatttatgta

SEQ ID NO: 80460 - DNA, 2567 bp, Oryza sativa
  Clone ID: PAT_MRT4530_80080C.1
caactgttaatagctagttatgggcattaattagatttcaccaacagctgtcacacaagatagataattgtagacaccccacaagaatatcagatttttagcgatctattttcttcatcattcaccaggagttaattctttctggacaaaacagaaaatatgccatctcggtcgattttacatgatcaggtcttcaaggtggcagacaatgtgaatatgcatccaaccaacacggcaatcagtagtactacaaacgccattagaatgctgaaactgctgccatgcgtcttcctcgaaccattctgtccagagttcatctctttcagaccaggctctgaaggcgcttttgacaaagctccaggtaccacatcccaaaacgatcctagcgtggcagccgatgcactttctggttctacgattgaatagtttcccatatctgcttcaagcgacatcacttccttgcagcgctccatggcatcctccgttgtttctgattgttgcaagtagtcacaaatataggagccagccaaccaaggtatcagaattcttctagggaatgggaaactgtaaggtactctcaactcatgaaaaacaacttgggtggccttctgagacagtgaattctccaaattgttagtagtagagtcatcatctgcctcatctagtatgatatccaatctgcttctcaggcttgtgatgatgtccaactttagatcagatataacttctgcaatggactcttttgggcccaagtatgccaaggcgctgacagatccagcaaagagaagtagcccagcaacaccctctaaactgcattcttcagccggcaaattgttcttgaaaggcacaagaaattcaacgttatgtggcccctccaaagtgttgtccatgtcatccaaaaacaggactccatcaatcaaagctttggcattctgcacttgcttcgtgagatgactgattgcctttgaaataaccttcttaaaaggctcagcttgaacaactggcagtcttatctcaaaattatatgtgcatctgaaagtttgaagagaagctaatagtttagtatacttgaagtcacatggccttaaacgtcctgagctcatatcacatatacgacaggcccaccttcttgggctgtaagaaatatgaatgagcagtctctcatcaacaccagtgccatacaaaggagcaacctgagaaacagctctaagaacctgtgataaaacagcaggggaagtcgctttgaacgaagcttctgacgcccatatgtaaatacctatgacggtcattcctccaagaagcatcctcgagacctggcgcgcgtgctcggcgacccagtcgacatcgaagtcgagcgacgaggaggcgtcggaagaggcagctttggcggccttggggttgggggccgcgcggaggagggagcaagcgggagcgccggaatcggtgggcggcgtggggatgagggagtaggcaagggcacggtcggaagaggcgctgagcttgccgacgacgagccccacctgagctggagaggcggaggcggagagggtttcctccaatgccttgagctgcgcctcctcgccgaccactgtcttcaccatcctctccacaatccagatcccacctcttctcttctcttctcttctcttctggggaggggaagggttgccggtgggaaagcgacgccgccgatggggggagcagcggagagggaggccgttgcggctcagcggaggagagaagagcgaaaggacacgtgttccgctctgtttctctcggctccgctctctcgggtccacttgggccgcattagcttcatgggccgagcatgtggacactaggcttgggtgcctttttagcccaaaacccacccttgggcgttctccccacctcaggacataaggtgagcagaaaaccccttcttcttcctcccctttcacttcccttgcttgttctttcttttcctcctcaagctgagctcccaactcacttctcctcccccaaatcccatctaagaacccaaactcaagctctgcatgttagaccacagcaatccccatcatccaagcttttcatccgtaccaacatcttgcacatgcatggagagttgtgggagatcgaaataggagaagagagtggtggtttcagcctgcatggttgcagcagcaatatgactttgtttccctccatttggtcgtccacctccattattgcagctaggaggtggctgcagctcatccggtgttaatctcttttgatttcggtggaagcagccccaatctccattttaattgtatctataggtgaggatcccgacgttgagctgtgtttcttgtgaggccactatgctcccgggggcagtgagggcagtgactagttcttgcagcttggctcttgcccggtcggatgccctagtggggtttggcgccaccggttttatcttttgcttatgaaatctagatgagacttccgctgcaatatttatgtgtagtatgttgggacctcggaccctattttgtgtcatgtacctcgctgcactttaaccctattatggtacttgctatgtt

SEQ ID NO: 80461 - DNA, 269 bp, Oryza sativa
  unsure (1)..(269): unsure at all n locations
  Clone ID: PAT_MRT4530_80081C.1
tgtcaatgtanatctntaggctagttcatagtgacatttttctgtagttnactcactcacagtgtcacgccggcggttgatntcttagangctttgagtttgtagtacttgtggtttgcattgatatagcctgtagcatatgctcttgtacctgttattcaacncntttttgtggtgtctaaaatggatgttctattttgacctgtttgcagcaaatgcaactgagcagctttgtttgaaaccaaaaaaaaaaaaaaaaaaaaaaaaaa

SEQ ID NO: 80462 - DNA, 466 bp, Oryza sativa
  Clone ID: PAT_MRT4530_80082C.1
ccggccgggcttgaagattcattcaagaaaaatgaacttgatgcgtggcattgatctgaaaaagattgcagagaagatgaatggggcatctggagcagagcttaaggcggtctgcacggaagcaggaatgtttgcccttcgcgagagaagggttcatgtcaaccaggaggatttcttgatggcggtggcgaaggtgatgaagaaggataccgaaaagaacatgtccctgcgcaagctctggaagtgaaggaagctctcatctcgacatccctgtcatatgcctaaacagctgaagctaaacagcgccagcgatgcattgatcgctgtaaattccttaaaacatgtcgagaagggaaacgttcaacatcttacagtagcttcttttaaagttatagaattccttcattggattatcaagatgtgaaatgaaaaggtttagatcaaaaaaaaaaaaaaaaaagcggcc

SEQ ID NO: 80463 - DNA, 1095 bp, Oryza sativa
  Clone ID: PAT_MRT4530_80083C.1
tcttggaggctagggctttactggtgagggagatagagcccatgggccgtggtgccccggctaagccccgcaagatattgtgggcttgtggccgcactttcagcccatgggcacctcccccgtcgtcgcggcggcagatccggcctccaccatcgtcgcagcggccgaatccggcaggaggaggccacgccccaccaccgagtacgaagccggcacgacccccgcgtcgccctctcacgcgagcggcacagggggtgaaccctagcccccgccgccccctcccttcctctcccccctcgccgccgccggagcgcgccaccggagcctcggaccccccctcccccgcgggactggtgaccttgcccaacaccttcttccatccccatccctcctcctcccccggcgccaccattcccgccgccaatatgctcgccgccgccgcctccgtcaagctctccacggccgggaccgccacggcgcccaagatggcattattcaagcccctccacctccctcccctcttcgccgccgccgccgccgccgccgggccacgtcccctctccctctcggcgcgccccctgtaccggcagcaggacccgttattcctggcgtcgcgcgtcgcgtcaccggcgccgccgccgccgtccgccaccgccgacggcgcccggccggtggaggctgcaccggcgggcgcggcgccggaggaggcggcgaggccgttcccttacccgtggctcacgtccacgctctccctcgccgccggctccgccatcatgctcgcctcctgggccaccaggatcgccgaggcgcccgccaccgcccggcgccggtctacttctccctcctcccaatcatcggcggatgcgccctcgccgccatcaccgagctcaatttcaacatcatcctcctccctttcgccttcgccatggaggggcccaaggtgtgggctgccggctggcaaaaagccgtcgccgagatcggtccaaacttcgtctggtgagcctcacatgccaccatgaagcggatctccgtcattgtcgcctccatcatcatcttccacacgccggtccagcccatcaacgccctcggagccgc

SEQ ID NO: 80464 - DNA, 1596 bp, Oryza sativa
  Clone ID: PAT_MRT4530_80084C.1
atggtggtggtggtggtggcagcggtgttggcggtggcggcggtggtgatgaatatgatgggtggaacatctatgggatccaattctccaatgtatttctgcatgattttgaaccatgagaggtttcaattttctgaagttctgggacagctacatgtggcgtccaaggagaacagtgttgcaggagataaacggtggtccaaggagacaatgttgcaggaggtggcaactgacatctacacatccaagcatggacggagaatgggttggggcaaggtcgatgcggtgcaacgagtagaagtctccatggttcaacatcatactcacaaatcgacgaaggtggctcacagtcgattgatccgcttgacgccgccgcccaccggaatcaatggaagtggaggcctctactcactccgccgcatcgacctctcccgccacccgctcttctacccgactccggccgctgccgccgccgcggggccgcgtgatctgcgcgtgcaacgagaggaggagtacgaattccagtggcccaagctgaacgacgacgacgagaggaggaggaagaagaagatgaaacgacatgaggcggtggagaccttgcggcagctgccgtcgatcgtcagcatggcgccgtctcccccaactccggcgggaggattcggcttcgactgcttccctctcgctgagtcggagagcaaggtcgtcttcgccgaccacgccggccgcgccttcctctacgacgccgacggcaaccgcttcaccggcatgcccagcctccacgctcccaagggcgactcccccgtcgccgtctccattgccgcgcagggcgaggaagaaagcaagctctacgtcatggaaaacaccctccgcccggagagcagcggcggcggcggcggcggcagcttgttccagttcgaggtgttcgaccatcgcaagcccgagccaacgtcgccgccgtgggaaaagtactggcactgcgacccgctcccgccgccgccgttcgtcttcgactccggcggcatggtggagtcgtacgcggtgatcggacacgtcatcgtcgtgtccgtcagcgatgtgggcacctactgcttcgacacggcgagccggagctggagccgcgccggcgagtgggcgctgccgttcgccggcaaggcggagtacgtcccggagctgaagctctggttcggcatagcagccaagggcgagtgctccccgtgcgccgccgacctctcccccgtcgcgaggggcgagccgccgtcgccggggtacatctgggaggaccttgacctgccggaggagtgggagccgagctggggctcccacctcgtcgtcctcggctccggcaggttctgcatcgccaggttcttccagctcgcgcgaaccgatgacaacatcatgaacgaccacgtcgaggacatcaccttcccggtgttcaccggactggaggtgctgcctccggctccggcgacggcgaccggcgatggcggcggatcaggcgatcatcggaaggaagggctccgtatgatcaagcacaagtcgaggcgttacgccgagctcgacgacgatggcattagaagcgtcaaatccgtgctctaa

SEQ ID NO: 80465 - DNA, 1521 bp, Oryza sativa
  Clone ID: PAT_MRT4530_80085C.1
gccacccgtcctttgttttcggccgttttttttttttgttcaagcaaaaaatctaacagctttatttaggcagatccacctctctacatcatcatagtcaagacaagggagcgcctccgaaaccctagctccccgccttcccctccgcggccgccaaaatggtgaacgttcccaagaccaagaagacctactgcaagaacaaggagtgcaggaagcacacccttcacaaggtcactcagtacaagaagggtaaggacagcctgtctgcccagggaaagcgccgttatgaccgtaagcagtcaggatatggtggtcagaccaagcctgttttccacaagaaggcaaaaaccaccaagaagattgtgctgaagctgcaatgccaaagctgcaagcattactcccagcaccccatcaagaggtgcaagcatttcgagattggtggagacaagaagggcaagggaacatctcttttctaaattgcttgctacctactggatactgaagttgtgggtctattgtgcttcatacttcaatgttattaggaacttaatttaagcagaccatatcatgtattcaagtatcatcgtctgacatttactctagcaaggattggctttctgctgaatcaagttttcttgcttaatgctcatcaaatccaatgtgatgcatgtatttagatggggccgcaattgtgacttttgtctaagagggagaagtagaccggcgccgggaagtgctcgccgaggaagaacctggagacgagcacgctgaacgccggctcgccgctcttgatgatgtgggtgaacgacaccgccaccttcgccatgctcaccgtcgccgccacgtgcccgatggtgtgcgcgatcgccaccggagacagggccttccagaaatcgaggtcggtggcgggcgcctcggcgatcctggtggcccaggaggcgagcatgatggcggagccggcggcgagggagagcgtggacgtgagccacgggtaagggaacggcgttgagcaccttcttgttgtagatgttgaagatcacgttcagcgcccaccacgtcgcgaagtagaccccgatcttggcccgcctcgccgcctcctccggcgccgcgcccgccggtgcagcctccaccggccgggcgccgtcggcggtggcggacggcggcggcggcgccggtgacgcgacgcgcgacgccaggaataacgggtcctgctgccggtacagggggcgcgccgagagggagaggggacgtggcccggcggcggcggcggcggcggcgaagaggggagggaggtggaggggcttgaataatgccatcttgggcgccgtggcggtcccggccgtggagagcttgacggaggcggcggcggcgagcatattggcggcgggaatggtggcgccggcttcttcagttacagttactgtgttgtgttgtagccggccgtccgtacgtctatggcggcgatgggttgcggccatagagactgctcgcatcgagtctacgtcaatccgaccctcgtgc

SEQ ID NO: 80466 - DNA, 476 bp, Oryza sativa
  Clone ID: PAT_MRT4530_80086C.1
cttgccgtcaccacgaacaccacatagagagaccccggcgcccggagagaagctaaaccaagtacagcggcctaggattattgcagctcgctgctcttccctctcttgaacgagtgtcgagccacacatactaccttcaacatctccatggagacggagaccaaggccttgactctcctcttcgcggtgctcgccaagctcgggggggagacggcggacgagacaatgctgcaggagagaggccgtcaagctgggcggtctcgcacctgctcccgcaccaaccaacgcggcggccaccatcacgccgagagcgatgaccatgaccgggaccgtctctctcctaacctacctcgcgcacagagacgacacactacccctgagaggacgcaacgcatagtttgcggaatctgacactacgagaaacccgtagtttgtatttccgttgcagcggtagcatcagatgttgatctaaagag

SEQ ID NO: 80467 - DNA, 437 bp, Oryza sativa
  Clone ID: PAT_MRT4530_80087C.1
atgcaagagaaccttcattttaacagtgggcaatgcggtgctgaaaggtaaggcatttcgctgctttcatatgtgccaacaggaccagtagaatctctagaaagccctttcttaatacgcaaggactatcatttgatagaaagacagagatgtgctccatgtaataaatctgctataagcacattgaaagaagaggtgtgttccggtttccctcacctgagatgtgctccatgtaatacttctgctataagcacatgtcaagtctgcattttgcggtgcacaatgcttttagtctgtcgtttaaagatgcaaacacagccgctgtcaccacttgatgcaaattctaagcggtcataatcaatcttcggagaatgattggtccatattatatcttggatcggttagttaaacatattcaccatctcattatgtgaagg

SEQ ID NO: 80468 - DNA, 455 bp, Oryza sativa
  Clone ID: PAT_MRT4530_80088C.1
cctcatcctttttattcaatcctggcagagagacggatccatggaagttacgtagccctcatcacgcaagcagagcacacacacacagtggcagaggaagagctatgaacaagacactaatcaacatacagagctaaaacaaacatggggatcactgcaaataccgaaaaaaaaacacaggggaaagatcacatcttcttctcggacccaacttctacgtgttaccaccacgtgttgcggatctgattttaccctggtctattaggtgaggcgtacacgatctcggcgacgtacttcgacgccaggatcagctccgggtgcgccaccgtcgacgccggcttcttgatcgtgccaacgatggcgttcggccggacgagcgctttcagcgccaggtgcgtcttcttgtgacaggagatcatgatggctacgaacgtcgggcccatactaggagcgcc

SEQ ID NO: 80469 - DNA, 280 bp, Oryza sativa
  Clone ID: PAT_MRT4530_80089C.1
ccgggcgggatgcagaaaccataaacctcaggcatctgattagagaaatctaatggcttcttcttccttttccttcctgcttgttgctgctctgctaggattgggctcatggaaagccattgcctcagagcctagccctctccaagacttttgtgtcgctgatgtgaattcgccaccgcgtacaaatggatttagttctgcagaacccaatgaacgcgcagtggctacgcactgtcttccaggcaagccactcggctcgataagcctaggagacacaaac

SEQ ID NO: 80470 - DNA, 261 bp, Oryza sativa
  Clone ID: PAT_MRT4530_8008C.1
aagctgcttaaccaagagaccacggtcaattggaagacgaggctggaattgatatgcctcatgcaatacatgtacgcgcgcgtgtgtggatgtgtagaaggagaaggtgaaggtgaaggtgaaggtggaggcgacagaaaagggaacgagcacgatacgccagcatcggaggaaagagccgccacggcgccagcggcgctgcccttgccggaggactggaggaatagatcatcgtgcatttgtgctattgggccgaattag

SEQ ID NO: 80471 - DNA, 855 bp, Oryza sativa
  Clone ID: PAT_MRT4530_80090C.1
atggaaagcgccccagagaagttgaagctgctgctgggggtgctggcgctgcagtgctgcctcgcggggttccatattgtgtccagggcagccctcaacatgggcatcagcaagatcgtcttcaccgtctaccgcaactgcatcgccttggcattgctcataccttttgcatacttccttgaaaagaaaaatagaccacccctcaccttctctttgctggcccagctcttctttctggcattctgcgggataacatgcaaccagggtttctatcttcttggtttgcactacctgtctccaacctatgcttctgctatccaaaatacagtaccagcaataacctttgccttggctgcttctctgaggcttgagcaagtaaacataaacaagaggtatgggatggcaaaagtgattggcacagttaccccagtcttgaagaaatacccagccaggttgtcaatgcttgcgctgaccctggcattcgggctggtacaattcttggccatagcagcattctgggagaatgacattgggaagtggaggcttcattctggagaagagctcttcacaatcctctacgctatctggtgcattgacaggggtggtgctctgttcactgctatcttccaacctgtacaaactgtcatggtggctataatggctgccgtcattcttggcgatctactatacacaggagggatcattggagctgtccttatagtgattggcctctaccttgtgttgtggggtaaaaacgaggagaagaaaagcaacagtaaccaaccagatttgtcaaggcatctcctcagtgaagagtcttctcgaccaacgactgtgacaagtgatgttccataa

SEQ ID NO: 80472 - DNA, 877 bp, Oryza sativa
  unsure (1)..(877): unsure at all n locations
  Clone ID: PAT_MRT4530_80091C.1
cgnactttgacacaacaacaagcaacaagcacaagctcaataccaagcaagttcaatatagtgcaacaacaacaaacatcttcccgatggaacggattcggaggagcaactatctgcacacatcaacggcaagcagntaaaacaattgcaaaaactccctagatcggtgcctgaacttcaataacaaacccccaccgatggcgtggcaacgggattctcaaagatgatcaaccacgcccagcaagattccccccatccgctaaccgtcacatccaacacggagctgcctacccagcagataaccaccataataaccagaacactggcctactttccgtcactccacccccacatctcccgtgggcgaaaatgggattccaaaactgggccctcccacattatcgactatgtggggantccatacttaactgcactctacacacgggggccacactcgtcgaacggtctcacacgatccggtgtaagatacaccctgtctgcgcacacacgcaacctgggtggantttgccgaacatgcggaatggtagttctccctcttccanggcgccctcgcttgggggacacccacncaccgactcaatttttgggnaagttccaaatttacgccngccaccatcgaatttaactgccgtcggtcctttgncaacancacaagccacgcacgacgcatgaacaagnggacatggccccgaaaatacttaatttttggccaaaaatttcgaaaggagaccaaaagaatccgggcccgtaataacccgggccccccattttctgggggttcaatgggcgcccacccacccatttgggctcagggggganacaaaaataaaacccttcaacagggttaacntttttt

SEQ ID NO: 80473 - DNA, 1870 bp, Oryza sativa
  Clone ID: PAT_MRT4530_80092C.1
tcgatctctctggctctggagctctctgtattccttcacacacagatccaccagaacacaggagtagggtattacgcttctcagcggcccgaacctgtctacgtcgcccgtgtcttgtgcgctccttctcgctgacattcctcagatcgagggcgaagaacctcacatagcgcccccggccgaaccggcaaaggggggcctgcgcggtctcctggtgaggagcccccacgctccgtcatctggcgcgccaggtagggggcgcgcgtgtctttctaagccctcgtcctctttcgtgtgcgccaagcttgccggcaggcggtcctccgccaccggaacctctggcgctgccgccgccggctccacgacgtcgaggcggagggcgcggcgagcggcggccgctacccgccgttcgtccgccattccctcgtcaacgcctccgacccaagaagatgtgcgtggggggccggatgcccggctcgatatcgagcgccggcgcgacgatcgtcgcgccgcccacgcaacggagggcgcttcctcgtccggagcgccacttcgggaggaagtgggaggaggagaagaggcaggagcgccgtgagggcaagaccccggcggctcccaccggtaactggcgaggtgaggccaagcagaaggccaccgccgaggacatcgacgatggcgacgatgacgggcaaacgccgacgtcttcgcctagagaccggcggacatgcccggggtccccagggaggtgattgagcaccgtctcgccgtgcggccgggcgtcggcagggcgtccccaggggtaccctcctgcttcctcttcccccgggcgtcggcagggcggctgccccccgggcccccgtcgcggggcccagaagcacgaccccctcccggggtagattgttcccccctgcggctcccgcccgcgccattgtggcctcggggggcccgctcccccgacgccccgaccacctgcatgatggtcaggatcttggcgcgctctggatcgcagcagagggggaggaccccttgggggatgagggatgcctccacggagctaagattcagcacccgttggaccaccatcctgaagtcctcagggtcccagtcccatttgcgcccctggtgggtcctcatgtagtcctcgggcccggtgtactcccaggcgccccgagcgcgccgctggagcggcgcgatccggcgacgaaggtagtcgccgaacaccatggcccccgtgagcccctgggatcgcagacccgccaggcggtcaagaacggcgtcgtagccgtctcccagatctaccgtcgcccgccagctggaggcctgcgccgggggctggctcggaagtcggaggcgcacttcgtcggcgagggggtgtgtagaaccaatcgctcttccagtcgtcccactttttgcggaggacgcagggaatgtagcggttcggcacctgcccccgcggctggaagtagcagccaccgactaccgtcggcggtgacaccggctgtacggtgaagaaccaccggaacagccggagagatgggcgcaccccgataaacatctcgcacaggtgcgcgaaaatggccaacgtcattatcgcgttgggggtgaggtgcgccatctggagatcataaaactccagaatatccatgaaaaaaatagagaatggcgggaccagccccgccattgcgaaagagaggaagaagacggaccgccccgggtagtgcggcgccaggcgtccctcgcccagcgcgaccacctcccggccggtggcagattccggcatgaatcggcgcggcagcccggcctgcctctcgctcacgatgcgggaaggcggcagcacgctaccctcgagcggtacggagccccgtgccat

SEQ ID NO: 80474 - DNA, 291 bp, Oryza sativa
  Clone ID: PAT_MRT4530_80093C.1
atggcgcacggaggcggcagggggagggcggaaggtggcggcggggggagagcggacgacggcatcgtggggaggacgaacggcggagacaggtccccgccgccggtgcggggcgcggtggggaggagatggggagacggccggatgcaacaggaggtgtcgtcatcatcgtatgagggaggtccggctgcgcctgcgtcgtcgtcgtcgtcaagcgccgaggatgtggtcgacgtgcacagcgaggacgagggacgccagggtcacgtcaagggcggatctacccattag

SEQ ID NO: 80475 - DNA, 2577 bp, Oryza sativa
  Clone ID: PAT_MRT4530_80094C.1
atggcacagggctccgcaccgctcgacggtagcgtgctgccgccttcccgcatcgtgagcgagaggcaggccgggctgccgcgccgattcatgccggaatctgccaccggccgggaggtggtcgagctgggcgagggacgcccggcgccacactacccggggcggtccgtcttcttcctctctttcgcaatggcagggctggtcccgccattctcttctttcttcatggatgttctggagttttatgatctccagatggcgcacctcacccccaacgcggtaatgacgttggccatcttcgcgcacctgtgcgagatgtttatcggggtgcgcccatctcttcggctgttccggtggttcttcaccgtacagccggatgtgacatactttcagccgcgggggccggtgctgagccgctacattccctgcgtcctccgcaagaaatgggacgactggaagagcgactggtgctacaccaccctcgctgacgaagcgcgcctccgacttccgagccagcccccggcgcaggcctccaactggcgggcaccggtagatctgggagacggctacgacgccgttcttgaccgcctggcgggtctgcgatcccaggggctcacgggggccatggtgtacggcgactaccttcgtcgccggattgcgccgctccagcggcgcgcccggggcgcctgggagtacactgggtccgaggattacatgaggacccaccaggggggcagatgggactgggcccctgaggacttcaagatggtggtccaacgggtgctgaatctcagctccgtggaggcatccctcatcccccaaggagtcctccccctctgcagcgatccagatcgtgccaacatcctgaccatcatgcaggcggtcggggcatcggaggagcgggctcctcgaggccacgatggcgcgggcgggagccgcaggggaaaacaatctaccccgggagggggtcacgcttctgggccccgcgacgggggcccggggggcagccgccctgccgacgcccgggggaagaggaagcaggagggcacgcctcccccatctcctccccgagggggcggggcagtgcgtgccagcagcaagcgcccggagggtgccgtgccgacgccgcagcccgagggggagcgaaaaaagaagcggctccgcaaaatgggggggaccgagccatgccgggggaacctcatctcgcccccgcggtggtcatttagccgacctccccgcagcgagatcccgtcacgcccctcccgccattccaagtccggccggtccgaggccgaggagacggcgaccgcggaggcccggaggcgggaggctgaccggcaagaagccgcagaccgcctccgggaagccgaggaagctgctcaggaggccgtccgggttcgccaggctgaggaagccgctcgggaggaggccagactccgccgggccgaggagtccgtccgggaggcggaggccttagccgccgcgaacaccacggtgctggacgggctaagtgcccagatggaggtcctgcaggcagagcgggcggagctcgacgcggcgtgggcgcgcgtagaggaggggcggcgctcggtggaggccatggtggaggcgggccgcaaggcacaccaccggcacgcctccgagctcgaggcccatcgtaggaacctggcggagatcgcccgggaggtggaggaggagcgggagactgccctcatcgccaccgccgtgcttgacgaggtgcgggacgacctccacctccaatacgggagccgggcggcggagctagagaagaagctcgacgccgcccggggaatccttgacgccgccgctgcccgggaacggcgggcggctgaaatcgaggcggcgtcccggaaacgcgaagaggcccttgaggctcgcgccacggcgctggaggaacgcgcccgcgcgaaggagagggacctggcggatcgtgaggccgccgtcgctattcgggaggcaacactagcggcgcacgaggccgcctgcgccgaagaggagtccgcactccgcctccgcgaggatgcgctcgccgagcgggagcgagctctcaaggaggccgaggccgcggcgcagcggctggcggacagcctgttcctccgcgagacagcgcaggaggagcaggcgcgccgcaatctggagggcgcccgcgccgagagggccgcgctggatcagcgggccgctgagctcgaggcgcgggcgaaggagctggacgcgagagcgcacagcggcggggcggccgcgggccacggcgacctagtcgcccgcctcgcagccgccgaacacaccatcgccgagatgcagggcgcgctggactcgtccgccggggaggtcgaggccctccgcctggcgaacaaggtagggcccggcatgcttcgggacgccgtctcccgtctagaccgtgccgggcggcaggcgggcctctggggcgagcggaccgcgaacttcgagggtacaacccctcggctcgcgttcgccctcgacgccgacgaggagggcggtgacgacggtgcggacgacaacgacgacgaggctggggacccgggcgcgtcggaatga

SEQ ID NO: 80476 - DNA, 429 bp, Oryza sativa
  Clone ID: PAT_MRT4530_80095C.1
ccttgagcatcaaccattatacccaatcactttaatacatatttgaagataacatatgtccaaataacaaaaaaaaagatagagaactattacattaaattgcaggcataaacatgtcaccaggtgatgcaaccatcaggcccgccatagcaagtgatgcagctcatacttgcactaggcgttcggtctgaccagtagcatagaaagagccacaacgacagatcgaatgaaaaaaaaaaatctccagaagaacaatacaactccaacccacatttgacaaaacattgcaaaaatcaaatcgcgacatccgagcgtgtgtatgtctggttgtggtcaaggactttgacagtccacaggcatgtccacgattgcttcagcaagtgttccaattgcatgctatcctcaagagtctatcctttccttgcacag

SEQ ID NO: 80477 - DNA, 5523 bp, Oryza sativa
  Clone ID: PAT_MRT4530_80096C.1
atgggtttcgtctccagcatcgacgacttcgtcttcccacccgggcaggcgttccagttcggcagcctcgacttcatcaccaacgacttcggcaagatttctctcctcgactcggattcgaaccagtcgggaagaggccaggtctccgccccgttcggtatcccgaactcggccgagatctaccccaagatcatctcaactgagttggccccaaaccactcagacgagatccaatctactccaacacgatctgatcaaggcgatggagcctatccgccaatcctgatgaaactccccgatgatttggctgctgtcttcaccacaagggtgtcttctccccgtaggtctaggctggatccggccccggccccgatccagtctagctccagggaagtcggcgtcatactctagcctctcggcacggtttcgatggaacaactagacggctacctcagctcccctggtgtcgactcacgaccaacggagatcgtggagtacgacgacttcggctaccgctacgaccaccacaagctcgacaacttcaacgaaggctttgaagacaactacacacccctctacttcggcattttcagaaccgacaatgagacggaagaacagcgtcaagcccgagaagcagaagaacagcgcgtgcgacaagaagccgaacgacgccgactggaggaggagcgccaagcacaagagcgagaacggctacagcgtgagcaacaggagcacgagcgggctgcaaaggaggctgaggaccaatgacaacgcgccttggaggccgggcgacgagcacgagaactcatcgggcagcaagacgtcgatgggacggcggtttttcgcaccccacaacagaacgcggatgcagcgatcacccttctcgaaacctcctcaaggaagacgcacttaaccaagccaatcacgtcgtcaacatcttgaaccagaccaagaccatgatcgcagcttcagtcccggttaactccgcgagcgtccgcacgccgactggcaaccgagttccccctcttcgatctcaagactatcaccaaccaagcatcagcgtcgtcagcgtgggatccagtcgcaggagcagggatcacgacgagcgatccgcccactcgcctcctgaccgacgcagggagcgtcgagctgaacgaccccgctccccacatcgcaggcgtcccatcgatcttcgtgatactatcaaccagcgccgcgcgacgagaagctacgtcccccaccattcaccagatcgctacgacgacgacatggatggagttgctgccttcacaagcgacatgcgtcgagtggattggccagtcggcttcaagccgactggaatcgagaattatgacggcaccactaacccagagtcttagctcaccgtctacagcctcgcaatttgcgcagaaggaggagatagcaaagccatggcaaactatctgcccatggccctagcggattctacccgacaacgttcacgtgtcaacacttttgacaagatcatgaattcccaatgtctacatcatccaaattccaatcacacggccaaagattgctttgtctacaagcagttcgcacaataatatgccaagaacgcacgcaagacgactgacggagatcaaagcacgtcaaagaagaaggatgatgaagatgatgccccgactggttttcaagaccatcgcaaggaatttaaccacatctttggcggacccctggcttatgaatccaagcgaaagcaaaagctgaccgaacgggagatcaatgctgttcagcccgacacaccccaatatcttcagtggtcagagacagctatcaagtttgaccgctctaatcaccctgaccgagtggtccacccggggcggtaccgcctggtactagacccagtggttcgcaacgtcaagctccgacgatccctcatcaatggtggcagtgcactcaacatccttttcgccaagactctggacgacatacagattcctcgcacggaattgaagccgagtaacgcgccctttcacggagtcatccccgggctgtcttctactcgactcggccagatcactttgccggatactttcgacacttgggagaactttcgcacagagaatatttgcttcgaagttgctgatttcgagacagtgtaccatgtcatattcggacgcccggcgttagccaagttcatggttgtcccgcactacacctacatgatgatgaagatgccaggtccccgaggagtcatatccctacggagcgacatcaagcaagccgtcacttgcgacaaggaaagctgcgagatggcccagacccgcgagatcacgctcgcccgagaaaagatccgactggctgcgtccacagcaaccgaatgagaagtgcctgcaaccaagatgacaaagagcggagaaggcgacgccaagaccaagaagattcctctagatccctctgatcctacaaagactgttaataataacgatatctttgcgtggaaaccatctgacatgcctggtattcctaagagaggtgattgagcactctttacatgttaaggaagatgctaaacctatcaagcaacgactccaccatttcgcacaagataggaaggacgcgatcaaggaggaactgaccaagctgttagcagcaggcttcatcaaggaagtccttcatcccgactggctggccaacccagtcctggttcggaagaagacggggtaatggcgcatgtgtgttgattcaagtcttgtcccaaagatcccttcgggttacctcatatttaccaggtagttgattcaacggccggctgcgagctactcagttttttggattgctactcaggatatcatcagatccgactaaaggagtccgactgcttaaagacttcatttattacaccctttggggcctattgctacatcaccatgccttttggattaaagaatgcatgagcaacttatcaacacatgatccagagatgttttttcaactcagatcggtcgtaacgttgaagcctatgttgatgatgtagtcgtcaagaccaagtagaaggatgatttgatcacggatctagaggagacttttgcgagcatccgtgctttcaggatgaaattaaaccctgaaaagtgtatcttcggagtaccgtcagggaagtttcttggctttatggtatcccacaggggcatacaagccaacctggagaaaatcaatgctatcctcaacatgaaaccgccaagctcccagaaggacgttcaaaagttaactggttgcatggcggcgctcagccagttcgtctcacgactaggcgagcgggggatgcccttcttcaagctgctaaagaaaactgacaatttccagtggggacccgaagcacaaaaagcctttgaagacttcaagaaattcctcactactccaccggtcttagcttcgccacatccgcaagagccgctgttgttatacgtgtcggcaacttcccaggttgtgagcacggttctggttgttgagcgtgaggaggaaggccatattcaaaaagtacaacgaccgatttatttcgttagcgaagttttggccgactccaagacaagatatcctcaggttcaaaagctattatatggtgttttaattaccgtcaggaaattatctcactacttccaaggtcactcggttacggtggttacatcatttccatcagggatatacttcacaatcgcgaagaaaatgggcggatcgcaaagtgggccttagagttgatgtcttttgatctatccttcaagccacgaacttcgatcaagtcccaagctttagcagacttcatcgccgaatggaccgagtgccaagaagacatgcctgcggagaagatggagtattggactatgcataggagcgggggttgttctaatttccccgactagagagaggttgagctatgtattgtggatacatttttctacatctcgcaacgtggcggaatatgaggcgcttcttcacgggctaaggcttgcgatctccttgggaattcggcgtctgatagttcgtggagactctaagttggttgttaatcaagtcatgaaatagtggtcctgccttgatgataacatgactgcctatcggtaggaggtacgcaaattagaagataaattcgatggccttgagctaacccacgttcttcgatataataatgaggcagccgatagactggtcaattttggttcaaaacgagaagcagctcctcccgacgtgttcgttgaacatctttatgagccaactgtaccaagggaagaaataaacgaggccacggacgctcgagacgtaagcatgattgaagccaactggagagagtccttcataagatttttgaccaaacaagaactccctcaagataaagacgaagccaacaggatctccaggcgcagcagacattatgtcgtacatgagaccgagctgtacaagaaaagtccatcaggaatcttgcaacgctgtgtgtctttggaggagggaagacaattgctaaaggatatacattcaggcatctgtggcaatcacgctgccgcacgaaccatagttggcaaggcatattggcaaggttttttctggcctacagctgtatccgacgctgacaaaattgtgcaaacatgtgagggttatcaattttttgcctgacggactcatctaccggctcaagagttgcaaaccatcccgttgtcttggccgttcgcggtatgggggctcgacatggttggcctgtttaaaaaggctgtcggtggttatactcatctcttcgtagccgttgacaagttttccaagtggatcgaagccaaaccggtcatcataatcacggtagacaaggctagagatttcttcatcaacattgtgcaccgatttggggtacccaatcggatcatcactgataacggcactcaattcactagcggggtatttaaagatttttttcaggacttcggcatcaaaatttgttatgcctccgtagcgcaccccatgagcaacggacaagttgaacgtgccaatggtatagtgcttcaaggaataaaagcacaagtttttgaccgactgcatccctatgctggcaaatgggtagaacagttgccatttgtcctttggtccctgcgcaccacacctagtcgggcgatgggccagtcgccgttttttctagtctatggagcagaagtgatgttgccaagcgaggtggaatttgagtcgttgcaatttcgtaatttcagcgaggagcgctacgaagaagaccaaatagatgatcacaattggttggagaaagcccgtgaagcagccttaattcagtcggctcggtatttacaagggttgcgccattatcacaatcgcaatgttcgatcacgagctttcttagtcggcgacctggttctgaggaaaattcagactacaaggaaaggaccgttcatagtttctgaagttactcagccaggttcttaccgactcaaacgtgaagacggtactcatattgacaactcttggaatattgaacatcttcgtcgtttttatgct

SEQ ID NO: 80478 - DNA, 162 bp, Oryza sativa
  Clone ID: PAT_MRT4530_80097C.1
atgacatcggctgatgcccaggctgcacaagaggtacattctgacctggagctgtaccccaagattgcactatgggaggaggaacagatgatgggcctcccatggtgggcatatggcctccagagaatgtcgctggcggctgcagaggcccagatgacatag

SEQ ID NO: 80479 - DNA, 1923 bp, Oryza sativa
  Clone ID: PAT_MRT4530_80098C.1
atgggtttcgtctccggcattgacgacttcgtcttcccacctgggcaggcgtttcggtttggcagcctcgacttcatcaccaacgacttcggcaagatttctctcctcgactcggattcgaaccagtcgggaagaggccaggtccccgccccgttcggtatcccgaaatcggccgggatctaccccaagatcatctcagccgagttggccccaaaccactcggacgagatccaatctactccaacacgacccgatcaagatgatggagcctatccgctaatcctgatgaaactccgcgatgacttggctgccgtcttcaccaaaagggcgtcctctccccgtaggtctaggcgggatccggccccgtccccgatccagtctagttccagggaagtcggcgtcatactccagcctctcggcacggtctcgacggaacaattggacggctacctcagctctcccagtgtcgactcacgactgacggagatcgtagagtacgacgacttcggctaccgctacgactaccgcaacctcgacgacttcgacgaaggctatgaagataactacacgcccctttacttcggcattttcatggccaacaacgagacggaagaacagtgtcaagcccgacaagcagaagaacagcgcaacgcggttgcagcgatcaccctcctcgacaccctccttaagggagacgcactcaatcaggccaatcacgtcgtcaacatcttgaacaagaccaagaccatgatcgcagcttcggtcccgatctccgacatcatcgacgacgtcatcatcaccgccttcaccaagggcattcgccacgatctcttagtcggcaagtttggacgcaagcctcccaggatagtcaagcagatgttcgaaaaagccaatgagtacgccaaagccgaagatgccgtcaccgcatccaagcagtcgggcaccacttggaagccgaagaaagatacgccgactacagggggagtggaagtaccaatcacaaggatcgcaagcttcgtagagcaatacgctaagaactcacgcaagacgactaacggagatcaaagcacgtcaaagaagaaggatgacgaagatgatgccccgactggttttcaagaccatcgcaaggaactcaaccacatctttggcggacccctagcttatgaatccaagcgaaagcaaaagctgattgaacgggagatcaatgctgttcagcccgacacaccccaatatcttcggtggtcagagacagctatcaagtttgaccactcggatcatcctgaccgagtggtctacccgggacggtaccccctggtactagacccagtggttcgcaacgtcaagctccgaagatccctcatcgatggtggtagcgcactcaacatccttttcgccaagatgctggacgacatgcagatccctcgcacggaattgaagccgagtaatgcgccctttcacggagtcatccccgggctgtcttctactccactcagccagatcactctgccggttgctttcggcactcgggagaattttcgcacagagaatatttgcttcgaagttgttgatttcgagacagcgtaccatgccatactcggacgaccggcattagccaagttcatggctgtcccgtactacacctacatgatgatgaagatgccaggtccccgaggagtcatatccctgcggagcgatattaagcaagccgtcacttgcgacaaggaaagctgcgagatggctcagacccgcgagatcacgctcgcccgagaagaaatccgactagctgcgtccacagcaaccgaaggagaagtgcctgcgaccaagatgacaaagagcggagaaagcaacgccaagaccaagaaaattcctctagatccttccgatcctactaagactgttgtaataggcgctgagttagtgtaa

SEQ ID NO: 80480 - DNA, 4828 bp, Oryza sativa
  Clone ID: PAT_MRT4530_80099C.1
ctacctcgtttctcctggatctacccctactccaatcctcttttcttctccaaatcctctcttctgtctctccttctcttcttgcaggtttcctacttctagacccagggcaccaccagaaggggtatgtagccatggtccatctggtcttccatcttctggtggtggcaaaggcaatggtgtagcaatagcaggagctaatccgtggtattcgggggatggctctgatggaagcaataccactagtaacagcgagagaacagtcacagctgaattcggaataatcgtgcatcctggtggttatggtgatcaggaggtggattctcgtacggctaatcaccatgaggcagattcagaaactgatagcgagagaactgaaggtgctagctttgggaagatcgtaggggtagcgtcaagttcttcgccgattagtgcgatcagttccgtctccggcatcgatgacttcgtcttccctcccgggcaggcgtttcggttcggcggcctcgacttcatcaccaacgacttcggcaagatctctctcctcgactcggatccaaaccagtcgggaaagaaccaggtctcagccccattcggtattccgaactcggccaagatctactccaagcttatctcgatcaagtcggcttcaaaccactcagacgagatcccatctactccaacatcaccagatcaagatgatggggcctaccctccaatcctgatgaaactccccgacgatttggccgccgtcttcactacaagggcgtcttctccccgtaggcctaggcggaagtcggcttcaacaccgatcatgcctagctccagggaagtcggcgtcatactccagccactcggcacgatttcgacggatcaactggaaggctacctcagctcccccggcgtcgactcacgaccaaccgagatcgtggagtacgacgaattcggctaccgctatgacaaccgcgacctcgacgacttcgacgaaagctttgaagacaattacacccctctattcttcggcgtcttcatggccgacaacgagatggaagaacaacgccaagcccgagaagcagatgcacgacgcttacagcaggaagctgagcgatgccgactggaagaggagcgccaagcacaagagcaagaacggctgcggcgagaacaacaagatcgcgaacgggctgcaaaggaggccgaggaccgacaacaacgagccttggacgcaggacgacgagcggagcgccgagttgaacggcctcgttccctaccttgtcaacgtcccatcgatcttcgcgatacgatcaaccagtgccgtgcaacacgaggtcaccgccgtacgccagaccgctatgacgacgacgtggatggagtagctgcctttactaacgacatgcgtcgagtggattggccggccggcttcaagccgactggaatcgagaagtatgacggcaccaccaatccagagtcctggcttaccgtctacggtcttgcaatccgcgtagcaggaggagacagtaaggccatggcaaactacttacctgtggtcctagcggattctgcttggtcctggctccacggattaccccgtggcacgattggatcatgggcggaactgcacgacaactttatcgccaacttccagggcacctttgaacgccccggcacacagtttgatccctacaacgtcattcagaagtctagagaatcccttcgagattatatccgacacttctctgaacagcgcaacaagatttccgacattaccgacgacgttatcatcaccgctttcaccaaaggaatttgccacgaagaactagtcggcaagttcgggcgcaaacttcccaggacagtcaaacagatgtttgaaaaagccaatgagtatgccagagccgaagacgccattgccgcatccaagcagtcgggtcctacttggaagccaaagaaagatgtgccgactacgggagggggtggaagtaacaatcacaaggaccgcaaacgtaagcccaaggaacttgttgcgactactacacacttctcccgacaacgttcgcgtgtcaacacttttgacaagatcatgaactcccaatgtccgcatcatcccaactccaacacgcagctaaggattgcttcgtctacaagcagtttgcagagcaatatgctaagaatgcacagaagacctctgacggaggacaaagcacgttttcaagaccaccgcaaggagctcaaccacatctttggcggccctctagcttacgagtctaaaagaaagcaaaagttgactgaatgggagatcaatgttgtccagactgatacgccgcagtatctttggtggtcggagataacgatcaagttcgaccgttcggatcatcccgaccgagtggtccacccggggcggtaccccctgatcactcttccggtcacttttggtactcgggagaacttccgcacagaaaacatttgcttcgaagtcgctgatttcgagacagcgtatcacgccatactcggacgcccggtgttagccaagttcatggccgtccctcactacacctacatgatgatgaagatgcctggtcctcgaggagtcatatccctacggagcgacatcaagcaagccgtcacatgtgacaaggagagttgcgagatggctcaaacccgcgagatcgcgattgctcgagaagacatccgactggctgcaaccacggcaagcgaaggagaagtgcctatggccaagatctcaaagagtggagaaagcgaagccaagaccaagaaaattcccctagatccttctgaccttactaaaactgctgtaataggcgccgagaaggacgcgatcaaggaggaattgaccaagctgttggcagcaggcttcatcaaagaagtccttcatcccgactggctggctaacccagtcctagttcggaagaagactgggcaatggcgcatgtgtgtcgattacaccgacctcaacaagtcttgccccaaagatcctttcgggctgcctcacattgaccaggtagtcgactcgaccgccggctgcgagctgctcaattttttggattgctactcgggatatcaccagatccgattgaaagaatccgactgcttgaagacttcgttcatcacgccctttggggcctactgctacatcaccatgactttcggattgaagaacgcgggagcaacttatcaacgcatgattcagagatgtttcacaactcaaattggtcgcaatgttgaagcctatgtggatgatgtagtcgtcaagaccaagcagaaggatgatttgattacggatttggaagaaacctttgcgagcatccgcgctttcaggatgaaattaaaccctgaaaaatgcaccttcggagtaccgtcagggaaactgcttggatttatggtgtctcacagaggcatacaggccaacccggagaaagtcaatgccatcctcaacatgaaaccgccgagctctcagaaagatgttcaaaagctgactggatgcatggcggcgctcagccggtttgtctcacgactcggcgagcgggggatgaccttcttcaaactgttaaagaaaacagacaatttccagtgcggacccgaagcacagaaagcctttgaagatttcaagaaacttctcacactccaccagttttggcctcgccacacccacaagagccactattactatacatatcggccacctctcaggttacgcgaacttcgattaaatcccaagcttttagccgactttgtcgccgagtggaccgagtgccaagaagacacgcccgaggaaaagatggagtattggactatgcactttgacgggtcaaagagactttcaggcactggggctagagttgttttaatttccccaactggagaaagactgagctatgtgctatggatacatttttccgcatctcacaacgtggcagaatacgaggcactccttcacggactacggatcgcgatctctttgggaatcaggcgtctgatagttcgtggagattcacagttagttgtaaatttgaaagagtggtcttgcctcgacggcaatatgatcgcttatcgacaagagattgaagctaaaccggtcatcacgatcacggtagacaaagctagagattttttcatcaacattgtacatcggttcggggtacctcatcggattattactgataatggcactcaattcactggcggagtatttaaagatttttgtgaagacttcggcatcaaaatttgctatgcctccgtagcgcatcctatgagcaatgggcaagttgaacgagccaatggcatgcgactccaaggaataaaagcacgagtttttgatcgcctgaatccttatgccggcaaatgggtggaacagctgccatctgtactttggtccttgcgcaccacccccagtcgggctacgggtcagtcaccattcttcctggtttatggagcagaagcaatgttgcctagtgaagtagaatttgaatcattgcgttttcgcaacttttgcgaagagcgctacggagacgaccgagtggatgacctacaccgactggaagaggcccgtgaagcagccttaattcagtcggcccgatacctgcaaggtttgcatcattatcataatcgtaacgtccgatcgcgagctttcttagtcggcgacctggttttgaggaaaattcaaactacacgggatcggcataagctatcccctttatgggaagggccatttatcatctctgaagtcactcggccaggttcctatcgactcaagcgtgaagacggtacacctatcgacaactcttggaatatcgaacatcttcgtcgtttttatgcttaa

SEQ ID NO: 80481 - DNA, 978 bp, Oryza sativa
  Clone ID: PAT_MRT4530_8009C.1
tcacgcgaacggacggccgagatcaaaccaatccaagatggacggccgagatcgatcgggtccacggcggctcacgacgaacggtcccgatgacgtcggcaatgacgtcaccgacggcggcggcggctcggcggcttgaacggcccgggcggcgcacgctcgccggcgaacggcggcgctaggacgcaaacggagggcaccaagacgaagcgggcggcacggcgaactcaccggcgaccaaaacggcggcggaagaccaacggacggcgacggcgacaaggaggaagcggcgggaaccttcgggtcgacggcggcgatgacgctccggcggtcttcggcggcaacgaaggggcggacgaggacggcgacgcgacggcgaacacgacggcggccttcccgagcgacggcgacggctgtcagcggcagcgggcgcgcgcgcgcggcggctgactgggccggaatctcataggcccaggcgttctcgttacggacctcggcctcctcctccggcgtgaagtcgttctcgatcccaaatacctccctgacctgctccggcatcatgtctttgatcaagtccgccgtgcgctggcatgtcagctccaacaggcacggcatgttcaggaagttggcagcattgatcaggccgaacaacttcttcctgtcgatgttgacgaactcggcgtcgaacttcctgatgagctcctcctgcccgctagcattcgcggcggcggtggctgtggcggtggcggcggcgtgcttgttgcagtactcgaccaccttggcgaggatatcggaggcgacgttggcgagagggatggcgccgttggtggcgcagtcatcctcgatcatgttacccaacgtcttggacaggctcgccgccgcctccgacagctcgaatttcgcgccgtccgagctgatcagcaggatcatcttctcgccatcggcggcgccgtctgctgctgctgccgatgctgccat

SEQ ID NO: 80482 - DNA, 179 bp, Oryza sativa
  Clone ID: PAT_MRT4530_800C.1
acctgtgcctgttccctgttctctgttcttggccaagtgttctactagccgcaacagtggccagataggtgtacacgtacgcagtcccccgttgtatatataacaacagtgtaacttcgcctcggtttagttgcctactgttaagttagtgtacttaagcataataggagagtttggct

SEQ ID NO: 80483 - DNA, 1578 bp, Oryza sativa
  Clone ID: PAT_MRT4530_80100C.1
atgggtcataccaacctccactccgtcggaagcaggtgcaacgtggaagcacggttgtttgccgatgacatgacaggcgagctggcacgccgtctccggctagggacaagtgcctggaggctctcatcaatccgacgggacggggcgaggcgtgtaacaggccacctgccaccacctaacccgcgatctgaccggtctgtgaccggtcacacgctgcgcccggtcacggaccggataagcgagcgcgctgagctgcattacatgcggcgtgacgcgctcatccaacccgcaatatatgcggttagctccttctccgccggcgtcatggcacggggctccgcaccgctcgacggtagcgtgctgccgccttcccgcatcgtgagcgagaggcaggccgggctgccgcgccgattcatgccggcatctgccgccggccgggaggtggtcgagctgggcgagggacgcccggcaccacactacccgaggcggtccgtcttcttcctccctttcgcaatggcagggctggtcccgccattctcttctttcttcatggatgttctggagttttatgacctccagatggcgcaccttacccccaacgcgataatgacgttggccatcttcgcgcacctgtgcgagatgtttatcgaggtgcacccatctcttcggctgtctcggtggttcttcaccgtacagccagtgtcgccgccgtcggtagttggtggctgctacttccagccgcgggggccggcgctgagccgctacattccctgcgtcctccgcaagaagtgggacgactggaagagtgactggttctacacccccctcgccgacgaagcgcgcctccaacttccgagccagcccccagcgcaggagaaacaaacgcgtcgcaatctggaaggtgccagcgccgagagggccgcactggatcagcgggccgctgagctcgaggcacgggcaagggagctggatgcgagggcgcgtagcggcggggcggccacgggcgacggcgatctagccgcccgcctcgcagctgccgaacacaccatcgccgagctgcagggcgcgctggactcgtccgccggggaggtcgaggccctccgcttggcaggcgaggtagggcccggcatgcttcgggacgccgtctcccgtctagaccgcgccgggcggcaggcgggcctctggggcgggcggatcgcgaaatatgccgccaaccaggggggcctcgcccagcgcctctcagagatggccgggactctccagcggctccccgaggagctcgaggagacgatcaagtcatcctcgagagacctcgcccggggggcagtggagcttgtactggcaagctaccaggccagggacccggacttctccccgtgggcggcgctggacgagttccctcccggaaccgaggacgacgcgcgcgcgcaggtccgggacgccgccgaccacatcgtccacagcttcgagggtacggcccctcggctcgcgttcgccctcgactccgacgtggagggcggcgacggtggtgtggacgacagcaacgacgaggccggcgacccgggagcctcgaagtga

SEQ ID NO: 80484 - DNA, 359 bp, Oryza sativa
  Clone ID: PAT_MRT4530_80101C.1
ttttgatctgatcgatggacatggcgtcgcccatgctctccgccagagcaccgtgctcactccagggaggcgggcttgtcagaagctctcctgatctgaggagctcgtgcccactgccggtgcagcggaatgcctcatagcacgacttgatgaacacggcgtcgttgaggacccacacgagaggaacgagcggcggggcgcggtcgtgcccgacgagatcgaccctgcacgcggggatcaaagctttcgggcagctcgggcgcacttttctgcagggctgcaacggacgcggtgaccgctatcacatggacgtcatcgacataaacgacaccggaggcgcgaagcaggcgtggcacctt

SEQ ID NO: 80485 - DNA, 625 bp, Oryza sativa
  unsure (1)..(625): unsure at all n locations
  Clone ID: PAT_MRT4530_80102C.1
aaggcgttccctcgnttcgagctccggccaccggcgccagccgccgcngccgggaacgcctcctcggcncggcttcccgtcggcgtcgtggcnaggaaggagaaggaggcacggcnagggatagagagggaggggaagnaggcgagcggcggcgccgccaccatgacgacgaggcggcaactgctggcgccgtcgcctcccggcgtgagaggagaagaggcncgnagaggagaagaggagtagtactcgaggataggatcagtctcgcgcgagagaggaagggctgnaaggggtaggtgnaggaaataaattttcgttcgctccatcggtccgnaagctagggtcacgcccactgtgggcttggtaccatttactagtgcctctatccgattaagccgcacatatatgagtgcttgcactgtggggtgagtgtcttagaaccaattttttggactggggtacgggtcccatagcttgcactgtganaggcctaagttggatagctccgaggtgaagatttagttaagagccccttcttaaagactcttaaaagtgcttgttagggataaacttatttccagtgaatggtcttaggaaccccaaaaaaaaaaaaaaaaaaaaaaaa

SEQ ID NO: 80486 - DNA, 305 bp, Oryza sativa
  Clone ID: PAT_MRT4530_80103C.1
acggagacggggatttttatacaggtttaggcccctgaacggtcagtcgacaacagggtagccttccacctcgaatccgtgcccggcgagatcagagatagcgctttcatctctcctgacagtatccggagacaccgtagggtactagccgtgtttatccctgaagttgatatccgacggcgtgtcttggcgtatgtaggcttctatgttgtggcttctatgtcgattgtgttgggttgtttccgtataggacatggtatgtggtggatcctaccgagatttagtcaactactattagatatgtg

SEQ ID NO: 80487 - DNA, 219 bp, Oryza sativa
  Clone ID: PAT_MRT4530_80104C.1
atggagaggtggtcgccacaagttcttcgggcttacgcttgcgatccttgtggttgttacttccactctctcctgcggtcggcgtatccttctttggctttcaagtggtgcccgactgtttggacgcggtcctcgtggcgaatgcctttagtgaaggcggcgatgatgacgtcgtcggtgatgtcggagatcttgttgcgttgttcggagaagcgttag

SEQ ID NO: 80488 - DNA, 4185 bp, Oryza sativa
  Clone ID: PAT_MRT4530_80105C.1
ctagccggtagctcgactgcgagtggtgcgtagggaccaaagtacagatggcagctgttctacccacttgccggcataaggacacaatcggtcgaaaactcgcgcttttattccttgaagtaccatgccattggcacgttcaacctgtccattgctcatggggtgcgctacagaggcataacaaattttgatgccgaagtcctcgcaaaaatctttgaatactccgcctgtgaattgggtgccgttatcagtgatgatccgattgggtaccctgaaccggtgtacaatgttgatgaagaaatctctagccttgtctgtcgtaattgtaatgaccggtttagcttcgatccacttggaaaatttgtcaacagccacaaagtggtgagtataaccgccgactgcctttttgaacgggccgaccatgtcaagcccccaaaccgcaaacggccaagacaacgggatggtttgcaactcatcttgggtgtccgcggcctcgattatttctttccttggtacagtcggctcataaagatgttcgacgaatacgtcagaaggagctgcttctcgctttgaaccaaaattagccaatctgtcggctgcctcgttgttgtgctgaagaacatgagtgagctcaagtccatcgaatttgtcttccaatttgcgtaccttctgccgataagcagtcatattatcatcaaggcaggaccactctttcatgacttgattaacaaccaactgagaattccacggacgatcagacgccgaatgcccaaagagatcgcgatcgtagctcaatctttctccagtcagggagatcaaaacaaccccagctccagtgcctgaaagcctcttcgacccatcaaaatgcatggtccaatactccatcttctcctcgggcatgtcttcttggcactcggtccacttggcgacaaagtcggctaaagcttgggacttaatcgaagttcgtggcttgaaggatatatccagggacatcaattctaaggcccactttgcgattcgtccatttgcttcgcgattacgaagtatatccccgagtgggaacgatgtgaccaccgtgaccgagtgaccttggaagtagtgagataatttcctaacggtaattaagataccatataataacttttgaacctgaggatatcttgtcttggagtcggccaaaacctcgctaacgaagtagattggtcgttggactttttgaacatggccttcttcttcatgctcaacaaccaggaccgtgctcacaacctgagaagtcgctgacacgtataacaatagtggctcttgcagatatggtgaggccaaaattggtggagtagtgagaagtttcttgaagtcttcaaaggctttttgtgcttcgggtccccacatgaatccaagcagcttccctaacggtactccgaagatgcacttttcagggtttagtttcatcctgaaagcgcggatgcttgcaaaggtttcttctaaatccgcaatcagaccatccttctgcttggtcttgacgactacatcatcaacataagcttcaacattgcggtcgatctggtcaatgcgaggtaacccaaaaggatctttgggacaggacttgttgaggtcggtgtaatcgacacacatgcgccattgccccgtcttcttccgaaccaggactgggttagccagccagtcgggatgaaggacttctttaatgaagcccgctgctaacagcttggtcaattcctccttgatcgcatccttcctgtcagcagtcttagtaggatcagagggatctaaaggaatctttttggtcttggcgtcgctttctccactcttgggcatcttggtcgcgggcacttctccttcgcctactgtggacgcagctagtcggatttcttctcgggagagcgcgatctcacgggtctgggccatctcgcaactttccttatcacatgtgacggcttgcttgatgtcgctccgaagggatatgactccttgaggacccgacatcttcatcatcatgtaggtatagtacggaacgaccatgaacttggctagcgccgggcgtccgagtatggcatgatacgccgtctcgaaatcagcaaccagggggtaccgccccaggtggaccactcggtcgggatgatccgagcggtcaaacttgattgtcgtttctgaccaccgaagatattggggcatgtcgggctggacagcattgatctctcgttcagtcaaattttgttttctcttggattcataagccaggggtccgccaaagatgtggttgaattccttgcgatggtcttgaaaatcagtcggggcaacatcttcgtcatccttcttctttgacgtactttgatctccgtcagtgcctttgcgtgtattcttggcgtactgctctgcaaattgtttgtagacgaagcaatctttggctgcgtggttagaatttggatggtgcggacattgggagttcatgatcttgtcgaaggtgttgacgcgcgaacgttgtcgggaggttggcgcagtagttgccacaagttcctcgggcttacgcttgcgatccttgtgatgagtacttccactccccccagtagtcggcgtatctttcttcggcttccaagtggtgctcgactgcttggacgtggaaatagcatcttcggctttggcatactcattagctttttcaaacatctgcttgactgtcctgggaggcttacgcccgaacttgccgactagatcttcgtggtgaatgcccttggtgaaggcggcgatgatgacgtcatcggtgatgtcggagatcttattgcgttgttcagagaaacgtcggatataatctcgcagggattctctggacttctggacaacgttggaaagatcaaactgagtgccagggcgttcgaaggtgcctcgacgcaggtcggccgtgaaggtagctacaccatccacgtcgtcatcgtagcagtctggtgaacggtggggagcgtagcctcttgccgcgcggcgctggttgatggtatcgtgaagatcgatggggtgcctgcgaggtcgttcaactcggcgctccctgtgtcgttcgggaggtgaatggacagatcgctcgtcgtgacccctgctcctgcgattggatccggcgccaacgacgctgaggcttggttggtgatagtcttgagatcggagagggaggactcggctgccagtcggcgtgcgggtgcttgcggagttagccgggatcgaggcggcgatcatggtcttcgtctgattcaagatgttgacgacatgatcggcctgattgagcgcatcttccttgaggagggtgtcgaggagggtgatcactgcaaccgcgttttgctggggtgtgcggaaaaccgctgtcccgtcgacgtcttgttgcccgatgagatctcgtgctcgtcgcccggattccaaggcgcgctgtcgtcgatcctcaacctccttcgcaacccgttcgcgatcttgttgttcacgctgtagtcgttctcgctcttgttgttgtcgttcttcctccagtcggcgacgttcggcttcttgtcgcgtgcgctcttcttccgcttctcgggctcggcgttgttctgccgtctcgttgtcggccataaatacgccgaaaaagagaggcgtgtagtcgtcctcatagccatcgtcgaagccgttgaagttgccgtagtcgtagtggtagccgaagtcgtcgtactcgaggatctccttagagctagattggatctgggctaaagccgaatcccgtctaggtcttcggatgggagacgccttggtcatgaagacagcagccagatcgtcgggaagtctcattaggattgggggataggacccatcatcttgatctggtcgtgttggagtagattggatctcgtccgagtggtttgaagccaactcgggagagatgatcttggagtagacctcggccgagttcgggataccgaacggggcagagatctggcctcttcccgactggttcgaatccgagtcgaggagagaaatcttgccgaagtcgttggtgatgaagtcgaggccgccgaatcgaaatgcatgccgtgtaggtatggggtatccataatctccacacgcagcagcagccagcagcagccctagcagcagcaaaaagcatatcgcggcagcagcagccagcagcagatcatggcagcagcaacaacaagccat

SEQ ID NO: 80489 - DNA, 6030 bp, Oryza sativa
  Clone ID: PAT_MRT4530_80106C.1
atgggtttcgtctccggcatcgacgacttcgtcttcccttccgggtaggcgttccggttcggcagcctcgacttcatcaccaacgacttcggcaagatttctctcctcgactcggatccaaaccaatcgggaagaggccaggtctccgccccgttcggtgtcccaaactcggccgagatctaccccaagatcatctcgatcgagtcggcttcaatccactcggacgagatccaatctactccaacacgacctgatcaagacgatgggtcctatccctcaatcttaatgagacttcccgatgatctggctgctgtcttcacgaccaaggcgtttcccacccgaagacctagatgggatccagcttcggctccgatccgatctagctctagggaggtcggcgttatactccaacctctcgggacggtctcgacggaagaattggacagctacctcagctccctcggtgtcagttctcgaccaacagagatcctcgagtacgacgacttcggctatcgttacgactacactaacttcgacgaaagctacgaggacaactacacgcctctcttcttcggtgtattcatggccgacaacgagacggcagaacagcgccgagcccgagaagcagaagaagaacgcacgcgacaagaagctgaacgtcgccgactggaggaagaacgacaacgacaagaacaagaacgactgcagcgtgaacaacaagatcgcgaacgggctgccaaggaggctgaggaccaacgacagcgcgccttggaacccggacgactagcacgagagctcatcgggcaagacgacgttgacgggacgacggtttttcgtgccccacaacagaacgcggttgtagcgatcaccctcctcgacaccctcctcactgaagatgcgctcaaccaagctgatcacgtcgtcaacatcttgaactagaccaagaccatgatcgccgcctcggtcccggctaactgcgcaagcacccgcacgccgactggcagccgagttccacctcttcggtctcaagactatcatcagccaagcctcaatgtcgtcgccgagggatccaatcgtaggagcagggatcatggtgaacgatccgttcattcaccccctgaccggcacagggagcgtcaagctgaacgcccccgctccccccaccgcaggcgtcccatcgatcttcgcgagaccattaaccagcgacgcgcggcgagaggccacaatcctcatcattcaccagatcgctccgacgacaacgtggatggagtagctgccttcacaaacgacctacgttaagtggattggccagctggcttcaagccgctagaatcgagaagtatgacggcaccactaaccctgagtcttggctcaccgtctacggtctcgccatccatgcagcaggaggagacagcaaagccatggcaaactatctacccgtggctctagcggattctgcccggtcctggcttcacgggttaccccgtggcacaatcggatcatgggcggaacttcgcgaccacttcatcgccaacttccagggtacctttgaacgccctggtacacagtttgatctctacaacgtcattcagaagtcgggagaatcccttcaagattacatccgacgcttctccgagcaacgcaacaagatatccgacattaccgacgacgtcatcatcgccgccttcaccaagggcatttgccacgaggacctagtcggcaagttcgggcgcaagcctcccaagacggtcaagcagatgttcgaaaaagccaatgagtatgccaaagccgaagatgctattaccgcgtccaagcaatcgggcaccacttggaagccgaagaaagatacgccgactacaggggggagtggaagtaccaatcacaaggaccgcaagcgtaagcccgaggaacttgtggcaaccactacaccatcctcccgacagcgttcccgcgtcaacacttttgacaatatcatgaactccccatgtccgcatcatcccaattccaatcacgcggccaaagattgcttcgtctacaaacagtttgcagaacaatacgccaagaatgcacgcaaggcctccgacggagatcaaagcacgtcaaagaagaaggatgatgaagatgatgccccgactggttttcaagaccatcgcaaggaactcaaccacatcttcggcggacccctggcttatgaatccaagagaaagcaaaagctgaccgaacgggagatcaacgctgttcagcccgacacgccccaatatctttggtggtcagagacaacaattaagtttgaccactcggatcatcctgaccgagtggtccacccggggcggtaccccctggtactagacccagtggttcgtaacgtcaagcttcgaagatccctcatcgatggtggcagtgcactcaacatccttttcgccaagactctggacgacatgcagatccctcgcacggaattaaagctgagtaatgcgccctttcacagagtcattccagggctatccgcaacaccactcggccagatcactcttccggtcactttcggcactcgggagaacttccgtacagagaacatttgtttcgaggtcgctgacttcgagacagcatatcatgtcatactcggacgcccggcgttagccaagttcatggccgtcccgcactatacctacatgatgatgaagatgcccggtccccgaggagtcatatccctacggagtgacatcaagcaagccgtcacgtgtgacaaggaaagttgcgagatggcccacacccgcgagatcacgctcgcccgagaagaaatccgactggctgcgtccacagcaagcgaaggagaagtgcctgcgaccaagacgccaaagaccggagaaagcgacgccaagaccaagaagatttcactagatccctctgatcctaccaagactgctaataataaagatatctttgcgtggaaaccatccgatatgcctggtattcctagagaggtgattgagcactctttacatgtcaaggaagacgcaaaacctattaagcaacgactccgccggttcgcacaagataggaaggacgcgatcaaggaaaaattgaccaagctgttagcagcaggcttcatcaaagaagtccttcatcccgactggctggctaacccagtcctggtccggaagaagacggggcaatggcgcatgtctgttgattataccgaccttaacaagtcttgccctaaagatccttttgggttacctcacattgaccaggtagttgactcaacggccgactgcgagttactcagctttttggattgctactctggatatcatcagatccgactaaaggaatccgactgcttaaagacttcattcatcacgcccttcggggcttactgttacatcaccatgccttttggattgaagaatgcaggagcaacttatcaacgcatgatccagagatgtttttcaactcagatcggccgcaacgttgaagcctatgtagatgacgtagtcgtcaagaccaagtagaaggatgatttgattgcggatctagaagaaacttttgcgagcatccgcgctttcaagatgaaactaaaccctgaaaagtgcatcttcggagtaccgtcagagaagctgcttggatttatggtgtcccatagaggcatacaagccaacccagagaaaatcaatgccatcctcaacatgaaaccgccaagctcctagaaaggtgttcaaaagctaaccggctgcatggtggcgctcagccgattcgtttcacaactcggcgagcgggggatgccctttttcaagctgttgaagaaaaccgacaatttccaatgggggcccgaagcacaaaaagcctttgaagacttcaaaaaacttcttactaccccaccagtcttagcttcaccacactcgcaagagccactgttgttataagtgtcgacaacttcctaggtggtaagcacaatcctggttgttgagcgtgtagaagaaggccacgttcaaaaagtccaacgaccaatctacttcgttagcaaggttttggctgactccaaaacaagatatcctcaggttcaaaagctactatatggtgttttaattaccgtcaggaaattatcccactacttccaaggtcactcggtcacggtggtcacatcgtttccactcggggatatacttcataatcacgaagcaaatgggcggatcgcaaagtgggccttagagttgatgtccttggatatatccctcaagccgcgaacttcgatcaagtcccaagctttagccgactttgttgtcgagtggactgagtgccaagaaggcgtgcctgtagagaagatggagtattggaccatgcattttgacgggtcaaagaggctttcaggcaccggagcaggggttgttctgatttccccgactggagaaaggctgagctacatattgtggatatatttttctacatcccataacatggcagaatatgaggcgctccttcacggactaaggattgcaatctctttgggaatccggcatctgatagtctgtgtagattttcagttggttgttaatcaagtcatgaaagaatggtcctgccttgatgataatatgaccgcttaccggcaggaggtacgcaagttggaagacaaattcgacggacttgagctcacccatgttcttcggcataataacgaggcagccgacagattggccaacttcggttcaaaacgagaagcagctccttttgacgtattcgtcgagcatctctatgagccaaccgtaccaaggaaagaaataatcgaggccacggtcactcaagatgtaagcatgattgaagctgactggagagagccccttataagatttttgcccaaacaagaactccctcaagataaagatgaagccgagcggatctccaggcatagcagacactatgtcattcacgagaccgagctgtacataaaaagtccatcgggaatcctgcaacgctgtgtgtctctcgaggagggaaggcaatttctaaaggacatacatttaggcatctgtggcaatcacgctgctgcacgaaccattgttggcaaggcataccagcagggtttcttctggcccacggctgtgtccgacgccgacaaaattgtgcgaacatgtgagggttgtcaattttttgcccgacaaactcatctaccggctcaggagttgcaaaccatcccgttgtcttggccgttcgtggttcgggggctcgacatggttggcccgtttaaaaaggctgtcggtagatatactcatctctttgtagctgttgacaaattctccgagtggatcgaagctaaaccggtcattacaatcacggtagacaaagccagagatttcttcatcaacattgtgcaccggttcagggtacccaatcggatcatcactgataacggcactcaatttacaggcggagtatttaaagatttttgtgaggacttcggcatcaaaatttgttatgtctccgtagcacaccccatgagcaatggacaagtcgaacgtgccaatggtatgatacttcaaggaataaaagcgcgagtttttgaccgactgcatccctatgccggcaagtgggtagaacagctgccgtctgtactttggtccatgcgcaccactcccagtcgggctacgggccagtcgccgttcttcctactctatggagcggaagcaatgttgctgttcttccgagtagatgacctcaaccgactggaagaagttcgtgaagcagcattaattcagtcggctcggtacttgcaagggatgcgccgttatcacaatcgcaatgttcgatcaagagcttttttagtcggcgacctggttctgagaaaaatccagactacacgggattggcacaagttatctcccttgtgggaaggaccgttcataatttccgaagtcactcggcaaggttcttaccgactcaagcgtgaagacggtactaatatcgacaactcttggaatattgaacatcttcgccatttttatgcttaggcgttacttttgtatttccctcttt

SEQ ID NO: 80490 - DNA, 2080 bp, Oryza sativa
  Clone ID: PAT_MRT4530_80107C.1
cgggctgcaggaattcggcacgaggcccatctccgcccgcacgaggcccctcctcattcccaccaccacctctctcctcggaggaaccttgctgctttcctttatataaacccctctccagtctatacttccactccacactcccctccacccccccccccacacccgcagcagcagggagaagacgacgacgaagatgatggatctcgccgacccaaaccaccggctcatcgccggcgcggcgctgctggtggccaccctcgccttcatcaagctgctgctgagctccgccggcggcggcaagaagcgcctcccgccgaccatcccggcggcgccgctggtgggcgggctgctccgcttcatgcgggggccgatcccgatgatccgggaggagtacgcccgcctcggcagcgtcttcaccgtccccatcctcagccgcaagatcaccttcctcatcggccccgaggtgtcggcgcacttcttcaaggggaacgaggccgagatgagccagcaggaggtctacaagttcaacgtgcccaccttcggccctggcgtcgtcttcgacgtcgactactccgtcaggcaggagcagttcaggttcttcaccgaggcgctccgcgccaacaagctccgcagctatgtcgaccagatggttgtcgaggctgaggagtacttctctaagtggggagaaagtggaacggtggatctgaagtatgagctggagcatctcatcattctgactgctagtcggtgcttgctcgggagggaggtgcgagaaaagctctttgatgatgtttcttctctcttccatgatctggacaatgggatgcagccagtcagtgtcatcttcccctacctcccaattcctgcacaccgccgccgtgaccgggcacggcaacggttgaaggaaatcttcgccaccatcatcaagtcccgcaaggcctctggacgggctgaggaagacatgctgcagtgcttcattgattcgaagtacaagagtggacgctcaaccacagaaggtgaaataaccggcctacttattgcagcactatttgctggacagcacactagctctatcacctcaacctggactggggcctacatgcttcgcttcaagcagtacttcgcagcagccgaagaggagcagaaggaggtcatgaagcggcacggggacaagatcgatcatgacatcttggcagagatggatgtcctctacaggtgcatcaaggaggcgctccgtcttcacccaccgctaatcatgctgctccgccagtcacacaacgacttctcagtgacaacgaaggatggcaaagagttcgacatcccgaagggccacatcgtcgcgacatctccagccttcgccaacaggctccctcacatcttcaagaaccccgactcatacgaccccgaccgctacgcaccaggcagggaggaggacaaggcagcgggcgccttctcgtacatctcctttggtggcggcaggcacggttgcctcggtgagcccttcgcctacctacagatcaaggccatatggactcacctgctgaggaactttgagttcgagctggtctcccccttcccggagaccaactggaaagccatggtcgtcggcatcaaggacgaggtgatggtcaacttcaagcggcggaagctcgtcgtcgacaactaggatgccaccttcaaccttaggagtcgatgcttgtcgcgcttttcgccttttttctcttcttttccctttctgtcagtatttgatccgtgtaagtttctgccagctttgtattagggtgtttcagtcgttttaggatcctgtgatttgcttcctgccatgaaaaatcaagcttgatctctgcaacttctgtacctctgggttgcttggcaacgatttgtgtttgtgttattagacttgaagcatcctggattgtacctgaatctttgcatcgtccgttatttcatatggctttggacataatgtctgaagtctgaacaaataatacttatatgtaatggaatggaaatgagaataaaactatggcaatgtgagttgtctctgcaaaaaaaaaaaaaaaaaaaaaaaaaaaaa

SEQ ID NO: 80491 - DNA, 425 bp, Oryza sativa
  Clone ID: PAT_MRT4530_80108C.1
ccagccgtcccgtgccacatttacaggagtacaaaaaaacatacaaatccacctgtttcattgactggccagttgctgtggagggactttttctacacagtggcctttggcactcctaattttgatcaaatgaaaggaaacaaaatatgcaaacagattccatggacagagaacgaagagctatttcctgcgtggagggacggtcggacaggatatccttggattgatgccatcatgattcagctgaggaagtggggttggatgcatcatcttgcacgccactctgttgcttgttttctaacacggggtgatctgtttatccactgggagaaaggtcgggatgtctttgaaaggctactgatagattctgactgggctattaacaatggcaactggatggggcttttctggtcatccttctttta

SEQ ID NO: 80492 - DNA, 4074 bp, Oryza sativa
  Clone ID: PAT_MRT4530_80109C.1
atgccggccgaaggcggcggccatggcaagctcaccggcgcgaggggaaaagcgggctccggcagcgcggatttcgacgacggaggggtggacggtgtggccgtcgggcttgcgaacccgacggcggcgacgggacggctcggcggcggatctagcggcggcgagcggcggccggaggtggctaaaggcgaaccatataagaggtcttcctgtaaaaatgaagggtatttggatgagagggcgattgggaaaagaggtggacataagaactgcatatgggcagttcatttccaaccaatatcagggaaggtaggggaggcgtcaagttctcgccgactaagtgcgatgggtttcgtttctggcatcgacgacttcgccttccctcccgggcaggcgttccggatcggcagcctcaacttcatcactaacgacttcggcaagatctctctccttgactcggactcaaaccaatcgggaagagaccagtctagatccagggaggttggcgttatactccaacctcttgggacagtctcgacggaagagttggatggctacctcagctcccccggcgtcagttctcgaacaaccgagatcctcgactacgacgacttcggctaccactacgaccacggcgacttcgacaacttcgacgacagctatgaggataactacacgcccctcttcttcggcgtatttatggctgacaacgaaacggaagaacagcgccgagcccgagaagcggaccaagatcgcgcaaggcaagaagctgaacgtcgccgactggaggaagagcgacagcgacaggagcgagaacgactacagcgtgagcaacaagatcgcgaacggattccaaaggaggctaaagatctacggcaccgcgccttggaatctgggcgccgagcgagagagctcattgggcaacaagacgtcgacgggatagcgacgaagaccatgatcgctgcctcggttccagccaactccgcaagcacccgcaccccgactggtagccgagtccctcatcatcagccaagcctcagcgtcaccggcacaggatctagttgcaggagcaggggtcacgacgaacgatatgttcactcgcttcccgaacttcacagggagcgccgagctgaacggcctcgttctccaccttgccagcgtcccgtcgaccttcgcgacatgatcaaccagcgccgtgcagcacgaggtcaccaccattcaccaaatcgctacaacgatgacgtggatggagtagttgccttcactaatgacctgcgtcgagtggattggccagtcggcttcaagccgactggaatcgagaagtatgatggcaccactaatccggagtcttggctcaccgtctacggactcgcaatctgcacagcaggaggagacagcagggccatggcaaactatctacctgtggccctagcggactccgcccgatcctggctccacggactaccccgtggcacgttcggatcatgggcagaacttcgtgatcacttcatcgctaacttccagggcatctttgaacgtcccggcacacagtttgacctctacaacgtcgttcagaagtctggagaatcccttcgagattacatccgacgcttctccgaacaacgcaacaaaatctccgacatcaccgacgacgtcatcatcgccgccttcactaaaggcattcgccacgaggacctagtcggcaagttcggacgtaaacctcccaggacggttaagcagatgttcgaaaaagccaacgagtatgccaaagccgaagatgctatcaccgcgtccaaacagtcgggcaccacttggaagccaaagaaggacacgccgactgcaggggggagtggaagtaataaccacaaggatcgcaagcacggagatcaaggcacatcaaagaagaaagatgacgaagacgatgccccaactggttttcaagatcatcgcaaagaacttaatcacattttcggcagacccctggcttatgagtccaagagaaaacagaagctaacagaacgggagatcaatgcggttcagcctaacacgccccaatatcttcggtggtcagagacagtaattaagttcgaccgctcggatcatcccgaccgagtggtccacccggggcggtaccccctggtactagacccagtggttcgcaatgtcaagctccgacggactctcatcgatggtggcagcgcactcaacatccttttcgctaagaccctagacgatatgcagattcctcgcacggaattaaagccgagtaatgcacccttccatggtgttataccaggactgtcagctacaccactcggtcagatcactcttctagttaccttcggcactcgagagaattttcgtacagaaaatgtctacttcgaagtcgctaatttcgagacagcatatcatgctatactcggacgaccggctctagccaagttcatggccgtcccgcactacacctacatgatgatgaagatgtctggccctcgaggggtcatatcactacggagcgacatcaagcaagccgtcacgtgtgacaaagaaagttgcgagatggctcaaacccacgagaccactctcacccgcgaagagatccgactggctgtgaccacggcaaacgagggagaagtgcctgcaaccaagctgacgaagaccgaagaaagtgacgccaagacgaaaaagattcccttagatccctccgatcctgacaagactgctaataataaagatatttttgcgtggaaaccatcggatatgcctggtatccctagagaggtgattgagcactctttacatgttaaggaagacgccaaacccatcatgcaacgactccgcccttttgcacaggacaggaaggacgcgatcaaggaggaattaaccaagctgttagcagcaggcttcattaaggaagtccttcatcccgactggctggctaacccagtcctggatcggaaaaagacggggcaatggcgcatgtgtgtcgattataccgacctcaacaaatcttgtcccaaagacccttttgggttacctcgcattgaccagatcagtcgcaatgttgaagcctatgtcgatgatgtagtcgtcaagagcaagcggaaggatgacctgattgcggatttagaagaaacttttacaagcattcgtgctttcaagatgaaactaaacacggaaaagtgcatcttcgaagtaccgtcagggaagttgctcggatttatggtatctcagagaggcatacaggccaacccggagaaaatcaacgccatcctcaacatgaaaccgccaagctctcaaaaagatgtccaaaagctgactggttgcatggcggcgctcagccggaaattatctcactattttcaaagtcactcggtcatggtggtcacatcgtttccactcgaggatatacttcataatcgcgaagcaaacggacggattgcgaagtgggccttagaattgatgtctttggacatatctttcaaaccacgaacttcgatcaagtcacaagctttagctgatttgcttgccgagtggaccgagtgccaagaagacatgccagaggaaaagatggaatattggactatgcattttgataggtcgaagaggcttacaggcactggagctggggtcgtcttgatttccccgactgtagaaagattgagctacgtgttgtggatacatttttctgcatctcataacgtagcagaatacgaagcgctactccatggaataaggattgcaatatctctaggtattcgccgattaatcgtccatggagactctcagttgattgtcaatcaggtcatgaaagagtggtcatgtctagatgataatatgactgcttatcgacaagaggtacgcaagttggaagataaattcgatggactcgagctcacccatgtccttcgacataacaacgaggcagctgacagactggccaattttggttcgaaacgggaagcagccccttctgatgtgttcgttgagcatctttatgaaccaactgtgcccagaaaagaagcagttgaagccatggatactcaaggcataagcatgcttgaagccgactag

SEQ ID NO: 80493 - DNA, 1093 bp, Oryza sativa
  unsure (1)..(1093): unsure at all n locations
  Clone ID: PAT_MRT4530_8010C.1
ccggccgggcacataaaactatatcatcatcttccatagctgtacacatcctatattttcattcatggcgatgacaccgcagctagcattttctcgcatgcctccagggtttcggttccagccgacggacgagcagcttgtcgtcgactacttgcagaggcgtaccgctgcgcagccatgcgttactcccgacatcaccgatatcgacgtttacaacgtcgacccgtggcagcttccagccatggcgatgtatggatcggatcatgaccggtacttcttcacgatggcggcccgagaggcgcaggccagacgaacgacaccgtcgggtttctggaagcccaccggacaaagaaagatctcgtcgntccgccgggggcatgagtgcccaccgcgtcagaaggagttcgtcttctacctcggccaccaccaaccatcgggcagcaacaacaacaacaaaacatcatggatcatgcatgagtaccgtctcatgaactctccaagagcggcagtgccgtcgtcttcttcggtgaatcgtcttcccactgatgatctcacggaagagatggtgctgtgtaggatctccaacaaggacctgcctaaaccaccctttcatccacaacagcttgttgcagttctcttcagtggggttgaatggtgatgggtataattacttgatccttgatcaccttgagccctccagcaatggagtatcctaatgttggcattggtaatgttgatgatgctgctgctggtactgatgatccgggtgaccttgatgaggagattgatgatagcatgcaaagaaaccatggtggctagaattaaccagtagcatcatgagtgaatggttttgcgggagatttgagttaaatatcagataataaaataataatacaaagaataaaaagaaaaacaaacctgtatagttagcaggttttgattcatttcgttgaactttgtgtgcttgttagctagcctatataccaaacatgccttggcgaggctttctatttgtatatagctttttttcttttttctattgtaaggttcgaactctattgagttgattgaataaacattatgcaatttatgt

SEQ ID NO: 80494 - DNA, 257 bp, Oryza sativa
  Clone ID: PAT_MRT4530_80110C.1
atccatgtaaaactcttgcctaacatgccactatatctatactgatagccactctatcatagacacttaatgtggctcgtatgtttcatgtaaatttaagctagcatctatatgtatgtctgctgctaaaaaaaaaaactaaacagccatgtttctgtgcctggttagcaatgtcatctatctattaacctttccgcaacataatttcaatgctttcattgttctgtccgtttaaaaaaaaaaaaaaaaaaaaaaaa

SEQ ID NO: 80495 - DNA, 224 bp, Oryza sativa
  Clone ID: PAT_MRT4530_80111C.1
ctgataggtacccagactcgatgtcaacacagtcgactttctggtttattagctatgacactcgccttccctgatcagacttcagcaacagaaccatcagagcacacgacgacacgtagtaacaataatagaaacacacgcgagcaatatctacagagacccatacaggttacataagtatgtgtggcaattcttacaggggcgccaccacctgacggtcttat

SEQ ID NO: 80496 - DNA, 363 bp, Oryza sativa
  unsure (1)..(363): unsure at all n locations
  Clone ID: PAT_MRT4530_80112C.1
gaggggtaaagaggggctttttcctctttgggcgaaagacgggcccgccccttgccgcaaaacaatggccggcacttgggggggggggggttttcttttcccccncgcccccccaaaagggccccgcccccttaaaaccccctggggcccccctggtttgggtgggggggggggcccccaccccatcccccctttttggctgggcccctgggcccctttctttgggggggcgatttgccttggcttgcccccccttcggggagcccccggaagatggacccctttccggcnggggggccaaccctggggggggggcgggcccagaccgcctggggggcccccccctttctttgggcctttttt

SEQ ID NO: 80497 - DNA, 3664 bp, Oryza sativa
  Clone ID: PAT_MRT4530_80113C.1
atgctggggggaggcctcggcggcggcgggggcggcggcggtgcgggtgggctgggcctcgacctctcggcggtgatccaggcggcggtggtcggcctcgtgctgttctcggcggccgtcgtcgccgtgcgccgcgccgcgtcgagttctcaaggatgtcagtcaaagcattggcaatctggtcacaagttcaagtgcaaacaaatgaaaaaatcaagccctgctgacaagctatcaggtggaggcgaggaagacagaaataagttatctggttttggtcccatctcattagtacctgcccgtagaaaattaaacaaggtcatctttccatatgatgaatttctaaagctgtgcaactggagggaccttgattatttaccttgtggccttttgaattgtggcaacagttgctttgccaatgttgttttacaatgtctttcatgtacgaggccacttgcagcctatctcttaggaatggaccatagcagggaatgttataagagacatgaagattggtgtttcttgtgcgaactgcaatgccatatccaaagggcaagtgaaagtatgcatccatttgcgccgaagaacattctttctcacctgccaaatataggtgggaaccttggctttggtagacaagaggatgctcatgaattcatgaggtttgcaatagataagatgcaatctgcttgtcttgatgaatttggaggcgagaaggctgtagaccctagcacgcaagaaacgactcttattcaacacatatttggtggtcgtctgcaatcccaggttcaatgtactgcatgtggaatggtctcaaatcgctatgagaatatgatggacttaacagttgaaattcatggtgatgctgactccttggaagaatgcttagataagttcactgcagtagagtggcttgatggtgataataagtacaaatgtgatggatgcagcgactatgtcaaagcacagaaacgtcttacagtttatcaagctccaaatatcctcacaattactctgaaaagattccagagtggtagatttgggaaactaaacaagagagttacattcccaatgaagttagacctaacgccatacatgagtagcactgatggaagtgaccaatacgatctctatgctgttgttgttcatctggatatgctcaatgcttcattttttgggcattatatatgctatataaaaaattaccgaggacgctggtataaaattgatgactgcaaggttatggctgttgatgaggaggaagtacatgctcaaggtgcttatatgcttctatatagcaggagaacagctcgccctaggccactaattgcagtagaagaactcatgaaacagcagcaacagttgaaagtatgccctttgaatggacaaaatcatttgatacaagaggatgtgccattagaaggcgtgccatctttgaaaccctcagaagatctggaagttgattttgaatccaacaacaaatctttacatactatggacagagagccagacctggattttcatgtgagctttgatagagataagttcactaacaatgatattatgcacccaccagtttcaacggtatcgcatgcccttgatgaaaatactagaggagattcaggttttccattggaagaatcgaacaccatgggatctgtgcaatttggcaactccacatatgaaacatctttagtgcattcccctgcagagcagtgtgaagaacctgcgtcatgtattgattcagttgactacatggaaattgacactgaagctggcgttaaagttgaaagatggagcaggcctgccttaggtgattcagttggagtgatggggaatggtacattggtcccggcattggagaatggtttggcgggtaaaccaattcctggttttcccgacaaaccctcgagaataaattcattctttgcagaaggatgtcaaactggtgacaatggtgctggttcctcgcaagagttgaatggtcattgcaatggagaacccagttgcccagagcaaggagttctgaccaatggtggcaacacgccctctccaagcacacaatgctatgaaaataagtttgcaacatccaccaacggcaactattctattgggaatggtgatacattatctagcagcaactcattacatgcgggcaaacagaatgctggctttacctataatggtttcaatccaaaaccttacaaagaaccatcaggaagcaacacatatctgaataatacatgcaatggtaaaccatcggaagataatcacaataaatgtgccccaaacctgccggcaaaagattgccaagggggcatgccattcttacatcgtggcttccttctaaggccttgttctaggggaaatccaggcaaatgtgatgatggcttgtcaattagtaatggcacatcatcatcctttgtgagtagtaacagcaaatcaagtaatatttcatcatctcgaaatggtgaaggaggcacaccattcttgtctcctagttttcgcacaaatcattgcagagagtcagctgccatggacacctctgcaagctctgtccatgatttgaaaaccagctataacatttccttggagcaaaaatctattggtgctgcagtaccgtcagacctgataaaagaaagttggggtgaagatggcacgacttttggcactgtttaccaacaaagagcaacttctgttgataatgtaagcagccgccatgatgaaaatgggcatgtgattttgggtgccaataattccagttatggaggagaaaacggcagtaataatggaattcttgatatgaatagcagcagtagccaaagggacgcagcatctagtaccatgatggcttctgagaaaggcataggacctaaaacagctgaccaagtcaattacatatctgatgcacttgaacatgatggtttgcgacgaagattaacctcaaattttcctgatcagaatggtattgatgctcaataaactgtggtcaccactggagcgcataaactggaaggctatgagctcaagttgtccgggttgaatggatataaactgaagggccatgagctggaaatcggaagaatgcctgatctcatattggttggttgattcaattgattacttgaaactgtaattggagcaaacattgtttgcttggcagtaattttgcctcttttccacatggcttcctcctgtgaggtggaggggtgtctctgggcttccacacaatttgcagaggctcagatgctcccctgattccatgttcttgttgcctttagggtacatagcagattgtaggcttaccttgttcccaccatgttggtggatccatagctcaaataaacctgaatgctgactccgttgtcaagaaagctgaatcaactgtagagtgataaaagaggaagattctgatcgctttcttcatctgatgcccgttttgaccccaattggtgcaaacagatttatgatctttacaatgcaaccacgatctttgttggtcggaccagaactgtaagcaactgatggttctcatttttttggttatcacgaaggtgtatgtttgcttaattgcattactgtaactaccacgatcagccaaagatggttttacgaacctgcccttgtgtatgttcctccggcccggggatccactagttctaaa

SEQ ID NO: 80498 - DNA, 192 bp, Oryza sativa
  Clone ID: PAT_MRT4530_80114C.1
atgcgcgtgttgcgctccgcgctgctagccgccagtgggaggggaagaggaacagtcgtggaggctgtagcagcgaaagaatatgggagcgagaaggctcagccgtgttgtgcccaacaagcaaaacaactgggaaaaataagctgttcagtgcactgcttcattgtcttgcgattgacatccaacggttga

SEQ ID NO: 80499 - DNA, 443 bp, Oryza sativa
  Clone ID: PAT_MRT4530_80115C.1
attaaggacacaagcatggctttgaggggggatgtttaaacaaatgcggtttaacaaacaaaccaacatcgaaacaagttttattgtggtgagtaatctaaacatacgattacaaaacatttggcagctacacaaatgcctatctatctcccaagaattatcagggcgcttaatgatgttaacaccacagccaagaaaagagagttgttttgggggcccaagccttaaaagcacatgtcataaaaggggaggtttaatgcttcgacccacaagcaacaatgaccaatttactgggtcgtgccgcttaggaacaaacaatggagggtgtgagcataaacccaggactctgtccaggtgaacaggacttgggcacgcttgtccaagaagggggcgatcttgccaaacttcttcctaacctttatggcaagggagaggagaccctt

SEQ ID NO: 80500 - DNA, 738 bp, Oryza sativa
  Clone ID: PAT_MRT4530_80116C.1
tccaccaccaccgccgcggcggcgtcgcccacgccgtgccgccccgcggccctcgtcgcgcgctcgtcggcggcgccgctccgctccgccgcgccggtggtggtggcggcggggcttcggcgagcggccgcgccgtcccgccgtggcgccacgctgcgggtgagccccccgcgagcttcgttcgggttactcgttggtttgccttgctttgatgcagcatttcgtagtgatttcgctgcatcaagtactagctgttgcagcttcgttcgggttgctcgttgatgacaacgaagtgaaatttggggctatgagttatccaatagatttgttggtcccagttcagtctttctgggaccagtgtaagccaaagccaccatttctgtacttctattgcccgtggaataattggttcaagcgaagaaacagacgttctcttcgtttgacgagttactggagaagtctgaaaagcctgtactagtcgacttctatgcaacttggtgtggtccatgtcaatacatggttcctatacttcaggaagtaagcgaaaagttaggcgataagattcaagtcgtaaaaattgatacagagaagtacacaagcattgctaatcgttaccaaattgaagcattgccaacttttattatcttcaagaatgggaaaccttgtcatcgctttgagggagcgctgcctgctaatcaactaatccaacagattgagagtgctttggaggttgcaaag

SEQ ID NO: 80501 - DNA, 273 bp, Oryza sativa
  Clone ID: PAT_MRT4530_80117C.1
atgacggagcgtggggctcctcaccgggagaccgcgcaggcccccctttgccggttcgggccgctgagaagcccgaaaatgacctctgacaagcagcacacacgtctcctgctccgctcgtcagctctcccggtggacgcccacttcaaccttcatttactggccagcgacttccttgccatacttgcgctgaagcctggaatgaatctgaccgggactgacatacccactcctggagttggcacgccggctccggctagggacgagagctag

SEQ ID NO: 80502 - DNA, 923 bp, Oryza sativa
  Clone ID: PAT_MRT4530_80118C.1
gacctgtcgacctcgtgctcacactctgtagctgctaagcttggtagctcgccatggccatggcgaaggagctccaagaaacctcctcgtcttcgtcctcctcggctgcctccacgtcctcctgctcctccgccgtcacggacgcgtggtcgtcgccggccagacccaatgctgtggccggggggaagaggaagaaggaggtggtaggagaggctgatgaggctgcaggcggcggcgcaggagaggaggaagaggaggaggcggaggcggcggcggcggggaagtcgtcggcggcgacgaagaagaggaagcggagcagcgacgggaagcacccggtgtaccgcggcgtgcggatgcgggcgtgggggaagtgggtgtcggagatccgcgagccgcggaagaagtcgcgcatctggctcggcacgttccccaccgccgacatggccgcgcgcgcccacgacgtcgccgcgctcgccatcaagggccgcgccgcgcacctcaacttcccggacctcgccggcgtcctcccgcgcgccgcctccgcctcgcccaaggacgtccaggccgccgccgcattggccgccgcgttcaccacgtccccgtcctcgtcgccctcctcctccttgtcggccgacgacgtcgcgccatgcgtcgtccacgccgacgccgacgagcagcctgccgctgccgccaagaacgacgacgacgacggctcaaccaccgcgccggtggcggcggcggcggcggcggcggcggcggatgagcagcagctgttcgacctgccggacttgctgttcgacatccaggacgggccgttcgggttcccggcgatgtgggcgccgctcgccgacgtcgacgaggtcaatgcggagctccggcttgaggagccattgctttgggacttgggagtaacagatgcttaa

SEQ ID NO: 80503 - DNA, 128 bp, Oryza sativa
  Clone ID: PAT_MRT4530_80119C.1
ccacgacaaggacaaaaccaaccatgtttcctactttgtagctaggcagctatttctcctggagggccagatcgctacaatttgcaaaatgattccttttaatcacactcaaaaactcaatcaaccaa

SEQ ID NO: 80504 - DNA, 156 bp, Oryza sativa
  Clone ID: PAT_MRT4530_8011C.1
ttacggccagttatacggtaggaaagaaccttactcttgtgtatcctcgatgacgccgcagtaaacgtacactgcactctaagagaagaagtcaggaggtctaagtatataggggagacgagccaggcgcgcctgatcttcagctagcttcataga

SEQ ID NO: 80505 - DNA, 1315 bp, Oryza sativa
  Clone ID: PAT_MRT4530_80120C.1
gaaagccaggaggcagccactccctggatgctggaagtatgcagcagcagcagcagcagcagcagtcttccacctcttgggcgacgagacgagcgaggcgcggccgcggcgagcgagatcccctggaggaaggcgccgcaagatcccgccttgtccggcccaggcggaggaggaagagcaggaacacgcgcggcgcgggcgatcggatctcagataggcgtattttttgtagagatgagtgtacacgcgttgaaagcgctaataatcgctaaaaatggcggtgttgttttagatcaaaccttttttcctcgtgatgaatacgagggccgcgacatcggtgggggaagcgacggggggaggggggcggcgcgccggccgtgaggcagagaagcgacgtggcggcggcaaaggcggccttcaggcacttgtcggaagggagggaagggtctaattcatctatagccgatctaatagtcaattcatacaatagttgctgcgatgaacaggaggaggaggagaagacgctggagctcagccttgggctccccggaggaggatggcgagcggcgtgcagggacaaggggacgacgacgaagcactccattgcagcagctgctgctgctgatgatgatgatggtgacaagagctccatgctctccctgggctactccacactccatgcacggcaatacacacacacacacacacacacacacacatatatatatatatatatatatatatatatgtatatgtatttggacacatttgaatatgttctgatatatattttttttttgtgtttttcagtttctttcttgtttgtttttcggttttttaatacgtataagtatagaactttgtatacatatatttttatactttttatccgtacgtatataaactttctatatatacataaatatttgtttatattatatatatatatatatacatatatatatatttttatacattaaaaattatacatatatatatatacatacatacatatatatatatatatatatatatatatatatatacatacatatacatacatacatatatatacatatatatatatatatatatatatatatatatatatatatacatacatatacatacatatacatacatataatatatatgagtatatagcatatacatacatatatacataaactatacaggatacttcgtaataatctatatggaccgttatgtaccattgggcaatactttttgcagcatcaccttttttctagttattttagtgctttattaatataaaaataggtcaatggtgacc

SEQ ID NO: 80506 - DNA, 225 bp, Oryza sativa
  Clone ID: PAT_MRT4530_80121C.1
agctctctccccaccggggtccgggtatcctttctccgaacccagccgagagctcgaagcctttccttactctcttgccatgtaccgcgcggcggccagcctcgcctccaaggcccgtcaagccgggagcagcgctcgtcagattgggagtaggctcgccttgcatagaaactatgctgccaaggacatcaagtttggtgtcgaggcccgggccttgatgttgag

SEQ ID NO: 80507 - DNA, 109 bp, Oryza sativa
  Clone ID: PAT_MRT4530_80122C.1
atggcagtgggattgcttcggtcgggttactaccagagagttcagagcggcgccgacttggatggagtggacaatggacttcggccttcttcttgggctgttttcatgg

SEQ ID NO: 80508 - DNA, 258 bp, Oryza sativa
  Clone ID: PAT_MRT4530_80123C.1
gtcacgaccggaaataacccaatagacattccatacgtgagtgtattaatccttgtcccaggaggcaaggtacaccacactcagagataaatgaacaaaagcggaagactagggcaaataccacaggcgcttgacagcaggcatgagctagacaccaaaaccttcatcctccaggaactccttttctggtttggggaaaaatagagcaagattgagtgcaaccacagtactcaacaagtcacaccgataaatgcacaa

SEQ ID NO: 80509 - DNA, 3915 bp, Oryza sativa
  Clone ID: PAT_MRT4530_80124C.1
atgaaactccccgacgacttggctgccgtcttcactacaagggcgtcttctccccgtaggcctaggcggaagtcggcttcaacaccgaccttgcctagctccagggaagtcggcgtcatactccggccactcggcacggtttcgacagatcaactggaaggctacttcggctcccccggcgtcgactcacgaccaacagagatcgtggagtacgacgaattcggctaccgctacgacaaccgtgacctcgacgacttcgacgaaagctttgaagacaattacatccctctctactttggcgtcttcatggccgacaacgagacggaagaacaacgccaagcccgagaaacagaggcacaacgcgtacagcaggaagccgagcgacgccgactagaagaggagcgccaagcacaagagcaagaacgactgcggcgagagcaacaagaacgcgaacgggctgcaaaggaggccgaggaccaacgacaacaagccttggacgcagggcgacgagcgcgagatctcatcgggcagcaagacgtcgagggaacagcggtctttcgcacccttcaacagaacgctgtcgctgcgatcacccttttcgacaccctcttcaaggaagacgcactcaatcaagctgatcacgtcgtcaacatcttgaaccagaccaagaccatgatcgccgcttcggtcccggttaactctggaagcgtctgcacgccgactggcagtcgagctccccatctccgatctcatgattattaccagccaagcctcagcatcaccggcacaggatccaatcgcaggagctggggccacgacgagcgatctgttcactcgcctcctgagcgacacagggagtgccgagttgaacggcctcgctccccacctcgccagcgtcctgtcgatattcgcgatataatcaatcagcgccgtgcagcacgaggtcaccgccattcaccagatcgctacgacgacgacgtggatagagtagctgcctttactaacgacctacgtcgagtggattggccagccggcttcaagccgactggaatcgagaagtatgacggcaccactaatccggagtcttggcttaccgtctacggtctcgcaatccgcgcagcaggaggagacagcaaggccatggcaaactacttacctgtggccctagcggattctgcctggtcctggctccatggattaccccgtggcacgattggatcatgggcggaacttcgtgaccacttcatcaccaacttccagggcacctttgaacgccccggcacacagtttgatctctacaacgtcattcagaagtctggagaatcccttcgagattacatccgacgcttctctgaacagcgcaacaagatctccgacattaccgacgacgtcatcatcgttgctttcaccaaaggaattcgccacgaagacctagttggcaagttcgggcgcaagcctcccaagacagtcaaacagatgtttgaaaaagccaacgagtatgccaaagccaaagacgccattatcgcatccaagcagtcgggtcctacttggaagtcaaagaaagatgtgccgactacgggagggggtggaagtaacaatcacaaggaccgcaagcgtaagcccgaggaactcgtcgcgactactacacactcctcccgacaacgttcgcgcgtcaacacttttgacaagatcatgaactcccaatgtccgcatcatcccaactccaaccacgcagctaaggattgcttcgtctacaagcagtttgcagagcaatatgccaagaatgcacggaagacccctgacggagaacaaagtacgtcgaaaaagaaggatgatgatgatgatcccccgacaggttttcaagatcacagtaaggagctcaaccacatctttggcggccctctggcttacgagtctaaaagaaagcaaaagctgactgaaagggagatcaatgctgtccagcccgatacgccccaatatcttcggtggtcggagataacaatcaagtttgaccgctcggatcatcctgaccgagtggtccacccggggcggtaccccctgatccctcgcaccgagttaaacccgagtaatgcacccttccacggagtcatcctagggctatcggcaacaccactcggccagatcactcttccggtcacttttggtactcgggagaacttccgcacagagaacgtctgcttcgaagtcgctgatttcaggacagcgtatcacgccatactcggacgcccggcgttagccaagttcatggccgtcccgcactatacctacatgatgatgaagatgcccggtcctcgaggagtcatattcctacggagcgacatcaagcaagctgtcacatgtgacaaggaaagttgcgagatggctcaaacccgcgagatcgcgatggctcaaactcgcattgaccagaggcatacaggccaacccggagaaagtcaacgccatcctcaacatgaagccgccgtgttcctagaaacacgttcaaaagctgactggatgcatggcggtgctcagtcgacgagatatcctcaagttcagaagctgttgtacggtgttctaatcaccgtcaggaaattatcccactactttcaaggccactcggtcacggtggttacatcgtttccactcagtgatatcctctataatcgcgaagcaaacgggcgaatcgcaaaatgggccttagaactgatgtccttggatatatcgttcaaaccgcgaacttcgatcaaatcccaagctttagccgactttgtcgctgagtggaccgagtgccaagaggacacgcccaaggaaaagatggagtattggactatgcactttgacgggtcaaagagactttcaggcactagggccggagttgttttaatttccccgactggagaaagactgagctatgtgctatggatacattttcctgcatctcacaacgtggcagaatacgaggcgccccttcacggactacggatcgcaatctctttgggaatcaggcatctgatagttcgtggagattcacagttagttgttaaccaagtaatgaaagagtggtcctgcctcaacgacaatatgatcgcttatcgacaagaggcagttggcggttacacacatctctttgtggctattgataaattctccaagtggattgaagctaaaccggtcatcacaatcacggcagataaagctagagattttttcatcaacattgtgcatcggtttggggtacctaatcagatcatcactgataatggtactcaattcaccagtggagtatttaaagatttttgtgaagacttcggcattaagatttgttatgcctccgtagcgcatcctatgagcaatgggcaagtcgagcgagccaacggcatggtactccaaggaataaaggcacgagtttttgaccgactgaatccttatgccggcaaatgggtggaacaactgccatctgtactttggtccttgcgcaccacccccagttgggctacgggccagtcgccattcttcctagtttatggagcagaagcaatgttgcctagtgaagtagaatttgaatcattgcgttttcgtaattttcgcgaagagcgctacggggaagaccgagtggatgacctacaccgactggaaaaggcccgtgaagcagccttaattcagtcagcccgatacttgcaagggttacgttgttatcacaatcgtaatgtccgatcgcgtgctttcttagtcggcgacctggttttgaggaaaattcaaactacacgggatcagcacaagttatctcctttatgggaagggccatttataatctctgaagtcactcggccaggttcctatcgactcaagcgtgaagacggtacacctattgacaactcttggaatatcgaacatcttcgtcgtttttatgcttaa

SEQ ID NO: 80510 - DNA, 1797 bp, Oryza sativa
  Clone ID: PAT_MRT4530_80125C.1
atggcacggggctccgctctgctcgatgatggcgcacctcacccccaatgcggtaatgacattggccatctttgcgcacctgtgcgagatgttcagcggggtgcgcccatcccttcggctgttccggtggttcttcaccgtacagtcggtgtcgccgccgtcggtggttggtggctgctacttctagctcgggaggaggccagactccaccaggccacggcgacgacgacttccgaggcagctcgcgacgaggctgcgggcgaatcgcttgggcccaatccctcaggcgacgctcaggacaagccgggtccgggggacgtccctgagtccggcacgtccatcggcgagccgaaccgcgcggcatcttctccgaggcggctcttccccacgccttccgtcgctccactgagcgcagaaccccttctacaggccttggccgtcgcaaacaccacggtgttggacgggttaagtgcccaggtagaggccctgcaagcagagcgggcggagctcgacgccgcatgggcgcgtgtcgaaaaggggcgacgctcggtggaggccatggtggaggtgggccgcaaggcacaccgccggcacgtctctgagctcgaagcccgccgaaaggtgctgggggagatcgccaaggaggtggaggaggagcggggggctgccctcatcgccaccactgtgatgaacgaggcgcaggacaccctccgccttcaatacgggagctgggaggcggagctagggaagaagctcgacgccgcccaggaggtccttgacgctgccgctgcccgagaacgacgggcggcggagaccgaggtggcatcccgtcggcgcgaagaagcccttgaggcccgtgccatggcgctggaagagcgtgccggcgtggtggagaggggcctggtggatcgcgaggccgctgtttccatccgggaggcaacgctggcggcgcacgaggccgcctgcgccgaagaggagtccgcactccgcctccgcgaggacgcgctcaccgagcgggagcgagctctcgaggaggccgaggccgcagcgcaacggctagcggacagcctgtccctccgcgaggcagcgcgggaggagcaggcgcgccacaatctggaaggtgtccgcgccgagagggccgcactgaaccagcgggccgctgaactcgaggcgcaggcaaaggagctggacgcgagggcgcgcatcggcggggcggccacgggcgaaagcgacttagccgtccgcctcgcagctgccgaacacaccatcgccgatctgcagggcgcgctagactcgtccaccggggaggtcgaggccctccgcttggcaggcgaagtagggcccggcatgcttcgggacgccgtctcccgtctagatcacgccggccggcaggctggcctctggggcgggcggactgtgaagtacgccgccaaccaggggggcctcgcccagcgcctctcggaaatggccgggactctccagcggctccccgaggagctcgagaggacgattaagtcatcctcgagggacctcgcccgaggagcagtggagctcgtactggcgagttaccaggccagggaccccgacttctccccatggacggcgctggatgagtttcctcccgggaccgaggacggcgcgcgcgcgcaggtccgggacgccgccgaccacatcgtccacagcttcgagggttcggcccctcggctcgcgttcgccctcaactccgacgaggaggacgatgacggtggagcgggcgatagtggcgacaaggctggcgacccgggtgcatcggagtga

SEQ ID NO: 80511 - DNA, 144 bp, Oryza sativa
  Clone ID: PAT_MRT4530_80126C.1
atggcggcggaaatggagaagagtgactgccaggggcatagcggtggagcaggagttgtagttggagtccttgtcgtcgacctcgagttcgtcaatgtgctcgagcatcaccccccattagtagtcgccggcggcggaaggtag

SEQ ID NO: 80512 - DNA, 1815 bp, Oryza sativa
  Clone ID: PAT_MRT4530_80127C.1
atgaaactccccgatgatttggctgctgtcttcactacaagggcgtcttctccccgtaggcctaggcaggatccggcttcagccccggtccggcctagctctagggaagtcggcgtcatactccagccacttggcacggtttcgacggaccaactggacggctacctcagctcccccggcgttgactcacgaccaacagagatcgtggagtacgatgacttcggctatcgctacaacaaccgcaacctcgacgacttcgacgagggctttaaagataactacacccctctctacttcggcgtcttcatggctgacaacgagacggaggaacaacacaaagcccgagaagcagaagagctacgccgctgcgcggcacgaggttacgccccccaccattcaccggatcgctacgatgacgatgtggatggagtcgctgcaattacaagcgacctgcgtcgagtggattggccagctgacttcaagccaactagaatcgagaagtatgacggcaccactaacccggagtcttggctcaccgtctacggtctcgcaattcgcgcagcaggaggagacagcaaagccatggcaaactacttgcctgtggctttagcggattttgcctggttctggcttcatgggttaccccgtggcacaatcagattatgggcggaacttcgcgaccacttcatcgccaacttccaggtcacctttgaacgccctggagggagtggaagtaccaatcacaaggaccgtaagcgtaagcccgaggaacttgttgcaactactataccttcctcccgacaacgttcgcgcgtcaacacttttgacaagatcatgaactcccaatgtccgcatcatcccaattccaatcacgcggccaaagattgcttcgtctacaaacaatttgcagaacaatacgccaagaacgcacgaaaggcctccgacggagatcaaagcacgtcaaagaaggacgatgacgatgatgccccgacaggttttcaagaccatcgcaaggaactcaatcacatctttggcggacccctgacttatgaatctaagagaaagcaaaagctgaccgaatgggagattaacactgttcagctcgacacgccccaatatcttcggtggtcggagacaacaatcaagtttgaccgctcggatcatcctgaccgagtggtccacccggggcggtaccccctggtactagacccagtggttcgcaacatcaagcttcgcagatctctcatggatggtggcaatgcactcaatatccttttcgctaaaaccatggatgatatgcagatccctcgcacggaattaaagccgagtaatgcgccctttcacggagtcattcgaggtctatccgctacactactcggccagatcactcttccggttaccttcggcactcgggagaacttccgcacagaaaacgtttgcttcgaagttgctgatttcgagacagcgtatcatgccatactcggatgcccggcgttagccaagtttatggctgtcccgcactatacctacatgatgatgaagatgcctggtcctcgaggagtcatatccctgtggagcaacatcaagcaagccgtcacatgcgacaaggaaagatgcgagatggcccagacccgcgagatcacgctcgctcgagaagaaatccgactagctgcgtccacagcaaacgaaggagaagtgcctgtaaccaagatgccaaagagcggagaaagcgacgccaagaccaagaaaattcctctagatccttctgatcctactaagactgctgtaataggcgctgagttagattgtaaatag

SEQ ID NO: 80513 - DNA, 1754 bp, Oryza sativa
  Clone ID: PAT_MRT4530_80128C.1
atggcggcggcggctgcaggcatgggcggcggaggaggggtgcagcatcaggagacgacgacgacagtggtgcaggtagcggcggaggcgagtcggaagaaggtggaggtgagatctgcagggcggcgcgggcggcgggagatgcggcggatcgaggacgcgacgagcaggcaggtgacgttctcgaagcgccggagtgggctgctgaagaaggcgttcgagctgaagaaaaaaatccccaaatcgaatcgatcggaatttgcttctccgttgaggcgaggcgaggggcgaagggggaacgaagtggaaggagatttggattgattggttggacgccggcggcgcagatccccaattcgatctcctcctcttcgatcttcatcctaccctgcctgccagtgccagtataagattcttatgagctggtcggctgtggttttccctcaattctggtgctactaagatgggtcaggagctcaccacaaacaagcctctcacaaccctcttaccaacggatgaaatagcaaccgcctaccatttctccctcctcctctcacctgtcgtctccttttgggactgcatcttccgcaagataagatactcattcagacctgagtgggtgtagcatcctgcactgcctgtttctttttagcgctagccagtgctttgctttctggcctggatcactccaaacaatgaactttgaagcttttgctttcccgtaattacaattacagtcactagtggagtttagctgaaaatagtacatagttgtcatggaaaaggccgcggccaatcaggcgggcaaagtcttgaagaaaggtaagaagaaacaagccaaggatgaattagatcgccagaagcaggctgagaagaagagacggcggctggagaaagcgcttgcaaactccgctgccattatatctgagctggaaaagaagaagcagaagaagagggaagaacagcaaaggctggatgaggaaggtgctgcgatagctgaagcagttgctcttcatgtcctcattggtgaggactccgatgaaccctgccatttgatgctaaacaagcacagaagatgcaaccattgggatcactcagctggttttgatttcgccgtggatgcacaaggcgctgatatttatcctcctgatggactgatacagtgcgctgatcatgtttatgctcccaaagggaggtgtattgattgggggattggccagccattgccatcttggggagaggtgaaggacttgcagttgcaggcaccgtgctaccaaggaatgttccaccagtcagttgcatgcccaggtttcatagcagctcaagcggtctcctccttgcaaatcggaggagattcgtcagatattacctctccaagccaaggagcgactgtcgttaataggatgcttggtgccaccaacaggctcaacctttacagagagatataaaaacatacacttcacgatattattattgtatatagtcatcaaacttgtgttgactactttgcctgcagtatatctcataaccaaagaagaattggatagaacaccttgtttactgtttctgtgagtctaaaaggatatcttatatcagtcaaattggtattgtaatgaacatattgttttgattccctgttgattttcttggaatgtatcctgtgtcgacttgatgttcaaaaaaaaaaaattgtgctttcttttacaactattactatatctaacttgagatgtcaaaaaaaaaaaaaaaaaaaa

SEQ ID NO: 80514 - DNA, 2391 bp, Oryza sativa
  Clone ID: PAT_MRT4530_80129C.1
atggatggggtcaccgccgccgcttccaatgctccccaccccaaccacaaggcgttccggttcggcagcctcaacttcatcaccaacgacttcggcaagatctctctccttgacttggattcgaaccagtcgggaagagatcaggtccccgcaccgttcggtattccgaactcggccgaggcgtactccaagatcatctctcccgagtcggcttcaaaccactcggacgagacccaatctactccaccgcgaccagatcaagacgacggggaggttggcgttatactccaacctcttaggacagtctcgacagaagagttggatggctacctcagctcccccggcgtcggttctcaaccaaccgaggtcctcaactacgatgacttcggctaccactacgaccacagcgacctcgacaacttcgacgacagcttcgaggataactacacgcccctcttcttcggcgtattcatggctgacaacgaaacggaggaacagcgccgagcccgagaagcggaccaagattgcgcacggcaagaagctgaacgtcgccgactggaggaagagcgacacggtctttcgcacccccagcagaacgcggttgcagcaatcactctcctcgacaccctcctcaaggaagacgcacttaaccaagctgatcatgttgtcaaaatcttgaaccagacgaagactataatcgctgcctcggtcccagccaactccgcaagcacctgcaccccgattggtagccgagtccctcatcttcgatctcaagactatcaccagccaagcctcagcattgccggcgccggatctagtcgcagaagcaggggacatgatgaacggtctgttcgttcgcctcccgaacgatatagggagcgtcgagttgaacgaccatactccccacatcgaaggcgccccatcgatcttcgcgacaccatcaaccagcaccgcgcagcaagaggccatcattcaccggatcgctacgacgacgatgtggacggagttgctgccttcacaagtgatttgcatcgagtggattggccagctggctttaagccgactggaatcgagaaatatgacggcaccaccaaccctcagtcttggctcaccgtctatggtctcgcaatcagcgcagcaggaggagacagcaaagccatggcgaattatctacctgtggccctagcggattctgcccggtcatggctccacgagctaccccgcggcacgatcggatcatgggcagagctacgcgaccacttcatagccaacttccaaggcacttttgaacggcctggtacacacttcgatctctacaacatcattcagaagtctggagagtctcttcgagattacattcgacgcttctctgagcaacgcaacaagatctccgacatcaccgacgacgtcatcattgcctcctttactaaaggcattcgccacgaggacctagtcggcaagttcggacgcaaacctcccaagacggtcaagcagatgtttgaaaaagccaatgagtatgccaaagccgaagatgctatcacggcgtccaagcagtcgggcaccacttggaagccaaagaaggatacgccgaccgcaggagggagtggaagtaacaaccacaaagatcgcaagcgtaagcccgaagaacttgtggtgacaacctctccgtcttcccgacaacgttcccgcgtcaacacattcgacaagataatgaactcccaatgtccgcatcatcccaactccaaccacgtggccaaagactgcttcatctacaaacaatttgcggagcaatacgtcaagaatgcacgtaagccctcagacggagatcaaggcacatcaaagaagaaagatgatgaagacgatgccccgactggttttcaagaccatcgcaaagaactcaatcacatcttcggcggacctctggcttatgagtctaagagaaagcagaagttaacagaacgtgagatcaatgcggttcagcccaacacgccccaataccttcggtggtcagagatagcaatcaagttcgaccgctcggatcatcccgaccgagtggtccacctggggcggtaccccctggtactagacccagtggttcgcaatatcaagctccgaagaactctcatcgatggtggcagtgcattcaacatccttttcgctaagaccctggacgatatgcagattcctcgcacggaattaaagccaagtaatgcacccttccacgccaaattcatggccgtcccacactacacctacatgatgatgaagatgcctggtcctcgaggggtcatatcactatggagcgacatcaagcaagccgtcacatgtgacaaagaaagttgcgagatggcccaaacccacgagatcactcttgctcgcgaagagatctga

SEQ ID NO: 80515 - DNA, 849 bp, Oryza sativa
  Clone ID: PAT_MRT4530_8012C.1
atgacgtcaccaccggcggcggcggctcggcggctcgacagctcggacggcgcaagctcgccggcgaacggcggcactacggcacgaacggagggcaccaacaggtagcggacggcacggcgaactcaccggcgaccaagggagcggcggaagaccaacagacggcgacggcgacgacgaaggaacggcggcggactgcggcttgacgacggcgacgatgctccggcggtttccgacggtgacgaagcggcggacaaggacggcgacgacttggcgaccacgacgacgaccttcccgagtgacggcgacgtctggaacggcggcggcgcactgctggagcgacggcggcgacggcggcgctagggcacacggcgctagagctctacgggcgacgagaggcgaaggcgagggtggcggcgggtagaggagacaccggggagccttttaaaggggctaggaggcggcggcgaaggcccacggcggccggtgacgagaaggaaacttcgtggcttgaaggaaagaggccgatccgaatcgaactcgattccacgaacttccaaaacgttttagccgatgattccaacggagaaaaggtagaggagatcccggagatcatttcccctcttttgattcggccggagaaggaaaggaacggccggatttggaagtgaacggcggcggcggcgcgctagggtttcggccgggcgacggcggctcggggaagacgaaccccacctgtcagcgagcgagggcgcgcgcgcgcggcggcggactgggccggactgggccgaggagagagagaagagaggttttgggccgactttcggcccaaagccaaaagaagacttt

SEQ ID NO: 80516 - DNA, 1983 bp, Oryza sativa
  Clone ID: PAT_MRT4530_80130C.1
atggcacggggctccgcaccgctcgacggtagcgtgctgccgccttcccgcatcgtgagcgagaggcaggccgggctgccgcgccgattcatgccggaatctgtcaccggccgggaggtggtcgcgctgggtgagggacgcccggcgccacactacccggggcggtccgtcttcttcctctctttcgcaatggcagggctggtcccgccattctcttcttttttcatggatattctggagttttatgatctccagatggcgcacctcacccccaacgcggtaatgacgttggccatcttcgcgcacctgtgcgagatgttcatcggggtgcgcccatctctccggctgttccggtggttcttcaccgtacagccggtgtcgccgccgtcggtagtcggtggctgctacttccagccgcgggggcaggtgctgaaccgctacattccctgcgtcctccgcaaaaagtgggacgactggaagagcgattggttctacaccctcctcgccgacgaagcgcgcctccgacttccgagccagcccccggcgcaggcctccagctggcgggcgacggtagatctgggagacggctacgacgccattcttgaccgcctggcgggtctgcgatcccaggggcttacgggggccatggtgttcggcgactaccttcgtcgccggatcgcgccgctccaacggcgcgcccggggcacctgggagtacaccgcgtccggcacgtcgatcggcgggccgagccgtgcggcaccctcaccgagacggctctcccctctgccttccgctgccccaccgagcgcagagccccttctgcaggccttggccgccgcgaatactacggtgttagacgggttaagtgcccagatggaggtcctgcaggcggagcgggcggagctcgacgcggcgtgggcgcgcgtcgaggaggggcggcgctcggtggaggccatggtggaggcgggccgcaaggcacaccgccggcacgcttccgagctcgaggcccgtcgcagggacctggcggagatcgccagggaggtggaggaggagtgggagactgccctcatcgccaccgccgtgctcgacgaggtgcgggacgacctccgcctccaatacgggagtcgggcggcggagctagagaagaagctcgacgccacccggggagtccttgacgccgtcgctgcccgggaacggcgggcagcggagatcgaggcggcgtcccggcagcgcgaagaggcccttgaggctcgcgccacggtgctggaggagcgcgcccgcgcgaaggagagggacctggcggaccgcgaggccgccgtcgccacccgggaggcaacactggcggcgcacgaggccgcctgcgccgaagaggagtccgcactccgcctccgcgaggacgcgctcaccgagcgggagcgagctctcgaggaggccgaggccgcggcgcagcggctggcggacagtccctccgcgtggcagcgcgggaggagggaggtcgaggccctccgcttggcgagcgaggtggggcccggcatgcttcgggacgccgtctcccgtctataccacgccgggcggcaagcgggtctctggggcggccgaaccgcgaagtacgccgccaaccaggggggcctcgcccagcgcctctcagagatggccggggtcctcaagcggctccccgaggagctcgaggagacgatcaagtcatcctcgagggatctcgcccggggggcggtggagctcgtactggcaagttaccaggccagggaccctgacttctccccgtgggcaacgctggaagagttccctcccggaaccgaggacggcacgcgcgcgcgggtccgggacgccgccgaccacatcgtccacagcttcgagggtacggcccctcggctcgcgttcgccctcgactctgacgaggagggcggtgacgacggtgtggacgacagcgacgacgaggccggcgacccgggcgcgtcggagtga

SEQ ID NO: 80517 - DNA, 2787 bp, Oryza sativa
  Clone ID: PAT_MRT4530_80131C.1
atggcacggggctccgctttgcttgatggtagcgtgctgccgccttcccgcatcgtgagcgagaggcaggccgggctgccgcgccgcttcatgccggaatctgccaccggccgggagatagttacactgggcgagggacgcccggcgccatgctacccggggcggtccgtcttcttcctcccttttgcaatggcagggctggttccgccattttcttctttcttcatggatgttctggagttttacgatctccagatggcgcacctcacccccaacgcggtaatgacattggccatcttcgcgcacctgtgcgagatgttcatcggggtgcgcccatcccttcggctgttccggtggttcttcaccgtacagtcggtgtcgccgccgtcggtggttggtggctgctacttccagccgcgggggccggtgttgaaccgctacattccctgcgtcctccgcaagaagtgggatgactggaagagcgactggcggtcggggcgtcggaggagcgggctcctcgaggccacgatggctcgggcgggagccgcagggggggaacaatctaccccgggagggggtcgtgcttctgggccccgtgatgggggctcggggggcagccgccctgccgacgcccgagggaagagaaagcaagagggtacttcctccccatctcctccccgagggggcggggcggcgcgtttcagcagcaggcgcccggagggggccgcgccgacgccgcagcccgagggggagtggaagaagaaacggctccgcaagatgggggggacagaaccatcccggggaaacctcatttcccctctaaggtggtcgtttaaccgaccccctcgcagcgagatcccgtcgcgtccctcccgccattccaagtccggccagtctgaggccgagaacccggcgaccacagaggcccggaggcggaaatctgaccggcgagaagccgcggatcgccttcgggaagccgaggaggccgctcgggaggtcgcccgggctcgccagaccgaggaagccgctcgggaggaggccggactccgccaggccgaggcgacgacatcctccgaggcgacccgtgaaactgaccggcaagaggccgtggatcgccttcgagaagccgaggaagctgaccaggtggccgtccgagctcgccaagctgaagaagccgctcgggaggaggctagacttcgccaggccgaggcgacaatgacttccgaggcaactcgcggcgaggccgcgggtgcatcacttgggcccactccctcgtgcgacgctcaggacaaaccaggtccgggggacatccccgagtccggcacgtccatcggcgggccaagccgcatggcatcctcttcgaggcggctcttccccacgccttccgttgctccactgagcgcagaaccccttctgcaggccttggccgtcgcaaacaccacggtgttggacgggttaagtgcccaggtggaggccctgcaagcagagcgggcggagctcgacgccacatgggcgcgtgtcgaagaggggcgacgctcggtggaggccatggtggaggtgggccgtaaggcacaccgccggcacgtctcagagctcgaagcccgtcggaaggtgctgggggagatcgccaaggaggtagaggaggagcggggggctgccctcatcgccaccaccgtgatgaacgaggcgcaggacaccctccgccttcaatacgggagctgggaggcggagctagggaagaagctcgacgtcgcccagggggtccttgacgctgccgctgcccgagaacggcgggcggcggagaccgaggtggcatcccggcggcgtgaagaagcccttgaggcccgtgccatggcgctggaagagcgtgcctgtgccgtggagagggacctggcggatcgcgaggccgccgttgccatccgggaggcaacgctgactgcgcacgaggccgcctgcgccgaagaggagtccgcgctccgcctccgcgaggacgcgctcaccgagcgggagcgagctctcgaggaggccgaggccgcggcgcaacggctggcggacagcctgtccctccgcgaggcagtgcgggaggagcaggcgcgccataatctagaaggtgcccgcgccgagagggccgcgctgaatcagcgggccgctgacctcgaggcgcgggagagggagctggacgcgagggcgcgcagcggcggggcggccgcgggcgaaagcgacttaaccgcccgcctcgcagctgccgaacacaccatcgccgatctgcagggcgcgctagactcgtccgccggggaggtcgaggccctccgcttggcaggcgaggtagggcccggcatgcttcgggacgccgtctcccgtctagaccgcgccggccggcaggcgggcctctggggcgggcggactgcgaagtacgccgccaaccaggggggcctcgcccagcgcctctcggagatagccgggactctccaacggcttcccgaggagctcgagaggacgattaagtcatcctcgagggacctcgcccgaggagcggtggagctcgtactggcgagttaccaagccagggatcccgacttctccccatggacggcgctggacgagttccctcccgggaccgaggacggcgcgcgcgcgcaggtccgggacgccgccgaccatatcgtccacagcttcgagggttcggcccctcggctcgcgttcgccctcaactccgacgaggaggacgatgacggcggagtgggcgacaatggcgacgaggctggcgacccaggtgcatcggagtga

SEQ ID NO: 80518 - DNA, 2914 bp, Oryza sativa
  unsure (1)..(2914): unsure at all n locations
  Clone ID: PAT_MRT4530_80132C.1
gtccctcttttctccccaaccctaaacctccttcgtctaccccatggcgtcgccgccgccgccgccgccgcctccgaagctgccggtccccggccgccgcaacatcctcgtcaccagcgcgctgccctacgtcaacaacgtccctcacctcgggaacatcatcggctgcgtgctcagcgccgacgtattcgcgcgctactgccggctgcggggctacaacgtcatctacatatgcggcaccgacgagtacgggacggccaccgagaccaaggccatggaggagaagtgctcgcccaaggagatctgcgacaagtatcatgctgtccatagtgaggtttacaaatggtttgacataaagtttgacaagtttggacggacatcctctccccaacagactgaagtctgccaagcaattttccaaaagttgatggaaaacaattggctcacagaaaacaccatgcagcagctgtactgtgatacttgccaacgatttttagcggataggctcgtggaggggaaatgtccaactgaaggctgtaattatgaggcggcgcgaggtgatcagtgtgaaaactgcagcaaattgttgaatccaactgagctaattgatcccaagtgtaaggtctgtaagaatactccacgtgtccgtgacacagatcacttattccttgagcttcctcttttgagcgacaagttggtaaactatatcaatgaaacttctgtagctggtatgtggagtcaaaatgctattcaggcaacaaacgcatggctgaaggaaggtttgaagccacgctgtatcacccgagatctcaagtggggtgttcctgttccacatgagaaatataaggacaaggtgttctatgtttggtttgatgcaccgattggctatgtatctatcacagcttcctatacacctgattgggagaaatggtggaaggatcctgataacgtagaattgtttcagttcatgggtaaagataatgtgccatttcacacggtcatgttcccttctacattacttggaactggcgaaaagtggacaatgatgaagaccataagtgtgactgaatatttgaactacgaagcaggaaaattctccaagagccatggtattggagtctttggtaatgacgcgaaggatacaaatatacctcctgaagtgtggcgttactacttgcttacaaatcgtcctgaggtatcagatacactatttacttgggctgatttgcaagccaaattaaacagtgagttgttgaacaacttggggaatttcatcaaccgtgtgctcagttttgttgcaaaaccagcaggagccggatatgattccatcgtacctgatgctcctaacgctgagtcgcatccactgacaaaggcacttgctgagaaaactaataaatgggttgaacaatatcttgaagcaatggaaaaggttaaattgaaacaaggactgaagagcgctatgggcatttctagtgatggaaatgcatatctgcaagagagccagttttggaaactttataaggaagatccagcagcctgtgctgttgtaatgaaaacttcagttggtgtggtctatctccttgcctgtttgctggagcctttcatgccttcattttccaatgaagtgttgctgcaattaaatatgacccctgaagaaagcttgtctttctgtgacgataaaggagaaatcgccaaggcaaaaagaccttgggattttgtatcagcaggccacaaaataggaaagccttcacctctatttaaagaactgaaagatgaagaagtagagtccttcaggaataaatttgcaggcagccaagctgagaggagctcaaaagcacaagctgatgctgaagctaagaaggttgctgacaagctcaagggcacaaaattatctgatggaggtcaaaagaaggaacagaaaaaacaatcaggtggttcaaaatcaaagaatgcagaggtggatgtcacggtggcaaagttggatattcgagtggggcttatcaggaaagcacagaagcatccagatgctgattcgctgtatgtagaggagattgatgttggagaggaagcaccaagaacagttgttagcggccttgtcaaattcatccctcttgaagaaatgcagaaccggaaagtgtgtgttctctgcaatctgaaaccagtggcgatgcgcggtataaaatcacatgcaatggttctggctgcatcaaatgaggaccatacaaaggttgagctggttgagccaccagaatccgcagcggttggggagagggtgacctttgctgggtactctggagagcctgaggcgtctctcaacgcaaagagcaagacgtgggagaagctatcagctgacctgcacagcaacggcgagctcgtggcgtgctacaaggatgtacccttcacaacttcagctggagtttgcaaggtgaagtcgatagcgagtggagaaattcgctagcttggcgacgcccctaacggtggggatatactcgagtgacttgtttgactgatttttatcggaattgctgctgtttctttatgatgaaaattttgatcctgccatttgaaaggtcttgtatttgacaactgccagtatcaagtattgtccgcatttgtgtcatcgtgattatgaagacgcatggataaccgtttgtttcccttgtaatgttgtagacttcttgtagtaaccttttacaattcgtcgtacccctcatgtcttcaatcgtgtcgtcgtgtgcgttggacgtgtcaggagcacagttgggctgaatatgtgctgattggccacgttccaaaccaggccaggcctgtttattcccaaacaaaaattattcaccttgtcacattgaaagtcacattgaatgttttgatataaaaaaaaaaaaaaaaaannnnnnnnnnnnnnnnnnnnnnn

SEQ ID NO: 80519 - DNA, 4104 bp, Oryza sativa
  Clone ID: PAT_MRT4530_80133C.1
atgggtttcgtttctggcatcgacgacttcgccttccctcccgggcaggcgttccgattcggcagcttcgacttcatcaccaacgacttcggcaagatctctctccttgactcggattcaaaccagtcggggagaaaccaggtccccgtgccgtttggtattccgaactcggccgaggcctactccaagatcatctctcctgagttggtttcaagccactcggatgagatccaatctgttcctccacgatccgatcaagacgatgggtcctatccctcaatcttgatgaaacttcctgacgacttggccgccgtcttcacagccaaaacatctcccactcggagatctaggcgagctctggcatcggccccgatccagtctagatccagggaggttggcgttatactccaacctcttgggacagtctcgacggaagagttggatggctacctcagctcccccggcgtcagttctcgaccaaccgagatcctcgactacgatgacttcggctaccactacgaccatggcgacttcgacaacttcgacgacagctacgaggataactacacacccctcttcttcggcgaagctgaagatcgacagcaccgcgcctgggaatctgggcgccgagcgagagagctcattgggcaacaagacgtcgacgggacagcagtctttcgcaccccccagcagaacgcggttgcagcaatcactctcctcgacaccctcctcaaggaagacgcactcaatcaagccgatcatgttgtcaacatcttgaaccagacgaagaccatgatcgctgcctcggttccagtcaactccgcaagcacccgcaccccgactggtagccgagtccctcatcatcagccaagcctcagcgtcactggcacaagatctagtcgcaggagcaggggtcacgacgaacgatctgttcactcgcttcccgaacgtcacagggagcgccgagctgaacgacctcgttctccacctcgtcagcgtcccgtcgaccttcgtgacatgatcaaccagtgccgtgcagcacgaggtcaccgtcattcaccaaatcgttatgacgatgacgtggatggagtagctgccttcactaatgacctgcgtcgagtggattggccagtcagcttcaaactgactggaatcgagaagtatgacggcaccaccaatccggagtcttggctcaccgtctacagactcgcaatccgcgcagcaggtggagacagcaaggccatggcaaactatctacttgtggccctagcggactccgcccgatcctggctccacggactaccccgtggcacgatcggatcatgggcggaacttcgtgatcacttcatcgccaacttccagggcacctttgaacgccccgacacacagtttgatctctacaacttcgttcagaagtctggagaatcccttcgggattacatccgacgcttctccgaacaacgcaacaagatctccgacatcaccgacaacgtcatcatcgccgccttcactaaaggcattctccacgaggacctagtcggcaagttcggacgtaaacctcccaggacggttaagcagatgttcgaaaaagccaacgagtatgccaaagccgaggatgctatcaccgcgtccaaacagtcgggcaccacttggaagccaaagaaggacacgtcgactacaggagggagtggaagtaacaaccacaaggatcccaagcatcatcgcaaagaacttaatcacatcttcggcggacccctggcttatgagtccaagagaaaacagaagctcacagagcgggagatcaatgcggttcagcctaacacgtcccaatatcttcggtggtcagaaacagcaattaagttcgactgctcggatcatcccgaccgagtggtccacccggggcggtaccccctggtactagacctagtggttcgcaatgtcaagctccaacggactctcatcgatggtggcagcgcactcaacatccttttcgctaagaccctggacgatatgcagattcctcgcacggaattaaagccgagtaatgcacccttccacagtgttatcccaggattgtcagctacaccactcggccagatcactcttctagttaccttcggcactcgagaaagttttcgcacagaaaatgtttgtttcgaagttgccgattttgagacagcatatcatgctatacttggacgaccggctttagccaaatttatggccgtcccacactacacctacatgatgatgaagatgcctggccctcgaggggtcatatcactacggagcgacatcaagcaggccgtcacatgtgacaaagaaagctgcgagatgtcctggttcggaaaaagacagggcaatgttaaagcctatgttgatgatgtagtcgtcaagaccaagcagaaggatgacctgattgcggatttagaagaaactttcacaagcattcgtgctttcaagatgaaactaaacccggaaaagtgcatcttcggagtaccgtcagggaagttgctcggatttatggtatctcagagaggcatacaggccaacccggagaaaatcaatgccatcctcaacatgaaaccaccaagctcccaaaaagacgtccaaaagctgactggttgcatagcggcgctcagccggttcgtctcacgactcggcgagcgggggatgcctttcttcaagctgctgaagaagactgacaatttccagtggggacccgaagcacagaaagccttcgaagactttaaggaactcctcaccactccaccagttttggcctcgccacatccacaagagccactactgttatatgtgtcggcaacctcccaggttgtacgcaagttggaagacaaattcgatggactcgagctcacccatgtcctccgacataacaatgaggcagccgacagactagccaattttggttcaaaacgggaagcagctccttcggatgtattcgtcgaacatctttacgaaccgaccatgcccagaaaagagacaactgaagccatggatactcaaggcgaagggagacaattgttgaaggatatacattctggcatttgtggtaatcatgctgctgcacggaccatcgtcagcaaagcttaccggcaaggttttttctggcctacagctgtgtctgatgcggacgagattgtgcggacatgcgaaggttgtcaattttttgccggacaaactcatttgccagcccaagagttgcaaaccatcccgttgtcctggccgtttgcggtctgggggcttgagatggtcggcccatttaaaagggcagtcggcggttacacgcatctctttgtggctatcgacaaattctccaagtggattgaggctaaaccggtcatcacgatcacagcaaataaagctagagattttttcatcaacattgtgcatcggtttggggtacctaatcggatcatcactgataatggcactcaattcaccggtggagcatttaaagacttttgtgaagacttcggcattaaaatttgttatgcctccgtggcacaccccatgagtaacggacaagttgagagcgctaacggcatgatactacaagggatcaaagcacgagttttcgaccgactactcccctatgctggcaagtgggtagatcagctgccgtccgtactttggtctttacgtactactcctagtcgggctaccggccagtcgccgttctttttggtttatggcgcagaagcaatgttgccgagtgaagtggaatttgaatcactacgatttcggaacttcaacgaggagggctatgaagagggccgagtagacgacatcaaccgactagaagaagcccgagaggcagctttaattcaatcgactcgatatcagcaagggttgcgtcgttatcataatcggaatgtccgatcgcgagcctttttagtcggtgacctggttctacggaaaattcaaacaacacaggatcggcataaattatctcctttatgggaaggaccgttcataattgctgaagtcactcggcctggttcttatcgactcaagcacgaagatggtactatcattaacaattcttggaatattgaacaccttcgtcgattttacgcttag

SEQ ID NO: 80520 - DNA, 2379 bp, Oryza sativa
  Clone ID: PAT_MRT4530_80134C.1
atggcgtcgccgccgccgcctccgaagctgccggtccccggccgccgcaacatcctcgtcaccagcgcgctgccctacgtcaacaacgtccctcacctcgggaacatcatcggctgcgtgctcagcgccgacgtgttcgcgcgctactgccggctgcggggctacaacgtcatctacatatgcggcaccgacgagtacgggacggccaccgagaccaaggccatggaggagaagtgctcgcccaaggagatctgcgacaagtatcatgctgtccatagtgaggtttacaaatggtttgacataaagtttgacaagtttggacggacatcctctccccaacagactgaagtctgccaagcaattttccaaaagttgatggaaaacaattggctcacagaaaacaccatgcagcagctgtactgtgatacttgccaacgatttttagcggataggctcgtggaggggaaatgtccaactgaaggctgtaattatgaggcggcgcgaggtgatcagtgtgaaaactgcagcaaattgttgaatccaactgagctaattgatcccaagtgtaaggtctgtaagaatactccacgtgtccgtgacacagatcacttattccttgagcttcctcttttgagcgacaagttggtaaactatatcaatgaaacttctgtagctggtatgtggagtcaaaatgctattcaggcaacaaacgcatggctgaaggaaggtttgaagccacgctgtatcacccgagatctcaagtggggtgttcctgttccacatgagaaatataaggacaaggtgttctatgtttggtttgatgcaccgattggctatgtatctatcacagcttcctatacacctgattgggagaaatggtggaaggatcctgataacgtagaattgtttcagttcatgggtaaagataatgtgccatttcacacggtcatgttcccttctacattacttggaactggcgaaaagtggacaatgatgaagaccataagtgtgactgaatatttgaactacgaagcagaaattgatggtcaaggaaaattctccaagagccatggtattggagtctttggtaatgacgcgaaggatacaaatatacctcctgaagtgtggcgttactacttgcttacaaatcgtcctgaggtatcagatacactatttacttgggctgatttgcaagccaaattaaacagtgagttgttgaacaacttggggaatttcatcaaccgtgtgctcagttttgttgcaaaaccagcaggagccggatatgattccatcgtacctgatgctcctaacgctgagtcgcatccactgacaaaggcacttgttgagaaaactaataaatgggttgaacaatatcttgaagcaatggaaaaggttaaattgaaacaaggactgaagagcgctatgggcatttctagtgatggaaatgcatatctgcaagtgttgctgcaattaaatatgacccctgaagaaagcttgtctttctgtgacgataaaggagaaatcgccaaggcaaaaagaccttgggattttgtatcagcaggccacaaaataggaaagccttcacctctatttaaagaactgaaagatgaagaagtagagtccttcaggaataaatttgcaggcagccaagctgagaggagctcaaaagcacaagctgatgctgaagctaagaaggttgctgacaagctcaagggcacaaaattatctggagagaacgattgggaacaaaaaaatcgctcccttcaagtggggaacgaaatatccagagttgggaatttggattattgggagacagatggaggtcaaaagaaggaacagaaaaaacaatcaggtggttcaaaatcaaagaatgcagaggtggatgtcacggtggcaaagttggatattcgagtggggcttatcaggaaagcacagaagcatccagatgctgattcgctgtatgtagaggagattgatgttggagaggaagcaccaagaacagttgttagcggccttgtcaaattcatccctcttgaagaaatgcagaaccggaaagtgtgtgttctctgcaatctgaaaccagtggcgatgcgcggtataaaatcacatgcaatggttctggctgcatcaaatgaggaccatacaaaggttgagctggttgagccaccagaatccgcagcggttggggagagggtgacctttgctgggtactctggagagcctgaggcgtctctcaacgcaaagagcaagacgtgggagaagctatcagctgacctgcacagcaacggcgagctcgtggcgtgctacaaggatgtacccttcacaacttcagctggagtttgcaaggtgaagtcgatagcgagtggagaaattcgctag

SEQ ID NO: 80521 - DNA, 2202 bp, Oryza sativa
  Clone ID: PAT_MRT4530_80135C.1
ctacccgcagccactctcgccttcgcccgccgccatctgtagcgccctatccccgtgagcttttgcgccgccgtcgccatcgttcgtccagccgtgcgccgccgtcgctccggtcgtcgtcgtcgctcgggaaagccgccatcgggatcgccaagccgtcgccgatctcgtccgcccctccgccgtcgctgtcgaccgctggaacaccatcgccgtcgttcgccggcgggcatgcgtgcccgagtcgtcgccggtgatgacgtcaccgctgacgtcatcgtcgtcgtctcccgtggtccggccgtggaccgatagatctcggccgttcgtttccgtgagccgccgccgtgcacccggtccaccatgaacccgacccgcgtggaagggtgcattactcggctttaattccgtgcgaggaatctgcatatcgtccagggtcttagcgaaaaggatgttgagtgcgctgccaccatcgatgagagtccgtcggagcttgacattgcgaaccactgggtctagtaccagggggtaccgccccgggtggaccactcggtcgggatgatccgagcggtcgaacttaattgctgtttttgaccaccgaagatattggggcgtgttaggctgaaccgcattgatctcccattctgttagcttctgctttctcttggactcataagccaggggtccgccgaagatgtgattaagttctttgcgatgatcttgaaaaccagtcggggcatcgtcttcatcatctttcttctttgatgtgccctgatctccgtctgcaggtttgcgtgcgttcttgacgtattgctctgcgaactgtttgtagacgaagcaatctttggccatgtggttggaattgggatgatgcggacattgagagttcattatcttgtcgaaggtgttgacgcggggacgttgtcgggaagatggagaggtggtcgccacaagttcttcgggcttacgcttgcgatccttgtggttgttacttccactcccccctgcagtcggcgtgtcgttctttggcttccaagtggtgcccgactgtttggacgcggtgatagcatcttcggctttggtatactcgttggctttttcgaacatctgcttaaccgtcctgggaggtttacgtccgaacttgccgactaggtcctcgtggcgaatgcctttagtgaaggcggcaatgatgacgtcgtcggtgatgtcggagatcttgttgcgttgttcggagaagcgtcggatgtaatctcgaagggattctccagacttctgaacgacgttgtagaggtcaaactgtgtgccggggcgttcaaaggtgccctcgtgctgcacggcgctggttgatcgtgtcacgaaggtcgacgggacgctggcgaggtggagaacgaggccgttcaactcggcgctccctgtgacgttcgggaagcgagtgaacagatcgttcgtcgtgaccccagtcggggtgcgggtgcttgcggagttggctggaactgacgtagcgatcatggtcttcgtctggttcaagatgttgacaacatgatcggcttggttgagtgcgtcttccttgaggagggtgtcgaggagagtgattgctgcaaccgcgttctgctggggggtgcgaaagaccgctctcccgtcgacgtcttgttgcccaatgagctctctcgctcggcgcccagattccaaggcgcggtgccgtcgatcttcagcttcctttgcaatccgttcgcgatcttgttgctcacggccgaagaagaggggcgtgtagttatcctcatagctgtcgttgaagttgccgaagtcgccgtggtcgtagtggtagccgaagtcatcattgtcgaggatctcggttggtcgagaactgacgccgggggagctgaggtagccatccaactcttccgtcaagactgtcccaagaggttggagtataatgccaacctccccgtcgtcttgatctgatcgtggaggaatagattggatctcatccgagtggcttgaaaccgactcaggagagatgatcttggagtaggcctcggccgagttcggaataccgaacggcacggggacctggtttctccccgactggtttgaatccgagtcaaggaaagagatcttgccgaagtcgttggtgatgaagtcgaggcggtccttaattgtcatgagcacgactctcaaaaccatgtgctcacaacccaccat

SEQ ID NO: 80522 - DNA, 320 bp, Oryza sativa
  Clone ID: PAT_MRT4530_80136C.1
ccggctctgaaacccgagcccatggaaaacaaatggatggccaaatggccatgggtcaacaaaaaaaaaacgattgcgaaaaccaaaacaggaacaagaagcttttgcaaatccttgcccaaaacttataaatgggggaggatttgaatctatcgaggtaaaaatcccttgcggtttaactccccgggaaaaccctgggggaaaccccaacccccagaccagtacctgaaaaacaagaatttgggctccgcccacgccaaaaagcccaggttggtccccaccatctccggggggatccactccggggagccctgggggga

SEQ ID NO: 80523 - DNA, 526 bp, Oryza sativa
  Clone ID: PAT_MRT4530_80137C.1
cccatccaaataagttcgtctagagtaagagaatgcatgagagaaaaggcctagccaatagaagtatcttgtatgtgatgaacgtcatcccgtatattggagaacaaccaactctacaaggaagctgacgccacgtggatacccagacatggaccatataacgggtgccacgtcccacgccatgctggaatgatgaggaccttaatgatgatgtgcaccggttaaatggttgaggtcgcctggttgttatgagctgaatgagtgccaatggttggtgaccctgggcatgctgtgtttgggataatacacactggaatgtgggatgatgagaagcctttgttttatttgaccaaaatgaaacctttcgaaataaaaagagcaccctggctaattgcatgttgactggaagttgtatcataatacagatagatgagatacttgtccccagtgtgtgactccccacactgtaatggctgggacatatttccctgaccaagcttcatttgtgcccaaaaaaaaaaaaaaa

SEQ ID NO: 80524 - DNA, 2118 bp, Oryza sativa
  Clone ID: PAT_MRT4530_80138C.1
atgggtcataccaacctccactccgtcggaagcaggtgcaacgtggaagcacggttgtttgccgatgacatgacaggcgtcagaccagtcacagaccggtcactctcgtccaccacgcgtcagtttagcaagctgcatgtctgcccttcttcatacaatgacttccttgcaatggttgggatgaagcctggcatatatctgaccgggaccgacgtgccatcttcaggagctggcacgccgtctccggctagggacaacgagatcccgtcgcgcccctcccgccattccaagtccggccggtctgaggccgaggatacggcgaccgcggaggcccggaggcgggaaactgaccggcgagaagccgcggatcgccttcgggaagccgaggaggctgcccaggaggccgtccgggctcgccgggctgaggaagccgctcgggaggaggccagactccgccgggccgaggagtccgcccgggaggcggaggcggcgcacgcacgccaggcggcctgccaagcccccgacccgactccgcccgaggcgacgacgacttccgaggccacccacgacgaggccgcgggcgcaccgctcgggcccgacccctcgggcgacgctcaggacaagccaggtccgggggacgtccctgagtccggtacgtcgatcggcgggccgagccgtgcggcatccccaccgaggcggctctcccccatgccttccgctgccccactgagcgtagagccccttctgcaggccttggccgccgcgaacaccacggtgttggacgggttaagtgcccagatggaggtcctgcaggcagagcgggcggagctcgacgctgcatgggcgcgtgtcgaagaggggcgacgctcggtggaggccatggtggaggcgggccgcaaggcacaccgccggcacacctcggagctcgaggtccgtcggaaggagctggcggagatcgccagggaggtggaggaggagcgggaggctgccctcatcgccaccgcagtgatgaacgaggcgcaggacgacctccgccttcaatacgggagctgggcggcggagctaggaaaaaagctcgacgccgcccggggggtccttgatgccgctgctgcccgggaacggcgggcggcggagaccgaggcggcgtcccgacgtcgcgaagaagcccttgaggcccgtgccacggcgctggaagagcgcgcctgcgtgaaggagagggacctggcagaccgcgaggccgccgttgccatccgggaggctacactggcggcgcacgaagccgcctgtgctgaagaggagtccgcactccgcctccgcgaggatgcgctcaccgagcgggagcgagctctcgaggaggccgaggccgcggcgcaaaggctggcggacagcctgtcccttcgtgaggcagcgcaggagaaacaaacgcgtcgcaatctggaaggtgcccgcgccgagagggccgcactggatcagcgggccgctgagctcgaggcacgggcaagggagctggatgcgagggcgcgtagcggcggggcggccacgggcgacggcgatctagccgcccgcctcgcagctgccgaacacactatcgccgagctgcagggcgcgctggactcgtccgccggggaggtcgaggccctccgcttggcaggcgaggtagggcccggcatgcttcgggacgccgtctcccgtctagaccgcgtcgggcggcaggcgggcctctggggcgggcggatcgcgaaatatgccgccaaccaggggggcctcgcccagcgcctctcagagatggccgggactctccagcggctccccgaggagctcgaggagacgatcaagtcatcctcgagagacctcgcccggggggcagtagagcttgtactggcaagctaccaggccagggacccggacttctccccgtgggcggcgctggacgagttccctcctggaaccgaggacgacgcgcgcgcgcaggtccgggacgccgccgaccacatcgtccacagcttcgagggtacggcccctcggctcgcgttcgccctcgactccgacgtggagggcggcgacggtggtgtggacgacagcgacgacgaggccggcgacccgggagcctcgaagtga

SEQ ID NO: 80525 - DNA, 2943 bp, Oryza sativa
  Clone ID: PAT_MRT4530_80139C.1
atggcgcacctcatccctaacgtggtaatgacattggccatcttcgcgcacctgtgcgagatgttcatcggggtgcgcccatcccttcggctgttccggtggttcttcaccgtacagccggtgtcgccgccgtcggtggttggtggctgctacttccagccgcgggggccggtgctgaaccgctacattccctgcgtccaccgcaagaagtgggatgactggaagagcgactggttctacacccccctcgccgacgaagcgcgcctccgacttccgagccagcccccagcacaggcctccagctggcgggcgccagtagacctgggagatggctacgatgccatcctcgaccgcctggcgggcctgcgatcccaggggctcacaggggccatggtgtacagtgactaccttcgtcgccggatcgcgccactccagcggcgcgcccggggcgcctgggagtacaccgggtccgaggactgtatgaggactcaccggggggtcaaatgggactgggtccccgaagacttcaaggtaatgatccaacgggtgctgaatctcagctccgcagaggcatccctcatcccccaaggagtcctccccctctgcagcgatccagatcgcgccaacatcctgtccatcatgatggcggtcggggcctcagaggagcgagctcctgagggccatgacggtgtgagcgggagccgcaagggagatcaatctaccccaggagggggttgtgcttccgggccccgtgatgggggctcggggggcagccgccctgccgacgcccgagggaagaggaagcaagagggtacttcctccccatctcccccccgagggggcggggcggcgcgtgtcagcagcaggcgcccggagggggccgcgccgacgccgcagcccgagggggagcgaaagaagaaacggctccgcaagatgggggggacagaaccatcccggggaaaccttatttcccctccaaggtggtcgtttaaccgaccccctcgcagcgagatcccgtcgcgtccttcttgccaatccaagtccggccaatctgaggccgagaacgcggcgaccacggaggctcggaggcgggaatctgaccggcgagaagccgcggatcgccttcgggaagccgaggaggccgcccggggggccgcccgggctcgccaggctgaggaagccgctcgggaggaggccagactccgccaggccgaggcgacgacatcctccgaggcaacccgcgagactgatcggcaagaagctgcggatcgccttcgggaagccgaggaagctgcccaggtggccgtccgagctcgccaagctgaagaagccgctcgggaggaggccagacttcgccaggccgaggcggcgacgacttccgaggcagctcgcgacgaggccgcggctgcatcgcttgggcccactccctcgggcgacgctcaggacaagccaggtccggggaacatccctgagtccggcacgtccatcagcgggccgagccgcgcggcatcctcaccgaggcggctctcccccacgccttccgttgccccactgagcgcagagcctcttctgcaggccttggccgtcgctaacaccactgtgttggacgggttaagtgcccagatagaggccctgcaagcagagcgggcggagctcgacgccgcatgggcgcgtgttgaagaggggcgacgctcagtggaggccatggtggaggtgggccgcaaggcacaccaccggcacgtctcagagctcgaagcccgtcggaagatgctgggggagatcgccagggaggtggaggaggagaggggggctgccctcatcgccactaccgtgatgaacgaggcgcaggacgacctccgccttcaatacgggagctgggaggcggagctagggaagaagctcgacgccgcccgtggggtccttgacgctgccgctgcccgagaacggcgggcggcggagaccgaggtggcatcccggcggcgcgaagaaacccttgaggcccgtgacatggcgctggaagagcgtgcccgcgtcgtggagagggacctggcggaccgcgaggccgccgttgctattcgggaggtcacactggcggcgcacgaagccgcctgtgccgaagaagagtccgcactccgcctccgcgaggatacgctcaccgagcgggagcgagccctcgaggaggccgaggccacagcgcagaggctagcggagagcgcgtccctccgcgaagctgcgcaagaggaacaagcgcgtcgcaatctggaaagtgcccgcgccgagagggccgcactgaaccagcgggccgctgaactcgaggcgcaggcaagggagctggatgcaagggcgcgtagcggcggggcggctacgggcgacagcgacttagccgctcgcctggcagctaccgaacacaccatcgcggatctgcagggcgcgctggattcgtccaccggggaggtcgaggcccttcgcctggcaggcgagatagggcccagcatgcttcgcgacgccgtgtcccgtttagaccgcgccgggcggcaggcgggtctctggggcgggcggactgtgaagtacgccgccaaccaggggggcctcgcccagcgcctctcgaagatggccgggactctccagcggctccccgaggagctcgaggggacgattaagtcatcctcgagggacctcgcccgaggagcggtggagctcgtactggcgagttaccaggccagggaccccgacttctccccatggacggcgctggacgagttccctcccgggaccgaggacggcgcgcgcgcgcaggtccgggatgccgccgaccatatcgtccacagcttcgagggttcggcccctcggctcgcgttcgccttcaactccgacgaggagggcgatgacggcggtgtgggcgacagtggcgacgaggctggcgacccgggtgcatcggagtga

SEQ ID NO: 80526 - DNA, 1733 bp, Oryza sativa
  Clone ID: PAT_MRT4530_8013C.1
acatcatggatcatgcatgagtaccgtctcatgaactctccaagagcggcagtgccgtcgtcttcttcggtgaatcgtcttcccactgatgatctcacggaagagatggtgctgtgtaggatctccaacaaggacctgcctaaaccacccttcatccacaacagcttgttgcagttctcttcagtggggttgaatggtgatgggtataattacttgatccttgatcaccttgagcccacaacaagggagtatcctaatgccgcctatcggaatacatcgacctatgagctctcgcggcaatagcacgctctcttctccaacaacacaccatcgagcaaagcataggcgagaggaggagaagacgaggagttttctcccaatgcctgagggcttgcaagcaaaaatggcccccctcccaaccccaccaccaccatccgccccttcctccgcgccccctttcaaatccaacgcctcgagctctcgccccaaccgcgcgccgcccgagggcgcgcccacctcgccggcggcggccaccaggccgccaccgttcgccatggtcccggcggtgtccgaggccgtcctcgcggtgttcgacgtctccaccacgctccgctcgcaggggtacctcgccgggcaggagctgcccagcatcaccctccccgaggaccgcgccccggaggtgttcgagcggctgctcgggtccttcctcgcgcagtcgcatgggcccggcgtgctcccgccgcgccccatgcctcccctgctcggggacgggcacccccgtggggctgctcccgcctgtacctcgccgtcaggggcgtgcggcgggttcgaggccgtgcgttcgtgggcggccgccgccgagatggccggcctcaaccccgccatggacgtccccatcatgctggtgtaccacaagtacctctgccccctggaggcgagcttcctcagggcccagaagctgagggaggaggccgggagcagcggcgggagcgccaagaagggcaagttcctcgcgccggcggccagggacgccgagggcgtcgaggaggtgctggacctgaagcgcaagagggagaacctcgtggggatgctcaactgggtgcgccaggtggcgaagaagccagatcggcgtcgctccggcaggaacgccgccgacaaccacctctccatggcgttgatgttccgccgccagatgttcgtcgacgacggcttcagcgacaagccccatggctgcgcatcgcctgagcccgaggcaacagagcctgaggtaaacagctcactgcctcctacatctatttttcttgaaatgctgcttgattgaaatggagtatcctaatgttggccttggtaatgttgatgatgctgctgctagttctagatcgcgagcggccgctcgcgatatgatagcatgcaaagaaaccatggtggctagaattaaccagtagcatcatgagtgaatggttttgcgggagatttgagttaaatatcagataataaaataataatacaaagaataaaaagaaaaacaaacctgtatagttagcaggttttgattcatttcgttgaactttgtgtgcttgttagctagcctatataccaaacatgccttggcgaggctttctatttgtatatagctttttttcttttttctattgtaaggttcgaactctattgagttgattgaataaacattatgcaatttatgtaaaaaaaaaaaaaaaaaatttgcggcc

SEQ ID NO: 80527 - DNA, 307 bp, Oryza sativa
  Clone ID: PAT_MRT4530_80140C.1
cgttcttttcggaggagctctgcctgaccatcaacccagatgaatgtgatggttatggtgctgctgtccaggttgccatctggcgtgacgtgggcctcgtgaaggtgcaggacctccttctggtgaacttcatgcttctgtctcttgcgacggagaccagttgcttggacatgagcgacttgatcccaaggaacaggaccattgccaccaagaaggagcaggtcttctccacctactgtgacaaccaggctgttgtgctgatccaggtttatgagggtgagaggaccaggacacgtgacaacaacct

SEQ ID NO: 80528 - DNA, 2433 bp, Oryza sativa
  Clone ID: PAT_MRT4530_80141C.1
cttctttcctctgttcgcaacgaccccaaccccgtctagagaaggggtcccagcatcacatccttcccgcacccttcgcccttgccctaatgacgccgatcaggacccggcccccccctccaagcagcttggacgtgtgcctcggggcggacgctgtatctctttttgctccccaatgagtctgaccgctcctctcagagatcggtcgtaggtttgtgaagtttctccttaactaacctcaaatgtacttattccttcattccgatgctccatgtaatgcacgtgggcttgtacaaaaattgtgcaaacttttcatgattcttacattgtccgtacagtagcacaatcctcctttcagagtgggagccactaatcagcagcgcaagaagttccatatcctggaccgatcgaagctctctctatgacaggttctacactgacgcggtcgactcgtcggacgcgacgccgggtttagcgccgccgttcctggcgaagaacgccggcttggagggcacctggagggagaccgtctcgctgtcgagcatcatcaccaccgacgacatcaccggccgatccgcggggttttcctgcacgcacaggagcgctacgtggacgcacttccgcacgtcgctcgccgagacgtacctgctcatggccgggtctaccatctcatccacggttccggccatccaacgctcccatatcgtgttcaggagatcttcagattggtgagagttgttgtagaagtcgttgttcttccttcccgtcacgatctccagcaccatgacgccgaagctgaacgcgtctgacttgacggagtagttgccacgcatcatgtactcaggtgccatgtacccatatgtgtcgacgacacggttcgtgacagcctgggtctgatcttgaccgaaaattctcgcgaggccaaagtttgagatcttggggttcatgttcgcgtctagcaagatgttgctcgccttcagatcacggtggactaccttgagctgagagtcttcgtggaggtattgcaggcctcgagcgacgccgtttatgatcctgtacctcttttcccagtcaagcttctcgcgtttctcagtgtcaaagaggatcaggtcaaggctccggttaggaacgaactcgtagacaagcagcctctcgtgttgatccaggcagacgcctacaaagcttacgaggttcttgtgcctcagcttggcgaccagagcaagctcattcttcagctcttgaactccctgtgttgagctctttgacagcctcttcactgcgatttcgttgccgtctggaagaacacccttgtacaccgctccaaatccaccttcaccaagcttgttgctctctgcaaaatccccagttgcagctcgcagagtagaaatgtccatgagcatggagtctacgctgtcaacgtcatctgcttcagcgtaatagttggcatttgtctgctttgcttttgttattactggacgcttcctcctccagacacagaagcaaacgacaaggtttacggctgctattatagggagcagtattataagaaccaggcgcggaaccttgtactttgtctctcgtcccggcgtggccgctgaaggcgtcgcgttgaccggcggcgccggagacggcgccgatgtcgccggtagccgcaccatcgtcgtgccattgaggaaaggcttggtctcgatccggaagctgcacctgacggagagggtcctccctccgatgtcgtccttgtacgaccaaagctcctgcgccacgatcttggcgaggcagctccggcacctcgccggcgacaggtccggcgtgcactgcgccaggctgtacaccttggggagcgccgcgtcgaagtcggcctcgccggccgcgtaccgccgcgtcgagttgtacgccgcgtagtcggcggtggcgttgacgagcgccgccacgaggcggttgtaccgcccctgctccgacgtgaccttgttctcgttgttcaccgtgtacgcgtcgatcctcgccgggtcttcgccgccggcgccgccggagaggaagttgatggcggagtagctgaccatgcaccggtcgtagtaggtggcggcctccctggagttgccgcacgcgttgggcaggtcggcgaaggcctgggtgaggcagccgaggcaggagctggcgctgacgtcgccgcggcagagcgcggcggcggtgacctgctccgggacggcgccaacgtccacggcggtggcgtagaggtccggcgacgacgaggcgttaccggggagcgtggcggcgatgagctggaggttggcgaagaacctgctcttgggcgtgaaggtgccgaagtcctgcccgcacaccggccatggctcgccggcagcgcggggcgcgagcagcgcgacggcgacggcgacggacaggatgagacggcgatccatcggggtatttccggcg

SEQ ID NO: 80529 - DNA, 267 bp, Oryza sativa
  Clone ID: PAT_MRT4530_80142C.1
atgggcatggcggcaagccggcggtgggcggggggcaagcgtggctggcggcggagcgacaggggtgagctgctgctggcactgtcgtccggggatgagacacgtacgcatgtgtacgtgatccgtatacccacaactaagtacgcagagtacaagggagacagcgaattgacgtacatgcatatcgatccatgcagttgtaacaggagattgatcgatcgatcgatcaattatattcatccagccctactgcgtacagcaatgagc

SEQ ID NO: 80530 - DNA, 270 bp, Oryza sativa
  Clone ID: PAT_MRT4530_80143C.1
atggcggggctacgagcctacggcgcggagacctcgacgatggccatccgtctctctttctctcctctgactccaagcaagaggagagcgctggagggcggggcaccagaacatgggcggacccagcccctggacaccctaaaccatggcccggagcttatggttgaaagcccatgggccaagacttattttcaccatgctagaatgagatggacaactgtccaacttgctgatgcacaatctgaaggaccattggcactcggaacctga

SEQ ID NO: 80531 - DNA, 924 bp, Oryza sativa
  Clone ID: PAT_MRT4530_80144C.1
atggctagcagttcgacatcgtcgagatgcctgacggcgagcgtcaccgggacgcacaacttggaggtgacgagctactcgctgctcgaaggcatgggggtcggcaagttcgtgagctcgaccaccttctccgtcgccggctacgactggaacctccgcttctaccccgacggcatcacggacaacgacagaaaggaaggctacggggctgtttggatgcttgcttcagtttaccaaatttctatagctaaggaacatgcaattcgccggattcggttcactggcaacgacagcttcaagatcgagtgttcgctgaccgtcataagcgagtctcgcgctgaagacgtgagcacgatcccagtcccgccgtcgaacctgcaccagcacctcgccggcatgttgcacggcgtcgagatcgcggatgtggagttcagcgtcggcggcgagccgttccgcgcccacgcgtgcgtgctggcggcgcggtcgccggtgttcagggcggagctcctcggaccagctgctgcacggagcatcaagatcgacgacgacgacgacatggagcccgcgacattcaaggcgcttcttcacttcatctacacggatcacctgccgaacgactccggattcggcaaagacgcggcaatgcagcggcgtctgctggtggctgccgatcgctacggggtggacaggctgagggcgatgtgcggggtcaagctgtacaagagcgttagcgttgggacggtcgtggattccctggaattcgcagagaagcaccactgcgcgcagctcaaggatgcttgccttggattcatggcttcacctaacgttcttggtgtcgtcaggaaaaccgatggattcaagcgtctcgtggagggctgcccttgggtcttgaaggagattttagacaaggtgcctagattctga

SEQ ID NO: 80532 - DNA, 239 bp, Oryza sativa
  Clone ID: PAT_MRT4530_80145C.1
agctattacattttttttttttttttgtgttcttcatattactgaataaaaggaaatattctgactatggcctctaccacgcactggttctaagccaatttaggccggaacccttaagtgcaggacaacggagggggcaaactggacagtacaccgtcggtgcggcaacgacccaaactaaccctacactggggtggaaaagggactatatggggaccaactcgaaaaaggccggccta

SEQ ID NO: 80533 - DNA, 463 bp, Oryza sativa
  unsure (1)..(463): unsure at all n locations
  Clone ID: PAT_MRT4530_80146C.1
gttcgctcgtctctcgcccagnccgcggggttacgcaccgtcgtcttcctcccgtgcaagggcggcgttctcgagctcggttccgtcgtagccatccgcgagacccccgaggtcttgcgcgccatccaatctgccatgcgcgccgtgccagctccgccggaagatttcatgagaatcttcggcaaggatctctcacccggccgaccgtcccagcccatgggatgcgacgccccatggacgccgcggctcgttgtccaaaccacgccggtgcgcccagccaagaaggaggtggtcaaggcgaaaccagccgagccccccaagagcttggacttctccaaggcgaacgtgcaggaacaggccggcggccaggagcggcggccgccaccgcggtggagctccancttttgttccctttagtgagggttaattgcgngcttggcgtaatcatggtcatagctgtttc

SEQ ID NO: 80534 - DNA, 249 bp, Oryza sativa
  Clone ID: PAT_MRT4530_80147C.1
cacgctactaacttgatccttaacggcgccttttttttttttttttgtaaacgatatttaatccagcattgttttggtaatgtgtacacaaaaggttccagaattattacgacagacatttaataacctaattgcccttaattaaaaccacattaagcacagccgcaaatgtcatggaccacacctccaaggcaaatagacttgtagtcttgacgtgaagcttcgagcccctcccgagacaggtaccct

SEQ ID NO: 80535 - DNA, 716 bp, Oryza sativa
  Clone ID: PAT_MRT4530_80148C.1
ccgggctgcaggtgcataatctggagtatgcattggaattttggattattttgcttcaatatcaacaatttagtggaaaacataattttcatataaccttttccttcaatgatatgatgggccaatgctacacaaagtttggttgatacactctacccctaccttattgaagactgctgtaacataacctagctagttatgttactgcactttacttcaaattcttgtatactaaaattccagctggtacccctgtttcagcttgaagtggtctccctatgtataagtattctcagagtctacatactgtcagttgcattaattattttctggaagtacatttcctttcttcagcaccatgcctatgcttttttttccattctcatagagtgttccttttttttatgaatgaattccagcttgatgagtatgtggaggggcatgtatgagtgtcatcaagtacagactcacatggtgcagcagcttgagtacctcaacaattccttgagcactaacccaacttccaatgtccaccggcaagcagctctacagcttgagatcgaggttgacagatggtactcagcattctgcagtctggttaagtcccagagagactatgtctattcattgaccggatggcttcgcctctcactattccaatcctatcatgatccatacaacaaagctcatcagaactctgatatctacagcttgtg

SEQ ID NO: 80536 - DNA, 414 bp, Oryza sativa
  Clone ID: PAT_MRT4530_80149C.1
atggcagcagcctccatagacggcgagggtggcagtgctcccctatcctccggcatatgtaggcagtggtttgcaaagatgctgcttcatctcttatgtctacaagatgtttggtcgtgttcctcaaattttgaaggtttttggccagcaaccgtgcatactcgttcattttcctcaaaccttaaaggttctgggtcagccacaaacggatcagaagcaatatcagacttattttgcttcctgcgggaaccctgcgatctcttcacaatctggatgtgcgcatggaagaagggaatcggaagaaaatacatggtgttgagtttgatggatgaacgacatggatgcgagctcgacacggatagggacggcatacaaaattcttgggaaaacatcttagatttttataatgggtaa

SEQ ID NO: 80537 - DNA, 411 bp, Oryza sativa
  Clone ID: PAT_MRT4530_8014C.1
cccacgcgtccggtttatttgcttgagatgtacttttttcttgtcagtgaaaaaaaaaaaaagggggaagggaaaaaaaaaaaaaaaagaaaaaaaaaaaaaaaaaaaaaaaaaaaaaaaaaaaaaaaaaaaaaaaaaaaaaaaaaaaaaaaaaaaaaaaagggggcgccccttttaaaaaacccaattttacttccccttccttccaaagtaataatttttttatagggcccccaaaattaaattccctgccccccttttaaaaacccctaaattgaaaaaaccctggcttacccaaattaaatccctttgaaaaaaatccccttttccccagttggctaaaaaacaaaaaggccccaaccaatcccctttccaaaaaatttcccaccctaaatgccaaatggaaccccc

SEQ ID NO: 80538 - DNA, 597 bp, Oryza sativa
  unsure (1)..(597): unsure at all n locations
  Clone ID: PAT_MRT4530_80150C.1
ggtcaaattgaattcaactctggagagatgaagtagcatcttgtgtacacagctgagtagtgagtataaacttcaaaccttccacgttgtatttgagttgtattttatagtgatggtgatgatgatggtggtggccaatagggtcccttggagtcttagacttattccttgggggacaatgtgacttagcgtacctgccataggttcatctggggccagaagtgggaagatctgtcctctgaggaagcagagtggtcgaccacatagtccaactgtagtggggattaggcttcctgttgctgaactggctgcagctctccccagtgccctgggaggagggacctcagttgccatggagtctcaggctggtggaaagtcttagaatttcaggcctttccctgatgaacttcactgtgatgctggatcttcacggtgatgctggaagagaattttcaccgggttccattattttaaaggtatcagggtggaattacagtttctgactgacgatnagggggaaaagtcttcatttttatgtaatcgccatgcactaaataaagcccaggtttgtaaagggattcatttccaagtataatt

SEQ ID NO: 80539 - DNA, 540 bp, Oryza sativa
  Clone ID: PAT_MRT4530_80151C.1
atggaggaggagatccggtgtccggcggtgtggtggctcaagcgacggcggcgccacgagcccgccaggctgcggtggcgagacggaatcccacgggcagtgatggagactggtggcggacctctccctggagcagcgagagcggaggtggacgccaaggccggcgcagacgggatagaccggcgggagtcggcggcgggaccggcgagagtggtggccaggcggtcaccgggaccacattcgcccaccgcaccgtcaccttgggcagcctccgccgtgccactccctatcgacgccgacccgcctccaccggtcgtctctaccgccagcgccgggggtcaacaaggagccatgacggcgggatctggcacccgcgccgtcggcgactgcagtggcggtggcgtgggtggaggccctcttgctcccgcgtcatcgccgcctgtcgccaccaccgtcgcgtcgtcgcctgtcgccgccgcctcgccaccggactcccgcctccccaccggcctcctccccacccaccgactgggttgctag

SEQ ID NO: 80540 - DNA, 363 bp, Oryza sativa
  unsure (1)..(363): unsure at all n locations
  Clone ID: PAT_MRT4530_80153C.1
ggagctatggatggtggtcttgacattcctcacagtgacaagaggtttgctgggttcaagaaggacgagaagcagcttgattctgatattcaccgcaagtacatctacggtgggcacgtggctgactacatgaggtctatggctgaggaggaacctgagaaatccaagcccactttagtccatgctgccatccgtgctgatcctaccatgggccaatcaaccaagaaggaaccggcgacccacaggagatacaaccttcagaagctgacctacgagcagaggaaggccagtctcgtcgaaagattgaatgctctcaactcctccgcttgtgctgatgatgatgacgangaagaagatgactag

SEQ ID NO: 80541 - DNA, 537 bp, Oryza sativa
  Clone ID: PAT_MRT4530_80154C.1
tcaccacgagccgcccgacgagcctgtgctagacccaccaccttcgagagactcagctatcccaataatttcttcctctggactccacctacaacaatgctccaccttctctcctatcatcacagtcgtattgccaatcaaaattggattccttcctagcgtccgaactccacagcctaaccagtccgtcggtctgaccagtggcggacccaccatgattctcgggtattccgcagtcagagtcctcgtgttcaccgtccacgaccctatcgtcccggccctccacgtccactgcgccgcaccacgctcgctggcttcgccacgtgggtcgggcacgttgtccatggcgttacccctccgatctctccgaacgccttcggccacgttcggccccgtcttccgatcatgttccgccatcgccggtctgatcgcgagtgaggtcgtcgccgccgcaacgtcctcgttgtcaccgtcaatctcatcgccacggctgacgacctcgtgtttcctgctccacttgtcttcttgatgcaatgc

SEQ ID NO: 80542 - DNA, 1521 bp, Oryza sativa
  Clone ID: PAT_MRT4530_80155C.1
ccacgcgtccgggacccacgccttctttttcgtgcccgcccacgcgtgcgcgccgccccccaagccaaatccacgcatcgacgcggcaggagcgggcggctgctgcgagatcggcggcgccgcagatctcgcgcccaccagcggagatgaagatcacggcgctcctcgtgctgaagccgtcgtcctccggcgggggagcatcctcgtccggcggcggcggcgggtcgggcggccccgaggcggtggtgctggcgaacgcgacggacgtgagccacttcgggttcttccagcggggcgccgcgcgggagttcatcgtcttcgtcgcgcgcaccgtcgcccagcgcacccagccaggccagcgccagtccgtccagcacgaagaatacaaggtccactcacacaacaggaatggtctttgcgcagttgcatttatggatgatcactatcctgtacgaagtgcattttctcttctgaataaggtacttgacgaataccagaaggctttcggggactcttggaaagctgctacaaaagatgcaacagatgctgcccaacagtggcctttcttgacagatgctttgacaaagtttcaggaccctgcagaggctgacaagttaatgaaaatccagagggacttggatgaaacaaaaattatcctacataaaactattgagagtgtgctccaaagaggggaaagattggatagcttggttgagaagagttcagacctgagtgctgcttcacagatgttctacaagcaggcaaagaaaacaaaccaatgctgtactatactctgaagtttggactttcctgtccttaagatgaagactccagaagccgaccgatactgtttagttctacagtaagatcaattgccgtgaatcgtgccaaagtaaaactgtcaaaactattattctttggtgatgaaggaaccttccagggtttatgttccagagcaactaacacattcattgaactgcatgtcccgccagcaatcgccaacatcttgtttccactggatagattgttgaattctcaaagcatgttggagtacacgctctgtttgctactcgtaatttatgttattgatatgattggtatttgatgtctctactataaaaaaagaaatttttattttttttttgatcaatatccaaaaaaaaaaaaaaaagggcggcagcttctcacataaataagataaccgatagctccaggttgagaaccaaaaaccgaaagaaataggttctttgagcggagttcagaacataaacaaaaatgcctgttgcaacttgcaagactatacaggtgaacttaaatgccatatggagtttgtttggcagcataaagatggaactactgtgataaggctaaactctttcactcatcatcctcttcctcgtcatcatcatcagcaccagcagaggagttgagagcattcaatctttcgacaagactggccttcctctgttcgtacggacgcgtgggcggacgcgtgggcggacgcgtgggcggacgcgtggg

SEQ ID NO: 80543 - DNA, 4569 bp, Oryza sativa
  Clone ID: PAT_MRT4530_80156C.1
tcaagtgtgactatcttgcgataggacagtgccgccctccggagatccaccttgtcccaaagcggaacctgttggacaacgagtagtaaccacatcaaaatccgctcaggtagccacagtatagggccaggaatccgagcgagatcggccacgcacgctggcagcattctctccattcccccgacgggtcttcataaaagacgttgggagctgttggtgcccggcttaagggtccgcgtcgcggggcagattatcaccggccaaagcggccgcgccgctttgcttcagctactttgtcctgataactgacttcacttgactggtggttgaacttcaccactcatcagcaacagatcctccaggttaataaatacgattgcagcagggatacgccatagcacaatggtcatatgattcatgcgtaggagatgcatcagcatattaatgattatcttggacctttaatttcgctagcaggtacggtgatccactgctaggagcaggggctacgcgcatcatttatgtccgacaccgacccaaaggggaaagtagcctcctcgattcatcaatataatattacacccatgcagtggcctcataccattacccagaagcataaatggccttaagtgcgatgcaccgaacatctggttaacgatgataggattcaaacagacctgtacactaactatacgtcactgttctgtggaaacatggtctctcccaaaactggcatagccgtaagtagctggctgaattaattgaaggtttttcaacggcgcccctcagccccatatgcaaggcatggttgtcagttgatgacccatccgtccatttaggtagataaactatattcatgtgcaaaggaattccacacctatgaggttaatactatcaacatgacttagtgtaaatcctgtttctatcagaaaggatagagttgggtattcgatataactgagctactcggttcagatacaactaaccaacttgataagcaataaaattattcttcaaggaaaggaaatgagcatatttggtaaaacgatccacaacaaccagaattgtattagctcctttagagagaggaagcccctcaataaaatccatcgaaatgtcttgccaagaaccctcaggaatgggtaaaggttggagcaaaccaggatatttacagtgctcatgtttggcctgttgacataccccacattgttgcacaaactcctccacagcttgtttcataccagtccaaacaaagagcttcttcagacgatgataagtggcatgaatgcctgaatgacctccaataggggaagagtgaaagacagcaatcaatttagactgtaatccagagttagctcctacccaaatcttgtcatgttttttaataagacccccagaaagcatgaatcccttgtcattgggactactcacagccaactcagtaagaagttgctgagcatcagcatccgttgcataagaattaaccacttcttgaatccatttaggataaggaccagaaaccgtagcaaataagtgtcccacacgagataaagcatcagctgacttattatcaacacctcgtttatactgaaacttgtattgcaacccaatcaacttagtcatagctttacgttgcaattcacttcctagtatctgatcatctaaatgacacaaagattgatgatcagtcttaatagtgaaagggcctctcaataagtaagatctccacttgtcaatagccatcataatagccaagaactccttctcatagatggacaatttttgattagccatgcctaaagctttactgtaaaaagcaatggggtgcccttcttgagacaaaacagctccaataccagttgcacaagcatcagtctccaatacaaaagttttagtgaaatctggcaaggctaacactggggtagaacacatagcatgtttcagctgaagaaaagcagaattagctgagtctgtccatataaactttgcattcttctgcaacaaaacagtcaggggtttagcaataacaccatagttcttaacaaactttcgataatatccagttaagccaagaaaacccctcaactcagtaacattggttggaacaggccaatctctcataatgcgagttttctcaggatcggtagccaccccatcagctgaaataatgtggcccaaatattccagctgagaagctgcaaaagagcacttgctcaacttagcgcttaactgatgttgctgcaacacttgaagaactgtatccaaatgaattgcatgagtctccaaggaaggactataaaccaatatatcgtccatgaataccagaacaaatttcctcaaatatggctcaaaaatggaattcattaaacactgaaatgtggctggcgcattggttaaaccaaatggcataaccctaaactgaaaatgaccatgatgtgtcttaaaggctgtcttttcctcatcagtttccttcatcctgatttgatgataaccactgcgcaaatccaatttagaaaagaaacgggtgccagccaattcatccaatagttcatcaacaataggaagaggaaacttattcttaattgtgattgcatttagccttctgtaatcaacacaaaaacgccatgtgttatctttcttcttaactaataaaactggggaagcaaaagggctgcagctgcgagaaattaaacccgattccaacatttcctgaacctgtttctcgatttcatctttttgtgcaggagaatatctgtatggcctgctattaacaggtatggcaccaggaaccaaaggaatagaatgatctaattccctatgaggaggcagtccagcactaggctgaaatactgaagaatatttctgcaatacgtcctgaatcgatgcaggtacagcagaatcacacaatggagaggaaagacagtcgaccacagctaaagcccaaatatcattacccacttgccatttcatcatttggtcagaagatacttcagaaagatactgcagttgatgagactgaataccctgaagtttaaccaacttgccttgataagtgaactccaaccacctgtcagcccaattgcaagtcataggactgaacttagaaagccaatccatacccaaaactatatcatgcccccccatggataaaactttcaatgaagaaacaaatgtgcacccctgtatccaccaagaaaattcagaaacctgagcctcacactgtaaagtttcaccattagccaccttcactgtggaaacaggaattggatcagtggatagattcagtttcgaacagagatctgcattgataaaactatgagaactgcctgaatccaccaaaatgataacaacttgattcccagcaagtgctctcaattgcaaggaatgagtagcactagtaccagccactgcttgcaaagataataacatgttatcatccggtaactgttcaaaagcagtgaccacatccaaaatttcatcagttaacacatcatcagaagaagaaacttccatagtttttaactgagcaccctctgtctttccacaagtatgagcaggactatatttttcaccgcatttaaagcacagtccatgagttctcctatactctttaagctgttgagccttccacaaatcccccacaggaacttttcctttatccccaaatttcacattccccacatccttcttgaaggccactttccgattgcaaaaggcaccctcaaaagctaaagcaactcgggcagcttgatgcactgtttcaggttcttgagcagccacaaagcatctcaattcatctttcagacccatcacaaaacgggacaccaaaaataaaccactagtagcaggatcatacagccgaatatgatataccagctgcagaaacttagagcgatattcagagactgttcctgtttgagtcaacaacagcaattcttccatcttagcacgtttgatattgatctcaaactcattcagtacagcctcacgtaattgctcccaagtaggccaacccctctcctgtttccaagcctgataccaatgtgctgcatcaccaatcatattcagagaagctgctgaaaccttaaacccttctgtgatttgatacagcgcaaaataagtctcacaattatccacccaaacacaaacatctgtgccatcgaattttgggaaatccatctttggcacccaagagcgtctcccctgcacatccgaattatcacgaaccggaggttgaccagaacgaacaggtacctcaacttcaggtggtggttgtgttgatgtcgatgccgcatcctgagacaaagtcggcctcggcgtcggaagtagcggtgaagaaggtgttgccgccgccttgagagccttcgtcatcaacgcttgctcgcactggacctgccccaacgatgccatggagagatccaccttgctctgcacagcatctaagcgcgcaccctgcttctccaacttgctatcaatctgcgtcagctgttgacccaacgcatcaaccttgtccaccttcaccgtcagagcttgcaccgccgccatcagcctctcctccatatcgcccat

SEQ ID NO: 80544 - DNA, 576 bp, Oryza sativa
  Clone ID: PAT_MRT4530_80158C.1
atgacgacggcgatgacagcggggcggtttggagcggggcgacgacacgggcggcaggcgcgggcaggcgcggcagaggctgacggcggcggcgaccaggcggcgcggcagggcagcggggccgggcggcgcagatggcgcaggcgcgacgcgggcgacgaccacgaacaatttaggaggatgaatcctcgtgttcctgtcttccaaacaggtatctggaacatgctgccaatgatgctcactgtgccacttgaggagatgttaagggagcagcttctaacccagagctacccctaccctgggaaaacgaccagaggcatccaggagcccccaaggcaatcaggcctccggaggccgtcatgtctccggatgccatccagccctcgaagcccatctcgccttcggagcccatccggcctccggaggctatccggccttcggagcccgtcagacctccgaaggtcactaggcctccggaggcctcagacctccgatgccatcgggcctctgaatcccaccagacctcccaagcccggcaggtctccggggcccatcaaggactccgaagttggttag

SEQ ID NO: 80545 - DNA, 294 bp, Oryza sativa
  Clone ID: PAT_MRT4530_80159C.1
atggcgctgcggccctcgaggacgtcctcgccccgctaccggcgccgacctacgcaccaacaagaggccgcccgaatgcgtcgtcgacggcgagttccgctgcgccggtgctgtcctgtaggcgccgctgccagagctgttttcgtgcggggagccggagcggcggaggcgaagaagggcggcgcggcgagcagcggcaacaacgggcgccaccaccaccaccacaaccaggccatgcagagcgcggtggcgagggagcggcggagctgtcacgcctcatccccacaccgctag

SEQ ID NO: 80546 - DNA, 355 bp, Oryza sativa
  Clone ID: PAT_MRT4530_8015C.1
ggatcgatgaggaatgattacacaggttgcaattgaataaaggggttaccattcgcgtacacaccaactttttttgggagggaggtgagttttcatttcacaaaggttaggactgaatttagctgcatatcaatttgcagaaacatatgtgggagggatttctgcattctcaattgccccccttggcgccatcttctcataaaaccatatgatgggggcggcacttgaagcccccgcagattatcagccataggaagagaatcaacgccgcatcagtaccaccgaccatcaacttaaacctcaagttctgaagccacatcttacgcctgaactctattgcatgcctgtggaaact

SEQ ID NO: 80547 - DNA, 124 bp, Oryza sativa
  Clone ID: PAT_MRT4530_80160C.1
catccattaaaaacaatttgattaaatatacacacatcaaaggagctcatgaattcaatgatccgaacgtttcataaaaggactgaattacagatctacaacacgaacccgtttctagacatcg

SEQ ID NO: 80548 - DNA, 444 bp, Oryza sativa
  Clone ID: PAT_MRT4530_80161C.1
atgggcaagaacgcgagccgcctcgccgtcgccgccgtcgtcgtgttcgcgctgctgctgtcgctccggcagctggaggcggccgacgacgtctccgtgtcgtgctccgacgtggtcgccgacgtgacgccgtgcctggggttcctgcagggagacgacgaccacccctccggcgagtgctgcgacggcctgtccggcctggtggccgccgcggccaccacggaggaccggcaggcggcgtgcgagtgcctcaagtcggccgtctccggccagttcaccgccgtcgaggccgcgccggcgagggacctgccggcggactgcggcctctccctgccctacaccttctcgccggacgtcgactgctcccagagtcaaggacacaatcatgcattcaagcagccaaataattcgtctactggaccacaattgcctcccagaaattaa

SEQ ID NO: 80549 - DNA, 2133 bp, Oryza sativa
  Clone ID: PAT_MRT4530_80162C.1
atggcgatggccggcgccgccgggcggtgcctcatgctgacccgcccgtcccctctcctccgcctccgcctcctccgcgccgcgctcgctaccaccacgaccaccaccacggcggcgggggcatccgccgtcaccgcgccgaccgagcccgagaccacggcgagggaggccccgtcccgccacgagctcctcctcgagcgcctccggcagcgccacctcaagggcgtgcccgctgctaccccgaggccggcgcagcgggagaaggggaggggcggcggcggcggtggcgcgcaggagctgcagcagaagaggagggtcgaggtggtggatagtttcgaggagctcgggctcggggaggaggtgatggccgcgctcggggagatgggtatctccaagcccaccgagatccagtgcgttggtgtgcccgccgtgctggctggcaccagtgttgtgcttggctcgcacaccggttccgggaagacgctcgcctacctgctcccgcttgttcagattgaaattgagaatacataccgattactacctataaataatggtgtacctgctaatcaaaagctactgcgtcgtgatgaagcaatgttgggaatgtcaatgaaaccaaggaggccaagagcagtagttctctgccccacaagggagctgactgagcaggtcttccgtgtcgcaaagtccataagccatcacgcacgttttcggtcaacaatggttagtggaggcagccgtataaggccccaggaagattctctgaacatgcctgtagacatggttgttgggactcctgggaggattcttgatcatatcaaggatggaaacatggtttatggtgatatcaagtatctggtccttgatgaggcagatacgatgtttgatcaaggttttggaccagacattaggaagtttcttgctcctttgaagaatcgtgctgcaaaacctggcgatcaggggttccaaactgtattagttactgctactatgaccaaggcagtacaaaagctgatagatgaggaatttgaagtagctgaaggcctccaaagtcaatcagttgatcacagttccttcctagttcttaatatggttcttgagccaagtttagcaaagggaaataaagttatggtgttctgcaatactttgaattcaagtcgtgccgtggaccattttctgactgaaaatcagatatctactgtaaactaccatggggaagttcctgctgaagagagggttgagaacctgaacaagttccggaatgaagaaggggattgcccaacactggtctgcactgacctagcagctcgaggcctagacttggatgttgaccatgtcatcatgtttgacttcccatcaaactctattgattacctccatagaactggaagaacagcacgcatgggagccaaagggaaagttacaagccttgttgcgaagaaagatgtgactttagcaacacggatagaagaggctatgaagaaaaacgagagcttagaggcactgacgactaataacgtcagaagggcggccgtcaacccacagtacactagtaccaaaggacgaccaagcgctctaaaggtagtaaaccagaagggtagaaggggagttgcactgcagaccaagtcatcaaggattgtcaaggacacaacttcatccagaaggcgctcgccaattaggagtcaaccaaggtcgaaatcgacatcttcaggaaaagcaaaaccagtgcgatctgctaagccgagcaagagtagcagccctagccccaaggttgcaaagagccgaccgagaccagagggtcggaaaggggatgctctgaacaagctgggtagtaagctcagtgtggttggattcagaggccgcagctcagggaaatcggcacaagcatcatagtgaggcctcgagaattttgggtagtgaaattcaactttttgtaaatatctgtgacttgtttcggccgttttccctgcaggcttgcaagaccctaattgagacgccccttctaaaagaaaacgtagaacactgaaatcttaccacagtacgtacatctatctgtttacattgttgaacaataatatcatctgtttcactgtccatgaataaacacgaagtgcataaaaaaaaaaaaaaaaa

SEQ ID NO: 80550 - DNA, 529 bp, Oryza sativa
  Clone ID: PAT_MRT4530_80163C.1
ggaaaaaaacagggggggctttttattggggcttcataaactaaaaacaaaaccgccacaaagttaacatacgggggggatttaatttttttttgttccccctatactatttaattagaacataacttgggggcccggttccccgactcattggaaaagccaagggaggccggggggggatttctaggagggaaggccccgagctcttcccccctattattctaaaggcttggggctggccccctggattggggggaggctttagggatcacatccacgggcagggcacggaatatggggttctcccctgcaggggggcccaccagggggttggcatgggcctggaaggaaagggatgggaatccttaaggcccgggttttttaaaaacaacggagggggggggaaggatcagcattggcccgggacgtaaaacgcccttgaataccggctttccaagggtcctaacgcccggaaccggagcaggccctggaacgatttccaccgggcttggggcattaacgttccaaa

SEQ ID NO: 80551 - DNA, 278 bp, Oryza sativa
  Clone ID: PAT_MRT4530_80164C.1
acagatgtgggactaaacccaactcactttatttatatgaagaattatagaagcaccaggtttaacagataggtacatactttaaatcaccattcgactcaaaccaacacagagcagctccaaattgtacactaacaaccacaacaaacaaagacttcaacagatactccaagaaatttcaatagagttgtagaaatttatagtggattcgctgactccagctctctagcagctagcacacaaactgcacctttcatagcacaccatctgcaattcat

SEQ ID NO: 80552 - DNA, 3225 bp, Oryza sativa
  Clone ID: PAT_MRT4530_80165C.1
atggcacggggctccgcaccgctcgatggtagcgtgctgctgccttcccgcatcgtgagcgagaggcaggctgggctgccgcgccgattcatgccggaatctgccaccggccgggaggtggtcgcgctgggcgagggacgcccggcgccacactacccagggcggtccgtcttcttcctctctttcgcaatggctaggctggtcccgccattctctaattttttcatggatattctggagttttatgatctccagatggcgcacctcacccccaacgcgataatgacattggccatcttcgcgcacctgtgcgagatgtttatcggggtgcgcccatctctccggctgttccggtggttcttcaccgtgcagccggtgtcgccgccgacgatagtcggtggctgctacttccagccgcgggggcaggtgctgaaccgctacattccctgcgtcctccgcaaaaagtgggacgactggaagagcgattggttctacacccccctcgccgacgaagcgcgcctccgacttccgagccagcctccagcgcaggcctccagctggcgggcggcggtagatctgggagacggctacgacgccgttcgtgaccgcttggcgggtctgcgatcccaggggctcacgggggccatggtgttcggcgactatcttcgtcgccggatcgcgccgctccagcggcgcgcccggggcgcctgggagtacacctggcccgaggactccatgaggacccaccaggggcgcacatgggactgggaccctgaggacttcaggatggtggtccaacgggtgctaaatctcagctccgtggaggcatccctcatcccccaagaggtcctccccctctgctgcgatccagagcgcgccaacatcctgaccatcatgcaggaggtcggggcgtcgggggagcgggccctccgaggccacgatggcgcgggcgggagccgcaggggggaacaatctaccccaggagggggtcgtgcttctgggccccgcgacgggggcccggggggcagccgcccggccgacgcccgggggaagaggaagcaggagggtaccccttccccatctcctccccgagggggcggggcggtgcgtgccagcagcaggcgcccggagggtgccgtgccgacgtcgcagcccgagggggagcgaaagaagaaacggctctgcaagatggggggaccgagccatgccgggggaacctcatctcgtctccgaggtggtcgtttagccgacctccccgcaggttcgtccctgcgctcgccgcggccgtattcattctcccatctcccaaggcgagttttcactcacccgtttctttttgtcttctggtttttcttctgcctcagcgagatcccgtcgcgcccctcccgccattccaagtccggccggtctgaggccgaggagacggcgaccgcggaagcccggaggcgggaagctgaccggcgagaagccgcggaccgcctccgggaagccgaggaggccgcccaggacgccgtccgggttcgccaggctgaggaggccgctcgggaggaggccagacttcgccgggccggggagtccgtccgggaggcagaggcggcgcgcgcacgccaggcggcctgccaagcccccgacccgactccgcccgaggcgacgacgacttccgaggccacccacgacgaggccgcgggcgcgccgctcgggcccgacccctcgggcgacgcttgggacgagccagcttcagggggcgcccccgactccggcacgtcgattggcgggccgagccgcgcggcacccacaccgaggcggctctcccctctgccttccgctgccccactgagcgcggagcccctcctgcaggccttggccgccacgaacaccacggtgctggacgggttaagtgcccagatggaggtcctgcaggcagagcgggcagagctcgacgcggcgtgggcgcgcgtcgaggaggggcggcgctcggtggaggccatggtggaggcgggccgcaaggcacaccgccggcacacctcagagctcgaggcccgtcgtagggacctggcggagatcgccagggaggtggaggaggagcgggagactgccctcatcgccaccaccgtgctcaacgaggcgcgggacgacctccgcctccaatacgggagccgggcggcggagctagagaagaagctcgacgccgctcggggagtccttgacgccgctgctgcacgggaacggcgggcggcggagaacgaggcagcgtcccggcagcgcgaagaggcccttgaggctcgcgccacggcgctggaggagcgcgcccgcgcgaaggagagggacatggcggaccgcgaggccgccgtcgccatccgggaggcaacactggcggcgcacgaggccgcctgcgctgaagaggaatctgcactccgcctccgcgaggacacgctcaccgagcgggggcgagctctcgaggaggccgaggccgcggcgcagcggctggcggatagcctgttcctccgcgaggcagcgcgggaggagcaggcgcgccgcaatctggaaggcgcccgcgccaagagggccgcactggatcagcgggtcgctgagctcgaggctcgggcgaaggagctggatgcgagagcgcatagcggcggggcggccgtgggcgacggcgacctagccgcccgcctcgcagccgccgaacacagcatcgccgagctgcagggcgcgctggactcgtccgccggggaggtcgaggccctccgcttggcgggcgaggtagggcccggcatgcttcgggacgccgtctcccgtctagaccgcgccgggcggcaagcgggcctctggggcgggcggtgcgcgaagtatgccgccaaccaggggggcctcgcccagcgcctctcagagatggccgggaccctccagcggctccccgaggagctcgaggagacgatcaagtcatcctcgagggacctcgcccggggggcggtggagctcgtactggcaagctaccaggccagggaccctgacttctccccgtgggcggcgctggaagagttccctcccggaaccgaggacggcgcgcgcgcacaggtccgggacgccgccaaccacattgtccacagcttcgacggtacggcccctcgactcgcgttcgcgcttgactccgacgaggagggcggtgacgacggtgcgggcgatggcgacgacgaggctggcgacccgggcgcgtcggagtga

SEQ ID NO: 80553 - DNA, 152 bp, Oryza sativa
  Clone ID: PAT_MRT4530_80166C.1
cgtggaacgaaggatacgatccttatctgttgtaatgcgcaacatagaactatcttaattcagtatatccacgagtgctttcaaatatggagtcgggtgtatatgcagctaggcctggggattctattcttaccgcttatcgtggcacacat

SEQ ID NO: 80554 - DNA, 2991 bp, Oryza sativa
  Clone ID: PAT_MRT4530_80167C.1
atggcacggggctccgcaccgctcgacggtagcgtgctgccgccttcccgcatcgtgagcgagaggcaggccgggctgccgcgccgattcatgccggaatctgccaccggccgggaggtggtcgcgctgggtgagggacgcccggcgccacactacccggggcggtccgtcttcttcctctctttcgcaatggcaggactggtcccaccattctcttctttcttcatggatgttctggaactttacgatctccagatggcgcacctcacccccaacgcggtaatgacgttggccatcttcgcgcacctgtgcgagatgttcatcggggtgcgcccatctctccggctgttccggtggttcttcaccgtacagccggtgtcgccgccgtcggtagtcggtggctgctacttccagccgcgggggccggtgctgaaccgctacattccctgcgtcctccgcaagaagtgggacgactggaagagcgactggttctacacccccctcgccgatgaaacgcgcctccgacttccgagccagcccccggcgcaggcctccagctggcgggcgccggtagatctgggagacggctacgacgccgttcttgaccgcctggcaggtctgcgatcccaggggctcacgagggccatggtgtacggcgactaccttcatcgccagatcgcgccgctccagcggcgcgccagaggcgcctgggagtacaccgggtccgaggactacatgaggacccaccaggggggcagatgggactgggcccctgaggacttcaagatggtggtccaacgggtgctgaatctcagctccgtggaggcatccctcatcccccaaggagtcctccccctctgcagcgatccagatcgcgccaacatcctgaccatcatccaccctgccgacgcccgggggaagaggaagcaggagggtaccccttccccatctcctccccgagggggcggggcggcgcgtgccagcagcaggcgcctggatggtgccgtgccgacgtcgcagcccgagggggagcgaaagaagaagcggcgccgcaagatgggggagaccgaaccacgccggggaaaccttatctctcccccaaggtggtcgtttagccgacctcctcgcagtgagatcccgtcgcgctcctcccgtcattccaagtccggacagtccgaggccgaggagacggcgaccgcggaggcccggaggcgggaggctgaccggcgagaagccgcagaccgcctccgggaagccgaggaagctgcccaggaggccgtccgggttcgccaggctgaggaagccgctcgggaggaggccaaactccgccgggccgaggagtccgttcgggaggcggaggtggcgcgtgcacgccaagcggcctgccaaacccccgacccgactccgcccgaggcgacgatgacttccgaggccacccacgatgaggtcgcgggcgcaccgctcgggcccgacccctcgggcgacgtttgggacgagccagcttcgggggtcgcccctgggtccggcacgtcgatcggcgggccgagccgcgcggcgcccataccgaggcggctctcccctctgccttccgctgccccactgaacgcggagcccctcctgcaggccttagccgccgcgaacaccacggtgctggacgagctaggtgcccagatggaggtcctgctagcagagcggacggagctcgacgcggcgtgggcgcgcgtcgaggaggggcggcgctcggtggaagccatggtggaggcgggccgcaaggcacaccgccggcacgcctcagagctcgaggcccgtcggagggagctggcggagatcgccagggaggtggaggaggagcgggagactgccctcatcgccaccgccgtgctcaacgaggcgcgggacgatctccgcctccaatacgggagccgggcggcggagctagagaagaaactcgacgccgcccggggagtccttgacgccgccgctgcacgggaacggcgggcggcggagaacgaggcggtgtcccggcggcgcgaagaggcccttgaggctcgtgccaaggcgctggaagagcgcgcccgcgcgagggagagggacctggcggaccgcgaggccgccgtcgccatccgggaggcaacgctggcggcgcacgaggccgcctgcgccgaagaggagtccacactccgcctccgcgaggacgcgctcaccgagcgggagcgagctctcggggaggccgaggccgcggcgcagcggctggcggacagcctgtccctccgcgaggcagcgcgggaggagcaggcgcgccgtaatctggaaggcgcccgcgccgagagggccgcactggatcagcgggccactgagctcgaggcgcgggcgaaggagctggacgcgagggcgcgcagcggcggggcggccgcgggcgacggcgacctagccgcccgcctcgcagctgccgaacacaccatcgccgatctgcagggcgtgttggactcgtccgccggggaggtcgaggccctccgcttggcaggcgaggtagggcccggcatgcttcgggacgccgtctcccgtctagaccgcgccgggcggcaggcgggcctctggggcgggcggactgcgaagtatgccgccaaccaggggggcctcgcccagcgcctctcagagatggccgggaccctccagcggctccccgaggagctcgaggagacgatcaagtcatcctcgagggacctcgcccggggggcggtggagctcgtactggcaagctaccaggccagggacccggacttctccccgtgggcagcgctggacgagtttcctcccgggaccgaggacgatgcgcgcgcgcaggtccgggacgctgccgaccacatcgtccacagcttcgagggtacggccccccggctcgcgttcgccctcgactccgacgaagagggcggtgacggcggtgcgggcgacagcggcgatgaggccggcgacccgggcgcgtcggaatga

SEQ ID NO: 80555 - DNA, 169 bp, Oryza sativa
  Clone ID: PAT_MRT4530_80168C.1
tccgtaagaatggggaaatgccaccaagaccgaagcacaaggcctagcgctagccctgtaccgcgccgacgcggaggaggcacaaggcagagcaataactgaaagaaggcgaaaacgaactgcaaagagacaacgaggagaaagaaaagcttcaagagaggatggagac

SEQ ID NO: 80556 - DNA, 143 bp, Oryza sativa
  Clone ID: PAT_MRT4530_80169C.1
atgtctgagccatcattgctcgcatcagcgatcattgggcttgaaaacgccgcgactcacgcggtcacgccgcgtccgcgcgccaacaaccagcggaggctgcatctactcgcgcccaggaaaacaacaattatcacgaagct

SEQ ID NO: 80557 - DNA, 579 bp, Oryza sativa
  Clone ID: PAT_MRT4530_8016C.1
atggtggccggacctcccgtgccggtttccttccccaccggccgctctctcccccttccaacctatttaaaccctgcccgcgcctccctcgcccgtttccgccccttgccgcaccgtctccccgccggaatcgagctcgcgccgttgccctctctctcctccatcgccgacgacctccggccggccttctccgctcgccgggaccgtctcccgcctcggcgtcgcctcctccggctttgccgcaccgccgtcgaccccgtccaccccctcgccgagtccgccgaccgccggaacaccgtcgaccccgtcgacccgagacgcgccaccgccttcctccgctccggccgcctttttcgtcgtcgccgtcaacctagggtgagccgtggaccgccgcctcttttcccccttcccttcccctctcttggccgccgctccgccgtgcctatggccgccgccggcgaccataggggcgcgggcggcgccacctgccaaccgcgccgagtggccgccttcgggcgcgcagagtggccgccgcgtgggggccggctgtcagccgcccgcgccctcgggtgcggctga

SEQ ID NO: 80558 - DNA, 3621 bp, Oryza sativa
  Clone ID: PAT_MRT4530_80170C.1
atgggttccgtctccggcatcgacgacttcgtcttccctcccggacaggcgttccggttcggcagcctcgacttcatcaccaacgacttcggcaagatttctctcctcgactcggattcgaaccagtcgggaagaggtcagatctccgccccgttcggtaccccgaactcggccgaggtctaccccaagatcatctctgccgagttggcttcaaaccactcgtacgagatccaatctactcggacacgaccagatcaagatgatgggtcctatcccccaatcctgatgagacttcccgatgatctggctgctgtcttcacgaccaaggcatctcccacccgaagacctagacgggatccggcttcggcttcgatccaatctagttctagggaggtaggcgttatatttcagcctctcgggacggtctcgacggaagaattggattgctacctcagctcccccggcgtcagttctcgaccaacggagatcctcgagtacgacgacttcggctatcgctacgactacgcgatcaccctcctcgacaccctcctcaaggaagacgcgctcaatcaggctgatcacgtcgtcaacatcttaaaccagacaaagaccatgatcgccgcctcggtcccggctaactccgcaagcacccgcacgccgactggcagccgagttccccctcttcgatctcaagactatcaccaaccaagcctcagcgtcatcggcgcgggatccagtcgcaggagcaggggtcacgacgagcgatctgtccattcgcctcccgaacgacacagggagcgtcgagttgaacgacctcgtaggcaccccatcgatcttcgcgataccatcaaccagcgccgcgcggcaagaggctgtgctcccaaccattcaccagaccgctacgacgacgacgtggatggagttgctgccttcacgactgacctgcgtcgagtggattggccagccggcttcaagccgagtggaatcgagaagtatgacggcaccactaacccggagtcttggctcaccgtctacggtctcgcaatccgcgcagcaggaggagacgatctctacaacgttgtccagaagtccggagaatcccttcgagattacatccggcgtttttccgagcaacgcaacaagatctccgacatcaccgacgacgtcatcatcgccgccttcaccaagggcattcgccacgacgacctagtcggcaagttcgggcgcaagcctcccaggacggtcaagcagatgttcgagaaagccaacgagtatgccaaagccgaagatgctattaccgcgtccaagcagtcgggcaccacttggaagctgaagaaaaatatgccgaacacaggggggagtggaagtaccaatcacaaggatcgcaagcgtaagcccgaggaacttgtggcaaccactacaccatcctcccgacaacgttcgcgcgtcaatacttttgataagatcatgaactcccaatatccgcatcatccaaattccaatcacgcggccaaagattgcttcgtctacaaacagtttgcagagcaatacgccaagaacgcacgcaagaccgctgacggagatcaaagcacgtcaaagaagaaggatgatgaagacgatgccccgactggttttcaagaccatcgcaaggaactaaaccacatctttggcggacccctggcttatgaatccaagagaaagcaaaagttgactgaacgggagatcaatgctgtccagcccgacacgccccaatatcttcggtggtcagagacgacaatcaagtttgaccgctcggatcatcctgaccgagtggtccacccggggcggtaccccctggtactagaccctgtggttcgcaacgtcaagcttcgcagatccctcatcgatggtggcagtgcgctcagcatccttttcgccaagactctggacaacatgcagatccctcgcacggaattaaaaccgagtaatgcgccctttcacggagtcatcccagggctatctgctacaccacttggccagatcactcttccggttactttcggcactcgggagaacttccgcacagaaaacgtttgttttgaagttgctgatttcgagacagcgtctcatgccatactcggacgcccggcgttagccaagtttatggctgtcccgcactatacctacatgatgatgaagatgcctggtattcccagagaggtgattgagcactctttacatgttaaggaagacgctaaacctatcaagcaacaactccaccgtttcgcacaggataggaaggatgcgatcaaggaagaattgactaagctgttagcagcgggcttcatcaaagaagtccttcatcccgactggctggctaacccagtcctggttcggaagaagacggggcaatggcgcatgtgtgtcgattataccgacctcaacaagtctagtcccaaagacccttttgggttacctcgcattgaccagacttcattcattacgcccttcggggcctactgctacatcaccatgccctttggattaaagaacgcaggagcaacttatcaacgcatgatccagagatgtttttcaactcagatcggccgcaatgatgaagcttatgtggatgatgtaatcgtgaagaccaaacagaaggatgatttgatcgcggatctagaagagacctttgcaagcatccgcgccttcaggatgaaactaaaccctaaaaagtgcatcttcggagtaccgtcagggaagctgcttggatttatggtgtcccatagaggcatacaagccaacccggagaaaatcaacgccatcctcaacatgaaaccgccgagctcacaaaaagatgtccaaaagctgactggttgcatggcggcgcttagcaggatcgcgatctccttgggcattcggcgtctgatagttcgtggagattctcagttggttgttgatcaagtcatgaaagagtggtcctgccttgatgataacatgaccgcttatcggcaggaggtacgtaagttggaagacaaattcgatagacttgaactcactcatgttcttcggcacaataacgaggcagccgacagactggctaattttggttcaaaacgagaagtagctccttccgacgtgttcgttgaacatctttacgaaccaaccgtgccaaggaaagaaacaattgaagccacggatactcaagacggttgtcaatttttcgcccgacaaactcatttaccagctcaggagttgcaaaccatcctgttgtcttggccgtttgcggtttgggggcttgacatggtcggcccattcaaaaaggcagtcggtggttatactcacctctttgtggctgttgacaaattttccaagtggattgaagctaaaccggtcattacaatcatggcagacaaggctagagatttcttcatcaacattgtgcaccggtttggggtacctaatcgtatcatcactgataatggcacttaattcaccggcggagtatttaaagacttttgtgaagacttcggcattaaaatttgttatgcctccgtagcgcaccccatgagcaatggacaggtcgaacgtgccaatggtatggtacttcaaggaataaaagcgcgagttttcgaccgactgcat

SEQ ID NO: 80559 - DNA, 3165 bp, Oryza sativa
  Clone ID: PAT_MRT4530_80171C.1
atggcacggggctccgctctgctcgacggtagcgtactaccgccttcccgcattgtgagcgagaggcaggctgggctgccgggccgcttcatgccggaatccgccaccggccgtgagatagtaatgctgggtgagggacgcccggcgccagactacccggggcggtccgtcttctttctccccttcgcaatggccgggttggttcctcctttttcttctttctttatggatgttctggagttctacgatctccagatggcgcacctcacccccaacgcagtgatgactttggccatcttcgcgcacctgtgcgagatgttcattggggtgcgcccatctcttcggctgttccggtggttcttcaccgtgcagtcggtgtcgccgccgtcggtggtcggtggttgctacttccagccgcgggggccggtgttgaaccgctacatcccctgcgccctccgcaagaagtgggacgattggaagagcgactggttctacaccccccttgccaacgaagcgcgcctccgactcccaagccagcccccggctccggtctccagctggcgggcgccagtagatctgggggatgactatgacgccgtcctcgaccgcctggcgggcctgcgatctcaggggctcacaggggccatggtgtacggcgactacctccgtcgccggattgcgccgcttcagcggcgcgcccggagcgcatgggagtacaccgggtccgaggactacatgaggacccaccggggagtcagacgggattgggctcccgatgacttcaagatcgtggtccaaagggtgctgaatctcagctccgtggaggcgtctcttattcctcaaggactcctccccctctgctgcgatccagaccgcgcctccattctgaccatcatgatgggggtcggggcctcagaggaggtggctcctaagggccacgacggcgccggcgggagccgccaggaagaatcaaccccaggagggggccgtgcttctgggccccgcgtcgggggctcggggagcaaccgccctaccgacgcccgggggaagaggaaactgggaggaacacctcccccatctcctccccgagggggcggggcggtgcgtgccagcagcaggcgcccggagggggccgcgccaacctcgcagcccgagggggagcgcaagaagaagcggctgcgcaagatgggggagacagaaccatcccggggaaacctaatttcccctccaaggtggtcatttaaccgaccccctcgcagtgatgtcccgtcgcgttcctcccgccatcccaagtccggccaatccgaagccgaagatccggcggccgcagaggaacggaggcgagaatctgaccggcgagaggccgcagatcgccttcgggaagctgaagaggccgcccgggaaaccgcccgggctcgccaagctgaagaagccgctcgggaggaggccgcccgggctcgtcaggctgaagaagtcacccgggaggaaaccgcccgggctcgccaggcagaggcgatggcgtctttcgaggcggtttacgacaagaccgccggcgcgtcgctcgggcccactccctcgggtgacgctcaggcgacaacctccggggcggcttgcgacaaggccgcgggcgcatcgcctgggcccgctccctcgggcgacgcccaggaccaaacgggtccgggggacatccccgagctcagtgcgtcttctggcgggccgagccgcgtcgcattttctccaaggcggctcttctcctcgtcttctgccaccccgctgagtgccgagccccttctgcaagccttggccgccgcaaacacagcggtgctagatggattcagcgcccaggtggaggccttgcgagcggaacgagcggagctcgaggccgcatgggcgcgcgtcgaggaggggcggcgctcggtggacgccatggtggaggtgggccgtaaggctcaccgccgccacatctcggagcttgaagcccgcaaggcggcgctggcggagatcgcccgagaggtggaggaggagcgagaggccgccctcgtcgccaccaccgcgatgattgaggcgcaggactccctccgccttcaacacgggagctgggaggcggagctaaagaaaaagctcgacgccgcccagggggtcctcgacgccgccgctgcccgagagcagcgagcaacggaggctgaagcggcgtcccggcggcgcgaagaggcccttgaagcccgtgccatggcgctggaggatcatgccggcgccgtggagaccagcttggcggaccgcgaggccgccgccgctatccgggaggcgacgctggcggcgcacgaggccgcctgcgccgaagaggagtccgcgctccggctccgcgaggacgcgcttgctgagcgggagcgagctcttgaggagtccgaggccgcgacacaacggctggcggacagcctgtccctccgcgaggcagcgcaggaggagcaggcgcgccgcaatctggaatgcatccgcgccgagagagccgcgctggagcagcaggctgctaacctcgagacacgagaaaaggagctggatgcgaggaagcgcagcggcggggcggctacgggcgaaagcgacttagtcgcccgcctcgcagctgccgaacacaacgtcgcggacatgcagcgcgccctggactcatccaccggggaagccgaggccctccgcttgtcgggtgagatagggcccggcatgctttgggatgcagtctcccggctggatcgcgccggtcgggaagcgggcctctggaaaggccagacaatttcgcgctccaccaatctggaaggcctcgccccgcaccttaggaggatggcctgggctgtccaacaactccccgaggagctcgagaagaccatcaagtcatcctcgagggacctcgcccaaggagcggtggaactcgtgttagcgagttaccaggccagggaccccggcttctccccatggatggcgctggaggagttccctcccgggaccgaggacgatgcgcgcgcgcgggtccgggatgccgccaaccacatcgtccaaagcttcgaggggtcggcccctcggctcgcgttcgcccccagctccgacgaggagggcgacgccagcggcgaggacgacggtggcgacgaggccagcgacccgggcgcattggaatga

SEQ ID NO: 80560 - DNA, 2886 bp, Oryza sativa
  Clone ID: PAT_MRT4530_80172C.1
atggcagggctggttccgccattttcttctttcttcatggatgtcctggagttctacgatctccagatggcgcaccttacccccaacgcagtgatgacattgggcatcttcgcacacctgtgcgagatgttcattggggtgcgcccatctcttcggctgttccggtggttcttcaccgtgcagtcggtatcgccaccgtcggtggtcggcggctgctatttcctgccgcgggggccggtgctgaaccgctacatcccctgcgtcctccgcaagaagtgggatgactggaagagcgactggttctacacccccctcgccgacgaagcgcgcctccgacttccgagccaacccccggcgcaggcctccagctggcgggcgccggtagatctgggggatggctatgacgccgtcctcgaccgcctcgcgggcctgcgatcccaggggctcaccggggccatggtgtacggcgactacctccgtcgtcggattgcgccgctccagcggcgcgctcggggcgcctgggagtacaccgggtccgaagactacatgcggacccaccagggagtcagatgggattgggctcccgaggacttcaagatactggtccaacgggtgctaaatctcaactccgttgaggcgtccctcatcccccacggtatcctccccctctgcagcgatccagatcgcgcctccatcttgaccattatgacggcggtcggggcctcagaggagcaggctcctaagggccatgacggcgcaggcgggagccgccgaggggatcaatctacccctggagggggtcgtgcttctgggccccgcgtcgggggctcggggagcaaccgccctaccgacgcccgggggaagaggaagctgggaggaacacctcccccatctcctccccgagggggcggggcggtgcgtgccagcagcaggcgcccggagggggccgcgccaacatcgcagcccgagggggagcgcaagaagaagcggctgcgcaagatgggggagacagaaccatcccggggaaacctaatttcccctccaaggtggtcatttaaccgaccccctcgcagtgatatcccatcgcgttcctcccaccatcccaagtccggccagtccgaggccgaagatcctgcggccgcagaggcacggaggcgggaatctgaccggcgagaggccgcagaccgcctacgggaagctgaagaggccgcccgggaggccgcccgggctcgccaggctgaggataccgctcgggaggaggccgcccgggctcgccaagccgaagaagccgctcgggaggaggccgcccgggcgacagcttctgggatggctcgcgacgaggccgcgggcgcatcgcttgggcccactccttcgggcgacgcccaggaccaaacaggtccgggggacatccccgaggccggcacgtccattggcgggccgagccgcgcggcatcttctccaaggcagctctttcccatgccttccgtcgccccgctgagcgcagagccccttctgcaggcccttgccgccgcaaacaccgcggtgttggatgggctaagtgcccaggtggaggccctgcaggcggagcgtgcggagctcgacgccgcatgggcgcgtgtcgaggaggggcggcactcggtggaggccatggtggaagcgggccgcaaggcacaccgccggcacgtctcagacctcgaggcccgcaagacggcactggcggagatcgctcgagaggtggaggaggagcggggggctgccctcatcgccaccacagtgatgaacgaggcgcaggactccctccgccttcagcacgggaactgggaggcggagctgaagaaaaagctcgacgccgcccagggggtccttgatgccgccgctgcccgagagcagcgagcagcggagaccgaagcggcgctccggcggcgtgaagaggccctcgaggcgcgcgccatggcgctggaggagcgcgcctgcgtcgcggagaaggacctggcggaccacgaggccgccgtcgcctcccgggaggcaacgctggtggcgcacgagtcggcctgcgccgaagaggagtccgcactccgcctccgcgaggacgcgcttgccgagcgggagcgagctctcgaagaggccgaggccgaggcgcaacggttggcggactccctgtccctccgcgaagcagcgctgacggagcaggcccgccgcaatttggaatccgtccgcgccgagagagccgcgctggagcagcgggctgccgacctcgaggcgcgggaaaaggagctggacgcgagggcgcgcatcggcggggcggctgcgggcgaaagcgacttagccgcccgcctcgcagatgccgaacacaccgtcgccgacatgcagcgcgcgctagactcatccgccggggaagccgaggccctccgtttggcgggcgagatagggcccggcatgctgtgggatgcagtctcccgcctggatcgcgccggtcggcaggcgggcctctggaaagggcagacaataaagcctgccgccaacctgggaggccttgcccagcgcctctcgaagatggccggggctctccagcagctccccgaggagctcgagaagaccatcaagtcatcctcgagggacctcgcccaaggagcggtggagctcgtcctggcgagctaccaggccagggaccccaacttctctccgtggatggcgctggacgagttcccacctgggactgaagacagcgcgcgcgcgcaggtccgggatgccgccgaccacatcgtccacagcttcgagggctcggcccctcagctcgcgttcgcccccaactccgacgaggagggcgatgccagcggtgcagacgacgtggaagacgaggccggcgacccgggcgcatcggaatga

SEQ ID NO: 80561 - DNA, 1158 bp, Oryza sativa
  Clone ID: PAT_MRT4530_80173C.1
ttaagaaataccaacagcgcgcgcagggtggagcagcgtggcggccccgcgggtgcacgcacagggaggcgcggcggccagcggccccgcagccagcgcgcagcggagaggagcggcggctctgtcgaccagcaagccagcgagcagggaagcttggcagcgggatggcgcagcgtacaggaaggcagtgaatctggcgcagcgccacgggaaggcggcggcgaaggctgtggcgaggcagctcctgatgttaacagaatatgggtaaactgaagcttcgtttgaaaaaagtaatggcaaaaatgcaaaccctcttgtcagtagatcgaaatcgatgccccgaaatttgggaataattccatctccctccaaatcttcctcgatttgttctttgactttgagtttatctctaaattctccaccacctccagtagtcccagcaccagcaccagctccagctccagctccagctccttcatcttcgccagttgcagctcctgcacccgcacccgctcttgcaccagcttcagcctccactccagcgccagttctcaccttcgctctagcctcagctttccgaggcgtagctagtggcagcagtagatggttaccttctacacccagtggcaacaacaactctagttcagaggcagccaatggcaacaccaacctgatggactccaggagtcgcttagaggagcccttcagatggtcaacactaggactggcagtcgtgtagcaggagatggcagcaatagtgaggaacagactgctcatgtcaatggtgtgccaggcaacggcccacctccaccactggagaatccaactatcgctcaagtgctgcatgagttcaaccgcctcgcgcgctatgctctgaaggatgtgcgtactgatgccaagcggaaggagaagtttctttctggccttaatgatgaactgaccaaccagctgatctctagggattatgctaactttgagaagctctaacgggcctaaaccctcacctttgacgggtttagccttgagggcgctgacgcggagagaggaggcggcacggtgaccggtggtggcggcggcgagcagcctgctgctgccaccggcggcggcggcgccgtagaggaggaagggcgaggcggcgtcgaggagggagggcgccat

SEQ ID NO: 80562 - DNA, 2994 bp, Oryza sativa
  Clone ID: PAT_MRT4530_80174C.1
atggcacggggctccgcaccgctcgacggtagcgtgctgccgccttcccgcatcgtgagcgagaggcaggccgggatgccgcgccgattcatgccggaatctgcctccggtcgggaggtggtcgagctgggcgagggacgcccggcgccacactacccggggcggtccgtcttcttcctctcttttgcaatggcagggctggtcccgccattctcttctttcttcatggatgttctggagttttatgatctccaaatggcgcacctcacccccaacgcggtaatgacgttgtccatcttcgcacacctgtgcgagatgtttatcggggtgcgcccatctcttcagctgttccggtggttcttcaccgcacagccggtgtcgccgccgtcggtagtcggtggctgctacttccagccacgggggccggtgctgagccgctacattccctgcgtcctccgcaagaagtgggacgactggaagagcgactggttctacacccccctcgccgacgaagcgcgccttcgacttccgagccagcccccggcgcaggcctccagctggcgggcgccggtagatctgggagacggctacgacgccgttcttgaccgcctggctggtctgcgatcccaggggctcacaggggccatggtgtacggcgactaccttcgtcgccggatcgcgccgctccagcggcgcgctcggggcgcctgggagtacaccgggtccgaggactacatgaggacccaccaggggcacaaatgggactgggtccctgaggacctcaggatggtggtccaacgggtgctgaatctcagctccgtggaggcatcccttatcccccaaggtgtcctccccctctgcagcgatccagatcgcgccaacatcctgaccatcatgcaggcggtcggggcgtcaggggagcgggcccctcgaggccacgatggcgcgggcgggagccgcaggggggaacaatctaccccaggagggggtcgtgcttctgggccccgcgacgggggcccggggggcagccaccctaccgacgcccgggggaagaggaagcaggagagtaccccttccccatctcctccccgagggggcggggcggtgcgtgccagcagcaggtgcccggagggtgccgtgccgacgtcgcagcccgagggggagcggaagaagaaacggctccgcaagatggggggaccgagccatgccgggggaacctcatctcgcccccgaggtggtcgtttagccgccctcctcgcaggttcgtccccgcgccaattgcggccgtactcattctcccatctcccaaggcgagttttcactcacccgtttctttttgtcttctggtttttcttctgcctcagcgagatcccgtcgcgccccctccgccattccaagtccggccggtctgaggccgaggagacggtgacagcggaggcccggaggcgggaagctgaccggcgagaagccgcggaccgcctccgggaagccgaggaagctgcccaggaggccgtccgggttctccaggctgaggaagccgctcaggagaaggccagactccgccgggccgaggagtccgtccgggaggcggaggcggcgcacgcacgccaggcggcctgccaagcccccgacccgactccgcccgaagcgacgacgacttccgaggccacccgcgacgaggccgcgggcgcactgctcgggcccgacccctcgggcgacactcaggacgagccagcttcgggggacgcccccgagtccggcacgtcgatcgacgggccgagccgcgcggcacccacaccgaggcggctctcccctctgccttctgctgccccactgagcgcagagcccctcctgcaggccttggccgccgcgaacaccacagtgttggacgggttaagcacccagatggaggtcctgcaggcggagcgggcggagctcgacgcggcgtgggcgcgcgtcgaagaggggcggcgctcggtggaggccatggtggaggcgggccgcaaggcacatcgccggcacacctcagagctcgaggcccgtcgtagagacctggcggagatcgccagggaggtggaggaggagcgggagactgccctcattgccaccgctgtgttcaacgcggcgcgggacgacctccgcctccaatacgggagccgggcggcggagctagagaaaaagctcgacgcgtcccggcagcgcgaagaggcccttgaggctcgcgccacggtgctggaggagcgcgcccgcgccctggacgcgaaggagaaggacctggcggaccacgaggccgccgtcgccacccgggaggcaacactgacggcgcacgaggccgcctgcgccgaagaggagtccgcactccgcctccgcgaggacgtgctcaccgagcgggagcgagctctcgaagaggccgaggccgcggcgcagcggcgagaggagcaggcgcgccctgccgaacacaccatcgccgagatgcagggcgcgctggactcgtccgccggggaggtcgaggccctccgcttggcaggcgaggtagggcccggcatgcttcgggacgccgtctcccatctagaccgtgctgggcgacaggcgggcctctggggcgggcggaccgcgaagtacgccgccaaccaggggggcctcgcccagcgcctctcagagatggccgagaccctccagcggctccccgaggagctcgaggagacgatcaagtcatcctcgagggaccttgcccggggggcggtggagctcgtactggccagctaccaggccagggaccctgacttctccccgtgggcagcgctggacgagttccctcccggaaccgaggacgtcgcgcgcgcgcaggtctgggacgccgccgaccacatcgtccacagcttcaagggtacggcccctcggctcgcgttcgccctcgactccgacgaggagggcggtgacggtggcgcggacgacagcgacgacgaggccggcgacccgggcgcgttgaagtga

SEQ ID NO: 80563 - DNA, 1048 bp, Oryza sativa
  Clone ID: PAT_MRT4530_80175C.1
tgaactctgtaaccgtaatatacctccagctccagctccttcatcttcgccagttgcagctcctgcacccgcacccgctcttgcaccagcttcagcctccactccagcgccagttctcaccttcgctctagcctcagctttccgaggcgtagctagtggcagcagtagatggttaccttctacacccagtggcaacaacaactctagttcagaggcagccaatggcaacaccaacctgatggactccaggagtcgcttagagtccccttcttgcctgttaccccttcagatggtcaacactaggactggcagtcgtgtagcaggagatggcagcaatagtgaggaacagactgctcatgtcaatggtgtgccaggcaacggcccacctccaccactggagaatccaactatcgctcaagtgctggccaaccagacgcagatgatgactatgatgatgcagcaggtgcatcaatagatgcaatagcagacgcagctgtagcagaaccaacagtgtggtcctcctcaatccaagccgccagtagtttctctagcatcaggccacctactttctcaagcaccaccgacccaatggaggcaaatgactggcttcatgccattgagaaaaagctcaaccttctgtagtgcaatgaccaagagaaggttgcctttgccactcactagctatagggtcatgcttcttcttggtgggataactacttggttacccgtctagtcggaacagaagtcacttgggcggaattctgttgtagctttaggaaagctcaggttcctgacgggatagtggcacagaagaagagggagttccgagcacttaaccaaggcagcaggacaatgacagaatacctgcatgagttcaaccgcctcgcgcgctatgctctgaaggatgtgcgtactgatgccaagcggaaggagaagtttctttctggccttaatgatgaactgaccaaccagctgatctctagggattatgctaactttgagaagctggtagacaaggcaatccgtcaggaagatcagtgcaacaaga

SEQ ID NO: 80564 - DNA, 2820 bp, Oryza sativa
  Clone ID: PAT_MRT4530_80176C.1
atggcacggggctccgcaccgctcgatggtagcgtgctgccgccttcccgcatcgtgagcgagaggcaggccgggctgccgcgccgattcatgccggaatctgccaccggccgggaggtggttgtgctaggtgagggacgcccggcgccacactacccggggcggtccgtattcttccttcccttcgcaatggcagggctggtcctgccattctcttctttcttcatggatgttctggagttttatgatctccagatggcacaccttacccccaacgcggtaatgacgttggcgatcttcgcgcacctgtgcgagatgttcatcggggtgcgcccatctctccggctgttccggtggttcttcaccgtacagccggtgtcgccaccgtcggtagtcggtggctgctacttccagccgtgggggccggtgctgaaccgctacattccctgcgtccttcgcaagaagtgggacgactggaagagcgactggttctacacccctctcgccgacgaagcgcgcctccgacttccgagccagcccccggcgcaggcctccagctggcgggcgccggtagatctgggagacggctacgacgccgttcttgaccgcctggctgacttcaaggtggtgatccaacgggtgctgaatctcagctccgtggaggcatccctcatcccccaaggtgtcctccccctctgcagcgatccagagcgcgccaacatcctgaccatcatgcaggcggtcggggcgtcaggggagcgggctcctcgaggccacgatggcgctggcgggagccgcaggggggaacaatctaccccgggagggggtcgtgcttctgggccccgtcacgggggcccggggggcagccgccctgccgacgcccgggggaagaggaaacaggaggataccccctccccatctcctccccgagggggcggggcggtgcgtgccagcagcaggcgcccggagggtgctgcgccgacgtcgcagcccgagggggagcgaaaaaagaagcggctccgcaagatgggggggaccgaaccatgccggggaaacctcatctcccccccaaggtggtcgtttagccgacctcctcgcagcgagatcccgtcgcgcccttcctgccattccaagtccggccggtctgaggccgaggagacggcgaccgcggaggcccggaggcgggaagctgatcggcgagaagccgcaaaccgcctccgggaagccgaggaagctgcccaggaggctgtccgggctcgccaggctgaggaagccgcttgggaagaggccagactccgccgggccgaggagcccgtccgggagacggaggcggcgcactcacgccgggcggcctgccaagcccccgacccgactccacccgaggcgacaacgacttccgaggccgcccacgacgaggccgcgggcgcgccgcccgggcccgacccctcgggcgacgttcgggacgagcccgcttcgggggacgcccccgagttcggcacgtcgatcggcgggccgagccgtgcggcatccttaccgaggcggctcttccccacgccttccgctgccccactaagcgcggagccccttctgcaggccttggccgccgcgaacaccacggtgttggacgggttaagtgcccagatggaggtcctgcaggcagagcgggcggagctcgacgcggcgtgggcgcgtgtcgaagaggggcgacgctcggtggaggccatggtggaggcaggccgcaaggcacaccgccggcacacctcagagctcgaggcccgtcgtagggacctggcggagatcgccagggaggtggaggaggagcgggagactgccctcattgccaccgccgtgttcaacacggcgcgggacgacctctgcctccaatacgggagccgggcggcggagctagagaagaagctcgacgcgtcccggcagcgcgaagaggcccttgaggctcgcgccacggtgctggaggagcgcgcccgcgccctggacacgaaggagagggaactggtgggtcgcgaggccgccgtcgccatccgggaggcaacgctggtggcgcacgaggctgcctgcgccgaagaggagtccgcactccgcctccgcgaggacgagctcactgagcgggagcgagctctcgaggaggccgaggccgcagcgcagctgcgggaggaacaggcgcgcctcaatctggaaggcgcccgcgccgagagggccgcactggaccagcgggccgctgaattcgaggcgcgggcgaaggagctggacgcgagagcgcacagcggcggggcggccgcaggcgacggcgacctagccgcccgcctcgcagccgccgaacacaccatcaccgagctgcagggcgcgctggactcgtccgccggggaggtcgaggccctccacttggcaggcgaggtagggcccggcatgcttcgggacgccgtctcccgtctagactgcgccgggcggcaggcgggcctttggggcgggcggaccgcgaaatatgccgccaaccaggggggcctcgcccagcgcctctcagagatggccgggaccctccagcggctccccgaggagctcgaggagacgatcaagtcatcctcgagggacctcgcccggggggcggtggcgctggacgagttccctcctggaaccgaggatggcgcgcgcgcacaggtccgggacgccgccgaccacatcgtccacagcttcgagggtacggcccctcgactcgcgttcgccctcgactccgacgaggagggcggtgacggtggtgcggacgacagcgacgacgaggccggcgacccgggcgcgtcggcgtga

SEQ ID NO: 80565 - DNA, 3039 bp, Oryza sativa
  Clone ID: PAT_MRT4530_80177C.1
atggcacggggctccgcactgcttgatggtagcgtgctgccgccttcccgcatggtgagcgagaagcaggctgggttgccgcgccgcttcatgccggaatctgccaccggccgtgagatagtcatgctgggcgagggacgcccagcgccagactacccgggacggtccgtcttctttctcccctttgcaatggcagggctggttccgccattttcttctttcttcatggatgtcctggagttctacgatctccagatggcgcaccttacccccaacgcagtgatgacattagccatctttgcgcacctgtgcgagatgttcattggggtgcgcccatctcttcggctgttctggtggttcttcaccgtgcagtcggtatcgccaccgtcggtggtcggcggctgctacttcctgccgcgggggccggtgttgaaccgctacatcccctgcgtcctccgcaagaagtgggatgactggaagagcgactgctggcgggcgccggtagatctgggggatggctatgacgccgtcctcgaccgcctggcgggcctgcgatcccaggggctcacaggggccatggtgtacggcgactacctccgtcgtcggattgcgccgctccagcggcgcgctcggggcgcctgggagtacaccgggtccgaagactacatgcggacccaccagggagtcagatgggattgggctcctgaggacttcaagatattggtccaacgggtgctgaatctcaactccgtggaggcgtccctcattccccacggaatcctccccctctgcagcgatccagaccgcgcctccatcttgaccattatgacggcggtcggggcctcagaggagcaggctcctaagggccatgacggcgcaggcgggagccgccgaggggaacaatctaccccaggagggggtcgtgcttctgggccccgcgtcgggggctcggggagcaaccgccctaccgacgcccgggggaagaggaagctgggaggaacacctcccccatctcctccccgagggggcggggtggttcgtcccacgctcattgcgaccgtctttcttctatcccaaaagcaagttttctcttacccatcttgtttgtcttctggtttttccttccgcttcagtgatgtcccgtcgcgttcctcccaccatcccaagtccggccagtccgaggccgaagatccggcggtcgcagaggcacggaggcgggaatctgaccggcgagaggccacagatcgcctacgggaagctgaagaggccgcccgggaggccgcccgggctcgccaggctgaggataccgctcgggaggaggccgcccgggctcgccaagccgaagaagccgcccgggaggaggccgcccgggctcgccaggctgaggcgatggcgacttccgaggcagctcgcgacgaggccgcgggcgcgtcgcttgggcccacctcctcgggcgacgctcaggcgacagcttctggggtggctcgcggcgaggccgcgggcgcatcgcttgggcccactccttcgggcgacgcccaggaccaaacaggtccgggggacatccccgagtccggcacgtccattggcgagccgagccgcgcggcatcttctccaaggcagctcttccccacgccttccgtcgccccgctgagcgcagagccccttctgcaggccttagccgccgcaaacaccgcggtgctggatgggttaagttcccaggtggaggccctgcaggcggagcgtgcggagctcgacgccgcatgggcgcgtgtcgaggaggggcggcgctcggtggaggccatggtggaagcgggccgcaaggcacaccgccggcacgtctcagatcttgaagcccgtaagacggcgctggcggagatcgctcgagaggtggaggaggagcggggggctgccctcatcgccaccactgtgatgaacgaggcgcaggactccctccgccttcaatacgggagctgggaggcggagctaaagaaaaagctcgacgccgcccagggggtccttgatgccgccgctgcccgagagcagcgagcaacggagaccgaagcggcgctccggcggcgtgaagaggccctcgaggcgcgcgccatggcgctggaagagcgcgcctgcgtcgcggagaaggacctggcggaccgcgaggccgccgtcgccactcgggaggcaacgctggcggcgcacgagtctgcctgcgccgaagaggagtccgcactccgcctccgcgaggacgcgcttaccgagcgggagcgagctctcgaagaggccgaggccgcggcgcaacggttggcggacagcctgtccctccgtgaggcagcgctgacggagcaggcacgccgcaatctagaatgtgtccgcgccgagagggccgcactggaccagcgggccgctgacctcgaggcgcgggagaaggagctggactcgagggcacgcagtggcggggcggctgcgggcgaaagtgacttagccacccgcctcgcagctaccgaactcaccatcgccgacatgcagcgtgcgctagactcatccgccggggaagccgaggccctccgcttggcgggcgagatagggcccggcatgctttgggatgcagtctcccgtctggatcgcgccggtcggcaggcgggcctctggaaaggccaggcaatgaagtactccaccaaccagggaggcctcgctcagcacctctcgaagatggccggggctctccagcagctccccgaggagctcgagaagaccatcaagtcatcctcgagggacctcgcccaaggagcggtggagctcgtcctggcgagctaccaggccagggaccccaacttctctccgtggatggcgctggatgagttcccacctgggactgaagacagcgcgcgcgcgcaggtccgggatgccgccgaccacatcgtccacagcttcgagggctcggcccctcggctcgcgttcgcccccaactccgacgaggagggcgacgccagcggtgcagacgacagtgatgacgaggccggcgacccgggcgcatcggattga

SEQ ID NO: 80566 - DNA, 2628 bp, Oryza sativa
  Clone ID: PAT_MRT4530_80178C.1
atggcatggggctccgctctgctcgatggtagcgtgctgccgccttcccgcatcatggcgcacctcacccccaacgcggtgatgatactggccatcttcgcgcatctgtgcgagatgttcattggggtgcgcccatctcttcggctgttccggtggttcttcaccgtgcagtcggtgtcgccgccatcggtagttggtggctgctacttccagccacgggggccggtgctgaaccgctacatcccctgcgccctccgcaagaagtgggacgactggaagagcgactggttctacacccccctcgccgacgaagcgcgcctccgacttccgagccagcccccggcacaggcttccagctggcgggcgccggtagatctgggggatggctatgacgccgtcctcgaccgtctggcgggcctgcgatcccaggggctcacaggggccatggtgtacggcgactacctccgtcgtcggattgcgccgctccagcggcgcgctcggggcgcctgggagtacaccgggtccgaagacctcatgaggacccaccagggagtgagatgggactgggctcctgaggacttcaagatattggtccaacgggtgctgaatctcaactccgtggaggcgtccctcattccccaaggaatcctccccctctgcagcgatccagaccgcgcctccatcctgaccattatgatagcggtcggggcctcagaggagcgagctccaaagggccacgacggcgcaggcgggagccgcaagggggaacaatctaccccgggagggggtcgtgcttctgggtcccgcgacaggggcccggggagcagccgccctgccgatgcccgggggaagaggaagcagggaggatcacctcccccatctcctccccgagggggcggggcggcgcgtgccagcagcaggcgcccggagggggccgcgccgacatcgcagcccaagggggagcgcaagaagaagcggccccgcaagatgggggagacagaaccatctcggggaaacctcatttcccctccaaagtggtcgtttaaccgaccccctcgcagcgagatcccgtcgcgtccctcccgccattccaagctcggccagtctgaggccgaggatccggcggccgcagaggcccggaggcgggaatctgaccggcgagaggccgcggatcgcctacgggaagccgaggaggctgcccaggaggccgcccgggctcgccaggccgaggaaaccgctcgggaggaggccgcccgggcccgccaggccgaggaagccgctcgggaggaggccgcccgagcccgccaggccgaggaagccgctcgggagaaagccggatttcgccaggacgaggcgatggcgacttccgaggcagctcgcgacgaggccgcgggcgcgtcgcttgggcccactccctcgggcgacgctcaggcgacaacttccggggcagctggcaacgaggctgcgggcacgtcgcttgggcccactccctcgggcgacgctcaggaccaaccgggtccggggaacatccccgagtccggcacttccatcggcggcccgagccgcgtggcatcctctccaaggcggctcttccccacgccttctatcgccccactgaacgcagagccccttctgcaggccttggccgtcgcaaacaccacggtgttggatgggttaagtgcccaggtggaggccctgcaggcagagcgggcggagctcgacgccgcgtgggcgcgtgtcgaagaggggcgacgctcggtggaggccatggtggaggtgggccgtaaggctcaccgccggcacgtctcggagcttgaaacccgtaagaaggtgctggcggagatcgccaaggaagtggaggaggagcggggggctgccctcattgccaccaccgtgatgaacgaggcgcaggacaccctccgccttcaatacgggagctgggaggcggagctagggaagaagctcgacgccgcccaggagagcgcctgcgtcgtggagagggatctggcggaccgcgaggccgccgtcaccatccgggaagcaacgctggcggcgcacgaggctgcctgcgccgaagaagagtccgcgctccgcctccgcgaggacgcgctcaccgagcgggagcgagctctcgagggggccgaggccgcggcgcaacagctggcggacagcctgtccctccgcgaggcagcgcaggaggagcaggcgcgccgtaatctggaaggtgcccgcgccgagagggccgcactgaaccaacgggccgctgagctcgaggcgcgggcgaaggagctggacgcgagggcgcgcagcggcggggcggccgcgggcgaaagcgacttagccgcccgcctcgcggctgccgaacacaccatcgccgatctgcagggcgcgctagactcgtccgccgaggaggtcgaagcccttcgcttggcaggcgaggtagggcccggcatgctttgggacgccgtctcccgcctagatcgcgccggtcggcaagtgggcctctggagagggcagaccgtaaagtacgccgccaaccagggaggtctcgcccagcgcctctcgaagatggccggggctctccaacggctcccgaggagctcgagaagacaattaagtcatccttga

SEQ ID NO: 80567 - DNA, 2322 bp, Oryza sativa
  Clone ID: PAT_MRT4530_80179C.1
atggcacggggctccgctctgctcgatggtagcgtgctgccgccttcccgcatcgtgagcgagaggcaggctgggctgccgcgccgcttcatgccggaatctgccaccggccgggagatagtcacgctgggcgagggacgcccggcgccagactacccggggcggtccgtcttctttctcccctttgcaatggcagggctggttccgccattttcttctttcttcatggatgttctggagttctacgatctccagatggtgcacctcaccctcaacgcggtgatgacattggccatcttcgcgcatctgtgcgagatgttcattggggtgcgcccatctcttcggctgttccggtggttcttcaccgtgcagtcggtgtcgccgccatcggtagttggtggctgctacttccagccacgggggccggtgctgaaccgctacatcccctgcgccctccgcaagaagtgggacgactggaagagcgactggttctacaccccccttgccgacgaagtgcgcctccgacttccgagccagcccccggcgcaggcctccagctggcgggcgccggtagatctgggggatggctatgacgccgtcctcgaccgcctggcgggcctgcgatcccaggggctcacaggggccatggtgtacggcgactacctccgtcgtcggattgcgccgctccagcggcgcgctcggggcgcctgggagtacaccgggtccgaagacttcatgaggacccacctgggagtgagatgggactgggctcctgaggacttcaagatattggtccaacgggtgctgaatctcaactccgtggaggcgtccctcattccccaaggaatcctccccctctgcagcgatccagaccgcgcctccatcctatccattatgatggcgcccgagggggagcgcgagaagaagcggttccgcaagatgggggagacagaaccatctcggggaaacctcatttcccctccaaagtggtcgtttaaccgaccccctcgcagcgagatcccgtcgcgtccctcccgccattccaagcccggccagtctgaggccgaggatccggcggccgcagaggcccggaggcgggaatctgaccggcgagaggccgcggatcgcctacgggaagccgaggaggccgcccaggaggccgcccgggctcgccaggccgaggaaaccgctcgggaggaggccgcccgggcccgccaggccgaggaaaccgctcgggaggaggccgcccgggcccgccaggccgaggaagccgttcgggaggaggccgcccgagcccgccaggccgaggaagccgctcgggagaaagccggatttcgccaggacgaggcgttggcgacttccgaagcagctcgcgacgaggccgcgggcgcgtcgcttgggcccactccctcgggcgacgctcaggcgacagcttccggggcagctggcgacgaggctgcgggcgcgtcgcttgggcccactccctcgggcgacgctcaggaccaaccgggtccgggggacatccccgagtccggcacttccatcggtggcccgagccgcatggcatcctctccaaggcggctcttccccacgccttctatcgccccactgaacgcagagccccttctgcaggccttggccgccgcaaacaccacggtgttggatgggttaagtgcccaggtggaggccctgcaggcagagcgggcggagctcgacgccgcgtgggcgcgtgtcgaagaggggcgacgctcggtggaggccatggtggaggtgggccgtaaggctcaccgccggcacgtctcggagcttgaaacccgtaagaaggtgctggcggagatcgccaaggaagtggaggaggagcggggggctgccctcattgccaccaccgtgatgaacgaggcgcaggacaccctccgccttcaatacgggagctgggaggcggagctagggaagaagctcgacgccgcccagggggtgcttgacgctgccgctgcccgagaacagcgggcggcggagaccgaagcagcgtcccggcggcgcgaagaggcccttgaggcgcgcgccatggcgctggaagagcgcgcctgcgtcgtggagagggatctggcggaccgcgaggccgccgtcaccatccgggaagcaacgctggcggcgcacgaggctgcctgcgccgaagaagagctcgcgctccgcctccgcgaggacgcgctcaccgagcgggagcgagctctcgagggggccgaggccgcggcgcaacagctggcggacagcctatccctccgcgaggcagcgcaggaggagcaggcgcgccgtaatctgtaa

SEQ ID NO: 80568 - DNA, 2238 bp, Oryza sativa
  Clone ID: PAT_MRT4530_8017C.1
ccacgcgtccgcgtccgaatatttcttcctataacagggcaagagcagatcgatcgtttccttttgatttctgaggagaagaggatcgatcgtttcgttcgatcgtttggtttttgaattttgaggagaagagaagagaagaggatcggaagagatggccggcggcggcgtggaggacacgtacggcgaggacagggccaccgaggatcagctcatcaccccatggtccttctccgtcgccagcgggtacacgctgctgagagacccgcggcacaacaagggtttggccttctcggaggcggagcgcgacgcgcactacctccgcggcctcctcccgccatccatcgtctcgcaggagctccaggagaagaagctcatgcacaacctccgcaactacaccgtccccctccagcgctacatcgccatgatggacctccaggagaggaatgagaggctgttctacaagctcctgatcgacaacgtggaggagctgctgccggtggtgtacacgccgacggtcggggaggcctgccagaagtacggcagcatctacaggcggccacagggcctgtacatcagcctcaaggacaaggggaagatccttgaggtgctcaagaactggccggagaggagcatccaggtgatcgtcgtcaccgacggcgagcgcattcttggccttggagatcttggttgtcagggaatgggtattcctgtcggcaaactgtctctgtacactgcccttggaggagttcgcccatcagcttgccttccaatcacaattgatgttggtaccaacaatgagtcactgctcaacgacgaattctacattggactcaagcaacgccgtgctaccggagaggaataccacgagcttcttgaggagtttatgaccgcagttaagcaaaactacggcgagaaagtgctcgttcagtttgaagactttgccaaccacaatgcttttgacttgcttgcaaagtacagcaagagccaccttgtcttcaacgacgacattcagggaacagcatcagtggtcctcgcaggtctgattgcggcgctcaaggtggtcggtggaactcttgcagatcacacttacctgttccttggcgccggtgaggctggaactggcatcgcagagctcattgccctcgagatgtcaaagcagacggagattccgatcaatgattgccggaagaaggtgtggctggtggactcgagggggctgatcgtggagtcgaggaaggagtcgctgcagcacttcaagcagccattcgcgcacgagcacgagccggtgaagacgctgctggaggccgtgcagtccatcaagccgaccgtgctcatcggcacttccggcgtcggcaagacattcacccaggaggtcgtcgaggccatggccgccttcaacgagaaacctgtcatcttcgcgctctccaacccgacgtcgcactcggaatgcaccgcggaggaggcatacacctggaccaagggaagtgcggtgttcgcgagcgggagcccgttcgacgcggtggagtacgaggggaagacgtacgtgccggggcaatcgaacaacgcctacatcttcccggggttcgggctgggcgtggtgatctcgggcgccatccgcgtccacgacgacatgctgctggcggcgtcggaggcgctggcggagcaggtgagcgaggacaacttcgccagggggctcatcttcccgcccttcaccaacatccgcaagatctccgcacacatcgccgccaaggtcgccgccaaggcgtacgagctcggcctcgccagccgcctcccgcgccccgacgacctcgtcaagtacgccgagagctgcatgtacaccccggcctaccgctgctaccgctgatcgagcacgagcccaccgaggaggaagacgatcgatcgaattaagcaataaaatttttattcaaatcttggcgcgagcgttagctgccattagaggggttttcatttttaattttttttgtgtacccatacatatacgtatacgtgtactgcatacatactagagcacctgatggtgcttgtcgtcgtcgattcttttgaccgatttgaagtttggtagggtgtaatagcacttacttttgagttttccacattgagttgattcggtgtaataggagtcaaatttgagtttcttatgatggttgttcatgatcagtttctgatgcaatgggtcgtgtcttttttacccaataaaagcatggatgcttcctt

SEQ ID NO: 80569 - DNA, 323 bp, Oryza sativa
  unsure (1)..(323): unsure at all n locations
  Clone ID: PAT_MRT4530_80180C.1
ggggaggacgtgcggcggcgcgccgggnagaaggccgagnaggcgnggcggcggacaagcntcacccgtcttcggagganaaggggaggtcggcnacgganaacatctacggttcggcggcgagcccggcggaggcnttcaggcagaanatnacgatgccggaggacgtggtggagcagaagcncgccgaggctnccgccggcgggaacaagggaacanccgccgcaacggaacggcaacgaacaccggcgggnaggcggcggcggaggaggtgatgatncgggtaaaggcngcggaccaaatnacggggcaaggctttcaac

SEQ ID NO: 80570 - DNA, 1572 bp, Oryza sativa
  Clone ID: PAT_MRT4530_80181C.1
atgcatgtaagcaagcagatatcagaggaatggatgagagagagagccaacaaattgaaagaagatgtctgcggactgtttattatggcctcaaatggcatcttggagaggatgaacttagtggatacaattcaacatctaggaatagatcacctctttcaagaggagattgactctgcactaaaagacatccatgaaaatgatttagctagctctaagctgcatgaggttgctcttcggtttcgcttgcttagagagcatggattttgggtgtctccagatgtatttaacaaattcaaaggtgatcatggcactttcaataacgaattatcattagccgatgacccaagaggcctactatctttatataatgcagcccatctgttcatacatggtgaaccagaactcgtggaagccatttcttttgcaaggcaccatctcgaatcattcaatcggcgtaatgttctgaaggcccctttagctgatcaagtcaagcgtgcccttcacttgccattgccaaggacacacaggagagtggagatggtatcatacatgtttgagtatggccgagaggatgggcacaatcccgttattcttgaactagcaaagctggatttcaacctactgcagcgtgttcacttgaaagaactcaaggaaatatctaggtggtggaaagatgtttctggatatatgggtataaaccatattcgagaccgtgtgattgagtgctacacctggtcctacgcagtgtaccatgaggaagaaatgtcgtttgcacggatgctctttgctaagatagttgtgataattgccctattagatgacacatacgatgtccatggatatacctccatccaggaatgccggatgctaaacgcagccattcaaggatgggatgacagtgctgtcttgcttgtacccgagtacctgagaaagttttatgaatttatcttgcgctgctttagggagtttgaggatcaagtgccaagcaatcagaagtacctgattgccttcagcaagacagagttacaaaggttgtcaagttattatctggaaggagccgaatggtcccaccggaagcacatgcccagcttcagcgagcaggtggctctggcgacaatgaccacaggaacacggccgctggctgctggtttaatggttggcatgagtgagtccatgacaacgaaacaagcgtacgagtgggctgtgaatagcactgacgccatcatctcatgcgggaaaactggccgtttcatgaacgacattgccggatttaagctcgggtcgcagaacaaagctgacatgccatgttcggttgagagttacatcaacgagcacaaggtcacagccgatgtcgccatcgccaagattaatgaattggtagaagatgagtggaaaacaactaaccaggctcgcattgaccaccgtgatgtgctccctgtggtgcagcgccttatcaatataaccatggccattccattgtattacagcgatggaattgatggattcacgttcggcgagggcattcaggaggttcttgagaaactctacgtcaagcccattcccttatag

SEQ ID NO: 80571 - DNA, 586 bp, Oryza sativa
  Clone ID: PAT_MRT4530_80182C.1
atgggtggaaagctttgtttggtcgcggctcgatcagcgcatccatccggtcgatcggccgccgtctggcctgtcacacgcacaggacagtgtgtcgcgggtggagagacgtctcggcccggacgcatacgggagcaacccacgtacgccacgccgccgccgtcgccgcgcggctcgcatcgcaggatgcagcgcgtggcgcggcgcggcggcaaatgcacgtcacaaggcggcgcggtgttggcggacgtggtaggtcgtcagccgctcgcagcaccggtggtgggccgcggcgcgcgtggatcgcgtgcgtgtcgtggactggactggtcggggagtccgcgcgcagcgggtgcggggactcgggacggaagaaagtccaaaaacgagaggagaagcggggagcgcgccgggccggtggtttccttccagaggagagagcctaccctcctgtgggatacgagtgaccaatgtatgcacctggaagaggaccttattaaagacacgagttgtcagtatcctgatctatattctaatatcttacgacactacgatcctatcaaaacgaaatgataccgattttacc

SEQ ID NO: 80572 - DNA, 618 bp, Oryza sativa
  Clone ID: PAT_MRT4530_80183C.1
tttagggcagagataccaacacaaaactctatcagtaacaaggacctagggtatagcttgggcaaatctattcaatactctgtgataacctctatagagaaagagtataaaaaagaatggatatatatttatatatatatggctgattcactttgctgtacaccggaaatttacacaacattgtaactcacctatactcgagatagaatttttctaaaaagaaaaaaaagctaataaaatcattatacattaaaaaaagctaatgaaatgatctcagaagatacatgacggaggtttggactggggtgatagagtagaggtagtgaaaaatgaggggattcttaatatattttgaagatagaactggagaatttgctgacagatgagataaggggtatgagaaaaagaaaggagtaaatcctgtggaagattttttaacttaagcaactaaaagaatggaattcctagtttttgaaataaaaaagatttttggaaagcaggttaatgtgtgggtgatggtggtggggtgaagtttcggtgaagatttgaagttggattttttttttgatatctattagatatcctactgattaccatgtgggttaaggacttaatgac

SEQ ID NO: 80573 - DNA, 485 bp, Oryza sativa
  unsure (1)..(485): unsure at all n locations
  Clone ID: PAT_MRT4530_80184C.1
nntgntcgattcggcccgaggnctntccgaactnnccatatggcggcctgctccatgangacgatcnnntgcnccatccntnatcggcccatacntgtatgtgctggatganngcnnagatgggaagtggatcnactctccacacntggatgtcatgggtttacaagcatgnnaanctcatngttcatctganntataacnnacnagcnngtttctctggacnncgtgtgggtnacggacatttcccctcagcaaaaaccactatttatggagggctaancagncgatantgtttctgtaacaaccaagtttcagcctgtgctgcctagcggantccgacttatttactaggaactgaanaatctgctactncgggaagaaggacaagctgtccnatcttctcgtntcaagtccccccctnaagccctnncccccccaatctatccnnaattctcntnccaaggtcacccgggccnnggatnccc

SEQ ID NO: 80574 - DNA, 565 bp, Oryza sativa
  Clone ID: PAT_MRT4530_80185C.1
ccggccggcgatcccttcccccatggtcggcgtgctcgccggttccacccaaaccctagcaacctcacgccgccacctccctcgccgccggccgtcgccctcgtcgccgtgtgtctccgccgtcagccgccggccgccctcaaccgcgggctgctgattctgctttcgcccgcatcggccacctgaccagggagagagaggaagagaaggggggaaaggaagaggagtaaaaaggagaaggaagaagaacacaggggggaaaaaagaagaagaagaagaagagaagaaacggggaaagggaagaattcggggatttctctgtgggtttcgtcagatcctccttcgatttgtggttcttgctgccagggtcgtggtgcgaatcaaggagtggaaacctccacccatcgctcatcttcacgcggttaaggagcgagcgatcaaatcaggggataatggaggaggacagcgtcatcagcaacggcggcagggaggaggaggaggtgggttgcgaaccgcagtggcggaggggtagtgggggacggcgaggagcggcggtgggggaggg

SEQ ID NO: 80575 - DNA, 1423 bp, Oryza sativa
  Clone ID: PAT_MRT4530_80186C.1
ctactcggtgtcggtggcgcgggaccgcttgcttgccttggctgcggcggcagcagaaggggaggtgctgttggtggcattggtgttattggcgctggcagcggcagtgacagagcgggagaaggagccggagagattagcgtagagatcgacgacacgggcgatgttggtgttgagctcccggatgagggcgacgttgcgggtgaggccatcggcgtcgcgggcctcatggttctggctgatctcctggatcagcacacggttctgctccaaaatcccctgcacctcgccaaagttcctctgcagcacctgcaccaccttcccccctcccccaccgctgctcctcgccgtcccccctacccctccgccactgccgttcgcaaccaccacctcctcctccctgccgccgttgctgatgacgctgtcctcctccattatcccctgatttgatcgctcgctctccattttcaccttgtaaccgttattataccaccataacatttccataattgccttaaccgcgtgaagatgagcgatgggtggaggtttccacttcttgattcgcaccacgaccctggcagcaagaaccacaaatcgaaggaggatctgacgaaacccacagagaaatccccgaattcttccctttccccgtttcttctcttcttcttcttcttcttttttcccccctgtgttcttcttccttctcctttttactcctcttcctttccccccttctcttcctctctctccccaatacataaggcctgttcggctgccattcttgcggcagcactgcggctgcagcgcttggttgtgcgaccgcagctgtgctgcttgcagctggtttgttacaagggagaaatcacaacgagacgaatgccatatagagaggtataggatgcagagacctgactcgtactcctggatcacctggggcttctcattgatcatctgtgcaagctgtgcctgggtcatcttcttgtccagccttgcttgcatgaggtttttcttcaggtcacttgagacacgctcatgggcaaggctctcggtgtcgtcatccagccgcttggtgttgagggatgtgccactggacgccgccttgtttgttccagcgttatacttcttcatggtctcgatctcggcgccggagcggcgggcggcgttgacggccttctcatccttcttggcggcggcggtgggcgccttcttccgcaccaccaccggctcccagtcctgcctgatcggaccaatcccggccatcgagacgagacaagaggaggaacaagaagatgaacaaagaaagggttaggggatgaacgaacaaggaagaagagaaggttctggagtcgcacccacgggtccgcccacgcgtccgggaaaacaaaaacgatgctggctagtaatctcaagaaagtattcagga

SEQ ID NO: 80576 - DNA, 339 bp, Oryza sativa
  unsure (1)..(339): unsure at all n locations
  Clone ID: PAT_MRT4530_80187C.1
gggcgccgcggcggccaagaagcgcgtcgcgctcggtaacatcaccaacgttgccgccgccgccaacaatgcggtacgtgaaggatcgcttgctgctgcttcttcttcttcttttttcctttttttttctctccaagatttgttctttgctttgcgcggtttgggtggagatcttttggtgtgtgaggtggttggaatggtttgggggtggctttttttttttttttttttgcttcttggttcctcttggggcacaagtgagtcgctgttgntgcggnaatggccgaagcgatctgtgtatgatttttttcttttttggtttttttccatcttgtttgg

SEQ ID NO: 80577 - DNA, 2567 bp, Oryza sativa
  Clone ID: PAT_MRT4530_80188C.1
ggaaagagacatatcaatattatttgaattaaattgcttgctcacgttccaacttacaacatctagaagatatttccactccagaacatatcagtggcatcctacctcctaacctaagatacagcatcacatggtcaattgcactgcgcatgatgcaatataatgccagaacacatgtatgaggatcactccagcttctggtacttctgctccttcctctgtgccatggtcagtttgagcactgggaagcactggcagtgcctcctgaaccggtccaggcctttcactctgatcctcagccgcagcgacttgatcttgtcggtgacagctttgaaacccttttggagctttttggctctcgcgaatttgattggtcttcgcttccttctcttcctcacttgcaccttcttgctgctctcatggttccctttgacctttgggtcatcgatcatctctgtcatgatctccagacgcctgctcatcctgctctggatgaagcttcgggggcactttatatacggactaagttctccctaggtcctgtacatgctccaagcacgacgacccgatggccacgcccgtgtcgtccgtgaaacgcattggaaatacacggcttatccgcacggggtttttgcttgcgcatactcgccgcgctgggctgttcacgagctcgacgacgcgcgacaacccggggccctggagaaggacgtcgagctcccaacttacgatggcgcagtaggcgccggcccattctgtaagagccttgacgcgatggctcggtccatttcgtccctggaacgtctgggtaagtttgcgcttgtattcatcggcggttggctcaaggatcactgctaccttgtgatgcactcttgcttgactcctctaatggaacctcagctaagccgcaggaccgcgaggtctcataagagagagatggttttcataaaggatagtagatgttctgtgaagctgtaatagaaggctgtaaatggtaacggattgatccaaactcaaacaaggtatgatcaacaggcataggtcgttcaacactctgcaatcccgtcaggatttccaccagcgcccgcgatccgctgctgaagaacgccgctggatggcgaagcctcataagaaagagatggtgttgatattgacaagtatatgttctctgaatctgtaatagaagcctgtaaatggtaacggattgatccaaactcaaacaaggtatgatcaacaggcataggtcgttcaacactctgcaatcccgtcaggatttccaccagcgcccgcgatccgctgctgaagaacgccatggagctagcacggtgaccgtctgactggtgagacttgaaagcctgaaggggacctctactgttgttggtaaacatagccctggagccaatcgttgccgccaattcttcagcctcagccttcctctttctgatgacctcattaagggtatcaggatcacttccttgtggtggctccatgctgtaaattatcaaggatgtgctagagagatcagccttgtccaagattgatcccccagctgcagtgatcaaatcttcaaggtgaacattttgcattgctcgtagtcttcccatgcgagggccatcaaaggagccatgaacatcagaactgatctcataaggctcttctgggactggttctttagcctccatacaagctttcagccagtttatattcagaacccatttcccagctagtatggccatgagaaccttgagtgtcctccaaccgttagttacagtgatgccagtttggtgctcaaactggtccaagatttcatcatcccatcggcagcctgatatcccatgggcacatggaacatgaaagctcttgcggcagctcttgacaaggcagccaagggctgcaccttttagtccacaaacactgcatttgatcttagaagcacgggccaactcaggctccaagttatttgcaatgtcaccagtaaagaacgcttgaggggccctcagtggttttggaagagtgacaaaattcacatttccaagcaccagcaacagctggttgtccagctctccttcaaggtcattgctgtcgcaatccagatccctagggccatcagaagattgagatcggcagggtcccttctgcacaagaattgtgggcatagcagtcacatcagccgcacctctagtctccaatgcaggatttctttctttcacgccgtccacatttccatatgcaagcccagttgactgatcagatttctctgctccatttctgtttcccgattctggagttccttgaaatgatgtctttgcaacaggaatatcagcttgagcctcctgctgagtgaccatgctgctgactgtagagcttaggctcctgtggatgttcactattgcctcgaggtgagaggcaggccttaggtcttgagaacgataagctgatttgcaaatcgcgcagctgtaaccgtccatggtccgtgtagtagcacacttgcagacggggcaggtgagctccagctccatcttctgcaggttgagcaccagcgggttcaggaacctcctgaagctctccat

SEQ ID NO: 80578 - DNA, 999 bp, Oryza sativa
  Clone ID: PAT_MRT4530_80189C.1
gcacgaggctggtcacgagcagcagcgccgatcatggtcaggcaaagcagctgcacaagagcaaacacaagcagaagcagtaacaaatgcagcagcaaggactgaagaaaaacaaaagcaaaagggaggtaaggggaaggcggcggcgttctcgttctcgccgctgtcgtggatcgccaagctgacggcgaggtcgtcgcacgggaagtgcggcggtgccaagcacgcgccggcggcgtccatggcggggccttcttgtcgtctccccaagcgcgccgccgccgccgccgcgagctcgagctcggtggtggcggcggtcgacgacgtcgccgcggggaggtccagcccgccgcgccgctcacccgtggacgtcgccccgcggcggctgtccgttggcaatgacagtgccgaggccgtggcgcggcggctctgccagcaacaacgccgccgccgccgccactgctccctcggcggcgaccgtgacctcccgccgctcggccacctgatccccttctccctcgcaggctccccagcttcccagccaccggagaacgccgctgccgccgccgccggcggcgcgacaccgtcagacaccgacgccggggccaagctgcggacgcgacgccaccggcgccgcgcgcaccgccgccgccgcagcagcctgggcgggagcggcaggcggtcgttctccgtgtccgggaggatgccggcggtccggatacggccaccgcgcgcggccgcctcggcgccggagctggagaggctggcggtggtgcggcgcacgcgcgacccgcagcgggcgttccgggagtcgatggtggagatgatcgcgagcagcggcgggagcatcgcggcgcggccggaggagctggagcggctgctggcgtgctacctcgccctcaacgccgacgagcaccacgactgcatcgtcaaggtgttccgccaggtctggttcgagtacatcaacctccacctccacctctcccgccgccgacgagc

SEQ ID NO: 80579 - DNA, 714 bp, Oryza sativa
  Clone ID: PAT_MRT4530_8018C.1
atgccgtgttacaagcctgagtacctgtttggtgttgagggttttgtccaggagttgcgtacgatgtcctttgtcattggatttgggaatgcccctttttatgcccagattcgtcatgatcgtcatgaagaaaagtgccgagtcaaagtcactttgaacagtaatagtgaagatatcccctcagtgatgtttgaagctggaggaagaaactacatccatgcatgtcaggaagtggcaaggatcgccataggagagctccgtgatagctacagtgatcaattggccgacactgagtatcgctaccatcctcgccaacctcagggaagtgaccgtggcagttaccttgagactgaaggaattgagaatgatgttaccacgaagcatttgatttgcaagctagaagacaaggtggatcatttggagaaggaattagccgcattgaagggagaagcaccgccgcagaaggccaggattcgtcttaccgcaaggaagagagctttatttgtccctcgctatcaactggcgccaaaggttcgtgtggtggagaaagaagttgccccagctcaagcggatcctccggtcatcatcataagtgatgaagaagaagaatctaagcgcaacaattccaagtttgagtgggtagctatcaaagatgaggaagatgagccgaacgagccttcaatcgacctccgatgcttggaagaactagagtga

SEQ ID NO: 80580 - DNA, 464 bp, Oryza sativa
  Clone ID: PAT_MRT4530_80190C.1
cccacgcgtccgcccacgcgtccgcccacgcgtccgcccacgcgtccgcggacgcgtgggttgaagatttgatcactgcagctgggggatcaatcttggacaaggctgatctctctagcacatccttgataatttacagcatggagccaccacaaggaagtgatcctgatacccttaatgaggtcatcagaaagaggaaggctgaggctgaagaattggcggcaacgattggctccagggctgttcctcatacatgtgttctggattctattgcatcatgcacagtgcaattgaccatgtgatgctgtatcttaggttaggagttaggatgttactgatatgttcttgagtgaaaatatcttctagatgttgtaagttgtaacgtgagcaagcaatttaattcaaataatattgatatgtctctttccattttaaaaaaaaaaaaaaaaaaaaaaaagggcggc

SEQ ID NO: 80581 - DNA, 471 bp, Oryza sativa
  unsure (1)..(471): unsure at all n locations
  Clone ID: PAT_MRT4530_80191C.1
cgttatctttactgtccaaacggctgaacaagatgctgcatgccggtcgtgtcaatcaggtgcagcgcaatgcttctggcgccccagcgcggctgctgaaggcatctcatgtgcaaggcgtcaatggacgtgtggtggccaaggttgccaggcgtgcagcactccgtgtttagcgcaagctggctgccagcatcagtgccagcgccacgactgcagtgaagcagcagtcagcagcaccagcagcagcccccaacggcggtggcggtggtggcacccgcgtcatgatcatcggtggagactgctactgtggctgggccaccgggctgtacctgtcagngcgcaactatgaggtgtgcattgtcgacaacctctgcaggcgttagtttgacctgacctttggactgacacggtgacccccatcaccaccatccatgagcgtgtcaaggtctggggcgagcagttacggaagca

SEQ ID NO: 80582 - DNA, 768 bp, Oryza sativa
  Clone ID: PAT_MRT4530_80192C.1
caatcctttgagagagagcgagagcgagagcgagaccgtgcggccgtgcagggatggagagcttcaggaggttcctgaacccgctggtgctcaacctgcagaagatggagctggagctcacctgccccgtctgcctgaagttgctcaacgcgcctaccatgctgccatgttaccacacttcctgcagcaagtgtgctactacacggaccatggacggttacagctgcgcgatttgcaaatcagcttatcgttctcaagacctaaggcctgcctctcacctcgaggcaatagtgaacatccacaggagcctaagctctacagtcagcagcatggtcactcagcaggaggctcaagctgatattcctgttgcaaagacatcatttcaaggaactccagaatcgggaaacagaaatggagcagagaaatctgatcaggtgaaatcatacaccccggttgcttctaaactggcatataaccagtcaactgggcttgcatatggaaatgtggacggcgtgaaagaaagaaatcctgcattggagactagaggtgcggctgatgtgactgctatgcccacaattcttgtgcagaagggaccctgccgatctcaatcttctgatggccctagggatctggattgcgacagcaatgaccttgaaggagagctgataacaagcagatcatctcctcaaagtgtcttgaaaagagaacccaatacagcgaatgatgataatagagaaataaaaaggcaaagtccactgatcaggatga

SEQ ID NO: 80583 - DNA, 299 bp, Oryza sativa
  Clone ID: PAT_MRT4530_80193C.1
ttttttttttttttttttttttttttttttttttttttttttttttttttttaattattttttttttttttaatatttttttattatttgaaaaattttttattatttatgattttttatgatattttatttgaacatagaaaaaaatttggattaaaacaaaaaagaagcatgggtcgaactgggaatacgggattgtaaatgcaaaaattcaagatttgcttatggtgagtcaaattagaactttgcttagagatggataaaaatgtgtaatatggaaaatagtatacctttacaat

SEQ ID NO: 80584 - DNA, 825 bp, Oryza sativa
  Clone ID: PAT_MRT4530_80194C.1
atcgatccttactttgcgagagacgccgttcccacgcgcggggcctctcgctcctcctcctccccgagagcgtctagaagcttcgggagtggaacccgcccgcgcgcccccccgcccgcgaggtgaggggacgccgccgccgccggcaatggcggcaatggaggccgccgccgacgcggtgctcgccgccgcgagccgcgccttctgcggccccgccgccgtcttcatccagatccaggggtgcctcatctgtttaactcttggtcttggatgggctgttgctgcacttgttagaaagaaacgaaatacggaggatgaggcgcagaattgtagatgggaatagttttgcatttctttgtgatgatgtcaatgagcttgagcactctgttcaagagaaattacctagggtctctgtaatcatgccgttgaagggctttggtgaacataatttgcaaaattggagaactcagatcacatctctttatggggggccactggaattcctgtttgtagtagaaagcaaagatgatccagcttatcatgctgtttcacgtttgatagcagaatacaaggacaagttggaggcaaaggtggttgtagctgggctctcaacaacatgtagccagaaaatccataatcagttaattggcgttgaaaagatgcataaggacagcaaatatgttttgtttctggatgatgatgtgagactgcaccctgggacaattggagctctcacaaaagaaatggagaaaaatcctgagatattcatccaaactggctacccccttgacttaccttctggcagcttgggaagctattgcatat

SEQ ID NO: 80585 - DNA, 378 bp, Oryza sativa
  Clone ID: PAT_MRT4530_80195C.1
atgctgggttttcacccaccgctcaccacctgcgagtccacggctgacgcaccgatgctccaccgaccgcccaacctctccgacatgtgggaccactgcatcagcgccccctgcacagaaaaatcgattttcgtgtgcaggcctcttaactggaacgcatgcgaaaatttcaattttcgtgatccggccgcggcggccgtcccccgcccggatccggtagcggtggcagtcggcgcgacggtggcggcggcaggcgagctcgacggtgacgacggtttcgacggtggcaggctcgatagcgatgacggttgcggcagcggcggctgggtgcggcggcggcgcgacgacagcgacaacgccgggagtggcggcgggtga

SEQ ID NO: 80586 - DNA, 1175 bp, Oryza sativa
  Clone ID: PAT_MRT4530_80196C.1
actagtggatccccgggctgcaggtagagtggactattcattggggcgtgaaagcgtcgtcagaaattcatcggggcttgcagatgcagcagtgtttgtagcgagcaagaggaagaagatacgacggtctcttctactgctactctagcttcttccttgcaagttgcatctacagttccaggaggagataaaagatttatttttttcctttcagtgctttcacagcttcattttgcaaggaggaatctggggctgaacactaacaagtctaccaccacacacacaaactgagactgattcactatgctgaggcagccatccagcagatgccacagatcaaagaagcttcttaggccaaagcacatcctccaggtcgtcctgctagtcgccgtcagtgtctggctggtgtaccagctcacacgcaaccggcgacgtgcagtggccgtggagggcggcggcgctgccatggacggtgaggtgacgcggcgccggctgggcaggaagggcttcattgtcttcgccggcgacgcgtctgatggtgatggcgttcgtcggagcatcggtggccggagcaatgttgccaccgaggccgaaatggaacggggcgtcacgtctgatcaggtgggcgatggtgatcgaggcggtgagggagacgtcgagaccggtgaagaagaagaagaagaagacgacgacggcgacggttacattgccgacgatggccttcccggcgacgaagacgacgacggcggagatctccgtcaccttcaggcagatgaaatggatgtcatcagctttggtcctcacacgaactcttctgactccatagctgctggtccactggtgaatggcgttgcagatgatatgaacagaactgcagtgattaacacatcggtaaatgattctggtgtaagcttgaatcctcctgtgaccgggtcattgcgatacaatcacagaaaagcaactggcaatattgaggcacttggaggcttggagcccacgattacgaacgacatggaagaagactgaaaatggcagacggaatgctctccggtgacagcatgagattatttcgtccggtttgatcttcaggacaactcgctgcatctttcaagctgatataatctgtttatcatgttaccctgcttgttactataaagccgtgtatccatctaggc

SEQ ID NO: 80587 - DNA, 3123 bp, Oryza sativa
  Clone ID: PAT_MRT4530_80197C.1
atggcacggggctccgttccgcttgacggtagcgtgctgccgccttcccgcatcgtgagcgagagacaggccgggctgccgcgccgcttcatgccggaatctgccaccggccgggagatagtctcactgggcgagggatgcccggcgccacgctacccggggcggtccgtcttctttctcccttttgctatggcagggctggttccgccattttcttctttcttcatggatgttctagagttttacgatctccagatggcgcatctcacccccaacgcggtaatgacattggccatcttcgcgcacctgtgcgagatgttcattggggtgcgcccatcccttcggctgttccggtggttcttcaccgtacagccggtgtcgccgccgtcggtggttggtggttgctacttccagccgcgggggccggtgctgaaccgctacattccctgcgtcctccgcaagaagtgggatgactggaagagcgactggttctacacccccctcgccgacgaagcgcgcctccgacttccgagccagcctccagcgcaggcctccaactggcgggcgccggtagatctgggagatggctacgaccccgtcctcgaccgcctggcgggcctgcgatcccaggggctcacaggggccatggtgttcggcgactatcttcgtcgccggatcgcgccactccagcggcgcgcccggggcgcctgggagtacaccgggtccgaggactgtatgaggacccaccggggggtcaaatgggactgggtccccgaagacttcaaggtaatgatccaacgggtgctgaatctcagctccgcggaggcatccctcatcccccaaggagtcctccccctctgcagcgatccagatcgcgccaacatcctgtccatcatgatggcggtcggggcctcagaggaacgagctcctaagggccatgacagtgcgagcgggagctgcaagggagatcaatctaccccaggagggggttgtgcttccggaccccgtgatgggggctcggggggcagccgccctgccgacgcccgagggaagagaaagcaagagggtacttcctccccatctcctcccagagggggcggggcggcgcgtgtcagcagcaggcgcccggagggggccgcgccgacgccgcagcccgagggggagcggaataagaaacggctccgcaagatgggggggacagaaccatcccagggaaacctcatttcccctccaaggtggtcgtttaaccgaccccctcgcagcgagatcccgtcgcgtccctcccgccattccaagtccggccagtctgaggccgaggacccggcgaccacagaggcccggaggcgggaatctgaccggcgagaagccgcggatcgccttcgggaagccgaggaggccgctcgggaggccgcccgggctcgccagaccgaggaagccgctcgggaggaggccggactccgccaggccgaggcgacgacatcctccgaggcgacccgtgaaactgaccggcaagaggccgtggatcgccttcgagaagccgaggaagctgcccaggtggccgtccgagctcgccaagctgaagaagccgctcgggaggaggccagacttcgccaggccgaggcgacgacgacttccgaggcaactcgcgacgaggccgcgggcgcatcgcttgggcccactccctcgtgcgacgctcaggacaaaccaggtccgggggacatccccgagtccggcacgtccatcggcgggccaagccgcgcggcatcctcttcgaggcggctcttccccacgccttccgttgctccactgagcgcagaaccccttctgcaggccttggccgtcgcaaacaccatggtgttggacgggttaagtgcccaggtggaggccctgcaagcagagcgggcggagctcgacgccgcatgggcgcgtgtcgaagaggggcgactctcggtggaggccatggtggaggtgggccgcaaggcacaccgccggcacgtctcagagctcgaagcccgtcggaaggtgctgggggagatcgccaaggaggtggaggaggagcggggggctgccctcattgccaccaccgtgatgaacgaggcgcaggacaccctccgccttcaatacgggagctgggaggtggagctagggaagaagctcaacgccgcccagggggtccttgacgctgccgctgcccgagaacggcgggcggcggagaccgagagggacctggcggatcgcgaggccgccgttgctattcgggaggtcacactggcggtgcacgaagccgcctgtgccgaagaagagtccgcgctccgcctccgcgaggacgcgctcaccgagcgggagcgagctctcgaggaggccgaggccgcggcgcaacggctggcggacagcctgtccctccgcgaggctgcgcaagaggaacaagcgcgtcgcaatctggaaagtgcccgcgccgagagggccgcactgaaccagcgggccgctgaactcgaggcgcaggcaagggagctggatgcaagggcgcgtagcggcggggcggccacgggcgacagcgacttagccgcccgcctcgcagctgccgaacacaccatcgcggatctgcagggcgcgctggattcgtccaccggggaggtcgaggcccttcgcctggcaggcgagatagggcccagcatgcttcgcgacgccgtgtcccgtttagaccgcgccgggcggcaggcgggtctctggggcgggcggactgtgaagtacgccgccaaccaggggggcctcgcccagcacctctcggagatggccgggactctccagcggctccccgaggagctcgaggggacgattaagtcatcctcgagggacctcgcccgaggagcggtggagctcgtactggcgagttaccaggccagggaccccgacttctccccatggacggcgctggacgagttccctcccgggaccgaggacggcccgcgcgcgcaggtccgggatgccgccgaccatatcgtccacagcttcgagggttcggcccctcggctcgcgttcgccctcaactccgacgaggagggcgatgacggcggtgtgggcgacagtggcgacgaggctggcgacccgggtgcatcggagtga

SEQ ID NO: 80588 - DNA, 401 bp, Oryza sativa
  Clone ID: PAT_MRT4530_80198C.1
ttgcgggatcttgaatggcacacggtcgactgctcaagccatcagggcttgtgctttatgccagtgtgaccctgtgtaaagttgaatgtcatgcagtgaggcatagattggtgacgttgctgccgtgcccatgaaaaaccaatgctgagaattaatgatgtgacatgattgtctgagtacaacgaacctgggacggagtcacgtccatgctgaggtttgttttctgtggggaccgaaaggagtgataatgatgttgctgtggcattgctgagtggtgctgatgatggttgctgtgctgggaactgctgtttatatgtgattctctggttcaggttattcctagccacaagcatgcactcaattcgtcagctagcttgtgtgttggaccaaacatttggtgt

SEQ ID NO: 80589 - DNA, 3054 bp, Oryza sativa
  Clone ID: PAT_MRT4530_80199C.1
atggcacggggttccgctctgctcgatggtagcgtgctgccgccttcccgtatcgtgagcgagaggcaggctgggctgtcgcgccgcttcatgccggaatctgccaccggccgggagatagtcacgctgggcgagggacgcccggcgccagactacccggggcggtccgtcttctttctcccctttgcaatggcagggctggttccaccattttcttctttcttcatggatgttctggagttctacgatctccagatggcgcacctcacccccaacgcggtgatgacattggccatcttcgcgcatctgtgcgagatgttcattggggtgcgcccatctcttcggctgttccggtggttcttcaccgtgcagtcggtgtcgccgccatcggtagtcggtggctgctacttccagccacgggggccggtgctgaaccgctacatcccctgcgccctccgcaagaagtgggacgactggaagagcgactggttctacactcccctcgccgacgaagcgcgcctccgacttccgaaccagcccccggcgcaggcctccagctggcgggcgccggtagatctgggggatggctatgacgccgtcctcgaccgcctggcgggcctgcgatcccaggggctcacaggggccatggtgtacggcgactacctccgtcgtcggattgcgccgctccagcgatgcgctcggggcgcctgggagtacaccgggtccgaagacttcacgaggacccaccagggagtgagatgggactgggctcctgaggacttcaagatattggtccaacgggtgctgaatctcaactccgtagaggcggccctcattccccaaggaatcctccccctctgcagcgatccagaccgcgcctccatcctgaccattatgatggcggtcggggcctcagaggagcgagctccaaagggccacgacggcgcaggcgggagccgcaggggggaacaatctaccccgagagggggtcgtgcttctgggtcccgcgacaggggcccggggagcagccgccctgccgacgcccgggggaagaggaagcagggaggaacacctcccccatctcctccccgagggggcggggcggcgcgtgccagtaacaggcgcccggagggggccgcgccaacatcgcagcccgagggggagcgcaagaagaagcggccccgtaagatgtgggagacagaaccatctcggggaaacctcatttcccctccaaagtggtcgtttaaccgaccccctcgcagcgagatcccgtcgcgtccctcccgccattccaagtccggccagtctgaggccgaggatccggcggccgcagaggccctcaggcgggaatctgaccggcgagaggccgcggatcgcctacgggaagccgaggaggccgcccaggaggccgcccgggctcgccaggccgaggaaaccgctcgggaggaggccggatttcgccaggacgaggcgatggcgacttccgaggcagctcgcgacgaggccgcgggcgcgtcgcttgggcccactccctcaggcgacactcaggcgacaacttccggggcagctggcgacgaggccgcgggcgcgtcgcttgggcctactccctcgggcgacgctcaggaccaaccgggtccgggggacatccccgagtccggcacttccatcggcggcccgagccgcgtggcatcctctccaaggcggctcttccccacgccttctatcgccctactgaacgcagagccccttctgcaggccttggccgccgcaaacaccacggtgttggatgggttaagtgcccaggtggaggtcctgcaggcagagcgggcggagctcgacgccgcgtgggcgcgtgtcgaagaggggcgacgctcggtggaggccatggtggaggtgggccgtaaggctcaccgccagcacgtctcggagcttgaaactcgtaagaaggtgctggcggagatcgccaaggaagtggaggaggagcggggggctgccctcattgccaccaccgtgatgaacgaggcgcaggacaccctccgccttcaatacgggagctgggaggcggagctagggaagaagctcgacgccgcccagggggtgcttgacgctgccgctgcccgagaacagcgggcggcggagaccgaagcggcgtcccggcggcgcaaagaggcccttgaggcgcgcgccatggcgctggaagagcgcgcctgcgtcgctgcctgcgccgaagaagagttcacgctccgcctccgcgaggacgcgctcaccgaacgggagcgagctctcgagggggccgaggccgcggcgcaacagctggcggtcaacctgtccctccgcgaggcagcgcaggaggagcaggcacgccgcaatctggaaggtgcccgcgccgagagggccgtactgaaccaacgggccgctgagctcgaggcgcgggcgaaggagctggacgcgagggcgcgcagcggcggggcggccacgggcgaaagcgacttagccgcccgcctcgcagctgccgaacgcaccatcgccgatctgcagggcgcgctggactcgtccgccggggaggtcgaagccctccgcttggcaggcgaggtagggcccggcatgctttgggacgccgtctcccgcctagattgcgccggtcggcaagtgggcctctggagagggaggaccgtaaagtacgccgccaaccagggaggcctcgcccagcgcctctcgaagatggccggggctctccaacggctccccgaggagctcgagaagacaattaagtcatcttcgaggaacctcgcccaaggagcggtggagctcgtcctggcgagttaccaggccagggaccccaatttctctccatggatggcgctggatgagttacctcctgggaccgaggaccgcgcgcgcgcgcaggtccgggatgccgccgaccatatcgtcgacagcttcgagggctcggcccctcggcttgcgttcgcccccaactccgacgaggagggcaatgccggtggtgcagacgacagtgacgtcgaggccggcgatccgggcgcatcggactga

SEQ ID NO: 80590 - DNA, 4620 bp, Oryza sativa
  Clone ID: PAT_MRT4530_8019C.1
atgaccggaaacgagaacgtagtggctacaaaccaaggcgactccatgtcgaaaaatcctcccgctaagacggagaacggagcatcgacgacatccgagctcgagaaggattctgatgcggccaaaccttgtccttccgacatgaaccgcgagccgacaaagatgacttccgaagccacaaggtcctggtgtcctatccacaaaaccaagaaacacactttgcaagcctgttgggttttcctcaacgtccgcgctgaaattcgcgcctgcaaagagtgtggaattcagcgtatttctccaacccgtgatgtctattgtcctatccacaagacaaagactcacgacctctcaagctgcaaagtctttctcagcgccatgaaagctccatctcctaaggtccagcagtcatacgtccccatcagggataatgacaaggaacaaggagcgactccaacttcagatcgattcgttggggtaatcgatatcgatcctcacgaaccatcagtcttacgccttctcgaagactatgggtcatcgacaacaagcgtgtcgcgggaggtattggctatcgatgatgttggcacgtcagcgcacgccaacgcagaagcggggaatcaatcgactactccagcccagcacattagggccgttcaagctatactgagggaaactccctacgatcccgttctgaacgatgacctcgagcgttggacagaacgactacgggaattagtgaccaacctcagcaacgcgttcgaagaagccgctaccgcagcacacccggagcagccaccactagcgatgccaatggtgaaaacccggaacagagggaatcacctcaacgagctacccctccacctcgcggcactggcgatctccgagatcacatcaacggccgccaagaggcacgacgcacacgagacaacggctttcggtcgttctctgcgtgatgtccgatggcctgagagattccgacctgtagcaatagaaaagtatgatgggagcactgaccgagaggagttccttcaagtctattccacagtactctacgctgccggagcagatgacaatgcgttggcgaattatttaccaactgcgttgaaaggttctgcacgttcatggctgatgcatcttcctccctactcaatctcttcgtgggcagacctgtggcaacagttcgtcgccaatttccaaggaacatacaagcgccacgcgatcgaagacgacctacacgcgttgatacagaactcgggtgaatcattgagggaatatgttcggcgcttcaacgagtgcagaaacacaattcccgaaatcaccgacgcttctgtaattcgcgccttcaaatccggtgtcagagatcgctatactacccaggagttggcgacaagacgcatcacaaccactcggagattgttcgagattgttaagcgatgcgcccacgcagacgatgcgctaaggcgcaaaaacgataaaccgaagaccgggggagagaagaaaccagccatggacgcatctgagtcaagcaagaagaaaaatcgcaaaaatgggaaaaggaaagctcaagcgaaagtcctcgcagcagaatacgcgaaccctcccaagcgcccagacccacaaagtagcgacacaaagaaagcatggtgccccatacacaagacggacagacattctctggaagattgccttgttttcaaaaaatcgctcgagaagcacattgcatttgaaaaaggcaagcgagtacgcgtggtcgagaagaacgaggaggcggttcctcacgaatcggattcagcatatccagactccgacctccacgtttcacacatcttcggaggttccacaacgtactcctcaaagcgagaatacaagaaagtggaacgtgaagtctgttcgacatggcagggggctgcacccaagatgaagtggtatgagcagaagatagagttctcggaagaagaccaccccaagaccgccgtcatcccaggacgatatccgatcatggtcgaacccactattcggaacatcaaagtagcgcgagtcctcatcgacggtggcagctcaatcaatcttcttttcgccagcactttggacgcgatgggaattccgcaaagcgagttgacaccaaccgatcaacccttccatggaattactccccaatcatcgtccagaccattgggcaagattacgttgcctgtaactttcggccaagccaacaacttccgaacagagcagataacctttgatgtcgctgaattcgatacaacttacaatgccatcatcgggagaactgcgcttgcgaagttcatggccgcatctcactatgcgtatcaagtgctcaagatgccgggaccgaagggaacaatcactattcaagggaacgcaaagctggtggtgcagtgcgacaagcggagccttgacatggtcgagcaaacgcccagcccatccaccacgactgagccacccaagaaaccgtccgacatgccgggggtccccagggaggtgattgagcacaaactcatggtgcgacccgatgccaagccaataagagaaagactgcggagatttgcaccagaccgaaaacaagccatacgagaagagctcgacaaacttctcaaagctggcttcatcagagaagtacttcatctagagtggctagccaatccagtcatggtgcagaaggccaacggaaaatggagaatgtgcgtcgacttcaccgacctcaataaggcgtgccccaaggatcacttccctctccctcaaatagatcaactggtggattcaacagccggttgcgagctgttgagcttcctcgacgcttactctggctaccaccaaatcagcatggcaaaagaggacgaagagaagacaacattcatcacgccgttcggggtattttgctatgttaagatgccgttcggactgataaccacagggaataccttccagcgcacggtccagggcgcacttagcgaccagctcggcaacaatgtcgaggcatatgtcgacgacatcattgtcaagaccaagatagacgactcattgattgacgatctgcgggaaacgttcgacaacctccgacgatatcgcctcatgctcaatccagagaagtgcacgttcggagtaccgtcgggcaagctgctcggattccttgtctctggcagaggaatagaagcaaatcccgagaagatcaaggcaatcgagaacatgaagtcacccacaagactcaaggaggtacaaaagctaaccggatgcatggtggcactgagcagccaaggagcaggggcaggatttatcttgacgtctccctacggagatcaattcaagcacgcaatccacctcaacttcagggcgaccaataacacagcagaatacgaaggactactcgccgggataagagctgcagctgcacttggggtcaagcgactaatcgtcaaaggggactccgagctagtcgcgaaccaggtgcacaaagattataaatgctctaaccccgagttatccaagtatctcgcagaagttaggaagctagagaaaaggttcgatgggatcgaggtccgacacgtctaccgcaaggacaacatcgagccaaacgacctagcacgacgtgcgtccagacgagaaccgctcgagcccagcacttttctcgacatcctgacgaagccatcagtgaaagaggaggtcaccaaggcagaacgcgctgttgccgatatcgagaccacagatgactggcgcatcccactaatcaaattcatcaacagcgaggagttgcccgaggacgatacagaggccgagaaaataacccgtaaagcaaagatctactatatacttgggccattcccacgaggacagggcggctacaggttcctattcgtggcgatcgacaagttcaccaaatggatcgaagcagtactcacgggggaaattaaggccgacaacgccatcaaattcatcaaagggatattttgcagatacagactaccgcaccgcatcataaccgacaacggctcccagttcatcagcgccgatttccaggattactgcatcgggctgggggtcaaaatatgcttcgcctcggtctctcaccctcaaagcaacggacaagttgagagggcaaacggcatagtactacaagggataaaaacccgtgtctacgacagattcatgtcacacgacaaaaaatgggttgaagaactcccatcagtactatgggccgtacgcaccacaccgacaacgtctaacaaggaaacacccttctttctcatgtacggctctgaggctatgctccccggcgagctacgacatcagagtacacgagtacagaagcactccgacgaggaccaggaggaacagcgagacatcgatgtaaatcttctcgaggagcatcgtgaacgagttgccgttcgagcagccagctatcagcaggccctccgctgttaccacaagaagcgcatccgagcacgcatactttcgatcggcgactatgtcctccgacgggttcaaagccaagcagggcgaaacaaactctcaccaaaatgggaaggaccttacacgatcacacaagtcttgcggccagacgcattcaaaatcgcagacgacgacggtcgcgagttagcaaattcttga

SEQ ID NO: 80591 - DNA, 512 bp, Oryza sativa
  Clone ID: PAT_MRT4530_801C.1
ttcgtgccctcctctctgtcgctgtcgccacgtgccctcctctccgtcgctatcgccgcccgccctcctctccgtcgccgccgccgcgcgccctcctctccgtcgccgtcgccgtcatcgcgcgccttcctcttcgtcgccatcgccactcgccttcctctccgtcgccgtcgccgctgcctccctctatttcgccggcgacaccgccgctgccatcctctattccgccggtcatgccgttgccacctccctctatttcgccggtgatgctgccgccctctattccaccttcgttgttgtcctctgctctggtgccgtcaccgccaaactgccctcctagttgcagctagagatgtttgcctgtgtggctctgctctttccctgcgatggatacgttccttggactgagcaaacaagcttcatgctctatcactaactgcgaggacagacaattgccccataatgcttgagtcttttgtccaagacgattccaacatcaggattgccatcta

SEQ ID NO: 80592 - DNA, 891 bp, Oryza sativa
  Clone ID: PAT_MRT4530_80200C.1
atgggcgacgacgtgggggcggagatcctcctgcggctgccggcgaaggccgtgctccggtgccgcgccgtctgccggagttggcgccgcatcaccaccaccgcctacttcgtcgccgcccactcccgccgccggccgctgcagctgctcggttacacggggctcgccgttgactcgtcgtcgtcgccctacagctacgtgttcacggtgatcacctccgtgatcccagccttctgcgacggcgacgacgcgggtcgccggatattgctgcggcgcgacatgcgcgtcagcctccgcggctcctgcgacggcctcttgctgttcgagcggaacacgggcggcggcggcgacggcggcgtgctcatctgcaacccggcgacgcggcagctggtcggcgtgacggtcggcgacaccgtgtactggggtcgccgccagaccgacgaccgcggccagatgtcggcgttcgacacggtgtcggagacgttccggcgggtggcgccgccgccgccggtgagccacgccgacgagggccccatgttcgacatgcacggcgcgctcgcggtgacggcgatgaagtcgaccgagccgtacatggacgtctggatcgccgccgccgccggaggtgagaactgggtgcgcctcctccgggtggagctgccgccgggacattactactccggcgaggtgaagccccacggctatggtaaggccgtcctggacgacgccggtgtgctgctcgtcgccatgaacggctgcccgagcttcctgtacgacaccaaaggcaagaggatggtgactggtgagttgctctcatcgtatcaacggttttatctgccagagctaactctattattattaacgactttgtcccaaaaataccatcaccgttag

SEQ ID NO: 80593 - DNA, 495 bp, Oryza sativa
  Clone ID: PAT_MRT4530_80201C.1
cttcaagtgaatacctcgcctggtggaacgcgtgtcggggcagtctcctactcgtctgaagcacgcagattgttcaacgtcaacgattttacgtctacagttgatgtagttaaggccatcgaggcgaatgtcaattacacaagtaaatctaagcgacgttcagacaagaggcgacaaactgcctcaaaaacccgctaccgggcaagaatggcaagagcgggcgcgattctagcagaatattggggctggggtggggaagctgaatgggggctatatgtcttcgcctacaaactggctcaggcgcgatcccggttcgaaactgagtcaagttattcggacggtgacgttaaagataaaggaacaaatttgcccgctgctctcgagacaatcggggtaatgattaccgaaacagcggatgaatctgggtacagcagcaggaaacgcattctatttatcataacagacggtaagctcagcttattagtgtttgttaag

SEQ ID NO: 80594 - DNA, 3168 bp, Oryza sativa
  Clone ID: PAT_MRT4530_80202C.1
atggcacggggctctgctctgctcgacggcagtgtgctgccgccttcccgcatcgtgaacgagaggcacgccggactgccgcgccgcttcatgccggagtccgccaccggtcgggagatagtgatgctgggagaggggcgcccggcaccagactacccggggcggtccatcttcttcctccccttcgcgatggctgggctggtcccgccattttctcattttttcatggatgttctggagttctacgatctccagatggcgcacctcacccccaatgcggtgatgacactggccatcttcgcgcacctgtgcgagatgttcattggggtgcgcccctctcttcagctgttccggtggttcttcaccgtgcagtcggtgtctccgccgtcggtggttggcggctgctacttccagccgcgggggccggtgctgaaccgctatatcccctgcgtcctccgcaagaagtgggacgactggaagagcgactggttctacaccccccttgccgacgaagcgcgcctccgccttccaagccagcccccggcgcaggtctccagctggcgggcgccggtagatctgggggaggagtacgacgccgtcctcgaccgcctggcgggcctgcgatcccaggggctcaccggggccatggtgttcggcgattacctccgtcgccggattgcgccgctccaacggcgcgcccggagcgcctgggagtacactgggcctgaagactacatgcggacccaccagggagccagatgggattgggctcctgaggacttcaagatcgtagtccaaagggtgctgaaccttagctccgcggaggcgtctcgccttcctcaggagatcctccccctctgcattgatcccgaccgcgtctccattctatccattatgttgggggtcggggcctcagaggagagagcccctaagggccacgacggcgcgggcgagagccgccgggggaaacaatctgccccaggagggggtcgtgcttctgggcctcgcgtcgggggcccggggagcagccgccctgccgacgcccaggggaagaggaagctcggaggaacacctcccccatctcctccccgagggggcggggcggtgcgtaccagcggtcggcgcccggagggggccgcgccgacgtctcagcccgagggggagcgcaagaagaagcggctccgcaagatgggggagacggaaccagcccggggaaacctaatttcccccccaaggtggtcattcaaccgaccccctcgcaggttcgtctcactctcattgcaaccatctttctccaaaaagaagttttttcttgctcactttgttcgtcttctggctttttcttctgcttcagcgatgtcccgtcgcattcctcccgccaccccaagtccggccagtccgaggccgaagatccagtggccgcagaggagcggaggcgagagtctgaccggcgcgaagccgcagaccgccttcgggaagctgaagaggccgcccgggaggccgcccgggttcgccaagcggaggaagctgctcgggaggaagccgcccgagcccgccaagccgaagaagctgcccgggaggaggccgcccgggctcgccaggctgaggcgacagcgtcacttgggcccactccctcgggcggccctcaggcgacatcctccgaggcggctcgcgacgaggccgcgggcgcatcgcctgggcctacctcaccgggcgacgcccaggaccaaacgggcccgggggacatccccgagcccagcgcatcctccggggggccaagccgcgtcgccttttctccaaggcggcttttctcctcctcttccgtcgccccgatggattagcgcccaggtggaggccttgcgagcggaacgagcggagctcgaggccgcatgggcgcgcgtcgaggaggggcggcgctcggtggacgccatggtggaggtgggccgtaaggctcaccgccgccacatctcggagctcgaagcccgcaaggcggcgctggcggagattgcccgagaggtggaggaggagcgagaggccgccctcgtcgccaccaccgcgatggtcgaggcgcaagacaccctccgtcttcagcacgcaagctgggaggcggagctgaagagcaagctcgacgccgcccaaggggttctcgactccgccgctgcccgagagcggcgggcaacggaagccgaagcggcgtcccggcggcgcgaggaggcccttgaggcccgtgccatggcgctggaagaacatgccggcgccgtggagaggggcttgacggaccgcgaggccgccactgctctccgggaggcgacgctggcggcgcacgaggccgcctgcgccgaggaggagtccgcgctccgccttcgcgaggatgcactcgccgagcgggagcgggctctcgaggaggccgaggctacgaccaaacggctggcggacagcctatcccttcgcgaggcggcgcaggaggagcaggcgcgccgcaatcttgaatgcgtccgcgccgagagagccgcgctggagcagcgggctgctggcctcgaggcgcgggagaaggagctagacgcgagggcgtctatcggcggggcggccgcgggcgaaagcggcttagccgcccgcctcgcagctgccgaacacaccgtcgcggagatgcagcgagcgctggactcctccaccggggaggccgaggcccttcgcttggcgggcgagattgggcccgacatgctttgggatgcggtctcccgcatgaagcgcgccggtcggcaagcgggcctctggggaggccagacgtcggtgccccccaccaatctggaaggcctcgctccgcacctcaacaggatggcttgggttctcgagcaactccccgaggagctcgagaagaccatcaaggcatcctcgagggacctcgcccggggggcggtcgaactcgtgctagcgagttaccaggcccgggaccccaatttctctccctggatggcgctggaggagttccctcccgggaccgaggatgacgcgcgcgcgcgggtcggggatgctgccgaccacattgtcaacggcttcgagggctcggcccctcggctcgcgttcgcccccagttccgacgaggagggcgacgccagcggcgaggacgacggtggcgacgaggccagcgacccgggtgcatttgaatga

SEQ ID NO: 80595 - DNA, 4353 bp, Oryza sativa
  Clone ID: PAT_MRT4530_80203C.1
atggagttgtcaaatcaagggcagacacccatgtcaactaacatgggttctcaaccattgccttcttaaaaaacaccacctaatcagggtgagtatccgtctatgttttatccatctttgcccggtgactggggtggacagccaatgttttctatgggagcttctgttccaattagttcgtattggagtgttcctatgagtcaacaatcggtccaaaaaggtgtttctaggccagagactccgcgttcttcaggggcacattctctaagcagagtatcattgaggccaccccagcaagtgctaagtattcgaacatctttgccaacaatggttggatcacaacactctcattctggccagaaactgaaaccatcagttgcttctctaaaggtccaaatactgaaatctacacagtcacagtcatcgaacaaaagttatggttagaagttgaaaccatcattggttcaaaatcagcaattggaatctgtgagatcaaagttcagggagtcactttctgctgctctgagaacagattctgatcagagtaagaatcaatcttctgatgtgcagcctgatgggtctgcagaccaaaagaaagagatggatgtagatgcagatcaagtggccaccacatcccaaggcatgagtgcagccaagtcggaagtattgacaagtgttggtgctgagaggcgtgctgaagatgagaagttaaacagtgatttagtttcgaacatagccacaccattaaacgcggacatccagcaacaaccagagaatgcttctttacaagatgaaatgttgggacaatatacagttgttgctgatgaactcttgcaaggtcatggactttgttgggtttctgactttgatgctggggttcctgaacctgccacacaacctaatttaaaaaggtccagggcttctgacattgaccctgttgttgcagacactctctcagaatctgagtccaaaagaatgaagtctgccaatgatgaggaagcgatagataaggatagcattattcagaaggcagatgatttagcagttagggttgaagaggagctgttcaaactatttggtggagttaataagaagtataaggagaaaggtagatctcttctatttaatctaaaagataaaagtaatcctgagttaagagagagggtattgtctggagatattacacctgatcgcctctgttcaatgactgcggaggaacttgcttccaaggagctatcggagtggcggttagctaaagctgaagaactagcacaaatggttgtccttcctagtaccgaggttgatgttagacgtttggttaggaaaacacacaaaggagaatttcaagttgaagtagaagaaacagatggtatctcagtggaggttgagcttggaggtaatcttcttactcaagttccatcaaaagcccctgaagatcagaccaaatcagacgataaagaaaatgaagataatggggcaggcaagaacgatccacaagatgatttagaatatgttgataatgagaaaagtgaccttatgcaagaacttatggtggatgacttgaaagacactgaaaaccttccaccgatcccttcactagatgaattcatgcaaggtttagattctgaaccaccttttgaaaatctctcagctgggacgccagaagaagattcagatgatcgagacgaagctgacactactgcagaatctgcggaacttcctgaggaagaagttaaagtttctgcagcagagaagattgtatctgaagctgacctgccatcttcgcaggataaatctgagtccaagttagagtcacccaaagatgaggtgggttcaaatttgggccctgttgagcagcgtgaaggaaagctgataaaatcctccccagatagtgttgaagtcaaacaaacaactactgaaaatgtgctgaatcgtgactctactgtgcataatatggcaactactcttcctatgatacgtgaaagtatatgggagggtgcaattcaacttaccatgtcttcgctcacaaatgtcgttgccatcttcaaaagtggtgaaaagccaccagtaaaagaatggcggagctttgttgaaatcaaggggagagtcaaacttagtgcctttcaagagtttgttgaacagcttcccaaatctaggagccgtgctataatggtaactgagttgtgttggaaggaaggttctcatgagagtggtcgccaacatctcttgcagacaattgactcgtatatttcagatgaaagagtagggttagctgaacctgcagatggaatagagctgtacctgtgcccttctcaagggaaaactgtggagattctctctcggcacctgccaaaggagcatttggagagtcttgctgtgtcagcatcctccatcatcggggtcatcgtctggcggaggcccaacgttcccaggatgccggcacaccctaggcatgatggttcccggaggccgtcgattttaaagaaaccgcaggttactggttctactccaggccctaggccctccctgcctatgagctcgcacggcgcgccgccgggttttccagttcagcgtcaccgccacgaggaagatgtaactgatgatgtccctccgggctttggccctggtgttgctagggatgaagacgatcttcctgaatttaattttgttaactcgtccaatcctgctgctaatgtaacaaccacccaggcctacaagggccggcagcatgtaccccttacctctgctcgcccggtagagcaaatgagggaactggttcagaagtatggtaaaagatcatctgttcaggctcgtccttgggatgatgatgacgacgatgatataccagaatggaaccccaaccagcttgtcacccaacaacagccaacaaggcagctcccagttccacccacaccacagcaaccgctgcctccaccaccaccaccgccctcgcttcagcaattgcatcatccctaccagcatcagcagcagcagcagcagcagctttaccaccaccaaaatgcattgcaacctcagatacccagcaactctatcccccaggcttacctccgaacccagcaaccattgcagcaacttcctctgatgcagcagcagcttcagccagcgcaagcctggcagcagaccaatgcttggtggccggcgcagggcggcgccgccgccgccgctgcgccggcgagcatggtgcagcagtcgcagtatggtgtgatacccaacagtaataacagcgcgcaaagctatggttctgggagtgaatcggggagtgaagatgatgaccttgatgttggtataggtgatgtaccatctgagcttgaggttaagaattctggtctaatacctgcacaatctaaagagacagaaaggcagctttcgaagaaggaatggaagaagaaagagcttgcagaactagatactgtgctggctgagctggggatttctggacatgctgaaagaaagccagataagcagaatggtggtgataagaatggtgctcctcaaggaccatggagaggtggcggatacaaatctgaagaggaaatcacagctgtgtatatgaaggagaagatgaagaagatagcttcagccaaaaagaagtccggcagaggtggatggggctgcaaagcatgctgcaaaatggaggatgctgctaggagtgcaaagcttgctggtgcaaagaagaaagagaaaaccaacagcctgtcgatagatagactgcttccatcaccaagttcagagttcagaatgagcaccgggctcatttgttctacttggtctgtttggtttagattgctgaacgcacttctcatgaatatatccaccatatctggtaagatatgctgcccttatgtgatcaacattggagatttagtgaatggcaattgtgtcatcagcatgcagaaatcgtactcagtaaactcaggtttcatcggtgccaacggcttgacttctggatatatttgttgaatggcatggagaccggataggaacctgtaaacccttgaaatttatggtgggttttacaacctgggagcgtacgttgtagggtggcgtctctcattgtatgtataagttcagcgattcaatgtaagcatgagtcagtcgtgtacacccgtacaggggatgtaatctggataaactagagatagttgtgggttgtattcataatcgtaggaaaagaaattttaaatattcgtttcgaacaatagctcctctcttcgaaccaatctgtttgtagacgcttcgcaccattgattagtccacaatcacgtaatgtgaagcagtgtctgaatggttataaaaaaaaaaaaaaaaaagggcggtagatgtataggatcc

SEQ ID NO: 80596 - DNA, 1771 bp, Oryza sativa
  Clone ID: PAT_MRT4530_80204C.1
tcagcgagatcccgtcgcgcccccccccgccattccaagtccggccggtctgaggccgaggagacggcgaccgcggaggcccggaggcgggaagctgaccggcgagaagccgcggaccgcctccgggaagccgaggaggctgcccaggaggccgtccgggttcgccaggccgactccgcccgaggcgacgacgacttccgaggccacccacgacgaggccgcgggcgcgccgctcgggcccgacccttcgggcgacgcttgggacgggccagcttcgggggacgcccccgagtccggcacgtcgattggcgggccgagccgcgcggcacccacaccgagggggctctcccctctgccttccgctgccccactgagcgcggagcccttcttgcaggccttggccgccgcgaacagcacggtgctggacgggttaagtgcccagatggaggccctgcaggcggagcgggcggagctcgacgcggcgtgggcgcgcgtcgaggagggccggcgctcggtggaggccatggtggaggcgggccgcaaggcacaccgccggcacgcctcatagctcgaggcccgtcgtagggacctggcggagatcgccagggaggtggaggaggagcgggagactgccctcatcgccaccgccgtgctcgacgaggcgcgggacgacctccgcctccaatacgggagccgggcggcggagctagaggagaagctcgacgccgcccgggaagtccttgacgccgccgctgcccgggaacggcgggcggcggagaacgaggcggcgtcccggcagcgcgaagaggcccttgaggctcgcgccacggcgctggaggagcgcccccacgccctggacgcgaaggagagagacctggcggaccgcgaggccgccgtcgccacccgggaggcaacactggcgacgcacgaggccgcctgcgccgaagaggagtccgcactccgcctccgcgaggacgcgctcaccgagcgggggcgagctctcgaggaggccgaggccgcgacgcagcggctggcggacagcctgttcctccgcgaggcagcgcgggaggagcaggcacgccgcaatctggaaggcgcccgcgccgagagggccgcactggatcagcgggccactgagctcgaggcgcgggcgaaggagctggacgcgagagcgcacagtggcggggcggccgcgggccacggcgacctagccgcccgcctcgcagccgccgaacacaccatcgccgagctgcagggcgcgctggactcgtccgccggggaggtcgaggccctccgcttggcgagcgaggtagggcctggcatgcttcgggacgccgtctcccgtctagaccgcgccgggcggcaggcgggcctctggggcgggcggtacgcgaagtacgccgccaaccaggggggcctcgcccagcgcctctcagagatggccggggccctcgagcggctccccgaggagctcgaggagacgatcaagtcatcctcgagggacctcgcccggggtgcagtggagctcgtactggcaagctaccaggccagggaccctgacttctccccgtgggcagcgctggaagagttccctctcggaaccgaggacggcgcgcgcgcgcaggtccgggacgccgccgaccacatcgtccacagcttcgagggtacggcccctcggctcgcgttcgcgctcgactccgacgaggagggcggtgacgacggtgcggacgacagcgacgacgaggccgacgacccgggcgcgtcggagtga

SEQ ID NO: 80597 - DNA, 1206 bp, Oryza sativa
  Clone ID: PAT_MRT4530_80205C.1
gttaatttggagcgtcacgggctagttcaggtcgggactagttcggggcgtgacaccgttcgcagccgccgtccgccttccgttccggccgacgtcgtcgtctacctctcgccggcccgcgtggctgccacgaaggcgccacgttggcgccacctcgggcgcgaccaggtcaagccgaccccgatcaaaaatccaataatcttagaaattcaatatcttcccaacctttcggagcccgaagacccgcagtgcgaggatttcgaggatcaagctcaagttgctgaagaagatgatgtggatcccgctgacgaggagttcttccaggagatgccacgtcagcgaaaccacccatatatactgccaatggaccttgagtgcacggtttgtatgagtttaggacatgtgatcaatcagttccttgaaaaaaaaatcattagccgctcatcaacagctgatcgacagggtggccacgccggtcgatcacccagcctgacgttgagatctagcgagagctttctgtacccaagtggcggcgggattcttgctggttgctgcaagttagatttgaagagattcttgcctggatctttacgaggtgatgcctcgctttccgctcactccatcgatcatcgtctgatggctgcagccacacatacactcaacgagaaggtgaaaggcgatgtctcaagttgtgatacaaatgaacatacaagagataagcgtaggtggggcccacaattgagcaacgcatcgtcagggaaaggagatggaggagagagacctcgttgctgtcgtcgaccatccccacgctccacgctgttgtcgaccatcgccacgctcaatgccgcgtcgaccattgccaagggaggagagctgtcgggcgctcgccggctcgatggggaagctcgctactccacgccgccgccggggagcccttactccacacgacgtcccgaccttgtcacggagagggcagggcagtggagaggcgaggaagacgaggatggatctgtcatcgatctgccgccgagccgcttcgagtgccacctcaccccgtccaccccattctacgttgcggcggtcggaggagaggggaggtgtggtggaggagaagagaatgggagagggaggcgacggagaatggcatcgtctagcacctgccggcaaggagaaggggagatccggcgagtcgctgccatcgctgcc

SEQ ID NO: 80598 - DNA, 416 bp, Oryza sativa
  Clone ID: PAT_MRT4530_80206C.1
aaaccaagcagattctgctttgcattacattattatcgtttaatcaattattcgaagtgtctacgaacagattggttcgaagagaggagctattgttcgaaacgaagatttaaaatttcttttcctacgattatgaatacaacccacaactatctctagtttatccagattacatcccctgtacgggtgtacacgactgactcatgcttacattgaatcgctgaactaaaagagagaaagagagaagccaccctacaacggacgctcgcaggttgtaaaaccagcataaatttcaaggttttacaggttctatctcggtctccatgccattccacccacactcccagaaccatagctttgcgcgctgttattactgttgggtatcacaccatactgcgactgctgcaccatgctcg

SEQ ID NO: 80599 - DNA, 3150 bp, Oryza sativa
  Clone ID: PAT_MRT4530_80207C.1
atggcacggggctccgctctgctcgacggtagcgtactaccgccttcccgcattgtgggcgagaggcaggctgggctgccgcgccgcttcatgccggaatccgccaccggccgggagatagtgatgctgggcgaggcgcgcccagcaccagattacccggggcggtccatcttcttcctccccttcgcaatggccgggttggttcctcctttttcttctttctttatggatgttctggagttctacgatctccagatggcgcacctcacccccaacgcagtgatgactttggccatcttcgcgcacctgtgcgagatgttcattggggtgcgcccatctcttcggctgttccggtggttcttcaccgtgcagtcggtgtcgccgccgtcggtggtcggtggttgctacttccagccgcgggggccagtgttgaatcgctacatcccctgcgccctccgcaagaagtgggacgattggaagagcgactggttctacaccccccttgccaacgaagcgcgcctccgactcccaagccagcccccggcgccggtctccagctggcgggcgccagtagatctgggggatgactatgacgccgtccttgaccgcctggcgggcctgcgatctcaggggctcacaggggccatggtgtacggcgactacctccgtcgccggattgcgccgcttcagcggcgcgcccggagcgcatgggagtacaccgggtccgaggactacatgaggacccaccggggagtcagatgggattgggctcccgatgacttcaagatcgtggtccaaagggtgctgaatctcagctccatggaggcgtctcttattcctcaaggactcctccccctctgctgcgatccagaccgcgcctccattctgaccatcatgatgggggtcggggcctcagaggaggtggctcctaagggccacgacggcgccggcgggagccgccaggaagaatcaaccccaggagggggccgtgcttctgggccccgcgacgggggctcggggagcaaccgccctgccgacgcccgggggaagaggaaacagggaggaacacctcccccatctcctccccgaggggacggggcggtgcgtgccagccgcaggcgcccggagggggccgcgccgacatcacagcccgagacggagcgcaagaagaagcggctccgcaagacgggggagacggaaccatcccggggaaacctgatttcccctccaaggtggtcgttcaaccgaccccctcgcagcgatgtcccgtcgcgttcctcccgccatcccaagtccggccaatccgaggccgaagatccggcggccgcagaggaacggaggcgagaatctgaccggcgagaggccgcagatcgccttcgggaagctgaagaggccgcccgggaggccgctcgggttcggcaggcggaggataccgctcgggaggaggccgcccgggctcgccaagccgaagaagctgctcgggaggaggccgcccgggctcgtcaggctgaagaagccactcgggaggaaaccgcccgggctcgccaggctgaggcgatggcgtcttccgaggcggttcacgacaagaccgccggcgcgtcgctcgggcccactccttcgggtgacgctcaggcgacaacctccggggcggctcgcgacaaggccgtgggcgcatcgcctgggcccgctccctcgggcgacgcccaggaccaaacgggtccgggggacatccccgagctcagtgcgtcttctggcgggccgagccgcgtcgcattttctccaaggcggctcttctcctcgtcttctgccgccccgctgagtgccgagccccttctgcaagccttggccgccgcaaacaccgcggtgctagatggattcagcgcccaggtggaggccttgcgagcggaacgagcggagctcgaggccgcatgggcgcgcgtcgaggaggggcggcgctcggtggacgccatggtggaggtgggccgtaaggctcaccgccgccacatcttggagcttgaagcccgcaaggcggcgctggcggagatcgcccgagaggactccctccaccttcaacacgggagctgggaggcggagctaaagaaaaagctcgacgccgcccagggggtccttgacgccgccgctgcccgagagcagcgagcaacggaggctgaagcggcatcccgacggcgcgaagaggcccttgaagcccgtgccatggcgctggaagatcatgccggcgtcgtggagatcagcttggcggaccgcgaggccgccgccgctatccgggaggcgacgctggcggcacacgaggccgcctgcgccgaagaggagtccgcgctccggcttcgcgaggacgcgcttgctgagcgggagcgagctcttgaggagtccgaggccgcgacacaacggctggcggacagcctgtccctccgcaagacagcgcaggaggagcaggcgcgccgcaatctggaatgcatccgcgccgagagagccgcgctggagcagcgggctgctaacctcgaggcgcgagaaaaggagctggacgcgagggagcgcagcggcggggcggctacgggcgaaagcgacttagtcgcccgcctcgcagctgccgaacacaccgtcgcggacatgcagcgcgccctggactcatccaccggggaagccgaggccctccgcttgtcgggtgagatagggcccggcatgctttgggatgcagtctcccggctggatcgcgccggtcgggaagcgggcctctggaaaggccagacaatttcgcgttctaccaatctggaaggcctcgccccgcaccttaggaggatggcctgggctgtccaacaactccccgaggagctcgagaagaccatcaagtcatcctcaagggacctcgcccaaggagcggtggaactcgtgttagcgagttaccaggccagggaccccggcttctccccatggatggcgctggaggagttccctcccgggaccgaggacgatgcgcgcgcgcgggtccgggatgccgccaaccacatcgtccaaagcttcgaggggtcggcccctcggctcgcgttcgcccccagctccgacgaggagggcgacgccagcggtgaggacgacggtggcgacgaggccggcgacccgggcgcattggaatga

SEQ ID NO: 80600 - DNA, 341 bp, Oryza sativa
  Clone ID: PAT_MRT4530_80208C.1
tccacgcgtccgcccacgcgtccggaagaactagcacaaatggttgtccttcctagtaccgaggttgatgttagacgtttggttaggaaaacacacaaaggagaatttcaagttgaagtagaagaaacagatggtatctcagtggaggttgagcttggaggtaatcttcttactcaagttccatcaaaagcccctgaagatcagaccaaatcagacgataaagaaagtacagatgataaaacaggcatacaagacaatgacaaggcacctgatgggacttcacaagatgaagataatggggcaggcaagaacgatccacaagatgatttagaatatgttga

SEQ ID NO: 80601 - DNA, 3114 bp, Oryza sativa
  Clone ID: PAT_MRT4530_80209C.1
atgagcggtctcttcaagactgccacattactcgagtagcacacgaatctggacacgtaattaacgcgcgcacgatatgatctacctcgactgccacaaccgcatatccacctcatgcgccgcaagcgggcgaatgggattagtggaagcgtgggcgcgagaaacgagggggcgtcttctcttccttccggcgccatggcacggggctccgctctgctcgatggtagcgtgctgccgccctcccgcatcgtgagcgagaggcaggctgggctgccgcgccgcttcatgccggaatctgccaccggccgggagatagtcacgctgggcgagggacgcccggcgccagactacccggggcggttcgtcttctttctcccctttgcaatggcagggctggttccgccattttcttctttcttcatggatgttttggagttctacgatctccagatggcgcacctcacccccaacgcggtgatgacattggccatcttcgcgcatctgtgcgagatgttcattggggtgcgcccatctcttcggctgttccggtggttcttcaccgtgcagtcggtgtcgccgccatcggtagttggtggctgctacttccagccacgggggccggtgctgaaccgctacatcccctgcgccctccgcaagaagtgggacgactggaagagcgactggttctacacccccctcgccgacgaagcacgcctccgacttccgagccagcccccggcgcaggcctccagttggcgggcgccggtagatctgggggatggctatgacgccgtcctcgaccgcctggcgggcctgcgatcccaggggctcacaggggccatggtgtacggcgactacctccgtcgtcggattgcgccgctccagcggcgcgctcggggcgcctgggagtacaccgggtccgaagactacatgaggacccaccagggagtcagatgggactgggctcctgaggacttcaagataatggtccaacgggtgctgaatctcaactccatggaggcgtccctcattccccaaggaatcctccctctctgcagcgatctggaccgcgcctccatcctgaccattatgacggcggtcggggcctcagaggagcgagctccaaagggccacgacggcgcaggcgggagccgtaggggggatcaatctaccccgggagggggtcgtgcttctgggtctcgcgacggaggcccggggagcagccgccctgccgacgcccgggggaagaggaagcagggaggaacacctcccccatctcctccccgagggggcggggcgtggtcgttcaaccgaccccctcgcagcgagatcccgtcgcgtccctcccgccattccaagtccggccagtctgaggccgaggatccggtggccgcagaggcccggaggcgggaatctgaccggcgagaggccgcggatcgcctacgggaagccgaggaggccgcccaggaggccgctcgggctcgccaggccgaggaaaccgctcggaaggaggccgcccgggcccgccaggccgaggaagccgctcgggaggaggccggatttcgccaggacgaggcgatggcgacttccgaggcagctcgcgacaaggtcgcgggcgcatcgcttgggcccactccctcgggcgacgctcaggcgacaacttccggggcagctggcgacgaggctgccggcgcgtcgcttgggcccactccctcgggcgtcgcccaggaccaaccaggtccgggggacatccccgagtccggcacttccatcggcggcccgagccgcgtggcatcctctccaaggcggctcttccccacgccttctatcgccccgctgagcgcagagccccttctgcaggccttggccgccgcaaacaccgtggtgttggacgggtttagtgcccaggtggaggccctgcaagcagagcgggcggagctcgacgccgcgtgggcgcgtgtcgaggaggggcggcgctcagtggaggccatggtggaggtgggccgcaaggcacaccgccggcatgtctcggagcttgaagcccgtaagaaggtgttggcggaaatcgccaaggaagtggaggaggagcggggggctgccctcattgccaccaccaacagcgggcggcggagaccgaagcggcgtcccgacggcgcgaagagacccttgaggcgcaccatggcgctggaagagcgcgcctgcgtcgtggagaaggacctggcggaccgcgaggccgccgtcgccatccgggaggcaacgctggcggcgcacgagtctgcctgcgccgaagaggagtccgcactccgcctccgcgaggacgcgctcaccgagcgggagcgagctctcgaggaggccgaggccgcggcgcaacggttggcggacagcttgtccctccgcgaggcagcgcgggaggagcaggcgcgccgtaatctggaaggtgcccgtgccgagaaggccgcactggaccagcgggccgctgagctcgaggcgcgggcaaaggagctggacgcgaggacgcgcagcggcggggcggccgcgggcgaaagcgacttagccgcccgcctcgcagctgccgaacacaccatcgccgatctgcagggcgcgctagactcgtccgccggggaggtcgaggccctccgcttggcaggcgaggtagggcccggcatgctttgggacgccgtctcccgcctagatcgcgccggtcggcaggtgggcctctggagagggcggaccgtaaagtacgccgccaaccagggaggcctcgcccagcgcctctcgaagatggccggggctctccaacggctccccgaggagctcgagaagacaattaagtcatcctcgagggacctcgcccaaggagcggtggagctcgtactggcgagttaccaagccagggaccccgacttctccccatggatggcgctggatgagttccctcctgggaccgaggacagcgcgcgcgcgcaggtccgggatgccgccgaccatatcgtccacagcttcgagggctcggcccctcggctcgcgttcacccccaactccgacgaggagggcgatgccggtggtgcagacgacagtgacgacgaggccggcgacccgggcgcatcggattga

SEQ ID NO: 80602 - DNA, 156 bp, Oryza sativa
  Clone ID: PAT_MRT4530_8020C.1
atggagtgcatggtgttggtctttgctgcaggtgtgggtggtgacagcgacgggcacgcatttggcaagactttggtcgctgttcttaatgaggatgatggcaatatagtgaaggttctatgcaaaaccttggagatgaaacttctggaagtctaa

SEQ ID NO: 80603 - DNA, 2871 bp, Oryza sativa
  Clone ID: PAT_MRT4530_80210C.1
atggcacggggctccgctccgcttgacggtagcgtgctgccgccttcccgcatcgtgagcgagagacaggccgggctgccgcgccgcttcatgccggaatctgccatcggccgggagatagtctcgctgggcgagggatgcccggcgccacgctacccggggcggtccgtcttcttcctccctttttctatggcagggctggttccgccattttcttctttcttcatggatgttctggagttttacgatctccagatggcgcacctcacccccaacgcggtaatgacattggccatcttcacgcacctgtgcgagatgttcatcggggtgcgcccatcccttcggctgttccggtggttcttcaccgtacagccggtgtcgccgccgtcggtgaagtgggatgactggaagagcgactggttctacacccccctcgccgacgaagcgcgcctccgacttcggagccagcctccagcgcaggcctccagctggtgggcgccggtagatctgggagatggctatgacgccgtcctcgaccgcttggcgggcctgcgattccaggggctcacaggggccatggtgtacggcgactatcttcatcgccggatcgcgccactccagcggcgcgcccggggcgcctgggagtacaccgggtccgaagacttcatgaggacccaccagggggtcagatgggactgggctcctgaggacttcaagatagtggtccaacgggtgctgaatctcagctccgtggaggcatcccttattcctcaaggagtcctccccctctgcagcgatccagaccgcgcctccatcctgaccatcatgcaggcggtcggggcatcggaggagcgggctcctcgaggccacgatggcgcgggcgggagccacaggggggaacaatctaccccgggagggggtcgtgcttctgggccccgcgacgggggcccggggagcggccgccctgccgacgcccgggggaagaggaagcaggaaggaacccctcccccatctcctccccgagggggcggggcggcgcgtgccagcagcaggcgctcggagggggccacaccgacgtcgcagcccgagggggagcggaagaagaaacggctccgcaagatgggggggacagaaccatcccggggaaaccttatttcccctccaaggtggtcgtttaaccgaccccctcgcagcgagatcccgtcgcgtccctcccgccattccaagtccggccagtctgaggccgaggacccggcgaccacagaggcccggaggcgggaatctgaccggcgagaagccgcggatcgccttcgggaagccgaggaggccgctcgggaggccgcccgggctcgccagaccgaggaagccgctcgggaggaggccggactccgccaggccgaggcgacgacatcctccgaggcgacccgtgaaactgaccggcaagaggccgcggatcgccttcgagaagccgaggaagctgcccaggtggccgtccgagctcgccaagctgaagaagccgctcgggaggaggccagacttcgccaggccgaggcgacgacgacttccgaggcaactcgcgacgaggccgcgggcgcatcgcttgggcccactcccacgtgcgacgctcaggacaaaccaggtccgggggacatccccgagtctggcacgtccatcagcgggccaagccgcgcggcatcctcttcgaggcggctcttccccacgcctttcgttgctccactgagcgcagaaccccttctgcaggccttggccgtcgcaaacaccacggtgttggacgggttaagtgcccaggtggaggccctgcaagcagagcgggcggagctcgacgccgcatgggcgcgtgtcgaagaggggcgacgctcggtggaggccatggtggaggtgggccgcaaggcacaccgccggcacgtctcagagctcgaagcccgtcggaaggtgctgggggagatcgccaaggaggtggaggaggagcggggggctgccctcatcgccaccaccgtgatgaacgaggcgcaagacaccctccgccttcaatacgggagctgggaggcagagctagggaagaagctcgacgccgcccggggggtccttgacgctgccgctgcccgagaacggcgggcggcggagaccgaggtggcatcccggcggcgcgaagaagcccttgaggcccgtgccatggcgctggaagagcgtgcctgcgccgtggagagggacctggcggatcgcgaggccgccgttgccatccgggaggcaacgctgactgcgcatgaggccgcctgcgccgaagaggagtccgcgctccgcctccgcgaggacgcgctcaccgagcgggagcgagctctcgaggaggccgaggccgcggcgcaacggctggcggacagcctgtccctccgcgaggcagcgcgggaggagcaggcgtgccgtaatctggaaggtgcccgcgccgagagggccgcgctgaatcagcgggccgctgagctcgaggcgcgggagagggagctggacgcgagggcgcgcagcggcggggcggccgcgggcgaaagcgacttaaccgcccgcctcgcagctgccgaacacaccatcgccgatctgcagggcgcgctagactcgtccgccggggaggtcgaggccctccgcttggcaggcgaggtagggcccggcatgtttcgggacgccgtctcccgtctagaccgcgccggccggcaggcgggcctctggggcaggcggactgcgaagtacgccgccaaccaggggggcctcgcccagcgcctctcggagatagccgggactctccaacggctccccgaggagctcgagaggacgattaagtcatcctcgagggacctcgcctga

SEQ ID NO: 80604 - DNA, 1635 bp, Oryza sativa
  Clone ID: PAT_MRT4530_80211C.1
cacgaggacgcgctttgccggaaagccccaaaagcccgagcaccactgccgccgcgccgcctcctcctcctccgcctccgccgccgccgccgcccgccggccatctccgtcgatccaccgtccggcgagcagacagcagcccggcagatctgcccccaccacgggatcgaatcggcggggggaaccgaatcggggagcgcgggaggcggggagcttagtttgagctcggtcggcggcggcggcggcggccatggtgaaggagacggggtactacgacgtgctaggggtgagcccgaccgccaccgagtccgagatcaagaaggcgtattacatgaaggcgcggcaggtccatccggataagaaccccaatgacccgaaagccgcggagaatttccaggcactaggagaggcataccaagttcttagtgaccctacgcagcgccaagcttatgacgcacatgggaaatctggcatctcaacggaagggataattgatccagcagcaatttttgcaatgctatttggtacatatggcactgttatgttaaacactatcggctatgtggattcgagacaagctgcaaaagaacttgggaagaaagcaatattcttgggtgttccatttgtagctgagtggttcagagacaaaggccatttcatcaaatcccaagtaacagctgcagcaggtgcaatagctttgatgcagttgcaagaagacttgaagaagtatcttagtgctgaaggccattacacagaggaggaactagaaatgttcatgcaaaaccacaaaaaggttatggttgattccttgtggaagcttaacgttgctgacatagaagccaccctatcacgagtctgtcaaatggtgcttcaagatggaagcgtcaggagggaggaactgcgtgctcgtgctaaaggactgaaaacattaggcaaaattttccagcgggttaagctcaacaatgatgagggggaagcatcggatatgaggaatatagataacatggatgacaatgacgggagctcccccgatacatcaccaagaagggaaccaccatacaatcctatccctaaccctcctcatgctcagagcccatatgtggaggccccacagtttggaggaacctattacccattcaatttcccaatgccaacagctccacctggtgcgcagagggatccaattccatgacaccatttaagcttgcatgtgctgttgttctgtgcaatattgctggtgaaatactagatcatttgtgtgatgcatcatttgtacctgtagtagagaacggaggtttagctatccttcgcaccatttattcggttgtacaatcagagactggtcaggtagcagccgtgtactgttgtgtacagttgttaacgctcgtgttgaggcagtagtaggtcagcattggtgtacatggtttggtgttaatctgcggcctcgttccgtttagcttgacgtgcatcttctatggaaaatgaagctgagaaataaaatcatgtttatagttttgggtgtatttcatggaaatcttgtgaatgagtttgttggcggcatgtcgaataaccataatgttttggaaatatcatttggatgagaaactgttggtctttcaaaaaaaaaaaaaaaaa

SEQ ID NO: 80605 - DNA, 3265 bp, Oryza sativa
  Clone ID: PAT_MRT4530_80212C.1
tcctgatcccatgtcaccgacagtagcccccggcgttatgccagggcgatcgccctctttaagggaaacggtcgggcgtgacgccactcctgagacatcggcaatggtaactcggctgtcaacaatgagcggtctcttcaagactgccacattacttgagtagcatacgaatcttcgccacacgcgctcgctcttaatcttctcttcctccggcgccatggcacggggttccgctctgctcgatggtagcgtgctgccgccttcccggatcgtgagcgagaggcaggctgggctgtcgcgccgcttcatgccggaatctgccaccggccgggagatagtcacgctgggcgagggacgcccggcgccagactacccggggcggtccgtcttctttctcccctttgcaatggcagggctggttccaccattttcttctttcttcatggatgttctggagttctacgatctccagatggcgcacctcacccccaacgcggtgatgacattggccatcttcgcgcatctgtgcgagatgttcattggggtgcgcccatctcttcggctgttccggtggttcttcaccgtgcagtcggtgtcgccgccattggtagtcggtggctgctacttccagccacgggggccggtgctgaaccgctacatcccctgcgccctccgcaagaagtgggacgactggaagagcgactggttctacactcccctcgccgacgaagcgcgcctccgacttccgagccagcccccggcgcaggcctccagctggcgggcgccggtagatctgggggatggctatgacgccgtcctcgaccgcctggcgggcctgcgatcccaggggctcacaggggccatggtgtacggcgactacctccgtcgtcggattgcgccgctccagcgacgtgctcggggcgcctgggagtacaccgggtccgaagacttcacgaggacccaccagggagtgagatgggactgggctcctgaggacttcaagatattggtccaacgggtgctgaatctcaactccgtagaggcggccctcattccccaaggaatcctccccctctgcagcgatccagaccgcgcctccatcctgaccattatgatggcggtcggggcctcagaggagcgagctccaaagggccacgacggtgcaggcgggagccgcaggggggaacaatctaccccgagagggggtcgtgcttctgggtcccgcgacaggggcccggggagcagccgccctgccgacgcccgggggaagaggaagcagggaggaacacctcccccatctcctccccgagggggcggggcggcgcgtgccagtaacaggcgcccggagggggccgcgccaacatcgcagcccgagggggagcgcaagaagaagcggccccgtaagatgggggagacagaaccatctcggggaaacctcatttcccctccaaagtggtcgtttaaccgaccccctcgcagcgagatcccgtcgcgtccctcccgccattccaagtccggccagtctgaggccgaggatccggcggccgcagaggccctcaggcgggaatctgaccggcgagaggccgcggatcgcctacgggaagctgaggaggccgcccaggaggccgcccgggctcgccaggccgaggaaaccgctcgggaggaggccggatttcgccaggacgaggcgatggcgacttccgaggcagctcgcgacgaggccgcgggcgcgtcgcttgggcccactccctcgggcgacgctcaggaccaaccgggtcagggggacatccccgagtccggcacttccatcggcggcccgagccgcgtggcatcctctccaaggcggctcttccccacgccttctatcgccctactgaacgcaaagccccttctgcaggccttggccgccgcaaacaccacggtgttggatgggttaagtgcccaggtggaggtcctgcaggcagagcgggcggagctcgacgccgcgtgggcgcgtgtcgaaaaggggcgacgctcggtggaggccatggtggaggtgggccgtaaggctcaccgccggcacgtctcggagcttgaaactcgtaagaaggtgctggcggagatcgccaaggaagtggaggaggagcggggggctgccctcattgccaccaccatgatgaacgaggcgcaggacaccctccgccttcaatacgggagctgggaggcggagctagggaagaagctcgacgccgcccagggggtgcttgacgctgccgctgcccgagaacagcgggcggcggagaccgaagcggcgtcccggcggcgcgaagaggcccttgaggcgcgcgccatggcgctggaagagcgcgcctgcgtcgtggagagggatctggcggaccgcgaggccgccgtcaccatccgggaagcaacgctggtggcgcacgaggctgcctgcgccgaagaagagttcacgctccgcctccgcgaggacgcgctcaccgaacgggagcgagctctcgagggggccgaggccgcggcgcaacagctggcggtcaacctgtccctccgcgaggcagcgcaggaggagcaggcgcgccgcaatctggaaggtgcccgcgccgagagggccgtactgaaccaacgggccgctgagctcgaggcgcgggcgaaggagctggacgcgagggcgcgcagcggcggggcggccacgggcgaaagcgacttagccgcccgcctcgcagctgccgaacgcaccatcgccgatctgcagggcgcgctggactcgtccgccggggaggtcgaagccctccgcttggcaggcgaggtagggcccggcatgctttgggacgccgtctcccgcctagattgcgccggtcggcaagtgggcctctggagagggcggaccgtaaagtacgccgccaaccagggaggcctcgcccagcgcctctcgaagatggccggggctctccaacggctccccgaggagctcgagaagacaattaagtcatcctcgagggacctcgcccaaggagcggtggagctcgtcctggcgagttaccaggccagggaccccaatttctctccatggatggcgctggatgagttccctcctgggaccgaggaccgcgcgcgcgcgcaggtccgggatgccgccgaccatatcgtcgacagcttcgagggctcggcccctcggcttgcgttcgcccccaactccgacgaggagggcaatgccggtggtgcagacgacagtgacgtcgaggccggcgatccgggcgcatcggattga

SEQ ID NO: 80606 - DNA, 107 bp, Oryza sativa
  Clone ID: PAT_MRT4530_80213C.1
gagatcgatagagcgacagtgtataagtagtggctggttggttggtttcaacactggttgggtttaatcaaccgagcgagatacccatacctccactgtgagctctc

SEQ ID NO: 80607 - DNA, 3519 bp, Oryza sativa
  Clone ID: PAT_MRT4530_80214C.1
atgggttccgtttctggcatcgacgacttcgccttccctcccgggcagacgttccggttcggcagcctcaacttcatcaccaacgacttcggcaagatctctctccttgactcggattcaaaccagtcgggaagagaccagtcaagacatctcccactcgaagatctaggcgagctccggctttggccccgatccgatctagatccagggaggttggcgttatactccaacctcttgggacagtctcgacggaagagttggatggctaccttagctccccaggcgtcagttctcgatcaaccgagatcctcgactacgacgactttggctaccactacgaccacggtgacctcgacaacttcgacgacagctatgaggataactacacgcccctcttcttcggcgtattcatggctgacaacgaaacggaggaacagcgccaatcccgagaagcggaccaagatcgcgcatgacaagaagctgaacgtcgccgactggaggaagagcgacagcgacaggagcgagaacgactacagcgaggctgaagatcgacgacaacgcgccttggaatctgggcggcgagcgagagagctcattgggcaacaagacgtcgatgggacagcggtctttcgcaccctccagcagaacgcggttgcagcaatcactctcctcgacaccctcctcaaggaagacgcactcaaccaagccgatcatgttgtcaacatcttgaaccagacgaagaccatgatcgctgcctcggttccagccaactctgcaagcacccgcaccccgactggtagccgagtccctcatcttcgatctcaagactatcaccagccaagcctcagcattgccggcgccggatctagtcgcaggagcaggggacacgatgaacggtctgttcattcgcctcccgaacgatacagggagcgccgagttgaacgaccacaccccccacatcgaaggcgccccatcgatcttcgcgacaccatcaaccagcgccgcgcagcaagaggccatcattcaccagatcgctacgacgacaacgtggacggagtggctgccttcacaagcgatctgcgtcgagtggattggccagccggctttaagccgactggaatcgaaaaatatgacagcaccaccaaccctgagtcttggctcaccgtctatggtctcgcaatccgccggattctgcctggtcatggctccacgggctaccccgcggcacgatcggatcatgggcagagctacgcgaccacttcatcgccaacttccaaggcacttttgaacggcctggcacacacttcgatctctacaacatcattcagaagtctggagagtctcttcgagattacattcgacgcttctctgaagcaacgcaacaagatctccgacatcaccgacgacgtcatcattgccgcctttactaaaggcattcgccacgaggacctagtcggcaagttcggacgcaaacctcccaagacggtcaagcagatgtttgaaaaagccaatgagtatgccaaagccgaagatgctatcacggcgtccaagcagtcgggcaccacttggaagccaaagaaggatacgccgaccgcaggagggagtggaagtaacaaccacaaggatcgcaagcattgcttcgtctacaaacagtttgcggagcaatatgtcaagaacgcgcgtaagacgtcagacggagatcaaggcacatcaaagaagaaagatgatgaagacgatgccccgactggttttcaagatcactacaaagaattcaatcacatcttcggcggacccctggcttatgaatctaagagaaagcagaagctaacagaacgggagatcaatgcggttcagcctaacacgccccaataccttcggtggttagagatagcaattaagttcgaccactcggatcatcccgaccgagtggtccacccggggcggtaccctctggtactagacccagtggttcgcaatgtcaagctccgacggactctcatcgatggtggcagtgcacttaacatccttttcgctaagaccctggatgatatgcagattcctcgcacaaaattgaagccgagtaatgcacccttccatggtgttatcccaggattgtcagctacaccactcggccagatcactcttccagttaccttcggcactcgggagaattttcgcacagaaaatgtttgcttcgaagttgctgatttcgagacagcatatcatgctatactcggacgaccggctttagctaaattcatggccgtcccacactacacctacatgatgatgaagatgcctggtcctcgaggagtcatatcactacggagcgacatcaagcaggccgtcacatgtgacaaagaaagttgcgagatggcccaaacccacgagactactctcgcccgcgaagagatccgactggctgcgaccacggcaagcgagggagaagtgcctgcaaccaagctgacgaagaccgaagaagtcgtcaagaccaagcagaaggatgacctgattgcggatttagaagaaacttttacaagcattcgtgctttcaagatgaaactaaacccggaaaagtgcatcttcggagtaccgtcagggaagttgctcggatttatggtatctcaaagaggcatacaggccaacccggagaaaatcaacaccatcctcaacatgaaaccgccaagctcccaaaaagacgtccaaaagctgactggttgcatggcggcgctcagccggttcgtctcacgactcggcgagcgggggatgcccttcttcaagctgctgaagaagactgacaatttccagtggggacccgaagcacaaaaagcctttgaagacttcaagaaacttctcaccactccaccagttttggcctcgccacatccacaagagctgctactgttatatgtgtcgtcaacctcccaggtgccacgaacttcgatcaagtcacaagcgttagctgatttccttgccgagtggaccgagtgccaagaagacatgccagaggaaaagatgaaacattggactatgcattttgatgggttaaagaggcttacaggcactggagctggggtcgtcttgatttccccgactggagaaagattgagctacgtattgtggatacatttttctgtgtcccataacgtggcggaatacatggcgctactccatggattaaggattgcaatctctctaggcattcgccgactaatcgtccgtggagactctcagttggttgttaatcaagtcatgaaagagtggtcttgtctagatgataatatgactgcttatcgacaagagatacgcaagttggaagataaattcgatggactcgagctcacccatgtcctccgacatagcaatgaggcagccgataggctggccaattttgattcaaaacgggaagcagctccttcagatgtgttcgtcgaacatctttatgaaccaaccgtgcccagaaaagaaacacttgaagccatggatactcaaggcgtaagcatgattgaaaccgactag

SEQ ID NO: 80608 - DNA, 863 bp, Oryza sativa
  Clone ID: PAT_MRT4530_80215C.1
atggagaaaggcactgtaggtggcattggcatgtgtgaccgtctcttgacgttcctcgccaagaacctgtccatgaaccggcagaagaccatcaccgatggcccaagaaatgacagcagcaacaacaatggcggccatgaagaggaaagaggagaagaagacgacgacgagttcaccattgagatcgagaaggccgaggtgttgctagtcgacgagaaagacgacgacgacgaccacaagagcatcacggccaccattcttgaagagaaaagcactgaagtggcgacgagcaatggaggagcaagtgtgcagaaggaggacgaagaaggtggccgtcgtaatgatcctccggtggctgcagaagctgcgacggtggcggaggcggcgccggtgaaggaggagaagaaggtgaagaagacggtggcgatcaaggaggaatccggcgcggcggcggcggcggggtcggcgtcgtcggcggtgaagaggttgctgtccaagaagaggcaggcgtcgtcgagccagctcggaggggatcacgacggcggccagcagacgaagccgccggcgaggcggccggggctccggccgaggatgccgtcgatcctgagggtgccgtccaacatcaacgagaagtcgtcgagcttcatagaggagcgcaagaagagcttcggcggcggcggtgccggcgccggcggcaagccggagaagtgaaggatgcatgtgcacgtgtgacgtgtcagctagcgtgaagtgcttgtgtgcgcgcgcgtgttggttaattaattaatttggataatcgattgttcgttctttacttctgtccaaggggcttgcttgatcatgaaattaaattcgttattgtg

SEQ ID NO: 80609 - DNA, 2955 bp, Oryza sativa
  Clone ID: PAT_MRT4530_80216C.1
atggcacggggctccgcaccgctcgagggtagcgtgctgccgccttcccgcatcgtgagcgagaggcaggccgggctgccgtgccgattcatgccggaatctgccaccggccgggaggtggtcgcgctgggcgagggacgcccggcgccgcattacccggggtggtccgtcttcttcctctctttcgcaatggcagggctggtcccgccattctcttctttcttcatggatgttctggagctttatgatatccagatggcgcacctcacccccaacgcggtaatgacgttggccatcttcgcgcacctatgcgagatgttcatcggggtgcgcccatctctccggctgttccggtggttcttcaccgtacagccggtgtcgccaccgtcggtagtcggtggctgctacttccagccgcgggggccggtgctgaaccgctacattccctgcgtccttcgcaagaagtgggacgactggaagagcgactggttctacacccctctcgccgacgaagcgcgcctccgacttccgagccagcccccggcgcaggcctccagctggcgggcgccggtagatctgggagacggctacgacgccgttcttgaccgcctggcgggtttgcgatcccaggggctcacgggggccatggtgttcggcgactaccttcgtcgccggatcgcgccactccagcggcgcgcccggggcgcctgggagtacaccgggtccgaggactacatgaggacccaccaggggggcagatgggactgggcccctgaggacttcaagatggtggtccaacgggtgctgaatctcagctccgtggaggcatccctcatcccccaaggtgtcctccccctctgcagcgatccagagcgcgccaacatcctgaccatcatgcaggcggtcggggcgtcaggggagcgggctcctcgaggccacgatggcgcgggcgggagccgcaggggggaacaatctaccccgggagggggtcgtgcttctgggccgcgtgacgggggcccggggggcagccgccctgccgacgcccgggggaagaggaaacaggaggataccccctccccatctcctccccgagggggcggggcggtgcgtgccagcagcaggcgcccggagggtgctgtgccgacgtcgcagcccgagggggagcgaaaaaagaagcggctccgcaagatgggggggaccgaacgatgctggggaaaccttatctcccccccaaggtggtcgtttagtcgacctcctcgcagcgagattccgtcgcgcccccctcgccattccaagtccggccggtctgaggccgaggagacagcgaccgcggaggcccggaggcgggaagctgtccggcgagaagccacggaccgcctccgggaagctgaggaggctgcccaggaagccgtccgggttcgccaggctgaggaggccgctcgggaggaggccagactccgccgggccgggaagtcagcccgggaggcagaggcgacgcgcgcacgccaggcggcctgccaagcccccgacccgactccgcccgaggcgacgacgacttccgaggccacccacgacgaggccgcgggcgcgccgctcggacccgacccttcgggcgacgttcgggacgagccagcctcgggggacgcccctgagtccggcacgtcgattggcgggccgagccgcacagcgcccacaccgaggcggctctcccctctgccttccgccgccccactgaacacagagcccctcctgcaggccctggccgccgcgaacacgacggtgctggacgggttaggtgcccagatggaggtcctgcaggcagagcgggcggagctcgacgcggcgtgggcgcgcgtcgaagaggggcggcgctcggtggaggccatggtggaggcgggccgcaaggcataccgccggcacgcctcagagctcgaggcccgtcggagggagctggcggagatcgccagggagaacgaggcagcgtcccggcggcgcgaagaggcccttaaggctcgcgccacggcgctcgaagagtgcgcccgcgcgagggagagggacctggcggaccgcgagaccgccgtcgctatccgggaggcaacgctggcggcgcacgaggccgcctgcgccgaagaggagtccgcactccgcctccgcgaggacgcactcaccgagcgggagcgagctctcgaggaagccgaggccacggcgcagcggctggcggacagcctgtccctccgcgaggcagcgcgggaggagcaggtgcgccgtaatctggaaggcgcccgcgccgagagggccgcactggatcagcgggccgctgagctcgaggcgcgggtgaaggagctggacgcgagggcgcgcagcggcggggcggccgcgggtgacggcgatctagccgcccgcctcgcagctgccgaacacaccatcgccgatctgcaaggcgcgctggactcgtccgccggggaggtcgaggccctccgcttggcgggcgaggtagggcccggcatgcttcgggacgccgtctcccatctagaccgcgccgggcggcaagcgggcctctggggcgagcggaccgcgaagtacgccgccaaccaggggggcctcgcccagcgcctctcagagatggccgggactctccagcggctccccgaggagctcgaggagacgatcaagtcatcctcgagagacctcgcccggggggcagtggagcttgtacaggcaagctaccaggccagggacccagacttctccccgtgggcagcgctggacgagttccctcccagaaccgaggacgacgcgcgcgcgcaggtccgggacgccgccgaccacatcgtccacagcttcgagggtacggcccctcggctcgcgttcgccctcgactccgacgaggagggcggcgacggtggtgtggacgacagcgaccacgaggccggcgactcgggagcctcgaagtga

SEQ ID NO: 80610 - DNA, 348 bp, Oryza sativa
  Clone ID: PAT_MRT4530_80217C.1
atgcggctggtggcggccgaacagagcggtgacgccgggaggcggtgccggcgacgttccggcgatgagttggatgggggcggatttgaggaggtgaaagaggtcgaaactgcgcttcttttgcctccggtcttgagccttctagttgagagacgaatgagatacggaggcgggaagctggaggtgtcgtttgggtattcgttcgtcgatcggcctcgtgcatgcacgtgcgagcgtgtggcatgcgcgggctggcacgagctgggtgcgggcgcacacgagtgcgactcgggattggcgcgaggcaacacggggaggcacaggcgttggctcggcctagccgaatag

SEQ ID NO: 80611 - DNA, 265 bp, Oryza sativa
  unsure (1)..(265): unsure at all n locations
  Clone ID: PAT_MRT4530_80218C.1
caccaacatcccccccccccccggcattgatctcgccttcatcctcgcgcgattcttgcgaggaattcgattcccggcgatggccgccgccgtcgtctgcntnaccggcgccggcgggttcatcgggtcgtggatcgtnaagctcctcctcgcccggggctacgcgtnccgcggnacatcccgccgcgccgatgacccgaagaacgcgcacctntggganctcganggcgcggcagancggctgacgatggtgagcgtcgacctg

SEQ ID NO: 80612 - DNA, 601 bp, Oryza sativa
  unsure (1)..(601): unsure at all n locations
  Clone ID: PAT_MRT4530_80219C.1
ccaccctaaaaaatttccctttgcttccattccctggaaaaacaaacccccctttatttgaccaattaataacaaaacctgattacctaaaaaaccttaaccaatccatttccatttacccccctggattaatttctaaaccattcctccttccaaaactattaccaaattatttaaaaacccaaccaatttccttgcgggcccccaaaaacaaacaatttttccgtgcatgctttgctgcatgcatgcaaacctaccccttctttaccccgtacccccttttactttcctttaaccccaaataaacccctaggaccttcctgcccctttntttnnaaagaaggctaacnttnangggnttttcnagggtttatcccaacccctttggccttnatggggntcnaaaaaaaangggggcccngntctnggaaggccccaaaaaccccccccngccnttggggggnnnggccnccccngcttaaaaagccnccttttggccccccaaaataccttnttggcntnttttttgnaggtnnagtttccccaggntnaggntgngggttttccccnggcgnccgnaaaaaanccctttaccccaaaa

SEQ ID NO: 80613 - DNA, 1359 bp, Oryza sativa
  Clone ID: PAT_MRT4530_8021C.1
atggagatggatgaagtcgggggtcgatggacattctctaggacaaatgaaggctacacgagctgcggcccggtagtcgagatgtcatggcacagggttggtgccctgctgctaggggctcagtcctgcctgcctgtcccggaggttccggccgtaggtgggattgggtcgaattggaacaacccagcaggggcaaccaacgttcaagtacctacagtccagcaacagtgcaagttatcagaatttctcaaaactgagcctccaacctttgccattgccgtcgatcctatggaagccagtgattggttgcgcacagtcgagaagaagctagggttgattcagtgcaccgaccaggagcgggttggcttcgcaactcatcagttggttggaccggcttcagagtggtgggatagctacgaagcatcacggccagaaggacataccatcacctggaacgagttttcatctgtattcaagagatcacatgttcccgcaggaatgatcgcactaagaaaacgagagtttcgctacctgaagcaaggagatttgaccgtcacagagtacctgcacgagttctatcgtttggctcactatgcaccagaagatgtggaaacggatgaagacaaacaagagaagtttctccaggggttaaaagatgagcttgcagtgcaactactcctagaggattatgaagattttgagaaacttgtggacaaagccatgcaacttgaaagtgagcataatcggatgacgaactgcaagagaaggattgtcaacatcccagtatttccaggtggtaaccaaagacagcgcactgagccacttcagatcaccggatcttctgttgtgcatcaagaattcctgcccgaagaagatggacgcaatgcagacaacaacactagcaatactaatgatgatgataccaccaacaaccatggttcttgccccattagtgaccacccgaataaagcgtgcaatgtcagtagcattcaccaagatgtcaacgatagtatcaatgttggaacccagaatgacaaccttagcaattttgacactgagaaagactccaatggtgatagcaactatggtaccactgatgccaatgttagcaaggatttccaaccaccaattccaactccaagtcaaaatgatcgtccccagatggacagctcagtaaagaagacgttgatttgttacaactgcaaagaaccaggtcatttctctagagattgtccacagccgaagcgtaacctgcgccatcactccggccattatgcaagaagaagacaagtcactcgccttgtggtcactggagcaaacgccgtacctgtgaggcctcatgttaatcctaacccatag

SEQ ID NO: 80614 - DNA, 336 bp, Oryza sativa
  Clone ID: PAT_MRT4530_80220C.1
atggagggctgcggtggcggcgctctgagggggcacggaggagctctgtgggggcggcggcggcgtggggacggcggcggcgagggggctacggtggcgtcggtcgtggttggaggtagcggcaatgcagcgtcgccggcgcatggaggtgactgtggtggcgccagctcgtgggtggaggtagcggcagtgccggctcgcgagcggagggagagagcagcggcggcggcggtatcggtgcgcgcaggagcagctgcttcgcgctgttggggtggcggtgggagggccacggcgaagctgtggctgaccccagcgacgacccgaggagctgcggcg

SEQ ID NO: 80615 - DNA, 751 bp, Oryza sativa
  Clone ID: PAT_MRT4530_80221C.1
atggcggtggtggggcggcacgacgcaaaaagggaggagaacaccggcgaccatgctagtggcagcgaagaaggccgacacgaaaggaaggaccggataagacattggacctttggtgtcggcagagtagccgcgagcccacgatgcgaaggaggtcgcgcgacttgccctggcaaggtcgccctcctgcatcgctacttgccatggacaccccaaaatcgtgtaattggctatgggacaccgcaaaatcttggctttgcccacggacactacgaaagttgtgaaattggctgtgagacaccagaggcaatattttataatttccgaggcaaaagaggcgacggcggcggcggggccggcggcgacagcggcggtggcggggccggcggcggaggcggcagtgttgaggacggcgacgacggcggcctagtcggcttcggttggtgcggcgatggacagctcggcgtcatcttcagtggtacggcgccgtggtggtggcgagttgcccttgggcaaatgtccattgtgccactgatggggattgttggctcagaaatgaagggagttgaaggagtgggacgaattttagtgtaccttggagttgtgcaagctttattattactgttgattttggtagttgtcattagcaagtaatatggactgtaataggcaatttagtatttggaagcaatgtaatgttgaacttatgaatgccctgtggaattaatgaatgtagtatggttttcagatg

SEQ ID NO: 80616 - DNA, 568 bp, Oryza sativa
  Clone ID: PAT_MRT4530_80222C.1
atggcataccaaaaagggaaagtaaggcaggtgcaatttccggaatattgattggtgcaatagttttagtattagcagcattatttggagtatttacactgataaagaagcggagagcattggcacaacagaaagaagaactatacaacctggttggacgacctgatgttttcagttacgctgagctcaagctagccacagacaatttcaattctcaaaatattctaggggaaggaggattcgggccagtgtataagggtaagctacctgatgaaagagttatagctgtgaagcaactttctcagtcatctcatcaggggacaagccaatttgtgacagaggttgcgacaatttcagctgttcaacatcggaatcttgtgatattgcatggatgctgcattgacagtaaaacacccttgttggtttatgagtaccttgagaatggaagcctggatcgagcaatctttggtgagttcacttctgcaaaattgccaccctcggcacttatagaattgtattttcttagttcacaaataaaactcacactacaacaaatataccttgtaga

SEQ ID NO: 80617 - DNA, 312 bp, Oryza sativa
  Clone ID: PAT_MRT4530_80223C.1
atgatcccaatccgagctccacacgggctgccgcagtgcttcgccactgcaaccgtcgcggcgccgtcctcctcctctccgcctcgccctgtcgacgtttgcaccgtggagctccggtgggctgccactgtgcttctccaccatggccgtcgtggcaccgtcctcctcatcctctcccgcctagccccgtcgacgcctgtgcaagctcgcatctcccagtcgacgcccgcgcacggccagtgcacacccgccgaccagcctgggcagagagagagagaggaggaaccgagaaagagaagagaagggagatag

SEQ ID NO: 80618 - DNA, 596 bp, Oryza sativa
  unsure (1)..(596): unsure at all n locations
  Clone ID: PAT_MRT4530_80224C.1
gatcaatctttctcgctcttatctcctctcatctctctatctctctcagataattaaaccaagtgtgcagatagatatatagctgctgctgcatgtgtaggggatttgcctctgaccatattactattccttgcatgcgaaagagagactagctcttgtcactctcctctgcccttcttccttcgattcaacaaggcacagtagtgtgtatatatatacaggcatacataccgttcttgccgcctctagtttgggtgtgattgaatgacaaaggagatggccgatgatgtcgagtaccatgaggagtttgtgacgaatccgagggggttgcggctcttcacatgcggctggcttcctgcttcttcctcccccaaggcgctcatcttcctttgccatggctacggcatggaggtcagtggcttcatgaaagcatgtggggtcgagctggccacggcgggttacggcgtgttcggcatcgattatgaggggcatggcaagtccatgggtgccagatgctacatncagaagttcgagcatcttgtcgatgactgcgacagattcttcaaatcaatatgtgagctggaggagtacagaga

SEQ ID NO: 80619 - DNA, 468 bp, Oryza sativa
  Clone ID: PAT_MRT4530_80225C.1
cccaatttcgacccagacctacccgtccgacgacttcgacaacaccatggtaggcttctacatcggccctgctttcatggacaagctcgcagaccacatctccaagaacttcatgaccctccccaacatcaaggtcccactcatgctgggtatctggggaggcaagggtcatggaaaatccttccagtgcgagctcgcgtcaagcaagagggagatccaccctatatcagcgcgcgctggctagttagcatggctccactgcccgactgaaaccacattcaagcaggcaggccttccggctggcgacatgatggaatatggtatgacgggtgcgctgcctattcataaacgatctgcgcgcgcatgctgttcgttgggacacgcccataccactgggatcaaacaactggcttgcgcgaccctgatcaacatggacaacagcgcagcccacgtgcagccaacggggat

SEQ ID NO: 80620 - DNA, 1113 bp, Oryza sativa
  Clone ID: PAT_MRT4530_80226C.1
atgggaagtttcagtcaccagaaacattccatttccgtatacctcgtcctcgtgtccgccgtcctgctgctgaactcaaccctgggtttgtgtggctgctacaagcgcatctttagcttcggcgactccatcatcgacagcggcaacttcgtccacatcgccggcgaccatccgtgtccgttcaaggaaccaccgtttggcatgacctacttcaagcaccccagcggccgcatctctgatggccgtgtcgttattgatttctacgcgcaagcactccagcttccgtttgtaccaccgagtttgcccgagaaggacagggggcagttcccgcacggcgccaacttcgccgtgttggcctccacggcgctgccgccggagtacttcagaaggcggaaccacaccgtgccgatgcccttctccctcgccacgcagctggagtggttcaagcaaacgctgcagcggatcgctcccggggacgctgctaggagagcactgctcggtgagtctcttatcttgatgggtgagatcggcggcaacgactacaacttttggttcttagatcataaacctcgcgaggttgcttaccagttcatcccggatgtcgtcgccagcatcagctccactgtccaggagctcatcggtctgggcgcgaggacgatcatgatcccggggaacttcccgaccgggtgcgtgccggcgtacctgagcgcctaccggagcggcaacccggcggactacgacgagttccgttgcctccggtggttcaacgccttctccgccgcgcacaaccaggcgctgctcaacgaggtcagccggctcaaggcgcagcacccgggcgtcaggctcatctacgccgactacttcggcgccgccctgcaactcttccgtaatccacgcagattcggtatcaatgatcctctgctcgcgtgctgcggcggccatggcccgtaccacaccggcgcgacgtgcgacaggacggcgacagtctggggtgatccgggcagtttcgccaactgggacggtgtccatatgacggagaaggcgtaccatgtcatcgccgacggggtgctcaacgggccgttcgcggatcctccgttgctgcatagttgctag

SEQ ID NO: 80621 - DNA, 2011 bp, Oryza sativa
  Clone ID: PAT_MRT4530_80227C.1
atggactcctaccgagaaagagacataacttacaattgggctacacctattactgacagcaaaaagctgtccaccacccgtgaagctctggagtcgagcgtgaacttggtccactacgccatggcggccgcaccacagcaatccgtgcacccaagcttgccctcctcaacctcaaccctccgcctcctcatctcctcctccccacgacggcctcctccgccgccgccaagagcccgccggtataacaggctcgcggcgtcggcttcggcggcgcgggagatgccgtggccgcacgtgctgacggtggccggctccgactccggcggcggcgccggcatccaggccgacatcaaggcctgcgccgcgctgggagcctactgctcctccgtcgtcaccgccgtcactgcccagaacaccgccggcgtccaggggattcatgtggtgccagaggagttcatccgggagcagctcaactcggttctttcggacatgtcggtggatgtggcagctttagtggtggatccagttatggtgtccacaagtggagatactctttcagaatcatctactctctctgtatatagggatgaattatttgctatggctgatatagtcaccccaaatgtgaaagaagcgtcgagattacttgggggtgtatctttgcgcactgtttctgacatgcgcaatgcagcggagtccatttacaaatttggtccaaaacatgtacttgtgaaaggtggggatatgctagaatcctcagatgcaactgatgtattttttgatggtaaggagttcattgagctccatgcgcatcgcataaagacccataacacacatggaactggttgcactttagcttcatgtatagcttccgaattagcgaaaggtgcaacgatgctgcatgctgttcaggtggctaagaattttgtagaatctgctcttcatcacagtaaagatcttgtcgttggaaatggacctcaaggcccttttgatcaccttttcaagctcaagtgtccgccatacaatgttggctcacagccaagctttaagccagaccaactcttcctgtatgcagtgacagactctgggatgaacaaaaagtggggtcgttcaatcaaagaagctgtgcaagctgccattgaaggtggcgctaccattgtacaactgagagaaaaagattccgaaacaagagagtttttggaagcagccaaagcatgcatggagatttgcaagtccagtggagtaccactgctgatcaacgaccgggtagacattgccctggcatgcaatgcagatggtgtccatgttggtcaattggacatgtcggcacacgaagtgcgggagctcctagggccgggtaaaatcatcggcgtctcgtgcaagacccctgctcaagcccagcaggcctggaatgatggagcagactacattggctgtggcggtgttttccctacctccacgaaggcgaacaatcctacattggggtttgatggcttgaagacagtttgcctggcatctaagctgcctgtggtcgctattggcggcatcaacgcttcaaatgcaggttcagtgatggagcttggtctcccaaacctcaaaggcgtcgcagtagtctccgctctgtttgaccgtccgagtgtcgtagccgaaacaagaaacatgaaatccatcttgaccaacacctctagaacctagagctactacaatattctttgttcgaaggggatatgtttatcaaaatgaagagatgtttccaactttaataatcagaaggcatttcttgtaataatgcttgatcaaaagcatctgtgatgcaggggaatgaggaatcacaatcttgcatcattgggatgtaaggtacaatgttcagatttcttttacatcttttgagcaaattatccaacaaattttgttgaaagttggtagtacaaaatgaaagggtgaaaggctgtaactttcaacttctttaagctttcaaatgaatgttgatgctaaaaaaaaaaaaaaaaaa

SEQ ID NO: 80622 - DNA, 453 bp, Oryza sativa
  Clone ID: PAT_MRT4530_80228C.1
tccacgcgttcggttatgacgcaatcggcggggcggggaagatccgaagaatgcatcaccatgagctaaacatgttgaagcggcaaatcccatgtttggactcttactaagacacggctaacttatcactctgggctcgcttcaagatggtgatggatgcgcatttgaacaacctacgaaaagcaaatgaatagactatctgagaggatgcagtgcattatccatatactaactagtgaagtgctcaattaacataatcactggagatacgaaatgataaatatatgaaacgacatctcaggctcaaactagagcggatgctgatcgactgagggggaccagtctagagaaccgaagcaaacgtacccgtacatgccacgccataactggttgatagggtaacataagggcaataaactggccgagggtgtacaacgctgccactggcaaaac

SEQ ID NO: 80623 - DNA, 268 bp, Oryza sativa
  Clone ID: PAT_MRT4530_80229C.1
gcgctgtgtgcgctcggtgcgcgctcgcggtgttcggcgcgatgctcaacgcgagcaccttgagcggcccagccagttgcacccggcgatttcgcggcgcccccatttctggacccactgttgaagtgtgtcatcaaatcaattctcccaaataaaattccgttgaaaaaaaaatgaaaaaggaaaaaaaaacttatcctttgtcatatcctgctatgtaaatagtcctgccaataataatgtaatgtggcgtaataataaataaaaa

SEQ ID NO: 80624 - DNA, 810 bp, Oryza sativa
  Clone ID: PAT_MRT4530_8022C.1
atggatgggagggggaggaaggggatgaggtgggacccagctgtaagtggcggaagcagcacggcacaaagcgcctggggaggatgtcggagggctgttgccttcaacggggctaggtgggacgagggcgtcggcggccggcgacgggcgacacgacggcggcggctggcaactggcgacgcaccgccgttgcagaggccgcaggagcggaggtgggccgccgtcgagggaggaggtaggcaagcaaggggggcggggaggccggcgatgacctcctcaccggctgcgagggggagcaaggcgtcggcggcaacgaggcggttcttagccgcggccagctcgacccgtagtctctcaagctcctcgccgagcggcatggagggacgacacggcggcggcaagccagtcgcatcgtcggatttggcaacgctgaggagctccgcggtgtgcaggaacgtgtcgccgcgagcgtcgtggtgtgcggagaaggagaacagcgggcagcgtgacgcggcggcgaggacgacgacgcccaagcccgctctttgcgcggagaaggagagctaccgtctgggcagagagctaccgtctagattttttttatacctcggcgccaaatcaagtggcgccgagctctgtaacttaaccgtgtgcttgcggccgacccaacatcccttttgtgttggccgtcaacttggcgctgagcctacaaacgtcagtgccaggagtaatggcgctgaggtcctcaatgccaaggcaacgcccaacataggagctatgttgggcgggcaggcctcgcgcggctgttga

SEQ ID NO: 80625 - DNA, 395 bp, Oryza sativa
  Clone ID: PAT_MRT4530_80230C.1
caaatttgctgaatacacagcggcaaggtctcctcttgggctttattcttgcctgccattccaagtatgatcacagaaatataaaatttgaagtcaataccaataatatctggacaagtggaattaggtttgttcgacaatattggaatttggaagatctttcttcgtgataatctcagtatgatgtcaaaaattggatattccatccattattcacttctcatgactgacacgttacaaggtgctggatttattttttaagtggtgcatcatacacgtgatatgtgatcatatattggtctccctcatgcattagtctcattggatctgctcttttatgcccccctggggttatgttggtgcctctgctacttactgataattgaataatcata

SEQ ID NO: 80626 - DNA, 382 bp, Oryza sativa
  Clone ID: PAT_MRT4530_80231C.1
gaaaacattcttaccataaaaaaaaaattttttagcttgttattttacaacacttttgtgaaggataacaaaagggggaaaaaagttttggcccaattttgtttcaagggtttcagagcaagaacatgaacccataacatgggaccaaaggtttacccattgtttggaatggggaagaatttaacaaagctttttaattccttaaacaacatttgcatggtccaaaattgggaagacgtgttgcccatgaatatggtgggaattcctgaagacgatttgtcaatagactaggtggtcccaccaggttcagggtttggaacattccaaccagggaggttttcgatggcctttttccttctcgcaagaagggacttgggatggt

SEQ ID NO: 80627 - DNA, 144 bp, Oryza sativa
  Clone ID: PAT_MRT4530_80232C.1
atggaggttatgggtaacttagcagggtggagatatgaggcgcggatgcacaagctttctatgataccaaggagcgtgggattggtgttggagttattgtacaccgctccttggttgtcactttattccctgcaaaagaggtag

SEQ ID NO: 80628 - DNA, 109 bp, Oryza sativa
  Clone ID: PAT_MRT4530_80233C.1
atgaagagaaggcaaatttgtgcttgggatgtggccccggcgggcaacgggctgctcatgggggtccaaatcaccggcgggctgctccctatggtgtctctcaaacctg

SEQ ID NO: 80629 - DNA, 385 bp, Oryza sativa
  Clone ID: PAT_MRT4530_80234C.1
catatcacctatttgtgttaaaaagggaagcttaggattatgagggacaagaaacataacggcatagataaaggttcatggatgggaatacagactatctaaccacgggagaggaacaaaaaggaatctgtgtctgacccgataaaaagtaacaaggagatgattggccgggataaaaaggtagccatatattactacaaggcggggggggagggactgggccgtcctgcaagaaataatggggaagccccggggtgactttccagagggaagccgaatacgcaagggcaccgagcgggaccaaaaaagaccccacggtttttaggcccttttaaattacagggtcagcatcatttgcaaaggggctggatttgcctccgggact

SEQ ID NO: 80630 - DNA, 638 bp, Oryza sativa
  Clone ID: PAT_MRT4530_80235C.1
agcgtccggtgcggcgcgcttgcggcggcatggtgcaccgggcgctcgcggtggcgggggcggcgggagccgcaggggcatctggggcggtggaggcggcggctgggtttggcgggatggcactgcgtggtggctggccgagggtgctgcagattctgcagctgcttagagagcaggggattattctcgctgtgttgcttggcctctcggcgtttttctccatggctgagacttccatcaccacgctatggccttggaaggttcgtgagttggctgaaaaggaacctgaaaatggtgttttcagaatgctccgaagtgatgttactcgcttcctgacaaccatactcattggcacaactgtggtcaacattggcgcaacagcaattgttactgaggcggcaactgcaatgtttggtgaagcaggtgtcagtgcagcaacaggcgtcatgactgtcgccatcttacttcttacagaaatcacacccaaaagtgttgcagttcataatgctacagaggttgctaggtttgttaccagttgcatggctttcattggtcctgtatccagttgggcgaattgtcacttttctgtccatggggatgctacagattctaggcctgaagggaagaagcattgttaa

SEQ ID NO: 80631 - DNA, 1654 bp, Oryza sativa
  Clone ID: PAT_MRT4530_80236C.1
ggcggcgcctccagagagatcgggggagagagagagagagagagagagagagagagagagaggggttcggccatggagacgagcagcagccggggacggagcgggagcgcgggattgaagcgccgcaggggccccggcggcggcggcggcgggtcggggtcgacggcgcaggcgctgaacgatgacaccctccgctccgtcttctcccgcctcgacgaccacttcgacctcgcccgctgctccgccgtctgcaactcatggaatagagttattgacacagctcatctgatgagggatctatattacaagaggaatccacggacgcgtgggtcagggtctaatacttcaataaagagttacttcaaggagcttgcacttgatgaacatgcatcgtctttctctagaggtcctgctgaagtttatcagtggattggtcatcctaaccaggccaccatatgccgcatgaagagtggttcaatcttaactggagttggagataagactctccgactttggtctgctgaaagttgcaaatacatgaatgagtacattgttccaagttctaaaatgctggtcaactttgattttgatgaaaataagattgtaggtttgactagctcccagctttgcatatggagacgtagtgagccgagaagtatttttcaatctcgtggagcctcattcaaccgtggcttatgtatgagttatgccgatccagaggttataattggttgtgaggatggtagagcatttgtatatgatatgtacagcaggagttgctcaagcatctaccggcttcactcttctcccttgacatgcttgacaataacagatgaccagctcattgctgctggttctacatttggaaatgtagctattgcagatcaaacctctggacaaaagttaggtgttctgaaatcagcttttgcaccaacagcaataagatgcttgtcattcagcacaagtggccatttgatattcgcgggctcatctgctggttatgcgcactgctgggacttgaggaccctgaggcctctctgggaaaagagagttagcccaaatgtcatctacagcgcacatcacttgccaggtgacacagcaacactggcagtcggcggtattgacggtgtgcttcgcttgatatgccaaagaaccggtgaaaccatccgaagtttcatagttaatgcagaccgcccagcagcatccagttcccatcagcaagtcgaaaagaaaagcgtccgccaggttgctccaaatgcgcggcttgacaacatccccacacgcctgcgccctcagatcacttgcctggcagtaggcatgaagaaaattgtgaccacacatggcgaaaactacatccgtgtctggaagtttcgcccgaagagttcttagaatgatcatccggagccagacactttgttatgatgcttaacgacccccctttttgtaaaattagacgaaaatatgttctgcatctgtcaatgccagatagtatgccatgctgttgtgttgtgcaaaaatatttgttgtatcaggagttatgttgaattaatctcatacctttacaaattattgttggttgtttcagttctcacaggatactcaagttgtaggtgcactcaaatatcaatattagcaggttctttttttcattttg

SEQ ID NO: 80632 - DNA, 576 bp, Oryza sativa
  Clone ID: PAT_MRT4530_80237C.1
atggagacgagcagcagccggggacggagcgggagcgcgggattgaagcgccgcaggggccccggcggcggcggcggcgggtcggggtcgacggcgcaggcgctgaacgacgacaccctccgctccgtcttctcccgcctcgacgaccacttcgacctcgcccgctgctccaccgtctgcaactcatggaatagagttattgacacagctcatctgatgagggatctatattacaagaggaatccacaagcaagaagttcagggtctaatacttcaataaagagttacttcaaggagcttgcacttgatgaacatgcatcgtctttctctagaggtcctgctgaagtttatcagtggattggtcatcctaaccaggccaccatatgccgcatgaagagtggttcaatcttaactggagttggagataaggggtatggtcaatggccttccactctcgctattcagactctccgactttggtctgctgaaagttgcaaatacatgaatgagtacattgttccaagttctaaaatgctggtcaactttgattttgatgaaaataaggaagggctataa

SEQ ID NO: 80633 - DNA, 124 bp, Oryza sativa
  Clone ID: PAT_MRT4530_80238C.1
ttacgcataaggtggacgaagtgaatacgcttactagtggcatagactctactgaatgagcacgcatactgtgcagaacacgctggagatacggcctagtgcaagacgttgcctctggtgacaa

SEQ ID NO: 80634 - DNA, 183 bp, Oryza sativa
  Clone ID: PAT_MRT4530_80239C.1
atggggaagatgattaggcacttgagcaattgggctgatcatcgacgacaacacaacgtcggtggcaggggcccgagccatgttgtgacggcggaggccgcggttgctgcagtggctgcagggtcagggctagggatccggctgttgtcatcgtcgccgcaaccactggcagactacggctag

SEQ ID NO: 80635 - DNA, 1567 bp, Oryza sativa
  Clone ID: PAT_MRT4530_8023C.1
agcgcgcctcagcctcagtacccaccacctccacgctcgcgccgtcggcttcgtgctcctgcgccgccgcaccgatctgcaccgtacgcgggcgtcgatccatccaaggaactcataaaaagtcatgggaaatgacgaagctgtagttactcagaagatggggaaagcaccatcgccccctaaggatcatccagcccttagtccataccttgattggtcaaatatgcaggcatattacggcccagggatcttgccaccaacattttttagccctggaatagccgctggtcatacccctcctccatttatcttgggtcctcagcctctggtgccatccgcttttgggaagccatatgccgcaatttatcctcctggtggagctttttcacatccgttcatgcccctaatggtgagcccattgagcatggagccagcaaagtctgtcaacagcaaggatagctgttcaaataagaaaatgaaggaaattgatggtgcgactgtgtcaactggcagtggcaacagtgaaaaaacaagtggagattgcagcttagaaggatccagtgatggaaacaaccagaaggcaagtggaactcccaagaaaaggagcatagatgataggcctaaatcaggcgtggaaactggtggagctttaacacctaatgatagacctagcgaacaagcagctttgccaaatctatgcattccggttacagcaatcaaaccagacgtgagcactgctagtgacttcagagttattgccaccccagtaactgaagtgccaactaaggatgataaggaatcgaagcgcgagagaaggaagcaatcaaacagggagtctgctcggaggtcaaggttgaggaagcaggccgagactgaggaactggctagaaaagttgagctattgactgcggagaacacatcccttagacgtgaaataagcaggctaacggaaagctccaagaaacttagattagagaattctgctctaatggagaaactaacggaaaccgggcctgatgaagcacaagaagtgcctccagtcaaaacaaaagcacagcaagctcgaggcgtcgaaaatttcctgtcaatgatagacaagactggcacgccgagaagcagcgggcacatggatcatgccattgccacgcccaagcttcgtcaactcctgggctctggtctggcgactgatgctgtagccgcaaggtaatcttaacgacttgaccctcccgccgttcgtgctcaaacgcagcatgtggcctggtgaattttataagctcaacctgcccgcacgattaacatcgaagtattaggtacgattttgtcactgtattcgcccttgtaaattactagtagctgccttttagacgagcattccaaccgctccaccgggatatgaatgcccccctggccgtcagttcttccctgagtttttactctactctcgtagatctgtaacatcagtgctggctcgcgttgttcatatcaaactgatctctgtaaatactgtaacactgacagaaagccttctaactttgatcttttacctttacctgcttttggatgatcc

SEQ ID NO: 80636 - DNA, 269 bp, Oryza sativa
  Clone ID: PAT_MRT4530_80240C.1
atgtcgagaatcagacttatgcatgaatgggccaagaactcagaaatgacacatcgaattgggccaaaattcacaagtctgcggagaagagcaaaagaggaggccacctgtcgaaactgagccagggaggcccaacccatgggttcggccgaaccctccctagcgccgttggatgcagggcttcttctggacggtgtggattgcctccctatggcggttggagggtattaccgatctttccaaccgccataactgtcattacctgccta

SEQ ID NO: 80637 - DNA, 2085 bp, Oryza sativa
  Clone ID: PAT_MRT4530_80241C.1
atggcggcgacgcaggcgacggccgccagaaaattcccagagggtttgcgcgtgcttgccgtcgacgatagccccgtttgcctcatgctcctggaggcgttgcttcgccggtgcaagtaccaaccgacgatgacgagggacgcggcgacagcgctacggatgctccgggagaggccgggggatttcgacctggtgattagcgacgtgcacatgctggacatggacggcttcaagcttctcgagctcatcggccttgagatggatctccccgtcatcatgcaatccgcaaatggggagcttgaaactatgatgaagggcgtgacccatggggcatgtgactacttggtgaaaccagtgagcctcaaagacatccagaacatatggcaacatgtgtggaggaagagaaagcttgacataaggaaccacaatggcggttacaacgacggcggtgagctggttggcgcgacgcggaccaagaggaagtacacaaggaagatgagaaatgatggagataattatggtgagaacaaagagaacatggattcaactctgaagagacaaagggttgtctggacacctgagctgcaccgggactttgtcattgccgtccatgagcttggagttgatcgtgctgttccaaggaagatattgcggatgatgaaagtggactacatgaccagagagaatattgcaagtcatcttcagaagtatcggttatacctgaaaaggatcagcactcaaacaggcatggatcctgatcaatttcctgaaaaatggaagtatatgaatgaactggatgctctgaaaaattactgtgaaaatgggagataccgtctaaccccagccattgcctcctcaagctcgagcaatccatttgcaaggatgaattctgcatctgcattggcaacaaatggctttctgcccactcactcagttcagctcaagaacagccagagaaacatggccatggggacagttggccatggtggaagcccgggcaacaatcctgtgtttcagccactgcagaactcatcaaatgcaagaaagtgcttcccatctggcccatctgggagctcatttgcaaacatatcaaatggcttggtgttggatacagacgattctggtagctcatatgctggcatgttctgtaagagtatgtgggagacaagcaatggctctccatcttgccattctggcaactcgtctgcaaacaagtcaaataatggggtttcggcgcctgcaaatcagtttcaagtacagtcaaagtttgggttttcagctcttgcaaatcagtttccagtgcagtcaaattgtgggttttcggcgcctgcaaatcagtatcaagtgcagtcaaatggtgggttttcggtgcctgcaaaccagtttccagtgcagtcaaatggtgagtttttggcgccaacaaatcagtttccagtgcagtaccctgaagtgaataatcagcctttggttcagatgaatcaatcttctacaaaccacttcagcacaattggcaatgattaccaatttccggaccttgcaaactgtagcaaatactggcaacctacagcaccatcgatgtttcctgatcttggtcacaatgatgggacatctttccgcccgtcgcaggcgaacatcgccaatatcaaccagctctcaagctttgcagcctccagtggccaggaaccgatgtttggagatgaactacatggtcaaatgtcaccaatcatgagcaccatatcactgtcagatttcgatgatcagatggggtcattcaacataggaaacgacacaagcccagcagagatgatgcatgacaacttctcacttggtagtgactcgaacatcagttcttcaacaccaactgattcaagcttcggttctacatttcctgactttcatctcgacagccctgagatgccggctcagatgctgaatggtggggatgaagatggcattcttctccctgtgctcgatgacacagttgatcagcaagatctttttgatcaactagatgaaaacaatggtagggaaaaacttggtagtggccgatgtgttaggaagggtccctttgaatgtttcttttag

SEQ ID NO: 80638 - DNA, 1765 bp, Oryza sativa
  Clone ID: PAT_MRT4530_80242C.1
cggccccgccctccctctccgcctccgcctacgccgccgtccccagccaccgcagcccgccacccttgcgcgcccccgcggcggccgcggccgcggcagtcgcggaccgcagcgtcgccgtcgccgccgccgccatctcgaggaggcggtgccggcaactgagaaggaaggcggcgccggcaatggcaaggaaggctgatggaaggagagggcggcgtgatgctgcgattcccaaaagtttcgtcatactagaagatattctgcaacacaccctgtctaatatgcacagtatccaggaaagcatactgttctggcagtccaatgctctgagaacaaattcgcagaaagcgtattttatgatctttcaaagaggtccaagggcctttgttgcaacaacatgtcaaacgctggctaaacttcagaacaaagggagtccagtccagggccttttggactctgcatcttctatgttctcaacaaaacttgccatcctaacaaggatgcaacactgcttggcttcttttcttgctgaggtttacaatgaaactgacaaacgcagaagtgtattaattagaagatcagaacaatcgctgcatagtctcttcgttgctctgaataacatcttctccaatttggaggtagaacttagaaatgctggtgaggtatgaaatgtttttttctttttaaatgataataactcattcgaactcttccaaagattgccagaagctgatgttcagagttcagctgctataagtttgatctatgaaaaccttcagaagttagatatttttctttcctctcggctttcaagccataaaaagccgagaaaaatgaccaaatattggttaccctacacatttggagcattgggcctctctgcatttaccctatggcttttacgccacagtagcttgatgggaagttctgacattgacaactggcttcatggtgctaaaaagttgctggtttggtgttgggatgagaatgttcagaaaccagtaagatactctatctatattctattttttttatttattttgtgcacaatggtagtgcaaattactccctttgtttttaaatattcaaactttcaaaggtttaactggatcttgtccaaaaatcaataaaaataaattgtgtctaagtcacacctcgaagaccatgaaagaaaaattgccggagaataattatgatatgtacacgttatttagctattccgaattactctattttgggtgatcctcgaacaattgttctctctatcgtgctcaattgaaaatgtgagtatgtttgatcattcagctatattctatgcatattaagtgcaggtatgagatggaaccaggatctcctgaagaattagcatgtctcatgattaatcaggttattttccttccttgtgtacatatatttgcatttaataaattcaggtcgcttttttctcaccaacggtcaggttacacagagaagagatagaattgcacatcttaagcgatgtcagcttctctctggagtacaggaaatgcttgcagagtttcagtactgtatggacaagggaatgaaggaagaggcacaatgttcgcttggactattattgtacagcatttatagattttacagaggtgttgagtcgagttcaaaagaaacaggcgagtggatatatatgaaggaacacattttctgtctggcagaccctcaattgggcgtggcaatcaagcgggacattctttcgagtctacggaattataaatgcttatcacca

SEQ ID NO: 80639 - DNA, 1110 bp, Oryza sativa
  Clone ID: PAT_MRT4530_80243C.1
tcctcccccgaaccacccgtccgcacccatcagcaacaatggcatcctcttgtctccttctggcctgtgtcgtggcagcggccatggtgtctgcagtgtcatgtgggccgcccaaggtgccgcctggccccaacatcactgcggcctacggcaaacagtggctggaagctaggggtacctggtacggcaagccaaagggtgccggccccgacgacaacggcggcgcttgtgggtacaaggacattgacaaggctcccttcctcggcatgaactcatgtggcaatgaccctatcttcaaggatggcaagggctgcggctcctgctttgaggtcaagtgttccaagccagaggcctgctccgacaagcccgtcatcatccacatcaccgacatgaacactgagcctatcgccgcctaccacttcgacctctccggccatgcttttggtgccatggctaaggaaggcaaggatgaggaactccgcaaggcgggaattatcgatatgcagtttcgtcgcgtccgctgcaagtaccctggtgagactaaggtcaccttccacgttgagaagggctccaaccccaactactttgcagtgcttgtcaagtacgtcggtggtgacggtgatgtcgtgaaggtggaacttaaggagaaaggctctgaggagtggaagccactcaacgagtcatggggtgctatctggaggatagacactcccaagccactcaagggccccttctccctccgtgtcaccaccgagtctgaccagaagcttgtcgccaacgacgtcatccccgataattggaaggccaacgctctctacaaatcagagatccaagtcgactaagcctgcatggaattcttccgttgtctagctacctatgcacacaggggacggaaaaaaatgtattttaaatttaaaaaatagagctaggtttgtggagtgagcagaaagtctatcggtctatggtgtctgctctcctacctgggcccatgatcgagtcttcaattctcgatcagaaaattttgatattaaattatttgacgctttcaattctaagggaatgtcaacgtgaaattcaattccttaaaaataatagggagtatctggaaag

SEQ ID NO: 80640 - DNA, 233 bp, Oryza sativa
  Clone ID: PAT_MRT4530_80244C.1
catgtgtggggatgaccgatcgcacacagcccacctgggaaagcacgtcagtcggcactggctcaagagcaaggcagctatgcgctggggacatcttcgtcacggaagaaagctccccgagagaagagctcagcttcgttgagctcgaggactacgcaacatcctcactgctgggtgctaacaaagctccattggtcgttgctcgctcctcctcgttttaaggatctgaaaaa

SEQ ID NO: 80641 - DNA, 687 bp, Oryza sativa
  Clone ID: PAT_MRT4530_80245C.1
atcatcacatttgtgcttgcataaattttatttaaattctctcaggatttacttattgaagctgttgctctcaaatggagttgcacacaaaagaacatggcttccattgagctcgatacaaagatatgggagatggaaaaggatgtgaagaaacttgaaaagaatgctattgaagctgctaaagaatatgaaaactgtaaaagaaaaactcaagagcataagcagcagttgtctaatgcaaaacagcatgcagagtcaatagctatgatcaccgaagaccttgcaaaaaagtttcttgagatgcctactaccatagaagaactggattgtgcaattcaagatactgaatccgaagcaaattctatgctttttcttaatcaaaatgttttgttggagtatcaaagccggcagcgtgagatagaatcaatatccataaagctggaagatgataaaggagaatgtgaaagatgctactctgatatagaggctacaaagggcaaatggcttccaactctgcgcactcttgtttcaaaaataaacagcacgtttagtcgtaactttcaagaaatggctgttgctggagaagtttcacttggtatgtgtggcagttccttctttgcgttatcacactgttatttgtactattttcagatggcataccaatctgtaccaaatttcctgcagatg

SEQ ID NO: 80642 - DNA, 855 bp, Oryza sativa
  Clone ID: PAT_MRT4530_80246C.1
ttatttttgaaaaggaaaagggaattattgcatcagcgggtcgggtttacggtggaccgggtgcacggcggcggttcatgaaacggacggccgagatcgatccatccaaaatggacgaccgagatccatcggtccacggctagaccacgagggacgacgacgatgacgtcagtgacgacgtcaccactggcagcggcttgggcacacatgcttgccggcaaacgatggcacggcggcgcgaatggagggcaccgaaacgatgcgggcatcgctgcgaactcaccggtgaccaaagaaaaggcggcggcgaccttcggcttgacgacggcgacggcgttccggcggtcaacggtgacggagaaggtgcggacggagacagcaacgagacggcgatcacgacggtggccttcccgagtggtgacaacgaccggagcgacggcggcgacggcggctcaaggtctcacgcggaggcggcgctacatacggcggcgggctaagacgagagtggcgacgggggctagggagcggcggcgaaggcccacggcgaccggcgacgggaaggaaagtttagggttcggaggagagagatcgatccgaatcgaactcaaatccggcgatttccaaagcgatttagacgatgttttcaaaagggaaaaggtagagtggatcacggggatcctttcccctcaatcaatttcaccggaaacggaaaggggcggccggacccacctgtcagcggcggtcgcacgcgcgcgcgcgggcggcgctcggcttgggctgacttgggccaagggagagagagagagagcggtttcgtcccaaaaccaaaagggaattttaaaaacctttttccat

SEQ ID NO: 80643 - DNA, 298 bp, Oryza sativa
  Clone ID: PAT_MRT4530_80247C.1
cgaccgcctcaaaccatgtggatcccaccacctttacgtccttgcacttggatccgtcagtggcggccacgggatgggcggatctcgtaccctctccctctcctatgtgaatcctgtcgcctataacccccatgcacatggatctgccagtggtggtgacgggaggagcagatctagagatttgtgcccctcccttgtggatcctgccgccactccaccgtactcacctacggatccgctacagccgctgactttgagctgcgacgatgacagcggcggcggtggcttcgagcgatga

SEQ ID NO: 80644 - DNA, 474 bp, Oryza sativa
  Clone ID: PAT_MRT4530_80248C.1
ggggtgggggtgttttctgtttccactaagtatatatagtgtataaacatatcaatatatatttacatcattatcaacggcatccgcaagatgttaatttttccccctcatctagaaattacgctctatgtccatatggcacaccaaagatttctgtgtttctttcccgagaaatcggtcacatgaaaggattcaagtgttccgttcggacatcagggaagaacgatcgaggatcagaaaagaccaaagcatatggtgcagcaaaagcattgcgtatgcccacgatctgcagcagctgcaagcgccggtcgctcttacgctatctcactctcggagacgggtggccagcggccgggccagcccagtccgaccccggccgcggcgactggccgtaaccgtgcgcgccgccgccgccgccgccccgtgccgcgggacgcggggacgccgagccgggggcgccaccggacgcgtggg

SEQ ID NO: 80645 - DNA, 2279 bp, Oryza sativa
  Clone ID: PAT_MRT4530_80249C.1
ttccaatgcagctctgtgccagctggcctgcagcagtaatcttgtggtactctagatcctgttgctaactgtatttttcttattgagctaggcatgtagaaattttttttatcgaacacgcaggacagctgcatatcattgcgttaaagaagggtaaaaggaccttagaaacacacacctacacactacagaactgattacatgcacatccttgctaattttatgcaatattaatagtcctacatctcccagtatctttcataccatgtcagcctatttcaattcttttgtgcaactgctatatcacaattaggcaatgttccacatatttcctttttaggaaaatgggaactctattgttgcattgaattgtttgccaagttgccaatatagactattgtaggtgaccaaaaccttgtggtgctgaccctaagttaatacaaggctgtggctcagaccatattactccttgttgggccaacacctagccctcaggtcacatggccaaaggcacggcgagcagagaccgcctatccgagctccccgacgatctgctcatacgtatcctctccttcgcccccgtcaagcaggccgccagcagcacactcctctctcgccggtggcgcctgcagccgctatggctggagactggcaccgtcaacatcgacttaacttccgacgaattcctcgataggaccttccacagggggtggggcgaggccggcccctcgacctgggaagacgagggagacgcccgggcagcgctccgccgccgccgccacggcctcaagaagctcaccgtcacggtgacagccgacagagaccacgacgacggctacgtcttcggctgcgtccgtcgggatttctcgcggtacctgaacccggaccagttcagaggcacctgtgtcgggctgctccgccacgtggaggagctccgcctcgagtgccaggtcgccagcggatcgttgccgtcgccgccacggtacaagtacgccgccgatcccggcgtcgagtacgatctctatctgggcatgctgccctgcgaggatttccgggttctggacatcgcgggatgctgcctcaaggtaacgacgaccgaatggttgtgggactggattgcctacccgtgcctcacgacgctgcggctgcggcgctgcaccgtgcggctgtgcgacctccagaaggtgatcctcgccgcgccgaggctcgccgagctgcgtctcgagtcagtcaccttctccgatcgaccaccgcttagcggcttcatcttcgacgaacacatccatctccactgcccggcggtcacctccttcaccatggttaactgccacatcgatggtcgcaccttcgagcttgacgcgccgtcgttgatctgcttccgctgcgcgcaggtcccatctttatatttttccgtatcgctgaaatcagctgcgccgtgcttggcacaagtcgacctggggtcgatctccggcacggcgacattaggtcctctgcttaccaccatgtgccacatcagcattttgaagctgacggtgtactcaattgttggagacatcaagtttgggtacttccctctcttcccgaacctcaagcaccttgtaatagaggaactgtgtggatttgccatggacggcggcttgtcggcggcggcaacggccgttggagacatgctatgtagatgcccggagatccgtgagctccggataagattcagctggttggaatatctcaatgagagtgcagatgatcatctcggcgcagacctgacggcctatctgaaatcctcggcgtgcggattgcaggagtctgattactgtaaggtttcagaatcagatacgcctgcgaccgggagcacacaaaatttctgcagtagctggcagaattctctaagaaaagtagtcatccaatttcagaagggcaagctcacctgctcccaagtccagctcgtgaagttcttggcagaaaaggctgctgttcttgaagagtttgacatcgagggaggaaaccaggatggcactgaccacatcaacagaaagatcgctacatggagaactcattctgcaggtgcttgtgcaggagaggtcgtgatcgcctctgctgccgtacttccaccgccggccgaagacacaaggtgggatcgtgcctggtataagtataactgcgattttcctgttctagggaaggggccgccctggatttgggacgggacgggttataagcttcattttccgattctaccacgccgacagcatcgaccaactagtgatagaggttattag

SEQ ID NO: 80646 - DNA, 375 bp, Oryza sativa
  Clone ID: PAT_MRT4530_8024C.1
tgattagaaaaattaatgagttaaaaactatgttctgaagttcgtgtcaatattttaattcataagaaagaaatattggatggaacatagtgcaaataatgtatcctagcatgctaattctcatcaaactaattccagatgggacaaagcctatttctattttcccggagtacctgaaaaagttctatattaaattgctaatcaactttgaggagtttgaccaccagtgtccgacacgaaaaataccaggttacttacaccaaccagaggtagaaccatccaatatctctatgggaaattttttgttattaccctataagttatattctattacacacccactaaatttgagtagccctgccaaaaaaaaaaaaa

SEQ ID NO: 80647 - DNA, 849 bp, Oryza sativa
  Clone ID: PAT_MRT4530_80250C.1
atggcgagtgggtcccaccaagcggtggctcaaaggggaggggagggaggtgctggctgggctcggctcgacatcaaggccgaccggccggttatggcgagggcggtggcggtgagcagtcgctggcaatggcaaccggcggcgcgggtggcggcggcgtcggccgaaggcgacggcgcatgggcgaagcagcagcgcggcccggcgctaggaagggagggaggagaaacgagggggagggagcgcctcaccgtgagttggccggagtgggggaagacgacggcgtacactggcagcaagcggcggacgacagggtgcgtgggatggacgaggcgaccctcgaccccgcgaggccaatggcggcaacggagcggcacggcgactgcactagcgacggctagcggcggttggaggcggtatgcagcggcgctaggcttggcgtggggagagcggtgcggcggcggtaggcggcaactgagtggcggccgaggtagcccttgtgttggcggagctagaggcggcggtaggtggcgtggcgacggcgctagcggcggcggcgcgcggtcggagtgcggtggcgggcggcggtgcaaggggcgagcggcgcaggcacggtggagagcacgggagaaggcggcgagtagtggaaacgagagagggagctcggggaaggcgttttacaggcgagtgagaagcgggcgaggccgggtggtggccggatttggagaaggagtggcgccggcgacgtggggtggagaaagagagaggggcatattcaaaatcgaatcctgccctctcgggcgcgcgcgcggaggcacgaaggcgtggggaatgtgggcggcgacgtga

SEQ ID NO: 80648 - DNA, 237 bp, Oryza sativa
  Clone ID: PAT_MRT4530_80251C.1
atgaagtggattgaggacaagatcagagaagatcgagatcagctcggtggcattctccacattattgaagtaagggagaacaatggcagtaatgatcgggacctcatcaaacgttacagtgggcagattatatgtatatatagagagaaaaatgatacttcggaaattgacatggtctctgaaaaatatattccttgcttaaccatcgatatttttgagacgaatatatatgtataa

SEQ ID NO: 80649 - DNA, 547 bp, Oryza sativa
  unsure (1)..(547): unsure at all n locations
  Clone ID: PAT_MRT4530_80252C.1
atnccatcccccatggtataccacgccatgacatcccaccaaactcttgaccttcaagaggcgactggaaattattccctgtccaatatgcgcgagtggtttgaggacttcatcgctggctatgtgacagatgttaagtggagactcgagtcgctcttcaaggtcggtccacctcccgctggcaccactgggtacggagcccagacggttgaggcgagcggtaacacggccagatggaagttcccgctttctgacgctgatgtaaacatcggttacttgttttcccccaacaagtacttcaaccttgcccctagattggttggttactcacgtcgggatcgcagcagtcagcaagctgcgttcgctcaggctgatggtaaagcgttcgttaactagcctgaaccaccttgctgatggtgtaacgaccatccttccccccgtttcatgccttgtgtttcccttgtttcctttgtctttgttcctcatttaagaggaccggagttcttatcggaaaccggtataaaaaagaaaaaaaaaaaaaaaaaaa

SEQ ID NO: 80650 - DNA, 368 bp, Oryza sativa
  Clone ID: PAT_MRT4530_80253C.1
cccgatcgatcgatccccagggggaaagaaaatggcaaacgacgaatcacatcctcattaactgcgtgttcgctcgacaggtctaattccgtgtgatgtcccctcctggctgagttgccctctctccccctcgtggtagctggctccaggattagtggtcatcctccagggcctgtttacctgagcacctccgcatcggtttcgactccttggttctcctagtctcctggcagctgtagaaggaacgaaactccagggttttcgactctgcgctcgcttcggtcctggtggttctggagtccatccgctcagagggccagctgtgttctttagccggtgttgctgtttttagggatttcttgggagtg

SEQ ID NO: 80651 - DNA, 516 bp, Oryza sativa
  Clone ID: PAT_MRT4530_80254C.1
cagctcctcctagcgcgcgccagcccgctgccgccgctcccgccggagctgctcgcctccttcacgtgctcgcccgccggagccgcctcaccctacccaccgctgcctgcttccctgctcgcgccgcgccgtgatggagaggaaagagaggcggggtctgctcgccctagcccgccgcctcctcgcgtgcgcaggccggacatccgggcgtcgccgccggaaaggggatatgaggtggcggagattcttgctaggaggaggagagggggccattggaggagggctagaggtcgctgcgcatggcccgtgggcggtggagagatgaggccaggaggtcagcgtcggcgaggttgactgggcaagaggcgagcgtcaacagacgttccagggaggagcagtccgctggcgcggtcgcatgagagggtgccgaccggaggcagagccgaggacccctaggaccgcacccgcgccaccactgctgccatcgtcaacatcctatatgatttttcgttgttg

SEQ ID NO: 80652 - DNA, 351 bp, Oryza sativa
  Clone ID: PAT_MRT4530_80255C.1
gaggtcgatcgggcgcaggctgtctgtgctttgtgtcgcatgatcgtggtcgtccggtgcccgggatggagcaggagggcacagcacggggtcggcttggccggccatggtggctcacgggggtagcggttcagccggggccaggaaggagaaggaagcggacgcacgactacctgcggacaaccccgcgccttgacgagtcctgccagcaagcaaaacacgtagcgggaaacttgtggggaagtagtgggagggatcaaatgcttgattgtgggggtatttatacttggctttgatatcagtagagattccatcgaggaacccgtcattttggcatcaaaaaaaaaaaaa
